United States Patent Application Publication US 2022/0090207 A1 - sequence listing, part 13

SEQ ID NO: 181768 - DNA, 317 bp, Homo sapiens
  chr16:88800047-88800364
  hypo
agctccagcagccgccgcaggaacacctgcacgcgtgagaggacgtccgagaagccggctgccagctccagcagccgctcagccaccaggccccacttggctgcccctgtgatggtgtgagggtcagtgcggggcacaaacggggattcccgggtcccctgtgaggaagaggctctggagcccagaggggactctgccaacgccccccgagctgggacatggcacagcagactgggtggcagctgtgctctgcccgcccaacccaccttcaggcacctgcgtggcctggtggggagtggccacgcccagcccctcgt

SEQ ID NO: 181769 - DNA, 603 bp, Homo sapiens
  chr16:88800569-88801172
  hypo
ggtgcacagctgtgtcgcaactcatgcccactgtccctgtgacctccacgctactgccatccccttggtatgagcaaatgccccttgggatctgaaggtggaagatgtggctcctgtccaactcccacctggctccctccctggcccaggaggctacacctctccagggccggacagggagggcggggccgcacctgtgagcccagcgcgggaggcgcgtgccaggcagggacacgtgctccatgtcggtgagctgcatgaagggcctgtggaagtagtgcagctgcaggatgcaggccaggaggaagaagccgggcaccaggatgctggagaagagctcggacacgctgaactgctccaggcccaggtcccccagcctgtggaggggcagcatcagcaccggcccggcccccggcagagccgctgcagccccggggaagtgcacggggtttcggcgcccctgccccaccgccccagcctggactcactgctcgtcggtgaagccagtgaggttgcgccagtaggcagggaagtcctggaactggaaggtgtagacggcgatgaggaccagcatggtgtaggccaccacgagccaccagaagg

SEQ ID NO: 181770 - DNA, 153 bp, Homo sapiens
  chr16:88801432-88801585
  hypo
ctgcaacagcgtctgcgtccgcgtgggctctgtgggccaagccaggggcaggcgatggcatcagggcgggcaggcaggagggcaacccccgcctctggcccaccactcacctgtgtctgccacggtgacctccgtcagcgcagctggagactc

SEQ ID NO: 181771 - DNA, 993 bp, Homo sapiens
  chr16:88802330-88803323
  hypo
cacaggggtggtgcccgtgccaacacaaggttgtctgtttattcagtcaacaaacgctcactgagaagctactctgggctggctctgggtgggcagaaggggacagacagacacatctgccttcttggcgctgccactcccccgggcaagtggacattgaacaggacgacaaccctgatgggtctgcgcacccaggcacccccggatgtggtggtgcacactcaccatggcaccaaggtccagacaggggtagcgggtgtgctccagccccagctggcgcaggctgacggggcccagggtggtgggcagctcagggcgcaggtccatggcccacacgtagcgtaggcagcacagcgtcatcccatacagcaggatgcagggcgagcacagcatggccagttggtggcggctgcgcaccgtccagatgaggcaggcccagagcagcagtacgaaggtcagccagctgtggtaggtgatgctccatacctgcgcggcagagagggctgcacagctgcccagcgcaccccacccaggcgatgccccacacctgcgcggcagagggggctgcacagctgcccagcgcaccccacccaggcgatgccccacacctgcgcggcagagggggctgcacagctgcccagcgcaccccacccaggcgatgccccacacctgcgcggcagagggggccgcccaccccaacccccacagccgcctaccatcatggcaatgagcgcgcacacatagctctggtccatgatgaggtggcccaggctgtggagcggagacgcctccctgggctcagcccgcttgggccgcactgcaggtggggacagcggtcagcttcggcaggttgatctgcaggcctccccaccctgactatgccctaaaatctgggccctgggcaagcacacagcaggagagacaggcccccggtgggctatgggcagaacacgagggctccggcaattgggctgacaccgtccctgagcgtca

SEQ ID NO: 181772 - DNA, 30 bp, Homo sapiens; identical to SEQ ID NO: 29703
  chr16:88804702-88804732
  hypo

SEQ ID NO: 181773 - DNA, 886 bp, Homo sapiens; identical to SEQ ID NO: 91434
  chr16:88805796-88806682
  hypo

SEQ ID NO: 181774 - DNA, 30 bp, Homo sapiens; identical to SEQ ID NO: 91435
  chr16:88808966-88808996
  hypo

SEQ ID NO: 181775 - DNA, 81 bp, Homo sapiens; identical to SEQ ID NO: 91436
  chr16:88810534-88810615
  hypo

SEQ ID NO: 181776 - DNA, 30 bp, Homo sapiens; identical to SEQ ID NO: 29706
  chr16:88816007-88816037
  hypo

SEQ ID NO: 181777 - DNA, 106 bp, Homo sapiens; identical to SEQ ID NO: 127756
  chr16:88817838-88817944
  hypo

SEQ ID NO: 181778 - DNA, 30 bp, Homo sapiens; identical to SEQ ID NO: 127757
  chr16:88818547-88818577
  hypo

SEQ ID NO: 181779 - DNA, 383 bp, Homo sapiens; identical to SEQ ID NO: 91438
  chr16:88821277-88821660
  hypo

SEQ ID NO: 181780 - DNA, 42 bp, Homo sapiens
  chr16:88823487-88823529
  hypo
caaacaaaaaatgggtggctggggagccgcactggccctcgg

SEQ ID NO: 181781 - DNA, 115 bp, Homo sapiens
  chr16:88826507-88826622
  hypo
ggtcctgcctccagcgcccaccaccccacacgcccacctcggacctcgccggcggggcctccgtgccctcagtgacagtgaccccggccgtggctacagacggctgagccacggg

SEQ ID NO: 181782 - DNA, 487 bp, Homo sapiens
  chr16:88826973-88827460
  hypo
ccgaggggaacgacccgcctttaaggcagcaggacccagggagcccaggacaggcaggggcccgaggggagccacccgtcttcgaggcagcagcacccaggaagcccaggacaggcagggtcccaagcggagacacccgcctttgacgcagcagcacccagggggcccgggacaggcaggggcccgaggggagccacccgccttcgacgcagcaggaggtaaacggaatgttcctcacctacttggagcccggccagcagcctggggcactgaggagcttctggaccatttaattagctcggtgtccaggtttaattagctcagtgtccaggaaactcagttttatggctcatctgacctacacggggcagggtcctgcaggcctggtggctgctgtgggctgggcacccaccgcacctgccacagccatctgctctcagacctgctggcgtggagagtcaggacaccctcccggacacactcagcc

SEQ ID NO: 181783 - DNA, 29 bp, Homo sapiens
  chr16:88830842-88830871
  hypo
tccaggcagagatcacgcgtcgacattcc

SEQ ID NO: 181784 - DNA, 269 bp, Homo sapiens
  chr16:88831170-88831439
  hypo
aaaaagaaagaaaaaaggaatgcccctgccacggcctgcctttgactcccagcatcatgccgtgacctcccaaaacgaggactccgccctcggcaccaggggcagacactggcgaccactccaaccatggccccagcaactcaccccagagaggcaacaagggcttcctaagaagcctggccattgaaaacctcccggtagccgcctctcaggagcactgccttctcaacacagctacctggccctggcagacccggctgcccactgtg

SEQ ID NO: 181785 - DNA, 106 bp, Homo sapiens
  chr16:88831980-88832086
  hypo
gccaggtgagcacctcgtatagctggcaaggggctggacagcagcgcctggagcctggctccctggtctctagagagcccaagtcgttatctctaatttttttttt

SEQ ID NO: 181786 - DNA, 115 bp, Homo sapiens; identical to SEQ ID NO: 10866
  chr16:88851817-88851932
  hypo

SEQ ID NO: 181787 - DNA, 66 bp, Homo sapiens
  chr16:88871936-88872002
  hypo
tggcggagatgttccgcagcatggacaccatcgtgggcatgctccacaaccgctccgagacgccca

SEQ ID NO: 181788 - DNA, 30 bp, Homo sapiens; identical to SEQ ID NO: 91445
  chr16:88873714-88873744
  hypo

SEQ ID NO: 181789 - DNA, 30 bp, Homo sapiens; identical to SEQ ID NO: 29710
  chr16:88875968-88875998
  hypo

SEQ ID NO: 181790 - DNA, 508 bp, Homo sapiens; identical to SEQ ID NO: 53477
  chr16:88878526-88879034
  hypo

SEQ ID NO: 181791 - DNA, 944 bp, Homo sapiens
  chr16:88883068-88884012
  hypo
ctctcctgttacatccgccggcccacgctgtggctccctggctgttcagagccaccaccttccttcccacggcacggcgggcacccagcggctcccacgctgcagccgggtctggccctggaaagaggcttcagctgggccttttcgcccgcacagcaggagcccaggctgaagtctgcagctgccgaggggccttcttcccgaatcctgcgcggcagatccaggggctgtgggcagccacgcccagcccgtgtaaacaggtgagcgacggcccaggggcctcgaggctgggctcggccatctccactgtgctcggtgggctctgggcacccaggagcgacaccgcagacctgtgtgtggctcgtttttgccgactagagcgagggccgcacgtgtcccatctgaaggagctgtgaagacctgccctgctgggacccacatcagctgtgctgggaaacaggcctttgcggccactgcacacgcgggatggctgggccgtccacatgccaccctatgggacccccaagcaggggacagaaaagctgctcctgagaggccctgactgctgcggcccccagggctggacaagacgacgacgcatcctttgtggcctgaacacagacttcagtgaaactttggaggcacgtctgtgcttgtgtttctggccgatgctggcgtgatgaggccgtttctctactggaggtgaacaaggcctggtcttgtcaggctgcacggaggtgctgctctgggtgggtgcctatgagtgagatcaggtctgatgcgaaggtctctggggctggcccagcatgaaggaggcacaaatgagaacctcgcaggtgggccctggggccgccgccactcaacagtgcccaccagcccacccgggacccaccgggcagtgccgttcctgcctcggtgccttcagagcccgggagtttggaggt

SEQ ID NO: 181792 - DNA, 296 bp, Homo sapiens
  chr16:88884237-88884533
  hypo
ctgcctcccgaatcccggacgccgccgcgtgtgctctgaggcacgagggcctcaccactgacggaggcggggaagcacgcctgcctctgccctgtgctggccacggttcatcctgggccccgggtgggtggctgcagccccggcaaagagacggccgcccacacaccagccacttaccatgaccgcccagttgcacacgttgagctggggctgcgcggggaccaaggcctcctggtgctgctggacgaccgaggtgatcctgctgagggcctcctggtactcggcgctggcaaagc

SEQ ID NO: 181793 - DNA, 30 bp, Homo sapiens; identical to SEQ ID NO: 91450
  chr16:88887306-88887336
  hypo

SEQ ID NO: 181794 - DNA, 31 bp, Homo sapiens; identical to SEQ ID NO: 91451
  chr16:88891674-88891705
  hypo

SEQ ID NO: 181795 - DNA, 158 bp, Homo sapiens; identical to SEQ ID NO: 91452
  chr16:88892176-88892334
  hypo

SEQ ID NO: 181796 - DNA, 255 bp, Homo sapiens; identical to SEQ ID NO: 91453
  chr16:88892587-88892842
  hypo

SEQ ID NO: 181797 - DNA, 30 bp, Homo sapiens; identical to SEQ ID NO: 91454
  chr16:88893162-88893192
  hypo

SEQ ID NO: 181798 - DNA, 30 bp, Homo sapiens; identical to SEQ ID NO: 29713
  chr16:88893558-88893588
  hypo

SEQ ID NO: 181799 - DNA, 67 bp, Homo sapiens; identical to SEQ ID NO: 91456
  chr16:88894326-88894393
  hypo

SEQ ID NO: 181800 - DNA, 47 bp, Homo sapiens; identical to SEQ ID NO: 91457
  chr16:88897187-88897234
  hypo

SEQ ID NO: 181801 - DNA, 683 bp, Homo sapiens
  chr16:88898118-88898801
  hypo
aggagagcggtgaggccgagcacggggtgcgtggggaggagagcggtgaggccgagcacggggtgcgtggggaggagagcggtgaggccgagcacggggagcgtggggaggagggtggtgaggctgagcatggggtgcgtggaggctgagcacagggtgcgtggggaggagagcggtgaggatgagcacggggtgcatgggggaggtggccagtgaggggcgcacacaccctgggatggctgcaggcctggacctgctgcccggcagaccggtggacgctgactcacctggcctgcagtgacgtgccctggccaccatgcgagggcaggctccctcatccctccttcaaacgtggtctgcttcccacacagaaaggggccgttgctgccacctgggagagaggggcccttgtcaggccactgggaccagatgtccccaggccctccccctccctccccactgagtcactgagactggtcatagggacaaagggcccggccaaggcactctggctggagtgcatgatccgagcctcggggtggctctccaggggctcatctgagatgccgcggctgcaaagtctcctggagaaagtggggacatcatgcccactgaggaaatggaaacacaaccatacggtgtcagcaagactcagagaggtacactcccgcagcagaggccct

SEQ ID NO: 181802 - DNA, 30 bp, Homo sapiens; identical to SEQ ID NO: 91459
  chr16:88901670-88901700
  hypo

SEQ ID NO: 181803 - DNA, 264 bp, Homo sapiens
  chr16:88910569-88910833
  hypo
ccccaagcaggaggacgggtgagcacagggcaggaagcacggaggctggggtgatgccaggaggccggggtgatgccaggtgtgatggcaccagcacagcaaatgcccacggcaaactccggaggtgagtggcagcggcggtgttcactgaaaacttcttcaaattttacagtgtgtattgttggaaaaaagtgcttttaaacaggcagtgggccaggactttgctctagaaggagaaggggagggcaccgcctggggctttgg

SEQ ID NO: 181804 - DNA, 30 bp, Homo sapiens; identical to SEQ ID NO: 91460
  chr16:88922237-88922267
  hypo

SEQ ID NO: 181805 - DNA, 240 bp, Homo sapiens; identical to SEQ ID NO: 91461
  chr16:88927320-88927560
  hypo

SEQ ID NO: 181806 - DNA, 30 bp, Homo sapiens
  chr16:88928666-88928696
  hypo
tactaacagaaccccggtgcctctgcccag

SEQ ID NO: 181807 - DNA, 31 bp, Homo sapiens
  chr16:88931260-88931291
  hypo
cttgatgacccggccccggaagaggctctgg

SEQ ID NO: 181808 - DNA, 30 bp, Homo sapiens
  chr16:88933367-88933397
  hypo
cactgcatgaacactcgatctaagtgggaa

SEQ ID NO: 181809 - DNA, 150 bp, Homo sapiens; identical to SEQ ID NO: 91462
  chr16:88933925-88934075
  hypo

SEQ ID NO: 181810 - DNA, 162 bp, Homo sapiens; identical to SEQ ID NO: 91463
  chr16:88935300-88935462
  hypo

SEQ ID NO: 181811 - DNA, 31 bp, Homo sapiens; identical to SEQ ID NO: 10868
  chr16:88938185-88938216
  hypo

SEQ ID NO: 181812 - DNA, 30 bp, Homo sapiens; identical to SEQ ID NO: 91465
  chr16:88940926-88940956
  hypo

SEQ ID NO: 181813 - DNA, 31 bp, Homo sapiens
  chr16:88941182-88941213
  hypo
ccaccagcaggcaaaccgctcctcccctcgg

SEQ ID NO: 181814 - DNA, 30 bp, Homo sapiens; identical to SEQ ID NO: 91466
  chr16:88942078-88942108
  hypo

SEQ ID NO: 181815 - DNA, 53 bp, Homo sapiens; identical to SEQ ID NO: 29719
  chr16:88942320-88942373
  hypo

SEQ ID NO: 181816 - DNA, 528 bp, Homo sapiens
  chr16:88943134-88943662
  hypo
ttgtcaggaggtctccgcgcggaatcattaggtagctgaggcaggtgcactgaatgcggttttgttggttctgtgtcttctttcggagaggggcagtagcagcagtgactaattggtcggctcccccaggtcaggcggggcgcagtgtctggcaggccaggcatcggaggccaggcacagcatccggtgggcctggagctgggtggggttggcacggtgctgtgtccggcaggccaggggccagtggggtcagcggggcacggtgtccagtgggccaggtgggctgggggagccggggcgagaaggccccgcagagccggcttcgctggggctggcagcacccacaggcagggaggggcccaggctgtgggcggcttcgggcggtccaggcaccgggtcggccaccacggctgtggggccctgcaggctctggccacacacgtggtgatgcttctcccagtcccgatgctggcagaaggacccgcagtagcgtgccgcgttgcagccgctgcacgtctcactggcttt

SEQ ID NO: 181817 - DNA, 88 bp, Homo sapiens
  chr16:88944984-88945072
  hypo
gggagccgggcgcctcggacgccacctggggccctcacagctctcctggatcctcctgttctcacaggctagagaacacgggtttcag

SEQ ID NO: 181818 - DNA, 857 bp, Homo sapiens; identical to SEQ ID NO: 91470
  chr16:88945515-88946372
  hypo

SEQ ID NO: 181819 - DNA, 30 bp, Homo sapiens
  chr16:88946810-88946840
  hypo
gccccgcgtgcctgacgcgcccaggctccg

SEQ ID NO: 181820 - DNA, 308 bp, Homo sapiens; identical to SEQ ID NO: 91471
  chr16:88948323-88948631
  hypo

SEQ ID NO: 181821 - DNA, 382 bp, Homo sapiens; identical to SEQ ID NO: 53479
  chr16:88950010-88950392
  hypo

SEQ ID NO: 181822 - DNA, 30 bp, Homo sapiens
  chr16:88951211-88951241
  hypo
gggcagttccaggcccgaggccgcccaccc

SEQ ID NO: 181823 - DNA, 30 bp, Homo sapiens; identical to SEQ ID NO: 91473
  chr16:88951649-88951679
  hypo

SEQ ID NO: 181824 - DNA, 452 bp, Homo sapiens
  chr16:88952173-88952625
  hypo
agcccactggggtgtccgcccgtgcagccaccaagcctgctggccctagtacacctcgccacgctccctcagcccgagagagccggccgggctggctgcagccccagaggaggttccctctcttacccagaggggagcagggtgagccgcgtgtccacggcacccccagcccagatccccggagcccacaggtacctgtcgggcgtcctcctcttgccgttctcgttgacttccagtagcagctctgaggagtcgatgggggaggaggcgctggcgtccagcaggagctgctcatgctgggccaagtactgggcgggcgtctgcttggccaggcgtgcacagtgcaggagctcccgctgcagcaagggcaggtttgcctgtggggtggggaaggagggcctgggtagcatgcaggggtgcacagccctgctcaggtccgagcagagggggcc

SEQ ID NO: 181825 - DNA, 173 bp, Homo sapiens
  chr16:88955195-88955368
  hypo
cactggccccgggccccgggtgggggcacgaggtgggctggccctgagctccagctaccccacacaggccgtgggatcccctgtgtaccaaggggagactgaggtggacacggccctcacgagagccgggccgcgggcggcacctgctggggcgtggccgggggacaccaggg

SEQ ID NO: 181826 - DNA, 988 bp, Homo sapiens
  chr16:88956087-88957075
  hypo
gcactcctcctcctccagggacgacaccccgcgattcctcctcctccagggacacttcaaatccctggacgacgccccgcgattcctcctcctccagggacgacgccacgcgattcctcctcctccagggacacttcaaatccctggacgatgccccgcgattcctcctcctccagggacacttcaaatccctggacgacgccccgcgattcctcctccttcagggacgacgccccgcgattcctcctcctccagggacgacgccgtgcgattcctcctcctccagggacgacgccccgtgattcctcctcctccaggggacgtttcaaatccctggacgatgccccgcgattcctcctcctccaggggacgtttcaaatccctggacgatgccccgcgattcctcctcctccaggggacgtttcaaatccctggacgatgccccgcgtgaatctagaacatgcctcacctccctgtagtccccgctacctgggaggctgaggtggaagattcccctgagcccgggagtgaggccccgttctttccgcgtgtccctccacgctgtctcctcaacagcctgaggatgattccattttgcagatacagaaaccgaagcacagaggaactggcctcacccaggggccaacagctgctaagtggcaggctcgggctcaagccagggagcatctggtctggtctgtcctctggacccccgaggggaggcctggcccagcagagatggagcccacagcagtacgggcagtgctcaggctgggcccgaaggtgtggccaggctggcagctcccaactaagctccacggaaccctgaccccaacacgtgctcggcagagaaggtcacatggtcagacacatttggggaacctttcctcagctcctgctagagatgtgcagccgtcttggggaaatggagacccgcagagatggcagtctgactccacggcactcccgtgcccgtcccgtctgtgtg

SEQ ID NO: 181827 - DNA, 620 bp, Homo sapiens
  chr16:88957368-88957988
  hypo
tcctcagactggcatctttaaaaatgcaggctctgattcagcaggtttgggccgggccgagagcctgcaaagctgacaagccccgcgtgctgccaccctggtccacggttgatctgggtgtgaccatctgacctgctttcacctgacacctcttcatccatcggcctgcgcagccacagaagccccttcccgcctgtctaccgccctcacctcccgccctcacctctgctctctccaccccacgtattctgttccagtcacactgacccctctgctgttcctcaagcacagcgggcgccccatacctcagggcctctgcacgtgcagttactgctgtctggaaaaccctgcgctggctctgcacctagctccgccctcatcctcagccctcaccaacacgcctccaagcaaaggactttcggaatacttctccaccacgtgcagctgcagatttgagagtggctgtggaccgaacgccttcccaccccagggtgctggctccaggagggacctgctgcatgtcctgggccctatccccgagccttgcccccacactggcacgtcgtcagtgctcaaaaatcacccgtggagtgagcgagcacattcggccaacggcaacc

SEQ ID NO: 181828 - DNA, 764 bp, Homo sapiens
  chr16:88958252-88959016
  hypo
gaggctcccgcagcacgggggacgggtttcgcattaccttcaggaagggaatgacaaacggccgcagagggaagttggtggcctcctgaagcttggaatgaaactcctcgatcgtcaatgtcgagttctgcaggggagaaaacccacctcacatcagcaccgctcggcatgtgagccagcgccgacccacccatgcctgaggaggaggcttccgtgttggaggcaggcaggcagcccaggagctgggcacggcctgagagggtgcaggtggcatcgtgggagcgggtccacgcccggttgtcagcgtggagcccatgtaaggagtggccgtggctgcaacctcattaaacggagggaatatgcatgtcccaaggccccggctgtccctgcccaactcaccaccaggcccagcaccagtgtgcgcacgcgctccccaatctctggggagatgtcgctgccaaactgctgcagtgtggtgaggaagcgcttgagcttgctgagctgccgggccccgcaggctgggggcaggtgctgtgtggacaaggaggctgtggacgaggtggccgggccattgctgaagccgttgggtgtgcacggtgcaccattgatggctgttggtgagtggctgctgccgttcatcactgcaggagggaagcggacatgaggacacaaaggtgatggtgacaacacaacccagacggcggcgacagtgagggaagcagcgactaaggtgacaatgtcaaaagtgacggcaacaatgatga

SEQ ID NO: 181829 - DNA, 30 bp, Homo sapiens
  chr16:88959412-88959442
  hypo
aggggcttctccacacgtcgggggcttgat

SEQ ID NO: 181830 - DNA, 280 bp, Homo sapiens
  chr16:88959982-88960262
  hypo
ggacacgcagatgcccgtgcacacaggccagtgcatgttgaggacaagcaggtgacataaggaacagctgatgagcgcgctgcagggccgcctgttggccactgagacgtgactgcctggctggccctgctattggggtcagtgttccaggggcctggcagacatggggctgctatggaaagtcccagggccgggcctcaccccttttctcaggtgacagagctaaggccaagcctcttgcaaggcggccagcgcacccctcctgcgcctgggacacccg

SEQ ID NO: 181831 - DNA, 386 bp, Homo sapiens
  chr16:88961768-88962154
  hypo
cctgcgaagtgcgcccgggtcaggaagctgtgctgtggcccgggctgggctctacacctgcacacaggctgcgcggttatcacacacatcccatgcggcaaatgggctccgaggaaccgaagacacacagcagggcagcccggctcccccagattgcctcccgtccccggcaggccccacacaccgagcaaacagcgctgggcacagtggcacaggggggaggccggccctgtgctctggatgttcttggtggagcggggggaacaggtgtgcccacgactgcctcccccggggcccagcgctcactctgctctcactccagcctgggcctcacagatacccactgcaggggctgtgggaggccaggagggcgggggatgctacag

SEQ ID NO: 181832 - DNA, 299 bp, Homo sapiens
  chr16:88962657-88962956
  hypo
ctgttgctggggccgcgaacctccacacgctgttctgagcggctgctcccctcaaccgggcaacctgcacagggggtagcctgtctgcgcccctggcttgaacgatcttagcagcgccttcctgggctcaggatggacgcaccggccctctggagcgcgcggcaccgataacggcgtcgtattctggggctttccctcttctggggggacagtggacgctgacacaggatgcaccgagcccctggtctctcgccttctgagcctctgtccggaggaccccaccgcgctgccgagtttcc

SEQ ID NO: 181833 - DNA, 576 bp, Homo sapiens
  chr16:88963177-88963753
  hypo
ggggcccctgcccaccgccccggccagcctgggcctggccctcccttaggtgcgcttaccagccttgccccgggtgcctggtccttccggcggcctgctcgccctcgcctgcccgcgcactccctcccgcgctgctgggcagtctcagcagctaaagagacgccaaaaataaccccggcacaagcgctttcattcccacgacaggtgtgttcctaagttagaccgcacacgtgtccccagctgaggattgggggcacacgcgagcacccccgcggctcccccagcctcagagccttggtgggggggtcagatgcgacagaggcaccctaacgcagcccctcctgtcacccctgctccttgctgtgggggctccgggatctgggattcaccaactttgccatccataagatcacagagtggatgacaagagccactgtccaggagctgcacgccaggcgcgagtgcgtggccaggcccatcacagaataatggctgtgaaaaggacagccctgtgcaacagaaacaacgcacagttgttctgctgccctcgttcttagagccgggagtgccacgaca

SEQ ID NO: 181834 - DNA, 30 bp, Homo sapiens; identical to SEQ ID NO: 91482
  chr16:88964513-88964543
  hypo

SEQ ID NO: 181835 - DNA, 91 bp, Homo sapiens
  chr16:88965556-88965647
  hypo
tcggccctcaagtctccgttcagactcagtctcccatcagcttggctcagaggccagtccccggggaggagcctcccggcagggctctgca

SEQ ID NO: 181836 - DNA, 630 bp, Homo sapiens
  chr16:88966222-88966852
  hypo
gtggtccgtcctgagcgtttcctcccccggggctggggtatactgcaaatttaacacagcagcggtctccctctacctatgtgggctcggtgtggtcgcaagctgcctggtagagagacggcccgtggtttgtaccagaccggagggctcttccgaagagagggaagggtgatcccagcccggccacatcgccgtgtgacaaggacatgtgagaaaaagcccagccagcctctcactagaaaccgtggccagctccgcagagccaggacctgcacgctgggcccgccgtcccccaggacctgcaaaatcgtgagtgcggcgtcccgactctctgaggcagggccggccccgcgggtgcagggagtagccgttaggctgtttggctcctactgagtgccgggcacatttccagctgtacctgcctctgggcggcacacctgggggcaccccattgctgggccaccccattccccaaccaagtcgggaggctgactcggagccaacatcctacaaacagggccgcaaatctgctgcctgaccgcacagccagtgctctctccagatggaggggagatgatggccaaagccctcggcggagcaggcccccagcctcagcggcagagccaggga

SEQ ID NO: 181837 - DNA, 298 bp, Homo sapiens
  chr16:88968000-88968298
  hypo
tgcgtcttcacctccgctggggagtccggcatcgctgaggccttagctttcctgtccactggggctgcgaccaacggagaaagaaagagtcggtgaagcaggctaagtgcaaaggccagggcccgcagccccacggttcccagcgaaggccccactgagtgtccgcccagcgctggggcagtctgccccaggtgtcctgacaggtggctgacgtcccacgtgcaggatcacgggggcagaaccaggccggaggacgggcttgggccagctcatctgaggtggccggccaggctggagc

SEQ ID NO: 181838 - DNA, 284 bp, Homo sapiens
  chr16:88968646-88968930
  hypo
gcaggccatttagggcggcaaaacctctattttaaccgtcttctgccccggtgattcacaggacagccaagacagaggcggcattgacttcaggatggccgaggcctggctgcgctgggcgcagcccccggcaggtggtaacgccaggacacgtgattaatgagaacctgcagctgaacaagattccctcgtggtctgaggctccctgaagtctgagaagctccacccagggccagctgtgtccggagacggcaggaaaacgctcaaggcgctggtgggccggg

SEQ ID NO: 181839 - DNA, 171 bp, Homo sapiens; identical to SEQ ID NO: 91485
  chr16:88970442-88970613
  hypo

SEQ ID NO: 181840 - DNA, 30 bp, Homo sapiens; identical to SEQ ID NO: 29732
  chr16:88973336-88973366
  hypo

SEQ ID NO: 181841 - DNA, 30 bp, Homo sapiens; identical to SEQ ID NO: 91487
  chr16:88975836-88975866
  hypo

SEQ ID NO: 181842 - DNA, 31 bp, Homo sapiens
  chr16:88976652-88976683
  hypo
caggctgcctccttcccggtgatgctgcagc

SEQ ID NO: 181843 - DNA, 589 bp, Homo sapiens; identical to SEQ ID NO: 29733
  chr16:88978018-88978607
  hypo

SEQ ID NO: 181844 - DNA, 30 bp, Homo sapiens; identical to SEQ ID NO: 29734
  chr16:88985908-88985938
  hypo

SEQ ID NO: 181845 - DNA, 200 bp, Homo sapiens
  chr16:88993192-88993392
  hypo
attgggctggtgcctcggtgcaccgtgggctcccaggagctcacaaggccttccgtgcctgtcccttgtgccccacctcacagcgaggtccttgcagcagcagggcagccccgtccggcccccgctgcctccctgccctcatctcctttctctgagacaaggctcctcactggtcctggaggtggcggcacactcctgcc

SEQ ID NO: 181846 - DNA, 587 bp, Homo sapiens
  chr16:88994146-88994733
  hypo
agctggccgtccgcccgtgcggacacccgggagccaacactgacccgaagacaggtcagccagacttcccacctgctccctcaggaggtgggatccggtcccctcctgctgggctgcacgggccacgatggaaaggcgcctcgtgacacgctgcggtcagctcagaaaagccgcagatgctgacacgggcaaccctgcccagtgtggggcgtcctctgaagtgggagccgcagggagggcctcacggaggcctctgtccacaggcagcggctcccggcacccaccgctgctgaccgagcccctggcacccccaagccgagcctttgaaccccagcagggaaggccacctggccgagaccctggccaccacggggccatcactgtcccacggggctctgttccgactccttggcccgagggtctctgagcaccaccagggttgcctcacgcctctgagtttggggtggtttgttcggcagcactggggcccggggcagcttcttgcccggcgtgtggcacagctgtccttgttgggggcgtttctgggatcctgtggtttcggggacgctcccctactccctggcctt

SEQ ID NO: 181847 - DNA, 174 bp, Homo sapiens
  chr16:88997822-88997996
  hypo
gcgctcacaaggaccggtctgtggcaagtgacaagtgacctttccaacccgaaggtctcctcggcagaagccccttcatgtgccaaggacgagccagaggtggagaagggccgtgggccggccccgtggacgagccagaggtggagaagggccgtgggccggccccgtggatga

SEQ ID NO: 181848 - DNA, 31 bp, Homo sapiens
  chr16:88999616-88999647
  hypo
cctgggggctgttttgcgctcccccagtgca

SEQ ID NO: 181849 - DNA, 30 bp, Homo sapiens; identical to SEQ ID NO: 29736
  chr16:89000143-89000173
  hypo

SEQ ID NO: 181850 - DNA, 117 bp, Homo sapiens; identical to SEQ ID NO: 91493
  chr16:89004836-89004953
  hypo

SEQ ID NO: 181851 - DNA, 1716 bp, Homo sapiens; identical to SEQ ID NO: 127769
  chr16:89006897-89008613
  hypo

SEQ ID NO: 181852 - DNA, 404 bp, Homo sapiens
  chr16:89010084-89010488
  hypo
ctgtgcggatgctcccggaacgcccattttacaggtggagaggctgagcctctcagccacaccgacttcctgctgccttatccaagaactggtttcttgccctggatgcggccaagtcacagctcctgggcatttcgaggggacatttaaggaggagactaccagccctatgtgaaagatgtctgcagtctgtccgacaaggccagcgtcacctgtgcgggagacagaccacgggcgagcaggacctcggagggccacactcagggctcgggagggggcagagccgtggaggagggagctcgagggtgtgcccatggagctcccagtgtgtcgctgtctgtagaggcaggagctcaattcacttaaaagaaaccaccacggccgggtgcggtgggtcacgcctg

SEQ ID NO: 181853 - DNA, 144 bp, Homo sapiens
  chr16:89012312-89012456
  hypo
agaagcgactgagaccgccttcaacaggtgaatacataaaatactgtggcatatgtagacgatagagtgttatccatgacaaaagtagtgagctatcaagccatggaaagtgaacattgatggccgggcgtggtggctcacacc

SEQ ID NO: 181854 - DNA, 295 bp, Homo sapiens
  chr16:89016744-89017039
  hypo
tcccctggaccggcaccgccacagagggtcagagtgttggcacctgtcttccgggtcagttcacccgtcccctggaccggcaccggcacagagggtcagagtgttggcacctgtcttccggatctgttcacccctcccccggaccggcaccgccacagagggtcaggagtgttggcacctgtcttccgggtcagttcacccgtcccctggaccggcaccgccacagagggtcaggagtgttggcacctgtcttccggatctgttcacccgtcccctggaccggcaccgccacaga

SEQ ID NO: 181855 - DNA, 30 bp, Homo sapiens; identical to SEQ ID NO: 91497
  chr16:89022673-89022703
  hypo

SEQ ID NO: 181856 - DNA, 334 bp, Homo sapiens
  chr16:89025781-89026115
  hypo
agaggtggagggaacacgcatgcacgcccagggctggaggcacgtgggtgttcagggcctgtgaggaggcccgggcaccaaggcagcacccagcgcttacagagcctgcaggtcttggacagaggtgcaggcagaggcaggaggtggcatgggtcataccacctgtaaaagccaggcgcagtagagaatgttctagaaataaatgtgatgctgcgattgcctgagagggaacccaggtgcaggagagggaaggtcccggggaaaccctccttttcctcctccttcctcccagcagctgggaaaggcgatggagagaaaacgggagcagggcaga

SEQ ID NO: 181857 - DNA, 201 bp, Homo sapiens
  chr16:89027648-89027849
  hypo
gcgcacggggagtgacggaaccttctgtaggaactgacacacagcactggagatttccactgcatagtaaccgacactcacccctgggcattcccaccacatagtgactgaccctcagcactgggcattcccactccatagcaactgaccctcagcgctggacattcccactccatagtaaccgacctcagcgctggacat

SEQ ID NO: 181858 - DNA, 167 bp, Homo sapiens
  chr16:89028918-89029085
  hypo
tgcctgtcgtgagtcccgaaggagaggcccagggcccaggccactctgcaccctgagggcacgtggtggggccagatcaccaaagggcacatttgggaggactgaacacagatgccgagtcccctggaccacgtttcggggggagacagccacgtagccggagccag

SEQ ID NO: 181859 - DNA, 30 bp, Homo sapiens; identical to SEQ ID NO: 91500
  chr16:89032980-89033010
  hypo

SEQ ID NO: 181860 - DNA, 30 bp, Homo sapiens
  chr16:89047584-89047614
  hypo
gaacagtgtcatgtacggaggagccttgcc

SEQ ID NO: 181861 - DNA, 30 bp, Homo sapiens
  chr16:89047930-89047960
  hypo
gagtccgagccgaggcgcaggccggagaca

SEQ ID NO: 181862 - DNA, 46 bp, Homo sapiens
  chr16:89055409-89055455
  hypo
cacccactcagtgtctcgtgcatggcacacacgtgtcctgcgggcc

SEQ ID NO: 181863 - DNA, 30 bp, Homo sapiens
  chr16:89057545-89057575
  hypo
ccaggtggaaccccacgtgtacctcttctc

SEQ ID NO: 181864 - DNA, 20 bp, Homo sapiens
  chr16:89057879-89057899
  hypo
agcactttgggaggccgagg

SEQ ID NO: 181865 - DNA, 30 bp, Homo sapiens; identical to SEQ ID NO: 91501
  chr16:89066999-89067029
  hypo

SEQ ID NO: 181866 - DNA, 30 bp, Homo sapiens
  chr16:89071797-89071827
  hypo
agctggtgccggagccgcctcagggccctg

SEQ ID NO: 181867 - DNA, 54 bp, Homo sapiens
  chr16:89072217-89072271
  hypo
caaatgccacgggtccgggtgccacgagagtgggtgccacgggagcaggcacgt

SEQ ID NO: 181868 - DNA, 278 bp, Homo sapiens
  chr16:89072549-89072827
  hypo
gaggcaggagtccaccgccagtgccaaccaggggcctcggggcaccgctccaggagcaaccccagagtgcatccacctcctcccgggtgggccacgccttgaggtgctgacggcgccccaaactccactccccggaatcggcccaggctcagccacatcggcccgggctcctacagaagccgacctggagacgaggaactgacctggagacgaggaactgacctggagacaaggaactgactgcaagtggaccatttgcagggcgaccccaagggcag

SEQ ID NO: 181869 - DNA, 165 bp, Homo sapiens
  chr16:89089218-89089383
  hypo
atggaagtcaagtcacgctctgggaaagaagagtgggaagtgctgcgccagcctaacccctgcccagagactcacatgtggacgcaggatcttgtatgtgcacacacaccctgcatcctgcgaccgacacgcatacacacctcccaccacacccggcaaattttt

SEQ ID NO: 181870 - DNA, 225 bp, Homo sapiens
  chr16:89089442-89089667
  hypo
gtgctcacatgcacccacagtcacactcacacacacgctcacactcacacgctcacaggcacgtcacatacacacactcacacgctcacaggcacagtcacatacacacactcacacgctcacaggcacagtcacacgtgcacccacagtcacacacacacacactcacaccctcacaggcacagtcacatacacacactcacactcatacgctgacaggcacag

SEQ ID NO: 181871 - DNA, 31 bp, Homo sapiens; identical to SEQ ID NO: 91502
  chr16:89100279-89100310
  hypo

SEQ ID NO: 181872 - DNA, 109 bp, Homo sapiens
  chr16:89103369-89103478
  hypo
ggggcctgtgccctgcgcagtcctgagctcgtctgcgcggggctgctggcctctagcaaggtgcaccggggtgtgaggtgcaggcggagaggtgcgggcaggctagggg

SEQ ID NO: 181873 - DNA, 155 bp, Homo sapiens
  chr16:89103807-89103962
  hypo
gtggcttcgacatgacgcagggtaggggggtgaatgtgctttaaggaggccccggccctaggtggacacaggcgcacagagaagacagggccccagagggtctcagtgatctgtccaggacctgggcccgtgggctgtggcgccgaggctggaca

SEQ ID NO: 181874 - DNA, 30 bp, Homo sapiens
  chr16:89107687-89107717
  hypo
tgccggccctccactcgagttcccctgccc

SEQ ID NO: 181875 - DNA, 30 bp, Homo sapiens; identical to SEQ ID NO: 29739
  chr16:89108904-89108934
  hypo

SEQ ID NO: 181876 - DNA, 422 bp, Homo sapiens; identical to SEQ ID NO: 91504
  chr16:89109379-89109801
  hypo

SEQ ID NO: 181877 - DNA, 103 bp, Homo sapiens
  chr16:89115644-89115747
  hypo
cctggtgggggctggcgtgaatacctggagcgcaaggctgggcaggttttgctcaacgtcatgaagtctgatctccacgcacagaacccggcgtggtgcccac

SEQ ID NO: 181878 - DNA, 30 bp, Homo sapiens
  chr16:89115965-89115995
  hypo
tggctccctcctatgcggggtggcggctgc

SEQ ID NO: 181879 - DNA, 33 bp, Homo sapiens
  chr16:89119941-89119974
  hypo
tgttggggacagagccggcggtcatagcctcca

SEQ ID NO: 181880 - DNA, 684 bp, Homo sapiens
  chr16:89120180-89120864
  hypo
gtgcagagagaaggccgggcgggtgctggggggcccatctccccgagccttgcaaatagtgcagtgcagggagaaggccgggcgggtgctggggggcccgtctccctgtgactcgtggacggtgcggtgcagggagaagggcgggcaggtgctggaggactgagtgaggcccctccaggatggctccctgcccctccatgcgctgggtcctcgggccaggacaggttgcatctgggtcaccagccccctcacacccgctcgcctgaaggcggccgaccctggccactggtcgcctggtggcagaagcctcttctgggcattttcaggcaccgcaatgctcttcacagcgttaactttttttttatccaaccaaggacaacctcagcttcagaaagccctggaatgccccacaatggacaagcaaggaacaccctccgggacggaccgcgagactcggccctgagatgcctcaataccctggacaccccagaacctcagattgcgtggctggggctcctgcggccaccctgctccccagaacctcgtcgtcttcccggtgccctgcggcaggaacacagggctggagccgacccccagggcatggctgggagctgcgggagtgaacggggagttaacccccagggcatggctgggagctgcgggagtgaacggggagctgcctgt

SEQ ID NO: 181881 - DNA, 138 bp, Homo sapiens
  chr16:89122409-89122547
  hypo
ccgcctgtgtgtgtgcgtgagcgtgggtggacttccaagtgtgtgcagagtcacatgcgggtgatcctaggcgtgcatccgcctgtgagcacgtgggagagtgcgccacccgtgtgtgtggtccgtgagcatccacca

SEQ ID NO: 181882 - DNA, 30 bp, Homo sapiens
  chr16:89128901-89128931
  hypo
aggacgggctgtggacgaggatgggttctg

SEQ ID NO: 181883 - DNA, 419 bp, Homo sapiens
  chr16:89129269-89129688
  hypo
tgtggtcacctttgacccctgcggcctggctgctcctgacagcatgagttgattcaaggacaaagccaggacccctggcttggagggacagtcccacaacccctgggtcccaggctggcacacgtgcctcctgggccacccccacctgccccccaccgctagcaccccactctctaccctcccaggccagcgcactgcctcctgggccagcacccccacctgcccccaccgccggcgccccgctctctaccctcccaggccagcacacatgactcctgggccagcacccccgtccccgccggcacttcactttctacctttgctcttcttccccggccatgtctcctgctctggtcctggggccggaagtcagcgctctgtgcagatgagcttggggcagcccacgccctgcaaaccct

SEQ ID NO: 181884 - DNA, 794 bp, Homo sapiens; identical to SEQ ID NO: 91509
  chr16:89130511-89131305
  hypo

SEQ ID NO: 181885 - DNA, 278 bp, Homo sapiens; identical to SEQ ID NO: 91510
  chr16:89132010-89132288
  hypo

SEQ ID NO: 181886 - DNA, 252 bp, Homo sapiens
  chr16:89137878-89138130
  hypo
cagatggaacaggagcgaggtcgcctgtatcctccgggaaatgctcctggaggtcagggcagccgggtgagcactgggtccggctgctctccccagcttctcttctccagtcagccaacccagcctccgcgagagacagaggaaagacagacacggcgttggctgcgcgggggcctgcatccctcccgaccttctcatttgatcctcctgccctatgcggttggtgccaacgttcatcccattttacagatg

SEQ ID NO: 181887 - DNA, 253 bp, Homo sapiens; identical to SEQ ID NO: 91512
  chr16:89139239-89139492
  hypo

SEQ ID NO: 181888 - DNA, 1241 bp, Homo sapiens
  chr16:89139897-89141138
  hypo
gagccgccgcacccggcctctcacatggttcttctcacgggcgctccccacatgtgcggacccctccttcgtggcctccagcttctatttagagagggtgtgacacgctgagatctttcacacgggtggtgacgggactgaatcgagttgcaggacgccagcgggtatgagagctgctgctgtggagaacggcagcaccatttccacacccacgtgtggcacttggtcacggcccatgcgggaaacaactacacccacctatttccctcccagaaaacctacgtttttcttcccaagacagacactgtgtgctcacaacaccctgttgctgcctttcctgagtagtatgtgtgcaggagtcctcacagcagccgtgtcgcagggagcaggcgccacggccttggaagccagcacagtcagcgaaattccgtagggagctgggactgacacggcccagtcatgtcatggatgagccatgtcatgaacgactcatgcatgcaccagtcacgtgaggacctgtcacgtgtggacctgtcatacatgcaccagttgagtgtggacctgtcatgtgtgaacttgtcacgtgaagacctgtcacatgtgaacctgtcacgaggacctgtcacgtgtggacctgtcacgtgtggacctgtcacgtgaggacctgtcacgtgtggacctgtcacgtgaggatctgtcgtgtggtcctgtcgtctgtgggcctgtcacgtgaggacctgtcatgtgtggactgtcacgtgtggacctgtcacgtgtggactgtcacgtgtggacctctcatacatgcaccagtcacgtgtagacctgtcacgtgtgaacctgtcgtgtggtcctgtcgtctgtgggcctgtcacgtgtggatctgtcacgtgtggacctgtcatacatgcaccagtcacgtgtggacctgtcgtgtggtcctgtcatctgtgggcctgtcacgtgtggacctgtcacgtgaggacctgtcacgtgtggatctgtcacgtatggactctcacgtgtggacctgtcatacatgcaccagtcacgtgtggacctgtcacgtgtgaacctgtcgtgtggtcctgtcgtctgtgggcctgtcacgtgtggatctgtcacgtgtggactgtcacgtgtggacctgtcatacatgcaccagtcacgtgtggacctgtcgtgtggtcctgtcgtctgtgggcctgtcacgtgtggacctgtcacgtgaggacctgtca

SEQ ID NO: 181889 - DNA, 30 bp, Homo sapiens
  chr16:89141457-89141487
  hypo
gttgtgtggtcctgtcgtctgtgggcctgt

SEQ ID NO: 181890 - DNA, 421 bp, Homo sapiens
  chr16:89141695-89142116
  hypo
cctcatccctgctaccgggtacctgccgtagctatgtccagcccaggtcactgagtgtgtaaacacacctcacgtccgcgtcgagaaggcgtcaccagtgcctgctgaacaaagaaggtctggcccagtgtggctgcagccaggaggccaaggagaccagtgagagcaccgccctcgccactgacgctcttgctgggctcattgttgtgctgggcccagtggagcaaaagacaggcctccagccggggcacctcccaacaactctgcacccttgattgaaatgcaatgtctgcggctgacggccacgtgactgcaacccaccctcccggctgccgattaattttaccttttgtgctgccagctgcagtgggttcatggtgagagctgagttgatgcatgcgagtgcgagggtgtgttaatg

SEQ ID NO: 181891 - DNA, 30 bp, Homo sapiens
  chr16:89145321-89145351
  hypo
cccgccctgtccgcccgggaggggatcctc

SEQ ID NO: 181892 - DNA, 241 bp, Homo sapiens; identical to SEQ ID NO: 91515
  chr16:89147080-89147321
  hypo

SEQ ID NO: 181893 - DNA, 38 bp, Homo sapiens
  chr16:89149006-89149044
  hypo
cgtgagccaccgcgcccggctagaattaaagattttaa

SEQ ID NO: 181894 - DNA, 30 bp, Homo sapiens; identical to SEQ ID NO: 91516
  chr16:89152677-89152707
  hypo

SEQ ID NO: 181895 - DNA, 154 bp, Homo sapiens
  chr16:89162715-89162869
  hypo
gtgatggggagccccacggtagaaggggtcccagtggttgaaaggtgaggttctctctgaggaagctggggtgcctctggaccgggaggtgtgcaggaagaccgcgcacagccatctgccctgagtaggctctgtctgcgtgttcgaggcaggg

SEQ ID NO: 181896 - DNA, 137 bp, Homo sapiens
  chr16:89163232-89163369
  hypo
cctctcctcatagcgcgtgggctctctgggagctgggaccatgtcacacggggccagtcacatctgtcacctcccaggggctggtggcaggagtgcccacccacaggcagcgctctggattccgcgcaggagaacag

SEQ ID NO: 181897 - DNA, 425 bp, Homo sapiens
  chr16:89165355-89165780
  hypo
aacttgactacgcttcggccacaggcctgggacgctgtcagaccgagggccgctgagtgcccagtggcagcagagcccagagggtgcttcccccaggaagggaggcagaccagcctattcttactgtgagtcgagcaaagctttgattataaagggccagggatgcaggagcctcgtggagagtgccaccccttcttctcgctctggaatgcgggggctgtgcccctggcctgtgtccgcatcctggggcggtgtcccgtgggcagtgtcctctggctgcagaatgcatgttgcagaattggaccagccctcacgcgtcaggagcgttgggcccacaggcggaggcaccctggcttcttctcggtctcctttctctgaatgaagaattccagtggacggcgggcccgcgcgacccctcccaggga

SEQ ID NO: 181898 - DNA, 328 bp, Homo sapiens
  chr16:89169087-89169415
  hypo
atggtgtggtcaacgcgctgctctgtcctctctgggtgggagccacctgtgtgatgatgcctgagttcagccctcagcaggtgagttggggtcagggctctcggttgcaccctcagactaggcgcctttcccctgtcggggccagggctctcagccgcgccctcagcctaagcgcctttcgctggttggggtcagggctctcggccgcgccctcagactaggcatcttttcctggtgtgcagtcgcccctatccacaggggacgtgccaatgccgagaccctgggtagcatggaaccctgtacctacgatgctttttgctatacatac

SEQ ID NO: 181899 - DNA, 627 bp, Homo sapiens; identical to SEQ ID NO: 29748
  chr16:89169474-89170101
  hypo

SEQ ID NO: 181900 - DNA, 571 bp, Homo sapiens
  chr16:89172067-89172638
  hypo
gaacctctgttgggggctgcccgggcgctgacggtggctggtctaccatggtcacttgggcagaggcagcaacggccattgtcgtggaccgtgccagggcgagatgcagctggcaggggcagaggcagaacatctcccagggagctgagggcaggttggttccatcgtcccggagggcaggttggttccatcctcccaagtaaagagtgtgttaccctcagggcgagaggcaggtgggtgtgggtgctggcgcaggccagctgtcaaggatctgggctttctggtcttgctgcttctccagcactgcatgaatgacaccacctggccctttccagtgcccacaggcacacggcttgggagctgctgctgcggcgtctctgcccaggggcatctgccagggggtccctgccttggggtctgtgtcccaagggcgtctgcccagggatttctgctccgagagtgtctaccctggggtctctgcctggggatctgctgtcatcttccagacactgcagactggctcattaatggacacgggaaagcctcagaccttcaacggacacgggaaagc

SEQ ID NO: 181901 - DNA, 30 bp, Homo sapiens
  chr16:89173822-89173852
  hypo
accatcctgctacacgcgtgctctccccgc

SEQ ID NO: 181902 - DNA, 30 bp, Homo sapiens
  chr16:89178574-89178604
  hypo
ctgatggagtactacgacaggcattttacc

SEQ ID NO: 181903 - DNA, 325 bp, Homo sapiens
  chr16:89179512-89179837
  hypo
cagtgagtcttcacacgcatcacaggcccgcacctccagcagagtcgtgggtggggtattttttctttttgtgagagggaggggtggcgtggagggtgcactgcaggaactgaaggctccactgccatccagtttccagtgggatgtgtgtgtctgtggctgccgcgcgctcctcccagtccccaggaagtgcacagggaagcggcacctttgttcctggagagaattccgggttgtccaaggcacatgtctgaaccgcttcgctctctttgccgttcccttgccccttttctgtgaggccaccggagcccatggttttgctgct

SEQ ID NO: 181904 - DNA, 30 bp, Homo sapiens
  chr16:89188360-89188390
  hypo
tggagggccacacggcgtgtcccgcctggc

SEQ ID NO: 181905 - DNA, 506 bp, Homo sapiens; identical to SEQ ID NO: 53482
  chr16:89189484-89189990
  hypo

SEQ ID NO: 181906 - DNA, 30 bp, Homo sapiens; identical to SEQ ID NO: 91524
  chr16:89190842-89190872
  hypo

SEQ ID NO: 181907 - DNA, 364 bp, Homo sapiens
  chr16:89198317-89198681
  hypo
caggtgtttcacccccgtgggtggcgtcagcccctcctggaggagcccaggctggcgggttggcagccccgtcatcatgtggggcaggtgtttcacccccgtgggtggcgtcagcccctcctggaggagcccaggctggcgggttggcagcaggacgacacactcggcagaggctgccatggggcagtgttggccccacggcgtttgagcgccctttctccacatcagatcagtgtgttctgctatttcgcagctacttccctggcccctggttttctgaagtccattccagatggcaggtgatgagcctcagtgagactcttgtacgcatcccttgacctccggggtcacagccagtcacttt

SEQ ID NO: 181908 - DNA, 30 bp, Homo sapiens
  chr16:89200491-89200521
  hypo
ggacatttggatagcggacgtatgtggatg

SEQ ID NO: 181909 - DNA, 62 bp, Homo sapiens; identical to SEQ ID NO: 29752
  chr16:89202504-89202566
  hypo

SEQ ID NO: 181910 - DNA, 274 bp, Homo sapiens; identical to SEQ ID NO: 91527
  chr16:89203067-89203341
  hypo

SEQ ID NO: 181911 - DNA, 31 bp, Homo sapiens; identical to SEQ ID NO: 29754
  chr16:89206302-89206333
  hypo

SEQ ID NO: 181912 - DNA, 30 bp, Homo sapiens; identical to SEQ ID NO: 91529
  chr16:89207538-89207568
  hypo

SEQ ID NO: 181913 - DNA, 23 bp, Homo sapiens
  chr16:89215947-89215970
  hypo
tatacctgcattcatcggttccc

SEQ ID NO: 181914 - DNA, 23 bp, Homo sapiens
  chr16:89216089-89216112
  hypo
tgctgaaccgcccagagttgggt

SEQ ID NO: 181915 - DNA, 488 bp, Homo sapiens
  chr16:89216566-89217054
  hypo
tgttccctctctggacgcaccctcctgcctccaccctgacttgccgtctcctgagcactgaagatatttttggcttgtccgatgtgactccacagacagcagaaacgcttgcttgatcagggcagcatcagggcaccacacatgcctgggcttgcacaacacagcgggagcactgccactcagcagcagctgctgctttcattaaacagttaccttgagaagaaaagataggtgtcgagggctgagagctgtgctagagtttcagggtccgagttggcaggaactgaagtcccgatgctcctcagcccttggctgtcctcagggctgccctctgcgtggggacaccaggccgcccctgcccagggacaccaggccgcctgctcctgctctgtgcatctctcacatcaggctcctcacccagcattgtttgggctatgacagtggctgtgacaagaccctaagacgggaagctgcgtgcagggcacttg

SEQ ID NO: 181916 - DNA, 24 bp, Homo sapiens
  chr16:89219171-89219195
  hypo
tgacgcatacctgtagcacttcgg

SEQ ID NO: 181917 - DNA, 444 bp, Homo sapiens; identical to SEQ ID NO: 91533
  chr16:89219254-89219698
  hypo

SEQ ID NO: 181918 - DNA, 797 bp, Homo sapiens; identical to SEQ ID NO: 91534
  chr16:89220237-89221034
  hypo

SEQ ID NO: 181919 - DNA, 30 bp, Homo sapiens; identical to SEQ ID NO: 91535
  chr16:89224246-89224276
  hypo

SEQ ID NO: 181920 - DNA, 598 bp, Homo sapiens
  chr16:89225781-89226379
  hypo
ctctgagcaggaagcccgtaggtccccacaggcgggtgcacggaaggggtgggtcctgggcccaacaggcaccccctgagcaccagcccgtctgagggtgggcggagggcgctgccgcaggtccccacatacccagcgcacgctcaccccacactggaggcacctgccgggttctgacacccctcgaggtgccttcccagggttctcacacccactgaaggcagcgcgctcagcctgctttgcacatgagccgctgaggcaggcgagttgagggcgagggtgtgaatcacgagcttggggccaaagcccaaggtcgtcccctctggccggcaagctcaggctcacacggggagccaccaggctggactgggtgcagcttacggacgtggcgcgtgctgtgggcgtcgggccgcggctcctccatgcagtacttacactgctgtctgcagatcgcacccaatcaggagggaatggtccaggcaggtgggcaaggccacggtttggccaggtaaggctgggagggcccaggatgattgtgcgttgagccaggcagatctggagaggcggagggatggggacggagcgccatgcagaggcc

SEQ ID NO: 181921 - DNA, 30 bp, Homo sapiens
  chr16:89226594-89226624
  hypo
tgtgagccgctgagtcgccctaactgcagg

SEQ ID NO: 181922 - DNA, 30 bp, Homo sapiens
  chr16:89232801-89232831
  hypo
gagaggacagacgtccggaactgggtagag

SEQ ID NO: 181923 - DNA, 30 bp, Homo sapiens; identical to SEQ ID NO: 29758
  chr16:89242920-89242950
  hypo

SEQ ID NO: 181924 - DNA, 625 bp, Homo sapiens
  chr16:89245120-89245745
  hypo
ccgctgtatgaattacggatacatctccagctgctcttgatggactggagctgaactctcgcatcccggggttcagttcccacaaagcagcctggagaggtggagggggacgggcactttcctgcaggcacctcccctgccgctcccccggaccctccacagccagcccactgtgcccacaggcaccgccactggcttcttggggtcattccgtgtcaggaccccacgctctccccagccctggctggcccaggggctttccgtgtgcaccgctaccctggcacctggggcgaggctgtgtccccgccgggtgaatctcaggtgtccctcccagccagaggcctggaaccctagcgctacctcccagtggcccatgcactcgccaggggctgcagacagcctggctgctgagtgggcccagtaggagactcgggggcagctggatgggggctttgagggccagtacttggggtgtggccaccaaggccctggctcagtccgacgggggcggggctcacgtgcctttgcccttgtgctacgcagccccgtgtgtggaagccgccttgcgccaatgggcaccgacccgtgggctgagggaaacactgcgccccgtggcctcctcacc

SEQ ID NO: 181925 - DNA, 399 bp, Homo sapiens
  chr16:89254514-89254913
  hypo
tggaggccatagaggccgtcagcggagtggatgtgggacgcctggaagtggaggacagggacctgccaggctccccaaactgggtggccaggttcaccatcctggaaggcgaccccgatgggcagttcaccatccgcacggaccccaagaccaacgagggtgttctgtccattgtgaaggtgagcggcccccggctggcacacagatgccggcagacgcagatgccgacacacacagatgcccacacacagatgccggcacacacagatgcccacacacagatgccggcacacacacatgccggcacacacagatgcccacacacagatgccggcacacacacatgccggcacacacagatgcccacacacagatgccggcacacacagatgccggcac

SEQ ID NO: 181926 - DNA, 99 bp, Homo sapiens
  chr16:89255152-89255251
  hypo
cacacacagatgcccacacacagatgcccacacacagatgcccacgcacaggtgcccacacacatgctggcacacagatgcccacgcacaggtgcccac

SEQ ID NO: 181927 - DNA, 378 bp, Homo sapiens; identical to SEQ ID NO: 29760
  chr16:89260392-89260770
  hypo

SEQ ID NO: 181928 - DNA, 30 bp, Homo sapiens
  chr16:89262955-89262985
  hypo
gaaggcccggcctccgcacagcctaaggtt

SEQ ID NO: 181929 - DNA, 439 bp, Homo sapiens; identical to SEQ ID NO: 127777
  chr16:89267385-89267824
  hypo

SEQ ID NO: 181930 - DNA, 157 bp, Homo sapiens; identical to SEQ ID NO: 127778
  chr16:89267957-89268114
  hypo

SEQ ID NO: 181931 - DNA, 103 bp, Homo sapiens; identical to SEQ ID NO: 127779
  chr16:89268345-89268448
  hypo

SEQ ID NO: 181932 - DNA, 17 bp, Homo sapiens
  chr16:89279504-89279521
  hypo
cccggcctgtagtttac

SEQ ID NO: 181933 - DNA, 36 bp, Homo sapiens
  chr16:89279951-89279987
  hypo
tacaccccagcccttcgggaggccaaggtaggagga

SEQ ID NO: 181934 - DNA, 21 bp, Homo sapiens
  chr16:89282068-89282089
  hypo
ccgtgcggtggctcacgcctg

SEQ ID NO: 181935 - DNA, 26 bp, Homo sapiens
  chr16:89290251-89290277
  hypo
agcctgggtgacagagcgagactcca

SEQ ID NO: 181936 - DNA, 81 bp, Homo sapiens
  chr16:89292226-89292307
  hypo
tcagacacacatcagcgcacacatgacgaggtcttgagatcgcagagctgttttgtgcgcacagacttttcgaagttagag

SEQ ID NO: 181937 - DNA, 18 bp, Homo sapiens
  chr16:89294166-89294184
  hypo
agcctgactgagcacgcg

SEQ ID NO: 181938 - DNA, 17 bp, Homo sapiens
  chr16:89294243-89294260
  hypo
gcgctcaggcctcacta

SEQ ID NO: 181939 - DNA, 30 bp, Homo sapiens; identical to SEQ ID NO: 29763
  chr16:89296731-89296761
  hypo

SEQ ID NO: 181940 - DNA, 30 bp, Homo sapiens
  chr16:89299373-89299403
  hypo
tatgcaactgagctcgctctgcgtatgcaa

SEQ ID NO: 181941 - DNA, 27 bp, Homo sapiens
  chr16:89321911-89321938
  hypo
ggcatgagccaccgcgcccagccgggt

SEQ ID NO: 181942 - DNA, 30 bp, Homo sapiens; identical to SEQ ID NO: 91547
  chr16:89332250-89332280
  hypo

SEQ ID NO: 181943 - DNA, 30 bp, Homo sapiens; identical to SEQ ID NO: 91548
  chr16:89337319-89337349
  hypo

SEQ ID NO: 181944 - DNA, 30 bp, Homo sapiens
  chr16:89342384-89342414
  hypo
catggccgtgtgctcggggccacagcagtc

SEQ ID NO: 181945 - DNA, 30 bp, Homo sapiens
  chr16:89342662-89342692
  hypo
acagctccagttagcggacacaggagaggg

SEQ ID NO: 181946 - DNA, 30 bp, Homo sapiens; identical to SEQ ID NO: 91549
  chr16:89344158-89344188
  hypo

SEQ ID NO: 181947 - DNA, 43 bp, Homo sapiens; identical to SEQ ID NO: 91550
  chr16:89347100-89347143
  hypo

SEQ ID NO: 181948 - DNA, 30 bp, Homo sapiens; identical to SEQ ID NO: 91551
  chr16:89350053-89350083
  hypo

SEQ ID NO: 181949 - DNA, 30 bp, Homo sapiens
  chr16:89351485-89351515
  hypo
actctctgaggactcgctctccgactccga

SEQ ID NO: 181950 - DNA, 144 bp, Homo sapiens
  chr16:89351878-89352022
  hypo
cctgtcctgctcgtcgtcctcatcaaactcatactcgtccttgacgggggccgtggccttctgtggctctgggttcttggccttgtgcttgaggcctttttcgaactcggagtccgtgttgttgccgtcgactgaactggaagg

SEQ ID NO: 181951 - DNA, 64 bp, Homo sapiens; identical to SEQ ID NO: 29765
  chr16:89354319-89354383
  hypo

SEQ ID NO: 181952 - DNA, 241 bp, Homo sapiens; identical to SEQ ID NO: 91553
  chr16:89354779-89355020
  hypo

SEQ ID NO: 181953 - DNA, 294 bp, Homo sapiens; identical to SEQ ID NO: 29766
  chr16:89357462-89357756
  hypo

SEQ ID NO: 181954 - DNA, 30 bp, Homo sapiens; identical to SEQ ID NO: 29767
  chr16:89358217-89358247
  hypo

SEQ ID NO: 181955 - DNA, 350 bp, Homo sapiens; identical to SEQ ID NO: 91556
  chr16:89358981-89359331
  hypo

SEQ ID NO: 181956 - DNA, 30 bp, Homo sapiens
  chr16:89359914-89359944
  hypo
tgcagagcgaggaggcggggtggtgttggg

SEQ ID NO: 181957 - DNA, 196 bp, Homo sapiens
  chr16:89360165-89360361
  hypo
tgggaggagctggggcggtgttggggctgcagtatgtttacatcccgaagtgcaggcgttgccatgctcttaagttatcaaaggaccctaggaggcgtgtgtcagaggaacaggcagaggcaaaggcgttccttagaagtcagtctttaggctggcaggccaggagcccacgctgcgtccccgctctgaggggcag

SEQ ID NO: 181958 - DNA, 174 bp, Homo sapiens; identical to SEQ ID NO: 91558
  chr16:89366814-89366988
  hypo

SEQ ID NO: 181959 - DNA, 30 bp, Homo sapiens; identical to SEQ ID NO: 29769
  chr16:89367308-89367338
  hypo

SEQ ID NO: 181960 - DNA, 30 bp, Homo sapiens
  chr16:89371551-89371581
  hypo
tgcctgggctgctccgggctgcctgtggag

SEQ ID NO: 181961 - DNA, 30 bp, Homo sapiens; identical to SEQ ID NO: 91560
  chr16:89384922-89384952
  hypo

SEQ ID NO: 181962 - DNA, 32 bp, Homo sapiens
  chr16:89387487-89387519
  hypo
gaaccatccaggcaccgcgccctccccctccg

SEQ ID NO: 181963 - DNA, 30 bp, Homo sapiens
  chr16:89387856-89387886
  hypo
gcgggagctgcggggcggggactgtggggc

SEQ ID NO: 181964 - DNA, 52 bp, Homo sapiens; identical to SEQ ID NO: 91561
  chr16:89389595-89389647
  hypo

SEQ ID NO: 181965 - DNA, 501 bp, Homo sapiens
  chr16:89409897-89410398
  hypo
tgtgtgagtgagtgagcgagcaaatgagacagagctcgaggtgggctggaggcatgtgagggtgcacgcgaaacacagtgcctcctcttggagttgccagaattcacctcgttcagaacctcaccccagtcagaaaacacaaggcagcaactggccggaacttggtcagtcacatccataaaccaccaattaccttcacagaccacgactaacaggtttattacagatgagtcacagctcatgttttcaaggaagggtctccaactgagcagtcaccagtgcagcctgcgtcagggcgcgcctccctccagcggtccccgcgtcgcccatgtctgacacagtttatgcttcgcaggcggtaaggctccgctcctcactcccatggaccaacagagtagggaaaacgaaggcacgttggaaactacggatcacgggctgttttgggtgtgggaaatccacccacccacactcacggccagctctgaccgactgaacccaggg

SEQ ID NO: 181966 - DNA, 31 bp, Homo sapiens; identical to SEQ ID NO: 91563
  chr16:89410650-89410681
  hypo

SEQ ID NO: 181967 - DNA, 30 bp, Homo sapiens; identical to SEQ ID NO: 29772
  chr16:89436823-89436853
  hypo

SEQ ID NO: 181968 - DNA, 273 bp, Homo sapiens
  chr16:89437346-89437619
  hypo
agaaccaagccctgcggacaccacgagacaaccctagggctccgtcccttgcttgagctctcctagttgagaaaaatgtgtttggcaatgttatagctgccccgtctcatgacgaaggggacttgttcaggtgagaaacgttcaactgcgcgctcgcttactgaaaaccgccgagggggaagacgggacgagcgtcttgactttcagggtgcacgtaagtggctggtcccaccaaggaagtgccagaaaaagatgcaacgactctcactacct

SEQ ID NO: 181969 - DNA, 325 bp, Homo sapiens; identical to SEQ ID NO: 91566
  chr16:89438582-89438907
  hypo

SEQ ID NO: 181970 - DNA, 30 bp, Homo sapiens; identical to SEQ ID NO: 29774
  chr16:89439273-89439303
  hypo

SEQ ID NO: 181971 - DNA, 30 bp, Homo sapiens
  chr16:89441523-89441553
  hypo
gtatacaactcagtgcgggacataccacac

SEQ ID NO: 181972 - DNA, 121 bp, Homo sapiens; identical to SEQ ID NO: 91568
  chr16:89442144-89442265
  hypo

SEQ ID NO: 181973 - DNA, 137 bp, Homo sapiens; identical to SEQ ID NO: 91569
  chr16:89442324-89442461
  hypo

SEQ ID NO: 181974 - DNA, 296 bp, Homo sapiens; identical to SEQ ID NO: 91570
  chr16:89445364-89445660
  hypo

SEQ ID NO: 181975 - DNA, 85 bp, Homo sapiens
  chr16:89446068-89446153
  hypo
caggtgactgggacgcgagcgccccaagcagcacggaagagctccgtgcagtgcacggatttgcgaagaacgtgttggttcttgt

SEQ ID NO: 181976 - DNA, 30 bp, Homo sapiens
  chr16:89452222-89452252
  hypo
gcgcagccagaggccggggattaggccaga

SEQ ID NO: 181977 - DNA, 30 bp, Homo sapiens; identical to SEQ ID NO: 29778
  chr16:89456313-89456343
  hypo

SEQ ID NO: 181978 - DNA, 78 bp, Homo sapiens
  chr16:89461029-89461107
  hypo
ctgtctccaaaaaaaaaaaaacaaacaaccttttgtggaaaaacgagtgtattttccactcctcgtctcaataaaacc

SEQ ID NO: 181979 - DNA, 30 bp, Homo sapiens; identical to SEQ ID NO: 91573
  chr16:89466377-89466407
  hypo

SEQ ID NO: 181980 - DNA, 41 bp, Homo sapiens
  chr16:89468176-89468217
  hypo
acactgagctgtgcacgcagggagaacgctgggtgaagagg

SEQ ID NO: 181981 - DNA, 519 bp, Homo sapiens
  chr16:89468447-89468966
  hypo
tgtggtgatttatcacggcagccccgaaagacccccacaccaagtttcactctctgtccatggacctctttaatggaaatcctgacttttccataaggcactgaatctgtgtaacttttagagtaaggaggacgacctacagttcactgcatgaaagcacagcccttccaacaaaggcaggcgaaatgtggaaccaattatatctgggtgcctacacgtgacgtacgccagttctttgtagaaagaacgaggcttgtctcagcgatactaatgtacagttcacatgaactcctaaccttagccagccacaataaggtatctgggattgagcgcttatttaaatcggtaggcacatcaatttaaatttaggtagtagctcagcctgtacctaacacatgaggaagccgaggcgggaagatcggttgactccaagagttcaagagcatcctgggaatgacagggagaccccgcctctagaaaaacatttaaaaattgctgcgtatggtgccgcacaccagc

SEQ ID NO: 181982 - DNA, 71 bp, Homo sapiens; identical to SEQ ID NO: 91575
  chr16:89471628-89471699
  hypo

SEQ ID NO: 181983 - DNA, 31 bp, Homo sapiens; identical to SEQ ID NO: 29779
  chr16:89472192-89472223
  hypo

SEQ ID NO: 181984 - DNA, 24 bp, Homo sapiens
  chr16:89494916-89494940
  hypo
agcgagactacatctcaaaatgaa

SEQ ID NO: 181985 - DNA, 242 bp, Homo sapiens; identical to SEQ ID NO: 29780
  chr16:89500004-89500246
  hypo

SEQ ID NO: 181986 - DNA, 30 bp, Homo sapiens; identical to SEQ ID NO: 91579
  chr16:89504227-89504257
  hypo

SEQ ID NO: 181987 - DNA, 77 bp, Homo sapiens; identical to SEQ ID NO: 91580
  chr16:89504485-89504562
  hypo

SEQ ID NO: 181988 - DNA, 18 bp, Homo sapiens
  chr16:89524936-89524954
  hypo
atttcatttcttaggaat

SEQ ID NO: 181989 - DNA, 209 bp, Homo sapiens; identical to SEQ ID NO: 91582
  chr16:89531900-89532109
  hypo

SEQ ID NO: 181990 - DNA, 38 bp, Homo sapiens
  chr16:89545054-89545092
  hypo
ctctcctccagcagccggctacgcgcagctctccggca

SEQ ID NO: 181991 - DNA, 100 bp, Homo sapiens
  chr16:89548160-89548260
  hypo
cttggatgggctttcgtgttcagacacgtctggctgacattctcacgttacatgcggccttcccagcctttgtccccagccttcccgaagtcgaagatgc

SEQ ID NO: 181992 - DNA, 33 bp, Homo sapiens; identical to SEQ ID NO: 91585
  chr16:89553883-89553916
  hypo

SEQ ID NO: 181993 - DNA, 191 bp, Homo sapiens; identical to SEQ ID NO: 91586
  chr16:89558581-89558772
  hypo

SEQ ID NO: 181994 - DNA, 23 bp, Homo sapiens
  chr16:89567124-89567147
  hypo
aaaacataaaacaggccgggcgc

SEQ ID NO: 181995 - DNA, 147 bp, Homo sapiens
  chr16:89575951-89576098
  hypo
ccggccataaaacatatttaaatgggaaaatgtttatcttgaaaggagaactctgaaagtatatacttgttaactggtttggtacctggaaatgttctacaaggagccactctctggtgacagcaggagccccgtgtctgggcagcc

SEQ ID NO: 181996 - DNA, 101 bp, Homo sapiens; identical to SEQ ID NO: 29787
  chr16:89577031-89577132
  hypo

SEQ ID NO: 181997 - DNA, 40 bp, Homo sapiens; identical to SEQ ID NO: 91589
  chr16:89584296-89584336
  hypo

SEQ ID NO: 181998 - DNA, 30 bp, Homo sapiens; identical to SEQ ID NO: 91590
  chr16:89584633-89584663
  hypo

SEQ ID NO: 181999 - DNA, 209 bp, Homo sapiens; identical to SEQ ID NO: 91591
  chr16:89588831-89589040
  hypo

SEQ ID NO: 182000 - DNA, 30 bp, Homo sapiens
  chr16:89593379-89593409
  hypo
ccgacgtaggatggcgaagtctcagcccct

SEQ ID NO: 182001 - DNA, 30 bp, Homo sapiens
  chr16:89595754-89595784
  hypo
gcatcggtcccagacgtagggattcctcgt

SEQ ID NO: 182002 - DNA, 160 bp, Homo sapiens; identical to SEQ ID NO: 91592
  chr16:89597144-89597304
  hypo

SEQ ID NO: 182003 - DNA, 31 bp, Homo sapiens
  chr16:89603136-89603167
  hypo
tcgtcctgtgagtctgcggccttcttctcca

SEQ ID NO: 182004 - DNA, 114 bp, Homo sapiens; identical to SEQ ID NO: 91593
  chr16:89603718-89603832
  hypo

SEQ ID NO: 182005 - DNA, 30 bp, Homo sapiens
  chr16:89608482-89608512
  hypo
gctctgctgaaggccgagctgtgcttgaac

SEQ ID NO: 182006 - DNA, 30 bp, Homo sapiens
  chr16:89611905-89611935
  hypo
cttcccgctgggacacggcttctccagggg

SEQ ID NO: 182007 - DNA, 30 bp, Homo sapiens; identical to SEQ ID NO: 91594
  chr16:89613888-89613918
  hypo

SEQ ID NO: 182008 - DNA, 264 bp, Homo sapiens; identical to SEQ ID NO: 127785
  chr16:89614906-89615170
  hypo

SEQ ID NO: 182009 - DNA, 30 bp, Homo sapiens; identical to SEQ ID NO: 91596
  chr16:89619158-89619188
  hypo

SEQ ID NO: 182010 - DNA, 30 bp, Homo sapiens; identical to SEQ ID NO: 29789
  chr16:89619387-89619417
  hypo

SEQ ID NO: 182011 - DNA, 30 bp, Homo sapiens; identical to SEQ ID NO: 91598
  chr16:89620171-89620201
  hypo

SEQ ID NO: 182012 - DNA, 154 bp, Homo sapiens; identical to SEQ ID NO: 53491
  chr16:89627716-89627870
  hypo

SEQ ID NO: 182013 - DNA, 30 bp, Homo sapiens
  chr16:89636883-89636913
  hypo
gctcatccgagtgcacggacctcgtggaca

SEQ ID NO: 182014 - DNA, 30 bp, Homo sapiens
  chr16:89638088-89638118
  hypo
cgggggctggacgggcgaaggaaggcgtga

SEQ ID NO: 182015 - DNA, 162 bp, Homo sapiens; identical to SEQ ID NO: 91600
  chr16:89647542-89647704
  hypo

SEQ ID NO: 182016 - DNA, 301 bp, Homo sapiens
  chr16:89647763-89648064
  hypo
ccatcacacggaacatcccgtcacccgcagctgcccctgcccctttgtggccagctccccgcctggttcgtctcttctggaattccacgtccatgaatcacagcgcgtgttctccctgctgtggaattcttttacccaacataatgtctgcgtgactcatccccctgcagcctcggtcggagctggcgtgccatcgatcctgttgtcctccccattttttagataaggaaactgagagttagggagggcacagatggaagaggatggcacggacacagaaatatggacatgctttttttgt

SEQ ID NO: 182017 - DNA, 342 bp, Homo sapiens
  chr16:89649561-89649903
  hypo
tgctccttggcaccttcgaagaggagtgggcggtggggtcctgggccggcacctcgctcacaccctttctgccgcccgtggctacgtggacatgctgggcgtgagggtccggggccgtttgagctgcctcgcctctgcttctgcgggttctcacctgggcctggagagggtcagggcagccctgcttacctgtggaggggcgtccgccacacctgtgcaggtgcaggccagctgggctgtgagctgcttcctggcttccacctgagcctgtttcctcacctggtaaataggtatgatgacctctgcctcccctgggcgactgctggcgccgtgaggtggtgg

SEQ ID NO: 182018 - DNA, 589 bp, Homo sapiens
  chr16:89650276-89650865
  hypo
agggtctgcaggagccggcagctacacagccccgggggtacacagacacctcctctcaggccccgctgggtggggtcagccagcctggggcctctggtcccccacggtggggtcaggccccacctggccaagcctggagcccgggcgtccccctgccaggtgatcgccgaggacatctcggggaacaacggctacgtggagctctccttccgggccaggaagctggacgacaaggtgagtgcaggtgccgggcacgcctggctcaggctgaggtccgggaaccggttcgaaaacccggtccctgcccagcgctgacctcgcgtggctatgtcccgtgtgagacgtgtgcggagtgtgcctggggctgggcgtgctgccgtcacggtcgccatcatcactgtcaccgccattagctctcccgcccctcctggcagctgggctggggctggggcagctccctcctgtggggaccactcatgaccctgctcagggatggggaaataggcccagcacccccgaggccactgtcgtgacaggaggaactggaacagcgcgcggttctgcgggctcgtcacgtgggtgggcagaa

SEQ ID NO: 182019 - DNA, 31 bp, Homo sapiens; identical to SEQ ID NO: 91604
  chr16:89656477-89656508
  hypo

SEQ ID NO: 182020 - DNA, 30 bp, Homo sapiens; identical to SEQ ID NO: 91605
  chr16:89662778-89662808
  hypo

SEQ ID NO: 182021 - DNA, 257 bp, Homo sapiens
  chr16:89663895-89664152
  hypo
agtgaggactgtggacgtgatgcaggggtgccaggagcctcccacatggcctgcaccgcagggagctgggctggagggtgaagcctccatgtgatgttcgtggagccggggcatctcccacctgctgggacctcctcgccctgagtttgagatttcccctgaatgatcttgcctgagaaaaacaaattgtcctaaccctgaatccaggcccacccatccccacatcggtccatccacccacccatccgtccacccat

SEQ ID NO: 182022 - DNA, 30 bp, Homo sapiens
  chr16:89671969-89671999
  hypo
gtggacaccagctccgccatccccaccgtt

SEQ ID NO: 182023 - DNA, 234 bp, Homo sapiens
  chr16:89674364-89674598
  hypo
tcttaattcctctagcgccgctgggttagggtctccacagccgagctggtctcagcacagtggcccttgacgtttgcggggatgggttccgggaccccagtagatcatacaatccatggatgctcaagtccctgatagaaactggtgtcatctttgcacgtaactgtctctgtgtgtgtcccgtcgtcttcagctcggaggtgctcgtggctagcgggacgcccgcactgcact

SEQ ID NO: 182024 - DNA, 254 bp, Homo sapiens
  chr16:89688045-89688299
  hypo
ctgagtgtgggctcccgtccctcgcacatgcaaggaagggctcaggtgagcaggtgcgcgtgtgcggctcacctgtgcatgcacgtgtgtctgtgtgcacgtggaggtatctgagtgtgcgtttactcatcccgtgggaaagtctgcacatgtctgttctaggtacgcggacgtatctgaccgtgtgggcttgcgatgcgcccaggtgttctcgtctgcgatgatctgtgtgtggggggcgtgggtaggtccgc

SEQ ID NO: 182025 - DNA, 147 bp, Homo sapiens; identical to SEQ ID NO: 29794
  chr16:89697116-89697263
  hypo

SEQ ID NO: 182026 - DNA, 30 bp, Homo sapiens; identical to SEQ ID NO: 29795
  chr16:89702747-89702777
  hypo

SEQ ID NO: 182027 - DNA, 601 bp, Homo sapiens
  chr16:89704273-89704874
  hypo
gtatccagacctgatcgctgagctgctcaggaggaactggacggaggcggaggtcaagggcgcactggctgacaacctgctgagggtcttcgaggctgtggaacaggtgaggatggggtggccacctgagtctcccccaccaccaccagcaggcaggctgccccacccgtgtctgtctgtccccaggccagcaacctcacacaggctcccgaggaggagcccatcccgctggaccagctgggtggctcctgcaggacccattacggctactcctctggggcttccagcctccatcgccactgggggctcctgctggcctccctcgctcccctggtcctctgtctgtctctcctgtgaaacctgggagaccagagtcccctttagggttcccggagctccgggaagacccgcccatcccaggactccagatgccaggagccctgctgcccacatgcaaggaccagcatctcctgagaggacgcctgggcttacctggggggcaggatgcctggggacagttcaggacacacacacagtaggcccgcaataaaagcaacaccccttcacatcctggggtacgtgtcatcggcatccggctcag

SEQ ID NO: 182028 - DNA, 30 bp, Homo sapiens
  chr16:89705125-89705155
  hypo
tgcacacacacacaccgcacccctgcacac

SEQ ID NO: 182029 - DNA, 30 bp, Homo sapiens
  chr16:89705415-89705445
  hypo
caccgcacccctgcacgcacacacccccca

SEQ ID NO: 182030 - DNA, 30 bp, Homo sapiens
  chr16:89709143-89709173
  hypo
tgtggctccagggcacgcagaggggtgtac

SEQ ID NO: 182031 - DNA, 343 bp, Homo sapiens; identical to SEQ ID NO: 91609
  chr16:89713324-89713667
  hypo

SEQ ID NO: 182032 - DNA, 30 bp, Homo sapiens; identical to SEQ ID NO: 91610
  chr16:89714834-89714864
  hypo

SEQ ID NO: 182033 - DNA, 48 bp, Homo sapiens
  chr16:89715824-89715872
  hypo
ccagttcacaccttcgttcttcttgcggatggcgttctcggcatacac

SEQ ID NO: 182034 - DNA, 30 bp, Homo sapiens; identical to SEQ ID NO: 29798
  chr16:89718568-89718598
  hypo

SEQ ID NO: 182035 - DNA, 24 bp, Homo sapiens
  chr16:89720015-89720039
  hypo
gtgagacgccgtctcaaaaaaaaa

SEQ ID NO: 182036 - DNA, 30 bp, Homo sapiens; identical to SEQ ID NO: 29799
  chr16:89736775-89736805
  hypo

SEQ ID NO: 182037 - DNA, 66 bp, Homo sapiens; identical to SEQ ID NO: 29800
  chr16:89755907-89755973
  hypo

SEQ ID NO: 182038 - DNA, 30 bp, Homo sapiens; identical to SEQ ID NO: 91616
  chr16:89757942-89757972
  hypo

SEQ ID NO: 182039 - DNA, 30 bp, Homo sapiens
  chr16:89761002-89761032
  hypo
ggtcctctgttcctcgcgctggcggggtca

SEQ ID NO: 182040 - DNA, 30 bp, Homo sapiens
  chr16:89761646-89761676
  hypo
ggaggtgaggaagccgcactcacaagtcgc

SEQ ID NO: 182041 - DNA, 98 bp, Homo sapiens; identical to SEQ ID NO: 91617
  chr16:89762086-89762184
  hypo

SEQ ID NO: 182042 - DNA, 934 bp, Homo sapiens
  chr16:89763775-89764709
  hypo
gtgtccatctgtgcacgctgtagccacaagcgccgctgggcgtcgccaagcagcacacgcagcgagtggcctggacggcaggcgggcagggctgcacagtgggcagcatgcagctggcgacaggtgtcgcagcagagggtgggcagggcgccaggggacaggcagctgtgtgcctggtagcctgggggctccgagacagacctataggctgaggctggtaccccctctgcccgaatacgcctcgggctggccgctgcagagctttcaggggtggccaggtccccaggcctactcagctcacggcgcagagagaggaaggagaaggcggaaggttcaggttccagcccctcctccaaggccccatatggtgggctgctggcctgcggcagctcctcagctgggggctcccaggcccggcccccagtgccccacagtttggcactctgctcccagagtggtggcctgtaggccagctccgccgggggcgagtcagggcctggtgacggctccccatacaggctggcgtcctccgacccctcgtcttcctgcaagtcccggtataagtccagtggggccctgtaagcagcaggggagcctcgggggggcaggggtggcggctcctcatcctgggccagccgctgctgcagccaggccacacaggaggccacgtccccgctggcacgccgtgcctgcagcagctcctcagctggcagcacactggtgcccagctgggccagcacctcacccaggatctcacactccagccggagggcgaagcagcccagggccacctgcaccagctggcaggcggggggcagggcggtcaccatgagccgatggctgtctctgcgtacgtagcccatcttctggaagctcttcaggaggaggtcgtctgagagcacacccttcagcacgtgcacgtagcccccagaga

SEQ ID NO: 182043 - DNA, 181 bp, Homo sapiens; identical to SEQ ID NO: 91619
  chr16:89770173-89770354
  hypo

SEQ ID NO: 182044 - DNA, 30 bp, Homo sapiens; identical to SEQ ID NO: 91620
  chr16:89775668-89775698
  hypo

SEQ ID NO: 182045 - DNA, 30 bp, Homo sapiens; identical to SEQ ID NO: 91621
  chr16:89777100-89777130
  hypo

SEQ ID NO: 182046 - DNA, 30 bp, Homo sapiens; identical to SEQ ID NO: 91622
  chr16:89795766-89795796
  hypo

SEQ ID NO: 182047 - DNA, 76 bp, Homo sapiens; identical to SEQ ID NO: 29802
  chr16:89800298-89800374
  hypo

SEQ ID NO: 182048 - DNA, 21 bp, Homo sapiens
  chr16:89807060-89807081
  hypo
aacccacggcctgggagttct

SEQ ID NO: 182049 - DNA, 86 bp, Homo sapiens
  chr16:89807743-89807829
  hypo
actacacaagaaacctgaagacgtactcagaagaacccctgcagggtggttataatcaccaaaaccctgggcgctgctgtcgatcc

SEQ ID NO: 182050 - DNA, 40 bp, Homo sapiens
  chr16:89809821-89809861
  hypo
ctttaaataagctgggcatgacggttcacatctgcaatca

SEQ ID NO: 182051 - DNA, 103 bp, Homo sapiens; identical to SEQ ID NO: 29804
  chr16:89815124-89815227
  hypo

SEQ ID NO: 182052 - DNA, 37 bp, Homo sapiens
  chr16:89824586-89824623
  hypo
tctatacacataaagaaacaaccgatgcaggaagctt

SEQ ID NO: 182053 - DNA, 39 bp, Homo sapiens; identical to SEQ ID NO: 29805
  chr16:89830046-89830085
  hypo

SEQ ID NO: 182054 - DNA, 132 bp, Homo sapiens
  chr16:89845486-89845618
  hypo
tcagagagtggactgcgagggctcactccaaagccacgatgcattatgaagtcttcttgtgcacagttccgggacaaggcatgtgtagggcaggccgtgctagcccagccctgagtccgtgggaatcaggac

SEQ ID NO: 182055 - DNA, 287 bp, Homo sapiens
  chr16:89846017-89846304
  hypo
ccccgtatcccttaacggcaggatcctcgattcacagccctgactcctgtctctctctgaatagacagtggccaacctgccccatgtggctctgggcagaaatgggacacactccaaagagccccagacgctggcaggcatcagagcggagtctgcacaccctgcaggcatcagagcagagtctgcacatactgcaggcatcagagcgcggtctgcacacactgcagctgctagaggccttttcggcagcccagcctacctggcctccatgacggtgactgggatgt

SEQ ID NO: 182056 - DNA, 163 bp, Homo sapiens
  chr16:89846595-89846758
  hypo
agaccccgtgatgtgcggccctcctcgagagctcagctctgctgagagcctgccgtgagcctctttcctgcctccaggaaagagttgaaagtaaagatttctaggtgggaaggagtagagacttaatttttgagattaaaagaaattacgagggctgggtgcc

SEQ ID NO: 182057 - DNA, 326 bp, Homo sapiens
  chr16:89871397-89871723
  hypo
cgcgccactgtactccagcctgggcgacagaaggaagcagctgcggtcactctatgggaaaggtgaatggaaacacttaaactcatgtcaaggccgacttactagtatttccacatcagtcaagtaaaatgcaaccccacaacaggctgagactgggagtctgtcatgccaggttcccacggccacggagagacaggctgttctgcctcgcagagctcttgagagcagaaggcattatcacagatcaaaatgagttttacccaagaacccgcatcttgtcatgaacgcaccagaaagcatggccctggcgacgtcagcatgctggc

SEQ ID NO: 182058 - DNA, 318 bp, Homo sapiens; identical to SEQ ID NO: 91627
  chr16:89884021-89884339
  hypo

SEQ ID NO: 182059 - DNA, 30 bp, Homo sapiens; identical to SEQ ID NO: 29807
  chr16:89888802-89888832
  hypo

SEQ ID NO: 182060 - DNA, 238 bp, Homo sapiens; identical to SEQ ID NO: 53501
  chr16:89894334-89894572
  hypo

SEQ ID NO: 182061 - DNA, 30 bp, Homo sapiens; identical to SEQ ID NO: 91630
  chr16:89898368-89898398
  hypo

SEQ ID NO: 182062 - DNA, 309 bp, Homo sapiens; identical to SEQ ID NO: 91631
  chr16:89899918-89900227
  hypo

SEQ ID NO: 182063 - DNA, 1202 bp, Homo sapiens; identical to SEQ ID NO: 91632
  chr16:89900472-89901674
  hypo

SEQ ID NO: 182064 - DNA, 107 bp, Homo sapiens
  chr16:89918307-89918414
  hypo
tcctggccagcttcccgaaccctctgagcctttgcaggtggttttgacgccgggtggcagcctgagctgctcggcctcatctgcagcccaagcgtgtgccaaggttg

SEQ ID NO: 182065 - DNA, 65 bp, Homo sapiens
  chr16:89920071-89920136
  hypo
ctagagttgggacttcgtgacagcagaggctgcgtgccaccgagatcgtgcgtgacggaggcagc

SEQ ID NO: 182066 - DNA, 30 bp, Homo sapiens
  chr16:89920575-89920605
  hypo
cttttccggctggtcgagtggagcccccgt

SEQ ID NO: 182067 - DNA, 30 bp, Homo sapiens; identical to SEQ ID NO: 91633
  chr16:89921033-89921063
  hypo

SEQ ID NO: 182068 - DNA, 30 bp, Homo sapiens
  chr16:89924982-89925012
  hypo
gggctaagctaagccgggggcagcagcaat

SEQ ID NO: 182069 - DNA, 88 bp, Homo sapiens; identical to SEQ ID NO: 91634
  chr16:89926089-89926177
  hypo

SEQ ID NO: 182070 - DNA, 30 bp, Homo sapiens; identical to SEQ ID NO: 29811
  chr16:89936470-89936500
  hypo

SEQ ID NO: 182071 - DNA, 30 bp, Homo sapiens
  chr16:89946382-89946412
  hypo
ccaggactatcacgcgtgctgtccatgtac

SEQ ID NO: 182072 - DNA, 214 bp, Homo sapiens
  chr16:89947430-89947644
  hypo
aggggctctgtttacataacacgtctatactgccatggattttctcaacgggcgtaagttgctcctgacttgtctcagcgggcgtttaagatgctcctgaatcgtatccttgtcatgtgggagcctccattggagagaaagccgactgaccggcaagcacagacctgccctgtgctttcttctcttcagcaaccgcagccggggtgtctgtctt

SEQ ID NO: 182073 - DNA, 184 bp, Homo sapiens
  chr16:89949812-89949996
  hypo
tgtgcgctcacagacgctgtggcaccagggaacaaaggaaggggtcagcgtggaaacacagagagcaagacggatggagatgacaccgagacagtgccctcagagcaggtggggggctgagtggtgaggaggtggcatcagacgggagagttccaaggcacccagccacgtgtatcctgtgctg

SEQ ID NO: 182074 - DNA, 30 bp, Homo sapiens; identical to SEQ ID NO: 91638
  chr16:89950204-89950234
  hypo

SEQ ID NO: 182075 - DNA, 30 bp, Homo sapiens; identical to SEQ ID NO: 91639
  chr16:89960169-89960199
  hypo

SEQ ID NO: 182076 - DNA, 209 bp, Homo sapiens; identical to SEQ ID NO: 91640
  chr16:89960586-89960795
  hypo

SEQ ID NO: 182077 - DNA, 311 bp, Homo sapiens; identical to SEQ ID NO: 91641
  chr16:89966589-89966900
  hypo

SEQ ID NO: 182078 - DNA, 38 bp, Homo sapiens; identical to SEQ ID NO: 91642
  chr16:89970850-89970888
  hypo

SEQ ID NO: 182079 - DNA, 97 bp, Homo sapiens
  chr16:89971007-89971104
  hypo
ggagcaaacacaggagaaagtgcacgccttggggtcatcccctggccctccagggctcgccctgtgtgcacgcagatggacccgccctgggtgcatt

SEQ ID NO: 182080 - DNA, 30 bp, Homo sapiens
  chr16:89971453-89971483
  hypo
tctgcaagcagtggacgccggggacccagc

SEQ ID NO: 182081 - DNA, 1573 bp, Homo sapiens; identical to SEQ ID NO: 91644
  chr16:89971725-89973298
  hypo

SEQ ID NO: 182082 - DNA, 30 bp, Homo sapiens; identical to SEQ ID NO: 29817
  chr16:89973701-89973731
  hypo

SEQ ID NO: 182083 - DNA, 30 bp, Homo sapiens; identical to SEQ ID NO: 91646
  chr16:89977637-89977667
  hypo

SEQ ID NO: 182084 - DNA, 70 bp, Homo sapiens
  chr16:89982537-89982607
  hypo
cagccaccggcataggcgaatctcagccagagagagtgaactgggacaccattcacgtgatgggccagat

SEQ ID NO: 182085 - DNA, 382 bp, Homo sapiens
  chr16:89985818-89986200
  hypo
gagcttggtggagaacgcgctggtggtggccaccatcgccaagaaccggaacctgcactcacccatgtactgcttcatctgctgcctggccttgtcggacctgctggtgagcgggagcaacgtgctggagacggccgtcatcctcctgctggaggccggtgcactggtggcccgggctgcggtgctgcagcagctggacaatgtcattgacgtgatcacctgcagctccatgctgtccagcctctgcttcctgggcgccatcgccgtggaccgctacatctccatcttctacgcactgcgctaccacagcatcgtgaccctgccgcgggcgcggcgagccgttgcggccatctgggtggccagtgtcgtcttcagcacgctc

SEQ ID NO: 182086 - DNA, 30 bp, Homo sapiens
  chr16:90000307-90000337
  hypo
tcaagagatcaggacgttcccatgcctgtg

SEQ ID NO: 182087 - DNA, 30 bp, Homo sapiens
  chr16:90028447-90028477
  hypo
cgctgatggtgtctcggcccgtactcaggc

SEQ ID NO: 182088 - DNA, 30 bp, Homo sapiens
  chr16:90030543-90030573
  hypo
ggtgcagggcgtcacggctgctgggacttg

SEQ ID NO: 182089 - DNA, 30 bp, Homo sapiens
  chr16:90032721-90032751
  hypo
aattccacagctcccgtcctggccaccctg

SEQ ID NO: 182090 - DNA, 17 bp, Homo sapiens
  chr16:90037065-90037082
  hypo
ttttctttttttttttt

SEQ ID NO: 182091 - DNA, 496 bp, Homo sapiens
  chr16:90037381-90037877
  hypo
ttatcagaaaggtcgctcaaatttacagagtggcatgacgcactgtctagtatgagcagtgctttgttggtgagattattttgggcactgtatttttcaacggcaaaaaaagtaagtgaaccattcatgaaagatgctcctggtcacccaagcctttctgttggagcgccaaatcacgggcaaactgggcttcaagaacccttcagagccttgcgggtttctgagcggtacaccagtaagggcttcaacttaaagtccccagctgcactgccaccaagcagcagcatcaagcgatctttggatgacttaaaccctggctcagcattctcttcctcggaaataaacgttcctttgggcattctcttccaatcaagtctcgtctcatctacgttaaagacacctggggggtgtactcaccttcttcgatgatgcttttcagcatttctgtgtacatgtccttgttgctgggagctgcgctgttcatcttgaagtgggg

SEQ ID NO: 182092 - DNA, 31 bp, Homo sapiens; identical to SEQ ID NO: 29819
  chr16:90039697-90039728
  hypo

SEQ ID NO: 182093 - DNA, 103 bp, Homo sapiens
  chr16:90044786-90044889
  hypo
gaggagggaaaactggcgtctctctcactttctctatatcgtcttgacagtacggttgcttttcttggtgtgattctgtcttctaaaatattagaaccaggct

SEQ ID NO: 182094 - DNA, 30 bp, Homo sapiens
  chr16:90048873-90048903
  hypo
cgggttgctgaaggccggtgaagcactgct

SEQ ID NO: 182095 - DNA, 96 bp, Homo sapiens
  chr16:90053008-90053104
  hypo
ccaccgcccccggccgacacttggtcattctaagcttccagtggctctcatattatcttggatttccgctgcatcgtatgttcttaaagtaattat

SEQ ID NO: 182096 - DNA, 190 bp, Homo sapiens; identical to SEQ ID NO: 91652
  chr16:90053306-90053496
  hypo

SEQ ID NO: 182097 - DNA, 124 bp, Homo sapiens
  chr16:90057595-90057719
  hypo
taccagtagcaaaaccgattctgggtgggttcctgtttcaggttcatgacatgtttgcaatggcccgaaaaaaacgctccatgtatcttattcattgatgagattgatgcgattggcaggaagc

SEQ ID NO: 182098 - DNA, 136 bp, Homo sapiens; identical to SEQ ID NO: 29822
  chr16:90059131-90059267
  hypo

SEQ ID NO: 182099 - DNA, 31 bp, Homo sapiens
  chr16:90060755-90060786
  hypo
cttttcacccatgctccgcagctctttgctg

SEQ ID NO: 182100 - DNA, 30 bp, Homo sapiens
  chr16:90065653-90065683
  hypo
gcctaccacgaggccggacacgtggtggta

SEQ ID NO: 182101 - DNA, 506 bp, Homo sapiens
  chr16:90066539-90067045
  hypo
gggccaggtgtccttcgacttttcccgacacggcaagaccctggtggagaagctgtacggcgaggcaagcgcccagctccttgatgacgaggtccggcacctcgtcagtgccacctacaggtgcaccctggacctgctgacacggtgccgggagcatgtggagaaggtgagtgtggcctctgcccagacaggtcgtgggtcccatgttgagtcacggtcatgccacacccgaaggccacacccgtccttcagcttgcttaggtttgggctgtgatcatgtcctcagagccgtctgacaggtgggccgttgtttccaggtgggccagcggctcctggagaaggaagtactggagaaggcagacatggtggagctgctgggcccccggcccttctcggagaagtctacctatgaggagtttgtagagggcgtgggcagcctggaggaggacacatcccttcccgaggggctgaagggttggaaccgcggacaggaggaggaagatgtg

SEQ ID NO: 182102 - DNA, 285 bp, Homo sapiens
  chr16:90068122-90068407
  hypo
gctttctgcagcacacgacctgcctccaggactcgctggggtcagcaacagcagggcagtgtcagcctcaaccactgccttggggtgggtggatgcgtgtctaggtcacctgggatgagacctggggaagacgcccatttgcatatgtcctgggtgagcggccggaggaggaggccctgcttgtgggtcagctgggatgggacctgggaagatgcccgtttgcagatgtcctgggtgaacagcgggaggaggaggccctgcttgctgccccgggcactgtttgtt

SEQ ID NO: 182103 - DNA, 30 bp, Homo sapiens
  chr16:90068766-90068796
  hypo
tggccctcgctccaccgtggttccctccaa

SEQ ID NO: 182104 - DNA, 462 bp, Homo sapiens; identical to SEQ ID NO: 91656
  chr16:90072248-90072710
  hypo

SEQ ID NO: 182105 - DNA, 46 bp, Homo sapiens; identical to SEQ ID NO: 127816
  chr16:90087049-90087095
  hypo

SEQ ID NO: 182106 - DNA, 30 bp, Homo sapiens; identical to SEQ ID NO: 29826
  chr16:90088473-90088503
  hypo

SEQ ID NO: 182107 - DNA, 31 bp, Homo sapiens; identical to SEQ ID NO: 91658
  chr16:90104654-90104685
  hypo

SEQ ID NO: 182108 - DNA, 31 bp, Homo sapiens; identical to SEQ ID NO: 29827
  chr16:90109400-90109431
  hypo

SEQ ID NO: 182109 - DNA, 207 bp, Homo sapiens; identical to SEQ ID NO: 91660
  chr16:90109928-90110135
  hypo

SEQ ID NO: 182110 - DNA, 30 bp, Homo sapiens
  chr16:90110555-90110585
  hypo
agtcaggcgcttctgcggcggctccagtgt

SEQ ID NO: 182111 - DNA, 82 bp, Homo sapiens
  chr16:90115265-90115347
  hypo
gggaaacgctgcacccgcatgatggtggactggctgtcctgctctgggatctgggaactttttttttttttgagacggagtc

SEQ ID NO: 182112 - DNA, 30 bp, Homo sapiens
  chr16:90148434-90148464
  hypo
tccaaaatcatggcccggagtaatctggag

SEQ ID NO: 182113 - DNA, 222 bp, Homo sapiens
  chr17:401101-401323
  hypo
ggcccctgtggctctcgggcattagcctgtaggtcttctgctgcaaagcgcctctcacccctcctggttgcgtgggtggggtggtcctgaagccccgtggcttcctttatttctgccttctctgtagaattcaaacatgaaccctgcagggctagaccaagacacaaatatcaatttctaaaaacacccctttgagggttgggcacggcggctcacgcctgt

SEQ ID NO: 182114 - DNA, 30 bp, Homo sapiens; identical to SEQ ID NO: 91661
  chr17:422466-422496
  hypo

SEQ ID NO: 182115 - DNA, 30 bp, Homo sapiens; identical to SEQ ID NO: 91662
  chr17:507567-507597
  hypo

SEQ ID NO: 182116 - DNA, 153 bp, Homo sapiens; identical to SEQ ID NO: 29828
  chr17:512962-513115
  hypo

SEQ ID NO: 182117 - DNA, 42 bp, Homo sapiens
  chr17:523201-523243
  hypo
aggcgtgcgccaccacgccccgctagtatttccttttctgac

SEQ ID NO: 182118 - DNA, 384 bp, Homo sapiens; identical to SEQ ID NO: 53513
  chr17:523543-523927
  hypo

SEQ ID NO: 182119 - DNA, 266 bp, Homo sapiens; identical to SEQ ID NO: 91666
  chr17:536282-536548
  hypo

SEQ ID NO: 182120 - DNA, 30 bp, Homo sapiens; identical to SEQ ID NO: 91667
  chr17:556417-556447
  hypo

SEQ ID NO: 182121 - DNA, 30 bp, Homo sapiens; identical to SEQ ID NO: 29831
  chr17:568197-568227
  hypo

SEQ ID NO: 182122 - DNA, 28 bp, Homo sapiens
  chr17:570989-571017
  hypo
tgggccagcaccagtccgtggcctgttg

SEQ ID NO: 182123 - DNA, 492 bp, Homo sapiens; identical to SEQ ID NO: 127819
  chr17:576351-576843
  hypo

SEQ ID NO: 182124 - DNA, 50 bp, Homo sapiens; identical to SEQ ID NO: 29834
  chr17:591790-591840
  hypo

SEQ ID NO: 182125 - DNA, 30 bp, Homo sapiens; identical to SEQ ID NO: 29835
  chr17:597090-597120
  hypo

SEQ ID NO: 182126 - DNA, 153 bp, Homo sapiens; identical to SEQ ID NO: 29836
  chr17:597508-597661
  hypo

SEQ ID NO: 182127 - DNA, 23 bp, Homo sapiens
  chr17:598044-598067
  hypo
tcatccgggctggagcgcggcgg

SEQ ID NO: 182128 - DNA, 30 bp, Homo sapiens; identical to SEQ ID NO: 91674
  chr17:621524-621554
  hypo

SEQ ID NO: 182129 - DNA, 279 bp, Homo sapiens; identical to SEQ ID NO: 91675
  chr17:633610-633889
  hypo

SEQ ID NO: 182130 - DNA, 264 bp, Homo sapiens; identical to SEQ ID NO: 91676
  chr17:634275-634539
  hypo

SEQ ID NO: 182131 - DNA, 79 bp, Homo sapiens; identical to SEQ ID NO: 53515
  chr17:635475-635554
  hypo

SEQ ID NO: 182132 - DNA, 138 bp, Homo sapiens; identical to SEQ ID NO: 53516
  chr17:635797-635935
  hypo

SEQ ID NO: 182133 - DNA, 299 bp, Homo sapiens; identical to SEQ ID NO: 53517
  chr17:635959-636258
  hypo

SEQ ID NO: 182134 - DNA, 141 bp, Homo sapiens
  chr17:641126-641267
  hypo
acatgatctatgactcgtacgccatgtacctctgtgaatggtgccgaaccagagaccagaaccgtgcgccctccctcactcttcgaaacttcctaagtcgaaaccgcctcatgatcacacatcatgcggtcattctctttg

SEQ ID NO: 182135 - DNA, 30 bp, Homo sapiens; identical to SEQ ID NO: 91680
  chr17:660240-660270
  hypo

SEQ ID NO: 182136 - DNA, 258 bp, Homo sapiens; identical to SEQ ID NO: 29839
  chr17:662965-663223
  hypo

SEQ ID NO: 182137 - DNA, 138 bp, Homo sapiens
  chr17:663954-664092
  hypo
gaatgattcctttttcgtaagtctcctcccggcctactcttctgatgttggttctgtttagtttgggcatcttaattaaaaaggaagccttaagccgtgcccagtggtcacacctatagtcacagccacttggaggct

SEQ ID NO: 182138 - DNA, 18 bp, Homo sapiens
  chr17:664151-664169
  hypo
ccccgtctcatatacata

SEQ ID NO: 182139 - DNA, 37 bp, Homo sapiens; identical to SEQ ID NO: 91684
  chr17:684165-684202
  hypo

SEQ ID NO: 182140 - DNA, 442 bp, Homo sapiens; identical to SEQ ID NO: 29842
  chr17:692537-692979
  hypo

SEQ ID NO: 182141 - DNA, 465 bp, Homo sapiens; identical to SEQ ID NO: 91686
  chr17:693366-693831
  hypo

SEQ ID NO: 182142 - DNA, 30 bp, Homo sapiens; identical to SEQ ID NO: 29845
  chr17:694247-694277
  hypo

SEQ ID NO: 182143 - DNA, 20 bp, Homo sapiens
  chr17:696346-696366
  hypo
ttaagcactgctggccaggt

SEQ ID NO: 182144 - DNA, 30 bp, Homo sapiens; identical to SEQ ID NO: 91689
  chr17:708395-708425
  hypo

SEQ ID NO: 182145 - DNA, 30 bp, Homo sapiens
  chr17:710591-710621
  hypo
ctgcgtgtgccccggcgtgggatgccgagt

SEQ ID NO: 182146 - DNA, 199 bp, Homo sapiens
  chr17:710848-711047
  hypo
ggcttccccgaggaacggctcctcctaagacgaggtgtgccgggacgggccgtgttgggccgcgtgactgtctgcataagcagaaaccaacttgggcccaaggaagccactcgtgttcggcccctgcacgggggaaagcacccatgtctgctgtgccaggctgcctcccctcagctggtcctgacgagcttggcctaca

SEQ ID NO: 182147 - DNA, 30 bp, Homo sapiens; identical to SEQ ID NO: 91690
  chr17:722822-722852
  hypo

SEQ ID NO: 182148 - DNA, 104 bp, Homo sapiens; identical to SEQ ID NO: 91691
  chr17:730081-730185
  hypo

SEQ ID NO: 182149 - DNA, 34 bp, Homo sapiens; identical to SEQ ID NO: 91692
  chr17:744616-744650
  hypo

SEQ ID NO: 182150 - DNA, 31 bp, Homo sapiens; identical to SEQ ID NO: 91693
  chr17:761089-761120
  hypo

SEQ ID NO: 182151 - DNA, 30 bp, Homo sapiens
  chr17:795890-795920
  hypo
gggggggtgctgttccgcacattgtagaat

SEQ ID NO: 182152 - DNA, 30 bp, Homo sapiens
  chr17:796404-796434
  hypo
gcagggcaatgctctcgttacttccacgag

SEQ ID NO: 182153 - DNA, 35 bp, Homo sapiens; identical to SEQ ID NO: 91694
  chr17:797965-798000
  hypo

SEQ ID NO: 182154 - DNA, 30 bp, Homo sapiens; identical to SEQ ID NO: 53519
  chr17:800577-800607
  hypo

SEQ ID NO: 182155 - DNA, 97 bp, Homo sapiens; identical to SEQ ID NO: 91696
  chr17:817715-817812
  hypo

SEQ ID NO: 182156 - DNA, 31 bp, Homo sapiens; identical to SEQ ID NO: 91697
  chr17:830915-830946
  hypo

SEQ ID NO: 182157 - DNA, 151 bp, Homo sapiens; identical to SEQ ID NO: 91698
  chr17:835882-836033
  hypo

SEQ ID NO: 182158 - DNA, 151 bp, Homo sapiens
  chr17:836152-836303
  hypo
actgggattccaggcgtgagccaccgcgcccagcccagcccgtcctcttgaacctgctcagtttcagtcgtcatgaccacttgtaatatcccttcccactaacatcaaaggctgtggcccgaagctcccaagtgggcgaaaaagtcccgag

SEQ ID NO: 182159 - DNA, 410 bp, Homo sapiens
  chr17:839510-839920
  hypo
cagaaacgtcccctgcgacaaagcctttggttttgctttgtgttcttctcccgtggggtggaagagccgccctccctctgaggcactgcagcgacgggtgccctggtgagtgtccacggtgaggtggtgagtgtgcaccacacacaacccggccagcatctgcccaggtcaagcccatcctgtcagtgcacacgccgcgtgctgccaccacccagctcgatgattctctccttccacaccttccggtccccaaaagtgactgaaagcaggattctgctgcggaaaaactggacttggaggaagggcaggagagaagggcgaggtgtgtcggcctgcctcaggtctggggtgcccaattctggttgtgcaaacagtgagggaaaaaaagggtgctacgatgtctggctaaa

SEQ ID NO: 182160 - DNA, 30 bp, Homo sapiens; identical to SEQ ID NO: 127831
  chr17:849941-849971
  hypo

SEQ ID NO: 182161 - DNA, 152 bp, Homo sapiens; identical to SEQ ID NO: 127832
  chr17:850230-850382
  hypo

SEQ ID NO: 182162 - DNA, 246 bp, Homo sapiens
  chr17:851783-852029
  hypo
gcgctggggacctagcggtgaacaagcagcctgggaaaggaatgtttaaaagctcccgggcgactgaagatcagccaggggtgaaaaccatcactcggtgcttcacggaacaaacgcttgaggcaaaacctaagacagctgggtcccaacgcggggcctcaccccggcccgtcccgccccagcgctcggaggctgagagcagcattctcagatggtactaaatccacatcccgggacacgaggaaa

SEQ ID NO: 182163 - DNA, 33 bp, Homo sapiens; identical to SEQ ID NO: 29848
  chr17:864607-864640
  hypo

SEQ ID NO: 182164 - DNA, 181 bp, Homo sapiens
  chr17:874467-874648
  hypo
gagccaccgcgcgtggccgagtctcttttaatagactcagatatttgacatttcaaaaatggagagtcaagctttttcctatttttgagcacagaatcacacggcaatccagttgcacaagaagctgctgggactcacccagctgtgacatccatttgctcatttagtcctctttaaaaca

SEQ ID NO: 182165 - DNA, 21 bp, Homo sapiens
  chr17:875983-876004
  hypo
aatcagggccgggtgcggtgg

SEQ ID NO: 182166 - DNA, 153 bp, Homo sapiens
  chr17:876751-876904
  hypo
tttcccaggcttcgtcgatcagcagcagtctggagcgtcattggcagatagaaatacagagctcagtaagtatcagtaatatcccgggactttaaggcactgtatttgttgtttcattcttctaggtctttcttcgcagttataatctcttat

SEQ ID NO: 182167 - DNA, 85 bp, Homo sapiens; identical to SEQ ID NO: 53522
  chr17:883201-883286
  hypo

SEQ ID NO: 182168 - DNA, 30 bp, Homo sapiens; identical to SEQ ID NO: 29849
  chr17:909967-909997
  hypo

SEQ ID NO: 182169 - DNA, 30 bp, Homo sapiens; identical to SEQ ID NO: 29850
  chr17:910376-910406
  hypo

SEQ ID NO: 182170 - DNA, 460 bp, Homo sapiens; identical to SEQ ID NO: 29851
  chr17:915564-916024
  hypo

SEQ ID NO: 182171 - DNA, 65 bp, Homo sapiens
  chr17:916257-916322
  hypo
agcagccacagggccgggctgcccacctgctgcacagacgttccacctcccggctcacgccactg

SEQ ID NO: 182172 - DNA, 31 bp, Homo sapiens; identical to SEQ ID NO: 91707
  chr17:926392-926423
  hypo

SEQ ID NO: 182173 - DNA, 30 bp, Homo sapiens; identical to SEQ ID NO: 29853
  chr17:927442-927472
  hypo

SEQ ID NO: 182174 - DNA, 526 bp, Homo sapiens
  chr17:929503-930029
  hypo
ctcccaccggcctggcgccctgtcttctctggcaccttgtgccacatgagcctgaggggctggggaccccggaggcctccccgagcacagccacggcatccaggcatcggatgggaagggcgctgtggatgtcacggctctggctgtgccggtcatcggtaccagccccggctggggtcacggtccagaaaggagatccctccagatttcggctcaggagctggttccgctgtcttgaagcgggactggggaagtctctgtggggatcctggggcctcctggcctctctacagaagcccaggaccagctccacgggcccctcccgcctctccagggcccatcctggagggccaagggtctacggctcactggacccaggactgacgctgcgtttctccccagggtggggcaggcaggtcacaggcgcaggggactgtctgttcctcgaaggtgctggggggccgtcaggacacaaacatcttcctgccccagcatgagttcacaggggaaacgaggtcaaagaaca

SEQ ID NO: 182175 - DNA, 31 bp, Homo sapiens; identical to SEQ ID NO: 29854
  chr17:930920-930951
  hypo

SEQ ID NO: 182176 - DNA, 30 bp, Homo sapiens; identical to SEQ ID NO: 91710
  chr17:933164-933194
  hypo

SEQ ID NO: 182177 - DNA, 565 bp, Homo sapiens; identical to SEQ ID NO: 91711
  chr17:951704-952269
  hypo

SEQ ID NO: 182178 - DNA, 67 bp, Homo sapiens; identical to SEQ ID NO: 91712
  chr17:952744-952811
  hypo

SEQ ID NO: 182179 - DNA, 497 bp, Homo sapiens
  chr17:972914-973411
  hypo
agaaaaaaaaccaacaaagttgctgaaggctccatgggtggcagggtccggcctccctcccccgccctgtgccactggactcacacactcaccccgcagaggtcaggaccccctcccccgcccctggactcacacactcacctcgcagaggtccggaccccctcccccgcccctggactcgcacactcaccccgcagaggtcaggaccccctcccccgccccggactcgcacactcaccccgcagaggtccggaccccctcccccgccccgtgcccctggactcacacactcaccctgcagaggtcttcttcagcttggcacacagtaggacatctgtaaagaggaagacgtgccgcagcttccgggagctctctgacacttccaccaggaagccgtccttcaccagctgtcgcgtctgagggagatggcagaccccccagcctgctcagaggggaatgcggccgagggcagagcctgcacacgggggcacggccag

SEQ ID NO: 182180 - DNA, 30 bp, Homo sapiens; identical to SEQ ID NO: 91714
  chr17:975851-975881
  hypo

SEQ ID NO: 182181 - DNA, 90 bp, Homo sapiens
  chr17:978611-978701
  hypo
gtcccagcgtgaacacgcacgccctagccgggccccaaacctgatagttctccaaagcctgagatataaataccccgtgcgcggctaagc

SEQ ID NO: 182182 - DNA, 30 bp, Homo sapiens
  chr17:994552-994582
  hypo
agacggagcaccctccgggagggagaagga

SEQ ID NO: 182183 - DNA, 289 bp, Homo sapiens
  chr17:995005-995294
  hypo
ggatcttgtagaagatggtctcgatctgctggatggtgagcacgggctgggaggtggtggcggtggccttcaggggtttcatgggctgggagaaacagaggaagaaagagcagaggtcgggggtaaacaaaccagagtgtcggcaggccccggggccgatcgttagcccttcccgctgcccaagtcctgcccagacaaggctgccaaaggcagggcactgaaacgagctttgtatcaaggagccactgccacaggccccaacaagccgcacactcgacagcaggaacct

SEQ ID NO: 182184 - DNA, 30 bp, Homo sapiens
  chr17:995650-995680
  hypo
gcagacattgctaagcgaccgtgatggtcc

SEQ ID NO: 182185 - DNA, 30 bp, Homo sapiens
  chr17:997359-997389
  hypo
cttctgaccctcgccgtcctagaaccaacg

SEQ ID NO: 182186 - DNA, 339 bp, Homo sapiens
  chr17:1028625-1028964
  hypo
ggtctctgagccctccgggggccccttctgctcctcattcccctctccgtcgtactcgtccgtcccgtagctgaagtctgagacaaggaacaagaaaggccactgagaatcctccaccagagctgccagggactggtagcgtagtgggcgccggcggcggcccccggcagccatggccccggccgcaccatccacgcctggcccgggcgggggctgtgcgggggcctgggcctggtgaggggcgggggagagccagcaggcaccgggccctgcccgctccggggctgctgggaggcggggaggagcggctctgctgttgctacccgatgaagagcatgt

SEQ ID NO: 182187 - DNA, 30 bp, Homo sapiens
  chr17:1029802-1029832
  hypo
actcgtgcgggccagcgggagctggcaccg

SEQ ID NO: 182188 - DNA, 66 bp, Homo sapiens; identical to SEQ ID NO: 91716
  chr17:1043598-1043664
  hypo

SEQ ID NO: 182189 - DNA, 30 bp, Homo sapiens
  chr17:1051828-1051858
  hypo
gtcttccacgaagccggtccctggtgcgct

SEQ ID NO: 182190 - DNA, 111 bp, Homo sapiens
  chr17:1053212-1053323
  hypo
gcctgggagagacaccgagaggaaggccagcttgcccggtgtcttctcaagggctgacacacttctcaaagcgctgagattacagacgtgagccaccgcgcccggcctgtg

SEQ ID NO: 182191 - DNA, 60 bp, Homo sapiens
  chr17:1053671-1053731
  hypo
cccgggcatggcaagcgcactgccccctctcactcctccggcggccgccgtccactccca

SEQ ID NO: 182192 - DNA, 138 bp, Homo sapiens; identical to SEQ ID NO: 91717
  chr17:1094002-1094140
  hypo

SEQ ID NO: 182193 - DNA, 31 bp, Homo sapiens; identical to SEQ ID NO: 29855
  chr17:1112805-1112836
  hypo

SEQ ID NO: 182194 - DNA, 74 bp, Homo sapiens; identical to SEQ ID NO: 127850
  chr17:1132221-1132295
  hypo

SEQ ID NO: 182195 - DNA, 43 bp, Homo sapiens
  chr17:1158235-1158278
  hypo
aagtgctgggattacaggcgtgagccaccgcacccagccacga

SEQ ID NO: 182196 - DNA, 30 bp, Homo sapiens
  chr17:1189464-1189494
  hypo
gaaggggctggctcacgctgcacggccacc

SEQ ID NO: 182197 - DNA, 30 bp, Homo sapiens
  chr17:1192780-1192810
  hypo
catgaccagcattgccgatagttccatatt

SEQ ID NO: 182198 - DNA, 218 bp, Homo sapiens
  chr17:1193057-1193275
  hypo
cctgcatgctgggaccggtttatccaagtccagctacatactcatggcaccccgcacctctgcccaaatacaagtccaaacactgcacggccctcttcctgagtcccagctggaggaagggcacctccactcatccagcacccaagctgggaacctgggaatcattcgagtcacgttcctcccagcacccaagccgggaaccccggaatcgtctgaat

SEQ ID NO: 182199 - DNA, 54 bp, Homo sapiens; identical to SEQ ID NO: 91719
  chr17:1208266-1208320
  hypo

SEQ ID NO: 182200 - DNA, 215 bp, Homo sapiens
  chr17:1240770-1240985
  hypo
gccatccaaccattccgccatttatccacaagaaaggaacgacatgcccatataaagacttatacgcaaacacttacaggtgctttatttgtcatggacaaaaactggaaacacccaaatgtccatcaaataggtgaataaacaaattgaggtatatcaaacaatggaatacgtctcagcaataaaaggaatgaaaggaataaaaggaataaact

SEQ ID NO: 182201 - DNA, 215 bp, Homo sapiens
  chr17:1241044-1241259
  hypo
cagggtgagattccatctcaaaaaaaaaaaaaatgttaatagctccccagatcgatttatagatttaataaaatcataagcaaaatcccagcaggtttctgttgttgctggtctgttactgaaatcgacaaactgattcttaaatgtatgcggaaatgcaaaaaccaataaaatcttgaacagcaaacctggaggcctcacgttaccgaatattg

SEQ ID NO: 182202 - DNA, 99 bp, Homo sapiens; identical to SEQ ID NO: 91720
  chr17:1244356-1244455
  hypo

SEQ ID NO: 182203 - DNA, 95 bp, Homo sapiens; identical to SEQ ID NO: 91721
  chr17:1244960-1245055
  hypo

SEQ ID NO: 182204 - DNA, 88 bp, Homo sapiens
  chr17:1255768-1255856
  hypo
tagcctcaagcaacgcgacatatgttttatgtttcagcctaagaaacgttatctcttttttttttttttagatggagtcttcctctgt

SEQ ID NO: 182205 - DNA, 27 bp, Homo sapiens
  chr17:1256095-1256122
  hypo
ggcatgagccaccgcgcccggcacagc

SEQ ID NO: 182206 - DNA, 45 bp, Homo sapiens
  chr17:1298784-1298829
  hypo
tgcactccagcctgggggacagagcccagtcgtagaagggatttt

SEQ ID NO: 182207 - DNA, 18 bp, Homo sapiens
  chr17:1330597-1330615
  hypo
agaatcttggccgggcgc

SEQ ID NO: 182208 - DNA, 18 bp, Homo sapiens
  chr17:1331214-1331232
  hypo
ccgcgcccagcctatatt

SEQ ID NO: 182209 - DNA, 209 bp, Homo sapiens; identical to SEQ ID NO: 91724
  chr17:1352362-1352571
  hypo

SEQ ID NO: 182210 - DNA, 205 bp, Homo sapiens
  chr17:1373308-1373513
  hypo
agactccatctcaaaaaaaaaagagaccttacttttcactgctcagctctggtccgggccctccgtgagccctccctgaccaatcctttggcccgaagaaatcagacccttctgctgtgtactatgatggtccctaacttggcagggggtgcccacagacctcacgcagggcaggtgggggcgtgggccacgaggtgtccaggac

SEQ ID NO: 182211 - DNA, 236 bp, Homo sapiens; identical to SEQ ID NO: 91725
  chr17:1375238-1375474
  hypo

SEQ ID NO: 182212 - DNA, 82 bp, Homo sapiens; identical to SEQ ID NO: 29858
  chr17:1376038-1376120
  hypo

SEQ ID NO: 182213 - DNA, 30 bp, Homo sapiens
  chr17:1377864-1377894
  hypo
gcgcatgcacccctgcgcccggtcccgcca

SEQ ID NO: 182214 - DNA, 25 bp, Homo sapiens
  chr17:1380149-1380174
  hypo
ggggttgaagtctcactctgtcgct

SEQ ID NO: 182215 - DNA, 30 bp, Homo sapiens; identical to SEQ ID NO: 91728
  chr17:1381749-1381779
  hypo

SEQ ID NO: 182216 - DNA, 30 bp, Homo sapiens
  chr17:1382027-1382057
  hypo
agctgtggacgcagcgtgagacaaggagat

SEQ ID NO: 182217 - DNA, 236 bp, Homo sapiens; identical to SEQ ID NO: 91729
  chr17:1386237-1386473
  hypo

SEQ ID NO: 182218 - DNA, 136 bp, Homo sapiens; identical to SEQ ID NO: 29860
  chr17:1386689-1386825
  hypo

SEQ ID NO: 182219 - DNA, 117 bp, Homo sapiens; identical to SEQ ID NO: 91731
  chr17:1387480-1387597
  hypo

SEQ ID NO: 182220 - DNA, 30 bp, Homo sapiens; identical to SEQ ID NO: 29862
  chr17:1398390-1398420
  hypo

SEQ ID NO: 182221 - DNA, 295 bp, Homo sapiens; identical to SEQ ID NO: 91733
  chr17:1407884-1408179
  hypo

SEQ ID NO: 182222 - DNA, 30 bp, Homo sapiens; identical to SEQ ID NO: 29864
  chr17:1409913-1409943
  hypo

SEQ ID NO: 182223 - DNA, 165 bp, Homo sapiens; identical to SEQ ID NO: 29865
  chr17:1410271-1410436
  hypo

SEQ ID NO: 182224 - DNA, 314 bp, Homo sapiens
  chr17:1412247-1412561
  hypo
agcgtggggcagagggcggggaacagtctgcagacccaggctcactcgtggcggtcagcgtggggcagagggcggggaacagtctgcagacccaggctcactcgtgggggtcagcgtggggcagagggcggggagcggtctgcagacccaggctcactcgtgggggttagtgggggttagcgtggggcagagggcggggaacggtctgccagacccaggctcactcgtggtccaggatgtttgggatgtctcgcccctcacaattctgcatctccaggatccggtcaaagtgctccagccgctggtaattgttg

SEQ ID NO: 182225 - DNA, 30 bp, Homo sapiens
  chr17:1413145-1413175
  hypo
atcccttccaagctccgtgctagggactct

SEQ ID NO: 182226 - DNA, 68 bp, Homo sapiens; identical to SEQ ID NO: 91737
  chr17:1437269-1437337
  hypo

SEQ ID NO: 182227 - DNA, 30 bp, Homo sapiens; identical to SEQ ID NO: 91738
  chr17:1438598-1438628
  hypo

SEQ ID NO: 182228 - DNA, 31 bp, Homo sapiens; identical to SEQ ID NO: 29867
  chr17:1446392-1446423
  hypo

SEQ ID NO: 182229 - DNA, 31 bp, Homo sapiens; identical to SEQ ID NO: 29868
  chr17:1446645-1446676
  hypo

SEQ ID NO: 182230 - DNA, 66 bp, Homo sapiens; identical to SEQ ID NO: 29869
  chr17:1451500-1451566
  hypo

SEQ ID NO: 182231 - DNA, 325 bp, Homo sapiens; identical to SEQ ID NO: 29870
  chr17:1454050-1454375
  hypo

SEQ ID NO: 182232 - DNA, 30 bp, Homo sapiens
  chr17:1457075-1457105
  hypo
actggctcatctactcgcttcttctctagt

SEQ ID NO: 182233 - DNA, 225 bp, Homo sapiens; identical to SEQ ID NO: 91743
  chr17:1462628-1462853
  hypo

SEQ ID NO: 182234 - DNA, 27 bp, Homo sapiens
  chr17:1473751-1473778
  hypo
tcctgggcactgaaaacgatgctacca

SEQ ID NO: 182235 - DNA, 250 bp, Homo sapiens
  chr17:1494363-1494613
  hypo
acggggttggcgctgcggtggggtcacctcttgggtgaaatcaggcaaatccctttccctcccccaggccttcctgagcgcctctgcagaacagggcgggcggggccgcctccccttttggggtgaggtgggaatggggtgagccgatacccacagagcactccctgcccgtcgcccggctgcggtctcaggcgggtacctgcggcatccggctggcacttcacctccaggtcgacggtggacaggcaca

SEQ ID NO: 182236 - DNA, 30 bp, Homo sapiens; identical to SEQ ID NO: 91745
  chr17:1505288-1505318
  hypo

SEQ ID NO: 182237 - DNA, 19 bp, Homo sapiens
  chr17:1520966-1520985
  hypo
gagccgccacacccagccg

SEQ ID NO: 182238 - DNA, 198 bp, Homo sapiens; identical to SEQ ID NO: 91746
  chr17:1523770-1523968
  hypo

SEQ ID NO: 182239 - DNA, 205 bp, Homo sapiens
  chr17:1527253-1527458
  hypo
caggagccacatctccgctgctgttctagctcctggcgccctgctttcttgggggcccgaccaccccctggaattatacgggttacacaggtatgcgtgtgatgacttgtttcctctgcacccagcacggcaccttcgtcaatgtttactgaatgtttaggttacaagaaagaggggattaacgatccacatgtaggcctggagc

SEQ ID NO: 182240 - DNA, 30 bp, Homo sapiens
  chr17:1538719-1538749
  hypo
gctcccctgagcttcggcgactctgtggtg

SEQ ID NO: 182241 - DNA, 30 bp, Homo sapiens; identical to SEQ ID NO: 91747
  chr17:1540156-1540186
  hypo

SEQ ID NO: 182242 - DNA, 121 bp, Homo sapiens
  chr17:1544472-1544593
  hypo
cgacagcgtagagatgaccagcaggggagcctgaccgcctgagctccgctgccagccagatcagtggtggcctcagattctcataggagcgccagtcctattgtgaactgcgcacgggagg

SEQ ID NO: 182243 - DNA, 29 bp, Homo sapiens
  chr17:1545292-1545321
  hypo
ggcgtgagccaccgcgcccagccagggat

SEQ ID NO: 182244 - DNA, 24 bp, Homo sapiens
  chr17:1545975-1545999
  hypo
acctggggcaacaaagcgttttta

SEQ ID NO: 182245 - DNA, 144 bp, Homo sapiens; identical to SEQ ID NO: 91751
  chr17:1546298-1546442
  hypo

SEQ ID NO: 182246 - DNA, 40 bp, Homo sapiens
  chr17:1562741-1562781
  hypo
tggcccgggcgtagcgctcaatgtcgtgggaatcatagtc

SEQ ID NO: 182247 - DNA, 184 bp, Homo sapiens; identical to SEQ ID NO: 10899
  chr17:1588081-1588265
  hypo

SEQ ID NO: 182248 - DNA, 803 bp, Homo sapiens; identical to SEQ ID NO: 127864
  chr17:1613224-1614027
  hypo

SEQ ID NO: 182249 - DNA, 30 bp, Homo sapiens
  chr17:1637376-1637406
  hypo
cgggaccagcgagacggccccacgcctcgt

SEQ ID NO: 182250 - DNA, 30 bp, Homo sapiens; identical to SEQ ID NO: 29875
  chr17:1659909-1659939
  hypo

SEQ ID NO: 182251 - DNA, 30 bp, Homo sapiens
  chr17:1662814-1662844
  hypo
aggatctttgagggccggacacgctgaccc

SEQ ID NO: 182252 - DNA, 18 bp, Homo sapiens
  chr17:1683761-1683779
  hypo
cagcgtctcaaagtactg

SEQ ID NO: 182253 - DNA, 121 bp, Homo sapiens; identical to SEQ ID NO: 91756
  chr17:1694043-1694164
  hypo

SEQ ID NO: 182254 - DNA, 157 bp, Homo sapiens; identical to SEQ ID NO: 29877
  chr17:1694899-1695056
  hypo

SEQ ID NO: 182255 - DNA, 181 bp, Homo sapiens
  chr17:1695175-1695356
  hypo
gtctcaaaaacaaacaaaaaaccactaattgaaattacaaaaggaatacgtggtagtcagaaaaaaatttaaaaattgaacattacagagaaaatgacagttgcttgtaatgccatcaggcagatataacatgttatctttaaatcctaacctaaaatacattttttttttttttgagacg

SEQ ID NO: 182256 - DNA, 221 bp, Homo sapiens
  chr17:1703828-1704049
  hypo
tgtcccatttgctgtctaggccgtgatgcggtggtggcagttctcctgggttgagaacactcacaaaagcatcctcctgcaccaggagctctcctgggagaatatcttttgtggcaacgagacagcgaccttttaaaggatctacgcataagccgatggatgatgaggcattggaaagttgttcattctcctccctcagcgctgcatcctcaagggttttg

SEQ ID NO: 182257 - DNA, 20 bp, Homo sapiens
  chr17:1734343-1734363
  hypo
accaccgcgcctggccccaa

SEQ ID NO: 182258 - DNA, 30 bp, Homo sapiens
  chr17:1739081-1739111
  hypo
cccctcatacatgcacgtggttttaaaatc

SEQ ID NO: 182259 - DNA, 22 bp, Homo sapiens
  chr17:1751271-1751293
  hypo
ccagcctcggttacagagcaag

SEQ ID NO: 182260 - DNA, 205 bp, Homo sapiens; identical to SEQ ID NO: 29878
  chr17:1756125-1756330
  hypo

SEQ ID NO: 182261 - DNA, 298 bp, Homo sapiens; identical to SEQ ID NO: 29879
  chr17:1775555-1775853
  hypo

SEQ ID NO: 182262 - DNA, 30 bp, Homo sapiens
  chr17:1776901-1776931
  hypo
tccgtctacctctctcgctcttgcacgttc

SEQ ID NO: 182263 - DNA, 403 bp, Homo sapiens
  chr17:1783886-1784289
  hypo
ccgagtctctgatttcggtggacggagcctctccgtgctgtcttcaagcactatcattgcgaatcctgacatcccagaggcctataagcttcgtggatggtaggttttgtggggctaaacaaagggttacttgaggctgggctttgagaaaagctggttacaatcagcatgggagctttctgccaagcagaagccttcgtccctgagtggtgcagcttccgtgtttcttgaaggcattatgccttctgtgaggagggctttaaagcccttaaacggacaaacctgtaatcccaggacaaacctagagagtcggaggaggcaattagcatgtaagtgctgcctgctgacctcgatcctgccaaaggaggggacggccaggcttcagcagcggtgtgctgaaggc

SEQ ID NO: 182264 - DNA, 120 bp, Homo sapiens
  chr17:1784820-1784940
  hypo
tccacacgtatctgccgaactgcagggcccgttcatagtctgaccagaactagccacagatttgcttttttcttattgcttgattttcttttaggctctggagttcgactccaggttaat

SEQ ID NO: 182265 - DNA, 30 bp, Homo sapiens; identical to SEQ ID NO: 91764
  chr17:1787063-1787093
  hypo

SEQ ID NO: 182266 - DNA, 162 bp, Homo sapiens; identical to SEQ ID NO: 29883
  chr17:1792140-1792302
  hypo

SEQ ID NO: 182267 - DNA, 30 bp, Homo sapiens
  chr17:1796799-1796829
  hypo
gctttcacgccgtgcgtgacttgcaaaaaa

SEQ ID NO: 182268 - DNA, 30 bp, Homo sapiens; identical to SEQ ID NO: 91766
  chr17:1799254-1799284
  hypo

SEQ ID NO: 182269 - DNA, 467 bp, Homo sapiens; identical to SEQ ID NO: 91767
  chr17:1801622-1802089
  hypo

SEQ ID NO: 182270 - DNA, 59 bp, Homo sapiens; identical to SEQ ID NO: 91768
  chr17:1802317-1802376
  hypo

SEQ ID NO: 182271 - DNA, 18 bp, Homo sapiens
  chr17:1809505-1809523
  hypo
aaagggattggctggccg

SEQ ID NO: 182272 - DNA, 282 bp, Homo sapiens
  chr17:1817207-1817489
  hypo
tgcggtcgtctgtttcggcagccccgggaacacaggcagcctattgtgtctgtcatcttgaattaccctgtgtcctttcggctgggtcagtggagaagccgtgggttcactcaggtttccattgtattcattcgtaactgggatccctcactccggggctgtcgggttcgaatcctcacggcccagctcgccttccttcaccccccagtgccttcttctgcgtcaggtatggctgcacccttagtgactggggttcttatcacttatcggcatctgatccag

SEQ ID NO: 182273 - DNA, 30 bp, Homo sapiens
  chr17:1821793-1821823
  hypo
atctcatggagagccgggggcgccccaaac

SEQ ID NO: 182274 - DNA, 256 bp, Homo sapiens
  chr17:1824434-1824690
  hypo
gagtggaggagtagacgattgggtcgaaaccaaattggtcaaaaggacaaactggtcaagagcgactatttccgccgcagccttggctgttccacaagccggttctgccaaggactcgtcatccccaggcggagtgccacctacatgccaggtgggaggcggcgttgcggaggagccgctgagggtgaaacgaaggagtccgggccagttcttagcctttttcaggatctgatgaaaaggccgtgctggcctgcac

SEQ ID NO: 182275 - DNA, 30 bp, Homo sapiens; identical to SEQ ID NO: 29886
  chr17:1833078-1833108
  hypo

SEQ ID NO: 182276 - DNA, 53 bp, Homo sapiens; identical to SEQ ID NO: 91771
  chr17:1837749-1837802
  hypo

SEQ ID NO: 182277 - DNA, 30 bp, Homo sapiens; identical to SEQ ID NO: 91772
  chr17:1841193-1841223
  hypo

SEQ ID NO: 182278 - DNA, 30 bp, Homo sapiens; identical to SEQ ID NO: 29888
  chr17:1843094-1843124
  hypo

SEQ ID NO: 182279 - DNA, 31 bp, Homo sapiens; identical to SEQ ID NO: 91774
  chr17:1849980-1850011
  hypo

SEQ ID NO: 182280 - DNA, 30 bp, Homo sapiens; identical to SEQ ID NO: 29889
  chr17:1850524-1850554
  hypo

SEQ ID NO: 182281 - DNA, 31 bp, Homo sapiens; identical to SEQ ID NO: 29890
  chr17:1890004-1890035
  hypo

SEQ ID NO: 182282 - DNA, 31 bp, Homo sapiens; identical to SEQ ID NO: 91777
  chr17:1918318-1918349
  hypo

SEQ ID NO: 182283 - DNA, 30 bp, Homo sapiens
  chr17:1922533-1922563
  hypo
ggtcctggcttctgccgtccctggaggctc

SEQ ID NO: 182284 - DNA, 175 bp, Homo sapiens; identical to SEQ ID NO: 29891
  chr17:1938561-1938736
  hypo

SEQ ID NO: 182285 - DNA, 54 bp, Homo sapiens; identical to SEQ ID NO: 29892
  chr17:1940205-1940259
  hypo

SEQ ID NO: 182286 - DNA, 30 bp, Homo sapiens; identical to SEQ ID NO: 127877
  chr17:1954393-1954423
  hypo

SEQ ID NO: 182287 - DNA, 329 bp, Homo sapiens; identical to SEQ ID NO: 127878
  chr17:1954661-1954990
  hypo

SEQ ID NO: 182288 - DNA, 665 bp, Homo sapiens; identical to SEQ ID NO: 127884
  chr17:1961433-1962098
  hypo

SEQ ID NO: 182289 - DNA, 176 bp, Homo sapiens; identical to SEQ ID NO: 91780
  chr17:1990504-1990680
  hypo

SEQ ID NO: 182290 - DNA, 48 bp, Homo sapiens
  chr17:2006931-2006979
  hypo
gcaggcagtggggaacggctggctctcgccccacgctcttcttgtgag

SEQ ID NO: 182291 - DNA, 61 bp, Homo sapiens; identical to SEQ ID NO: 53554
  chr17:2014967-2015028
  hypo

SEQ ID NO: 182292 - DNA, 32 bp, Homo sapiens; identical to SEQ ID NO: 29894
  chr17:2015468-2015500
  hypo

SEQ ID NO: 182293 - DNA, 23 bp, Homo sapiens
  chr17:2049867-2049890
  hypo
tctgccactcaggctacagtgcg

SEQ ID NO: 182294 - DNA, 22 bp, Homo sapiens
  chr17:2050129-2050151
  hypo
gattacacgtgtgagccaccac

SEQ ID NO: 182295 - DNA, 30 bp, Homo sapiens
  chr17:2073559-2073589
  hypo
gctctgtgttctcctcgagccaaaacacat

SEQ ID NO: 182296 - DNA, 65 bp, Homo sapiens
  chr17:2111756-2111821
  hypo
gggaggggtccacagcgcagaccccaccaaatctgaagtgcttactgcagcgcctgggtgttgaa

SEQ ID NO: 182297 - DNA, 51 bp, Homo sapiens; identical to SEQ ID NO: 91784
  chr17:2135565-2135616
  hypo

SEQ ID NO: 182298 - DNA, 149 bp, Homo sapiens; identical to SEQ ID NO: 91785
  chr17:2146554-2146703
  hypo

SEQ ID NO: 182299 - DNA, 192 bp, Homo sapiens; identical to SEQ ID NO: 127886
  chr17:2156672-2156864
  hypo

SEQ ID NO: 182300 - DNA, 148 bp, Homo sapiens
  chr17:2181378-2181526
  hypo
aggtatgtgcatacacgtatacacttataaatgcttagaaaaaggtctggaaggacatcaatcagttaatagtgatgtctccgaaggaaagaatacaagtgactgccactttatatatacttttttttttttttttgagacaaagtct

SEQ ID NO: 182301 - DNA, 157 bp, Homo sapiens; identical to SEQ ID NO: 29896
  chr17:2182383-2182540
  hypo

SEQ ID NO: 182302 - DNA, 121 bp, Homo sapiens; identical to SEQ ID NO: 29897
  chr17:2207846-2207967
  hypo

SEQ ID NO: 182303 - DNA, 37 bp, Homo sapiens; identical to SEQ ID NO: 29898
  chr17:2208026-2208063
  hypo

SEQ ID NO: 182304 - DNA, 77 bp, Homo sapiens; identical to SEQ ID NO: 91789
  chr17:2220982-2221059
  hypo

SEQ ID NO: 182305 - DNA, 30 bp, Homo sapiens
  chr17:2249524-2249554
  hypo
ggattaccagcctagcgacaccacggtccc

SEQ ID NO: 182306 - DNA, 158 bp, Homo sapiens
  chr17:2249955-2250113
  hypo
ggcaaaccagtctggcggcagcaggggggtgggtggggttctctgtgtgctgttcccaggcccgaggatcagaacctatgtaactgccacctccgtgccagtggagggtggcgctaggagaatggactcaaaactaccactatggggccaggcatggt

SEQ ID NO: 182307 - DNA, 30 bp, Homo sapiens
  chr17:2262443-2262473
  hypo
tacaggcgtgagccacggcgcccagaccca

SEQ ID NO: 182308 - DNA, 39 bp, Homo sapiens; identical to SEQ ID NO: 91790
  chr17:2263306-2263345
  hypo

SEQ ID NO: 182309 - DNA, 30 bp, Homo sapiens; identical to SEQ ID NO: 91791
  chr17:2265495-2265525
  hypo

SEQ ID NO: 182310 - DNA, 30 bp, Homo sapiens; identical to SEQ ID NO: 91792
  chr17:2268533-2268563
  hypo

SEQ ID NO: 182311 - DNA, 30 bp, Homo sapiens; identical to SEQ ID NO: 91793
  chr17:2276186-2276216
  hypo

SEQ ID NO: 182312 - DNA, 628 bp, Homo sapiens
  chr17:2278749-2279377
  hypo
gagtgcaggtggagccgccctgtgttcaccccccaggtgtttatctcagtggatgatctggaacccccggagccccaggaccctgaagattccagaccaaaacctgagcaggaagcaggacccgggactccgggcaccgccgtggtggagcagcagcattccgtggagttcgactctccagactcaggactgccctcctctcgcaattactccgtggcctcgggcatccagtcaagcctagatgaggggcagagcgtgggcttcgaagaggaggacggcggtggggaggaaggctccagtgggcccggccctgcagctcacactttgagggagccccaggatcccagccaggagaagcctcaggccggagaactggaggccggagaggagcttgcggctgtgtgtgcggctgcctacactgtgcgtacatgctccccaggctgttcccagccgccccagaggccctcctgacatcccagagctggggaagcgctggtggggtggaaggcggggcgccctgactgccctggaagggagttctgagcccatttctcagcatccccacaggactcgctctggtctctgggttccgttttgctgcatttcttggggcgtcacctcctgcccc

SEQ ID NO: 182313 - DNA, 123 bp, Homo sapiens
  chr17:2289840-2289963
  hypo
gaaggcggggcagggcgggggagaagtcagggagcgtgacgtccacatcgcactgatttccgagggtagggaggggaagcaggagcggcactggagctggcactgggccggacaggtggcaca

SEQ ID NO: 182314 - DNA, 129 bp, Homo sapiens
  chr17:2290293-2290422
  hypo
ctgagcccccacggccggctttgccatgacagtagccgggggccccaggccggccgtgccgttgacttgctggtgcgagagggtgtgggcgatgtggctcactgccacgggctgcgggtacaagggcag

SEQ ID NO: 182315 - DNA, 394 bp, Homo sapiens
  chr17:2291778-2292172
  hypo
actaggcagtgacacgccctcgccccatctcatctccaggactcgcctccctcctggctgctggtctgcacctgctccccgaccccctaggcgactctccactgtgcccgcctgtgacgcttctcgacgaggctccatttacatgctgctccccatcaccctgcccactcccctccagactccctgggctgaacaacccccaagcctaggaacgtgccccctgtacttgggctaaaccgatccatgagaaatggctgttgcgtcccatgacccagctcccctccacactcagtctttcccgtgctccaacccgacacttcatcaatcccaccctttcaagtctcacagacctccctgctggcagcttttcgcccaggcacgtcatgaccaatgt

SEQ ID NO: 182316 - DNA, 30 bp, Homo sapiens; identical to SEQ ID NO: 91796
  chr17:2298222-2298252
  hypo

SEQ ID NO: 182317 - DNA, 51 bp, Homo sapiens; identical to SEQ ID NO: 53557
  chr17:2302238-2302289
  hypo

SEQ ID NO: 182318 - DNA, 30 bp, Homo sapiens; identical to SEQ ID NO: 91798
  chr17:2309070-2309100
  hypo

SEQ ID NO: 182319 - DNA, 30 bp, Homo sapiens; identical to SEQ ID NO: 91799
  chr17:2309695-2309725
  hypo

SEQ ID NO: 182320 - DNA, 30 bp, Homo sapiens; identical to SEQ ID NO: 29902
  chr17:2324846-2324876
  hypo

SEQ ID NO: 182321 - DNA, 203 bp, Homo sapiens; identical to SEQ ID NO: 29903
  chr17:2326290-2326493
  hypo

SEQ ID NO: 182322 - DNA, 40 bp, Homo sapiens; identical to SEQ ID NO: 29904
  chr17:2326809-2326849
  hypo

SEQ ID NO: 182323 - DNA, 19 bp, Homo sapiens
  chr17:2388074-2388093
  hypo
accgcgcctggtgaccacc

SEQ ID NO: 182324 - DNA, 121 bp, Homo sapiens; identical to SEQ ID NO: 29906
  chr17:2388545-2388666
  hypo

SEQ ID NO: 182325 - DNA, 30 bp, Homo sapiens
  chr17:2390176-2390206
  hypo
agtgggagtagggcgcggtactgaggtggg

SEQ ID NO: 182326 - DNA, 22 bp, Homo sapiens
  chr17:2495604-2495626
  hypo
tcagaaccccaaatctcgcttt

SEQ ID NO: 182327 - DNA, 30 bp, Homo sapiens
  chr17:2508911-2508941
  hypo
cgccccccttacttacgcttcaaatctgcc

SEQ ID NO: 182328 - DNA, 30 bp, Homo sapiens; identical to SEQ ID NO: 91806
  chr17:2515377-2515407
  hypo

SEQ ID NO: 182329 - DNA, 33 bp, Homo sapiens
  chr17:2529848-2529881
  hypo
cccccccccccccccccgaggcggagtcttgtt

SEQ ID NO: 182330 - DNA, 25 bp, Homo sapiens
  chr17:2538190-2538215
  hypo
ctcaagcctgtaatccgagcacttt

SEQ ID NO: 182331 - DNA, 18 bp, Homo sapiens
  chr17:2539753-2539771
  hypo
tgtttgtttttgagacgg

SEQ ID NO: 182332 - DNA, 78 bp, Homo sapiens
  chr17:2539950-2540028
  hypo
ccaaagtgctaggtttgcagacataagccaccacgcctggcctcagggctcatatttgaaacccgaaggtatgcattt

SEQ ID NO: 182333 - DNA, 30 bp, Homo sapiens; identical to SEQ ID NO: 91808
  chr17:2588049-2588079
  hypo

SEQ ID NO: 182334 - DNA, 30 bp, Homo sapiens
  chr17:2589728-2589758
  hypo
gcaaaaaaggaatgggccatgcgcagtggt

SEQ ID NO: 182335 - DNA, 40 bp, Homo sapiens
  chr17:2590519-2590559
  hypo
aggcaggctcaggttcgagaaccaccgagctaaatgattc

SEQ ID NO: 182336 - DNA, 204 bp, Homo sapiens; identical to SEQ ID NO: 91809
  chr17:2595623-2595827
  hypo

SEQ ID NO: 182337 - DNA, 30 bp, Homo sapiens; identical to SEQ ID NO: 91810
  chr17:2598506-2598536
  hypo

SEQ ID NO: 182338 - DNA, 236 bp, Homo sapiens; identical to SEQ ID NO: 91811
  chr17:2599037-2599273
  hypo

SEQ ID NO: 182339 - DNA, 30 bp, Homo sapiens; identical to SEQ ID NO: 91812
  chr17:2599808-2599838
  hypo

SEQ ID NO: 182340 - DNA, 30 bp, Homo sapiens; identical to SEQ ID NO: 91813
  chr17:2601964-2601994
  hypo

SEQ ID NO: 182341 - DNA, 86 bp, Homo sapiens; identical to SEQ ID NO: 91814
  chr17:2603724-2603810
  hypo

SEQ ID NO: 182342 - DNA, 30 bp, Homo sapiens
  chr17:2604938-2604968
  hypo
acagtggccgctcccggctccctggcagga

SEQ ID NO: 182343 - DNA, 30 bp, Homo sapiens
  chr17:2606833-2606863
  hypo
gagaaggccccaaccgccccggtgagaggc

SEQ ID NO: 182344 - DNA, 35 bp, Homo sapiens; identical to SEQ ID NO: 91815
  chr17:2616131-2616166
  hypo

SEQ ID NO: 182345 - DNA, 274 bp, Homo sapiens
  chr17:2616825-2617099
  hypo
tatagtgtgtgtatatatatagtgtgtatatatataagtgtatatataaaatatatatatttataatcaatatatataaaagtgtgtatatatgtgtgtatatatacacatacatacttatgtgtgcgtgtgtatatacgtatgtgtatacacacactcgttcctcttttgttacacaaatgtgcagaaaattgtacctgctattcttcactctgattttttttttacacgctttcagtaggtgttctcattccatttacgctggataatgttg

SEQ ID NO: 182346 - DNA, 30 bp, Homo sapiens; identical to SEQ ID NO: 91816
  chr17:2619563-2619593
  hypo

SEQ ID NO: 182347 - DNA, 31 bp, Homo sapiens; identical to SEQ ID NO: 91817
  chr17:2624047-2624078
  hypo

SEQ ID NO: 182348 - DNA, 222 bp, Homo sapiens; identical to SEQ ID NO: 53561
  chr17:2627361-2627583
  hypo

SEQ ID NO: 182349 - DNA, 538 bp, Homo sapiens; identical to SEQ ID NO: 53562
  chr17:2627798-2628336
  hypo

SEQ ID NO: 182350 - DNA, 26 bp, Homo sapiens
  chr17:2650697-2650723
  hypo
ataggacaagcatggcgataagtgaa

SEQ ID NO: 182351 - DNA, 19 bp, Homo sapiens
  chr17:2671310-2671329
  hypo
ccaccgtacgtggccaatt

SEQ ID NO: 182352 - DNA, 30 bp, Homo sapiens; identical to SEQ ID NO: 91821
  chr17:2682719-2682749
  hypo

SEQ ID NO: 182353 - DNA, 45 bp, Homo sapiens; identical to SEQ ID NO: 29912
  chr17:2684789-2684834
  hypo

SEQ ID NO: 182354 - DNA, 241 bp, Homo sapiens; identical to SEQ ID NO: 29913
  chr17:2684893-2685134
  hypo

SEQ ID NO: 182355 - DNA, 45 bp, Homo sapiens; identical to SEQ ID NO: 29914
  chr17:2685193-2685238
  hypo

SEQ ID NO: 182356 - DNA, 96 bp, Homo sapiens; identical to SEQ ID NO: 91825
  chr17:2708583-2708679
  hypo

SEQ ID NO: 182357 - DNA, 30 bp, Homo sapiens
  chr17:2749680-2749710
  hypo
gctttccgactttggcggtttgttttgttt

SEQ ID NO: 182358 - DNA, 1499 bp, Homo sapiens; identical to SEQ ID NO: 127908
  chr17:2756326-2757825
  hypo

SEQ ID NO: 182359 - DNA, 85 bp, Homo sapiens
  chr17:2767336-2767421
  hypo
actctgtccccctcaaaaaaaaaaaacagtggcggcgggagcccccggttcctcaccgtcttgtcccgtacgtagcagcatgcca

SEQ ID NO: 182360 - DNA, 30 bp, Homo sapiens
  chr17:2780668-2780698
  hypo
ttacagtccgtcctccgtaaggcagccaga

SEQ ID NO: 182361 - DNA, 102 bp, Homo sapiens
  chr17:2799188-2799290
  hypo
agcctgctgtgccctcgaatggtgtgatgtgtctcctgggcattgcgacactggtggtctctccgtcatgctggtcacgttcctctgcgtcctgcttctgtg

SEQ ID NO: 182362 - DNA, 181 bp, Homo sapiens
  chr17:2805372-2805553
  hypo
gaatccttcctcgcctcttctagcctctggcggggtcggcaagcctcagcatgcgttggcttgcagccgcatcactcctgtgtctgcctgagaacacggggcattctcactgtgtgtttcttcacattgttgccttcccttcttttttttttttttgagatggagtcttgctctgtcaccc

SEQ ID NO: 182363 - DNA, 30 bp, Homo sapiens
  chr17:2806141-2806171
  hypo
ctgcgcccttttgaccgggactcagggcct

SEQ ID NO: 182364 - DNA, 157 bp, Homo sapiens
  chr17:2811366-2811523
  hypo
gggattacagtcgtgagccaccacgcctggcccagagtcagcattttaccgtcattttccggtgatttgtatacacagggcagcttgagaagcactgctgtgggcctctgcacatgcgttcaggcagccgagagagagaaggcgacagcaagaggaa

SEQ ID NO: 182365 - DNA, 30 bp, Homo sapiens
  chr17:2812275-2812305
  hypo
aggtgtgagccactgcgccttgtcgagggg

SEQ ID NO: 182366 - DNA, 30 bp, Homo sapiens
  chr17:2812601-2812631
  hypo
ggccactgggctccgcggcctggcagttgc

SEQ ID NO: 182367 - DNA, 21 bp, Homo sapiens
  chr17:2816855-2816876
  hypo
tacaggcgtgagccaccacac

SEQ ID NO: 182368 - DNA, 30 bp, Homo sapiens
  chr17:2824316-2824346
  hypo
tgtgtgtgcccctcccgctggcttcttctc

SEQ ID NO: 182369 - DNA, 26 bp, Homo sapiens
  chr17:2824846-2824872
  hypo
gtcagcagggccgttaaagtgtccgc

SEQ ID NO: 182370 - DNA, 30 bp, Homo sapiens; identical to SEQ ID NO: 91827
  chr17:2825512-2825542
  hypo

SEQ ID NO: 182371 - DNA, 27 bp, Homo sapiens
  chr17:2830753-2830780
  hypo
tctttctcacaccgccgtctctcggat

SEQ ID NO: 182372 - DNA, 30 bp, Homo sapiens
  chr17:2831087-2831117
  hypo
cggcccaccgcatagcgggccttccctctg

SEQ ID NO: 182373 - DNA, 146 bp, Homo sapiens; identical to SEQ ID NO: 91829
  chr17:2868865-2869011
  hypo

SEQ ID NO: 182374 - DNA, 288 bp, Homo sapiens; identical to SEQ ID NO: 91830
  chr17:2908448-2908736
  hypo

SEQ ID NO: 182375 - DNA, 30 bp, Homo sapiens; identical to SEQ ID NO: 91831
  chr17:2909113-2909143
  hypo

SEQ ID NO: 182376 - DNA, 169 bp, Homo sapiens
  chr17:3374889-3375058
  hypo
aagaggctccagtccgagttgagacgctcttccaaaggcctctcctgacccgcccacggagtgggggcagtttggtatcaacgcacagtctttcccttctaggccctcctgccaacacgacacacaactttcgccctcagtttccctcgcctccgtcaaccgtcgtcca

SEQ ID NO: 182377 - DNA, 36 bp, Homo sapiens; identical to SEQ ID NO: 91833
  chr17:3375580-3375616
  hypo

SEQ ID NO: 182378 - DNA, 87 bp, Homo sapiens; identical to SEQ ID NO: 91834
  chr17:3474664-3474751
  hypo

SEQ ID NO: 182379 - DNA, 322 bp, Homo sapiens
  chr17:3486254-3486576
  hypo
aagattccagtatgcaaggagatttccttcactgctcagagctttaacagattggtttaattaaaaaactaccagtcatgatcctatcacttaagaggcctccactctgcccctgtaatcaaatactccgttccgtggagtggctggagtgtctactttcaagcttgcctgccttgggcctgtggagacgccctgagcaccctcccgccccgcggtgactgactgaagggctctcatcttcacctctgcgtctctcagctccccaagtagggctatgatgtgtctgatgaattaaaaagtgagtgagcgctgagggatcttc

SEQ ID NO: 182380 - DNA, 73 bp, Homo sapiens
  chr17:3500359-3500432
  hypo
gcactagcaggagtcgctgtggacgcccttcggcactcaaggaaaaaacgcttccagcgatgcaagcagctgc

SEQ ID NO: 182381 - DNA, 30 bp, Homo sapiens; identical to SEQ ID NO: 91837
  chr17:3525615-3525645
  hypo

SEQ ID NO: 182382 - DNA, 30 bp, Homo sapiens
  chr17:3527443-3527473
  hypo
cggccatcctgccacgtgaccaggtggcta

SEQ ID NO: 182383 - DNA, 30 bp, Homo sapiens; identical to SEQ ID NO: 91838
  chr17:3558793-3558823
  hypo

SEQ ID NO: 182384 - DNA, 30 bp, Homo sapiens; identical to SEQ ID NO: 91839
  chr17:3560591-3560621
  hypo

SEQ ID NO: 182385 - DNA, 122 bp, Homo sapiens; identical to SEQ ID NO: 91840
  chr17:3560846-3560968
  hypo

SEQ ID NO: 182386 - DNA, 30 bp, Homo sapiens
  chr17:3561295-3561325
  hypo
cagcgcggtggccagcgcgtgtcctggcct

SEQ ID NO: 182387 - DNA, 85 bp, Homo sapiens
  chr17:3561542-3561627
  hypo
tggggcagctcctgccggcgtgaggaaacaggacggaaagccacagggagcccgggagcccagcgggagcggggcggtggggagg

SEQ ID NO: 182388 - DNA, 251 bp, Homo sapiens
  chr17:3562848-3563099
  hypo
gccccagggatgtggaggagacggggaaggccgcatcggccccgcctctgctggagctgtgaggtgtggggggtgcggggcctttgcttgctgtacatgcagatgagacgcctacccccaggaccacccaaactgttccttggctgaggcctgtcatagcccaaaggtcaccgtgtccttggagccaaggccccagtgggaggaatgagaaccgcttttgtttggaggggcagtcacgaggcgcatgaggc

SEQ ID NO: 182389 - DNA, 30 bp, Homo sapiens
  chr17:3563578-3563608
  hypo
cttctccatcgtcttcgacgtcgtcttctt

SEQ ID NO: 182390 - DNA, 30 bp, Homo sapiens; identical to SEQ ID NO: 91843
  chr17:3566606-3566636
  hypo

SEQ ID NO: 182391 - DNA, 31 bp, Homo sapiens; identical to SEQ ID NO: 29919
  chr17:3576583-3576614
  hypo

SEQ ID NO: 182392 - DNA, 44 bp, Homo sapiens; identical to SEQ ID NO: 91845
  chr17:3577298-3577342
  hypo

SEQ ID NO: 182393 - DNA, 43 bp, Homo sapiens; identical to SEQ ID NO: 91846
  chr17:3585001-3585044
  hypo

SEQ ID NO: 182394 - DNA, 141 bp, Homo sapiens; identical to SEQ ID NO: 53573
  chr17:3599031-3599172
  hypo

SEQ ID NO: 182395 - DNA, 429 bp, Homo sapiens; identical to SEQ ID NO: 53574
  chr17:3599244-3599673
  hypo

SEQ ID NO: 182396 - DNA, 191 bp, Homo sapiens; identical to SEQ ID NO: 91849
  chr17:3653521-3653712
  hypo

SEQ ID NO: 182397 - DNA, 25 bp, Homo sapiens
  chr17:3658904-3658929
  hypo
gagccgagactgcaccgctgcactc

SEQ ID NO: 182398 - DNA, 100 bp, Homo sapiens; identical to SEQ ID NO: 91850
  chr17:3660154-3660254
  hypo

SEQ ID NO: 182399 - DNA, 68 bp, Homo sapiens; identical to SEQ ID NO: 29921
  chr17:3664935-3665003
  hypo

SEQ ID NO: 182400 - DNA, 159 bp, Homo sapiens; identical to SEQ ID NO: 91852
  chr17:3711311-3711470
  hypo

SEQ ID NO: 182401 - DNA, 30 bp, Homo sapiens; identical to SEQ ID NO: 91853
  chr17:3714243-3714273
  hypo

SEQ ID NO: 182402 - DNA, 610 bp, Homo sapiens; identical to SEQ ID NO: 29922
  chr17:3716184-3716794
  hypo

SEQ ID NO: 182403 - DNA, 74 bp, Homo sapiens; identical to SEQ ID NO: 29923
  chr17:3721568-3721642
  hypo

SEQ ID NO: 182404 - DNA, 30 bp, Homo sapiens
  chr17:3733453-3733483
  hypo
ttgcacgtgccctacggacctaggaactcc

SEQ ID NO: 182405 - DNA, 251 bp, Homo sapiens; identical to SEQ ID NO: 91856
  chr17:3741552-3741803
  hypo

SEQ ID NO: 182406 - DNA, 271 bp, Homo sapiens
  chr17:3755003-3755274
  hypo
ttcctgagaccacacacgctctgctgtgatcatgccactcatggttttcttttttctccaccgctcctgccctacggcctttgcaggttcttcaacttccacaacagtggcattctgccagagctcaatcctgggccccttctcactccctcgactagctcatcacacgcatggcttccaactccacggccgtccacacgctgagggcccccgcgtctccatttccagttctcgcctctccctcgagctccagatgcgcatgtccagctgc

SEQ ID NO: 182407 - DNA, 30 bp, Homo sapiens
  chr17:3765188-3765218
  hypo
ccatgccaaccagccgggtggcatttctga

SEQ ID NO: 182408 - DNA, 30 bp, Homo sapiens; identical to SEQ ID NO: 29924
  chr17:3769713-3769743
  hypo

SEQ ID NO: 182409 - DNA, 156 bp, Homo sapiens; identical to SEQ ID NO: 53575
  chr17:3778890-3779046
  hypo

SEQ ID NO: 182410 - DNA, 31 bp, Homo sapiens
  chr17:3792165-3792196
  hypo
ggagggaatatgtgtgcgcaggctgtggacc

SEQ ID NO: 182411 - DNA, 172 bp, Homo sapiens
  chr17:3793344-3793516
  hypo
aacagaagggaaagccgcagaggtggcggccacccaggccagacacagaaggtggtcctcccatgcctgggccgcctcactggagctgtgtttatgatcctggcgagtatctggatggccctggcaacgggtgccctccgcagctcccgcccccacccgggatgactcagtc

SEQ ID NO: 182412 - DNA, 30 bp, Homo sapiens; identical to SEQ ID NO: 91861
  chr17:3831294-3831324
  hypo

SEQ ID NO: 182413 - DNA, 30 bp, Homo sapiens; identical to SEQ ID NO: 91862
  chr17:3833858-3833888
  hypo

SEQ ID NO: 182414 - DNA, 176 bp, Homo sapiens; identical to SEQ ID NO: 91863
  chr17:3844262-3844438
  hypo

SEQ ID NO: 182415 - DNA, 136 bp, Homo sapiens
  chr17:3844805-3844941
  hypo
gccaggcagcgcagcgtgtctgagcctgagccccaatcccggatctttgccaggatctgctccctggaggtgggggtcaggggtgctgtgcggctccccacgcggactgagctacagcgctcgatcacactctcag

SEQ ID NO: 182416 - DNA, 371 bp, Homo sapiens
  chr17:3850754-3851125
  hypo
agggtctccacggacggcaggcttcgcacgatggcgttcttgcgtgccatgcgccgcgtgcccagtgccaggcatgtagtgatgacagccgggaggccctcggggatggccgccaccgccagggccacggcgatcttgaagtagtagacagcgccacgcagccaggagccaccgtgggccgggtcggcgaagtggccgatgttgatgacccacacggccacgcagatcacagagatggcgtgggacagctgccgtccaaactcgtccagcttgcgctgcagcggcgtccgctcgggctcgactgccgccatctggctccggatcttgcccagctccgtgtgcaggccggtggccacggccacacccaccgc

SEQ ID NO: 182417 - DNA, 157 bp, Homo sapiens
  chr17:3860423-3860580
  hypo
gcagctggtggtgtgcgccagacaccctgctaactccttgcgtgccttattctcatgatccgcaaacaagctgggaaggaggatgccattgttatgcccattttacagagtacacaacagagaggttgagtgactagttcaccgtcacacagcgggg

SEQ ID NO: 182418 - DNA, 668 bp, Homo sapiens; identical to SEQ ID NO: 127920
  chr17:3866999-3867667
  hypo

SEQ ID NO: 182419 - DNA, 230 bp, Homo sapiens; identical to SEQ ID NO: 127921
  chr17:3867878-3868108
  hypo

SEQ ID NO: 182420 - DNA, 92 bp, Homo sapiens; identical to SEQ ID NO: 29928
  chr17:3884834-3884926
  hypo

SEQ ID NO: 182421 - DNA, 30 bp, Homo sapiens; identical to SEQ ID NO: 91869
  chr17:3885531-3885561
  hypo

SEQ ID NO: 182422 - DNA, 31 bp, Homo sapiens; identical to SEQ ID NO: 29929
  chr17:3904902-3904933
  hypo

SEQ ID NO: 182423 - DNA, 30 bp, Homo sapiens; identical to SEQ ID NO: 29930
  chr17:3912355-3912385
  hypo

SEQ ID NO: 182424 - DNA, 29 bp, Homo sapiens
  chr17:3921576-3921605
  hypo
ttttttttagagatgacgtgttggagcta

SEQ ID NO: 182425 - DNA, 28 bp, Homo sapiens
  chr17:3921664-3921692
  hypo
tccctagtagctgcgattacaggctcat

SEQ ID NO: 182426 - DNA, 559 bp, Homo sapiens; identical to SEQ ID NO: 91874
  chr17:3980236-3980795
  hypo

SEQ ID NO: 182427 - DNA, 31 bp, Homo sapiens; identical to SEQ ID NO: 91875
  chr17:3982361-3982392
  hypo

SEQ ID NO: 182428 - DNA, 116 bp, Homo sapiens; identical to SEQ ID NO: 91876
  chr17:3985687-3985803
  hypo

SEQ ID NO: 182429 - DNA, 32 bp, Homo sapiens; identical to SEQ ID NO: 29934
  chr17:4039290-4039322
  hypo

SEQ ID NO: 182430 - DNA, 32 bp, Homo sapiens; identical to SEQ ID NO: 29935
  chr17:4039621-4039653
  hypo

SEQ ID NO: 182431 - DNA, 30 bp, Homo sapiens
  chr17:4039937-4039967
  hypo
ggctaattacacacccgtccaggttgctat

SEQ ID NO: 182432 - DNA, 105 bp, Homo sapiens
  chr17:4048007-4048112
  hypo
gggggttaaaggatgcgatttgcctgaaaccctcacacctgaatactgacagaatatggactcggaccaccagtctagtgctttttttttaaagatggaatctcg

SEQ ID NO: 182433 - DNA, 346 bp, Homo sapiens; identical to SEQ ID NO: 91879
  chr17:4048746-4049092
  hypo

SEQ ID NO: 182434 - DNA, 30 bp, Homo sapiens
  chr17:4063582-4063612
  hypo
ataccccgatatccacgactcggctctgtg

SEQ ID NO: 182435 - DNA, 32 bp, Homo sapiens
  chr17:4063864-4063896
  hypo
agcgtgtgggaagttcgtgcagagttgtttct

SEQ ID NO: 182436 - DNA, 289 bp, Homo sapiens; identical to SEQ ID NO: 91880
  chr17:4074111-4074400
  hypo

SEQ ID NO: 182437 - DNA, 86 bp, Homo sapiens; identical to SEQ ID NO: 29936
  chr17:4076473-4076559
  hypo

SEQ ID NO: 182438 - DNA, 308 bp, Homo sapiens
  chr17:4079168-4079476
  hypo
ggacactggaagacccgctgtttctagtgtttctgggcgatcctatcatctgtcatgccgggccccaggaaggcggggtccttggtcagggaccgtaacctcctccagccctacagaggcataaagactgatgaacacgaggccgattccctacgactttgggacccagctccgcctccttggctgcttcccccacatccaatctgttcctggcaccatcatacccaccgctccttagccctcagttcacactcactgccacggcctccgctcggtctcgtcactggtgagcccgccccacacctgtg

SEQ ID NO: 182439 - DNA, 30 bp, Homo sapiens
  chr17:4089121-4089151
  hypo
aaatgggagagccgcgcagcccccgcccgg

SEQ ID NO: 182440 - DNA, 42 bp, Homo sapiens
  chr17:4090910-4090952
  hypo
gagaaggaacaacagcgggtagacaatgtgggcccaagggag

SEQ ID NO: 182441 - DNA, 30 bp, Homo sapiens; identical to SEQ ID NO: 91882
  chr17:4098163-4098193
  hypo

SEQ ID NO: 182442 - DNA, 30 bp, Homo sapiens
  chr17:4133059-4133089
  hypo
tcctcatgacatggccgctaacgttccccc

SEQ ID NO: 182443 - DNA, 145 bp, Homo sapiens
  chr17:4137078-4137223
  hypo
gcagagtacgggctccgtatggcagggactgtgttataatcatctcagtgttcctggcactgcgcatggaaaacagtaccttctcaactgacaaaccttctgaacaaagatataattcacacaatcacttcggcaagtccagtca

SEQ ID NO: 182444 - DNA, 241 bp, Homo sapiens
  chr17:4144868-4145109
  hypo
ctgagcttctaacagaagctgtatgactccagagttcaacctcaaccatcatgatgcactctccaactagttccaagactgttttgctttgatcatctcaagagaaacggacctttgccctctgaattcctagacaggtaagtcaattcctgcttgattagcaatgctatcaccatgactcccgcactctttgctgaagataagcagtgaacgagagacacaaatcttgcctcgggcccgg

SEQ ID NO: 182445 - DNA, 207 bp, Homo sapiens
  chr17:4151785-4151992
  hypo
gtcagagaagtacgtgtaaagtcattaggataggttaaatcactcggaacagtgtctggtttagtaaggcttaccgctgctgctactcctctgcctacttattcttcatcaagtgaccagttttcagccgtggttttttctttgtccccttccaactttcatttgaaaagcaagcctagaaatttaattagccgggcatggtggcgc

SEQ ID NO: 182446 - DNA, 46 bp, Homo sapiens; identical to SEQ ID NO: 29937
  chr17:4161525-4161571
  hypo

SEQ ID NO: 182447 - DNA, 17 bp, Homo sapiens
  chr17:4170522-4170539
  hypo
agcccttgtcttttgag

SEQ ID NO: 182448 - DNA, 30 bp, Homo sapiens; identical to SEQ ID NO: 29938
  chr17:4170806-4170836
  hypo

SEQ ID NO: 182449 - DNA, 142 bp, Homo sapiens; identical to SEQ ID NO: 91887
  chr17:4215640-4215782
  hypo

SEQ ID NO: 182450 - DNA, 143 bp, Homo sapiens; identical to SEQ ID NO: 29940
  chr17:4236550-4236693
  hypo

SEQ ID NO: 182451 - DNA, 121 bp, Homo sapiens; identical to SEQ ID NO: 91889
  chr17:4250032-4250153
  hypo

SEQ ID NO: 182452 - DNA, 25 bp, Homo sapiens
  chr17:4256508-4256533
  hypo
tctcgaaaacaacaacaacaacaac

SEQ ID NO: 182453 - DNA, 37 bp, Homo sapiens; identical to SEQ ID NO: 29942
  chr17:4273439-4273476
  hypo

SEQ ID NO: 182454 - DNA, 38 bp, Homo sapiens; identical to SEQ ID NO: 91892
  chr17:4289152-4289190
  hypo

SEQ ID NO: 182455 - DNA, 31 bp, Homo sapiens; identical to SEQ ID NO: 91893
  chr17:4350841-4350872
  hypo

SEQ ID NO: 182456 - DNA, 378 bp, Homo sapiens; identical to SEQ ID NO: 29943
  chr17:4392107-4392485
  hypo

SEQ ID NO: 182457 - DNA, 30 bp, Homo sapiens
  chr17:4434016-4434046
  hypo
ttcaccaagaacacgcgtacgctcatgctg

SEQ ID NO: 182458 - DNA, 289 bp, Homo sapiens
  chr17:4436330-4436619
  hypo
tgggcatgtggatcccgctctacctgcaccgcgcccaagttgtgcagaagacagcagagacgtgcaacagcccgccctgtggggccaaggacaggtggggccccgcggggtgggcccagggctggtgagggacctcggacaggagagcccctcagccttagccctgagccgcctcaactcgtgcgccaccatcctctgtccccacagcctcatctttggggccatcacctgctttacgggatttctgggcgtggtcacgggggcaggagccacgcgctggtgccgcctg

SEQ ID NO: 182459 - DNA, 257 bp, Homo sapiens
  chr17:4446256-4446513
  hypo
tcctgtgtctcatgcacgcagccctcagcagtgttgcccttcaagacccggagcaggtagagagaggcgttgaagtggtagagggcggtgggggagtcgggctggcggccagcctgctgcaccaaccgctccacctgggcgtgcagggcccctgcgcgctcacccaagtcgtggcagtagcgccgggcacggcacaggtggtgcctgtgggtggtgaggacgagagctggtcagaacattctcggtccaccctgctc

SEQ ID NO: 182460 - DNA, 30 bp, Homo sapiens
  chr17:4448516-4448546
  hypo
ctccccaccgcccccgcccggcccatgctg

SEQ ID NO: 182461 - DNA, 30 bp, Homo sapiens; identical to SEQ ID NO: 29944
  chr17:4456054-4456084
  hypo

SEQ ID NO: 182462 - DNA, 88 bp, Homo sapiens; identical to SEQ ID NO: 91897
  chr17:4461985-4462073
  hypo

SEQ ID NO: 182463 - DNA, 562 bp, Homo sapiens; identical to SEQ ID NO: 29946
  chr17:4500075-4500637
  hypo

SEQ ID NO: 182464 - DNA, 19 bp, Homo sapiens
  chr17:4519881-4519900
  hypo
acctggcctccatcagtat

SEQ ID NO: 182465 - DNA, 30 bp, Homo sapiens; identical to SEQ ID NO: 91899
  chr17:4608971-4609001
  hypo

SEQ ID NO: 182466 - DNA, 31 bp, Homo sapiens; identical to SEQ ID NO: 10922
  chr17:4642753-4642784
  hypo

SEQ ID NO: 182467 - DNA, 123 bp, Homo sapiens; identical to SEQ ID NO: 91901
  chr17:4643850-4643973
  hypo

SEQ ID NO: 182468 - DNA, 43 bp, Homo sapiens; identical to SEQ ID NO: 53589
  chr17:4647511-4647554
  hypo

SEQ ID NO: 182469 - DNA, 37 bp, Homo sapiens
  chr17:4649704-4649741
  hypo
tcctgacctcaggtgatccgcccgcatcggaaaagga

SEQ ID NO: 182470 - DNA, 26 bp, Homo sapiens
  chr17:4685354-4685380
  hypo
gacaggtgcagaaacagagtccgaat

SEQ ID NO: 182471 - DNA, 265 bp, Homo sapiens; identical to SEQ ID NO: 91904
  chr17:4685679-4685944
  hypo

SEQ ID NO: 182472 - DNA, 31 bp, Homo sapiens; identical to SEQ ID NO: 29948
  chr17:4713424-4713455
  hypo

SEQ ID NO: 182473 - DNA, 24 bp, Homo sapiens
  chr17:4758211-4758235
  hypo
agagtccaggctgggcgcggtggc

SEQ ID NO: 182474 - DNA, 30 bp, Homo sapiens; identical to SEQ ID NO: 29949
  chr17:4764489-4764519
  hypo

SEQ ID NO: 182475 - DNA, 26 bp, Homo sapiens
  chr17:4769466-4769492
  hypo
ttagaaagtttttgggccagacgcgg

SEQ ID NO: 182476 - DNA, 542 bp, Homo sapiens; identical to SEQ ID NO: 91909
  chr17:4795535-4796077
  hypo

SEQ ID NO: 182477 - DNA, 30 bp, Homo sapiens
  chr17:4796323-4796353
  hypo
aagcccgacgaccaccgctcacggccaggc

SEQ ID NO: 182478 - DNA, 30 bp, Homo sapiens; identical to SEQ ID NO: 29951
  chr17:4799588-4799618
  hypo

SEQ ID NO: 182479 - DNA, 30 bp, Homo sapiens; identical to SEQ ID NO: 91911
  chr17:4799817-4799847
  hypo

SEQ ID NO: 182480 - DNA, 518 bp, Homo sapiens; identical to SEQ ID NO: 127954
  chr17:4853392-4853910
  hypo

SEQ ID NO: 182481 - DNA, 30 bp, Homo sapiens; identical to SEQ ID NO: 29953
  chr17:4863100-4863130
  hypo

SEQ ID NO: 182482 - DNA, 29 bp, Homo sapiens
  chr17:4869516-4869545
  hypo
tccgccgcggcctcccaaagtggtggtat

SEQ ID NO: 182483 - DNA, 31 bp, Homo sapiens; identical to SEQ ID NO: 91915
  chr17:4880336-4880367
  hypo

SEQ ID NO: 182484 - DNA, 359 bp, Homo sapiens; identical to SEQ ID NO: 53598
  chr17:4890352-4890711
  hypo

SEQ ID NO: 182485 - DNA, 31 bp, Homo sapiens; identical to SEQ ID NO: 10926
  chr17:4900808-4900839
  hypo

SEQ ID NO: 182486 - DNA, 119 bp, Homo sapiens; identical to SEQ ID NO: 10927
  chr17:4901560-4901679
  hypo

SEQ ID NO: 182487 - DNA, 158 bp, Homo sapiens; identical to SEQ ID NO: 91919
  chr17:4916075-4916233
  hypo

SEQ ID NO: 182488 - DNA, 30 bp, Homo sapiens; identical to SEQ ID NO: 91920
  chr17:4925731-4925761
  hypo

SEQ ID NO: 182489 - DNA, 32 bp, Homo sapiens; identical to SEQ ID NO: 91921
  chr17:4928166-4928198
  hypo

SEQ ID NO: 182490 - DNA, 282 bp, Homo sapiens; identical to SEQ ID NO: 127961
  chr17:4938732-4939014
  hypo

SEQ ID NO: 182491 - DNA, 31 bp, Homo sapiens; identical to SEQ ID NO: 91922
  chr17:4950114-4950145
  hypo

SEQ ID NO: 182492 - DNA, 30 bp, Homo sapiens
  chr17:4958978-4959008
  hypo
aagcctagagaggatcggcctttctaggac

SEQ ID NO: 182493 - DNA, 178 bp, Homo sapiens; identical to SEQ ID NO: 127962
  chr17:4981370-4981548
  hypo

SEQ ID NO: 182494 - DNA, 89 bp, Homo sapiens; identical to SEQ ID NO: 10929
  chr17:4981951-4982040
  hypo

SEQ ID NO: 182495 - DNA, 534 bp, Homo sapiens; identical to SEQ ID NO: 53604
  chr17:5000401-5000935
  hypo

SEQ ID NO: 182496 - DNA, 31 bp, Homo sapiens; identical to SEQ ID NO: 91926
  chr17:5033401-5033432
  hypo

SEQ ID NO: 182497 - DNA, 31 bp, Homo sapiens; identical to SEQ ID NO: 91927
  chr17:5033760-5033791
  hypo

SEQ ID NO: 182498 - DNA, 31 bp, Homo sapiens; identical to SEQ ID NO: 91928
  chr17:5080633-5080664
  hypo

SEQ ID NO: 182499 - DNA, 31 bp, Homo sapiens; identical to SEQ ID NO: 91929
  chr17:5131038-5131069
  hypo

SEQ ID NO: 182500 - DNA, 36 bp, Homo sapiens; identical to SEQ ID NO: 91930
  chr17:5168547-5168583
  hypo

SEQ ID NO: 182501 - DNA, 30 bp, Homo sapiens; identical to SEQ ID NO: 91931
  chr17:5209342-5209372
  hypo

SEQ ID NO: 182502 - DNA, 30 bp, Homo sapiens; identical to SEQ ID NO: 91932
  chr17:5209628-5209658
  hypo

SEQ ID NO: 182503 - DNA, 248 bp, Homo sapiens; identical to SEQ ID NO: 29960
  chr17:5269053-5269301
  hypo

SEQ ID NO: 182504 - DNA, 18 bp, Homo sapiens
  chr17:5317809-5317827
  hypo
aggccctgaagaaatttc

SEQ ID NO: 182505 - DNA, 30 bp, Homo sapiens; identical to SEQ ID NO: 29962
  chr17:5350269-5350299
  hypo

SEQ ID NO: 182506 - DNA, 165 bp, Homo sapiens
  chr17:5392213-5392378
  hypo
agttctttggcttcacgccacaaacgtgcatgcttcggatctacattgcatttcaagactacctatttgaagtgatgcaggccgttgaacaggttattctgaagaagctggatggcatcccagactgtgacattagcccagtgcagattcgcaaatgcacagaga

SEQ ID NO: 182507 - DNA, 49 bp, Homo sapiens; identical to SEQ ID NO: 29964
  chr17:5404270-5404319
  hypo

SEQ ID NO: 182508 - DNA, 172 bp, Homo sapiens; identical to SEQ ID NO: 91938
  chr17:5405103-5405275
  hypo

SEQ ID NO: 182509 - DNA, 164 bp, Homo sapiens; identical to SEQ ID NO: 91939
  chr17:5465215-5465379
  hypo

SEQ ID NO: 182510 - DNA, 30 bp, Homo sapiens; identical to SEQ ID NO: 29966
  chr17:5984243-5984273
  hypo

SEQ ID NO: 182511 - DNA, 31 bp, Homo sapiens; identical to SEQ ID NO: 91941
  chr17:6011472-6011503
  hypo

SEQ ID NO: 182512 - DNA, 500 bp, Homo sapiens; identical to SEQ ID NO: 91942
  chr17:6023532-6024032
  hypo

SEQ ID NO: 182513 - DNA, 27 bp, Homo sapiens
  chr17:6292600-6292627
  hypo
tttttttttgagatggagtctcgctct

SEQ ID NO: 182514 - DNA, 30 bp, Homo sapiens
  chr17:6307327-6307357
  hypo
cttgatatataccaccgtactgtattcgtt

SEQ ID NO: 182515 - DNA, 30 bp, Homo sapiens; identical to SEQ ID NO: 91943
  chr17:6339069-6339099
  hypo

SEQ ID NO: 182516 - DNA, 30 bp, Homo sapiens; identical to SEQ ID NO: 91944
  chr17:6377818-6377848
  hypo

SEQ ID NO: 182517 - DNA, 139 bp, Homo sapiens
  chr17:6419896-6420035
  hypo
aaacaaagaaagaaagaaatacttgaagaaatcatgaaaagaaggcttcacagtagtgaaagagcacagccaggtatggcatgaccaacaaacacctccacaacaaaaacctactcagaaacgtcgcttgaaatttcag

SEQ ID NO: 182518 - DNA, 175 bp, Homo sapiens; identical to SEQ ID NO: 91946
  chr17:6456917-6457092
  hypo

SEQ ID NO: 182519 - DNA, 603 bp, Homo sapiens; identical to SEQ ID NO: 53620
  chr17:6459171-6459774
  hypo

SEQ ID NO: 182520 - DNA, 43 bp, Homo sapiens; identical to SEQ ID NO: 29968
  chr17:6470125-6470168
  hypo

SEQ ID NO: 182521 - DNA, 719 bp, Homo sapiens
  chr17:6474306-6475025
  hypo
tgatgcatgccagtccgaggccccagcccggaatggggagcccactacgtgcccctccagaggctacaccacgatcaacatggagagaaagagcccaggcccccaggccctgcccagattgtcctcgcaaagacccagccaccctgttggccccgcgtctgtttcaaatcccatgcctgggatttctttttgacattaaagtaaatgttggccagagagccacctacaagggtgacgaaggctgccggcttctcattggagggctgggaggagactctgcaggtctctgaggactgccaagactccttcatcacactgagcagatataaaatccattaccaagggctaataaatgcggggaggccggcagaggacatgcccgccttgctgggagggcacacactcaggccaagaacagcaggctctccaggcacagccactcgccctccgatatttgcccctcctgcacgcacctctctcggagtcccattgttctccattcaatcatttgggcaccaattctgtttctctttgactataaaagcccatgcctgcagacctctctacacatttattgtgcggctggaatttatgacggattggatttcagaggagggattgattaaatacagatggagcacttgacaagggcctgggggtcccggtagactcccccatttagaaacagaataaagattagaaagcgtgagcaagggcaa

SEQ ID NO: 182522 - DNA, 30 bp, Homo sapiens; identical to SEQ ID NO: 91949
  chr17:6482593-6482623
  hypo

SEQ ID NO: 182523 - DNA, 804 bp, Homo sapiens; identical to SEQ ID NO: 127991
  chr17:6616335-6617139
  hypo

SEQ ID NO: 182524 - DNA, 38 bp, Homo sapiens; identical to SEQ ID NO: 91951
  chr17:6755546-6755584
  hypo

SEQ ID NO: 182525 - DNA, 38 bp, Homo sapiens; identical to SEQ ID NO: 91952
  chr17:6755823-6755861
  hypo

SEQ ID NO: 182526 - DNA, 24 bp, Homo sapiens
  chr17:6775506-6775530
  hypo
tgcgcaatgggactgttttccttg

SEQ ID NO: 182527 - DNA, 21 bp, Homo sapiens
  chr17:6811262-6811283
  hypo
agccaccgcccctggcctcaa

SEQ ID NO: 182528 - DNA, 93 bp, Homo sapiens
  chr17:6899901-6899994
  hypo
agttaatgggacccacgtgggcgatgctgctccagcatcagctccaggcgctgcgggccctcgtcctccacccgactccgggcgtctgagacc

SEQ ID NO: 182529 - DNA, 19 bp, Homo sapiens
  chr17:6943486-6943505
  hypo
tcttttttctttttcccga

SEQ ID NO: 182530 - DNA, 30 bp, Homo sapiens
  chr17:6960126-6960156
  hypo
tttttttttttgagacggagtctcgctctg

SEQ ID NO: 182531 - DNA, 30 bp, Homo sapiens
  chr17:6960395-6960425
  hypo
aggcgtgagccaccgcgcccggcctatttg

SEQ ID NO: 182532 - DNA, 30 bp, Homo sapiens; identical to SEQ ID NO: 91956
  chr17:7044097-7044127
  hypo

SEQ ID NO: 182533 - DNA, 31 bp, Homo sapiens; identical to SEQ ID NO: 91957
  chr17:7044663-7044694
  hypo

SEQ ID NO: 182534 - DNA, 40 bp, Homo sapiens; identical to SEQ ID NO: 91958
  chr17:7048538-7048578
  hypo

SEQ ID NO: 182535 - DNA, 160 bp, Homo sapiens; identical to SEQ ID NO: 91959
  chr17:7076076-7076236
  hypo

SEQ ID NO: 182536 - DNA, 65 bp, Homo sapiens; identical to SEQ ID NO: 29971
  chr17:7077089-7077154
  hypo

SEQ ID NO: 182537 - DNA, 30 bp, Homo sapiens; identical to SEQ ID NO: 91961
  chr17:7100206-7100236
  hypo

SEQ ID NO: 182538 - DNA, 31 bp, Homo sapiens; identical to SEQ ID NO: 29972
  chr17:7112808-7112839
  hypo

SEQ ID NO: 182539 - DNA, 35 bp, Homo sapiens; identical to SEQ ID NO: 91963
  chr17:7116700-7116735
  hypo

SEQ ID NO: 182540 - DNA, 212 bp, Homo sapiens; identical to SEQ ID NO: 91964
  chr17:7121866-7122078
  hypo

SEQ ID NO: 182541 - DNA, 30 bp, Homo sapiens; identical to SEQ ID NO: 91965
  chr17:7128542-7128572
  hypo

SEQ ID NO: 182542 - DNA, 30 bp, Homo sapiens; identical to SEQ ID NO: 91966
  chr17:7129140-7129170
  hypo

SEQ ID NO: 182543 - DNA, 30 bp, Homo sapiens
  chr17:7132176-7132206
  hypo
aggctcgagccaccacgcccggctgtctta

SEQ ID NO: 182544 - DNA, 30 bp, Homo sapiens
  chr17:7132474-7132504
  hypo
ctcaatgcgcccgtcggccgccacagcccc

SEQ ID NO: 182545 - DNA, 30 bp, Homo sapiens
  chr17:7132947-7132977
  hypo
ggcgcttaaggaggcgggaggcactgctct

SEQ ID NO: 182546 - DNA, 38 bp, Homo sapiens; identical to SEQ ID NO: 29973
  chr17:7136108-7136146
  hypo

SEQ ID NO: 182547 - DNA, 190 bp, Homo sapiens; identical to SEQ ID NO: 53640
  chr17:7146324-7146514
  hypo

SEQ ID NO: 182548 - DNA, 15 bp, Homo sapiens
  chr17:7146549-7146564
  hypo
cgaagcccggtttct

SEQ ID NO: 182549 - DNA, 109 bp, Homo sapiens; identical to SEQ ID NO: 128014
  chr17:7146587-7146696
  hypo

SEQ ID NO: 182550 - DNA, 30 bp, Homo sapiens
  chr17:7158550-7158580
  hypo
aagggcactcttggccgggcgcggtggctc

SEQ ID NO: 182551 - DNA, 73 bp, Homo sapiens
  chr17:7187871-7187944
  hypo
aagctggagcgtgagcggccactgtccctgctccagctcctgggcagccgtacccaccggcagcccctgatca

SEQ ID NO: 182552 - DNA, 115 bp, Homo sapiens
  chr17:7188330-7188445
  hypo
ggttgccctcacccacgcggcccctcctacttcccgtgcccaaaaggctggggtcaagctccgactctccccgcaggtgttgttggtggagcgggcggggcgccggacgctccat

SEQ ID NO: 182553 - DNA, 57 bp, Homo sapiens; identical to SEQ ID NO: 91972
  chr17:7192898-7192955
  hypo

SEQ ID NO: 182554 - DNA, 30 bp, Homo sapiens
  chr17:7193583-7193613
  hypo
gctggttgggaggccgggggcctcgcacaa

SEQ ID NO: 182555 - DNA, 294 bp, Homo sapiens; identical to SEQ ID NO: 128022
  chr17:7199729-7200023
  hypo

SEQ ID NO: 182556 - DNA, 573 bp, Homo sapiens; identical to SEQ ID NO: 91974
  chr17:7224752-7225325
  hypo

SEQ ID NO: 182557 - DNA, 303 bp, Homo sapiens
  chr17:7227166-7227469
  hypo
tgcgacagttgtggcggagggcggtgcggcccccgttagtgatgactgcgttactgccgtgcagctgatggaagcgcaggtcagagcccccggcccctgaggacggagagcttggagacacctggttgttcccctcagggagtggttcaggaactggagccacctctgtaaaagtggacatcacccatcaggtctctaggtgtctctcagacctcccaaggccaccctaacccccagccccagcccagcccggccctcacccacgtcgtccacaatggtggcctgggccgcctggccatagag

SEQ ID NO: 182558 - DNA, 30 bp, Homo sapiens
  chr17:7229593-7229623
  hypo
attcgcagtactcccggcgggtgcccttgc

SEQ ID NO: 182559 - DNA, 30 bp, Homo sapiens
  chr17:7230219-7230249
  hypo
aggccttcccctgccggtggggagctcagg

SEQ ID NO: 182560 - DNA, 1358 bp, Homo sapiens; identical to SEQ ID NO: 53652
  chr17:7254484-7255842
  hypo

SEQ ID NO: 182561 - DNA, 171 bp, Homo sapiens
  chr17:7285129-7285300
  hypo
acctttgtgtcttagccgtgtggggcagtgtatctaggtgtttggaggcagtgaactgccatgtcccatggatgtgacacgtatgtacaaggaacatctcatggaaggacacagatgagcctgggcgttttgtggccgcatgctgaaatgtctcagcgttaagacgacata

SEQ ID NO: 182562 - DNA, 52 bp, Homo sapiens; identical to SEQ ID NO: 91977
  chr17:7292300-7292352
  hypo

SEQ ID NO: 182563 - DNA, 30 bp, Homo sapiens; identical to SEQ ID NO: 91978
  chr17:7296441-7296471
  hypo

SEQ ID NO: 182564 - DNA, 31 bp, Homo sapiens; identical to SEQ ID NO: 10948
  chr17:7307051-7307082
  hypo

SEQ ID NO: 182565 - DNA, 30 bp, Homo sapiens
  chr17:7314124-7314154
  hypo
tgactcaggcgcgcgcgcgcacacacacac

SEQ ID NO: 182566 - DNA, 44 bp, Homo sapiens; identical to SEQ ID NO: 91980
  chr17:7318436-7318480
  hypo

SEQ ID NO: 182567 - DNA, 34 bp, Homo sapiens; identical to SEQ ID NO: 91981
  chr17:7318915-7318949
  hypo

SEQ ID NO: 182568 - DNA, 324 bp, Homo sapiens; identical to SEQ ID NO: 91982
  chr17:7320350-7320674
  hypo

SEQ ID NO: 182569 - DNA, 31 bp, Homo sapiens; identical to SEQ ID NO: 91983
  chr17:7329116-7329147
  hypo

SEQ ID NO: 182570 - DNA, 30 bp, Homo sapiens; identical to SEQ ID NO: 29981
  chr17:7330128-7330158
  hypo

SEQ ID NO: 182571 - DNA, 30 bp, Homo sapiens; identical to SEQ ID NO: 91985
  chr17:7330643-7330673
  hypo

SEQ ID NO: 182572 - DNA, 630 bp, Homo sapiens; identical to SEQ ID NO: 128037
  chr17:7340251-7340881
  hypo

SEQ ID NO: 182573 - DNA, 161 bp, Homo sapiens; identical to SEQ ID NO: 91987
  chr17:7367403-7367564
  hypo

SEQ ID NO: 182574 - DNA, 525 bp, Homo sapiens; identical to SEQ ID NO: 91988
  chr17:7368874-7369399
  hypo

SEQ ID NO: 182575 - DNA, 30 bp, Homo sapiens
  chr17:7371993-7372023
  hypo
gtccttccgtatgccgtgggccacgtgtct

SEQ ID NO: 182576 - DNA, 36 bp, Homo sapiens
  chr17:7384626-7384662
  hypo
taacaagagtggaaacttcgtcgcaaacaaaaaaag

SEQ ID NO: 182577 - DNA, 285 bp, Homo sapiens; identical to SEQ ID NO: 91989
  chr17:7419622-7419907
  hypo

SEQ ID NO: 182578 - DNA, 19 bp, Homo sapiens
  chr17:7439262-7439281
  hypo
ccaccgcgccgggtcataa

SEQ ID NO: 182579 - DNA, 254 bp, Homo sapiens
  chr17:7460246-7460500
  hypo
cgcagtaagagagtggcgaagggtttgccaggagagtgggggacaagctacagggctgggagggtgagttggggtttgggtgggatgggatgcctgcgtcgctgaggaaattggaaattgaggcgagggcaggcagaggcctggactcggcctgttgtccccaccccaggtgcactttgatgaggggaaggctgtctacctgaagctggacttgctggtggatggtgtgctggccctgcgctgcctggaggaat

SEQ ID NO: 182580 - DNA, 65 bp, Homo sapiens
  chr17:7466806-7466871
  hypo
ctcaaaaagcacctcgctgacattccactggaagctttgggggcgccaccggggccggcggcggg

SEQ ID NO: 182581 - DNA, 30 bp, Homo sapiens; identical to SEQ ID NO: 91992
  chr17:7468139-7468169
  hypo

SEQ ID NO: 182582 - DNA, 18 bp, Homo sapiens
  chr17:7471630-7471648
  hypo
aggggccgggtgcggcgg

SEQ ID NO: 182583 - DNA, 102 bp, Homo sapiens
  chr17:7480062-7480164
  hypo
ttccagtctttcagcgtaagccagagtcattcccaaggatgctggtttctctctgggggaagagctgctctgtgatggagcccatgcgtgtcatctgagcct

SEQ ID NO: 182584 - DNA, 386 bp, Homo sapiens; identical to SEQ ID NO: 128045
  chr17:7486278-7486664
  hypo

SEQ ID NO: 182585 - DNA, 318 bp, Homo sapiens; identical to SEQ ID NO: 128046
  chr17:7486946-7487264
  hypo

SEQ ID NO: 182586 - DNA, 655 bp, Homo sapiens; identical to SEQ ID NO: 91995
  chr17:7491924-7492579
  hypo

SEQ ID NO: 182587 - DNA, 1140 bp, Homo sapiens
  chr17:7493026-7494166
  hypo
atgccctcccctcaacgtgaagcgtcgatcctgaaaatggaaaggtcttcccagtctggagtcgttgccgaggaacttgggtccttaaaaagtgtattttatccccaagcccagagcttaaaccggagcctttgcttccaacctgttcggcacactttggggagagtcgaatgcaaaatccgctgtctggtgccccggcactgaagaggtgttctgaggcctactgactgggggacccccggtccctctccccgacccgcagctgcgatcagaccgaccttccgtggagggggtaaaccataaacccctttgtggtctccggagttccgacagctgccaggcgcggataggccagacctctcccacctgggctcagcgtttgtggcaggcgggccagacctgggaacagcttttaaagactgactccgcccctgtccctcccataagactgcacctccttaagggcgccaacatcctcagcccgtaggtaaacccaggtgtcctgtttgtcccagcccccaacaccctcagggtgccacgccccccgccccccccacccaagacctgatgtcaggccttccagcccgttgctgattgcctcccctccctgaagcacaggcaatttaaagccaattctttccacaatgggatcaaacacagggggatgaagtgccctcagggcccgagttgtgctgagaggagcttgggagcatcccggaccaccaccccaacccctttcctggtgcctgttgctcctcaaatcccagaactgcccctggggcaagaaaggccgaggagggagaccatttttgtttcctgagtcattccagcaggtgcttgggccgtgattcaacccctttcccaagtgagaaaacttaagccctcccaactccagtccctaaacctatatttctccactgctattgaattatggcaagttttagcttcagtcgtccaagtcatgaggggggagccaggaaacccaggacaactccccaagttaagaggtctgtgatgcgcatgccggagaaaaagcctggagccagaacagaacaccaccaagaaggccggaccccgggctccagaggctgctgtgagggaaccctgctccccactctgcccaacggcccagcccaagcc

SEQ ID NO: 182588 - DNA, 31 bp, Homo sapiens; identical to SEQ ID NO: 29990
  chr17:7496152-7496183
  hypo

SEQ ID NO: 182589 - DNA, 98 bp, Homo sapiens
  chr17:7496711-7496809
  hypo
ctgtctcaccataggcaggaccgcctgtcctccggccacggccacggcccccatagctgcccccataggttcgagtcgcatggagggaggaggaggag

SEQ ID NO: 182590 - DNA, 42 bp, Homo sapiens; identical to SEQ ID NO: 91999
  chr17:7536910-7536952
  hypo

SEQ ID NO: 182591 - DNA, 17 bp, Homo sapiens
  chr17:7548679-7548696
  hypo
tccgtataaaaaacaaa

SEQ ID NO: 182592 - DNA, 30 bp, Homo sapiens; identical to SEQ ID NO: 92001
  chr17:7559129-7559159
  hypo

SEQ ID NO: 182593 - DNA, 31 bp, Homo sapiens; identical to SEQ ID NO: 29991
  chr17:7571394-7571425
  hypo

SEQ ID NO: 182594 - DNA, 166 bp, Homo sapiens; identical to SEQ ID NO: 10956
  chr17:7571718-7571884
  hypo

SEQ ID NO: 182595 - DNA, 825 bp, Homo sapiens; identical to SEQ ID NO: 10957
  chr17:7572183-7573008
  hypo

SEQ ID NO: 182596 - DNA, 112 bp, Homo sapiens; identical to SEQ ID NO: 10958
  chr17:7573921-7574033
  hypo

SEQ ID NO: 182597 - DNA, 622 bp, Homo sapiens; identical to SEQ ID NO: 10959
  chr17:7576545-7577167
  hypo

SEQ ID NO: 182598 - DNA, 122 bp, Homo sapiens; identical to SEQ ID NO: 10960
  chr17:7577495-7577617
  hypo

SEQ ID NO: 182599 - DNA, 559 bp, Homo sapiens; identical to SEQ ID NO: 10961
  chr17:7578174-7578733
  hypo

SEQ ID NO: 182600 - DNA, 692 bp, Homo sapiens; identical to SEQ ID NO: 10962
  chr17:7579248-7579940
  hypo

SEQ ID NO: 182601 - DNA, 330 bp, Homo sapiens; identical to SEQ ID NO: 128061
  chr17:7590624-7590954
  hypo

SEQ ID NO: 182602 - DNA, 30 bp, Homo sapiens; identical to SEQ ID NO: 92011
  chr17:7604970-7605000
  hypo

SEQ ID NO: 182603 - DNA, 207 bp, Homo sapiens; identical to SEQ ID NO: 92012
  chr17:7662607-7662814
  hypo

SEQ ID NO: 182604 - DNA, 198 bp, Homo sapiens; identical to SEQ ID NO: 92013
  chr17:7690144-7690342
  hypo

SEQ ID NO: 182605 - DNA, 31 bp, Homo sapiens; identical to SEQ ID NO: 92014
  chr17:7695958-7695989
  hypo

SEQ ID NO: 182606 - DNA, 31 bp, Homo sapiens; identical to SEQ ID NO: 92015
  chr17:7699939-7699970
  hypo

SEQ ID NO: 182607 - DNA, 140 bp, Homo sapiens; identical to SEQ ID NO: 92016
  chr17:7702406-7702546
  hypo

SEQ ID NO: 182608 - DNA, 177 bp, Homo sapiens; identical to SEQ ID NO: 92017
  chr17:7710675-7710852
  hypo

SEQ ID NO: 182609 - DNA, 30 bp, Homo sapiens
  chr17:7712773-7712803
  hypo
gctcctccacggctccgtccctgctaccac

SEQ ID NO: 182610 - DNA, 64 bp, Homo sapiens
  chr17:7727215-7727279
  hypo
ccgcgtggccttctgcgtgacctccttcatcatcaccaaccttggctcccgcttcatcgagccg

SEQ ID NO: 182611 - DNA, 30 bp, Homo sapiens
  chr17:7750680-7750710
  hypo
ccccctggcctccccggcaccaccaccagc

SEQ ID NO: 182612 - DNA, 96 bp, Homo sapiens; identical to SEQ ID NO: 30001
  chr17:7769320-7769416
  hypo

SEQ ID NO: 182613 - DNA, 36 bp, Homo sapiens; identical to SEQ ID NO: 30002
  chr17:7769715-7769751
  hypo

SEQ ID NO: 182614 - DNA, 43 bp, Homo sapiens; identical to SEQ ID NO: 92020
  chr17:7797153-7797196
  hypo

SEQ ID NO: 182615 - DNA, 31 bp, Homo sapiens; identical to SEQ ID NO: 92021
  chr17:7798327-7798358
  hypo

SEQ ID NO: 182616 - DNA, 185 bp, Homo sapiens; identical to SEQ ID NO: 92022
  chr17:7798624-7798809
  hypo

SEQ ID NO: 182617 - DNA, 102 bp, Homo sapiens; identical to SEQ ID NO: 92023
  chr17:7800248-7800350
  hypo

SEQ ID NO: 182618 - DNA, 213 bp, Homo sapiens
  chr17:7806523-7806736
  hypo
gctctatgggcagcttctccccggccactcccctgacccacccgccactttctcttgcccctgcaggcctttagccgggctcatcggattggccaggccaacaaagtgatgatttaccggtttgtgactcgcgcgtcagtggaagagcgaatcacacaagtggccaagagaaagatgatgctgacacacctggttgtgcggcctgggctgggc

SEQ ID NO: 182619 - DNA, 126 bp, Homo sapiens
  chr17:7807179-7807305
  hypo
tgacaatgaggccatcgctcggctgttggaccggaaccaggatgcaactgaggacactgacgtgcagaacatgaatgagtatctcagctccttcaaggtggcacagtacgtcgtgcgggaagaaga

SEQ ID NO: 182620 - DNA, 479 bp, Homo sapiens
  chr17:7809784-7810263
  hypo
gtcctcagtcatcctcgcgcctccctcactgccctataccccttctgtggctcccctaaccctcctcccactcccatgctccttagggcctatgtgtctttgttcatgcgccatctgtgtgagcctggggcagacggctctgaaacctttgccgatggggtccctcgggagggactgagtcgccagcaggtgttgacccgcattggagtcatgtctctcgtcaaaaagaaggtatcagtcttcctgtcacccaaagaatcaagctggctgcctagtctctgtccttcctctgcctctgtccctgagttgtaagcttgcgctggtgtgagacggaggagactggagcttcctgtctgtaagcgcctggagctgacacctaaccctcccaccctgccaccccaggtgcaggagtttgagcacatcaatgggcgttggtcaatgccggaactgatgcctgaccccagcgccgattctaagcg

SEQ ID NO: 182621 - DNA, 50 bp, Homo sapiens; identical to SEQ ID NO: 30008
  chr17:7811071-7811121
  hypo

SEQ ID NO: 182622 - DNA, 127 bp, Homo sapiens; identical to SEQ ID NO: 92029
  chr17:7812553-7812680
  hypo

SEQ ID NO: 182623 - DNA, 80 bp, Homo sapiens; identical to SEQ ID NO: 92030
  chr17:7813719-7813799
  hypo

SEQ ID NO: 182624 - DNA, 30 bp, Homo sapiens; identical to SEQ ID NO: 92031
  chr17:7832464-7832494
  hypo

SEQ ID NO: 182625 - DNA, 19 bp, Homo sapiens
  chr17:7856926-7856945
  hypo
acctcgtgctttgcagtcc

SEQ ID NO: 182626 - DNA, 19 bp, Homo sapiens
  chr17:7860533-7860552
  hypo
ccttaactggaattttaaa

SEQ ID NO: 182627 - DNA, 151 bp, Homo sapiens; identical to SEQ ID NO: 30011
  chr17:7892699-7892850
  hypo

SEQ ID NO: 182628 - DNA, 30 bp, Homo sapiens; identical to SEQ ID NO: 92035
  chr17:7917932-7917962
  hypo

SEQ ID NO: 182629 - DNA, 236 bp, Homo sapiens; identical to SEQ ID NO: 92036
  chr17:7951706-7951942
  hypo

SEQ ID NO: 182630 - DNA, 292 bp, Homo sapiens
  chr17:8012301-8012593
  hypo
caagcccctctctggacggcagctacctgccatttcagaagggaccccaaactcaattcataccctcaagaattccctatgctagggtgtgaaaacacctgaaatccccaggcgccatgagcgcagggaccacaatgtcccaggccaggagaccctggtgggactgctggtcccgccccgcacctcgcacctctcaatggccgcccagatcttcaggccgtcgtctcggtagtggtagttggggatagccaggacgccgcgggcccgcaggctgtccggaaggcagaaattg

SEQ ID NO: 182631 - DNA, 30 bp, Homo sapiens; identical to SEQ ID NO: 30012
  chr17:8045648-8045678
  hypo

SEQ ID NO: 182632 - DNA, 30 bp, Homo sapiens; identical to SEQ ID NO: 92039
  chr17:8046616-8046646
  hypo

SEQ ID NO: 182633 - DNA, 30 bp, Homo sapiens
  chr17:8052060-8052090
  hypo
ggaatggctggtaccgaggccctggatccc

SEQ ID NO: 182634 - DNA, 30 bp, Homo sapiens; identical to SEQ ID NO: 30013
  chr17:8053411-8053441
  hypo

SEQ ID NO: 182635 - DNA, 214 bp, Homo sapiens; identical to SEQ ID NO: 92041
  chr17:8064841-8065055
  hypo

SEQ ID NO: 182636 - DNA, 41 bp, Homo sapiens; identical to SEQ ID NO: 92042
  chr17:8074474-8074515
  hypo

SEQ ID NO: 182637 - DNA, 30 bp, Homo sapiens
  chr17:8094902-8094932
  hypo
tgctagcatgacaggcgtgagccaccgtgc

SEQ ID NO: 182638 - DNA, 28 bp, Homo sapiens
  chr17:8104139-8104167
  hypo
gccttaaaccttgcctttggccgggtgc

SEQ ID NO: 182639 - DNA, 541 bp, Homo sapiens; identical to SEQ ID NO: 92044
  chr17:8104406-8104947
  hypo

SEQ ID NO: 182640 - DNA, 30 bp, Homo sapiens; identical to SEQ ID NO: 92045
  chr17:8128711-8128741
  hypo

SEQ ID NO: 182641 - DNA, 473 bp, Homo sapiens
  chr17:8138409-8138882
  hypo
tagaggggaagtcctaactgacgttcccacaccagctgctcgtacagggaggccccgtaggcttgacgggatgagtgagccccaggcttctgacgagagaagctttgaagcagaacggcgccacggaggcagggggcgagcactggccttcttgtcccccctcccactgactggagcaggtgaacatcctggagctgggggaaagcagagaaaatgaaaaagcagagatgaagaccccaactcaatgaacccaggcagagttaaccgcactttgccactgcctgggttccaggaagacggaaagcaatttctcccacgtgggctggcctcactttccattacaacccactcccgctgcggtcagccttcatctcccatgagctccactcagtcttgctgtgggctgggtggctcctggatgaacagacatggctgaggcttctcaccgggtcgcctgagatcaccccagcccc

SEQ ID NO: 182642 - DNA, 31 bp, Homo sapiens; identical to SEQ ID NO: 30018
  chr17:8139151-8139182
  hypo

SEQ ID NO: 182643 - DNA, 30 bp, Homo sapiens
  chr17:8178728-8178758
  hypo
ttttttttttttcccgcttagtttaacatt

SEQ ID NO: 182644 - DNA, 459 bp, Homo sapiens
  chr17:8197550-8198009
  hypo
atcaatacattcaatcgtgtccatcagatgggtgtgtatagggcagatcagaagactccgaagcctaccagcactttcctgatgcctttccctgcttgcagtggggcagcactctgccacctatgcccttgggaaagaacagctcctatcctacaacgaggatctgccctgaaggtcccaggcaagagccctcttcttaccatgtagatggggctccccaagtaggctcccatgaccccagccatggccccagctgctgcgctgcgggcaggactgtgggtgccttcggctgtgtgcaggtagcccccagcctcagccagcccataggtgcccagtcggatgccattcatcaggaactggtacaagagggcgggggccaggcctttctgcagggcagcaaggccatccaccttgccgatggtgatgaaggcatggaagacatttcggtagtgccgctgg

SEQ ID NO: 182645 - DNA, 39 bp, Homo sapiens
  chr17:8276462-8276501
  hypo
ccctctctccgtctccgtctccgtctccgtctccacggt

SEQ ID NO: 182646 - DNA, 30 bp, Homo sapiens
  chr17:8289994-8290024
  hypo
cccctttctcttaacgtgtctgttgggtgt

SEQ ID NO: 182647 - DNA, 437 bp, Homo sapiens
  chr17:8295897-8296334
  hypo
cacgtggggaacacgcgccgcgcgcatggagtcagctccagcctctctgtcgagcggaagcccctgcgggggtcggggaagcccaaggccctctctgtgcccaggtcctcccctctgcctgcccgcgtgcccctcggagcttggtggcaccagggctgccgtgggcctcctgtcccaccccaggccacggctagcccggcggcctccctgaggtgcggctcacgcctgcttcctcaccagcagcacccagggcaggatggcggccaccacggccaccacagcgatgagcgtgatgagcagcagggcccgcgatcggcagcagaaggcgcgggcggagcggggcgccagggaggcctccgagagctctgccaggctgcggcggggcagcacgctgtcctgctcccccaggggcatcccgtggcggctgatgacaaaga

SEQ ID NO: 182648 - DNA, 259 bp, Homo sapiens
  chr17:8311455-8311714
  hypo
ctgtctcaattaattcatgaaacggtacaaactttaattaattaatgcaaacttctaagtataaaaaggttcacttgtgtaccatctgaagtgccactcatgcggactctggcacgagtgggtgagagctggcgcccacgcaggggacagaaacttgggatcccagagctagaaacaggcgactctagaactttccgtggctgagcccaaggcccgggtgaaatgcttgacccgagagccctttcgatgggaaaccact

SEQ ID NO: 182649 - DNA, 104 bp, Homo sapiens
  chr17:8319004-8319108
  hypo
cgctgggattacaggcgtgagacacctattttccatttttaatgtgccttgcccattttacattttttattgtggtaaatagatggagtctcgcactgttgccc

SEQ ID NO: 182650 - DNA, 84 bp, Homo sapiens; identical to SEQ ID NO: 92051
  chr17:8325970-8326054
  hypo

SEQ ID NO: 182651 - DNA, 106 bp, Homo sapiens
  chr17:8365197-8365303
  hypo
cataaatggataggtcggacaggtgcctgtgcgtgtggaagccctgaagaacagtcacgaggagggaaggataacactgtctgttcagggtcgctactcctgcccg

SEQ ID NO: 182652 - DNA, 143 bp, Homo sapiens
  chr17:8371938-8372081
  hypo
acacattgaagaacgcgtaaactgggggtctgtgtgaatgcatcagattctgagcactgtttgcttagaacaacagaaacattttatagttttaaaactgtaagtaactgaaaacgatgtgaatcaaaaccctaagagacttc

SEQ ID NO: 182653 - DNA, 83 bp, Homo sapiens
  chr17:8380283-8380366
  hypo
gatgcgttggcacgcgtcgcttcttcttctgcttcctccagctggcgtttaagctgcttcatccgagcgttggccttctccat

SEQ ID NO: 182654 - DNA, 209 bp, Homo sapiens
  chr17:8383606-8383815
  hypo
ggctgctagctcggcgttcagtgtgtccacctagagaggagagaggagtttagtcacttgtgcctgaggggtggcacagccctccctgggtgacgggctcctgcatgggccacctgtagagtggtcttgcggaagcggtcgttgagcagctccatgttgctctgctcctcttccagctcctcctccagctgtgcgatccgagcttccag

SEQ ID NO: 182655 - DNA, 474 bp, Homo sapiens
  chr17:8384349-8384823
  hypo
aaagtgaaggcctgcagtgcccgttggcgcaccccacggctcccccctgcggtgtgcagggctcagcaggactggcacgggtgcagtgcccgttagtgcacaccacggctcccacctgcggtgtgcagggctcggcaggactggcacggggtaccatggctgaggcagcccaggcccagcgagggaggagcaaaccacccgctgatgccaggtgtgtggacacctccagccttctcagcagtgcgcgtgcctgagggcgaagaacccacccccggccgtgggagactcacttgccagaggcgctgttggtgatctcgtccgccagctcatctctctcctgctcggcgtgtcggcgggctcgctcagatgaggcaagttcctaagcagtggagactgcgttaagctctggctgtgaatagtttcctcacctgtggaatctgacagtgcctggagctacagcgaccttgctcctgt

SEQ ID NO: 182656 - DNA, 31 bp, Homo sapiens; identical to SEQ ID NO: 30024
  chr17:8390694-8390725
  hypo

SEQ ID NO: 182657 - DNA, 67 bp, Homo sapiens
  chr17:8409684-8409751
  hypo
tgagctcatcaatctgcgcctgcagctctgcgatctggtcctgcaggtcggtcgtctccccgtcgag

SEQ ID NO: 182658 - DNA, 31 bp, Homo sapiens; identical to SEQ ID NO: 30025
  chr17:8424445-8424476
  hypo

SEQ ID NO: 182659 - DNA, 380 bp, Homo sapiens
  chr17:8430759-8431139
  hypo
actgtgctctgcgctcgctttctcccgttgtggggtcccatgtccccaactcatgctgagactgggcagcctggcaccacggcctatcagctgtaccttgggacactatgagcgatactagacttatgttaaggaaagccaaggaaataaacatttatcgggtttctctgttgttctgtaattacagcagcagctgctgcagatgcagccacggcaatggcaactctacaacaccacacattcaggcactccccatgtgccacgcattcaggttcacgttgcctcagttgatactcacagtaaccctgagaactaaatgttgctgtccgcacttgtcctcaggaactcaaactgcagtacccaagcgctgcttctcctcg

SEQ ID NO: 182660 - DNA, 159 bp, Homo sapiens; identical to SEQ ID NO: 30026
  chr17:8438421-8438580
  hypo

SEQ ID NO: 182661 - DNA, 30 bp, Homo sapiens; identical to SEQ ID NO: 92059
  chr17:8449168-8449198
  hypo

SEQ ID NO: 182662 - DNA, 30 bp, Homo sapiens; identical to SEQ ID NO: 92060
  chr17:8449895-8449925
  hypo

SEQ ID NO: 182663 - DNA, 105 bp, Homo sapiens
  chr17:8458245-8458350
  hypo
gggtgacagagcgagactccatctcaaagcaaaataaaagcaaatatggtatggttatatcttacttataaaaatatatataaggagaatcgcttgaacccggga

SEQ ID NO: 182664 - DNA, 58 bp, Homo sapiens
  chr17:8471464-8471522
  hypo
ccaactctcgtctctcgtgggtggctttcaagtggcacgcagccgaacttgggttcag

SEQ ID NO: 182665 - DNA, 30 bp, Homo sapiens
  chr17:8471792-8471822
  hypo
ttaaaaagcgtgtcacgacgacactagatc

SEQ ID NO: 182666 - DNA, 30 bp, Homo sapiens
  chr17:8472675-8472705
  hypo
gggctaagtgctcagcgtgcacaccattta

SEQ ID NO: 182667 - DNA, 30 bp, Homo sapiens
  chr17:8473101-8473131
  hypo
gcttgcaaaagctgccgttcaagttccccc

SEQ ID NO: 182668 - DNA, 20 bp, Homo sapiens
  chr17:8474804-8474824
  hypo
aaatgccagtcaggggccag

SEQ ID NO: 182669 - DNA, 20 bp, Homo sapiens
  chr17:8475063-8475083
  hypo
agagactcatctccaaaaaa

SEQ ID NO: 182670 - DNA, 22 bp, Homo sapiens
  chr17:8567947-8567969
  hypo
cgtctcaaaaaaaaaaaacaaa

SEQ ID NO: 182671 - DNA, 30 bp, Homo sapiens
  chr17:8568722-8568752
  hypo
aggcttgagccaccgcgcctggcgtggcta

SEQ ID NO: 182672 - DNA, 27 bp, Homo sapiens
  chr17:8617882-8617909
  hypo
catgagccaccgcgcccagccatggag

SEQ ID NO: 182673 - DNA, 30 bp, Homo sapiens
  chr17:8618206-8618236
  hypo
gctggagagaacaagcgggagggtaggaga

SEQ ID NO: 182674 - DNA, 387 bp, Homo sapiens
  chr17:8638482-8638869
  hypo
ctggaagaggttcagcgtggccatcttaatggtgccaagcaggagggtcttcttggctgcggtgttctggatgtgcgcccagcgagattcctggagagtggataaggacggggcatgagcacagcatgtggtgtgtgtgtgtttgtgtgtatgtgtgtgtgtgtatgctcagggcccgcactcacccagtgcctgggagcccccggcccgccccgggcccctcacccagaagatgacattgctgcgggcacggtcaaagcgcatctgcagccttgccagctcattgttttgctgcaggatctcatcatccttttcctccatgtagcgcgccagccgggccttggcgcgctcaatcttctcctggccttcctgcgcagactgcatgag

SEQ ID NO: 182675 - DNA, 30 bp, Homo sapiens
  chr17:8660672-8660702
  hypo
ccacccaggtgtcctcgggctcaggggcgc

SEQ ID NO: 182676 - DNA, 127 bp, Homo sapiens
  chr17:8700776-8700903
  hypo
cgagtacttgattttccgctctcggggcagcctccgctgtatggacaggagcaaggccaaccagagcaacagggccacacagcaggcctggtagagcacagccaggctgaagcgcatcaccacgaag

SEQ ID NO: 182677 - DNA, 30 bp, Homo sapiens
  chr17:8701205-8701235
  hypo
caagctgagggcgaccgagaaacccatgac

SEQ ID NO: 182678 - DNA, 228 bp, Homo sapiens
  chr17:8731953-8732181
  hypo
tgtgcagccgggacacgccgggcagcatttccccatccccactgggccggcctgtcctccggtgcagccctgggggcccgtcccagctgccaggcatcaagaagtccaggggccatgcacgcttcttgatgccccctttgcgctgcagcccggctcgctccatctcagggctgccgggtgcaggcagctcatcagcccccgtgggaaggtcccgctcaatgccgctgt

SEQ ID NO: 182679 - DNA, 157 bp, Homo sapiens
  chr17:8738594-8738751
  hypo
gcttcctgtgcagagcgcctgcgtgacaggcctcccccagagccgcctgcagggcgtgggagaccacgtggcgcatgcaggtctctggtgtctgctgcgcctgggccgcctcgatctccagtagcagagcactgcacacagacgcagacaccagctc

SEQ ID NO: 182680 - DNA, 34 bp, Homo sapiens; identical to SEQ ID NO: 53710
  chr17:8759639-8759673
  hypo

SEQ ID NO: 182681 - DNA, 39 bp, Homo sapiens
  chr17:8789812-8789851
  hypo
agcagcaccggtctggcggcaaagcggcagtagtagagt

SEQ ID NO: 182682 - DNA, 31 bp, Homo sapiens; identical to SEQ ID NO: 92068
  chr17:8794407-8794438
  hypo

SEQ ID NO: 182683 - DNA, 89 bp, Homo sapiens
  chr17:8814769-8814858
  hypo
ctggatgcggtcctccgtgcatgtcgtggcccctggctgcatcctgggtcatcgcctgcatgggggacagacgccggtcagcttgtcga

SEQ ID NO: 182684 - DNA, 30 bp, Homo sapiens; identical to SEQ ID NO: 30032
  chr17:8817203-8817233
  hypo

SEQ ID NO: 182685 - DNA, 85 bp, Homo sapiens; identical to SEQ ID NO: 128116
  chr17:8868582-8868667
  hypo

SEQ ID NO: 182686 - DNA, 694 bp, Homo sapiens; identical to SEQ ID NO: 128117
  chr17:8868814-8869508
  hypo

SEQ ID NO: 182687 - DNA, 1545 bp, Homo sapiens; identical to SEQ ID NO: 53713
  chr17:8906182-8907727
  hypo

SEQ ID NO: 182688 - DNA, 103 bp, Homo sapiens
  chr17:8932899-8933002
  hypo
atgaggtttgacttgcgtagcacaacttagtgagctcagtattgcattcctgtctccttactccaaaaatggatttctattgtaaactaagaagtagatttta

SEQ ID NO: 182689 - DNA, 30 bp, Homo sapiens
  chr17:8954682-8954712
  hypo
tgctgaccctgggtccggattcgttagagg

SEQ ID NO: 182690 - DNA, 30 bp, Homo sapiens
  chr17:8971000-8971030
  hypo
cctcccatgccccatcgtgtttatgctgtg

SEQ ID NO: 182691 - DNA, 30 bp, Homo sapiens
  chr17:8971275-8971305
  hypo
gcctgtaaacccagccgaggtgggaggatt

SEQ ID NO: 182692 - DNA, 18 bp, Homo sapiens
  chr17:8972110-8972128
  hypo
caccgcgcctggcccgat

SEQ ID NO: 182693 - DNA, 215 bp, Homo sapiens
  chr17:8977463-8977678
  hypo
agaaggcagtggtgccggctctcgcgaaccagtgcgggagggaagcctgacaggggcgaggtggcttcctgcaagacggcgtgtaagctcagcaactgcatttttctgaggaattagggatgggacgcggccagcccgctctggttggagcttggtgctgtgactcattctcatcaagggtcactgagcgtctctctgcgcgtggccttgggctg

SEQ ID NO: 182694 - DNA, 30 bp, Homo sapiens
  chr17:9001443-9001473
  hypo
attgtcacctggcatcgtttacttccaagt

SEQ ID NO: 182695 - DNA, 30 bp, Homo sapiens
  chr17:9038395-9038425
  hypo
tgtccccatccacaccgagggcccggtaag

SEQ ID NO: 182696 - DNA, 45 bp, Homo sapiens; identical to SEQ ID NO: 92074
  chr17:9041942-9041987
  hypo

SEQ ID NO: 182697 - DNA, 148 bp, Homo sapiens; identical to SEQ ID NO: 30035
  chr17:9054226-9054374
  hypo

SEQ ID NO: 182698 - DNA, 38 bp, Homo sapiens; identical to SEQ ID NO: 92076
  chr17:9065577-9065615
  hypo

SEQ ID NO: 182699 - DNA, 181 bp, Homo sapiens
  chr17:9065674-9065855
  hypo
ggttgctctggaggcccttctgcgtggcttgcagatggccgccctctggcaacgtcctcacgggatctctcctccgtgcacatgcgtccctgcgtctctctgtgtcctcatctcctcttcctacaacgacacagtcatactggcatagggcccactctgagggccttgttttaagactctg

SEQ ID NO: 182700 - DNA, 457 bp, Homo sapiens
  chr17:9065914-9066371
  hypo
gggagaaccttagccatgtattgttacgtgcccaataaatgcttacgggtacaaacaggaggagccgaggaggagctcctggagcacaagtctgcctgcctggctctgctagtggagaagggaggagttgaggggtggggtttcttttgacgctcttgggtgcctgtcctccccgcgcccctgcggctgacacctctctctgtctccccctgcagcctgtaactgcaacctgcatgcccggcgctgccgcttcaacatggagctctacaagctttcggggcgcaagagcggaggtgtctgcctcaactgtcgccacaacaccgccggccgccactgccattactgcaaggagggctactaccgcgacatgggcaagcccatcacccaccggaaggcctgcaaaggtgggctacacgtggcggggcggggggctggggagacccggggaacatcagtc

SEQ ID NO: 182701 - DNA, 118 bp, Homo sapiens
  chr17:9066670-9066788
  hypo
cataccagagggctgcgagtcatgttcgccaggcttaccgttgggacaaaggactctctttcaccaaatgcacgcagactcacttctttggatatgtgcgcaccgcccctcactcccc

SEQ ID NO: 182702 - DNA, 31 bp, Homo sapiens; identical to SEQ ID NO: 92078
  chr17:9115730-9115761
  hypo

SEQ ID NO: 182703 - DNA, 34 bp, Homo sapiens; identical to SEQ ID NO: 92079
  chr17:9122495-9122529
  hypo

SEQ ID NO: 182704 - DNA, 30 bp, Homo sapiens
  chr17:9123098-9123128
  hypo
ctctgcgggataggacgctgccacctgccc

SEQ ID NO: 182705 - DNA, 276 bp, Homo sapiens; identical to SEQ ID NO: 92080
  chr17:9124885-9125161
  hypo

SEQ ID NO: 182706 - DNA, 205 bp, Homo sapiens; identical to SEQ ID NO: 92081
  chr17:9127007-9127212
  hypo

SEQ ID NO: 182707 - DNA, 192 bp, Homo sapiens; identical to SEQ ID NO: 30038
  chr17:9150997-9151189
  hypo

SEQ ID NO: 182708 - DNA, 108 bp, Homo sapiens; identical to SEQ ID NO: 92083
  chr17:9153810-9153918
  hypo

SEQ ID NO: 182709 - DNA, 271 bp, Homo sapiens
  chr17:9154705-9154976
  hypo
ttgcccagtatttaacgagtgtttaccacgtgccaggtaccagcggcgacaaggtatagcataacagagaaggggcgccctactacaaagtaagcactcaagaaaggtttgctcactgaagagtccttgagctgccaaggccccacgagagaggtgggtagcagaggaggagaggtccatgaaaatgcttcagaaagtaacagggagagccacgtgtgcagggtcacatggttgcacagccatcaggactgctgaacgccacggtagtctg

SEQ ID NO: 182710 - DNA, 30 bp, Homo sapiens
  chr17:9156345-9156375
  hypo
cctgcagcatcagttcgcccacttaggcgc

SEQ ID NO: 182711 - DNA, 216 bp, Homo sapiens
  chr17:9233913-9234129
  hypo
tccctcaggaatgcccgtgcactggcttcggctttctgtttgggacgtgggttcacgtttacgaacaacaagggatggcccctggcagagcctcgttcgcactcgctcctgcctccagtttggcaacacaacacaaaggcggtatggcttgtatacactttccaggctgagcccctattcagagggggctgcagcttgcgcgtaatgggcccccta

SEQ ID NO: 182712 - DNA, 30 bp, Homo sapiens; identical to SEQ ID NO: 92085
  chr17:9234948-9234978
  hypo

SEQ ID NO: 182713 - DNA, 30 bp, Homo sapiens; identical to SEQ ID NO: 92086
  chr17:9235301-9235331
  hypo

SEQ ID NO: 182714 - DNA, 194 bp, Homo sapiens
  chr17:9264055-9264249
  hypo
aaatacgggctgtttcgagcgtgaatcaaagtgtcaaagaacatttggaggctgctcggtagacatgcactctctcaaggacaactgagatgcatgcctgactgagtcacggctgagcacccagcgctcagcagtcagctccagagctgcagaaagtaacccagtgagacccgcggtgccggctacaggtccct

SEQ ID NO: 182715 - DNA, 32 bp, Homo sapiens; identical to SEQ ID NO: 30040
  chr17:9393282-9393314
  hypo

SEQ ID NO: 182716 - DNA, 30 bp, Homo sapiens
  chr17:9440769-9440799
  hypo
aagcaacctgaagctcggagtcacctttac

SEQ ID NO: 182717 - DNA, 165 bp, Homo sapiens
  chr17:9474684-9474849
  hypo
agtgattccaatctgcggtaaagtccgggcgggaacccttggcctggggcaatagacaacctcattacactatcaagcacacaggtgcctgaagtactagtttagaaaaagtaattgggtcggggggtggctgaggcaggagaatcgctggaacccgggaggcag

SEQ ID NO: 182718 - DNA, 1494 bp, Homo sapiens; identical to SEQ ID NO: 128127
  chr17:9548017-9549511
  hypo

SEQ ID NO: 182719 - DNA, 39 bp, Homo sapiens; identical to SEQ ID NO: 92089
  chr17:9576952-9576991
  hypo

SEQ ID NO: 182720 - DNA, 24 bp, Homo sapiens
  chr17:9617703-9617727
  hypo
gaaaaagaatgaaggccgggcaca

SEQ ID NO: 182721 - DNA, 226 bp, Homo sapiens; identical to SEQ ID NO: 30042
  chr17:9631364-9631590
  hypo

SEQ ID NO: 182722 - DNA, 330 bp, Homo sapiens
  chr17:9674878-9675208
  hypo
aggtgcggacgtacacggcggccttggggatggggttggccataaacacctcttgcttcttcctccgcacggtgcgcatcacctcctccgccacctctactgggtgcacgccgtaggtcagcttcctgaaaaagactgaaaggccccagttgggggcgggggttatgacctccgtggggacccggctggtcagagccctgcacatgcacaaaggctgaggggcgggaagcgtgggctgtccccggagtcacaggttccaggccccctccgccacccgcggaccgcggcgaccagcgggagacactccactctctgcgcttccttctgcgt

SEQ ID NO: 182723 - DNA, 46 bp, Homo sapiens
  chr17:9719664-9719710
  hypo
acgtgcacgcgtatgcgtgtgtctgtgtgtgtgcgtgtgtgtctgt

SEQ ID NO: 182724 - DNA, 105 bp, Homo sapiens
  chr17:9719769-9719874
  hypo
tgtgtgtgcgtccgtgtgcgtgtctgtgtgtgtgcatgtgtctgtgtgtgcctgtctgtgtgtgcgtgtctgtgtctctgtgtgcacgtgcgtgtgtctgtgtgt

SEQ ID NO: 182725 - DNA, 30 bp, Homo sapiens
  chr17:9775899-9775929
  hypo
caaacaaacaaaaaacggtgtacacgatgt

SEQ ID NO: 182726 - DNA, 30 bp, Homo sapiens
  chr17:9776312-9776342
  hypo
ggctccagggagccacgctgtctctcttgg

SEQ ID NO: 182727 - DNA, 473 bp, Homo sapiens
  chr17:9807967-9808440
  hypo
catctcggagcaccacgctctcagagccagtggcccgcatcccccgctccacccacagatccactccctctgcagcagctgcagcaggggacccccagcccggagcgaccccggcaccgcccagccagaaggggagaggggagactgaccatgacgatctccagcacttcattcttgctgatggtcccgttaccgtccacgtcgtagagggagaaggcccactccagcttctggttggtcttgcccgcggtggtcatgtgcagggcgatgacgtactccttgaagtccagggtgccgtcgaggttggaatcgaagctgcggaacacatgctgggcgtaggccttggggtcggtgtcggggaagaacttggcgtagatgctctggaactgctgctgggtgatgcggccggtgggacagtccttcaggaaggactggtaccaggagcacagctcctcctccgagaacttggtgtt

SEQ ID NO: 182728 - DNA, 137 bp, Homo sapiens
  chr17:9810182-9810319
  hypo
gtgcactttccttagcggagcgcagtgctcgaggggacacactcagaaccccagccttgccaccgtggatggagagttgtctctttttgccctggggtgagaatgatgaagaataaaccccacggtctccaggcagg

SEQ ID NO: 182729 - DNA, 100 bp, Homo sapiens; identical to SEQ ID NO: 30043
  chr17:9893604-9893704
  hypo

SEQ ID NO: 182730 - DNA, 30 bp, Homo sapiens; identical to SEQ ID NO: 92094
  chr17:9963846-9963876
  hypo

SEQ ID NO: 182731 - DNA, 22 bp, Homo sapiens
  chr17:10050013-10050035
  hypo
atctctggccgggcgcggtggc

SEQ ID NO: 182732 - DNA, 4 bp, Homo sapiens
  chr17:10101105-10101109
  hypo
ggag

SEQ ID NO: 182733 - DNA, 316 bp, Homo sapiens; identical to SEQ ID NO: 128131
  chr17:10101131-10101447
  hypo

SEQ ID NO: 182734 - DNA, 342 bp, Homo sapiens; identical to SEQ ID NO: 53719
  chr17:10102264-10102606
  hypo

SEQ ID NO: 182735 - DNA, 175 bp, Homo sapiens
  chr17:10212814-10212989
  hypo
cgcagaggcggccaccgtgctcaccttgagctggccctggaccgtgcgcagatgcttctgggtctctgccatctggcggttggagtggcccagctgaatctccatctcattaaggtctccctccatcttcttctttagcctcagggcgtcgttccggctgcggatttcagcatcc

SEQ ID NO: 182736 - DNA, 185 bp, Homo sapiens
  chr17:10216483-10216668
  hypo
tccagctcctctgtgcgctgaatggcgtccgtctcgtatttggtcctccactgggcaacctcactgttggccttggacagcgccctctgcagctcggccttggcttcctgctcctcctcatactgttcccgcagcaggtcacagtcgtggcgggaggactgcagggcgtgcgccatggcgttctt

SEQ ID NO: 182737 - DNA, 30 bp, Homo sapiens
  chr17:10526288-10526318
  hypo
caggtttggggctggcgctgcccttctgac

SEQ ID NO: 182738 - DNA, 30 bp, Homo sapiens
  chr17:10526694-10526724
  hypo
ggcctctgcctgccccgtgggatggtgctg

SEQ ID NO: 182739 - DNA, 30 bp, Homo sapiens
  chr17:10532928-10532958
  hypo
gtctcgagtcttagcgcggagcttgttgac

SEQ ID NO: 182740 - DNA, 31 bp, Homo sapiens; identical to SEQ ID NO: 30046
  chr17:10555783-10555814
  hypo

SEQ ID NO: 182741 - DNA, 65 bp, Homo sapiens; identical to SEQ ID NO: 92098
  chr17:10561723-10561788
  hypo

SEQ ID NO: 182742 - DNA, 30 bp, Homo sapiens; identical to SEQ ID NO: 92099
  chr17:10584076-10584106
  hypo

SEQ ID NO: 182743 - DNA, 30 bp, Homo sapiens
  chr17:10598661-10598691
  hypo
atcttactcatcttcgtaccctccagattt

SEQ ID NO: 182744 - DNA, 27 bp, Homo sapiens
  chr17:10599471-10599498
  hypo
ccaattatggccgggcgcggtgggtca

SEQ ID NO: 182745 - DNA, 30 bp, Homo sapiens; identical to SEQ ID NO: 92100
  chr17:10604550-10604580
  hypo

SEQ ID NO: 182746 - DNA, 17 bp, Homo sapiens
  chr17:10631187-10631204
  hypo
atatttagagccgggcg

SEQ ID NO: 182747 - DNA, 946 bp, Homo sapiens; identical to SEQ ID NO: 128134
  chr17:10632699-10633645
  hypo

SEQ ID NO: 182748 - DNA, 30 bp, Homo sapiens
  chr17:11650974-11651004
  hypo
tatcagatcatgaaacggcgccccgtctgg

SEQ ID NO: 182749 - DNA, 30 bp, Homo sapiens
  chr17:11687632-11687662
  hypo
ttgtcctctccttcccgggggcagatgccc

SEQ ID NO: 182750 - DNA, 170 bp, Homo sapiens; identical to SEQ ID NO: 92102
  chr17:11774904-11775074
  hypo

SEQ ID NO: 182751 - DNA, 25 bp, Homo sapiens
  chr17:11791606-11791631
  hypo
ttacgtttttaaaagaaacccaata

SEQ ID NO: 182752 - DNA, 30 bp, Homo sapiens; identical to SEQ ID NO: 92104
  chr17:11913750-11913780
  hypo

SEQ ID NO: 182753 - DNA, 63 bp, Homo sapiens; identical to SEQ ID NO: 92105
  chr17:12018834-12018897
  hypo

SEQ ID NO: 182754 - DNA, 30 bp, Homo sapiens; identical to SEQ ID NO: 92106
  chr17:12019218-12019248
  hypo

SEQ ID NO: 182755 - DNA, 135 bp, Homo sapiens; identical to SEQ ID NO: 92107
  chr17:12032508-12032643
  hypo

SEQ ID NO: 182756 - DNA, 30 bp, Homo sapiens; identical to SEQ ID NO: 92108
  chr17:12127671-12127701
  hypo

SEQ ID NO: 182757 - DNA, 30 bp, Homo sapiens; identical to SEQ ID NO: 53724
  chr17:12490863-12490893
  hypo

SEQ ID NO: 182758 - DNA, 204 bp, Homo sapiens; identical to SEQ ID NO: 30049
  chr17:12517841-12518045
  hypo

SEQ ID NO: 182759 - DNA, 45 bp, Homo sapiens; identical to SEQ ID NO: 30050
  chr17:12744162-12744207
  hypo

SEQ ID NO: 182760 - DNA, 134 bp, Homo sapiens; identical to SEQ ID NO: 53727
  chr17:12877185-12877319
  hypo

SEQ ID NO: 182761 - DNA, 131 bp, Homo sapiens; identical to SEQ ID NO: 53728
  chr17:12877650-12877781
  hypo

SEQ ID NO: 182762 - DNA, 255 bp, Homo sapiens
  chr17:12890247-12890502
  hypo
ttgttttgtcccatacgttcaggtctctgagccagtgtagaatccatcatggtttgatgtggcccgtctgggactgtgatattggcatagctttttttttttttttttgtgacgttcatgttttgtcgtgttgattcctttctccgaatcctatcattgtgttcttgcagctgtgtgacatgagtggcgcagttttggatacgtgtgagggggattttcagggtaagctggccccggcctcgcccctccaccccg

SEQ ID NO: 182763 - DNA, 30 bp, Homo sapiens; identical to SEQ ID NO: 92114
  chr17:12895264-12895294
  hypo

SEQ ID NO: 182764 - DNA, 30 bp, Homo sapiens; identical to SEQ ID NO: 92115
  chr17:12899438-12899468
  hypo

SEQ ID NO: 182765 - DNA, 243 bp, Homo sapiens; identical to SEQ ID NO: 92116
  chr17:12905697-12905940
  hypo

SEQ ID NO: 182766 - DNA, 30 bp, Homo sapiens
  chr17:12906272-12906302
  hypo
aggtcaccccgcacccgagctcaactcata

SEQ ID NO: 182767 - DNA, 30 bp, Homo sapiens
  chr17:13124993-13125023
  hypo
gaaggggagaggaggcgtgtgatggacccg

SEQ ID NO: 182768 - DNA, 764 bp, Homo sapiens; identical to SEQ ID NO: 128147
  chr17:13505001-13505765
  hypo

SEQ ID NO: 182769 - DNA, 284 bp, Homo sapiens
  chr17:13950030-13950314
  hypo
acacaacaggcctgacgcaggatctacttcgtatactcagagcagtgttgacacaccaccatctcagacccgctagccatctagttcatgttgacaacccgagacccacagactgcttcccggcaccataagagatcttgcccactggagctagagtggggaagattgggaaggaggccaatttgagatgacctggagtctccagcaccgtacctttgtcctttttccagccatataaaaccctgctactaaaagtgtggtccacggaccgggagacttgatat

SEQ ID NO: 182770 - DNA, 31 bp, Homo sapiens; identical to SEQ ID NO: 30054
  chr17:14109918-14109949
  hypo

SEQ ID NO: 182771 - DNA, 30 bp, Homo sapiens; identical to SEQ ID NO: 92119
  chr17:14110396-14110426
  hypo

SEQ ID NO: 182772 - DNA, 30 bp, Homo sapiens; identical to SEQ ID NO: 30055
  chr17:14111629-14111659
  hypo

SEQ ID NO: 182773 - DNA, 308 bp, Homo sapiens; identical to SEQ ID NO: 53732
  chr17:14200598-14200906
  hypo

SEQ ID NO: 182774 - DNA, 285 bp, Homo sapiens; identical to SEQ ID NO: 53733
  chr17:14200930-14201215
  hypo

SEQ ID NO: 182775 - DNA, 1145 bp, Homo sapiens; identical to SEQ ID NO: 128153
  chr17:14203856-14205001
  hypo

SEQ ID NO: 182776 - DNA, 1196 bp, Homo sapiens; identical to SEQ ID NO: 128154
  chr17:14205182-14206378
  hypo

SEQ ID NO: 182777 - DNA, 86 bp, Homo sapiens; identical to SEQ ID NO: 128155
  chr17:14212386-14212472
  hypo

SEQ ID NO: 182778 - DNA, 130 bp, Homo sapiens; identical to SEQ ID NO: 128156
  chr17:14212588-14212718
  hypo

SEQ ID NO: 182779 - DNA, 45 bp, Homo sapiens; identical to SEQ ID NO: 30059
  chr17:14236461-14236506
  hypo

SEQ ID NO: 182780 - DNA, 39 bp, Homo sapiens
  chr17:14674673-14674712
  hypo
cgcgcccggcctcatttccactttcgattcctggccata

SEQ ID NO: 182781 - DNA, 81 bp, Homo sapiens
  chr17:14739355-14739436
  hypo
accgtgcccagccccgggtgttcttaagtggttgctgtcaggtacatctaccacgcagatgcaggtcgtctgctacagcga

SEQ ID NO: 182782 - DNA, 23 bp, Homo sapiens
  chr17:14897600-14897623
  hypo
gggcgcggtggctcacgcctgta

SEQ ID NO: 182783 - DNA, 30 bp, Homo sapiens; identical to SEQ ID NO: 11003
  chr17:14940884-14940914
  hypo

SEQ ID NO: 182784 - DNA, 30 bp, Homo sapiens; identical to SEQ ID NO: 92127
  chr17:15134336-15134366
  hypo

SEQ ID NO: 182785 - DNA, 30 bp, Homo sapiens; identical to SEQ ID NO: 92128
  chr17:15268977-15269007
  hypo

SEQ ID NO: 182786 - DNA, 90 bp, Homo sapiens; identical to SEQ ID NO: 92129
  chr17:15411142-15411232
  hypo

SEQ ID NO: 182787 - DNA, 154 bp, Homo sapiens; identical to SEQ ID NO: 92130
  chr17:15500063-15500217
  hypo

SEQ ID NO: 182788 - DNA, 31 bp, Homo sapiens; identical to SEQ ID NO: 92131
  chr17:15500646-15500677
  hypo

SEQ ID NO: 182789 - DNA, 25 bp, Homo sapiens
  chr17:15581232-15581257
  hypo
attataagaaaactatcggctgggt

SEQ ID NO: 182790 - DNA, 88 bp, Homo sapiens
  chr17:15608018-15608106
  hypo
gcaggagtttcatgcggaacagacctccagcatatggggtcccttcagggccctcgatggtgacctggaggtcggtgaggtcctcctc

SEQ ID NO: 182791 - DNA, 30 bp, Homo sapiens; identical to SEQ ID NO: 30062
  chr17:15646400-15646430
  hypo

SEQ ID NO: 182792 - DNA, 31 bp, Homo sapiens; identical to SEQ ID NO: 92135
  chr17:15721506-15721537
  hypo

SEQ ID NO: 182793 - DNA, 20 bp, Homo sapiens
  chr17:15723963-15723983
  hypo
ttttgagacagagtctcgct

SEQ ID NO: 182794 - DNA, 46 bp, Homo sapiens; identical to SEQ ID NO: 92137
  chr17:15843703-15843749
  hypo

SEQ ID NO: 182795 - DNA, 23 bp, Homo sapiens
  chr17:15858714-15858737
  hypo
ttttgtttttttttttcgagaca

SEQ ID NO: 182796 - DNA, 30 bp, Homo sapiens
  chr17:15860936-15860966
  hypo
tgcaggttgagagacgcagtagtggtcgag

SEQ ID NO: 182797 - DNA, 32 bp, Homo sapiens; identical to SEQ ID NO: 92139
  chr17:15870825-15870857
  hypo

SEQ ID NO: 182798 - DNA, 187 bp, Homo sapiens; identical to SEQ ID NO: 92140
  chr17:15873030-15873217
  hypo

SEQ ID NO: 182799 - DNA, 31 bp, Homo sapiens; identical to SEQ ID NO: 30064
  chr17:15945326-15945357
  hypo

SEQ ID NO: 182800 - DNA, 56 bp, Homo sapiens
  chr17:15952211-15952267
  hypo
tttctcatgcacaaccggaacctggggtggggagatgggctcgtagggctccgaag

SEQ ID NO: 182801 - DNA, 212 bp, Homo sapiens; identical to SEQ ID NO: 92143
  chr17:15952497-15952709
  hypo

SEQ ID NO: 182802 - DNA, 30 bp, Homo sapiens
  chr17:16011662-16011692
  hypo
gttttttttttctatcggtgcttctaaggt

SEQ ID NO: 182803 - DNA, 30 bp, Homo sapiens
  chr17:16012159-16012189
  hypo
cagaaacagtggaagcgacactttcacatt

SEQ ID NO: 182804 - DNA, 23 bp, Homo sapiens
  chr17:16074139-16074162
  hypo
gcgagactccatctcaaaaaaaa

SEQ ID NO: 182805 - DNA, 30 bp, Homo sapiens
  chr17:16075213-16075243
  hypo
tgttccagacgtggtcgcttcgattccagt

SEQ ID NO: 182806 - DNA, 30 bp, Homo sapiens
  chr17:16089963-16089993
  hypo
tcaagatgagaggaacgataatcagggact

SEQ ID NO: 182807 - DNA, 22 bp, Homo sapiens
  chr17:16138065-16138087
  hypo
aagactccgtctcaaaaataat

SEQ ID NO: 182808 - DNA, 121 bp, Homo sapiens
  chr17:16149816-16149937
  hypo
tccgtctcaaaaaaaaaaagtaaatacttaaagaagccagtttgaagattcaagaaaaatgcatcttagtctgcttgggctcccttaacaaaataccgtagacagtgtggcttaaacaata

SEQ ID NO: 182809 - DNA, 23 bp, Homo sapiens
  chr17:16150296-16150319
  hypo
ccggcccagatcaaggtcttgca

SEQ ID NO: 182810 - DNA, 26 bp, Homo sapiens
  chr17:16237435-16237461
  hypo
acaagctaaatttgatgatcacgccg

SEQ ID NO: 182811 - DNA, 25 bp, Homo sapiens
  chr17:16237760-16237785
  hypo
gatcgctttctgcacctagtgatac

SEQ ID NO: 182812 - DNA, 31 bp, Homo sapiens; identical to SEQ ID NO: 92148
  chr17:16248028-16248059
  hypo

SEQ ID NO: 182813 - DNA, 30 bp, Homo sapiens; identical to SEQ ID NO: 128169
  chr17:16256299-16256329
  hypo

SEQ ID NO: 182814 - DNA, 30 bp, Homo sapiens; identical to SEQ ID NO: 128170
  chr17:16256616-16256646
  hypo

SEQ ID NO: 182815 - DNA, 244 bp, Homo sapiens; identical to SEQ ID NO: 128171
  chr17:16256905-16257149
  hypo

SEQ ID NO: 182816 - DNA, 28 bp, Homo sapiens
  chr17:16277884-16277912
  hypo
atgcatgtatatatatatacacgtgtat

SEQ ID NO: 182817 - DNA, 391 bp, Homo sapiens; identical to SEQ ID NO: 92151
  chr17:16282250-16282641
  hypo

SEQ ID NO: 182818 - DNA, 23 bp, Homo sapiens
  chr17:16283543-16283566
  hypo
gcgtttttaaaacatgggagagg

SEQ ID NO: 182819 - DNA, 1162 bp, Homo sapiens; identical to SEQ ID NO: 53747
  chr17:16283956-16285118
  hypo

SEQ ID NO: 182820 - DNA, 31 bp, Homo sapiens; identical to SEQ ID NO: 30070
  chr17:16295226-16295257
  hypo

SEQ ID NO: 182821 - DNA, 41 bp, Homo sapiens; identical to SEQ ID NO: 92155
  chr17:16305046-16305087
  hypo

SEQ ID NO: 182822 - DNA, 257 bp, Homo sapiens; identical to SEQ ID NO: 128175
  chr17:16310307-16310564
  hypo

SEQ ID NO: 182823 - DNA, 210 bp, Homo sapiens; identical to SEQ ID NO: 92157
  chr17:16369822-16370032
  hypo

SEQ ID NO: 182824 - DNA, 30 bp, Homo sapiens; identical to SEQ ID NO: 30071
  chr17:16375606-16375636
  hypo

SEQ ID NO: 182825 - DNA, 30 bp, Homo sapiens; identical to SEQ ID NO: 30072
  chr17:16381204-16381234
  hypo

SEQ ID NO: 182826 - DNA, 122 bp, Homo sapiens; identical to SEQ ID NO: 92160
  chr17:16385290-16385412
  hypo

SEQ ID NO: 182827 - DNA, 30 bp, Homo sapiens
  chr17:16388062-16388092
  hypo
gcggacactgagggccgagcaggagcgagg

SEQ ID NO: 182828 - DNA, 30 bp, Homo sapiens
  chr17:16388381-16388411
  hypo
cccgcccctgcttggcgcgccaaggtctct

SEQ ID NO: 182829 - DNA, 274 bp, Homo sapiens
  chr17:16391198-16391472
  hypo
ctgcttaagaggtgtgcgccacacttcgagtaaaccaaccccatcagcctcttctcatgggaaagctggggtgctggtgaacacgaagacaggggctacctcagctgggtgtatcccagggaaacagacgcctttttctgctgctccatgacgcaggccgacagctcagtctaaaattttgaggactcagggaaactgctggggtgaagagatgacagctcaccctcaaggtggcctggcacttgccctctctcaatggcggaaggttatttct

SEQ ID NO: 182830 - DNA, 58 bp, Homo sapiens; identical to SEQ ID NO: 53752
  chr17:16395228-16395286
  hypo

SEQ ID NO: 182831 - DNA, 173 bp, Homo sapiens
  chr17:16399903-16400076
  hypo
cctcatccctcaaggcggctcgctgtaaacacagcactgagaagtggcccaggttaaaaatggtcagggtcttgcaatcttggcatacacagcaagatgtgtgagagtgcaagggacccacggaggatcatctcttccaatagtgagcacttcatgctcgacaaatgagcgca

SEQ ID NO: 182832 - DNA, 201 bp, Homo sapiens; identical to SEQ ID NO: 92163
  chr17:16434314-16434515
  hypo

SEQ ID NO: 182833 - DNA, 30 bp, Homo sapiens; identical to SEQ ID NO: 92164
  chr17:16470885-16470915
  hypo

SEQ ID NO: 182834 - DNA, 761 bp, Homo sapiens; identical to SEQ ID NO: 53755
  chr17:16472053-16472814
  hypo

SEQ ID NO: 182835 - DNA, 30 bp, Homo sapiens; identical to SEQ ID NO: 30076
  chr17:16521042-16521072
  hypo

SEQ ID NO: 182836 - DNA, 208 bp, Homo sapiens; identical to SEQ ID NO: 128187
  chr17:16570360-16570568
  hypo

SEQ ID NO: 182837 - DNA, 238 bp, Homo sapiens; identical to SEQ ID NO: 92168
  chr17:16923460-16923698
  hypo

SEQ ID NO: 182838 - DNA, 198 bp, Homo sapiens; identical to SEQ ID NO: 92169
  chr17:16927736-16927934
  hypo

SEQ ID NO: 182839 - DNA, 45 bp, Homo sapiens; identical to SEQ ID NO: 92170
  chr17:16929737-16929782
  hypo

SEQ ID NO: 182840 - DNA, 30 bp, Homo sapiens; identical to SEQ ID NO: 30079
  chr17:16934640-16934670
  hypo

SEQ ID NO: 182841 - DNA, 201 bp, Homo sapiens
  chr17:16960604-16960805
  hypo
catgaggcagtgtcacggggcggtgcaggggtggctcagctgctcggaggtacacgccttctttcttccctttttgtctgacctgaagatcatctgactgccaagaaagaggcaagttaatccttaaacattgttggaaggagggctgtggggcatgggagctgaaggctggagaccccagggagacgcggtgccttccca

SEQ ID NO: 182842 - DNA, 30 bp, Homo sapiens; identical to SEQ ID NO: 92172
  chr17:16976460-16976490
  hypo

SEQ ID NO: 182843 - DNA, 295 bp, Homo sapiens
  chr17:16994698-16994993
  hypo
gtaggcttcagagacagatgccgcttgctccgtgcagcatccctccctgcccggattggtgtgaacagggcagttgtcagcgagcagtgagcgaccaagagagacactcctcaaggctcagcccagcagatgctctcgtgcgtattaggtgctgggtgactgggggctgaatggaatgtgttgtccagggtcatgcggctggttgtcccagaaccatggctggacagccgacccttttccagtgcccttttcactacatcacatcccttgcggtcctcccggccctgcttaaaga

SEQ ID NO: 182844 - DNA, 120 bp, Homo sapiens; identical to SEQ ID NO: 92174
  chr17:17012231-17012351
  hypo

SEQ ID NO: 182845 - DNA, 227 bp, Homo sapiens
  chr17:17031179-17031406
  hypo
gtccagggccacatggcaaggcgtccaggagccagtgctgggtcccgggggcgctctctgcgggggtgtgctctcccctagagtcctcccctggagagaggcaggtttgcatttctgagcacctggagccgagctggaggagcacttctgtctcccacaatcttaatccagaaccatatgatcaagaatgtcaagggcctctgaagaaccctcgtggtacagtcgag

SEQ ID NO: 182846 - DNA, 30 bp, Homo sapiens
  chr17:17038095-17038125
  hypo
tgcctcttctgtcagcgcctgcggcctccc

SEQ ID NO: 182847 - DNA, 466 bp, Homo sapiens
  chr17:17045700-17046166
  hypo
ctgcagggcctctagcgcgggggcagagggtaggggcaagcgcaggcctgatgggagggagggccgtggaggggtgcaggcagagctcgggtcagctgagcacgtgtctagacaacctcggtgctgtgcaagcctgaggggaatcaggcccgggccaggccgggcatgggaggagtcggctcactgccacctcacagctcacctcactgccacctcagggcctcgtgtcctctcttgcaggaggtcccaggtgattgaaaagtttgaggccttggacattgagaaggcagagcacatggagaccaatgcagtggggccctcaccatccagcgacacacgccagggccgcagcgagaagagggcgttccctaggaagcgggtgagctcctggggctgggcagcacctcaggggtggctcgggggcgggtcagcatgcaccccatgcgccaagtcccctccacacagg

SEQ ID NO: 182848 - DNA, 30 bp, Homo sapiens; identical to SEQ ID NO: 92177
  chr17:17046980-17047010
  hypo

SEQ ID NO: 182849 - DNA, 786 bp, Homo sapiens
  chr17:17062273-17063059
  hypo
ccggctctccacacacgagctgacctctctgctcgagaaggaggtaatagcctgggaccagatccccaccctgctcccagcagcctttccagagcatcagctgtgcccagctgtggcctgaggggttcatctagacagtcctacccgcgagggacttgcagacccctaggggagacagacgcatagatgagtcctcatagttgaggcagacctgagagctgtgggagcgtgccagtgcatgcagggcagggaaaggggccttccaggcacagaggaattcttccgatggtgggggcccctgccattgagaggcaagcggcgttgcagggcctagatggtttcctcgttctgactcccgatggcaggaggggcgcgagcagggcaaggcttttgcattacgcagccctggcttggacaggtcaaagctgtaggcagagaccagccccaggtgctcttacagtggcttggggacggccgatcagatctgaagccaggggcatccagcaggagatgacagctgggtcctaggtcatgaggatatgaagcagaagacagtggtgaggcagggtaggctgtggatgaaggctgccctgtgactgtcactcctccacgaggccttcagtgcacctaggtacatagatgaacaagctggcccccgaactataaaataagatgttctttcatggaaatgtatgcagaaatccagtctgcagaacttcagtggtagattgacatgtctgggcagggagtctcgtagctggggaggtgtagcgttacagtttttgt

SEQ ID NO: 182850 - DNA, 30 bp, Homo sapiens; identical to SEQ ID NO: 30082
  chr17:17064688-17064718
  hypo

SEQ ID NO: 182851 - DNA, 485 bp, Homo sapiens
  chr17:17067429-17067914
  hypo
tggccgcctccccatcgggtgcctggcagaggctccatagagtcaaccaagaccttcaaagtgagcttgaagcccagtgccagcgccaggagctgattacacaccagattcagaccctgaagcgtagctatggggaggccaaggacacgatccggcaccacgaggctgagatccggagccttcaggcacggctcagcaatgcggccgctgagctagccatcaaggagcaggcgctggccaagctcaagggcgacctgaagcgggagcagggccgggtccgcgagcagctggaggagcggcaacacagcgaggcggcgctgagcagccagctgagggctagcgagcagaagctcaagagtgctgaggccctgctgctggagaagacgcaggagctacggggcctggagacacagcaggcgctgcagcgggaccggcagaaggaggtccagaggctgcaggagcgcattgccgacctcagccagcaa

SEQ ID NO: 182852 - DNA, 30 bp, Homo sapiens
  chr17:17068170-17068200
  hypo
gagaggccagcgtgcgcaggctcgcagagc

SEQ ID NO: 182853 - DNA, 30 bp, Homo sapiens
  chr17:17068857-17068887
  hypo
aaaggcaaagaatccggttctccacaatcc

SEQ ID NO: 182854 - DNA, 30 bp, Homo sapiens; identical to SEQ ID NO: 92182
  chr17:17071579-17071609
  hypo

SEQ ID NO: 182855 - DNA, 30 bp, Homo sapiens
  chr17:17072312-17072342
  hypo
tctgtgtgacggactcggccccacccagac

SEQ ID NO: 182856 - DNA, 30 bp, Homo sapiens; identical to SEQ ID NO: 30083
  chr17:17079842-17079872
  hypo

SEQ ID NO: 182857 - DNA, 352 bp, Homo sapiens; identical to SEQ ID NO: 30084
  chr17:17080459-17080811
  hypo

SEQ ID NO: 182858 - DNA, 201 bp, Homo sapiens; identical to SEQ ID NO: 92185
  chr17:17083736-17083937
  hypo

SEQ ID NO: 182859 - DNA, 30 bp, Homo sapiens
  chr17:17084714-17084744
  hypo
acacccacagcaccccgccgtccgaaggac

SEQ ID NO: 182860 - DNA, 30 bp, Homo sapiens; identical to SEQ ID NO: 92186
  chr17:17085387-17085417
  hypo

SEQ ID NO: 182861 - DNA, 30 bp, Homo sapiens; identical to SEQ ID NO: 30085
  chr17:17086026-17086056
  hypo

SEQ ID NO: 182862 - DNA, 240 bp, Homo sapiens; identical to SEQ ID NO: 92188
  chr17:17104697-17104937
  hypo

SEQ ID NO: 182863 - DNA, 402 bp, Homo sapiens
  chr17:17105842-17106244
  hypo
tcatgaaagcaccccgtggcaggtcgtgactgaagttattttggcaaaggagcaagaaaaaggtctggcccgaaataactgacccgaagtaacagaaatttccctttcctaaccttctttagttcaatttagtattctaatagacgagactttagtttaacgatttttttctagtgccgaggtctccctccctcagaacgcacagcagcccgcagggagggctcagccccattcttggttaggtttggctttcgctggaggtgccgcaagttctgtgccatgaaagcaatctccctccagctctggagacaggtggggcacagcttccgtgacttttctttggtgggaaaaaggtatactttgtagggttaaactgttcccagatgcgctcaaattcttcca

SEQ ID NO: 182864 - DNA, 30 bp, Homo sapiens
  chr17:17106824-17106854
  hypo
cagagaggccccggcgtctgagagcagagc

SEQ ID NO: 182865 - DNA, 30 bp, Homo sapiens; identical to SEQ ID NO: 92190
  chr17:17116752-17116782
  hypo

SEQ ID NO: 182866 - DNA, 239 bp, Homo sapiens
  chr17:17120249-17120488
  hypo
gcccccagtggagaccgtgtggtgcacagcggttctgtgctgggcagtcggtgcaccttggcatccccacctgacgccaggcaccaggccaatactgccctgcgccgcacacctaaggaaaagatgttctcacccgaagtacttcaaaagctgactggacgaggtccacgtctctgcttttccagatcacctggttccccatgagaacgtgccaggccagcatgcggaaagaaggggca

SEQ ID NO: 182867 - DNA, 128 bp, Homo sapiens
  chr17:17123824-17123952
  hypo
aaagggaagggtgcacgtcagaagcaaatccaggatgcgaagccaggtctgtctgatgccaaagggcaagccctgagcccgaaaccccatactgcgcatgcccagcacacctgcgtttccagctctca

SEQ ID NO: 182868 - DNA, 261 bp, Homo sapiens; identical to SEQ ID NO: 92192
  chr17:17124506-17124767
  hypo

SEQ ID NO: 182869 - DNA, 30 bp, Homo sapiens
  chr17:17127258-17127288
  hypo
catcgatgattccccggaccttccccagca

SEQ ID NO: 182870 - DNA, 99 bp, Homo sapiens
  chr17:17142227-17142326
  hypo
tcttgctgttggacagcgcaaacttaatttctgaggaggtagtaagttacagggtgattttattttattttattttagagacggagtcttgctatgtct

SEQ ID NO: 182871 - DNA, 30 bp, Homo sapiens; identical to SEQ ID NO: 30088
  chr17:17188364-17188394
  hypo

SEQ ID NO: 182872 - DNA, 60 bp, Homo sapiens
  chr17:17223896-17223956
  hypo
ggatcacgtttcccacgttggaaatcctgtgtgaggtgtgtgaggcgtccaggtgggtgg

SEQ ID NO: 182873 - DNA, 244 bp, Homo sapiens
  chr17:17224331-17224575
  hypo
gtggaggcagcttgtcggggacattctgcttcgaagggagcagctggaatgtgggggtcaaggctgtgtgtgtatatatctaaggcgggaggtgccagcacacgtttgaatgaggagtcatggaggaggatagcaagcgggcattcgggaggtgccagcacgtgtttgaatgaggagtcatggagaaggatagcaagcgggcattcgggaggtgccagcatgcgtttgaatgaggttcatggag

SEQ ID NO: 182874 - DNA, 30 bp, Homo sapiens
  chr17:17246725-17246755
  hypo
gtggcgctgggacagcggtagggctggtct

SEQ ID NO: 182875 - DNA, 207 bp, Homo sapiens
  chr17:17250659-17250866
  hypo
gaccaggaacccggcgactgaggtgcttccaggtggggacaagcccctcttggtctcagccacagcaccccttattccagctgccctgcccaacctgctcaccccacatgaccttctgtgtattcagcaaacactcactaggtgacagcggccaccaggctctgtgctgggggacgatactggccctggcctcgaccagcttagagg

SEQ ID NO: 182876 - DNA, 312 bp, Homo sapiens
  chr17:17251121-17251433
  hypo
tagtggtggtctcctcgggccacccacccactctcgttggtgagacttaggaggtgggtcttagtggtggtctcctcgggccacccacccactctcattggtgaggtttaggagatgggctccagacactcggttgctctctcaagtgcctccttcccgcacctgccccagtgcttcagagcagggtcccccgtccccctctcctccgctcttctcccaaggccaagtttctgtgggatcgcaggagccctgtggggaaggctggtgttagagtctcagcttctgttccttttgacccgctgggaagtgaca

SEQ ID NO: 182877 - DNA, 30 bp, Homo sapiens
  chr17:17254642-17254672
  hypo
cccgaggccatgcggcgttcgacctgggtc

SEQ ID NO: 182878 - DNA, 102 bp, Homo sapiens
  chr17:17255032-17255134
  hypo
tgcacttgggcagcccgccccggcggagggcaaccccttaatgagccttagcaggtggcatgtgggccagcgtgtcccagcacgagacgttcttgtgctggg

SEQ ID NO: 182879 - DNA, 31 bp, Homo sapiens; identical to SEQ ID NO: 92197
  chr17:17257801-17257832
  hypo

SEQ ID NO: 182880 - DNA, 19 bp, Homo sapiens
  chr17:17276195-17276214
  hypo
gcctcgagttgtccctgct

SEQ ID NO: 182881 - DNA, 125 bp, Homo sapiens
  chr17:17280605-17280730
  hypo
gttccccagcagcctgaacatcggagccactgatcttccagataaataggggcagacaaaggcgagtgagcagtgagctccagagaaaccagttgtgtccggccgcaaaaataatgtccctggct

SEQ ID NO: 182882 - DNA, 30 bp, Homo sapiens; identical to SEQ ID NO: 128196
  chr17:17286852-17286882
  hypo

SEQ ID NO: 182883 - DNA, 52 bp, Homo sapiens; identical to SEQ ID NO: 128197
  chr17:17287172-17287224
  hypo

SEQ ID NO: 182884 - DNA, 28 bp, Homo sapiens
  chr17:17287254-17287282
  hypo
cgtggccacgcgccgctgccagtccttg

SEQ ID NO: 182885 - DNA, 37 bp, Homo sapiens; identical to SEQ ID NO: 92199
  chr17:17303347-17303384
  hypo

SEQ ID NO: 182886 - DNA, 184 bp, Homo sapiens; identical to SEQ ID NO: 92200
  chr17:17325163-17325347
  hypo

SEQ ID NO: 182887 - DNA, 30 bp, Homo sapiens
  chr17:17326291-17326321
  hypo
gctgtccggcagcatcggtcatcacagaac

SEQ ID NO: 182888 - DNA, 31 bp, Homo sapiens; identical to SEQ ID NO: 92201
  chr17:17328456-17328487
  hypo

SEQ ID NO: 182889 - DNA, 78 bp, Homo sapiens; identical to SEQ ID NO: 30090
  chr17:17330585-17330663
  hypo

SEQ ID NO: 182890 - DNA, 248 bp, Homo sapiens
  chr17:17344147-17344395
  hypo
atgcagagagaacaccgtgttttggtttcaggcctttggccagggcggtgagagaggggtgtgtgtgtgtgtgtttagtgatggtagtggggtgatatttattttcatttctccatcataaaggaattgaagtcctatagcatgtcagcaatgtcaatgtttcagggtgaaataaacaagtaaaaggtgttagcgttcagatgagctctagcagcctgtgacgttaggaaaatcgccaactcctgggg

SEQ ID NO: 182891 - DNA, 31 bp, Homo sapiens; identical to SEQ ID NO: 30091
  chr17:17352482-17352513
  hypo

SEQ ID NO: 182892 - DNA, 30 bp, Homo sapiens; identical to SEQ ID NO: 92204
  chr17:17359806-17359836
  hypo

SEQ ID NO: 182893 - DNA, 814 bp, Homo sapiens; identical to SEQ ID NO: 128200
  chr17:17398322-17399136
  hypo

SEQ ID NO: 182894 - DNA, 633 bp, Homo sapiens; identical to SEQ ID NO: 128201
  chr17:17399419-17400052
  hypo

SEQ ID NO: 182895 - DNA, 53 bp, Homo sapiens; identical to SEQ ID NO: 30094
  chr17:17402428-17402481
  hypo

SEQ ID NO: 182896 - DNA, 31 bp, Homo sapiens; identical to SEQ ID NO: 92208
  chr17:17413541-17413572
  hypo

SEQ ID NO: 182897 - DNA, 30 bp, Homo sapiens
  chr17:17415879-17415909
  hypo
ccagtcccaggagcgcgaggcccaggctgt

SEQ ID NO: 182898 - DNA, 37 bp, Homo sapiens; identical to SEQ ID NO: 92209
  chr17:17431919-17431956
  hypo

SEQ ID NO: 182899 - DNA, 133 bp, Homo sapiens; identical to SEQ ID NO: 30095
  chr17:17447944-17448077
  hypo

SEQ ID NO: 182900 - DNA, 30 bp, Homo sapiens
  chr17:17466959-17466989
  hypo
gggtggcaggcaaagcgacaggtgtactgg

SEQ ID NO: 182901 - DNA, 164 bp, Homo sapiens; identical to SEQ ID NO: 92211
  chr17:17488194-17488358
  hypo

SEQ ID NO: 182902 - DNA, 31 bp, Homo sapiens; identical to SEQ ID NO: 92212
  chr17:17492208-17492239
  hypo

SEQ ID NO: 182903 - DNA, 93 bp, Homo sapiens; identical to SEQ ID NO: 92213
  chr17:17590234-17590327
  hypo

SEQ ID NO: 182904 - DNA, 32 bp, Homo sapiens
  chr17:17590446-17590478
  hypo
ccaccacgcccggctagttgagcaacctcttt

SEQ ID NO: 182905 - DNA, 131 bp, Homo sapiens
  chr17:17602524-17602655
  hypo
tcttcagtgctttttgcgctccctgccagggccctcaagacatctgtcggcaacatccttgactttggaatgctggaggcactgccccaggggacgcctggagccaagcacagcaccgctgcctcaggccc

SEQ ID NO: 182906 - DNA, 30 bp, Homo sapiens; identical to SEQ ID NO: 92214
  chr17:17613277-17613307
  hypo

SEQ ID NO: 182907 - DNA, 112 bp, Homo sapiens
  chr17:17614484-17614596
  hypo
tgcatgcaggtggggcgactgaggccctggaagaactctggtcacgtcctggctgggggttgtccctcctcgacagaaacacacaggccctggctgccgcagcacccctgga

SEQ ID NO: 182908 - DNA, 297 bp, Homo sapiens
  chr17:17615236-17615533
  hypo
ctgatggctgtcacgcggtgtccggccctgatgaccagatatgtgttttcaagagaagctggaatttggatttttatgtgaactctcctgattctcaaatgctggctccgttaacaaaaggcacagtgtggtttaaaccacacatgtccgcaggcagaggaccaccagtttctaatgtctgcgctgtggggcgcttgggtttttgcatttggttcttttacattccttattttattggaaacagcccaaatagtcactgagctgcaactctgtgctaggtgccggggctctatcagc

SEQ ID NO: 182909 - DNA, 93 bp, Homo sapiens; identical to SEQ ID NO: 30096
  chr17:17618836-17618929
  hypo

SEQ ID NO: 182910 - DNA, 30 bp, Homo sapiens; identical to SEQ ID NO: 30097
  chr17:17632248-17632278
  hypo

SEQ ID NO: 182911 - DNA, 241 bp, Homo sapiens
  chr17:17637948-17638189
  hypo
ccactgcagaggtgtcagggacggacctggtgcagaccagtgggcccacacctgctttcctatgtgcgggtcagagcgtgtaggtgtattacatgcctgcctgtgtgtctgcgtgtgagctccttggacacacacaggggcacatatctgtgcttgcatgtttgtacatctaagtgtgtgcgtatctgtgtgttctgacaccagctcgcgacaccagctcgccctccacaaagctatttcc

SEQ ID NO: 182912 - DNA, 30 bp, Homo sapiens; identical to SEQ ID NO: 92218
  chr17:17697449-17697479
  hypo

SEQ ID NO: 182913 - DNA, 36 bp, Homo sapiens
  chr17:17697717-17697753
  hypo
agcggctactcagccgagcccgcaggcacaccgctg

SEQ ID NO: 182914 - DNA, 30 bp, Homo sapiens
  chr17:17699198-17699228
  hypo
tgctgtgcccgaggcgcccatcgcaaagaa

SEQ ID NO: 182915 - DNA, 30 bp, Homo sapiens; identical to SEQ ID NO: 30099
  chr17:17699446-17699476
  hypo

SEQ ID NO: 182916 - DNA, 30 bp, Homo sapiens; identical to SEQ ID NO: 92221
  chr17:17700928-17700958
  hypo

SEQ ID NO: 182917 - DNA, 30 bp, Homo sapiens; identical to SEQ ID NO: 92222
  chr17:17708992-17709022
  hypo

SEQ ID NO: 182918 - DNA, 30 bp, Homo sapiens; identical to SEQ ID NO: 92223
  chr17:17716991-17717021
  hypo

SEQ ID NO: 182919 - DNA, 67 bp, Homo sapiens
  chr17:17717224-17717291
  hypo
atgcaccgcggggccgcccgcctctctcggcccccacacccgccaccggcccgggagcagctgtcca

SEQ ID NO: 182920 - DNA, 103 bp, Homo sapiens; identical to SEQ ID NO: 30100
  chr17:17717879-17717982
  hypo

SEQ ID NO: 182921 - DNA, 30 bp, Homo sapiens; identical to SEQ ID NO: 30101
  chr17:17747883-17747913
  hypo

SEQ ID NO: 182922 - DNA, 88 bp, Homo sapiens
  chr17:17748667-17748755
  hypo
gcgctggagctggagcggggcagttctgggagtgggtatgaaaaacagttttgctgggggctccccaggagggcgcctatttcagctt

SEQ ID NO: 182923 - DNA, 30 bp, Homo sapiens; identical to SEQ ID NO: 92227
  chr17:17779995-17780025
  hypo

SEQ ID NO: 182924 - DNA, 183 bp, Homo sapiens; identical to SEQ ID NO: 92228
  chr17:17881579-17881762
  hypo

SEQ ID NO: 182925 - DNA, 19 bp, Homo sapiens
  chr17:17894005-17894024
  hypo
ttactttttaaaacatttg

SEQ ID NO: 182926 - DNA, 30 bp, Homo sapiens
  chr17:17907830-17907860
  hypo
agtgccagaatctggcgatgcagctgcaca

SEQ ID NO: 182927 - DNA, 109 bp, Homo sapiens
  chr17:17908137-17908246
  hypo
aaacaaagacccctccgcattgcagcctgcagttgccgcttctcaggtgacgtgaggaggctgcaactcagcactaagtagtgaaaatgaaaagcgccgctgtctgaaa

SEQ ID NO: 182928 - DNA, 266 bp, Homo sapiens; identical to SEQ ID NO: 92230
  chr17:17910220-17910486
  hypo

SEQ ID NO: 182929 - DNA, 30 bp, Homo sapiens; identical to SEQ ID NO: 92231
  chr17:17910959-17910989
  hypo

SEQ ID NO: 182930 - DNA, 30 bp, Homo sapiens
  chr17:17917520-17917550
  hypo
atgtgacaccgtgcccggccagtgccaacg

SEQ ID NO: 182931 - DNA, 30 bp, Homo sapiens; identical to SEQ ID NO: 92232
  chr17:17970519-17970549
  hypo

SEQ ID NO: 182932 - DNA, 30 bp, Homo sapiens; identical to SEQ ID NO: 30103
  chr17:18022010-18022040
  hypo

SEQ ID NO: 182933 - DNA, 30 bp, Homo sapiens
  chr17:18023680-18023710
  hypo
tccgctgtgccctacggccaccctttctgg

SEQ ID NO: 182934 - DNA, 30 bp, Homo sapiens
  chr17:18024389-18024419
  hypo
gggcctctccacgggcgtcgcggaggcgag

SEQ ID NO: 182935 - DNA, 261 bp, Homo sapiens; identical to SEQ ID NO: 92234
  chr17:18024621-18024882
  hypo

SEQ ID NO: 182936 - DNA, 175 bp, Homo sapiens
  chr17:18026590-18026765
  hypo
ccctggccccggcggcggatgccccgcgctgtgtgggctgcagcgttgcgggagcggggcgcagggcgtctaggggtgaggggcaaggatgcctgggtcctccttaccctggaatacgtgagtggctgaattattcagggtctgcggctgctggcaagcacgtgggcagatgggt

SEQ ID NO: 182937 - DNA, 30 bp, Homo sapiens; identical to SEQ ID NO: 92235
  chr17:18070990-18071020
  hypo

SEQ ID NO: 182938 - DNA, 159 bp, Homo sapiens; identical to SEQ ID NO: 92236
  chr17:18083363-18083522
  hypo

SEQ ID NO: 182939 - DNA, 24 bp, Homo sapiens
  chr17:18110682-18110706
  hypo
aaaaaaatgttttggccggcacag

SEQ ID NO: 182940 - DNA, 189 bp, Homo sapiens; identical to SEQ ID NO: 30106
  chr17:18139365-18139554
  hypo

SEQ ID NO: 182941 - DNA, 99 bp, Homo sapiens; identical to SEQ ID NO: 92239
  chr17:18144919-18145018
  hypo

SEQ ID NO: 182942 - DNA, 30 bp, Homo sapiens; identical to SEQ ID NO: 92240
  chr17:18148225-18148255
  hypo

SEQ ID NO: 182943 - DNA, 454 bp, Homo sapiens
  chr17:18149872-18150326
  hypo
gcctggcctcgggctcgcggggctgccaggcacacctccagcttcccagggaagaggctctcgaacttcttttgcaggctgaaggtgaaggtgagccagcccatattggaggcttcacggccctgccagaagtacacgatgcactggaagtcctcctctggctgcttctcctctgcctcagcggttgcttcctcgccttctttgccctcggccttctcctccttgtcttccttcttttcctcctcctcgtactccacaggcacccagtacctgccgggttggaaggttgtgagcaggggctcgagcccccagcaccaggggagggacttggggaagggagtgctgaggtggtacctgcagaggaagacgtagcagtcctgcgtgtagaagtggccaaactcctcttccggcagccgcgcaaacttcttgccctccagcacgaaaccctccatgc

SEQ ID NO: 182944 - DNA, 30 bp, Homo sapiens; identical to SEQ ID NO: 92243
  chr17:18154709-18154739
  hypo

SEQ ID NO: 182945 - DNA, 30 bp, Homo sapiens
  chr17:18158517-18158547
  hypo
cttgaagatgtcatcggggactccggaatt

SEQ ID NO: 182946 - DNA, 261 bp, Homo sapiens; identical to SEQ ID NO: 92244
  chr17:18163100-18163361
  hypo

SEQ ID NO: 182947 - DNA, 78 bp, Homo sapiens
  chr17:18167536-18167614
  hypo
tcgggtgcctgatccggcccagcatggcctcggaggagctgctgctcgaggtgcagcacgaacgcctggagctcactg

SEQ ID NO: 182948 - DNA, 62 bp, Homo sapiens
  chr17:18267502-18267564
  hypo
taagaatgataaaaaccggggccacatgtcaggaccacctgaggctgcgtcataaatttttt

SEQ ID NO: 182949 - DNA, 39 bp, Homo sapiens; identical to SEQ ID NO: 92246
  chr17:18278352-18278391
  hypo

SEQ ID NO: 182950 - DNA, 30 bp, Homo sapiens
  chr17:18285795-18285825
  hypo
tgtggtgactgagccgccggctctcctgca

SEQ ID NO: 182951 - DNA, 140 bp, Homo sapiens; identical to SEQ ID NO: 92247
  chr17:18399915-18400055
  hypo

SEQ ID NO: 182952 - DNA, 80 bp, Homo sapiens
  chr17:18527461-18527541
  hypo
tcctgtcacaaatctgggaaacgataatatgggacattccacgatctaagaaaagggtccggccgggcgcggtggctcac

SEQ ID NO: 182953 - DNA, 31 bp, Homo sapiens; identical to SEQ ID NO: 92248
  chr17:18575701-18575732
  hypo

SEQ ID NO: 182954 - DNA, 30 bp, Homo sapiens; identical to SEQ ID NO: 92249
  chr17:18576457-18576487
  hypo

SEQ ID NO: 182955 - DNA, 218 bp, Homo sapiens
  chr17:18677635-18677853
  hypo
tttccctgtcacatacgtcagtttagaaggttgttacactctctttacttttcacagactccaggtaactacttggtttcatacgacaataaacaatatggtgtttggtagaaaaatacagttagatggaagggataagttccagcgtttggttgcacggtaggatgactacaattaacaataatgtatagccgggcgcagtgactcatgcctgtaat

SEQ ID NO: 182956 - DNA, 35 bp, Homo sapiens
  chr17:18760367-18760402
  hypo
tgggcgcgatggctcacgcctgtaaccccaggact

SEQ ID NO: 182957 - DNA, 30 bp, Homo sapiens; identical to SEQ ID NO: 92251
  chr17:18834052-18834082
  hypo

SEQ ID NO: 182958 - DNA, 197 bp, Homo sapiens
  chr17:18853336-18853533
  hypo
tcaaggggtgtggtacggatgacttctcagctaggacggtcttcatgtttcttggggtgagtgaataggtgatcccgttgggtcaggtggggtgggaatgtgggtgtgactgggcttcgggtggcgtttcttctcccgcagacatggctgggcttgtttggtacttctccctccatgtcctccgctgccaccctcct

SEQ ID NO: 182959 - DNA, 623 bp, Homo sapiens; identical to SEQ ID NO: 92253
  chr17:18854647-18855270
  hypo

SEQ ID NO: 182960 - DNA, 65 bp, Homo sapiens; identical to SEQ ID NO: 92254
  chr17:18855508-18855573
  hypo

SEQ ID NO: 182961 - DNA, 30 bp, Homo sapiens
  chr17:18874583-18874613
  hypo
ctggtaggcccaggcggcctgtctgccctc

SEQ ID NO: 182962 - DNA, 30 bp, Homo sapiens; identical to SEQ ID NO: 30109
  chr17:18878121-18878151
  hypo

SEQ ID NO: 182963 - DNA, 30 bp, Homo sapiens
  chr17:18881892-18881922
  hypo
cttggcaatctcgtcgacgctcttggcctt

SEQ ID NO: 182964 - DNA, 170 bp, Homo sapiens
  chr17:18885751-18885921
  hypo
ctcctgggacacccccggcacaggacagcagatgggtggagggatgccggggctggcccaagaggggtgccctggaaaagtctttggaccctctgggacctcagtttcctcataagtaagagaggacgtcaagggcgagtcagggcaggggaggacggccgggtggtgct

SEQ ID NO: 182965 - DNA, 95 bp, Homo sapiens; identical to SEQ ID NO: 92256
  chr17:18895395-18895490
  hypo

SEQ ID NO: 182966 - DNA, 31 bp, Homo sapiens; identical to SEQ ID NO: 92257
  chr17:18895944-18895975
  hypo

SEQ ID NO: 182967 - DNA, 30 bp, Homo sapiens; identical to SEQ ID NO: 92258
  chr17:18897235-18897265
  hypo

SEQ ID NO: 182968 - DNA, 31 bp, Homo sapiens; identical to SEQ ID NO: 92259
  chr17:18915678-18915709
  hypo

SEQ ID NO: 182969 - DNA, 30 bp, Homo sapiens; identical to SEQ ID NO: 92260
  chr17:18916385-18916415
  hypo

SEQ ID NO: 182970 - DNA, 191 bp, Homo sapiens; identical to SEQ ID NO: 92261
  chr17:18918296-18918487
  hypo

SEQ ID NO: 182971 - DNA, 329 bp, Homo sapiens; identical to SEQ ID NO: 53777
  chr17:19140729-19141058
  hypo

SEQ ID NO: 182972 - DNA, 21 bp, Homo sapiens
  chr17:19149655-19149676
  hypo
gagactgtctcaaaataataa

SEQ ID NO: 182973 - DNA, 20 bp, Homo sapiens
  chr17:19150088-19150108
  hypo
tttttttttttgaagcggag

SEQ ID NO: 182974 - DNA, 89 bp, Homo sapiens
  chr17:19203398-19203487
  hypo
cacctagctgccccatggttccgtggtgggcaggtctatgcaaatctacccccaatgtccggagaagcggaggggccaaggaaggaggc

SEQ ID NO: 182975 - DNA, 326 bp, Homo sapiens; identical to SEQ ID NO: 92263
  chr17:19211654-19211980
  hypo

SEQ ID NO: 182976 - DNA, 26 bp, Homo sapiens
  chr17:19212420-19212446
  hypo
ctcgtagtaacactacgagagacaaa

SEQ ID NO: 182977 - DNA, 30 bp, Homo sapiens
  chr17:19230096-19230126
  hypo
ctgcataccatgctgcgaggagtggatgga

SEQ ID NO: 182978 - DNA, 30 bp, Homo sapiens; identical to SEQ ID NO: 92264
  chr17:19232144-19232174
  hypo

SEQ ID NO: 182979 - DNA, 103 bp, Homo sapiens; identical to SEQ ID NO: 30112
  chr17:19233947-19234050
  hypo

SEQ ID NO: 182980 - DNA, 50 bp, Homo sapiens
  chr17:19234670-19234720
  hypo
cgtgaagcatcccgtcgtggcaatcacattcctaccggcctggctcagca

SEQ ID NO: 182981 - DNA, 30 bp, Homo sapiens
  chr17:19251730-19251760
  hypo
gaggcactttcacctcgccagtttcaggtg

SEQ ID NO: 182982 - DNA, 425 bp, Homo sapiens; identical to SEQ ID NO: 53783
  chr17:19282072-19282497
  hypo

SEQ ID NO: 182983 - DNA, 30 bp, Homo sapiens; identical to SEQ ID NO: 92267
  chr17:19284417-19284447
  hypo

SEQ ID NO: 182984 - DNA, 30 bp, Homo sapiens; identical to SEQ ID NO: 92268
  chr17:19285330-19285360
  hypo

SEQ ID NO: 182985 - DNA, 30 bp, Homo sapiens; identical to SEQ ID NO: 30114
  chr17:19287662-19287692
  hypo

SEQ ID NO: 182986 - DNA, 30 bp, Homo sapiens
  chr17:19319602-19319632
  hypo
cctggtcgaatgctcggtgtctgggtggca

SEQ ID NO: 182987 - DNA, 31 bp, Homo sapiens; identical to SEQ ID NO: 11031
  chr17:19391541-19391572
  hypo

SEQ ID NO: 182988 - DNA, 30 bp, Homo sapiens; identical to SEQ ID NO: 92271
  chr17:19398453-19398483
  hypo

SEQ ID NO: 182989 - DNA, 839 bp, Homo sapiens; identical to SEQ ID NO: 128239
  chr17:19436794-19437633
  hypo

SEQ ID NO: 182990 - DNA, 121 bp, Homo sapiens
  chr17:19513140-19513261
  hypo
aaactcgttttatagcaaatagtacaatgaacaaattgacatatataaaaaggaacaaacgatacatgtcataacatgtgaatctcaaacttttttttttttttgtgacggagtctcgctc

SEQ ID NO: 182991 - DNA, 19 bp, Homo sapiens
  chr17:19513500-19513519
  hypo
caggcgtgagccaccgcgc

SEQ ID NO: 182992 - DNA, 371 bp, Homo sapiens
  chr17:19551277-19551648
  hypo
tccacaagacaggaccgatcagctgagccaactgctgctgagtacagtgatgagagctgaagtctctcgcccgaaaggcaataaggcgggagggggaaacctgagggcagcgggttctctcttgggagcgggaacacggaaccatgggcagcgaggcaaatgcagcctggggagaagctctgagtaacggacgtgcgaggatgatgcttgtgcaagaaggaaatgaccgctgtcccggctccgcgggagacgaaccccggcttcccgccctcagggactagctctccagggaactgggacggtcagtgccggtcgaggcagctcctcgctgaaggaaggagcaggggacagggaagcggaatggggagcgc

SEQ ID NO: 182993 - DNA, 269 bp, Homo sapiens; identical to SEQ ID NO: 92274
  chr17:19606606-19606875
  hypo

SEQ ID NO: 182994 - DNA, 91 bp, Homo sapiens; identical to SEQ ID NO: 92275
  chr17:19616224-19616315
  hypo

SEQ ID NO: 182995 - DNA, 402 bp, Homo sapiens; identical to SEQ ID NO: 92276
  chr17:19617062-19617464
  hypo

SEQ ID NO: 182996 - DNA, 78 bp, Homo sapiens; identical to SEQ ID NO: 92277
  chr17:19618656-19618734
  hypo

SEQ ID NO: 182997 - DNA, 149 bp, Homo sapiens; identical to SEQ ID NO: 92278
  chr17:19623342-19623491
  hypo

SEQ ID NO: 182998 - DNA, 17 bp, Homo sapiens
  chr17:19627158-19627175
  hypo
cccggccgcctgatttc

SEQ ID NO: 182999 - DNA, 66 bp, Homo sapiens; identical to SEQ ID NO: 92279
  chr17:19641467-19641533
  hypo

SEQ ID NO: 183000 - DNA, 59 bp, Homo sapiens; identical to SEQ ID NO: 92280
  chr17:19642883-19642942
  hypo

SEQ ID NO: 183001 - DNA, 38 bp, Homo sapiens; identical to SEQ ID NO: 92281
  chr17:19643640-19643678
  hypo

SEQ ID NO: 183002 - DNA, 175 bp, Homo sapiens; identical to SEQ ID NO: 92282
  chr17:19644759-19644934
  hypo

SEQ ID NO: 183003 - DNA, 31 bp, Homo sapiens; identical to SEQ ID NO: 92283
  chr17:19645605-19645636
  hypo

SEQ ID NO: 183004 - DNA, 375 bp, Homo sapiens; identical to SEQ ID NO: 92284
  chr17:19646479-19646854
  hypo

SEQ ID NO: 183005 - DNA, 37 bp, Homo sapiens
  chr17:19647411-19647448
  hypo
tgaaaagtgcagtagcaggcccggcgctgtggctcat

SEQ ID NO: 183006 - DNA, 89 bp, Homo sapiens; identical to SEQ ID NO: 92285
  chr17:19650044-19650133
  hypo

SEQ ID NO: 183007 - DNA, 25 bp, Homo sapiens
  chr17:19655704-19655729
  hypo
catatttaggtagaaataatacgac

SEQ ID NO: 183008 - DNA, 30 bp, Homo sapiens; identical to SEQ ID NO: 92286
  chr17:19675242-19675272
  hypo

SEQ ID NO: 183009 - DNA, 31 bp, Homo sapiens; identical to SEQ ID NO: 92287
  chr17:19680416-19680447
  hypo

SEQ ID NO: 183010 - DNA, 45 bp, Homo sapiens; identical to SEQ ID NO: 92288
  chr17:19686486-19686531
  hypo

SEQ ID NO: 183011 - DNA, 105 bp, Homo sapiens; identical to SEQ ID NO: 92289
  chr17:19687002-19687107
  hypo

SEQ ID NO: 183012 - DNA, 31 bp, Homo sapiens; identical to SEQ ID NO: 92290
  chr17:19721310-19721341
  hypo

SEQ ID NO: 183013 - DNA, 121 bp, Homo sapiens; identical to SEQ ID NO: 92291
  chr17:19736606-19736727
  hypo

SEQ ID NO: 183014 - DNA, 30 bp, Homo sapiens; identical to SEQ ID NO: 92292
  chr17:19741968-19741998
  hypo

SEQ ID NO: 183015 - DNA, 17 bp, Homo sapiens
  chr17:19769520-19769537
  hypo
aagtaggccgggagccg

SEQ ID NO: 183016 - DNA, 76 bp, Homo sapiens; identical to SEQ ID NO: 92293
  chr17:19769836-19769912
  hypo

SEQ ID NO: 183017 - DNA, 211 bp, Homo sapiens
  chr17:19771617-19771828
  hypo
ggaaaaccagagttcacgctgccaaactgccagccttcggacgcctctcggggtttactcgcttaggatccctagagggacggtgacaggcgggattctgcaccttttgggggtcccttgactgcgagaagctggtgacagctcagggccctcttcgcagagaatcgtttctgcacaccgactcagaatcgcacacgttttcaaggttctc

SEQ ID NO: 183018 - DNA, 72 bp, Homo sapiens
  chr17:19772162-19772234
  hypo
tcacacgctcaaaacgtagggccttgagtttctgcttctgctactgtgcacgcttacgttatcctgtcctta

SEQ ID NO: 183019 - DNA, 46 bp, Homo sapiens; identical to SEQ ID NO: 92296
  chr17:19773272-19773318
  hypo

SEQ ID NO: 183020 - DNA, 30 bp, Homo sapiens; identical to SEQ ID NO: 30122
  chr17:19842112-19842142
  hypo

SEQ ID NO: 183021 - DNA, 90 bp, Homo sapiens; identical to SEQ ID NO: 92298
  chr17:19842321-19842411
  hypo

SEQ ID NO: 183022 - DNA, 94 bp, Homo sapiens; identical to SEQ ID NO: 92299
  chr17:19861687-19861781
  hypo

SEQ ID NO: 183023 - DNA, 155 bp, Homo sapiens
  chr17:19890246-19890401
  hypo
gcgcccagccccagtccatttttaaataaggaaaggaatgtgagctggggccgtagcatgcctgggcatgtagtaaaatcagaaagaaggaaaaggagaagaaaggcggggggtggtacttggaattagagaataagaagcggatcagcctgttt

SEQ ID NO: 183024 - DNA, 121 bp, Homo sapiens
  chr17:19902537-19902658
  hypo
tgagcgagactccgtctccaaaaaaaaaagagaaatatgggagtcatcagtctaccgatggtatttaaagccatgaggcaggaggagtttatgaggggagcaagtataggtagagaggccg

SEQ ID NO: 183025 - DNA, 101 bp, Homo sapiens
  chr17:19989100-19989201
  hypo
caatggcggactcccgctgcatgtgcgagtggatggatattccctgttcagtggaggggatatccaccacgactctgggtacccacggcgggatgcagatg

SEQ ID NO: 183026 - DNA, 173 bp, Homo sapiens
  chr17:20013841-20014014
  hypo
gagctcacggagagccgcctgaggagcggcacaggtaggagggaccgggcaggtgggctcggcaggccatcagtcctggccgcatggaagcacttcagtgacccatgacccatccattccttccctcgtgaaatatttcttgaccacttaccctgggccggaactgttttagg

SEQ ID NO: 183027 - DNA, 31 bp, Homo sapiens; identical to SEQ ID NO: 92302
  chr17:20014223-20014254
  hypo

SEQ ID NO: 183028 - DNA, 29 bp, Homo sapiens
  chr17:20039442-20039471
  hypo
cattgcactgggcgcggtggctcacactt

SEQ ID NO: 183029 - DNA, 30 bp, Homo sapiens
  chr17:20047025-20047055
  hypo
aagcatctctttcagcggtggtaccttcgt

SEQ ID NO: 183030 - DNA, 247 bp, Homo sapiens; identical to SEQ ID NO: 128250
  chr17:20059179-20059426
  hypo

SEQ ID NO: 183031 - DNA, 121 bp, Homo sapiens; identical to SEQ ID NO: 92305
  chr17:20065369-20065490
  hypo

SEQ ID NO: 183032 - DNA, 35 bp, Homo sapiens
  chr17:20065729-20065764
  hypo
attacagacgtgagccaccgcgcccggcccaggca

SEQ ID NO: 183033 - DNA, 84 bp, Homo sapiens; identical to SEQ ID NO: 92307
  chr17:20087135-20087219
  hypo

SEQ ID NO: 183034 - DNA, 31 bp, Homo sapiens
  chr17:20091862-20091893
  hypo
tacaggcgtgagccaccgtgcccggcttgta

SEQ ID NO: 183035 - DNA, 30 bp, Homo sapiens
  chr17:20092096-20092126
  hypo
ttcaaaggatacggacgattccttaaattt

SEQ ID NO: 183036 - DNA, 378 bp, Homo sapiens
  chr17:20107949-20108327
  hypo
gaaaaggactctgaacgctgaggggactgatgctttgggcccaaatgtcgatggaacatcagtctccccaggtgacacggaacctatgataagagctcttgaggagaagaacaagaactttcagaaagagctttccgatctagaggaagaaaaccgggtcctgaaggagaaactgatctatcttgagcactccccaaattcagaaggggcagcaagtcacactggcgacagcagctgcccaacatccataactcaagagtcaagcttcggaagcccaactggaaatcagatgtccagtgacattgatgagtataaaaaaaacatacatggaaatgcattacggacatcaggctcctcaagtagcgatgttaccaaagc

SEQ ID NO: 183037 - DNA, 30 bp, Homo sapiens; identical to SEQ ID NO: 92309
  chr17:20108877-20108907
  hypo

SEQ ID NO: 183038 - DNA, 30 bp, Homo sapiens
  chr17:20120793-20120823
  hypo
tttgctcagggtgctcgacctctaggctgc

SEQ ID NO: 183039 - DNA, 30 bp, Homo sapiens
  chr17:20132635-20132665
  hypo
cgcaagctcttgtcccgttgtgcgtgagtt

SEQ ID NO: 183040 - DNA, 30 bp, Homo sapiens
  chr17:20134726-20134756
  hypo
gagtgcgagggaggccggactcggtatgca

SEQ ID NO: 183041 - DNA, 30 bp, Homo sapiens
  chr17:20135176-20135206
  hypo
ttcctatgaattacccgctccgaggtgtgg

SEQ ID NO: 183042 - DNA, 30 bp, Homo sapiens; identical to SEQ ID NO: 30126
  chr17:20137404-20137434
  hypo

SEQ ID NO: 183043 - DNA, 79 bp, Homo sapiens; identical to SEQ ID NO: 92311
  chr17:20141014-20141093
  hypo

SEQ ID NO: 183044 - DNA, 28 bp, Homo sapiens
  chr17:20147514-20147542
  hypo
ctgggcgacagagcgagactctgtctca

SEQ ID NO: 183045 - DNA, 43 bp, Homo sapiens
  chr17:20163531-20163574
  hypo
cttggcccgggaatacggtggttccaagcgcaatgctctactg

SEQ ID NO: 183046 - DNA, 30 bp, Homo sapiens
  chr17:20163832-20163862
  hypo
aaatgtatggctgcacgcagagctgcacct

SEQ ID NO: 183047 - DNA, 77 bp, Homo sapiens
  chr17:20170297-20170374
  hypo
ctgggaagtgagcatcgcagccagacccacctgccgagctccgggccaactgcctgacatctcgagtggcccaggat

SEQ ID NO: 183048 - DNA, 30 bp, Homo sapiens
  chr17:20177638-20177668
  hypo
ctgagtgcggcacagcgccctgggcctcag

SEQ ID NO: 183049 - DNA, 138 bp, Homo sapiens
  chr17:20190316-20190454
  hypo
taggccatcggctgccgtcagcagcctcccctgcctcccctgggctctgctgatgagggtgcaacacactgcatagctcatagcctctgtacgtggtctgcaagggaacagtaatttaaatgacatggctttggccgg

SEQ ID NO: 183050 - DNA, 30 bp, Homo sapiens
  chr17:20197922-20197952
  hypo
ttatgaaggtaatgacgacggtggtgggga

SEQ ID NO: 183051 - DNA, 30 bp, Homo sapiens
  chr17:20204007-20204037
  hypo
gctgcccaggcctcccgcagccgtggcagc

SEQ ID NO: 183052 - DNA, 30 bp, Homo sapiens
  chr17:20204494-20204524
  hypo
cccaacaggcagactcgtaccatataaaac

SEQ ID NO: 183053 - DNA, 34 bp, Homo sapiens; identical to SEQ ID NO: 92313
  chr17:20220060-20220094
  hypo

SEQ ID NO: 183054 - DNA, 83 bp, Homo sapiens
  chr17:20467687-20467770
  hypo
ccatctcaaaaaaaaaaaaaaaaagagtttagcggacctgcagccgtgcttggagtttgcagacgctgcgtcactgtcaccac

SEQ ID NO: 183055 - DNA, 30 bp, Homo sapiens; identical to SEQ ID NO: 30128
  chr17:20516157-20516187
  hypo

SEQ ID NO: 183056 - DNA, 154 bp, Homo sapiens; identical to SEQ ID NO: 92315
  chr17:20805560-20805714
  hypo

SEQ ID NO: 183057 - DNA, 44 bp, Homo sapiens
  chr17:20817538-20817582
  hypo
gagcccagcaatgaaccgagtcagtgacattacagacttcatga

SEQ ID NO: 183058 - DNA, 43 bp, Homo sapiens; identical to SEQ ID NO: 92317
  chr17:20817881-20817924
  hypo

SEQ ID NO: 183059 - DNA, 188 bp, Homo sapiens; identical to SEQ ID NO: 92318
  chr17:20841353-20841541
  hypo

SEQ ID NO: 183060 - DNA, 252 bp, Homo sapiens
  chr17:20903658-20903910
  hypo
cagtgccagggccgccgccgcctcctgtgagcagctcttcagcagcaggcatcaggtaactgcttagaacggcaatgccacagtggaataagggggactaacttggatacgaaagtttagaataatgcccaccaaaaatccatgtgactccatctctcttcccagttctaatgttctcagaacagcagccacccctgaatgcaagtggagacaggaaggggactaggggttggccggcgggaggggaggcag

SEQ ID NO: 183061 - DNA, 134 bp, Homo sapiens
  chr17:20905668-20905802
  hypo
tttgtggaaaaaggagcgggagagggataagaaaatgcctgtttctagaaaaccgcgagatgcttccacgtgcagcttgatgctgttacctgcagaacagacacgcttgaaaacgcgacgtagtgtccgtactt

SEQ ID NO: 183062 - DNA, 30 bp, Homo sapiens
  chr17:20906168-20906198
  hypo
tggtccatcccgacccgatgggtcccaggt

SEQ ID NO: 183063 - DNA, 30 bp, Homo sapiens
  chr17:20906476-20906506
  hypo
gcgctctgcacaggtcggccaggcccgagt

SEQ ID NO: 183064 - DNA, 440 bp, Homo sapiens; identical to SEQ ID NO: 92320
  chr17:20908043-20908483
  hypo

SEQ ID NO: 183065 - DNA, 196 bp, Homo sapiens; identical to SEQ ID NO: 30130
  chr17:20914086-20914282
  hypo

SEQ ID NO: 183066 - DNA, 30 bp, Homo sapiens
  chr17:20914497-20914527
  hypo
acacgtggctttccccgtttaccacgttgc

SEQ ID NO: 183067 - DNA, 186 bp, Homo sapiens; identical to SEQ ID NO: 92322
  chr17:20919059-20919245
  hypo

SEQ ID NO: 183068 - DNA, 131 bp, Homo sapiens; identical to SEQ ID NO: 92323
  chr17:20920702-20920833
  hypo

SEQ ID NO: 183069 - DNA, 95 bp, Homo sapiens; identical to SEQ ID NO: 92324
  chr17:20950573-20950668
  hypo

SEQ ID NO: 183070 - DNA, 30 bp, Homo sapiens
  chr17:20979069-20979099
  hypo
aagtggaggaggccacggagatgcacgagg

SEQ ID NO: 183071 - DNA, 18 bp, Homo sapiens
  chr17:21048624-21048642
  hypo
agacgccgtctaaaaaaa

SEQ ID NO: 183072 - DNA, 30 bp, Homo sapiens; identical to SEQ ID NO: 30132
  chr17:21096617-21096647
  hypo

SEQ ID NO: 183073 - DNA, 44 bp, Homo sapiens; identical to SEQ ID NO: 92326
  chr17:21100033-21100077
  hypo

SEQ ID NO: 183074 - DNA, 30 bp, Homo sapiens; identical to SEQ ID NO: 92327
  chr17:21101945-21101975
  hypo

SEQ ID NO: 183075 - DNA, 366 bp, Homo sapiens
  chr17:21103995-21104361
  hypo
tggcccatgtacctgaagctccgaatgtgcctgacaggaactagcttcctttcatggctaacgagaagcacagccctcagtgtgcacagacgcgaaggtcccgtccgcccagcctgtcctggcaggcacacctggctgcggtgcagaggagagtcatggggagctgagccacctggccattggccgtaatatgggagtgacgagtgaagacattcataacaagccaccccagaacctcagcccagcatgaaggtaactccctccagcctccttcaaagatgggagcaattccaagtgaaggatggtggaaatcggactgtcgggaaacttcaaggaaaaagaacaggcaatcgtagttcttcctac

SEQ ID NO: 183076 - DNA, 42 bp, Homo sapiens; identical to SEQ ID NO: 92329
  chr17:21128220-21128262
  hypo

SEQ ID NO: 183077 - DNA, 30 bp, Homo sapiens; identical to SEQ ID NO: 92330
  chr17:21144258-21144288
  hypo

SEQ ID NO: 183078 - DNA, 30 bp, Homo sapiens; identical to SEQ ID NO: 30133
  chr17:21157484-21157514
  hypo

SEQ ID NO: 183079 - DNA, 30 bp, Homo sapiens; identical to SEQ ID NO: 92332
  chr17:21160073-21160103
  hypo

SEQ ID NO: 183080 - DNA, 84 bp, Homo sapiens; identical to SEQ ID NO: 30134
  chr17:21160807-21160891
  hypo

SEQ ID NO: 183081 - DNA, 31 bp, Homo sapiens; identical to SEQ ID NO: 30135
  chr17:21196972-21197003
  hypo

SEQ ID NO: 183082 - DNA, 88 bp, Homo sapiens; identical to SEQ ID NO: 92335
  chr17:21204235-21204323
  hypo

SEQ ID NO: 183083 - DNA, 30 bp, Homo sapiens; identical to SEQ ID NO: 92336
  chr17:21220792-21220822
  hypo

SEQ ID NO: 183084 - DNA, 48 bp, Homo sapiens; identical to SEQ ID NO: 30136
  chr17:21221774-21221822
  hypo

SEQ ID NO: 183085 - DNA, 27 bp, Homo sapiens
  chr17:21702938-21702965
  hypo
cgtgagccaccgcgcccggcctaaact

SEQ ID NO: 183086 - DNA, 182 bp, Homo sapiens; identical to SEQ ID NO: 30137
  chr17:21793591-21793773
  hypo

SEQ ID NO: 183087 - DNA, 216 bp, Homo sapiens; identical to SEQ ID NO: 92339
  chr17:21832213-21832429
  hypo

SEQ ID NO: 183088 - DNA, 212 bp, Homo sapiens
  chr17:25336165-25336377
  hypo
gttcttgtagctgagcggaaatgcccacagcatctgcatctggcacgtgcctgggggcctgcagccgcaacaacctcaaccggagatactgatggtgtggaaaggcagagacactgatggtgcgaaaaggaaaaggcgtctgggagggcctgtgagctggagggcagccatcggggaggtggaggagaaccctgaggcgggtttctccacat

SEQ ID NO: 183089 - DNA, 26 bp, Homo sapiens
  chr17:25432197-25432223
  hypo
cccccgtggagatttttttaaataaa

SEQ ID NO: 183090 - DNA, 30 bp, Homo sapiens
  chr17:25485128-25485158
  hypo
cagcccggaaaattccgaggctgcgcagtt

SEQ ID NO: 183091 - DNA, 131 bp, Homo sapiens
  chr17:25485412-25485543
  hypo
caggcgagagtacatcgctgacgacgtccacagagtcctccttcccctccatgcctcatggacttgtcgccaggcaacggtgactttcactgtgaggagagccatggctcacggctcgcgcctggtgccct

SEQ ID NO: 183092 - DNA, 121 bp, Homo sapiens
  chr17:25619835-25619956
  hypo
ggggcgatgttttattaaacatttcgctatttgaagaattaatacactcatgcaaagaaaagatgaagtaaacatgccctacagtgttatcatttgagatctcttaaaagcggctatgcag

SEQ ID NO: 183093 - DNA, 460 bp, Homo sapiens; identical to SEQ ID NO: 92343
  chr17:25620255-25620715
  hypo

SEQ ID NO: 183094 - DNA, 202 bp, Homo sapiens
  chr17:25676852-25677054
  hypo
ggttggggcctagcccgagggctgtcacacccccgcctggtgtgcgcatgctaggggcagtgctgacacgctccactggtttcagatcaactttggagaatttggcgatagctagttaaagccgaagatgtgcatgcactgtgatctagcaaccatatgcctcgcaaaacaggccgggcgcggtgactcatgcctgtaatcc

SEQ ID NO: 183095 - DNA, 73 bp, Homo sapiens; identical to SEQ ID NO: 92344
  chr17:25680100-25680173
  hypo

SEQ ID NO: 183096 - DNA, 119 bp, Homo sapiens
  chr17:25748140-25748259
  hypo
tgcccggtcagagcccgggaggtgaaggtaagagcctgatccatgggggggctggtccagggacggggggactcggcgagtggtcagtgaggcagagaaagcagcgggcctgggcggta

SEQ ID NO: 183097 - DNA, 128 bp, Homo sapiens
  chr17:25829640-25829768
  hypo
gtcaggagccctcctcgggggcaggcactggtttttcatctttctgtgcttgctcacacttgagcgtcagcacattccagaacctacctcaaccgtaatcacggcacagatgtcgtttgacttcagtt

SEQ ID NO: 183098 - DNA, 167 bp, Homo sapiens; identical to SEQ ID NO: 92345
  chr17:25842423-25842590
  hypo

SEQ ID NO: 183099 - DNA, 595 bp, Homo sapiens
  chr17:25878806-25879401
  hypo
ctgcctccagcaccacggtccaggccgctgtcacctcctgcagaatctctgcagtggcacctcgccccttgcattccattttccacccagcagccagggtgctcacctagaaaggtgacttggatcccatcctttttcagtgcttcctgtttccttcaggataaacgccagatgccttccttgatctggcctctctcgcctctgtttgctcaccttctcctttgctcggtagactctaacctttgcacttgctccccacttccctggagtgctctgcccatgactcatcccttgaatatttttctggtgttgagtgttgtcaccgcctccaggcagtcgtccctggtgatgtgatctaaagatcatcccctgcccatcattctcgcctgcgcacctgagtttattttctcaatgacactgaccactttctggagtgacctaaccgatttgttgtctgtggtctgtctgctccccctgggatgcgagcaccatgagacacggccttgctgtttgggtttgtttgccacaaaatccccattgagtgtcgggcccaatatggcagttgcttggttgcgacagatataaaaataaatac

SEQ ID NO: 183100 - DNA, 30 bp, Homo sapiens; identical to SEQ ID NO: 92348
  chr17:25898810-25898840
  hypo

SEQ ID NO: 183101 - DNA, 174 bp, Homo sapiens
  chr17:25904460-25904634
  hypo
ggctcccggcccagccgactgctcaccgcctctctgcctgtccctctgtccccttaggagatcccccgagacctcacgctggatgccctgctggagatgaatgaggccaaggtgaaggagacgctgcggcgctgtggggccagcggggatgagtgtggccgtctgcagtatgcc

SEQ ID NO: 183102 - DNA, 282 bp, Homo sapiens; identical to SEQ ID NO: 92350
  chr17:25907594-25907876
  hypo

SEQ ID NO: 183103 - DNA, 30 bp, Homo sapiens
  chr17:25927626-25927656
  hypo
attatttcccgccagcgtcaccacagacac

SEQ ID NO: 183104 - DNA, 45 bp, Homo sapiens
  chr17:25928309-25928354
  hypo
cggtacctgcaattccgctcctccctcctgcgttggccgttctgt

SEQ ID NO: 183105 - DNA, 30 bp, Homo sapiens; identical to SEQ ID NO: 30143
  chr17:25930890-25930920
  hypo

SEQ ID NO: 183106 - DNA, 61 bp, Homo sapiens
  chr17:25931231-25931292
  hypo
tgagcacttgactcacattcccgcatctcaccctcagcgcggtggtaggtatcaaagtagg

SEQ ID NO: 183107 - DNA, 290 bp, Homo sapiens; identical to SEQ ID NO: 92353
  chr17:25931552-25931842
  hypo

SEQ ID NO: 183108 - DNA, 35 bp, Homo sapiens; identical to SEQ ID NO: 30146
  chr17:25933866-25933901
  hypo

SEQ ID NO: 183109 - DNA, 229 bp, Homo sapiens; identical to SEQ ID NO: 30147
  chr17:25934803-25935032
  hypo

SEQ ID NO: 183110 - DNA, 323 bp, Homo sapiens; identical to SEQ ID NO: 92356
  chr17:25936169-25936492
  hypo

SEQ ID NO: 183111 - DNA, 22 bp, Homo sapiens
  chr17:25947018-25947040
  hypo
cggccttcgggccctgtcttga

SEQ ID NO: 183112 - DNA, 98 bp, Homo sapiens
  chr17:25948171-25948269
  hypo
actgcgctcttcccacgcctggtggaatggtcgctgggcactcccagtcgctggaggagccgctactatggaaaaggacgctacggccaccctgactt

SEQ ID NO: 183113 - DNA, 111 bp, Homo sapiens
  chr17:25970769-25970880
  hypo
ttccctgtctctgtccgctgggcacccagagctggggacctgggggtcaccctggattcttcactccctcttctttacgtctctccaaggcacgaacgtgtctccctcctg

SEQ ID NO: 183114 - DNA, 119 bp, Homo sapiens
  chr17:25971186-25971305
  hypo
tgctgtccctggtcccggaagcaccctctgccagcctgcctcgagcacatgcctaattgcccttccatgctctgcctaagtgccgctcctctgggagtcctccccgcctggaatattgt

SEQ ID NO: 183115 - DNA, 30 bp, Homo sapiens; identical to SEQ ID NO: 92359
  chr17:26117800-26117830
  hypo

SEQ ID NO: 183116 - DNA, 394 bp, Homo sapiens; identical to SEQ ID NO: 53806
  chr17:26120456-26120850
  hypo

SEQ ID NO: 183117 - DNA, 63 bp, Homo sapiens; identical to SEQ ID NO: 53807
  chr17:26120901-26120964
  hypo

SEQ ID NO: 183118 - DNA, 30 bp, Homo sapiens
  chr17:26129039-26129069
  hypo
acaagatggccgggcgtggtggttcatgcc

SEQ ID NO: 183119 - DNA, 30 bp, Homo sapiens; identical to SEQ ID NO: 30149
  chr17:26206829-26206859
  hypo

SEQ ID NO: 183120 - DNA, 30 bp, Homo sapiens; identical to SEQ ID NO: 92363
  chr17:26216056-26216086
  hypo

SEQ ID NO: 183121 - DNA, 24 bp, Homo sapiens
  chr17:26216333-26216357
  hypo
tttctttttttttttttgagacgg

SEQ ID NO: 183122 - DNA, 22 bp, Homo sapiens
  chr17:26263177-26263199
  hypo
tttgaaaacaagaagaatggcc

SEQ ID NO: 183123 - DNA, 81 bp, Homo sapiens; identical to SEQ ID NO: 30151
  chr17:26263498-26263579
  hypo

SEQ ID NO: 183124 - DNA, 30 bp, Homo sapiens; identical to SEQ ID NO: 30152
  chr17:26292636-26292666
  hypo

SEQ ID NO: 183125 - DNA, 30 bp, Homo sapiens; identical to SEQ ID NO: 92368
  chr17:26385532-26385562
  hypo

SEQ ID NO: 183126 - DNA, 30 bp, Homo sapiens; identical to SEQ ID NO: 92369
  chr17:26487523-26487553
  hypo

SEQ ID NO: 183127 - DNA, 40 bp, Homo sapiens
  chr17:26530851-26530891
  hypo
tgcgcccggccctgttgatctttctcgtcgccccagtgcc

SEQ ID NO: 183128 - DNA, 122 bp, Homo sapiens
  chr17:26594093-26594215
  hypo
tcactctcaggaaaacgaaacctaactaacgccgcccttgccccaccccgactccgcccctacatcacctagtgtccatataagcgtgctgcaactacaacacagtgcgacttccctggccc

SEQ ID NO: 183129 - DNA, 30 bp, Homo sapiens
  chr17:26850895-26850925
  hypo
tggggtggaggtggcgaacctgggttggtc

SEQ ID NO: 183130 - DNA, 31 bp, Homo sapiens; identical to SEQ ID NO: 30153
  chr17:26851172-26851203
  hypo

SEQ ID NO: 183131 - DNA, 328 bp, Homo sapiens; identical to SEQ ID NO: 92371
  chr17:26851580-26851908
  hypo

SEQ ID NO: 183132 - DNA, 31 bp, Homo sapiens; identical to SEQ ID NO: 30154
  chr17:26861031-26861062
  hypo

SEQ ID NO: 183133 - DNA, 78 bp, Homo sapiens; identical to SEQ ID NO: 92373
  chr17:26862777-26862855
  hypo

SEQ ID NO: 183134 - DNA, 102 bp, Homo sapiens; identical to SEQ ID NO: 30155
  chr17:26864423-26864525
  hypo

SEQ ID NO: 183135 - DNA, 31 bp, Homo sapiens; identical to SEQ ID NO: 30156
  chr17:26874434-26874465
  hypo

SEQ ID NO: 183136 - DNA, 30 bp, Homo sapiens; identical to SEQ ID NO: 92376
  chr17:26902137-26902167
  hypo

SEQ ID NO: 183137 - DNA, 31 bp, Homo sapiens; identical to SEQ ID NO: 11043
  chr17:26925397-26925428
  hypo

SEQ ID NO: 183138 - DNA, 332 bp, Homo sapiens; identical to SEQ ID NO: 11044
  chr17:26925693-26926025
  hypo

SEQ ID NO: 183139 - DNA, 342 bp, Homo sapiens; identical to SEQ ID NO: 11045
  chr17:26926083-26926425
  hypo

SEQ ID NO: 183140 - DNA, 26 bp, Homo sapiens
  chr17:26930175-26930201
  hypo
ggatttacaggcgtgagccactgcgc

SEQ ID NO: 183141 - DNA, 136 bp, Homo sapiens; identical to SEQ ID NO: 30160
  chr17:26959954-26960090
  hypo

SEQ ID NO: 183142 - DNA, 239 bp, Homo sapiens; identical to SEQ ID NO: 30161
  chr17:26960858-26961097
  hypo

SEQ ID NO: 183143 - DNA, 176 bp, Homo sapiens; identical to SEQ ID NO: 30162
  chr17:26961701-26961877
  hypo

SEQ ID NO: 183144 - DNA, 192 bp, Homo sapiens; identical to SEQ ID NO: 30163
  chr17:26962145-26962337
  hypo

SEQ ID NO: 183145 - DNA, 130 bp, Homo sapiens
  chr17:27011596-27011726
  hypo
ccctcaggcctgtagtcgaaagctctacaattggttgagagtggcaccctaccgaccagatcagcaggtggaagaagatgacgactttatggacgagaaccaagggaagggcattcgagtcctcggcatt

SEQ ID NO: 183146 - DNA, 30 bp, Homo sapiens
  chr17:27024267-27024297
  hypo
tttgtcccctccttccgtgtcctccaaatg

SEQ ID NO: 183147 - DNA, 30 bp, Homo sapiens
  chr17:27024682-27024712
  hypo
atggcatcctttgcccgggaccttctgaat

SEQ ID NO: 183148 - DNA, 65 bp, Homo sapiens
  chr17:27028073-27028138
  hypo
gcaccaccccacagtcggcccaggcccagccccagccctcttccagctcccggcaacggcagcag

SEQ ID NO: 183149 - DNA, 20 bp, Homo sapiens
  chr17:27036963-27036983
  hypo
gatatcgtgctactgcactc

SEQ ID NO: 183150 - DNA, 301 bp, Homo sapiens
  chr17:27056851-27057152
  hypo
ccgcgacaggccagaagtgagatttaaggccaagacttgaggaatgaggaccagtagtctgcaggtgaagggagaacttttcaggcaaaggaaatagcgtatgtgaaatgtctcacatgggaaaacagagcattcaagaaaccgagaaagactagtaatagttggaatgtagtgggcaaggtagagaatggtataaaatgtaattgtcgagggcggggactagattatggcctgataacctgagataaaaggttcatttgccacaaacggttttgttttgtttttgtttttgtttttgaga

SEQ ID NO: 183151 - DNA, 177 bp, Homo sapiens
  chr17:27074938-27075115
  hypo
tggagtgggccactacgtcatctacaggtgaggctctgatgtgagggctggcaccacctctcccttggcaggcactaattgcagccttcccaccagggccacctgaatacctgcagcttcaatgtcattccctgccctaatcgctgccccatgaagctgagccgccgtgatctacct

SEQ ID NO: 183152 - DNA, 129 bp, Homo sapiens; identical to SEQ ID NO: 92388
  chr17:27075315-27075444
  hypo

SEQ ID NO: 183153 - DNA, 264 bp, Homo sapiens
  chr17:27085330-27085594
  hypo
gtgggatcgggggctcggttgccaggggctcggtgggccttgctcagcatggccaggctctgttctcggaagcaggcctgttggaaatccccacttaggtaatccactgtttgcatcaagctgttctggcttgccactggaccgcccccggtccctgctcggtagtgggccccgggagctgccgcacagtcgaggggtgcacctgtgggctgcccaccgtggaacggcatggcaaggtcctgagaccccgagctgtcgctattg

SEQ ID NO: 183154 - DNA, 36 bp, Homo sapiens
  chr17:27086029-27086065
  hypo
gggacgctgtgggtcgacacccgggtgcttgcattg

SEQ ID NO: 183155 - DNA, 36 bp, Homo sapiens; identical to SEQ ID NO: 92390
  chr17:27138131-27138167
  hypo

SEQ ID NO: 183156 - DNA, 30 bp, Homo sapiens; identical to SEQ ID NO: 30167
  chr17:27170972-27171002
  hypo

SEQ ID NO: 183157 - DNA, 97 bp, Homo sapiens; identical to SEQ ID NO: 92392
  chr17:27171309-27171406
  hypo

SEQ ID NO: 183158 - DNA, 22 bp, Homo sapiens
  chr17:27174925-27174947
  hypo
cgcctcaaaaaaaaaaaaaaga

SEQ ID NO: 183159 - DNA, 39 bp, Homo sapiens; identical to SEQ ID NO: 92394
  chr17:27179809-27179848
  hypo

SEQ ID NO: 183160 - DNA, 102 bp, Homo sapiens; identical to SEQ ID NO: 30168
  chr17:27181276-27181378
  hypo

SEQ ID NO: 183161 - DNA, 24 bp, Homo sapiens
  chr17:27195634-27195658
  hypo
atcgtgtaagaaagcccctgaatg

SEQ ID NO: 183162 - DNA, 207 bp, Homo sapiens
  chr17:27207672-27207879
  hypo
cctgggccagtccgacgggctacctgggcaaccccaccgcagctaggcaggcacataccttagacaggtccacgcctgtgagggcatgcacagaggcaggcagctcggccagcagtcggttcacttctgatgtgaccttactgttgtctccactgaggaccacaatctcatcgaccttggtaagtggggcagcgattttggcagcaa

SEQ ID NO: 183163 - DNA, 25 bp, Homo sapiens
  chr17:27222572-27222597
  hypo
gcccggccaatagattttcaaggta

SEQ ID NO: 183164 - DNA, 30 bp, Homo sapiens; identical to SEQ ID NO: 92399
  chr17:27225755-27225785
  hypo

SEQ ID NO: 183165 - DNA, 493 bp, Homo sapiens
  chr17:27228010-27228503
  hypo
ggtgggctgcatagcaggtgacgccagtggcctcaagctggttggcgagctcccgggcaaacagtacattagccagcttagtgtcagcatatgcccgcagctcctgccgccagcccaccactgggcggtccaggcgtttgaagtcaagacgtccccgacagtgggcagctgaggctaccaccaccacgcggctaggggcacatgccttcaggcaaggcagcagcagatgtgtcagcagaaagggaccgatatggttcacccgaagcagcaggttaaacgcctcacgggtccggccacaggaactgatacctggggcagaggctaaatgtgagcggctgctccagaaggagctctgcagccttggcatccctatctatgagatgggagaagggggcatccttcccatgtgtccactggccccagcagggcccccgctggagggggcagttgcccctggccacccgccaccccacccccacgcagggcctgctgc

SEQ ID NO: 183166 - DNA, 30 bp, Homo sapiens; identical to SEQ ID NO: 92401
  chr17:27237349-27237379
  hypo

SEQ ID NO: 183167 - DNA, 30 bp, Homo sapiens; identical to SEQ ID NO: 53830
  chr17:27254415-27254445
  hypo

SEQ ID NO: 183168 - DNA, 30 bp, Homo sapiens
  chr17:27272470-27272500
  hypo
attccaaatataacacgcggaggcaaatgc

SEQ ID NO: 183169 - DNA, 31 bp, Homo sapiens; identical to SEQ ID NO: 92403
  chr17:27301127-27301158
  hypo

SEQ ID NO: 183170 - DNA, 30 bp, Homo sapiens; identical to SEQ ID NO: 53834
  chr17:27329672-27329702
  hypo

SEQ ID NO: 183171 - DNA, 569 bp, Homo sapiens; identical to SEQ ID NO: 128317
  chr17:27332300-27332869
  hypo

SEQ ID NO: 183172 - DNA, 198 bp, Homo sapiens; identical to SEQ ID NO: 128318
  chr17:27333090-27333288
  hypo

SEQ ID NO: 183173 - DNA, 30 bp, Homo sapiens; identical to SEQ ID NO: 30170
  chr17:27345531-27345561
  hypo

SEQ ID NO: 183174 - DNA, 30 bp, Homo sapiens
  chr17:27364830-27364860
  hypo
tgtgtatagagaccacgcacaaagcctgct

SEQ ID NO: 183175 - DNA, 66 bp, Homo sapiens
  chr17:27393153-27393219
  hypo
tgcctgcgcatcacccgctgccatgagttatttcagcgctgatgtttgtctcgagctgattattcc

SEQ ID NO: 183176 - DNA, 30 bp, Homo sapiens; identical to SEQ ID NO: 92408
  chr17:27402878-27402908
  hypo

SEQ ID NO: 183177 - DNA, 30 bp, Homo sapiens; identical to SEQ ID NO: 30171
  chr17:27404111-27404141
  hypo

SEQ ID NO: 183178 - DNA, 30 bp, Homo sapiens
  chr17:27405541-27405571
  hypo
cacagcacaagcatgcgacaggtgtgttag

SEQ ID NO: 183179 - DNA, 533 bp, Homo sapiens; identical to SEQ ID NO: 30172
  chr17:27406520-27407053
  hypo

SEQ ID NO: 183180 - DNA, 70 bp, Homo sapiens; identical to SEQ ID NO: 92411
  chr17:27407261-27407331
  hypo

SEQ ID NO: 183181 - DNA, 67 bp, Homo sapiens; identical to SEQ ID NO: 30174
  chr17:27407716-27407783
  hypo

SEQ ID NO: 183182 - DNA, 166 bp, Homo sapiens
  chr17:27411025-27411191
  hypo
gtatctctaagtaaatcgaaacattatttctctgcctgccttactgcgctgggctcaataacttggagctggggcccagagctgctgaggaaggagccacaccacctctctgccatcagccggaacctggttagagctgcacgtccccatgcgtctatgtgagcac

SEQ ID NO: 183183 - DNA, 496 bp, Homo sapiens
  chr17:27411532-27412028
  hypo
aatggttggaattaaacctcacgtcaaatacaatttatgtccgggctcatgtgctattagttaacggggagccgaatcacgggggaacaaacaaacggagacagaacggcgggggatattaattgtgtgtgacaaccaggctccagcggccctctatcactgttacacactattacatttatcattagctctcactgagtcctgtgcgctgccaccagcccatcctggccaggggagggggtccatcaggcgagagagagtgggggaagaaacccaatgccatgctaaaaaaaaaagacctctaaaaaacaaccctgtcgaacttgatggaggatcagcccgctctgcctgaaggcctgcgcatctgcatccgctgtccagctcccacccagaaagcgggaaaagagagggctggatttcctgggcttcctgccacctgacagtaccagcacaagcgcccgctggggcctccctctgcccacggtaccgcagggag

SEQ ID NO: 183184 - DNA, 157 bp, Homo sapiens
  chr17:27412340-27412497
  hypo
ttctcaaataggctgcgctttcctttcggcaggagcccccccatcctgcccaccaagggtgcacgggccagccccagccttctggggagcacacctcattgcccgctccctgcctcccccgaggatagagtcagcatgttagcgttagagaccagtg

SEQ ID NO: 183185 - DNA, 30 bp, Homo sapiens; identical to SEQ ID NO: 92415
  chr17:27413192-27413222
  hypo

SEQ ID NO: 183186 - DNA, 194 bp, Homo sapiens
  chr17:27419313-27419507
  hypo
tctgcctcagccccccgagctctgccccgggcaccttggcccctcaccgctgtcttggctttggcgatgtcatcaatctgcaggtgcaggtcttcgatctccacctccattgctttccgtgctttcacggctgccgcacaggtgaactctgactcctccagctggacacagaccacccccgccccagggagaga

SEQ ID NO: 183187 - DNA, 37 bp, Homo sapiens; identical to SEQ ID NO: 92417
  chr17:27421182-27421219
  hypo

SEQ ID NO: 183188 - DNA, 109 bp, Homo sapiens; identical to SEQ ID NO: 30178
  chr17:27421467-27421576
  hypo

SEQ ID NO: 183189 - DNA, 30 bp, Homo sapiens; identical to SEQ ID NO: 30179
  chr17:27436900-27436930
  hypo

SEQ ID NO: 183190 - DNA, 30 bp, Homo sapiens; identical to SEQ ID NO: 92420
  chr17:27577278-27577308
  hypo

SEQ ID NO: 183191 - DNA, 27 bp, Homo sapiens
  chr17:27686897-27686924
  hypo
tgggcaacagagcgagactgtctcaaa

SEQ ID NO: 183192 - DNA, 81 bp, Homo sapiens; identical to SEQ ID NO: 92422
  chr17:27716045-27716126
  hypo

SEQ ID NO: 183193 - DNA, 181 bp, Homo sapiens; identical to SEQ ID NO: 92423
  chr17:27716185-27716366
  hypo

SEQ ID NO: 183194 - DNA, 21 bp, Homo sapiens
  chr17:27716605-27716626
  hypo
tacaggcgtgagccaccgcgc

SEQ ID NO: 183195 - DNA, 54 bp, Homo sapiens; identical to SEQ ID NO: 11055
  chr17:27893140-27893194
  hypo

SEQ ID NO: 183196 - DNA, 402 bp, Homo sapiens; identical to SEQ ID NO: 53841
  chr17:27893344-27893746
  hypo

SEQ ID NO: 183197 - DNA, 134 bp, Homo sapiens; identical to SEQ ID NO: 30184
  chr17:27902813-27902947
  hypo

SEQ ID NO: 183198 - DNA, 200 bp, Homo sapiens; identical to SEQ ID NO: 30185
  chr17:27903153-27903353
  hypo

SEQ ID NO: 183199 - DNA, 30 bp, Homo sapiens; identical to SEQ ID NO: 92428
  chr17:27903925-27903955
  hypo

SEQ ID NO: 183200 - DNA, 37 bp, Homo sapiens
  chr17:27908745-27908782
  hypo
caagctctgctcacccggcttgcgtccacagaggtag

SEQ ID NO: 183201 - DNA, 348 bp, Homo sapiens; identical to SEQ ID NO: 92429
  chr17:27909035-27909383
  hypo

SEQ ID NO: 183202 - DNA, 724 bp, Homo sapiens; identical to SEQ ID NO: 92430
  chr17:27934685-27935409
  hypo

SEQ ID NO: 183203 - DNA, 31 bp, Homo sapiens; identical to SEQ ID NO: 30187
  chr17:27936394-27936425
  hypo

SEQ ID NO: 183204 - DNA, 96 bp, Homo sapiens; identical to SEQ ID NO: 92432
  chr17:27939246-27939342
  hypo

SEQ ID NO: 183205 - DNA, 904 bp, Homo sapiens; identical to SEQ ID NO: 53845
  chr17:27942511-27943415
  hypo

SEQ ID NO: 183206 - DNA, 30 bp, Homo sapiens; identical to SEQ ID NO: 30190
  chr17:27948244-27948274
  hypo

SEQ ID NO: 183207 - DNA, 20 bp, Homo sapiens
  chr17:28039533-28039553
  hypo
atttctggctgagcgcggtg

SEQ ID NO: 183208 - DNA, 56 bp, Homo sapiens; identical to SEQ ID NO: 11061
  chr17:28089159-28089215
  hypo

SEQ ID NO: 183209 - DNA, 31 bp, Homo sapiens; identical to SEQ ID NO: 30192
  chr17:28250200-28250231
  hypo

SEQ ID NO: 183210 - DNA, 260 bp, Homo sapiens; identical to SEQ ID NO: 30193
  chr17:28299359-28299619
  hypo

SEQ ID NO: 183211 - DNA, 30 bp, Homo sapiens; identical to SEQ ID NO: 30194
  chr17:28395659-28395689
  hypo

SEQ ID NO: 183212 - DNA, 745 bp, Homo sapiens; identical to SEQ ID NO: 128341
  chr17:28562513-28563258
  hypo

SEQ ID NO: 183213 - DNA, 30 bp, Homo sapiens; identical to SEQ ID NO: 92440
  chr17:28701624-28701654
  hypo

SEQ ID NO: 183214 - DNA, 278 bp, Homo sapiens
  chr17:28715707-28715985
  hypo
gcatgcagccccagccgtgccccctgggagcctgtggcgggtggctcctaatcctcgctgggcctgggccagtgtctgggccaggggcgacattgccacaagcttccctgttgccctggggctaaggagtggcccggagctgattgcgggcctggggccaggctgtcaggagtgtcaggctgggaggtcaccccacgtgtggcggacactggggacttggccccaagtggcccgcgcagagcctcctcccgagcccaggaacccgggacccttagtgg

SEQ ID NO: 183215 - DNA, 36 bp, Homo sapiens; identical to SEQ ID NO: 92441
  chr17:28740013-28740049
  hypo

SEQ ID NO: 183216 - DNA, 30 bp, Homo sapiens
  chr17:28900023-28900053
  hypo
ccccccatgcatacacgcacagcggccacc

SEQ ID NO: 183217 - DNA, 20 bp, Homo sapiens
  chr17:28925643-28925663
  hypo
gtatttatttttgatacgga

SEQ ID NO: 183218 - DNA, 31 bp, Homo sapiens; identical to SEQ ID NO: 30196
  chr17:29094864-29094895
  hypo

SEQ ID NO: 183219 - DNA, 28 bp, Homo sapiens
  chr17:29112374-29112402
  hypo
gatccaccgcgcccggcctctggctagc

SEQ ID NO: 183220 - DNA, 241 bp, Homo sapiens
  chr17:29232003-29232244
  hypo
atctttaaaagaggattagtttttaaactatattatatagagttttaaatagagcttttgttgttttcaagtcacgagagatgtctcccgatatttatggatcagtccgaagttttactacctagaaaattgtattttatacccatcaggaagcaagtagttgaaataattattccaactgcttaaagtttctgatatttttaatttagaggaatctttttgtaactaatatttcctgtta

SEQ ID NO: 183221 - DNA, 88 bp, Homo sapiens
  chr17:29234394-29234482
  hypo
aacctaggagatgtaaggagagtggaaagaaaagaattatttctggaagatggggagccagttttgtgaaaaacggggaattcaggag

SEQ ID NO: 183222 - DNA, 34 bp, Homo sapiens; identical to SEQ ID NO: 92444
  chr17:29247878-29247912
  hypo

SEQ ID NO: 183223 - DNA, 347 bp, Homo sapiens; identical to SEQ ID NO: 128350
  chr17:29248939-29249286
  hypo

SEQ ID NO: 183224 - DNA, 406 bp, Homo sapiens; identical to SEQ ID NO: 128351
  chr17:29249457-29249863
  hypo

SEQ ID NO: 183225 - DNA, 30 bp, Homo sapiens
  chr17:29396505-29396535
  hypo
aaaaacacaccgtaacggcagtccatggct

SEQ ID NO: 183226 - DNA, 7 bp, Homo sapiens
  chr17:29421875-29421882
  hypo
ggcgcgg

SEQ ID NO: 183227 - DNA, 488 bp, Homo sapiens; identical to SEQ ID NO: 128356
  chr17:29421899-29422387
  hypo

SEQ ID NO: 183228 - DNA, 145 bp, Homo sapiens; identical to SEQ ID NO: 11066
  chr17:29482999-29483144
  hypo

SEQ ID NO: 183229 - DNA, 92 bp, Homo sapiens; identical to SEQ ID NO: 11067
  chr17:29486026-29486118
  hypo

SEQ ID NO: 183230 - DNA, 192 bp, Homo sapiens; identical to SEQ ID NO: 11068
  chr17:29490202-29490394
  hypo

SEQ ID NO: 183231 - DNA, 110 bp, Homo sapiens; identical to SEQ ID NO: 11069
  chr17:29496907-29497017
  hypo

SEQ ID NO: 183232 - DNA, 69 bp, Homo sapiens; identical to SEQ ID NO: 11070
  chr17:29508438-29508507
  hypo

SEQ ID NO: 183233 - DNA, 89 bp, Homo sapiens; identical to SEQ ID NO: 11071
  chr17:29508714-29508803
  hypo

SEQ ID NO: 183234 - DNA, 164 bp, Homo sapiens; identical to SEQ ID NO: 11072
  chr17:29509519-29509683
  hypo

SEQ ID NO: 183235 - DNA, 175 bp, Homo sapiens; identical to SEQ ID NO: 11073
  chr17:29527438-29527613
  hypo

SEQ ID NO: 183236 - DNA, 124 bp, Homo sapiens; identical to SEQ ID NO: 11074
  chr17:29528053-29528177
  hypo

SEQ ID NO: 183237 - DNA, 76 bp, Homo sapiens; identical to SEQ ID NO: 11075
  chr17:29528427-29528503
  hypo

SEQ ID NO: 183238 - DNA, 141 bp, Homo sapiens; identical to SEQ ID NO: 11076
  chr17:29533248-29533389
  hypo

SEQ ID NO: 183239 - DNA, 136 bp, Homo sapiens; identical to SEQ ID NO: 11077
  chr17:29541467-29541603
  hypo

SEQ ID NO: 183240 - DNA, 137 bp, Homo sapiens; identical to SEQ ID NO: 11078
  chr17:29546008-29546145
  hypo

SEQ ID NO: 183241 - DNA, 81 bp, Homo sapiens; identical to SEQ ID NO: 11079
  chr17:29548866-29548947
  hypo

SEQ ID NO: 183242 - DNA, 125 bp, Homo sapiens; identical to SEQ ID NO: 11080
  chr17:29550460-29550585
  hypo

SEQ ID NO: 183243 - DNA, 157 bp, Homo sapiens; identical to SEQ ID NO: 11081
  chr17:29552111-29552268
  hypo

SEQ ID NO: 183244 - DNA, 251 bp, Homo sapiens; identical to SEQ ID NO: 11082
  chr17:29553451-29553702
  hypo

SEQ ID NO: 183245 - DNA, 75 bp, Homo sapiens; identical to SEQ ID NO: 11083
  chr17:29554234-29554309
  hypo

SEQ ID NO: 183246 - DNA, 85 bp, Homo sapiens; identical to SEQ ID NO: 11084
  chr17:29554539-29554624
  hypo

SEQ ID NO: 183247 - DNA, 442 bp, Homo sapiens; identical to SEQ ID NO: 11085
  chr17:29556041-29556483
  hypo

SEQ ID NO: 183248 - DNA, 141 bp, Homo sapiens; identical to SEQ ID NO: 11086
  chr17:29556851-29556992
  hypo

SEQ ID NO: 183249 - DNA, 124 bp, Homo sapiens; identical to SEQ ID NO: 11087
  chr17:29557276-29557400
  hypo

SEQ ID NO: 183250 - DNA, 85 bp, Homo sapiens; identical to SEQ ID NO: 11088
  chr17:29557858-29557943
  hypo

SEQ ID NO: 183251 - DNA, 118 bp, Homo sapiens; identical to SEQ ID NO: 11089
  chr17:29559089-29559207
  hypo

SEQ ID NO: 183252 - DNA, 515 bp, Homo sapiens; identical to SEQ ID NO: 11090
  chr17:29559716-29560231
  hypo

SEQ ID NO: 183253 - DNA, 412 bp, Homo sapiens; identical to SEQ ID NO: 11091
  chr17:29562627-29563039
  hypo

SEQ ID NO: 183254 - DNA, 137 bp, Homo sapiens; identical to SEQ ID NO: 11092
  chr17:29576000-29576137
  hypo

SEQ ID NO: 183255 - DNA, 64 bp, Homo sapiens; identical to SEQ ID NO: 11093
  chr17:29579954-29580018
  hypo

SEQ ID NO: 183256 - DNA, 160 bp, Homo sapiens; identical to SEQ ID NO: 11094
  chr17:29585360-29585520
  hypo

SEQ ID NO: 183257 - DNA, 99 bp, Homo sapiens; identical to SEQ ID NO: 11095
  chr17:29586048-29586147
  hypo

SEQ ID NO: 183258 - DNA, 148 bp, Homo sapiens; identical to SEQ ID NO: 11096
  chr17:29587385-29587533
  hypo

SEQ ID NO: 183259 - DNA, 148 bp, Homo sapiens; identical to SEQ ID NO: 11097
  chr17:29588727-29588875
  hypo

SEQ ID NO: 183260 - DNA, 112 bp, Homo sapiens; identical to SEQ ID NO: 11098
  chr17:29592245-29592357
  hypo

SEQ ID NO: 183261 - DNA, 434 bp, Homo sapiens; identical to SEQ ID NO: 11099
  chr17:29652836-29653270
  hypo

SEQ ID NO: 183262 - DNA, 342 bp, Homo sapiens; identical to SEQ ID NO: 11100
  chr17:29654515-29654857
  hypo

SEQ ID NO: 183263 - DNA, 204 bp, Homo sapiens; identical to SEQ ID NO: 11101
  chr17:29657312-29657516
  hypo

SEQ ID NO: 183264 - DNA, 195 bp, Homo sapiens; identical to SEQ ID NO: 11102
  chr17:29661854-29662049
  hypo

SEQ ID NO: 183265 - DNA, 583 bp, Homo sapiens; identical to SEQ ID NO: 11103
  chr17:29663349-29663932
  hypo

SEQ ID NO: 183266 - DNA, 216 bp, Homo sapiens; identical to SEQ ID NO: 11104
  chr17:29664384-29664600
  hypo

SEQ ID NO: 183267 - DNA, 322 bp, Homo sapiens; identical to SEQ ID NO: 11105
  chr17:29664835-29665157
  hypo

SEQ ID NO: 183268 - DNA, 103 bp, Homo sapiens; identical to SEQ ID NO: 11106
  chr17:29665720-29665823
  hypo

SEQ ID NO: 183269 - DNA, 142 bp, Homo sapiens; identical to SEQ ID NO: 11107
  chr17:29667521-29667663
  hypo

SEQ ID NO: 183270 - DNA, 128 bp, Homo sapiens; identical to SEQ ID NO: 11108
  chr17:29670025-29670153
  hypo

SEQ ID NO: 183271 - DNA, 142 bp, Homo sapiens; identical to SEQ ID NO: 11109
  chr17:29676129-29676271
  hypo

SEQ ID NO: 183272 - DNA, 143 bp, Homo sapiens; identical to SEQ ID NO: 11110
  chr17:29677199-29677342
  hypo

SEQ ID NO: 183273 - DNA, 159 bp, Homo sapiens; identical to SEQ ID NO: 11111
  chr17:29679273-29679432
  hypo

SEQ ID NO: 183274 - DNA, 124 bp, Homo sapiens; identical to SEQ ID NO: 11112
  chr17:29683476-29683600
  hypo

SEQ ID NO: 183275 - DNA, 411 bp, Homo sapiens; identical to SEQ ID NO: 11113
  chr17:29683976-29684387
  hypo

SEQ ID NO: 183276 - DNA, 144 bp, Homo sapiens; identical to SEQ ID NO: 11114
  chr17:29685496-29685640
  hypo

SEQ ID NO: 183277 - DNA, 48 bp, Homo sapiens; identical to SEQ ID NO: 11115
  chr17:29685985-29686033
  hypo

SEQ ID NO: 183278 - DNA, 218 bp, Homo sapiens; identical to SEQ ID NO: 11116
  chr17:29687503-29687721
  hypo

SEQ ID NO: 183279 - DNA, 3666 bp, Homo sapiens; identical to SEQ ID NO: 11117
  chr17:29701029-29704695
  hypo

SEQ ID NO: 183280 - DNA, 312 bp, Homo sapiens; identical to SEQ ID NO: 53914
  chr17:29718209-29718521
  hypo

SEQ ID NO: 183281 - DNA, 497 bp, Homo sapiens; identical to SEQ ID NO: 53915
  chr17:29718749-29719246
  hypo

SEQ ID NO: 183282 - DNA, 134 bp, Homo sapiens
  chr17:29773384-29773518
  hypo
gtgtgtgcggccgagcgtccacccttggcatctctcaaattgtggggaggcagccggccttggtactttctggctccaggaacacgccatgggccattgaacgtctgtgcgatgggtaacgtctgtgcgatgaa

SEQ ID NO: 183283 - DNA, 31 bp, Homo sapiens; identical to SEQ ID NO: 11118
  chr17:29815732-29815763
  hypo

SEQ ID NO: 183284 - DNA, 31 bp, Homo sapiens; identical to SEQ ID NO: 30252
  chr17:29841345-29841376
  hypo

SEQ ID NO: 183285 - DNA, 150 bp, Homo sapiens; identical to SEQ ID NO: 92502
  chr17:29855418-29855568
  hypo

SEQ ID NO: 183286 - DNA, 26 bp, Homo sapiens
  chr17:29917505-29917531
  hypo
atagggagttgggatgcgtggttaat

SEQ ID NO: 183287 - DNA, 26 bp, Homo sapiens
  chr17:29917650-29917676
  hypo
gccacggcgcccggctgtcaggtata

SEQ ID NO: 183288 - DNA, 30 bp, Homo sapiens; identical to SEQ ID NO: 92505
  chr17:30036567-30036597
  hypo

SEQ ID NO: 183289 - DNA, 30 bp, Homo sapiens
  chr17:30207914-30207944
  hypo
gggcccggtggctcacgccactgggagacc

SEQ ID NO: 183290 - DNA, 222 bp, Homo sapiens
  chr17:30243767-30243989
  hypo
tacgatgtaactaaaacgccactctacagttaactccctctattccttagatttcattcccggggtcacctctttggcctaggtgcacacaccgcgggctccgctctaggtggggcacaggccttcgcccgccgcatgcaccctgggctgcgcagccccagccagcccgacccgggctcagcgacccctgcccccgggaccccgcaccggggctgagcgctc

SEQ ID NO: 183291 - DNA, 37 bp, Homo sapiens
  chr17:30301484-30301521
  hypo
gcagcgagccgagatcgcacaactgcactccagcctt

SEQ ID NO: 183292 - DNA, 121 bp, Homo sapiens; identical to SEQ ID NO: 92508
  chr17:30333040-30333161
  hypo

SEQ ID NO: 183293 - DNA, 309 bp, Homo sapiens
  chr17:30347556-30347865
  hypo
aaaatctggagtcctcgcttattccctggcagcccctacctaatagggtggtgaattaattatcaaacatgcgacagtttagcgaaaacggcaacattttggaataaatgactgtaacgcgcgtcctgcctgccaccctaactggcgcccattttgcaggtcagttgctctcccctgaaggaagagtattctcggatttcacctcagaggaggaagaattcaggctgccagaactggactagcacttctgaagatcccaaggccaggtcccgtgacttccttgggaagctctgccgtgcccccacccca

SEQ ID NO: 183294 - DNA, 30 bp, Homo sapiens
  chr17:30348077-30348107
  hypo
acagggcatggcacacgcttataaggggca

SEQ ID NO: 183295 - DNA, 242 bp, Homo sapiens
  chr17:30348355-30348597
  hypo
ctcccccagcagccccgggggactttgattacctggggccctctgcttcttcgcagatgtcagccctgcctcaggaaccaactgaaaatttggctccattcctgaaggaattggattcagctggagagctgcccctggggccagagccgttcttggctgcacatcaggacttaaatgacaagcggactccagaagaaaggctcccagaggtggttccgcttctcaaccgggatcagaaccag

SEQ ID NO: 183296 - DNA, 30 bp, Homo sapiens
  chr17:30348851-30348881
  hypo
ggacacactgtatcccggcagcctacctcc

SEQ ID NO: 183297 - DNA, 18 bp, Homo sapiens
  chr17:30484575-30484593
  hypo
atccatttgggaggtcga

SEQ ID NO: 183298 - DNA, 30 bp, Homo sapiens
  chr17:30484820-30484850
  hypo
cccccgctcccaccccgccgcccagaaaaa

SEQ ID NO: 183299 - DNA, 150 bp, Homo sapiens; identical to SEQ ID NO: 30256
  chr17:30529220-30529370
  hypo

SEQ ID NO: 183300 - DNA, 41 bp, Homo sapiens; identical to SEQ ID NO: 92512
  chr17:30582938-30582979
  hypo

SEQ ID NO: 183301 - DNA, 1560 bp, Homo sapiens; identical to SEQ ID NO: 128420
  chr17:30592473-30594033
  hypo

SEQ ID NO: 183302 - DNA, 31 bp, Homo sapiens; identical to SEQ ID NO: 30257
  chr17:30632642-30632673
  hypo

SEQ ID NO: 183303 - DNA, 30 bp, Homo sapiens
  chr17:30668717-30668747
  hypo
gcatgcggggcactgcgctaaacaaagggc

SEQ ID NO: 183304 - DNA, 30 bp, Homo sapiens; identical to SEQ ID NO: 128421
  chr17:30668995-30669025
  hypo

SEQ ID NO: 183305 - DNA, 14 bp, Homo sapiens
  chr17:30669047-30669061
  hypo
gtggctgctggacg

SEQ ID NO: 183306 - DNA, 30 bp, Homo sapiens
  chr17:30682630-30682660
  hypo
ggctagtttaagccgcgctaccagatgtcc

SEQ ID NO: 183307 - DNA, 33 bp, Homo sapiens; identical to SEQ ID NO: 92514
  chr17:30684633-30684666
  hypo

SEQ ID NO: 183308 - DNA, 40 bp, Homo sapiens; identical to SEQ ID NO: 92515
  chr17:30710916-30710956
  hypo

SEQ ID NO: 183309 - DNA, 155 bp, Homo sapiens; identical to SEQ ID NO: 92516
  chr17:30804368-30804523
  hypo

SEQ ID NO: 183310 - DNA, 90 bp, Homo sapiens; identical to SEQ ID NO: 53921
  chr17:30813421-30813511
  hypo

SEQ ID NO: 183311 - DNA, 117 bp, Homo sapiens
  chr17:30823890-30824007
  hypo
gaatgggctctaaacaggccacgctccacgtcagctcaaaaaaattaagagacagaaaatgggaaccattagttcaccctcaccctctcgtgttcagacaatcggggcatgctcctc

SEQ ID NO: 183312 - DNA, 200 bp, Homo sapiens; identical to SEQ ID NO: 30261
  chr17:30844874-30845074
  hypo

SEQ ID NO: 183313 - DNA, 30 bp, Homo sapiens; identical to SEQ ID NO: 30262
  chr17:30856863-30856893
  hypo

SEQ ID NO: 183314 - DNA, 397 bp, Homo sapiens
  chr17:30954268-30954665
  hypo
aggattgagggagggccgagggagtgagtaggctagcgcacaccagcacaggcggtgccagacgtcagctgactgtatccattgaggttaccatggaaaccccttcctttgggacactgccatgagggtagggtgctttagaaatggtgatggggcacagaccggcgggcggatggatttcagcagggttcaccctgtacgcattacaaggacaatccatcttccaaacgaaatgatatctttctagcaagtcacgtcaaatagagcaataaagcatgaagtctggcataattacagtccatttacctttacaaaacagtcacatcggttcagataattgtctcttttctctcccctgcttgctttgtattctccacagaacgaaaggaggtatttg

SEQ ID NO: 183315 - DNA, 254 bp, Homo sapiens
  chr17:31047962-31048216
  hypo
atgtgctgatgcactattgtacggggaggactcccttattctcagtgaactaggcctctctgacgagtctattctcacctgtgaagaaacttctcgtatgtctggcggaaggcaaatcctgcccgacgcactctcacattttccagtagtccaagatattctacttggtgccggcagcgttcatcatcaaatatctgtggagatttcttgtcattgggtttgatgcaacgaacgtaatatggttcctaaagaaa

SEQ ID NO: 183316 - DNA, 46 bp, Homo sapiens
  chr17:31099651-31099697
  hypo
ggcatgtggtgcgtgcgtgcgtgcgtgcatgcgtgacatgttacgg

SEQ ID NO: 183317 - DNA, 31 bp, Homo sapiens; identical to SEQ ID NO: 92523
  chr17:31104659-31104690
  hypo

SEQ ID NO: 183318 - DNA, 30 bp, Homo sapiens; identical to SEQ ID NO: 92524
  chr17:31104929-31104959
  hypo

SEQ ID NO: 183319 - DNA, 109 bp, Homo sapiens; identical to SEQ ID NO: 53924
  chr17:31203739-31203848
  hypo

SEQ ID NO: 183320 - DNA, 30 bp, Homo sapiens
  chr17:31213537-31213567
  hypo
ctctgcgtgtgtgtgcgtgtgtttgcgtgt

SEQ ID NO: 183321 - DNA, 166 bp, Homo sapiens
  chr17:31214019-31214185
  hypo
ataaagccctggtttacgtccctcctggcacaactcttcccatttccccattccgtgtgaagagtgccatcccatggagccttgattgttacctgccaatttgtatatgttatttgcattaaaacttctgattcacggaggagccaagatggccgaataggaacag

SEQ ID NO: 183322 - DNA, 30 bp, Homo sapiens
  chr17:31265392-31265422
  hypo
tctgcatgtcctcaccggctccacagccgt

SEQ ID NO: 183323 - DNA, 2022 bp, Homo sapiens; identical to SEQ ID NO: 128433
  chr17:31618425-31620447
  hypo

SEQ ID NO: 183324 - DNA, 30 bp, Homo sapiens
  chr17:32211070-32211100
  hypo
ttccttgtttgcaaccgcacacctatggtc

SEQ ID NO: 183325 - DNA, 43 bp, Homo sapiens; identical to SEQ ID NO: 92528
  chr17:32520157-32520200
  hypo

SEQ ID NO: 183326 - DNA, 30 bp, Homo sapiens
  chr17:32860854-32860884
  hypo
gggtgaaagggtgcccgccactccacagat

SEQ ID NO: 183327 - DNA, 1206 bp, Homo sapiens; identical to SEQ ID NO: 53930
  chr17:32906598-32907804
  hypo

SEQ ID NO: 183328 - DNA, 273 bp, Homo sapiens; identical to SEQ ID NO: 11134
  chr17:32907873-32908146
  hypo

SEQ ID NO: 183329 - DNA, 1137 bp, Homo sapiens; identical to SEQ ID NO: 53932
  chr17:32908170-32909307
  hypo

SEQ ID NO: 183330 - DNA, 30 bp, Homo sapiens; identical to SEQ ID NO: 92532
  chr17:33230985-33231015
  hypo

SEQ ID NO: 183331 - DNA, 23 bp, Homo sapiens
  chr17:33327282-33327305
  hypo
tgttttgtttttgagacggagtt

SEQ ID NO: 183332 - DNA, 275 bp, Homo sapiens; identical to SEQ ID NO: 30271
  chr17:33344313-33344588
  hypo

SEQ ID NO: 183333 - DNA, 166 bp, Homo sapiens
  chr17:33348604-33348770
  hypo
tctcccggcacatttcggtagagatgtcatggaggctgagatagtccctcaagtccttcaccttcatcttcatgagctcctctcgctgaaaggctgtagctcgaaaccgttggcagagaaggcagaggcggggcccattccctacttggctcgaacaggtcatgca

SEQ ID NO: 183334 - DNA, 67 bp, Homo sapiens; identical to SEQ ID NO: 92535
  chr17:33351139-33351206
  hypo

SEQ ID NO: 183335 - DNA, 35 bp, Homo sapiens; identical to SEQ ID NO: 92536
  chr17:33354437-33354472
  hypo

SEQ ID NO: 183336 - DNA, 20 bp, Homo sapiens
  chr17:33358818-33358838
  hypo
aaactacaaaatgcagctgg

SEQ ID NO: 183337 - DNA, 31 bp, Homo sapiens; identical to SEQ ID NO: 92537
  chr17:33521041-33521072
  hypo

SEQ ID NO: 183338 - DNA, 30 bp, Homo sapiens; identical to SEQ ID NO: 30273
  chr17:33568554-33568584
  hypo

SEQ ID NO: 183339 - DNA, 99 bp, Homo sapiens
  chr17:33568806-33568905
  hypo
gagtaagacttccagcgccccggcccagactgcgacgacccagactgcgacgacccagtctgcgcctggcgcaggctccatagacggcttttcttcagc

SEQ ID NO: 183340 - DNA, 78 bp, Homo sapiens; identical to SEQ ID NO: 92540
  chr17:33578344-33578422
  hypo

SEQ ID NO: 183341 - DNA, 30 bp, Homo sapiens; identical to SEQ ID NO: 92541
  chr17:33734466-33734496
  hypo

SEQ ID NO: 183342 - DNA, 744 bp, Homo sapiens; identical to SEQ ID NO: 128455
  chr17:33814243-33814987
  hypo

SEQ ID NO: 183343 - DNA, 30 bp, Homo sapiens
  chr17:33842258-33842288
  hypo
tgcccacaaaccatccgagcacagggagcc

SEQ ID NO: 183344 - DNA, 30 bp, Homo sapiens
  chr17:33896140-33896170
  hypo
caaagccaccgctcccggccttgagtaaag

SEQ ID NO: 183345 - DNA, 35 bp, Homo sapiens; identical to SEQ ID NO: 92543
  chr17:33898170-33898205
  hypo

SEQ ID NO: 183346 - DNA, 45 bp, Homo sapiens; identical to SEQ ID NO: 30276
  chr17:33917230-33917275
  hypo

SEQ ID NO: 183347 - DNA, 77 bp, Homo sapiens
  chr17:33924081-33924158
  hypo
gaaggacccctgggcgcccccgctccggggccactgaggcagcagtagcgacctccggaagcggagactgtccccac

SEQ ID NO: 183348 - DNA, 30 bp, Homo sapiens; identical to SEQ ID NO: 30277
  chr17:34261795-34261825
  hypo

SEQ ID NO: 183349 - DNA, 30 bp, Homo sapiens; identical to SEQ ID NO: 30278
  chr17:34345377-34345407
  hypo

SEQ ID NO: 183350 - DNA, 27 bp, Homo sapiens
  chr17:34366949-34366976
  hypo
tcggcctcccaacgtgttcgaactgca

SEQ ID NO: 183351 - DNA, 30 bp, Homo sapiens
  chr17:35020144-35020174
  hypo
tctctgtttaccagccggtccatcctttca

SEQ ID NO: 183352 - DNA, 113 bp, Homo sapiens
  chr17:35039666-35039779
  hypo
tggaatactaaataaactttacgagcccgttgtaagttttttgatgcatggggagcggaaaatgaaaactaatgatataaaaattacacagcgtgctgagtattattatactg

SEQ ID NO: 183353 - DNA, 173 bp, Homo sapiens
  chr17:35045438-35045611
  hypo
acggtggttgcactacggatgtccctggaaggccctcttgattctgaggttctgtcttattagctgcacctccctccacccccggccaaccgcaaagaaaaggaaaagtcctttcctcctcctcaggtggctcgtggtggattacttagcgcttgacacggcgtgtctctgtg

SEQ ID NO: 183354 - DNA, 30 bp, Homo sapiens; identical to SEQ ID NO: 92548
  chr17:35062452-35062482
  hypo

SEQ ID NO: 183355 - DNA, 30 bp, Homo sapiens; identical to SEQ ID NO: 11144
  chr17:35082280-35082310
  hypo

SEQ ID NO: 183356 - DNA, 30 bp, Homo sapiens
  chr17:35084827-35084857
  hypo
gctctaaattcacgccgaagccggctgtat

SEQ ID NO: 183357 - DNA, 30 bp, Homo sapiens
  chr17:35085147-35085177
  hypo
gcagctggaggaccccgtggccctggatga

SEQ ID NO: 183358 - DNA, 118 bp, Homo sapiens; identical to SEQ ID NO: 92550
  chr17:35099226-35099344
  hypo

SEQ ID NO: 183359 - DNA, 644 bp, Homo sapiens; identical to SEQ ID NO: 128465
  chr17:35165346-35165990
  hypo

SEQ ID NO: 183360 - DNA, 1699 bp, Homo sapiens; identical to SEQ ID NO: 53951
  chr17:35290199-35291898
  hypo

SEQ ID NO: 183361 - DNA, 799 bp, Homo sapiens; identical to SEQ ID NO: 11147
  chr17:35291920-35292719
  hypo

SEQ ID NO: 183362 - DNA, 209 bp, Homo sapiens
  chr17:35336167-35336376
  hypo
acagtggagccttcacgcaattctttgttgaagaagttagggcctaaatgttaaggcttattgttattctgagttgataatctctgccttgctttaataatttttcctcatgcctgggtagcccgcgagttgcacaataatcactcacacagctttgtaatcaatgcccaaagtaataggattcctctggccaccggcaattaataaat

SEQ ID NO: 183363 - DNA, 36 bp, Homo sapiens; identical to SEQ ID NO: 30284
  chr17:35414065-35414101
  hypo

SEQ ID NO: 183364 - DNA, 165 bp, Homo sapiens; identical to SEQ ID NO: 92557
  chr17:35488970-35489135
  hypo

SEQ ID NO: 183365 - DNA, 30 bp, Homo sapiens
  chr17:35489346-35489376
  hypo
ctctggttttatggtcgtcataaacccgat

SEQ ID NO: 183366 - DNA, 141 bp, Homo sapiens
  chr17:35501214-35501355
  hypo
tgtttagttgtttttccacagcgaggcacagagtcacccagtgcctgtctggctctcgcttgccccggcgctgtctctatcgtaacctctttaagttatgtgaaagttacaatgctgcccgccccacagtgagagctaagt

SEQ ID NO: 183367 - DNA, 172 bp, Homo sapiens; identical to SEQ ID NO: 92558
  chr17:35545257-35545429
  hypo

SEQ ID NO: 183368 - DNA, 30 bp, Homo sapiens; identical to SEQ ID NO: 30285
  chr17:35577338-35577368
  hypo

SEQ ID NO: 183369 - DNA, 31 bp, Homo sapiens
  chr17:35631392-35631423
  hypo
ctggcaaaagccagccgaactaacagggagc

SEQ ID NO: 183370 - DNA, 457 bp, Homo sapiens; identical to SEQ ID NO: 128485
  chr17:35716403-35716860
  hypo

SEQ ID NO: 183371 - DNA, 30 bp, Homo sapiens
  chr17:35718994-35719024
  hypo
ccttataagacgaggcgacgaggacacaga

SEQ ID NO: 183372 - DNA, 30 bp, Homo sapiens; identical to SEQ ID NO: 92562
  chr17:35719624-35719654
  hypo

SEQ ID NO: 183373 - DNA, 39 bp, Homo sapiens; identical to SEQ ID NO: 30287
  chr17:35802038-35802077
  hypo

SEQ ID NO: 183374 - DNA, 19 bp, Homo sapiens
  chr17:35810278-35810297
  hypo
caggttggataagcttggc

SEQ ID NO: 183375 - DNA, 31 bp, Homo sapiens; identical to SEQ ID NO: 53965
  chr17:35816364-35816395
  hypo

SEQ ID NO: 183376 - DNA, 27 bp, Homo sapiens
  chr17:35845111-35845138
  hypo
aactccgtctcaaaaaaaaaaaaaaaa

SEQ ID NO: 183377 - DNA, 32 bp, Homo sapiens; identical to SEQ ID NO: 30290
  chr17:35845346-35845378
  hypo

SEQ ID NO: 183378 - DNA, 31 bp, Homo sapiens
  chr17:35870345-35870376
  hypo
ctgcacctggcctgtccgtcctcccaccgcg

SEQ ID NO: 183379 - DNA, 183 bp, Homo sapiens; identical to SEQ ID NO: 30291
  chr17:35872840-35873023
  hypo

SEQ ID NO: 183380 - DNA, 30 bp, Homo sapiens; identical to SEQ ID NO: 92569
  chr17:35896115-35896145
  hypo

SEQ ID NO: 183381 - DNA, 31 bp, Homo sapiens; identical to SEQ ID NO: 92570
  chr17:35915514-35915545
  hypo

SEQ ID NO: 183382 - DNA, 83 bp, Homo sapiens; identical to SEQ ID NO: 92571
  chr17:36076476-36076559
  hypo

SEQ ID NO: 183383 - DNA, 19 bp, Homo sapiens
  chr17:36083034-36083053
  hypo
taattaaaaaagaaaaatg

SEQ ID NO: 183384 - DNA, 31 bp, Homo sapiens; identical to SEQ ID NO: 92573
  chr17:36089510-36089541
  hypo

SEQ ID NO: 183385 - DNA, 30 bp, Homo sapiens; identical to SEQ ID NO: 53968
  chr17:36093006-36093036
  hypo

SEQ ID NO: 183386 - DNA, 30 bp, Homo sapiens; identical to SEQ ID NO: 53969
  chr17:36096499-36096529
  hypo

SEQ ID NO: 183387 - DNA, 30 bp, Homo sapiens; identical to SEQ ID NO: 53970
  chr17:36098024-36098054
  hypo

SEQ ID NO: 183388 - DNA, 30 bp, Homo sapiens; identical to SEQ ID NO: 53971
  chr17:36099824-36099854
  hypo

SEQ ID NO: 183389 - DNA, 2092 bp, Homo sapiens; identical to SEQ ID NO: 128495
  chr17:36101942-36104034
  hypo

SEQ ID NO: 183390 - DNA, 333 bp, Homo sapiens; identical to SEQ ID NO: 11159
  chr17:36104217-36104550
  hypo

SEQ ID NO: 183391 - DNA, 706 bp, Homo sapiens; identical to SEQ ID NO: 11160
  chr17:36104643-36105349
  hypo

SEQ ID NO: 183392 - DNA, 30 bp, Homo sapiens; identical to SEQ ID NO: 53980
  chr17:36749381-36749411
  hypo

SEQ ID NO: 183393 - DNA, 30 bp, Homo sapiens; identical to SEQ ID NO: 53981
  chr17:36754365-36754395
  hypo

SEQ ID NO: 183394 - DNA, 30 bp, Homo sapiens; identical to SEQ ID NO: 53982
  chr17:36755706-36755736
  hypo

SEQ ID NO: 183395 - DNA, 46 bp, Homo sapiens; identical to SEQ ID NO: 11164
  chr17:36762362-36762408
  hypo

SEQ ID NO: 183396 - DNA, 31 bp, Homo sapiens; identical to SEQ ID NO: 92585
  chr17:36790406-36790437
  hypo

SEQ ID NO: 183397 - DNA, 22 bp, Homo sapiens
  chr17:36805645-36805667
  hypo
gtttggttttgttttgtttttc

SEQ ID NO: 183398 - DNA, 43 bp, Homo sapiens; identical to SEQ ID NO: 92587
  chr17:36818502-36818545
  hypo

SEQ ID NO: 183399 - DNA, 111 bp, Homo sapiens
  chr17:36864034-36864145
  hypo
tgccctctacatccccgaggtgcaatttgccaacgtgctcaccatggagcccatcgtgctgcagtacgtgcctcatgatcgcttcaacaaggtcagcggccccccgccgtg

SEQ ID NO: 183400 - DNA, 30 bp, Homo sapiens; identical to SEQ ID NO: 92588
  chr17:36870557-36870587
  hypo

SEQ ID NO: 183401 - DNA, 30 bp, Homo sapiens
  chr17:36874946-36874976
  hypo
gtgtcttgggatcagcgcttacggaggtct

SEQ ID NO: 183402 - DNA, 929 bp, Homo sapiens
  chr17:36875864-36876793
  hypo
gctgggggcaggagggacacccgagggaggagggacggagagaccggcgtgggctggaacccctgggggatacgggagaagggccagaggagcctggagtggtcgggtcgactgaacccaggttccctctggccgcaggtcccccatcagcagcctccccgcactcttcgaccagacagcctctgcaccctgtgggggcggccagttagacccggcggccccagggacgactaacatggagcagcttctggagaagcagggcgacggggaggccggcgtcaacagtgaggaggggtggcgccggtcgggacgcctgccctagggccctaacagtcacctttctccccgaggtccccaagcttctttaaggttccgcccttaggccccgccccagccttgactctcggccaccccgggcctcacctcccatccctgccaggccacacgaccggccctggtccctcagcgccccacctttggccttcgtggcctccgggccccgaccttaccaaaccgcaacttccgcccttctctcctgacccgtgtggcctcgaccccagcctcaggctccgccccaggtcttcacacctgtggctccccaagtcccgcctctcttctcagagctcacctgtgtccctccttaggatggcgccgccttttcaagggctgagcactggctcccctccaggccccgcccccggtcccctggccccgcctccgccccctcgcccctccctcaggttcctcgctctctccgcagtcgtggagatgctgaaggcgctgcacgcgctgcagaaggagaaccagcggctgcaagagcagatcctgagcctgacggccaaaaaggagcggctgcagattctcaacgtgcagctctctgtgcccttccctgccctgcctgctgccctgcctgccgccaacggccctgt

SEQ ID NO: 183403 - DNA, 223 bp, Homo sapiens; identical to SEQ ID NO: 11167
  chr17:36886753-36886976
  hypo

SEQ ID NO: 183404 - DNA, 30 bp, Homo sapiens; identical to SEQ ID NO: 92592
  chr17:36896562-36896592
  hypo

SEQ ID NO: 183405 - DNA, 38 bp, Homo sapiens; identical to SEQ ID NO: 11168
  chr17:36904349-36904387
  hypo

SEQ ID NO: 183406 - DNA, 1325 bp, Homo sapiens; identical to SEQ ID NO: 128518
  chr17:36905016-36906341
  hypo

SEQ ID NO: 183407 - DNA, 62 bp, Homo sapiens; identical to SEQ ID NO: 30300
  chr17:36927314-36927376
  hypo

SEQ ID NO: 183408 - DNA, 43 bp, Homo sapiens; identical to SEQ ID NO: 30301
  chr17:36967821-36967864
  hypo

SEQ ID NO: 183409 - DNA, 40 bp, Homo sapiens
  chr17:37000765-37000805
  hypo
tggcatgcagcgttgcgatccggaatcactgcaacctctg

SEQ ID NO: 183410 - DNA, 17 bp, Homo sapiens
  chr17:37001176-37001193
  hypo
agtgtcgctctgtcgcg

SEQ ID NO: 183411 - DNA, 88 bp, Homo sapiens
  chr17:37011082-37011170
  hypo
aaaatataaatagtatcgcttctcggccttttggccaagatcaagtgtaaaatataaatagtggccgggccttgtggctcacgcttgt

SEQ ID NO: 183412 - DNA, 121 bp, Homo sapiens; identical to SEQ ID NO: 92599
  chr17:37012073-37012194
  hypo

SEQ ID NO: 183413 - DNA, 30 bp, Homo sapiens; identical to SEQ ID NO: 53994
  chr17:37050591-37050621
  hypo

SEQ ID NO: 183414 - DNA, 30 bp, Homo sapiens
  chr17:37072098-37072128
  hypo
tcctggcaggctcagcgcctccaggctggg

SEQ ID NO: 183415 - DNA, 196 bp, Homo sapiens; identical to SEQ ID NO: 92601
  chr17:37074887-37075083
  hypo

SEQ ID NO: 183416 - DNA, 152 bp, Homo sapiens; identical to SEQ ID NO: 92602
  chr17:37084533-37084685
  hypo

SEQ ID NO: 183417 - DNA, 32 bp, Homo sapiens; identical to SEQ ID NO: 92603
  chr17:37111336-37111368
  hypo

SEQ ID NO: 183418 - DNA, 30 bp, Homo sapiens
  chr17:37141825-37141855
  hypo
aaggacatagtggcccggtttgtacccttc

SEQ ID NO: 183419 - DNA, 30 bp, Homo sapiens
  chr17:37152703-37152733
  hypo
tatttggaacagctccgcgggcaagttgct

SEQ ID NO: 183420 - DNA, 20 bp, Homo sapiens
  chr17:37169219-37169239
  hypo
gaactcgtgcaggtctgtgg

SEQ ID NO: 183421 - DNA, 151 bp, Homo sapiens
  chr17:37171928-37172079
  hypo
gttctgtgtgggccccgcacagcgtccaagcatgttacaaccaatgctctttcagttctgctgtccagggctggtcgagtgccaactagctcagtggagggtcagagtgggagcccctgccctctcggcacccagattcttgtccagcatc

SEQ ID NO: 183422 - DNA, 30 bp, Homo sapiens
  chr17:37174567-37174597
  hypo
cagcgggtgccgggacggccccatctctgc

SEQ ID NO: 183423 - DNA, 17 bp, Homo sapiens
  chr17:37192175-37192192
  hypo
gccgccacccccgggca

SEQ ID NO: 183424 - DNA, 30 bp, Homo sapiens; identical to SEQ ID NO: 30303
  chr17:37216806-37216836
  hypo

SEQ ID NO: 183425 - DNA, 36 bp, Homo sapiens
  chr17:37276418-37276454
  hypo
tttgagatggagtttcgctcatgtaacacaggctgg

SEQ ID NO: 183426 - DNA, 82 bp, Homo sapiens
  chr17:37313705-37313787
  hypo
gccttggtctggcaccgcacagggaacatggggggtacttagaaaatgctgattgggccaggcgcagtggctcacgccttta

SEQ ID NO: 183427 - DNA, 543 bp, Homo sapiens; identical to SEQ ID NO: 54001
  chr17:37380886-37381429
  hypo

SEQ ID NO: 183428 - DNA, 156 bp, Homo sapiens; identical to SEQ ID NO: 11179
  chr17:37381570-37381726
  hypo

SEQ ID NO: 183429 - DNA, 632 bp, Homo sapiens; identical to SEQ ID NO: 128543
  chr17:37381825-37382457
  hypo

SEQ ID NO: 183430 - DNA, 31 bp, Homo sapiens; identical to SEQ ID NO: 92609
  chr17:37389382-37389413
  hypo

SEQ ID NO: 183431 - DNA, 30 bp, Homo sapiens; identical to SEQ ID NO: 54004
  chr17:37395772-37395802
  hypo

SEQ ID NO: 183432 - DNA, 18 bp, Homo sapiens
  chr17:37407230-37407248
  hypo
aattcttgcataagcccg

SEQ ID NO: 183433 - DNA, 30 bp, Homo sapiens
  chr17:37411338-37411368
  hypo
actgaccttcctaacgatcaaaggcttcag

SEQ ID NO: 183434 - DNA, 30 bp, Homo sapiens; identical to SEQ ID NO: 30308
  chr17:37417640-37417670
  hypo

SEQ ID NO: 183435 - DNA, 40 bp, Homo sapiens; identical to SEQ ID NO: 30309
  chr17:37445219-37445259
  hypo

SEQ ID NO: 183436 - DNA, 35 bp, Homo sapiens; identical to SEQ ID NO: 30310
  chr17:37452477-37452512
  hypo

SEQ ID NO: 183437 - DNA, 32 bp, Homo sapiens; identical to SEQ ID NO: 30311
  chr17:37455740-37455772
  hypo

SEQ ID NO: 183438 - DNA, 86 bp, Homo sapiens; identical to SEQ ID NO: 92616
  chr17:37483845-37483931
  hypo

SEQ ID NO: 183439 - DNA, 25 bp, Homo sapiens
  chr17:37484110-37484135
  hypo
gcccgggtaaccaaacatgtatttc

SEQ ID NO: 183440 - DNA, 20 bp, Homo sapiens
  chr17:37534237-37534257
  hypo
ctgggcgacagagcaagacc

SEQ ID NO: 183441 - DNA, 162 bp, Homo sapiens; identical to SEQ ID NO: 92618
  chr17:37583066-37583228
  hypo

SEQ ID NO: 183442 - DNA, 181 bp, Homo sapiens; identical to SEQ ID NO: 92619
  chr17:37583287-37583468
  hypo

SEQ ID NO: 183443 - DNA, 40 bp, Homo sapiens; identical to SEQ ID NO: 92620
  chr17:37694843-37694883
  hypo

SEQ ID NO: 183444 - DNA, 34 bp, Homo sapiens; identical to SEQ ID NO: 92621
  chr17:37701200-37701234
  hypo

SEQ ID NO: 183445 - DNA, 30 bp, Homo sapiens; identical to SEQ ID NO: 92622
  chr17:37705227-37705257
  hypo

SEQ ID NO: 183446 - DNA, 30 bp, Homo sapiens; identical to SEQ ID NO: 92623
  chr17:37705498-37705528
  hypo

SEQ ID NO: 183447 - DNA, 31 bp, Homo sapiens; identical to SEQ ID NO: 30313
  chr17:37736505-37736536
  hypo

SEQ ID NO: 183448 - DNA, 677 bp, Homo sapiens; identical to SEQ ID NO: 128555
  chr17:37761153-37761830
  hypo

SEQ ID NO: 183449 - DNA, 1039 bp, Homo sapiens; identical to SEQ ID NO: 54011
  chr17:37761946-37762985
  hypo

SEQ ID NO: 183450 - DNA, 340 bp, Homo sapiens; identical to SEQ ID NO: 11190
  chr17:37774744-37775084
  hypo

SEQ ID NO: 183451 - DNA, 1045 bp, Homo sapiens; identical to SEQ ID NO: 128563
  chr17:37782848-37783893
  hypo

SEQ ID NO: 183452 - DNA, 30 bp, Homo sapiens; identical to SEQ ID NO: 30319
  chr17:37809823-37809853
  hypo

SEQ ID NO: 183453 - DNA, 221 bp, Homo sapiens; identical to SEQ ID NO: 30320
  chr17:37819038-37819259
  hypo

SEQ ID NO: 183454 - DNA, 725 bp, Homo sapiens; identical to SEQ ID NO: 54019
  chr17:37823745-37824470
  hypo

SEQ ID NO: 183455 - DNA, 30 bp, Homo sapiens; identical to SEQ ID NO: 92632
  chr17:37826148-37826178
  hypo

SEQ ID NO: 183456 - DNA, 30 bp, Homo sapiens; identical to SEQ ID NO: 92633
  chr17:37840942-37840972
  hypo

SEQ ID NO: 183457 - DNA, 94 bp, Homo sapiens; identical to SEQ ID NO: 128567
  chr17:37844397-37844491
  hypo

SEQ ID NO: 183458 - DNA, 31 bp, Homo sapiens; identical to SEQ ID NO: 11196
  chr17:37844562-37844593
  hypo

SEQ ID NO: 183459 - DNA, 30 bp, Homo sapiens
  chr17:37862946-37862976
  hypo
aacaccctgtactggcgggcgagctcccca

SEQ ID NO: 183460 - DNA, 31 bp, Homo sapiens; identical to SEQ ID NO: 92635
  chr17:37864743-37864774
  hypo

SEQ ID NO: 183461 - DNA, 134 bp, Homo sapiens; identical to SEQ ID NO: 92636
  chr17:37879779-37879913
  hypo

SEQ ID NO: 183462 - DNA, 172 bp, Homo sapiens; identical to SEQ ID NO: 92637
  chr17:37880945-37881117
  hypo

SEQ ID NO: 183463 - DNA, 30 bp, Homo sapiens; identical to SEQ ID NO: 30325
  chr17:37884299-37884329
  hypo

SEQ ID NO: 183464 - DNA, 30 bp, Homo sapiens; identical to SEQ ID NO: 92639
  chr17:37885595-37885625
  hypo

SEQ ID NO: 183465 - DNA, 45 bp, Homo sapiens
  chr17:37887588-37887633
  hypo
aagtgctgggattacaggcgtgagccaccacgcccggtgctgatg

SEQ ID NO: 183466 - DNA, 48 bp, Homo sapiens; identical to SEQ ID NO: 128576
  chr17:38024014-38024062
  hypo

SEQ ID NO: 183467 - DNA, 30 bp, Homo sapiens; identical to SEQ ID NO: 54028
  chr17:38051332-38051362
  hypo

SEQ ID NO: 183468 - DNA, 25 bp, Homo sapiens
  chr17:38055925-38055950
  hypo
ttttttttttgaacagagtctcgat

SEQ ID NO: 183469 - DNA, 30 bp, Homo sapiens; identical to SEQ ID NO: 30327
  chr17:38073545-38073575
  hypo

SEQ ID NO: 183470 - DNA, 25 bp, Homo sapiens
  chr17:38075014-38075039
  hypo
cttttttttttttttttgagacgga

SEQ ID NO: 183471 - DNA, 85 bp, Homo sapiens
  chr17:38075338-38075423
  hypo
tacctaaggagtgggtaggagatcctggtatgtattctaggtgagtgtgggccagacaatggtgcacaccgtggcgccctgggcc

SEQ ID NO: 183472 - DNA, 121 bp, Homo sapiens; identical to SEQ ID NO: 92644
  chr17:38105713-38105834
  hypo

SEQ ID NO: 183473 - DNA, 31 bp, Homo sapiens; identical to SEQ ID NO: 92645
  chr17:38176410-38176441
  hypo

SEQ ID NO: 183474 - DNA, 473 bp, Homo sapiens; identical to SEQ ID NO: 92646
  chr17:38179104-38179577
  hypo

SEQ ID NO: 183475 - DNA, 31 bp, Homo sapiens
  chr17:38183023-38183054
  hypo
acaggggagcaaggaacgggctcagggagcg

SEQ ID NO: 183476 - DNA, 40 bp, Homo sapiens; identical to SEQ ID NO: 11203
  chr17:38228512-38228552
  hypo

SEQ ID NO: 183477 - DNA, 33 bp, Homo sapiens; identical to SEQ ID NO: 92648
  chr17:38237910-38237943
  hypo

SEQ ID NO: 183478 - DNA, 47 bp, Homo sapiens; identical to SEQ ID NO: 92649
  chr17:38244540-38244587
  hypo

SEQ ID NO: 183479 - DNA, 30 bp, Homo sapiens; identical to SEQ ID NO: 30332
  chr17:38245527-38245557
  hypo

SEQ ID NO: 183480 - DNA, 505 bp, Homo sapiens; identical to SEQ ID NO: 92651
  chr17:38249239-38249744
  hypo

SEQ ID NO: 183481 - DNA, 165 bp, Homo sapiens; identical to SEQ ID NO: 92652
  chr17:38250102-38250267
  hypo

SEQ ID NO: 183482 - DNA, 125 bp, Homo sapiens
  chr17:38251852-38251977
  hypo
ggaggagggagcctggcgcagaccatttagggcctcgttatgacgctgggcagccaaggtgttgttgtcattgggggcaggtgggcagccctgattttcccagcgatgtggggtggtggctggag

SEQ ID NO: 183483 - DNA, 121 bp, Homo sapiens
  chr17:38276208-38276329
  hypo
attagacatccaactgggtatgtatactagacagttggatatatgattctggagttaggggatgagtccagaaagaaatataaattacggagctgtcagcgtagagatggtgcagaaagtc

SEQ ID NO: 183484 - DNA, 28 bp, Homo sapiens
  chr17:38276388-38276416
  hypo
caggtgggaggatcgcttgagcgagttc

SEQ ID NO: 183485 - DNA, 329 bp, Homo sapiens
  chr17:38334997-38335326
  hypo
cgcagccatgccacccgccagaggtgctttagccctgaaaaccctggggtccctgactgttcagaggcctacacagcgcaggctgacccacccagggaggcagtgccagacaggcacaggccccaagctgccttttaggcatcagcaaagggatgcgttgtccttagcagtttggtgggggggatagtattctccttgggctggactcagaaggtgtctgggaggggagaggtggctgggccggcatcatggccctgcagcatccagggtgtccaagcgcctccagcttccacccttcggtggcaggcctcagcacccggctttttttt

SEQ ID NO: 183486 - DNA, 23 bp, Homo sapiens
  chr17:38380135-38380158
  hypo
ccgagaaaattattaaatgttct

SEQ ID NO: 183487 - DNA, 38 bp, Homo sapiens; identical to SEQ ID NO: 92657
  chr17:38380417-38380455
  hypo

SEQ ID NO: 183488 - DNA, 21 bp, Homo sapiens
  chr17:38383815-38383836
  hypo
tgttccaggctggttgcggtg

SEQ ID NO: 183489 - DNA, 21 bp, Homo sapiens
  chr17:38395607-38395628
  hypo
ccactgcgcccagccttggct

SEQ ID NO: 183490 - DNA, 19 bp, Homo sapiens
  chr17:38441077-38441096
  hypo
agatgaaaagtctgttttt

SEQ ID NO: 183491 - DNA, 19 bp, Homo sapiens
  chr17:38441335-38441354
  hypo
agagcgagactccaaataa

SEQ ID NO: 183492 - DNA, 1097 bp, Homo sapiens; identical to SEQ ID NO: 54046
  chr17:38498083-38499180
  hypo

SEQ ID NO: 183493 - DNA, 30 bp, Homo sapiens; identical to SEQ ID NO: 54047
  chr17:38499536-38499566
  hypo

SEQ ID NO: 183494 - DNA, 79 bp, Homo sapiens
  chr17:38511650-38511729
  hypo
cctgcgaagcatcagcgccaagggtgaggctcacagacctggaggggtaccggcccccgacacctggcccaggccccca

SEQ ID NO: 183495 - DNA, 92 bp, Homo sapiens; identical to SEQ ID NO: 30339
  chr17:38513564-38513656
  hypo

SEQ ID NO: 183496 - DNA, 31 bp, Homo sapiens; identical to SEQ ID NO: 30340
  chr17:38527562-38527593
  hypo

SEQ ID NO: 183497 - DNA, 20 bp, Homo sapiens
  chr17:38575001-38575021
  hypo
cagagcgaggccacctcaag

SEQ ID NO: 183498 - DNA, 30 bp, Homo sapiens; identical to SEQ ID NO: 30342
  chr17:38631676-38631706
  hypo

SEQ ID NO: 183499 - DNA, 42 bp, Homo sapiens; identical to SEQ ID NO: 92668
  chr17:38638672-38638714
  hypo

SEQ ID NO: 183500 - DNA, 30 bp, Homo sapiens
  chr17:38646473-38646503
  hypo
tttccactccctggtcggggcatccaggac

SEQ ID NO: 183501 - DNA, 98 bp, Homo sapiens
  chr17:38656558-38656656
  hypo
acttttaaggctctgcgtcgcccttggatgtaccaaggcagggctccatcttactcctgtattcctgaatgctgcccccttcgcggccccgcacactc

SEQ ID NO: 183502 - DNA, 30 bp, Homo sapiens
  chr17:38657062-38657092
  hypo
cccggtgacgcaggacgtggacctcaggca

SEQ ID NO: 183503 - DNA, 30 bp, Homo sapiens; identical to SEQ ID NO: 30343
  chr17:38657295-38657325
  hypo

SEQ ID NO: 183504 - DNA, 30 bp, Homo sapiens
  chr17:38657899-38657929
  hypo
taaaagcagcttgcccgccttctctcctcc

SEQ ID NO: 183505 - DNA, 322 bp, Homo sapiens; identical to SEQ ID NO: 92671
  chr17:38668669-38668991
  hypo

SEQ ID NO: 183506 - DNA, 22 bp, Homo sapiens
  chr17:38669290-38669312
  hypo
cctggcccgctccaggcacttt

SEQ ID NO: 183507 - DNA, 30 bp, Homo sapiens
  chr17:38677504-38677534
  hypo
aaggaggcactgtttcggatgggccggggg

SEQ ID NO: 183508 - DNA, 43 bp, Homo sapiens; identical to SEQ ID NO: 92673
  chr17:38692021-38692064
  hypo

SEQ ID NO: 183509 - DNA, 225 bp, Homo sapiens
  chr17:38711763-38711988
  hypo
cccaggacttggccgcgctgtaggcccagaagggaagggtcaggaggaagaggatgtctgccaccgccaggttgagcaggtaggtatcggtcatggtcttgagcctcttgaaatagatataggtcaacacgaccagcccattgcccagtaggcccacgaaacaaatgatggagtacatgatagggaggaaccaggctttaaagttccgcacgtccttcttggagc

SEQ ID NO: 183510 - DNA, 30 bp, Homo sapiens
  chr17:38769213-38769243
  hypo
cagagaagctagtgacgcacctgaggagga

SEQ ID NO: 183511 - DNA, 30 bp, Homo sapiens
  chr17:38769499-38769529
  hypo
cttccagttacccttcgcgactcactcatc

SEQ ID NO: 183512 - DNA, 324 bp, Homo sapiens
  chr17:38774235-38774559
  hypo
tccctccttagccgtcgtgcacaacctgtgctgtgagacgctgctgcttgcctggcactgctgttgaatcagtctccatctcctcattttgatggcagcctgggtttgttatccttcaaagatcgtctcttggaaggacaccagcctctgattacatttccgagcctgcctggaggcagctaagctaatccgacacgatttgggtggattcccttctggcctcatgttctgacacaacctctggcagcagtagggtgggaagatggacaaaataattacgccctatgagttgaaaggagaattaaaattaattccctcgtgcaa

SEQ ID NO: 183513 - DNA, 26 bp, Homo sapiens
  chr17:38782430-38782456
  hypo
atggcgccattacactccagcctggg

SEQ ID NO: 183514 - DNA, 31 bp, Homo sapiens; identical to SEQ ID NO: 30346
  chr17:38786988-38787019
  hypo

SEQ ID NO: 183515 - DNA, 31 bp, Homo sapiens; identical to SEQ ID NO: 30347
  chr17:38821260-38821291
  hypo

SEQ ID NO: 183516 - DNA, 30 bp, Homo sapiens
  chr17:38844812-38844842
  hypo
gtgaaccaccacgcccggccttacctagtg

SEQ ID NO: 183517 - DNA, 21 bp, Homo sapiens
  chr17:39344858-39344879
  hypo
acacacggccgggcgcggtgg

SEQ ID NO: 183518 - DNA, 30 bp, Homo sapiens; identical to SEQ ID NO: 54055
  chr17:39596539-39596569
  hypo

SEQ ID NO: 183519 - DNA, 31 bp, Homo sapiens; identical to SEQ ID NO: 30349
  chr17:39651771-39651802
  hypo

SEQ ID NO: 183520 - DNA, 340 bp, Homo sapiens; identical to SEQ ID NO: 92681
  chr17:39657290-39657630
  hypo

SEQ ID NO: 183521 - DNA, 727 bp, Homo sapiens; identical to SEQ ID NO: 30350
  chr17:39658614-39659341
  hypo

SEQ ID NO: 183522 - DNA, 230 bp, Homo sapiens; identical to SEQ ID NO: 92683
  chr17:39659564-39659794
  hypo

SEQ ID NO: 183523 - DNA, 110 bp, Homo sapiens; identical to SEQ ID NO: 92684
  chr17:39661339-39661449
  hypo

SEQ ID NO: 183524 - DNA, 30 bp, Homo sapiens; identical to SEQ ID NO: 92685
  chr17:39661707-39661737
  hypo

SEQ ID NO: 183525 - DNA, 149 bp, Homo sapiens
  chr17:39671695-39671844
  hypo
actccttcccctgtgcccaggcgcctacttggcatcctggccctcgagcaggctgcggtaagtagcgatctcctgctccagccgtgtctttatgtcaagcagcatcttgtactcctggttctgagcctccatctcgcatcggagctcac

SEQ ID NO: 183526 - DNA, 499 bp, Homo sapiens; identical to SEQ ID NO: 92687
  chr17:39672144-39672643
  hypo

SEQ ID NO: 183527 - DNA, 412 bp, Homo sapiens; identical to SEQ ID NO: 92688
  chr17:39673043-39673455
  hypo

SEQ ID NO: 183528 - DNA, 119 bp, Homo sapiens
  chr17:39676656-39676775
  hypo
catgaccggcacctgcgcctgagtgccctcaccaggaggggctttgtcgttgggcatcagaacatgccctgtgagcctgagcatgttcttaggctcaacggcatcgaccttccatagcc

SEQ ID NO: 183529 - DNA, 30 bp, Homo sapiens
  chr17:39679166-39679196
  hypo
gcccctagggatccccggcctgagccttca

SEQ ID NO: 183530 - DNA, 453 bp, Homo sapiens; identical to SEQ ID NO: 92690
  chr17:39680349-39680802
  hypo

SEQ ID NO: 183531 - DNA, 143 bp, Homo sapiens; identical to SEQ ID NO: 30355
  chr17:39681120-39681263
  hypo

SEQ ID NO: 183532 - DNA, 20 bp, Homo sapiens
  chr17:39682232-39682252
  hypo
ggtttttttgagacagagtc

SEQ ID NO: 183533 - DNA, 241 bp, Homo sapiens; identical to SEQ ID NO: 30357
  chr17:39682491-39682732
  hypo

SEQ ID NO: 183534 - DNA, 1139 bp, Homo sapiens; identical to SEQ ID NO: 128624
  chr17:39683515-39684654
  hypo

SEQ ID NO: 183535 - DNA, 112 bp, Homo sapiens; identical to SEQ ID NO: 92695
  chr17:39694231-39694343
  hypo

SEQ ID NO: 183536 - DNA, 31 bp, Homo sapiens; identical to SEQ ID NO: 30359
  chr17:39702524-39702555
  hypo

SEQ ID NO: 183537 - DNA, 30 bp, Homo sapiens
  chr17:39739844-39739874
  hypo
ggtgcgccggagctccgagatctcgctctt

SEQ ID NO: 183538 - DNA, 248 bp, Homo sapiens
  chr17:39788200-39788448
  hypo
ctcagtgggcccatctgcatccggcagagacccacccagcccccatctccttgctcgggaggctttgggggcacagcgagggtcggctgtgaaaacacggagagaatgcgtgtagggtgactcgaggcacagccctggtgcgtgctgcgcggcggggttggtgatgaggtgctggctgatcccgaagatcaggagcactgactcaccagggctcccctgggttccccgctgccagaaccaaccccaat

SEQ ID NO: 183539 - DNA, 30 bp, Homo sapiens; identical to SEQ ID NO: 30361
  chr17:39793127-39793157
  hypo

SEQ ID NO: 183540 - DNA, 30 bp, Homo sapiens; identical to SEQ ID NO: 54058
  chr17:39795172-39795202
  hypo

SEQ ID NO: 183541 - DNA, 65 bp, Homo sapiens
  chr17:39803736-39803801
  hypo
cgccagctgcgtgaacgcccgtaactctttacggcagaagaccaagggtgcgtctggtcctcaga

SEQ ID NO: 183542 - DNA, 30 bp, Homo sapiens
  chr17:39810559-39810589
  hypo
agtgaggaatgcggacgccgcccgggctgg

SEQ ID NO: 183543 - DNA, 30 bp, Homo sapiens
  chr17:39811343-39811373
  hypo
gccagaaaaactgcccgtcccctcctggcg

SEQ ID NO: 183544 - DNA, 158 bp, Homo sapiens
  chr17:39855665-39855823
  hypo
tatgcttctactgtccgtttttgtgtgctccaatgcagatctaaaactgcgatggaatgtgcacttataaaaacaatgccactgtctttttttaaccagtgaacagattgcaatataaagtccactaaagccaggcgcggtgactcacacttgtaatc

SEQ ID NO: 183545 - DNA, 30 bp, Homo sapiens; identical to SEQ ID NO: 92701
  chr17:40278776-40278806
  hypo

SEQ ID NO: 183546 - DNA, 30 bp, Homo sapiens; identical to SEQ ID NO: 92702
  chr17:40309342-40309372
  hypo

SEQ ID NO: 183547 - DNA, 21 bp, Homo sapiens
  chr17:40313230-40313251
  hypo
ccaccgcgcccggcctatcag

SEQ ID NO: 183548 - DNA, 30 bp, Homo sapiens
  chr17:40317506-40317536
  hypo
cggggcaggccagcccggaaggcagcccca

SEQ ID NO: 183549 - DNA, 287 bp, Homo sapiens
  chr17:40318142-40318429
  hypo
tctaaaggcgatggtcgtagggcggagggaccgagagagtactcctcagcaggaactgtaggtatccacgaggggtatcccattccctagaatcctggccattcccaagtcctcagtgggggttgcggggggtggttccagggtaggtagtagagggtgacggtgtccttacccaggatggccagcaccatgttgtctcggagcacctcaagcgagccggagcagacatagtaatgtgcctgcagggcatccccacggcgcaacaggtactcgcccggagcgcagaa

SEQ ID NO: 183550 - DNA, 30 bp, Homo sapiens; identical to SEQ ID NO: 92705
  chr17:40322123-40322153
  hypo

SEQ ID NO: 183551 - DNA, 137 bp, Homo sapiens; identical to SEQ ID NO: 92706
  chr17:40330250-40330387
  hypo

SEQ ID NO: 183552 - DNA, 454 bp, Homo sapiens; identical to SEQ ID NO: 128631
  chr17:40332755-40333209
  hypo

SEQ ID NO: 183553 - DNA, 54 bp, Homo sapiens; identical to SEQ ID NO: 128632
  chr17:40333431-40333485
  hypo

SEQ ID NO: 183554 - DNA, 119 bp, Homo sapiens; identical to SEQ ID NO: 30362
  chr17:40337519-40337638
  hypo

SEQ ID NO: 183555 - DNA, 30 bp, Homo sapiens
  chr17:40346325-40346355
  hypo
ggctttgctttctctcgggatccaccctgt

SEQ ID NO: 183556 - DNA, 106 bp, Homo sapiens; identical to SEQ ID NO: 30363
  chr17:40353735-40353841
  hypo

SEQ ID NO: 183557 - DNA, 204 bp, Homo sapiens; identical to SEQ ID NO: 92710
  chr17:40362203-40362407
  hypo

SEQ ID NO: 183558 - DNA, 22 bp, Homo sapiens
  chr17:40363503-40363525
  hypo
acaagagcgaaactctgtctca

SEQ ID NO: 183559 - DNA, 139 bp, Homo sapiens; identical to SEQ ID NO: 30364
  chr17:40370155-40370294
  hypo

SEQ ID NO: 183560 - DNA, 663 bp, Homo sapiens; identical to SEQ ID NO: 30365
  chr17:40371744-40372407
  hypo

SEQ ID NO: 183561 - DNA, 168 bp, Homo sapiens
  chr17:40372619-40372787
  hypo
accaaccagggaacacggacagacagacagaccgcagagggagagcatgtccagggccactggggatgcagagccaccaagattctctcaggaaagggaggccgaagggaggcggcttccctccacaccatctgtgaggagtctcattgatggcgggacagggagtaa

SEQ ID NO: 183562 - DNA, 438 bp, Homo sapiens
  chr17:40375286-40375724
  hypo
aaaggtcgctgcctccgaatggaaagtgtgctttctcccaaccccaccagagctgctttccagtccccaggcccaatcctcaagttgcacaatgtgcctccaccgcgcctcaccttggatcctcaggctctcctggtactggatgatgaagtactcctgagtctgctgcagcttttttaactcattctctgtgtcctgcgtgaccagtcgcagctcctcaaacgtctggttgatctggaggtgtttctgggacatggcatcagcaaggcttccagctggagagctaccctgggaacatatggggggcagtgcaaggcagtgcgaatgggaggaagactgaggccttaatccccaggaaaagccagctcctacaaccagggtaagaccccaaaaggtaaattttgagtcgggaggaaaagcaaacgtcatcatgagaca

SEQ ID NO: 183563 - DNA, 31 bp, Homo sapiens; identical to SEQ ID NO: 92715
  chr17:40376747-40376778
  hypo

SEQ ID NO: 183564 - DNA, 22 bp, Homo sapiens
  chr17:40381601-40381623
  hypo
aagatttggctgggcccggtgg

SEQ ID NO: 183565 - DNA, 21 bp, Homo sapiens
  chr17:40381862-40381883
  hypo
acagagcgagactccatctca

SEQ ID NO: 183566 - DNA, 23 bp, Homo sapiens
  chr17:40387506-40387529
  hypo
ttttttttttttgagacggagtc

SEQ ID NO: 183567 - DNA, 82 bp, Homo sapiens; identical to SEQ ID NO: 30369
  chr17:40387768-40387850
  hypo

SEQ ID NO: 183568 - DNA, 20 bp, Homo sapiens
  chr17:40407743-40407763
  hypo
tggagatggaccaggtgctg

SEQ ID NO: 183569 - DNA, 27 bp, Homo sapiens
  chr17:40408578-40408605
  hypo
taagatagactacattcggccaggcac

SEQ ID NO: 183570 - DNA, 385 bp, Homo sapiens; identical to SEQ ID NO: 128634
  chr17:40427458-40427843
  hypo

SEQ ID NO: 183571 - DNA, 518 bp, Homo sapiens; identical to SEQ ID NO: 128636
  chr17:40428744-40429262
  hypo

SEQ ID NO: 183572 - DNA, 209 bp, Homo sapiens
  chr17:40436564-40436773
  hypo
gtgagccaccatgcccggccctttgggataattctcttaatccataaactcaaacccaccttcatgtaagtgtgcacagagcacactgtcccattcaatagagcaggggtgtaggctgggcgagaatggagatgccatgctccgcaccgcagaaaaatggtgggctagcccagcccagggaggcctcttcactccgccggtgtgtgctg

SEQ ID NO: 183573 - DNA, 23 bp, Homo sapiens
  chr17:40445509-40445532
  hypo
accacgcccggcctattacgtat

SEQ ID NO: 183574 - DNA, 30 bp, Homo sapiens; identical to SEQ ID NO: 30374
  chr17:40445941-40445971
  hypo

SEQ ID NO: 183575 - DNA, 148 bp, Homo sapiens; identical to SEQ ID NO: 92725
  chr17:40447591-40447739
  hypo

SEQ ID NO: 183576 - DNA, 166 bp, Homo sapiens; identical to SEQ ID NO: 92726
  chr17:40453234-40453400
  hypo

SEQ ID NO: 183577 - DNA, 37 bp, Homo sapiens; identical to SEQ ID NO: 92727
  chr17:40453898-40453935
  hypo

SEQ ID NO: 183578 - DNA, 419 bp, Homo sapiens; identical to SEQ ID NO: 92728
  chr17:40456104-40456523
  hypo

SEQ ID NO: 183579 - DNA, 160 bp, Homo sapiens; identical to SEQ ID NO: 92729
  chr17:40458358-40458518
  hypo

SEQ ID NO: 183580 - DNA, 108 bp, Homo sapiens; identical to SEQ ID NO: 92730
  chr17:40459506-40459614
  hypo

SEQ ID NO: 183581 - DNA, 31 bp, Homo sapiens; identical to SEQ ID NO: 92731
  chr17:40461335-40461366
  hypo

SEQ ID NO: 183582 - DNA, 46 bp, Homo sapiens; identical to SEQ ID NO: 30377
  chr17:40477850-40477896
  hypo

SEQ ID NO: 183583 - DNA, 43 bp, Homo sapiens; identical to SEQ ID NO: 92733
  chr17:40514601-40514644
  hypo

SEQ ID NO: 183584 - DNA, 36 bp, Homo sapiens; identical to SEQ ID NO: 92734
  chr17:40533447-40533483
  hypo

SEQ ID NO: 183585 - DNA, 33 bp, Homo sapiens
  chr17:40548835-40548868
  hypo
ccgcctcggcctcccaaacgtcaatatcttatt

SEQ ID NO: 183586 - DNA, 557 bp, Homo sapiens; identical to SEQ ID NO: 128645
  chr17:40574882-40575439
  hypo

SEQ ID NO: 183587 - DNA, 43 bp, Homo sapiens; identical to SEQ ID NO: 92736
  chr17:40609954-40609997
  hypo

SEQ ID NO: 183588 - DNA, 77 bp, Homo sapiens; identical to SEQ ID NO: 92737
  chr17:40616718-40616795
  hypo

SEQ ID NO: 183589 - DNA, 286 bp, Homo sapiens
  chr17:40689404-40689690
  hypo
actgcccgcaggtaccgctattaccagaatgtgtgcacgcaaagctactctttcgtgtggtgggactgggcccgctgggagcgagagatagactggatggcgctgaatggcatcaacctggcactggcctggagcggccaggaggccatctggcagcgggtgcgtgcccactgtcccttccccaccctcctctatggcgggagccaccgtaggtgttttcacccgccccccagcatgggcgcagtgtctctctctagaagtgctttcagcgtgcacagtggcttgg

SEQ ID NO: 183590 - DNA, 197 bp, Homo sapiens
  chr17:40695504-40695701
  hypo
ggaggctactgctccggagtgtgtacaactgctccggggaggcctgcaggggccacaatcgtagcccgctggtcaggcggccgtccctacagatgaataccagcatctggtacaaccgatctgatgtgtttgaggcctggcggctgctgctcacatctgctccctccctggccaccagccccgccttccgctacgac

SEQ ID NO: 183591 - DNA, 611 bp, Homo sapiens
  chr17:40699093-40699704
  hypo
gccgctgcccgggaacgcgtgaccgagggccgtgtggatgtgctgggtgagcctcctggaagcatatgggctcctaggagccttctccgccctgcgttgaaaccaacatgtccccaggcccctggagcatgaggggacaggccgtgctgagggtgatgctgaggcgggctggttgggcctctgtccccgcagtgtgtgacacaggcctgggcctgctggggccgctgggggaggacgctgtggcctctgtactggatgtgaatgtagtaggtactgtgcgggtgctgcaggacttcctgccagacatgaagcggccgggttcgggacgcgtgttggtgactgggagcatgggaggattgatgggtgagtggcagggaccgggcccggagctccagattctttgtgtgcagagctgagccttgaaggcaggctccttagggggtggggtgcaatcagcttggaggggcactgcctgccgggggatgaccccctggccgctgcgcctcaggaacctcatcttcccacccaagggctgcctttcaatgacgtttattgcgccagcaagttcgcgctcgaaggcttatgcgagagtctggcggttctgctgctgc

SEQ ID NO: 183592 - DNA, 30 bp, Homo sapiens
  chr17:40704980-40705010
  hypo
ctgttcctcgggcatcggcctgcacttggc

SEQ ID NO: 183593 - DNA, 93 bp, Homo sapiens
  chr17:40705244-40705337
  hypo
aagggactcaaaatccgtggccgctgcccgggaacgcgtgactgagggccgcgtggacgtgctgggtgagcctcctggaagcatatgggctcc

SEQ ID NO: 183594 - DNA, 190 bp, Homo sapiens; identical to SEQ ID NO: 92742
  chr17:40705838-40706028
  hypo

SEQ ID NO: 183595 - DNA, 43 bp, Homo sapiens; identical to SEQ ID NO: 92743
  chr17:40711056-40711099
  hypo

SEQ ID NO: 183596 - DNA, 34 bp, Homo sapiens
  chr17:40743621-40743655
  hypo
tgcaggggttactaataggcgttagccactgcgc

SEQ ID NO: 183597 - DNA, 104 bp, Homo sapiens
  chr17:40801989-40802093
  hypo
aaacaaaaacaactacagaaacatcccattttgttctatttcacaactaaaatatgaatttagtacaactcccttcacataaagagcgtcggctctttgccatc

SEQ ID NO: 183598 - DNA, 41 bp, Homo sapiens; identical to SEQ ID NO: 30381
  chr17:40804384-40804425
  hypo

SEQ ID NO: 183599 - DNA, 105 bp, Homo sapiens
  chr17:40820750-40820855
  hypo
aggcgtgagccaccgcggccggcttctctccttcatttctatgtgccagttatacttggttctttctgctcttctaacatttttttttgttgttgttgttgttgt

SEQ ID NO: 183600 - DNA, 109 bp, Homo sapiens; identical to SEQ ID NO: 92745
  chr17:40847765-40847874
  hypo

SEQ ID NO: 183601 - DNA, 30 bp, Homo sapiens
  chr17:40854499-40854529
  hypo
aagccaagacagtgccgctaccataagtgc

SEQ ID NO: 183602 - DNA, 34 bp, Homo sapiens
  chr17:40856547-40856581
  hypo
agagcaagactccgtctcaaaaaaagaaaaaaaa

SEQ ID NO: 183603 - DNA, 56 bp, Homo sapiens
  chr17:40897647-40897703
  hypo
cttcttctttttttgccggggggcgaggctggacggagtctcgctttgttacttac

SEQ ID NO: 183604 - DNA, 96 bp, Homo sapiens; identical to SEQ ID NO: 92747
  chr17:40929521-40929617
  hypo

SEQ ID NO: 183605 - DNA, 36 bp, Homo sapiens; identical to SEQ ID NO: 92748
  chr17:40939516-40939552
  hypo

SEQ ID NO: 183606 - DNA, 212 bp, Homo sapiens; identical to SEQ ID NO: 54091
  chr17:40950644-40950856
  hypo

SEQ ID NO: 183607 - DNA, 132 bp, Homo sapiens; identical to SEQ ID NO: 92750
  chr17:40951141-40951273
  hypo

SEQ ID NO: 183608 - DNA, 21 bp, Homo sapiens
  chr17:40956812-40956833
  hypo
gactctgtctcaaaaaaacta

SEQ ID NO: 183609 - DNA, 104 bp, Homo sapiens
  chr17:40975573-40975677
  hypo
aaagctctcagaagtccacaatgtcagaatgctttatgtttccaaggagaaaacagggagccagatgaagtgactttcctaggttcacacgatgagtttgtggc

SEQ ID NO: 183610 - DNA, 30 bp, Homo sapiens; identical to SEQ ID NO: 92752
  chr17:40996871-40996901
  hypo

SEQ ID NO: 183611 - DNA, 30 bp, Homo sapiens; identical to SEQ ID NO: 92753
  chr17:41051195-41051225
  hypo

SEQ ID NO: 183612 - DNA, 120 bp, Homo sapiens
  chr17:41131473-41131593
  hypo
tgaagctgaggagatgcggaatactccgtgtggggacattaggaaaggggtagattcctgggaagccaggccctcggacggcagggccactacctgaacacaatgcggtgatcctcaata

SEQ ID NO: 183613 - DNA, 39 bp, Homo sapiens
  chr17:41152507-41152546
  hypo
tttttgagacggagtcgcccaggttggagtgcagtggcg

SEQ ID NO: 183614 - DNA, 44 bp, Homo sapiens
  chr17:41177995-41178039
  hypo
ttgagaactacactgcgagctttgagatcgacaagcgccgcatt

SEQ ID NO: 183615 - DNA, 30 bp, Homo sapiens; identical to SEQ ID NO: 30384
  chr17:41180505-41180535
  hypo

SEQ ID NO: 183616 - DNA, 162 bp, Homo sapiens
  chr17:41188390-41188552
  hypo
taaatggatctgctgcgccagcaaacaactgtccattgtgtcctgatgagggacgagcagggaaaaccaatcacttatgatgcaaatgagccgacggctgcagcctcctcacattcactgagtgcttctcttctgcccagagcccggcgccgccccagttgg

SEQ ID NO: 183617 - DNA, 515 bp, Homo sapiens; identical to SEQ ID NO: 54095
  chr17:41196310-41196825
  hypo

SEQ ID NO: 183618 - DNA, 695 bp, Homo sapiens; identical to SEQ ID NO: 54096
  chr17:41197124-41197819
  hypo

SEQ ID NO: 183619 - DNA, 62 bp, Homo sapiens; identical to SEQ ID NO: 54097
  chr17:41199658-41199720
  hypo

SEQ ID NO: 183620 - DNA, 75 bp, Homo sapiens; identical to SEQ ID NO: 54098
  chr17:41201136-41201211
  hypo

SEQ ID NO: 183621 - DNA, 56 bp, Homo sapiens; identical to SEQ ID NO: 54099
  chr17:41203078-41203134
  hypo

SEQ ID NO: 183622 - DNA, 29 bp, Homo sapiens
  chr17:41208244-41208273
  hypo
cagtggcgcaatctccgttcactgtagtc

SEQ ID NO: 183623 - DNA, 85 bp, Homo sapiens; identical to SEQ ID NO: 54100
  chr17:41209067-41209152
  hypo

SEQ ID NO: 183624 - DNA, 42 bp, Homo sapiens; identical to SEQ ID NO: 54101
  chr17:41215348-41215390
  hypo

SEQ ID NO: 183625 - DNA, 79 bp, Homo sapiens; identical to SEQ ID NO: 54102
  chr17:41215889-41215968
  hypo

SEQ ID NO: 183626 - DNA, 89 bp, Homo sapiens; identical to SEQ ID NO: 54103
  chr17:41219623-41219712
  hypo

SEQ ID NO: 183627 - DNA, 312 bp, Homo sapiens; identical to SEQ ID NO: 54104
  chr17:41222943-41223255
  hypo

SEQ ID NO: 183628 - DNA, 192 bp, Homo sapiens; identical to SEQ ID NO: 54105
  chr17:41226346-41226538
  hypo

SEQ ID NO: 183629 - DNA, 128 bp, Homo sapiens; identical to SEQ ID NO: 54106
  chr17:41228503-41228631
  hypo

SEQ ID NO: 183630 - DNA, 23 bp, Homo sapiens
  chr17:41232306-41232329
  hypo
ataataaactaggccaggcaccg

SEQ ID NO: 183631 - DNA, 173 bp, Homo sapiens; identical to SEQ ID NO: 54107
  chr17:41234419-41234592
  hypo

SEQ ID NO: 183632 - DNA, 90 bp, Homo sapiens; identical to SEQ ID NO: 54108
  chr17:41242959-41243049
  hypo

SEQ ID NO: 183633 - DNA, 3427 bp, Homo sapiens; identical to SEQ ID NO: 54109
  chr17:41243450-41246877
  hypo

SEQ ID NO: 183634 - DNA, 78 bp, Homo sapiens; identical to SEQ ID NO: 54110
  chr17:41247861-41247939
  hypo

SEQ ID NO: 183635 - DNA, 47 bp, Homo sapiens; identical to SEQ ID NO: 54111
  chr17:41249259-41249306
  hypo

SEQ ID NO: 183636 - DNA, 107 bp, Homo sapiens; identical to SEQ ID NO: 54112
  chr17:41251790-41251897
  hypo

SEQ ID NO: 183637 - DNA, 141 bp, Homo sapiens; identical to SEQ ID NO: 54113
  chr17:41256137-41256278
  hypo

SEQ ID NO: 183638 - DNA, 90 bp, Homo sapiens; identical to SEQ ID NO: 54114
  chr17:41256883-41256973
  hypo

SEQ ID NO: 183639 - DNA, 79 bp, Homo sapiens; identical to SEQ ID NO: 54115
  chr17:41258471-41258550
  hypo

SEQ ID NO: 183640 - DNA, 55 bp, Homo sapiens; identical to SEQ ID NO: 54116
  chr17:41267741-41267796
  hypo

SEQ ID NO: 183641 - DNA, 100 bp, Homo sapiens; identical to SEQ ID NO: 54117
  chr17:41276032-41276132
  hypo

SEQ ID NO: 183642 - DNA, 214 bp, Homo sapiens; identical to SEQ ID NO: 54118
  chr17:41277286-41277500
  hypo

SEQ ID NO: 183643 - DNA, 85 bp, Homo sapiens; identical to SEQ ID NO: 30385
  chr17:41278615-41278700
  hypo

SEQ ID NO: 183644 - DNA, 30 bp, Homo sapiens; identical to SEQ ID NO: 92784
  chr17:41287571-41287601
  hypo

SEQ ID NO: 183645 - DNA, 156 bp, Homo sapiens
  chr17:41290191-41290347
  hypo
actccatctcaaaaggaaaaaaaagcaaaagagaaaaaacccaaacaaacaaaacccctgaacttccctgcgggcacattttctctggcagcctttttcaatgagagctatgttttctccgatactatatggcctgcggaccgctcagctttcatt

SEQ ID NO: 183646 - DNA, 38 bp, Homo sapiens; identical to SEQ ID NO: 92785
  chr17:41320358-41320396
  hypo

SEQ ID NO: 183647 - DNA, 37 bp, Homo sapiens; identical to SEQ ID NO: 92786
  chr17:41320635-41320672
  hypo

SEQ ID NO: 183648 - DNA, 30 bp, Homo sapiens; identical to SEQ ID NO: 92787
  chr17:41327229-41327259
  hypo

SEQ ID NO: 183649 - DNA, 148 bp, Homo sapiens; identical to SEQ ID NO: 92788
  chr17:41389668-41389816
  hypo

SEQ ID NO: 183650 - DNA, 44 bp, Homo sapiens; identical to SEQ ID NO: 92789
  chr17:41399426-41399470
  hypo

SEQ ID NO: 183651 - DNA, 31 bp, Homo sapiens; identical to SEQ ID NO: 30388
  chr17:41437690-41437721
  hypo

SEQ ID NO: 183652 - DNA, 30 bp, Homo sapiens; identical to SEQ ID NO: 92791
  chr17:41440702-41440732
  hypo

SEQ ID NO: 183653 - DNA, 34 bp, Homo sapiens
  chr17:41444580-41444614
  hypo
caaataaaggtcgggcgcggtggctcaggcctgt

SEQ ID NO: 183654 - DNA, 30 bp, Homo sapiens
  chr17:41445084-41445114
  hypo
agtttcaggactcggcggcgtactttccca

SEQ ID NO: 183655 - DNA, 31 bp, Homo sapiens; identical to SEQ ID NO: 92793
  chr17:41451802-41451833
  hypo

SEQ ID NO: 183656 - DNA, 236 bp, Homo sapiens; identical to SEQ ID NO: 92794
  chr17:41456126-41456362
  hypo

SEQ ID NO: 183657 - DNA, 31 bp, Homo sapiens; identical to SEQ ID NO: 30389
  chr17:41528541-41528572
  hypo

SEQ ID NO: 183658 - DNA, 43 bp, Homo sapiens; identical to SEQ ID NO: 30390
  chr17:41570141-41570184
  hypo

SEQ ID NO: 183659 - DNA, 30 bp, Homo sapiens; identical to SEQ ID NO: 30391
  chr17:41601290-41601320
  hypo

SEQ ID NO: 183660 - DNA, 30 bp, Homo sapiens
  chr17:41603768-41603798
  hypo
ggcatgtgtgagctccgcagctgggtcagg

SEQ ID NO: 183661 - DNA, 30 bp, Homo sapiens
  chr17:41604073-41604103
  hypo
cttcagggtttccaccgatttttacacctt

SEQ ID NO: 183662 - DNA, 137 bp, Homo sapiens
  chr17:41610026-41610163
  hypo
accccagtctcttacctgagtcgtaggcgaagtccgtctgttcctgtttgatcaccacccccgcccctgggtacctgtgcccattgaccccaccctggtccacggctggctggcccgcctgttcatacaggggatca

SEQ ID NO: 183663 - DNA, 31 bp, Homo sapiens; identical to SEQ ID NO: 92798
  chr17:41634686-41634717
  hypo

SEQ ID NO: 183664 - DNA, 31 bp, Homo sapiens; identical to SEQ ID NO: 92799
  chr17:41646432-41646463
  hypo

SEQ ID NO: 183665 - DNA, 30 bp, Homo sapiens; identical to SEQ ID NO: 92800
  chr17:41651891-41651921
  hypo

SEQ ID NO: 183666 - DNA, 121 bp, Homo sapiens
  chr17:41672276-41672397
  hypo
aactccgtctcaaaaaaaaaaaaaagaaactaaatgaataaagaatggatactgcataggcagagcggcggcatgagttgcttgactgagtatgcttattgttccggtttttttttttttt

SEQ ID NO: 183667 - DNA, 42 bp, Homo sapiens; identical to SEQ ID NO: 30392
  chr17:41692629-41692671
  hypo

SEQ ID NO: 183668 - DNA, 550 bp, Homo sapiens; identical to SEQ ID NO: 128713
  chr17:41723352-41723902
  hypo

SEQ ID NO: 183669 - DNA, 22 bp, Homo sapiens
  chr17:41728379-41728401
  hypo
ttctggaatgaaaatgcgtaat

SEQ ID NO: 183670 - DNA, 31 bp, Homo sapiens; identical to SEQ ID NO: 92805
  chr17:41729456-41729487
  hypo

SEQ ID NO: 183671 - DNA, 22 bp, Homo sapiens
  chr17:41745720-41745742
  hypo
actgcccccctccccacaaccc

SEQ ID NO: 183672 - DNA, 30 bp, Homo sapiens; identical to SEQ ID NO: 92807
  chr17:41817622-41817652
  hypo

SEQ ID NO: 183673 - DNA, 31 bp, Homo sapiens; identical to SEQ ID NO: 92808
  chr17:41824096-41824127
  hypo

SEQ ID NO: 183674 - DNA, 42 bp, Homo sapiens; identical to SEQ ID NO: 92809
  chr17:41895346-41895388
  hypo

SEQ ID NO: 183675 - DNA, 31 bp, Homo sapiens; identical to SEQ ID NO: 92810
  chr17:41907276-41907307
  hypo

SEQ ID NO: 183676 - DNA, 38 bp, Homo sapiens; identical to SEQ ID NO: 92811
  chr17:41915918-41915956
  hypo

SEQ ID NO: 183677 - DNA, 26 bp, Homo sapiens
  chr17:41919727-41919753
  hypo
ccacgcctctctccacgcctctccac

SEQ ID NO: 183678 - DNA, 25 bp, Homo sapiens
  chr17:41919872-41919897
  hypo
cctctctctacgcctctccacccct

SEQ ID NO: 183679 - DNA, 30 bp, Homo sapiens; identical to SEQ ID NO: 11239
  chr17:42005404-42005434
  hypo

SEQ ID NO: 183680 - DNA, 452 bp, Homo sapiens; identical to SEQ ID NO: 128730
  chr17:42015410-42015862
  hypo

SEQ ID NO: 183681 - DNA, 58 bp, Homo sapiens; identical to SEQ ID NO: 92814
  chr17:42019593-42019651
  hypo

SEQ ID NO: 183682 - DNA, 506 bp, Homo sapiens; identical to SEQ ID NO: 54140
  chr17:42030244-42030750
  hypo

SEQ ID NO: 183683 - DNA, 846 bp, Homo sapiens; identical to SEQ ID NO: 11243
  chr17:42091702-42092548
  hypo

SEQ ID NO: 183684 - DNA, 325 bp, Homo sapiens; identical to SEQ ID NO: 92817
  chr17:42097490-42097815
  hypo

SEQ ID NO: 183685 - DNA, 125 bp, Homo sapiens
  chr17:42098920-42099045
  hypo
attaaccatttgtttcgttgccactggggcatcctagtagtgagaccgtttgctactgaccaagtttttctacaagtgacaaatccctctggcctcctcctgaagagcttcgaggacggctacca

SEQ ID NO: 183686 - DNA, 97 bp, Homo sapiens
  chr17:42100158-42100255
  hypo
gcatgctttttctttcggattctgtttgtgacaccaaaaatgttctgtgtgagagacgcatgaggggagaagaaaaggtgcacacacaaaatacctt

SEQ ID NO: 183687 - DNA, 30 bp, Homo sapiens; identical to SEQ ID NO: 92818
  chr17:42100972-42101002
  hypo

SEQ ID NO: 183688 - DNA, 454 bp, Homo sapiens
  chr17:42109842-42110296
  hypo
cattaactccaaaggcgtgtgcgtggtggtggcgagataatcaggtgctgggtatagaggtgtgtgtgtgtgtgtatatttggggagaaaggagaacaccccaaaacaaagccgaggagacactgcaaaactactgcccatactgcatcatagatgtaagctctctgcaccacgctcttccatggttcaatatgctttcaatctaggtggcaatttctgccattctcactagtctcccgtgttccagcctcattctggcaaacaaaagtgagcagtacacatgccatcactttggaaagtcccactgcattaggaacccgtgagtgttaagcctcgggccttcttccagctccgctaccacaggcaggtggggcactctagacaagtcacttggcctcagtggaactcactctctactctgaaaaatagttttgaaaattatcaaggccaggtg

SEQ ID NO: 183689 - DNA, 25 bp, Homo sapiens
  chr17:42123310-42123335
  hypo
ttttttttttttgagacggagtctc

SEQ ID NO: 183690 - DNA, 104 bp, Homo sapiens
  chr17:42142811-42142915
  hypo
aaaaaaaaaaaaaaaagatgccataaaaaattactcctccaaaaaaaaattccaataaacccacctgtggctcacataaaaagggaagccgtggcacatttatc

SEQ ID NO: 183691 - DNA, 562 bp, Homo sapiens; identical to SEQ ID NO: 128741
  chr17:42200350-42200912
  hypo

SEQ ID NO: 183692 - DNA, 209 bp, Homo sapiens; identical to SEQ ID NO: 128742
  chr17:42200973-42201182
  hypo

SEQ ID NO: 183693 - DNA, 17 bp, Homo sapiens
  chr17:42216973-42216990
  hypo
ttttttttttttgagac

SEQ ID NO: 183694 - DNA, 93 bp, Homo sapiens; identical to SEQ ID NO: 30401
  chr17:42222373-42222466
  hypo

SEQ ID NO: 183695 - DNA, 30 bp, Homo sapiens
  chr17:42239394-42239424
  hypo
agagtggacacagccggggggcttctgtgg

SEQ ID NO: 183696 - DNA, 92 bp, Homo sapiens
  chr17:42249457-42249549
  hypo
gccatcgctacagcccgaggctacacagactgtgctcgacacctgatccggcagggagctgagctggatgcccgtgtcgggggtcgcgctgc

SEQ ID NO: 183697 - DNA, 356 bp, Homo sapiens; identical to SEQ ID NO: 92825
  chr17:42254321-42254677
  hypo

SEQ ID NO: 183698 - DNA, 30 bp, Homo sapiens; identical to SEQ ID NO: 30404
  chr17:42255094-42255124
  hypo

SEQ ID NO: 183699 - DNA, 30 bp, Homo sapiens; identical to SEQ ID NO: 30405
  chr17:42267975-42268005
  hypo

SEQ ID NO: 183700 - DNA, 509 bp, Homo sapiens; identical to SEQ ID NO: 128747
  chr17:42287798-42288307
  hypo

SEQ ID NO: 183701 - DNA, 118 bp, Homo sapiens; identical to SEQ ID NO: 30406
  chr17:42289049-42289167
  hypo

SEQ ID NO: 183702 - DNA, 30 bp, Homo sapiens; identical to SEQ ID NO: 30407
  chr17:42289754-42289784
  hypo

SEQ ID NO: 183703 - DNA, 30 bp, Homo sapiens; identical to SEQ ID NO: 92830
  chr17:42290013-42290043
  hypo

SEQ ID NO: 183704 - DNA, 217 bp, Homo sapiens; identical to SEQ ID NO: 92831
  chr17:42292483-42292700
  hypo

SEQ ID NO: 183705 - DNA, 615 bp, Homo sapiens; identical to SEQ ID NO: 128750
  chr17:42298855-42299470
  hypo

SEQ ID NO: 183706 - DNA, 276 bp, Homo sapiens; identical to SEQ ID NO: 128751
  chr17:42299536-42299812
  hypo

SEQ ID NO: 183707 - DNA, 121 bp, Homo sapiens; identical to SEQ ID NO: 92833
  chr17:42301913-42302034
  hypo

SEQ ID NO: 183708 - DNA, 24 bp, Homo sapiens
  chr17:42302877-42302901
  hypo
gtgaaccaccgcacctggcgcatt

SEQ ID NO: 183709 - DNA, 31 bp, Homo sapiens; identical to SEQ ID NO: 30409
  chr17:42304494-42304525
  hypo

SEQ ID NO: 183710 - DNA, 23 bp, Homo sapiens
  chr17:42318151-42318174
  hypo
aaaataagaccaggcacggtggc

SEQ ID NO: 183711 - DNA, 30 bp, Homo sapiens
  chr17:42328221-42328251
  hypo
aaatgactcggaagacggcaggacttgctg

SEQ ID NO: 183712 - DNA, 419 bp, Homo sapiens
  chr17:42328459-42328878
  hypo
cctagttctgagacgcgcccctcgcatgctcccagctcttgtgccccaggcccaggcagccactcacacactgaagctccacgttcctgaagatgagcggcagcaggacgcgccgcagcggcacagtgaggatgaggacgaagggcagggccagggaggccggcgtggacttcaccacccacagcactgccaggcagatgatctggatgcccgtgaataagtgcatgcgccaggtcttcacctgcaggcggaggctggggtcagtgcctatcacaccccagcaccctctaccaccccaggctgggcagccagaaaagggtcctgtacccgcttgacgtagggcacatctgggtgatacttgggtggcttgaacagaagcaagatgcggtcaaagagctggatgccgctgagcgacgtga

SEQ ID NO: 183713 - DNA, 25 bp, Homo sapiens
  chr17:42331624-42331649
  hypo
tgagccaccgcgcccggccacgttt

SEQ ID NO: 183714 - DNA, 257 bp, Homo sapiens
  chr17:42334639-42334896
  hypo
ctgagccctcgcacccggccactgtctcagtcttatacacaacctcccgtgtgcattaacatccccataggcccccaccttgatcagcttggagaaagtctcatagatgaagatgagggaaatgaggaaggagaagatctcctgggtatagcgggagatgaagcggaccaggaagctaccctcgaaggccaccaccaacaccaccagcaggatgagccagaagccgatccacacgcggcccacgatgtactctagac

SEQ ID NO: 183715 - DNA, 125 bp, Homo sapiens
  chr17:42335362-42335487
  hypo
cgccgaaggtgatggcgggtgacagtgcagcaaagtagatgaagatgacggcagccaggacctgggggctgaatgcatctgtgatgtcactcaggtaataggggtagcggcgccggatatcacgc

SEQ ID NO: 183716 - DNA, 129 bp, Homo sapiens
  chr17:42338003-42338132
  hypo
cttggtgaagactctacgcagctctaggaggctccagaaggtgaggtgagagaggtgcgggcggccccaggccccattctcccccaggttctcctccagttgcacccagcgcgccgcctccatccatct

SEQ ID NO: 183717 - DNA, 30 bp, Homo sapiens
  chr17:42338983-42339013
  hypo
ctgttgcctcggtgtcgtgagctgaaaacc

SEQ ID NO: 183718 - DNA, 30 bp, Homo sapiens
  chr17:42340278-42340308
  hypo
cagcataacccgcaccgcgggtccctgcag

SEQ ID NO: 183719 - DNA, 31 bp, Homo sapiens; identical to SEQ ID NO: 92838
  chr17:42395127-42395158
  hypo

SEQ ID NO: 183720 - DNA, 131 bp, Homo sapiens; identical to SEQ ID NO: 92839
  chr17:42395459-42395590
  hypo

SEQ ID NO: 183721 - DNA, 30 bp, Homo sapiens; identical to SEQ ID NO: 92840
  chr17:42397590-42397620
  hypo

SEQ ID NO: 183722 - DNA, 46 bp, Homo sapiens
  chr17:42401271-42401317
  hypo
cactgggattacaggcgtgagccaccgcacccggcccactgtgaga

SEQ ID NO: 183723 - DNA, 403 bp, Homo sapiens; identical to SEQ ID NO: 54159
  chr17:42402709-42403112
  hypo

SEQ ID NO: 183724 - DNA, 30 bp, Homo sapiens
  chr17:42426330-42426360
  hypo
gtgtcacacacggggcgctgtaggaagctg

SEQ ID NO: 183725 - DNA, 199 bp, Homo sapiens
  chr17:42427015-42427214
  hypo
gtttctctgtgttccacaggccgtggcatgcggggatggccatcactgctgcccacggggcttccactgcagtgcagacgggcgatcctgcttccaaagatcaggtgcagctggggtgtgggtgcagggcaggcagacgggcagcatgtggagtctggaacccaggagcccagctggcgggggcagccctgattcctgc

SEQ ID NO: 183726 - DNA, 420 bp, Homo sapiens
  chr17:42427763-42428183
  hypo
gccaggggcagggggtgaagacggagtcaggaccattttttctcaggcttcctgctgtgaagacagggtgcactgctgtccgcacggtgccttctgcgacctggttcacacccgctgcatcacacccacgggcacccaccccctggcaaagaagctccctgcccagaggactaacagggcaggtgaggaggtgggagagcatcaggccaggggctggggcggggcctcattgactccaagtgtaggaaaaagtttcctccatcctggctgcccctcacgtttgctcctcttccagtggccttgtccagctcggtcatgtgtccggacgcacggtcccggtgccctgatggttctacctgctgtgagctgcccagtgggaagtatggctgctgcccaatgcccaacgtgagtgaggggctg

SEQ ID NO: 183727 - DNA, 153 bp, Homo sapiens; identical to SEQ ID NO: 11251
  chr17:42441041-42441194
  hypo

SEQ ID NO: 183728 - DNA, 30 bp, Homo sapiens
  chr17:42460158-42460188
  hypo
ctcttccttgagtcccgggccatcagaccc

SEQ ID NO: 183729 - DNA, 30 bp, Homo sapiens
  chr17:42460452-42460482
  hypo
gaactgctgatctcccgcctctccccagca

SEQ ID NO: 183730 - DNA, 181 bp, Homo sapiens
  chr17:42590361-42590542
  hypo
ccgtgagccaccgcgcccagccgattattcaattcttaaattgcaaaatttctctctctctctctctctcttcctctctgtatatataagtttatgttttgggttttttgtttttgtttttgtttttgtttttgttttctgaaccatttgaaagtaagttgcagaccgggcacggtggctc

SEQ ID NO: 183731 - DNA, 892 bp, Homo sapiens; identical to SEQ ID NO: 128770
  chr17:42635072-42635964
  hypo

SEQ ID NO: 183732 - DNA, 31 bp, Homo sapiens; identical to SEQ ID NO: 92847
  chr17:42662278-42662309
  hypo

SEQ ID NO: 183733 - DNA, 96 bp, Homo sapiens
  chr17:42706594-42706690
  hypo
ggcctgattcctaggcgacaaccatttaccttctggctgtcccatattctgagagcgacttccactcaataaaaccttgcactcatactccaagcc

SEQ ID NO: 183734 - DNA, 37 bp, Homo sapiens
  chr17:42787251-42787288
  hypo
atctagttggccgggcgcggctgctcacgcctgtaat

SEQ ID NO: 183735 - DNA, 96 bp, Homo sapiens; identical to SEQ ID NO: 30416
  chr17:42787527-42787623
  hypo

SEQ ID NO: 183736 - DNA, 30 bp, Homo sapiens
  chr17:42829278-42829308
  hypo
attgcccattccctcgttcgttcattcagc

SEQ ID NO: 183737 - DNA, 31 bp, Homo sapiens; identical to SEQ ID NO: 92849
  chr17:42848907-42848938
  hypo

SEQ ID NO: 183738 - DNA, 30 bp, Homo sapiens; identical to SEQ ID NO: 92850
  chr17:42854732-42854762
  hypo

SEQ ID NO: 183739 - DNA, 1173 bp, Homo sapiens; identical to SEQ ID NO: 128777
  chr17:42906457-42907630
  hypo

SEQ ID NO: 183740 - DNA, 498 bp, Homo sapiens; identical to SEQ ID NO: 54169
  chr17:42907654-42908152
  hypo

SEQ ID NO: 183741 - DNA, 160 bp, Homo sapiens; identical to SEQ ID NO: 30419
  chr17:42942199-42942359
  hypo

SEQ ID NO: 183742 - DNA, 31 bp, Homo sapiens; identical to SEQ ID NO: 30420
  chr17:42963909-42963940
  hypo

SEQ ID NO: 183743 - DNA, 64 bp, Homo sapiens; identical to SEQ ID NO: 30421
  chr17:42981555-42981619
  hypo

SEQ ID NO: 183744 - DNA, 31 bp, Homo sapiens; identical to SEQ ID NO: 92856
  chr17:42981928-42981959
  hypo

SEQ ID NO: 183745 - DNA, 208 bp, Homo sapiens; identical to SEQ ID NO: 30422
  chr17:42992857-42993065
  hypo

SEQ ID NO: 183746 - DNA, 31 bp, Homo sapiens; identical to SEQ ID NO: 92858
  chr17:42999485-42999516
  hypo

SEQ ID NO: 183747 - DNA, 30 bp, Homo sapiens; identical to SEQ ID NO: 92859
  chr17:43001820-43001850
  hypo

SEQ ID NO: 183748 - DNA, 30 bp, Homo sapiens
  chr17:43004727-43004757
  hypo
ccgagagctgcttctcgggctatggaatgg

SEQ ID NO: 183749 - DNA, 30 bp, Homo sapiens
  chr17:43005561-43005591
  hypo
gggcccaggggcacccggcttttgatgact

SEQ ID NO: 183750 - DNA, 23 bp, Homo sapiens
  chr17:43028038-43028061
  hypo
gccaccgcgcctggtctactttg

SEQ ID NO: 183751 - DNA, 418 bp, Homo sapiens; identical to SEQ ID NO: 128786
  chr17:43044388-43044806
  hypo

SEQ ID NO: 183752 - DNA, 5 bp, Homo sapiens
  chr17:43044863-43044868
  hypo
cgccg

SEQ ID NO: 183753 - DNA, 227 bp, Homo sapiens; identical to SEQ ID NO: 11263
  chr17:43045038-43045265
  hypo

SEQ ID NO: 183754 - DNA, 201 bp, Homo sapiens; identical to SEQ ID NO: 11264
  chr17:43045371-43045572
  hypo

SEQ ID NO: 183755 - DNA, 22 bp, Homo sapiens
  chr17:43048601-43048623
  hypo
actaaaacggcttgcgtgccaa

SEQ ID NO: 183756 - DNA, 30 bp, Homo sapiens; identical to SEQ ID NO: 92865
  chr17:43112073-43112103
  hypo

SEQ ID NO: 183757 - DNA, 30 bp, Homo sapiens
  chr17:43114546-43114576
  hypo
tttctaggccacgcacggtgttcacgcctg

SEQ ID NO: 183758 - DNA, 310 bp, Homo sapiens; identical to SEQ ID NO: 92866
  chr17:43121046-43121356
  hypo

SEQ ID NO: 183759 - DNA, 140 bp, Homo sapiens; identical to SEQ ID NO: 30429
  chr17:43121665-43121805
  hypo

SEQ ID NO: 183760 - DNA, 86 bp, Homo sapiens; identical to SEQ ID NO: 30430
  chr17:43124005-43124091
  hypo

SEQ ID NO: 183761 - DNA, 34 bp, Homo sapiens; identical to SEQ ID NO: 30431
  chr17:43173432-43173466
  hypo

SEQ ID NO: 183762 - DNA, 186 bp, Homo sapiens; identical to SEQ ID NO: 30432
  chr17:43179706-43179892
  hypo

SEQ ID NO: 183763 - DNA, 259 bp, Homo sapiens; identical to SEQ ID NO: 92871
  chr17:43180324-43180583
  hypo

SEQ ID NO: 183764 - DNA, 89 bp, Homo sapiens; identical to SEQ ID NO: 92872
  chr17:43181004-43181093
  hypo

SEQ ID NO: 183765 - DNA, 48 bp, Homo sapiens; identical to SEQ ID NO: 92873
  chr17:43193913-43193961
  hypo

SEQ ID NO: 183766 - DNA, 54 bp, Homo sapiens; identical to SEQ ID NO: 30435
  chr17:43196205-43196259
  hypo

SEQ ID NO: 183767 - DNA, 30 bp, Homo sapiens
  chr17:43207832-43207862
  hypo
tcccctcagcccttccgcggcacccgtgac

SEQ ID NO: 183768 - DNA, 224 bp, Homo sapiens; identical to SEQ ID NO: 92875
  chr17:43208546-43208770
  hypo

SEQ ID NO: 183769 - DNA, 31 bp, Homo sapiens; identical to SEQ ID NO: 11266
  chr17:43209588-43209619
  hypo

SEQ ID NO: 183770 - DNA, 99 bp, Homo sapiens
  chr17:43211170-43211269
  hypo
tacaggcgtgagccaccgcgcccggccctgaattttcttcttgattatcgtattcgcctttgtgcttttgatcctgccgttccttcctccagaaacaac

SEQ ID NO: 183771 - DNA, 32 bp, Homo sapiens; identical to SEQ ID NO: 92877
  chr17:43234069-43234101
  hypo

SEQ ID NO: 183772 - DNA, 92 bp, Homo sapiens; identical to SEQ ID NO: 92878
  chr17:43246545-43246637
  hypo

SEQ ID NO: 183773 - DNA, 437 bp, Homo sapiens; identical to SEQ ID NO: 92879
  chr17:43246868-43247305
  hypo

SEQ ID NO: 183774 - DNA, 33 bp, Homo sapiens
  chr17:43296202-43296235
  hypo
ttacaggcgtgagccaccgcgcccggcctctcg

SEQ ID NO: 183775 - DNA, 325 bp, Homo sapiens; identical to SEQ ID NO: 128803
  chr17:43298576-43298901
  hypo

SEQ ID NO: 183776 - DNA, 30 bp, Homo sapiens; identical to SEQ ID NO: 30438
  chr17:43318030-43318060
  hypo

SEQ ID NO: 183777 - DNA, 253 bp, Homo sapiens; identical to SEQ ID NO: 92882
  chr17:43321182-43321435
  hypo

SEQ ID NO: 183778 - DNA, 876 bp, Homo sapiens; identical to SEQ ID NO: 54190
  chr17:43324795-43325671
  hypo

SEQ ID NO: 183779 - DNA, 163 bp, Homo sapiens; identical to SEQ ID NO: 92884
  chr17:43347688-43347851
  hypo

SEQ ID NO: 183780 - DNA, 30 bp, Homo sapiens; identical to SEQ ID NO: 92885
  chr17:43361316-43361346
  hypo

SEQ ID NO: 183781 - DNA, 30 bp, Homo sapiens
  chr17:43366244-43366274
  hypo
caccaacccggcctgcgctcacggtcacgc

SEQ ID NO: 183782 - DNA, 27 bp, Homo sapiens
  chr17:44193884-44193911
  hypo
gactccgtctcaaaaaacaaaaaccaa

SEQ ID NO: 183783 - DNA, 100 bp, Homo sapiens; identical to SEQ ID NO: 92887
  chr17:44799503-44799603
  hypo

SEQ ID NO: 183784 - DNA, 572 bp, Homo sapiens; identical to SEQ ID NO: 30442
  chr17:44845575-44846147
  hypo

SEQ ID NO: 183785 - DNA, 31 bp, Homo sapiens; identical to SEQ ID NO: 92889
  chr17:44861962-44861993
  hypo

SEQ ID NO: 183786 - DNA, 30 bp, Homo sapiens; identical to SEQ ID NO: 92890
  chr17:44931762-44931792
  hypo

SEQ ID NO: 183787 - DNA, 31 bp, Homo sapiens; identical to SEQ ID NO: 92891
  chr17:44949746-44949777
  hypo

SEQ ID NO: 183788 - DNA, 41 bp, Homo sapiens; identical to SEQ ID NO: 92892
  chr17:45022234-45022275
  hypo

SEQ ID NO: 183789 - DNA, 78 bp, Homo sapiens; identical to SEQ ID NO: 92893
  chr17:45253200-45253278
  hypo

SEQ ID NO: 183790 - DNA, 38 bp, Homo sapiens
  chr17:45590571-45590609
  hypo
agtgcacgacctaggcggggcgtggcggcttacacctg

SEQ ID NO: 183791 - DNA, 82 bp, Homo sapiens; identical to SEQ ID NO: 30444
  chr17:45599272-45599354
  hypo

SEQ ID NO: 183792 - DNA, 149 bp, Homo sapiens; identical to SEQ ID NO: 92895
  chr17:45689890-45690039
  hypo

SEQ ID NO: 183793 - DNA, 30 bp, Homo sapiens
  chr17:45699244-45699274
  hypo
cagtacctccttcagcggaaggcctcacca

SEQ ID NO: 183794 - DNA, 22 bp, Homo sapiens
  chr17:45723850-45723872
  hypo
caaaggagaattgcttgaaccc

SEQ ID NO: 183795 - DNA, 22 bp, Homo sapiens
  chr17:45723931-45723953
  hypo
cgagactctgtatcaaaaaaag

SEQ ID NO: 183796 - DNA, 30 bp, Homo sapiens
  chr17:45750997-45751027
  hypo
tgtacacacagaactcgaaaatggtataga

SEQ ID NO: 183797 - DNA, 939 bp, Homo sapiens; identical to SEQ ID NO: 128835
  chr17:45810487-45811426
  hypo

SEQ ID NO: 183798 - DNA, 229 bp, Homo sapiens
  chr17:45885681-45885910
  hypo
ttcccatagcctggctcggcccgcagcctccagtaggtattgttggtcacccaccactctttcccgctgctatccgtctgccgcctggtgggagaaggcggtggcagtgaggggtgaacatctagaaggcaggctagggtcctaaggtgctgcctcccacacctgccctgctccaagcagggctcatggggagacccagggcggagggcgaggccgaggcacctgaaga

SEQ ID NO: 183799 - DNA, 55 bp, Homo sapiens
  chr17:45886227-45886282
  hypo
acctctggtctggccggagtctcgtgtcggtggaaggcagcgaccgtttcagctc

SEQ ID NO: 183800 - DNA, 104 bp, Homo sapiens; identical to SEQ ID NO: 92901
  chr17:45891075-45891179
  hypo

SEQ ID NO: 183801 - DNA, 30 bp, Homo sapiens; identical to SEQ ID NO: 92902
  chr17:45892135-45892165
  hypo

SEQ ID NO: 183802 - DNA, 390 bp, Homo sapiens; identical to SEQ ID NO: 92903
  chr17:45894354-45894744
  hypo

SEQ ID NO: 183803 - DNA, 30 bp, Homo sapiens
  chr17:45917667-45917697
  hypo
catagccaagaaggacggctcagaatcaca

SEQ ID NO: 183804 - DNA, 620 bp, Homo sapiens; identical to SEQ ID NO: 128839
  chr17:45928209-45928829
  hypo

SEQ ID NO: 183805 - DNA, 82 bp, Homo sapiens
  chr17:45943942-45944024
  hypo
ttggggattggctgccggaccggagtagccagacagccaccgtgaacaaaggctctgggatcgcatccgcggcctgatggga

SEQ ID NO: 183806 - DNA, 152 bp, Homo sapiens
  chr17:45944323-45944475
  hypo
aagactcctgctcatcggacacgccacgctgggaatctgagaatctgtggtgggaatgggccgggctggcaggaacaaaggatgaaagcgaggttgtgcggccggctgggacgtacacacccatcgctgacgtacttcggcggctgatgacc

SEQ ID NO: 183807 - DNA, 30 bp, Homo sapiens
  chr17:45946304-45946334
  hypo
cgctctgggtggcatcggcagcttatcctg

SEQ ID NO: 183808 - DNA, 114 bp, Homo sapiens; identical to SEQ ID NO: 92905
  chr17:45970934-45971048
  hypo

SEQ ID NO: 183809 - DNA, 30 bp, Homo sapiens; identical to SEQ ID NO: 92906
  chr17:45978979-45979009
  hypo

SEQ ID NO: 183810 - DNA, 30 bp, Homo sapiens; identical to SEQ ID NO: 92907
  chr17:45992796-45992826
  hypo

SEQ ID NO: 183811 - DNA, 136 bp, Homo sapiens
  chr17:46006391-46006527
  hypo
tgtggtctctcagagcgatccacactgggaccaaggtaggaccttgccctcctgaccctcggcaaacccaagccacatgcccaaaaggggccgcggccacatatacctcatgacactggcacgagcccccagagca

SEQ ID NO: 183812 - DNA, 38 bp, Homo sapiens; identical to SEQ ID NO: 92908
  chr17:46017955-46017993
  hypo

SEQ ID NO: 183813 - DNA, 38 bp, Homo sapiens; identical to SEQ ID NO: 92909
  chr17:46018232-46018270
  hypo

SEQ ID NO: 183814 - DNA, 129 bp, Homo sapiens
  chr17:46080798-46080927
  hypo
ggggaggagcaggcgcgggggtgggtgtgcttggattcgctcatgggagctgagccagccccagcagggaagaagggtcgctttggcattcattctcctgcagttaccaggcctcgccgcctgccgggc

SEQ ID NO: 183815 - DNA, 811 bp, Homo sapiens; identical to SEQ ID NO: 128845
  chr17:46089196-46090007
  hypo

SEQ ID NO: 183816 - DNA, 30 bp, Homo sapiens
  chr17:46123437-46123467
  hypo
cacctttactctcttcggcccttgcaactc

SEQ ID NO: 183817 - DNA, 34 bp, Homo sapiens; identical to SEQ ID NO: 92911
  chr17:46123910-46123944
  hypo

SEQ ID NO: 183818 - DNA, 302 bp, Homo sapiens; identical to SEQ ID NO: 128849
  chr17:46124667-46124969
  hypo

SEQ ID NO: 183819 - DNA, 307 bp, Homo sapiens; identical to SEQ ID NO: 11285
  chr17:46125006-46125313
  hypo

SEQ ID NO: 183820 - DNA, 30 bp, Homo sapiens; identical to SEQ ID NO: 30453
  chr17:46136635-46136665
  hypo

SEQ ID NO: 183821 - DNA, 30 bp, Homo sapiens; identical to SEQ ID NO: 92915
  chr17:46138338-46138368
  hypo

SEQ ID NO: 183822 - DNA, 153 bp, Homo sapiens; identical to SEQ ID NO: 30454
  chr17:46152421-46152574
  hypo

SEQ ID NO: 183823 - DNA, 153 bp, Homo sapiens; identical to SEQ ID NO: 30455
  chr17:46152813-46152966
  hypo

SEQ ID NO: 183824 - DNA, 45 bp, Homo sapiens
  chr17:46170652-46170697
  hypo
aaaaaaaaaaaagacacagaagacaggtctcgaaaaaaatttaca

SEQ ID NO: 183825 - DNA, 58 bp, Homo sapiens
  chr17:46176825-46176883
  hypo
tcaccacagggaaaaccgtaaacgacttcaggtcctccactcccgtgaagcttcatta

SEQ ID NO: 183826 - DNA, 79 bp, Homo sapiens
  chr17:46177139-46177218
  hypo
ttgcgttaaaccaacacgtctaaatgtaacaccaatttatgaaaaaccctcatttgaaactttgaaaaagaggtaaaat

SEQ ID NO: 183827 - DNA, 30 bp, Homo sapiens; identical to SEQ ID NO: 30457
  chr17:46199892-46199922
  hypo

SEQ ID NO: 183828 - DNA, 38 bp, Homo sapiens
  chr17:46223565-46223603
  hypo
aaggagaggccggagacggtggctcacgcctgtaatcc

SEQ ID NO: 183829 - DNA, 121 bp, Homo sapiens
  chr17:46235536-46235657
  hypo
ctcaaaaaaaaaaaaaaaaaaaaatgcgataaatagctctctttctgtgatcattcttgcccaaaggcaagactaaaagattctcctctgggccggttgcgctggctcacgcctgtaatcc

SEQ ID NO: 183830 - DNA, 29 bp, Homo sapiens
  chr17:46344159-46344188
  hypo
ccgtgcccggccctgttttccttttctta

SEQ ID NO: 183831 - DNA, 32 bp, Homo sapiens
  chr17:46409044-46409076
  hypo
agcgaaactccgtctcaaggaaaaaaaaaaaa

SEQ ID NO: 183832 - DNA, 30 bp, Homo sapiens; identical to SEQ ID NO: 54219
  chr17:46411484-46411514
  hypo

SEQ ID NO: 183833 - DNA, 30 bp, Homo sapiens; identical to SEQ ID NO: 54220
  chr17:46500657-46500687
  hypo

SEQ ID NO: 183834 - DNA, 418 bp, Homo sapiens; identical to SEQ ID NO: 128859
  chr17:46570075-46570493
  hypo

SEQ ID NO: 183835 - DNA, 239 bp, Homo sapiens; identical to SEQ ID NO: 92925
  chr17:46607011-46607250
  hypo

SEQ ID NO: 183836 - DNA, 189 bp, Homo sapiens; identical to SEQ ID NO: 11293
  chr17:46659084-46659273
  hypo

SEQ ID NO: 183837 - DNA, 482 bp, Homo sapiens; identical to SEQ ID NO: 11294
  chr17:46659384-46659866
  hypo

SEQ ID NO: 183838 - DNA, 298 bp, Homo sapiens; identical to SEQ ID NO: 128874
  chr17:46683516-46683814
  hypo

SEQ ID NO: 183839 - DNA, 30 bp, Homo sapiens; identical to SEQ ID NO: 128875
  chr17:46684018-46684048
  hypo

SEQ ID NO: 183840 - DNA, 1635 bp, Homo sapiens; identical to SEQ ID NO: 128876
  chr17:46687506-46689141
  hypo

SEQ ID NO: 183841 - DNA, 333 bp, Homo sapiens; identical to SEQ ID NO: 54240
  chr17:46690030-46690363
  hypo

SEQ ID NO: 183842 - DNA, 275 bp, Homo sapiens; identical to SEQ ID NO: 11303
  chr17:46690429-46690704
  hypo

SEQ ID NO: 183843 - DNA, 216 bp, Homo sapiens; identical to SEQ ID NO: 128880
  chr17:46690852-46691068
  hypo

SEQ ID NO: 183844 - DNA, 382 bp, Homo sapiens; identical to SEQ ID NO: 54243
  chr17:46691436-46691818
  hypo

SEQ ID NO: 183845 - DNA, 607 bp, Homo sapiens; identical to SEQ ID NO: 128882
  chr17:46691987-46692594
  hypo

SEQ ID NO: 183846 - DNA, 217 bp, Homo sapiens; identical to SEQ ID NO: 128884
  chr17:46696375-46696592
  hypo

SEQ ID NO: 183847 - DNA, 267 bp, Homo sapiens; identical to SEQ ID NO: 128885
  chr17:46696642-46696909
  hypo

SEQ ID NO: 183848 - DNA, 533 bp, Homo sapiens; identical to SEQ ID NO: 128889
  chr17:46723838-46724371
  hypo

SEQ ID NO: 183849 - DNA, 277 bp, Homo sapiens; identical to SEQ ID NO: 54251
  chr17:46724659-46724936
  hypo

SEQ ID NO: 183850 - DNA, 710 bp, Homo sapiens; identical to SEQ ID NO: 54265
  chr17:46805458-46806168
  hypo

SEQ ID NO: 183851 - DNA, 31 bp, Homo sapiens; identical to SEQ ID NO: 92939
  chr17:46872246-46872277
  hypo

SEQ ID NO: 183852 - DNA, 30 bp, Homo sapiens; identical to SEQ ID NO: 30469
  chr17:46907727-46907757
  hypo

SEQ ID NO: 183853 - DNA, 121 bp, Homo sapiens
  chr17:46983802-46983923
  hypo
attgcactccagcctgcgtgacaagagcaagattccctctttaaaaacaaaaaacaaaaaacaaaaaaactctaaagccagactcttttttttgagacggagtctcactcttttacccagg

SEQ ID NO: 183854 - DNA, 19 bp, Homo sapiens
  chr17:46984162-46984181
  hypo
ccaccgtgcccggcccaga

SEQ ID NO: 183855 - DNA, 35 bp, Homo sapiens
  chr17:46993883-46993918
  hypo
attacaggcgtgagccaccgcgcccagccagaata

SEQ ID NO: 183856 - DNA, 224 bp, Homo sapiens; identical to SEQ ID NO: 11343
  chr17:47073103-47073327
  hypo

SEQ ID NO: 183857 - DNA, 2061 bp, Homo sapiens; identical to SEQ ID NO: 54290
  chr17:47073388-47075449
  hypo

SEQ ID NO: 183858 - DNA, 211 bp, Homo sapiens
  chr17:47092595-47092806
  hypo
aagtgctgggattataggcgtgaaccactttgcccggccgtgaccgtatggcttttaagctttctggagagaggctggcatctccaccgggggcgagtgctaaaccagcatctccagagaggcggggccgggccagagatggtcttcctgccccccacctttccctcggtcggagcttagtagccttcccgacccccgggggaagattccg

SEQ ID NO: 183859 - DNA, 31 bp, Homo sapiens; identical to SEQ ID NO: 92943
  chr17:47126022-47126053
  hypo

SEQ ID NO: 183860 - DNA, 20 bp, Homo sapiens
  chr17:47162036-47162056
  hypo
ttttttttttttgagacgga

SEQ ID NO: 183861 - DNA, 200 bp, Homo sapiens
  chr17:47170364-47170564
  hypo
ttggaaagagagatgcggaatgtggtagagaggtaatattcaagttagtcggcctccttgtttttctttgtctcccccttgcacctgctctgccctgattttactgctgaggacacctggaccaaacagaggaaaggtgaattggtctctctctgtcctggagccgggatacaagcttcttctcccgcccttggaaatca

SEQ ID NO: 183862 - DNA, 160 bp, Homo sapiens
  chr17:47170915-47171075
  hypo
gtgcgcgtgcgcgtgcggattctaaccgcactgcattgtggttatgaatatgatctgtaacttatccatttttggggaaacccttttgctcatagtaaatggtccatttactatggtccattttgtaaatattcatatgtgtgcttaaaaagaatgtata

SEQ ID NO: 183863 - DNA, 181 bp, Homo sapiens
  chr17:47177620-47177801
  hypo
gactccgtctcaaaaaaaaaaaaaaaaaaaaaaaagaggtagactcaacgggcaatcccagccttttgtacttagctgtttcttccctccccctccccaccagtaggtgtgtggaattgcttccatcttagcagccatcatgaatgaggttgaaagctcaccctaggaataagagtgggga

SEQ ID NO: 183864 - DNA, 125 bp, Homo sapiens; identical to SEQ ID NO: 128935
  chr17:47301640-47301765
  hypo

SEQ ID NO: 183865 - DNA, 434 bp, Homo sapiens; identical to SEQ ID NO: 128936
  chr17:47301801-47302235
  hypo

SEQ ID NO: 183866 - DNA, 1137 bp, Homo sapiens; identical to SEQ ID NO: 128937
  chr17:47307529-47308666
  hypo

SEQ ID NO: 183867 - DNA, 40 bp, Homo sapiens
  chr17:47442683-47442723
  hypo
ggttacaggcgtgagccatcgcatccggacttatgtccat

SEQ ID NO: 183868 - DNA, 30 bp, Homo sapiens; identical to SEQ ID NO: 128942
  chr17:47547416-47547446
  hypo

SEQ ID NO: 183869 - DNA, 14 bp, Homo sapiens
  chr17:47547682-47547696
  hypo
cccgtgtccctccc

SEQ ID NO: 183870 - DNA, 91 bp, Homo sapiens; identical to SEQ ID NO: 128944
  chr17:47547746-47547837
  hypo

SEQ ID NO: 183871 - DNA, 2070 bp, Homo sapiens; identical to SEQ ID NO: 128946
  chr17:47572595-47574665
  hypo

SEQ ID NO: 183872 - DNA, 427 bp, Homo sapiens; identical to SEQ ID NO: 11350
  chr17:47574903-47575330
  hypo

SEQ ID NO: 183873 - DNA, 96 bp, Homo sapiens; identical to SEQ ID NO: 92949
  chr17:47583839-47583935
  hypo

SEQ ID NO: 183874 - DNA, 446 bp, Homo sapiens
  chr17:47629442-47629888
  hypo
ggagaaagtcctgctcggggctgtgagcacatccatgggcaggtgttctgtgctcggcctggaggttgggcgtgcctgtgtgcttggtcctcaatgccagtaaacgtgctccgtgtagacactctgcggagggcctaagagggtgtgaggtgtaggcgtgtgcactgcccgtgcagcacgcgtgcatgagtcaggatgtgtactcccgggcagagggacaagcactcgcctgaggtggggagcctgggcacggtcttggcccgatgacatcgtgctgagtgatctcgggtgccctgtgcgcagggagggagtcagaaggctgtgtgagcctctccagcaacatgggtctgtgttctgagccccaaggaaagccccaggcgccctgcatgcccactgcaggcctctgtctacccttgatccctcaccctggcgccccgacaactggg

SEQ ID NO: 183875 - DNA, 852 bp, Homo sapiens; identical to SEQ ID NO: 128950
  chr17:47653241-47654093
  hypo

SEQ ID NO: 183876 - DNA, 97 bp, Homo sapiens
  chr17:47657457-47657554
  hypo
ggagcatccatgtcccggagaggggtccctcaacagtcagcctcacctgtcagaccggggttctcccggatctggatggcgccgccctctcagcagc

SEQ ID NO: 183877 - DNA, 182 bp, Homo sapiens
  chr17:47657768-47657950
  hypo
aggaagaatttctctgatggccgcaggacatttgcttgagacccaagtggcagggatccaaccgcccttggcgctgatgtttgctgagggctcagggcttccctctccagccccggttccaagctgtctgatcccccacgaggaaacttgagcaaacaccctgggctcggtgctggaggagg

SEQ ID NO: 183878 - DNA, 30 bp, Homo sapiens
  chr17:47674089-47674119
  hypo
ttaaaagaaggaaaacgcattcaccttgtg

SEQ ID NO: 183879 - DNA, 21 bp, Homo sapiens
  chr17:47716149-47716170
  hypo
attcacctgaggtcaggagtt

SEQ ID NO: 183880 - DNA, 21 bp, Homo sapiens
  chr17:47716289-47716310
  hypo
gcttgaacctgggaggtggca

SEQ ID NO: 183881 - DNA, 30 bp, Homo sapiens
  chr17:47720257-47720287
  hypo
acttttgatggaatacgtcatctatgttaa

SEQ ID NO: 183882 - DNA, 30 bp, Homo sapiens; identical to SEQ ID NO: 30478
  chr17:47722939-47722969
  hypo

SEQ ID NO: 183883 - DNA, 22 bp, Homo sapiens
  chr17:47724669-47724691
  hypo
cgtcttaaaaaaaaaaaaaaaa

SEQ ID NO: 183884 - DNA, 30 bp, Homo sapiens; identical to SEQ ID NO: 92957
  chr17:47795734-47795764
  hypo

SEQ ID NO: 183885 - DNA, 18 bp, Homo sapiens
  chr17:47813624-47813642
  hypo
ttttttttttttgagacg

SEQ ID NO: 183886 - DNA, 35 bp, Homo sapiens; identical to SEQ ID NO: 92959
  chr17:47851978-47852013
  hypo

SEQ ID NO: 183887 - DNA, 30 bp, Homo sapiens; identical to SEQ ID NO: 92960
  chr17:47863665-47863695
  hypo

SEQ ID NO: 183888 - DNA, 30 bp, Homo sapiens
  chr17:47874198-47874228
  hypo
ctaccccagtgacaccgaaaaaataccctc

SEQ ID NO: 183889 - DNA, 17 bp, Homo sapiens
  chr17:47894849-47894866
  hypo
tttaaaaaggagtttcg

SEQ ID NO: 183890 - DNA, 93 bp, Homo sapiens; identical to SEQ ID NO: 30479
  chr17:47895283-47895376
  hypo

SEQ ID NO: 183891 - DNA, 21 bp, Homo sapiens
  chr17:47899877-47899898
  hypo
ccattgcgcccggcctaagtc

SEQ ID NO: 183892 - DNA, 163 bp, Homo sapiens; identical to SEQ ID NO: 92963
  chr17:47911773-47911936
  hypo

SEQ ID NO: 183893 - DNA, 30 bp, Homo sapiens; identical to SEQ ID NO: 92964
  chr17:47915877-47915907
  hypo

SEQ ID NO: 183894 - DNA, 30 bp, Homo sapiens; identical to SEQ ID NO: 30482
  chr17:47923460-47923490
  hypo

SEQ ID NO: 183895 - DNA, 521 bp, Homo sapiens; identical to SEQ ID NO: 128959
  chr17:47928287-47928808
  hypo

SEQ ID NO: 183896 - DNA, 174 bp, Homo sapiens; identical to SEQ ID NO: 128960
  chr17:47929092-47929266
  hypo

SEQ ID NO: 183897 - DNA, 30 bp, Homo sapiens
  chr17:47947871-47947901
  hypo
gggactatgtacatacgtgtgtgtgaaggt

SEQ ID NO: 183898 - DNA, 30 bp, Homo sapiens
  chr17:47953300-47953330
  hypo
ctgcagcggctcctgcgccatgtccctaat

SEQ ID NO: 183899 - DNA, 64 bp, Homo sapiens; identical to SEQ ID NO: 92967
  chr17:47998382-47998446
  hypo

SEQ ID NO: 183900 - DNA, 458 bp, Homo sapiens; identical to SEQ ID NO: 128965
  chr17:48041211-48041669
  hypo

SEQ ID NO: 183901 - DNA, 1759 bp, Homo sapiens; identical to SEQ ID NO: 128974
  chr17:48048843-48050602
  hypo

SEQ ID NO: 183902 - DNA, 695 bp, Homo sapiens; identical to SEQ ID NO: 54321
  chr17:48070683-48071378
  hypo

SEQ ID NO: 183903 - DNA, 546 bp, Homo sapiens; identical to SEQ ID NO: 128978
  chr17:48072069-48072615
  hypo

SEQ ID NO: 183904 - DNA, 30 bp, Homo sapiens
  chr17:48075391-48075421
  hypo
ggatggcgaggtagccggaggatgcagtgg

SEQ ID NO: 183905 - DNA, 43 bp, Homo sapiens; identical to SEQ ID NO: 30488
  chr17:48139109-48139152
  hypo

SEQ ID NO: 183906 - DNA, 114 bp, Homo sapiens; identical to SEQ ID NO: 92973
  chr17:48183243-48183357
  hypo

SEQ ID NO: 183907 - DNA, 30 bp, Homo sapiens; identical to SEQ ID NO: 92974
  chr17:48199560-48199590
  hypo

SEQ ID NO: 183908 - DNA, 30 bp, Homo sapiens
  chr17:48242670-48242700
  hypo
tgttaaggaagctgccgccagccagctaca

SEQ ID NO: 183909 - DNA, 141 bp, Homo sapiens
  chr17:48243307-48243448
  hypo
gggacccagctgccccgagccacctccctccttccctcctctcctccctgccccctgtctctgtcactcaccgggcgggccaggccgggcagccatggctgagacactcttctggactcctctcctcgtgggcaagttggg

SEQ ID NO: 183910 - DNA, 80 bp, Homo sapiens
  chr17:48258095-48258175
  hypo
gcctcctcgtgtggacgctgggcttgacggcagcctcgcattctttcccacgcggcccacgctcacgcctgctccacaca

SEQ ID NO: 183911 - DNA, 220 bp, Homo sapiens
  chr17:48258577-48258797
  hypo
tggctgtatttagggcggctgtgatgtcagcggaaaggagggtttgagttgggaatgtggcacaatggcccctttgtccccctcccctcctgtcctgtacacactgaaaccacacaccggccccacaccacgtgatgcaggctcagagctgcccatggggcactgccacacaaggctgcccccgctgcagccctgacccacagtgcgtgtgtccacatac

SEQ ID NO: 183912 - DNA, 197 bp, Homo sapiens; identical to SEQ ID NO: 92977
  chr17:48263245-48263442
  hypo

SEQ ID NO: 183913 - DNA, 34 bp, Homo sapiens; identical to SEQ ID NO: 92978
  chr17:48268218-48268252
  hypo

SEQ ID NO: 183914 - DNA, 30 bp, Homo sapiens
  chr17:48380618-48380648
  hypo
gcccttgtcaacaggcgtcctgcggctttg

SEQ ID NO: 183915 - DNA, 30 bp, Homo sapiens
  chr17:48422438-48422468
  hypo
ggtgctcattgaacacgccgggttctcaaa

SEQ ID NO: 183916 - DNA, 31 bp, Homo sapiens; identical to SEQ ID NO: 30491
  chr17:48435304-48435335
  hypo

SEQ ID NO: 183917 - DNA, 18 bp, Homo sapiens
  chr17:48455716-48455734
  hypo
gcccggctgctatgttcc

SEQ ID NO: 183918 - DNA, 160 bp, Homo sapiens; identical to SEQ ID NO: 92980
  chr17:48530414-48530574
  hypo

SEQ ID NO: 183919 - DNA, 30 bp, Homo sapiens
  chr17:48538914-48538944
  hypo
atgcctcctgggggcggaggggcagcagga

SEQ ID NO: 183920 - DNA, 47 bp, Homo sapiens; identical to SEQ ID NO: 92981
  chr17:48539229-48539276
  hypo

SEQ ID NO: 183921 - DNA, 41 bp, Homo sapiens; identical to SEQ ID NO: 30492
  chr17:48555661-48555702
  hypo

SEQ ID NO: 183922 - DNA, 326 bp, Homo sapiens; identical to SEQ ID NO: 92983
  chr17:48565117-48565443
  hypo

SEQ ID NO: 183923 - DNA, 41 bp, Homo sapiens
  chr17:48589711-48589752
  hypo
gccccccagcaagttttctgtgttatcgtgccactcacgtg

SEQ ID NO: 183924 - DNA, 30 bp, Homo sapiens
  chr17:48603402-48603432
  hypo
taggagccccatctccgaaactcaagtgcc

SEQ ID NO: 183925 - DNA, 264 bp, Homo sapiens
  chr17:48612044-48612308
  hypo
cctcgcccactcccacggtatcttattctctgggcccccaacaaaacctgccaaggcatgttttcaaagcgtggggctgctttgaactgagcccagcactggcggggctggggtggaaggagcgtggaatcgggtgcgagaggacagtctccttcagattcctgcttctggcagcctggggaccagttggggcacgggctgggatggagggtggagccgaaaggtgtttggtgggtgggggacagttcacgggtgaagtggagg

SEQ ID NO: 183926 - DNA, 604 bp, Homo sapiens
  chr17:48613865-48614469
  hypo
agccctccacctccggcgggggcgagggccacccacctccaagtctccagccatgacgacctccgcactccggcgccaggtgaagaacatcgtgcacaactactccgaggcagaaatcaaggtgcgcgaggccaccagcaatgacccctggggcccccctagttcgctcatgtccgagatcgctgacctgaccttcaacacagtggccttcaccgaagtcatgggcatgctgtggcggcggctcaatgacagcggcaagaactggcggcacgtgtacaaggctctaacattgctggactacctgctcaagacgggctccgagcgggtggcccaccagtgccgcgagaacctctacaccatccagacactcaaggacttccagtacatcgaccgcgacggcaaggaccagggcgtcaacgtgcgcgagaaggtcaagcaggtgatggccctgctcaaggatgaggagcggctgcggcaggagcgaacccacgccctcaagaccaaggagcgcatggcactggagggcatcggcattggcagtgggcagctgggcttcagccgccgctacggcgaggactacagccgctcccggggctccccgtcc

SEQ ID NO: 183927 - DNA, 195 bp, Homo sapiens; identical to SEQ ID NO: 54341
  chr17:48619095-48619290
  hypo

SEQ ID NO: 183928 - DNA, 608 bp, Homo sapiens; identical to SEQ ID NO: 11376
  chr17:48619346-48619954
  hypo

SEQ ID NO: 183929 - DNA, 76 bp, Homo sapiens
  chr17:48620599-48620675
  hypo
gccctctcccttgcttcgccaaggctagcgagaaactcagtcttagccacacaggaggaatcggaccccttctggg

SEQ ID NO: 183930 - DNA, 30 bp, Homo sapiens; identical to SEQ ID NO: 92988
  chr17:48626491-48626521
  hypo

SEQ ID NO: 183931 - DNA, 513 bp, Homo sapiens
  chr17:48653004-48653517
  hypo
gcggttcctgtccaacgccagcaccctggctagcttctctgagcccggcagctgctatgaggagctgctcaagtacctggtgtacatccttcgtaaggcagcccgcaggctggctcaggtctctcgggcagcaggtgtgcgggttgggctgctcagcagcccagcacccctcgggggccaggagacccagcccagcagcagctgctctcgctcccaccgccgcctatccgtccaccacctggtgcaccaccaccaccaccatcaccaccactaccacctgggcaatgggacgctcagggccccccgggccagcccggagatccaggacagggatgccaatgggtcccgccggctcatgctgccaccaccctcgacgcctgccctctccggggccccccctggtggcgcagagtctgtgcacagcttctaccatgccgactgccacttagagccagtccgctgccaggcgccccctcccaggtccccatctgaggcatccggcaggactgtggg

SEQ ID NO: 183932 - DNA, 31 bp, Homo sapiens; identical to SEQ ID NO: 92990
  chr17:48668917-48668948
  hypo

SEQ ID NO: 183933 - DNA, 30 bp, Homo sapiens; identical to SEQ ID NO: 92991
  chr17:48672468-48672498
  hypo

SEQ ID NO: 183934 - DNA, 30 bp, Homo sapiens; identical to SEQ ID NO: 30498
  chr17:48677412-48677442
  hypo

SEQ ID NO: 183935 - DNA, 30 bp, Homo sapiens; identical to SEQ ID NO: 30499
  chr17:48680453-48680483
  hypo

SEQ ID NO: 183936 - DNA, 325 bp, Homo sapiens; identical to SEQ ID NO: 92994
  chr17:48687013-48687338
  hypo

SEQ ID NO: 183937 - DNA, 31 bp, Homo sapiens; identical to SEQ ID NO: 92995
  chr17:48690339-48690370
  hypo

SEQ ID NO: 183938 - DNA, 30 bp, Homo sapiens
  chr17:48727747-48727777
  hypo
gtgagccactgcacccggtcgctaactttt

SEQ ID NO: 183939 - DNA, 157 bp, Homo sapiens; identical to SEQ ID NO: 92996
  chr17:48763549-48763706
  hypo

SEQ ID NO: 183940 - DNA, 209 bp, Homo sapiens; identical to SEQ ID NO: 92997
  chr17:48764875-48765084
  hypo

SEQ ID NO: 183941 - DNA, 232 bp, Homo sapiens; identical to SEQ ID NO: 92998
  chr17:48776790-48777022
  hypo

SEQ ID NO: 183942 - DNA, 141 bp, Homo sapiens
  chr17:48844994-48845135
  hypo
ggaacccagatgttcgggtaacgctcacatttcatttaaccctccaatgacaaaagacgggcaaacagacggggcatcagggtgggcctcagcatcaaaaaactggagggagctggctgggtgcggtggctcacgcctgta

SEQ ID NO: 183943 - DNA, 106 bp, Homo sapiens; identical to SEQ ID NO: 30504
  chr17:48881297-48881403
  hypo

SEQ ID NO: 183944 - DNA, 38 bp, Homo sapiens; identical to SEQ ID NO: 93001
  chr17:48890602-48890640
  hypo

SEQ ID NO: 183945 - DNA, 202 bp, Homo sapiens; identical to SEQ ID NO: 30505
  chr17:48911126-48911328
  hypo

SEQ ID NO: 183946 - DNA, 30 bp, Homo sapiens
  chr17:48917774-48917804
  hypo
ctggcctgcatgagcgggccgctggccgcg

SEQ ID NO: 183947 - DNA, 192 bp, Homo sapiens; identical to SEQ ID NO: 93003
  chr17:48921800-48921992
  hypo

SEQ ID NO: 183948 - DNA, 618 bp, Homo sapiens
  chr17:48970595-48971213
  hypo
ccaaccttattaatgcgctcctgcaaaagccaggctcctcctcacaggctctgctgctgttcggagcaggcccgggctgctgtgtacctcacagctccccgacagagtgctgcacaatgacgaccttcggtggggcagacattcgcctccatcaggcgcctaattatgcaaaccctgaacatgagactgaagaggagactggcctgcccagggacgattgatgaggctggctggtttcatcttccccattgtgtaggccagaggcttcatgatgggagcggctcagctgcgggatctcggttgctttgttgcaggcgctggggcaacgaagggtgaactgggttaataaaatgtgctggtgactcactcctaggaaagaacctgtgatggatcattaagctgtctcggaacttatttcaggcccacacccgcaagatgaacgctctcaatttgtttattaggtctccaacaataggccactgttctccttccccacaactcagttacacaatctttcccctcgtgtctttcagccacctactgaaaatctgtctgtgtgccgagcacgcgctccccatccctctaccaaatgcctggctggcgcgtcatccctggctt

SEQ ID NO: 183949 - DNA, 26 bp, Homo sapiens
  chr17:48991947-48991973
  hypo
gcgtgagccaccgcatccagccaggc

SEQ ID NO: 183950 - DNA, 147 bp, Homo sapiens
  chr17:48995484-48995631
  hypo
ccacccttacagaaccggttcgaagccaaacaatggcacgtcacagtccagctgagccggaggcctcagcagggtaagtacaagtgaggctgtggccaagaggggcataggtgccagggactcagaggcgggcgcgcgcaagtgcca

SEQ ID NO: 183951 - DNA, 30 bp, Homo sapiens; identical to SEQ ID NO: 129021
  chr17:49008516-49008546
  hypo

SEQ ID NO: 183952 - DNA, 383 bp, Homo sapiens; identical to SEQ ID NO: 129022
  chr17:49008768-49009151
  hypo

SEQ ID NO: 183953 - DNA, 31 bp, Homo sapiens; identical to SEQ ID NO: 93007
  chr17:49015437-49015468
  hypo

SEQ ID NO: 183954 - DNA, 30 bp, Homo sapiens; identical to SEQ ID NO: 93008
  chr17:49024819-49024849
  hypo

SEQ ID NO: 183955 - DNA, 116 bp, Homo sapiens; identical to SEQ ID NO: 11384
  chr17:49027999-49028115
  hypo

SEQ ID NO: 183956 - DNA, 30 bp, Homo sapiens; identical to SEQ ID NO: 93010
  chr17:49039156-49039186
  hypo

SEQ ID NO: 183957 - DNA, 33 bp, Homo sapiens
  chr17:49047590-49047623
  hypo
accaagggccgggtgcggtggctcgggcttgta

SEQ ID NO: 183958 - DNA, 37 bp, Homo sapiens; identical to SEQ ID NO: 30507
  chr17:49129051-49129088
  hypo

SEQ ID NO: 183959 - DNA, 24 bp, Homo sapiens
  chr17:49170779-49170803
  hypo
ctggccaggcatggtggctcacgc

SEQ ID NO: 183960 - DNA, 33 bp, Homo sapiens; identical to SEQ ID NO: 93013
  chr17:49194751-49194784
  hypo

SEQ ID NO: 183961 - DNA, 31 bp, Homo sapiens
  chr17:49200570-49200601
  hypo
gcaataaaaagaaagtcgttggaggggaggg

SEQ ID NO: 183962 - DNA, 29 bp, Homo sapiens
  chr17:49227904-49227933
  hypo
tttttaagaaactatcggccgggcgcggt

SEQ ID NO: 183963 - DNA, 181 bp, Homo sapiens; identical to SEQ ID NO: 30508
  chr17:49229458-49229639
  hypo

SEQ ID NO: 183964 - DNA, 30 bp, Homo sapiens
  chr17:49259207-49259237
  hypo
ctttagtatggaaaacggtttttcagtttc

SEQ ID NO: 183965 - DNA, 164 bp, Homo sapiens; identical to SEQ ID NO: 30509
  chr17:49281026-49281190
  hypo

SEQ ID NO: 183966 - DNA, 47 bp, Homo sapiens
  chr17:49354210-49354257
  hypo
ggagcgtggagcttccgtgccttctcagggcacgccacctcctcagc

SEQ ID NO: 183967 - DNA, 30 bp, Homo sapiens; identical to SEQ ID NO: 30510
  chr17:49462712-49462742
  hypo

SEQ ID NO: 183968 - DNA, 30 bp, Homo sapiens
  chr17:50158862-50158892
  hypo
aagatttagatgaagcggccgggcgcggtg

SEQ ID NO: 183969 - DNA, 104 bp, Homo sapiens; identical to SEQ ID NO: 54359
  chr17:50235154-50235258
  hypo

SEQ ID NO: 183970 - DNA, 947 bp, Homo sapiens; identical to SEQ ID NO: 129033
  chr17:50235416-50236363
  hypo

SEQ ID NO: 183971 - DNA, 79 bp, Homo sapiens; identical to SEQ ID NO: 30511
  chr17:52832077-52832156
  hypo

SEQ ID NO: 183972 - DNA, 44 bp, Homo sapiens; identical to SEQ ID NO: 93021
  chr17:52865182-52865226
  hypo

SEQ ID NO: 183973 - DNA, 21 bp, Homo sapiens
  chr17:53002975-53002996
  hypo
atcctgaggccagatgcgatg

SEQ ID NO: 183974 - DNA, 18 bp, Homo sapiens
  chr17:53021513-53021531
  hypo
gaattcaagaagtggccg

SEQ ID NO: 183975 - DNA, 30 bp, Homo sapiens; identical to SEQ ID NO: 54363
  chr17:53051517-53051547
  hypo

SEQ ID NO: 183976 - DNA, 30 bp, Homo sapiens; identical to SEQ ID NO: 54364
  chr17:53056455-53056485
  hypo

SEQ ID NO: 183977 - DNA, 37 bp, Homo sapiens; identical to SEQ ID NO: 30513
  chr17:53314419-53314456
  hypo

SEQ ID NO: 183978 - DNA, 1576 bp, Homo sapiens; identical to SEQ ID NO: 129041
  chr17:53342190-53343766
  hypo

SEQ ID NO: 183979 - DNA, 37 bp, Homo sapiens
  chr17:53398065-53398102
  hypo
agccaagcgctcccgcgacgcccggaggctgaaagag

SEQ ID NO: 183980 - DNA, 77 bp, Homo sapiens; identical to SEQ ID NO: 93028
  chr17:53409742-53409819
  hypo

SEQ ID NO: 183981 - DNA, 101 bp, Homo sapiens; identical to SEQ ID NO: 93029
  chr17:53410258-53410359
  hypo

SEQ ID NO: 183982 - DNA, 30 bp, Homo sapiens; identical to SEQ ID NO: 54368
  chr17:53445243-53445273
  hypo

SEQ ID NO: 183983 - DNA, 44 bp, Homo sapiens; identical to SEQ ID NO: 30515
  chr17:53479130-53479174
  hypo

SEQ ID NO: 183984 - DNA, 30 bp, Homo sapiens; identical to SEQ ID NO: 93032
  chr17:53521489-53521519
  hypo

SEQ ID NO: 183985 - DNA, 81 bp, Homo sapiens
  chr17:53550718-53550799
  hypo
tctgcttgtttggatcgacacctccaccagatgggtcgacgcctttcccactagctccgaaaaggctactgcggtcatttc

SEQ ID NO: 183986 - DNA, 30 bp, Homo sapiens; identical to SEQ ID NO: 54369
  chr17:53558866-53558896
  hypo

SEQ ID NO: 183987 - DNA, 38 bp, Homo sapiens
  chr17:53579055-53579093
  hypo
gtcccatgaaatacatacattcggggaggagccaagat

SEQ ID NO: 183988 - DNA, 186 bp, Homo sapiens
  chr17:53852161-53852347
  hypo
attacttcgataacccgggtggccaaattccgtcctggctcattaactgggccgccaaggtgagatcccaggaggtggggcggggggagggatgggggagtgtgtttgacaaatgttgacttagcccgcggggctgtcaggctgaagagacacattgtctcaggcgtaatgaggctcttttatgaa

SEQ ID NO: 183989 - DNA, 30 bp, Homo sapiens; identical to SEQ ID NO: 11389
  chr17:54376036-54376066
  hypo

SEQ ID NO: 183990 - DNA, 30 bp, Homo sapiens; identical to SEQ ID NO: 30517
  chr17:54588468-54588498
  hypo

SEQ ID NO: 183991 - DNA, 687 bp, Homo sapiens; identical to SEQ ID NO: 129049
  chr17:54671709-54672396
  hypo

SEQ ID NO: 183992 - DNA, 30 bp, Homo sapiens
  chr17:54811419-54811449
  hypo
ttcattctcatgcatcgtaagagaggcttt

SEQ ID NO: 183993 - DNA, 30 bp, Homo sapiens; identical to SEQ ID NO: 30519
  chr17:54872385-54872415
  hypo

SEQ ID NO: 183994 - DNA, 354 bp, Homo sapiens; identical to SEQ ID NO: 129057
  chr17:54910846-54911200
  hypo

SEQ ID NO: 183995 - DNA, 918 bp, Homo sapiens; identical to SEQ ID NO: 54380
  chr17:54911483-54912401
  hypo

SEQ ID NO: 183996 - DNA, 30 bp, Homo sapiens
  chr17:54969164-54969194
  hypo
ccttgtcggcaacagcgaagaagatgacaa

SEQ ID NO: 183997 - DNA, 272 bp, Homo sapiens; identical to SEQ ID NO: 30522
  chr17:54976881-54977153
  hypo

SEQ ID NO: 183998 - DNA, 30 bp, Homo sapiens; identical to SEQ ID NO: 93042
  chr17:54978908-54978938
  hypo

SEQ ID NO: 183999 - DNA, 139 bp, Homo sapiens
  chr17:55037154-55037293
  hypo
gtgcctagctaagcgcggatgtgctaaatcaaggctgaaagaaagcctggccctgcccttaggcatcagggattttccaagtttgattctcctgtcatcagaagcatcccgggaaggatgctcgttacactgcagattc

SEQ ID NO: 184000 - DNA, 30 bp, Homo sapiens
  chr17:55038680-55038710
  hypo
aagatatttgctcatcgacgtgaaagattt

SEQ ID NO: 184001 - DNA, 19 bp, Homo sapiens
  chr17:55092693-55092712
  hypo
ttttttttttttgagacgg

SEQ ID NO: 184002 - DNA, 30 bp, Homo sapiens
  chr17:55129307-55129337
  hypo
gggatacgatgtcttcgtgcctctggcaaa

SEQ ID NO: 184003 - DNA, 36 bp, Homo sapiens
  chr17:55161299-55161335
  hypo
ctttttggccgggcgcggtggctcacgcctgtaatc

SEQ ID NO: 184004 - DNA, 30 bp, Homo sapiens
  chr17:55170142-55170172
  hypo
gggttcttgcgagtccgactggccttccgc

SEQ ID NO: 184005 - DNA, 88 bp, Homo sapiens; identical to SEQ ID NO: 93045
  chr17:55184790-55184878
  hypo

SEQ ID NO: 184006 - DNA, 30 bp, Homo sapiens
  chr17:55185349-55185379
  hypo
gtgtcctgggtttttcgagtgctgacccca

SEQ ID NO: 184007 - DNA, 30 bp, Homo sapiens; identical to SEQ ID NO: 30524
  chr17:55193501-55193531
  hypo

SEQ ID NO: 184008 - DNA, 20 bp, Homo sapiens
  chr17:55205466-55205486
  hypo
ggaactgtaattttatcgct

SEQ ID NO: 184009 - DNA, 30 bp, Homo sapiens
  chr17:55330822-55330852
  hypo
ttattgagcgtcaaccgtgcgccagcaggc

SEQ ID NO: 184010 - DNA, 460 bp, Homo sapiens
  chr17:55363923-55364383
  hypo
cctgttggtaattgtgcttctcggaggtgaccacgtcattggtatccgggctccataaacaaggggctgccttaccagtgacctttcccgcctaaaaccgaaggccccaaggtcgcttgtctgatggagaatgtatttcccggctcactgtgagcctcgacttaatttgttcctttcctaaggcaaaatgaccttccagtaaacccacaccccctcccccgcttattattatttatttatttttctggtgaacaaacagaattaggaaaggtgtgttcttccaggagagagcgggcagtgtgggaggagatggcagtctggctcattaaaatgccgaggtaggtttaagctgattgccaagtgcgggtcctgcaggtcagagtgtgatgcccagaaacaaagcaaggcctagggagaggctggcctggaggcaactggctcgcgccgcagagagttttga

SEQ ID NO: 184011 - DNA, 63 bp, Homo sapiens
  chr17:55368496-55368559
  hypo
ttttgcaggttgtgtcgtttcagcgggtaactggtatgtgtgtgcatgcgtgcaaaagaaaac

SEQ ID NO: 184012 - DNA, 59 bp, Homo sapiens
  chr17:55378748-55378807
  hypo
tcacatataaaatatcgcatacatacaaaaacatgtgagatctccgtgtaaataggaat

SEQ ID NO: 184013 - DNA, 67 bp, Homo sapiens; identical to SEQ ID NO: 30526
  chr17:55379075-55379142
  hypo

SEQ ID NO: 184014 - DNA, 35 bp, Homo sapiens; identical to SEQ ID NO: 30527
  chr17:55426662-55426697
  hypo

SEQ ID NO: 184015 - DNA, 30 bp, Homo sapiens; identical to SEQ ID NO: 30528
  chr17:55474930-55474960
  hypo

SEQ ID NO: 184016 - DNA, 45 bp, Homo sapiens; identical to SEQ ID NO: 93053
  chr17:55519663-55519708
  hypo

SEQ ID NO: 184017 - DNA, 125 bp, Homo sapiens
  chr17:55536229-55536354
  hypo
cctgtccctgctccgcggttgctgggcacctggcgagagcgttgggttgtttgctttgggtaactatggcagatccttttaattgccaccaaataacttcagctcaacctcgtcagtggttgttt

SEQ ID NO: 184018 - DNA, 30 bp, Homo sapiens; identical to SEQ ID NO: 30529
  chr17:55594699-55594729
  hypo

SEQ ID NO: 184019 - DNA, 68 bp, Homo sapiens; identical to SEQ ID NO: 93056
  chr17:55605294-55605362
  hypo

SEQ ID NO: 184020 - DNA, 33 bp, Homo sapiens
  chr17:55615594-55615627
  hypo
ggctgggccaggggtcgccgcaagccctgggtg

SEQ ID NO: 184021 - DNA, 30 bp, Homo sapiens
  chr17:55622533-55622563
  hypo
gttttttaagtagagcgttaatgcaacctc

SEQ ID NO: 184022 - DNA, 30 bp, Homo sapiens; identical to SEQ ID NO: 93057
  chr17:55634536-55634566
  hypo

SEQ ID NO: 184023 - DNA, 145 bp, Homo sapiens
  chr17:55643991-55644136
  hypo
gctttctgggatgaacgtggttttattcactcagtaactgagagattgaggatttggctcatctcaggaagctcaaggcagagctgagaaaagaactcaacgaagctgggcttgcccgagagactgccaccgatctggttggggc

SEQ ID NO: 184024 - DNA, 475 bp, Homo sapiens
  chr17:55644491-55644966
  hypo
caccatttttgtttccgtttaaaacattgctatcaaccagttggaatataggcccggagtatcgcagggagtaatctaattagtatgaagtcaattcagtcgctccttttgtatctcgtgattaaataagtggggaaaatggcttgaaaattaggtgctagaacgacccaattacatttctgtagctttttgtattcaatttcataaacaattttgctcttcgctggttaatcagtgaatgcctttttccagtttgaaaagcacttttgaaattataatgcaattaaattgtgtgtggatgttctggcatagcgagtgtgaaagccaggggcttggcaggccgccatgttgtaccttgactgtaatgagtccctgggctggcagcttgcgagtgtcattcataatattgtccatgctgggttactgtaaagtgcagctgccttaaccggcagttaaccggcgactgccagtctct

SEQ ID NO: 184025 - DNA, 92 bp, Homo sapiens
  chr17:55647399-55647491
  hypo
aaggaaattatgggacgctcatatgatggatgattacacatccattaaaatggtgtttacagagagtttttaaatgacgtggaaatgccgat

SEQ ID NO: 184026 - DNA, 152 bp, Homo sapiens
  chr17:55664888-55665040
  hypo
acctgagatcactccccgccccccacccaactccccccagccccaaaggtggctgcagaggcgcaggtgtgagctggctcactaagtcgctttccccctcctgattaagcgtgtgggggaataaagaagacccgtgtcgactcacgccgatc

SEQ ID NO: 184027 - DNA, 30 bp, Homo sapiens
  chr17:55705013-55705043
  hypo
ctaccaccccttgcccgcctccccgctccc

SEQ ID NO: 184028 - DNA, 183 bp, Homo sapiens; identical to SEQ ID NO: 93061
  chr17:55752304-55752487
  hypo

SEQ ID NO: 184029 - DNA, 383 bp, Homo sapiens; identical to SEQ ID NO: 93062
  chr17:55753391-55753774
  hypo

SEQ ID NO: 184030 - DNA, 71 bp, Homo sapiens; identical to SEQ ID NO: 30534
  chr17:55828322-55828393
  hypo

SEQ ID NO: 184031 - DNA, 270 bp, Homo sapiens; identical to SEQ ID NO: 30535
  chr17:55917218-55917488
  hypo

SEQ ID NO: 184032 - DNA, 29 bp, Homo sapiens
  chr17:55917727-55917756
  hypo
acagagcgagactccgtctcaaaaaaaaa

SEQ ID NO: 184033 - DNA, 18 bp, Homo sapiens
  chr17:55923478-55923496
  hypo
ggcagcccccacccagcc

SEQ ID NO: 184034 - DNA, 23 bp, Homo sapiens
  chr17:55924358-55924381
  hypo
ttaagaatgttgctaggaggccg

SEQ ID NO: 184035 - DNA, 31 bp, Homo sapiens; identical to SEQ ID NO: 93068
  chr17:55931430-55931461
  hypo

SEQ ID NO: 184036 - DNA, 31 bp, Homo sapiens; identical to SEQ ID NO: 93069
  chr17:55962007-55962038
  hypo

SEQ ID NO: 184037 - DNA, 31 bp, Homo sapiens; identical to SEQ ID NO: 30538
  chr17:55965542-55965573
  hypo

SEQ ID NO: 184038 - DNA, 29 bp, Homo sapiens
  chr17:56001755-56001784
  hypo
cgccgggcctcttccggcttctttacgtt

SEQ ID NO: 184039 - DNA, 137 bp, Homo sapiens; identical to SEQ ID NO: 93072
  chr17:56009115-56009252
  hypo

SEQ ID NO: 184040 - DNA, 31 bp, Homo sapiens; identical to SEQ ID NO: 93073
  chr17:56020028-56020059
  hypo

SEQ ID NO: 184041 - DNA, 70 bp, Homo sapiens
  chr17:56031530-56031600
  hypo
gtggctcaggtgctgcgggatcacccagggaaggctcattcctctcgctacaagacgctgactgcggatc

SEQ ID NO: 184042 - DNA, 705 bp, Homo sapiens; identical to SEQ ID NO: 129075
  chr17:56031840-56032545
  hypo

SEQ ID NO: 184043 - DNA, 40 bp, Homo sapiens; identical to SEQ ID NO: 93076
  chr17:56037719-56037759
  hypo

SEQ ID NO: 184044 - DNA, 30 bp, Homo sapiens
  chr17:56081096-56081126
  hypo
aaaacacaattccatcgtgcatcttaaggg

SEQ ID NO: 184045 - DNA, 30 bp, Homo sapiens
  chr17:56159715-56159745
  hypo
ggcaggctcccaacgcgcacgttcacaccc

SEQ ID NO: 184046 - DNA, 30 bp, Homo sapiens; identical to SEQ ID NO: 30540
  chr17:56166757-56166787
  hypo

SEQ ID NO: 184047 - DNA, 477 bp, Homo sapiens; identical to SEQ ID NO: 54397
  chr17:56296379-56296856
  hypo

SEQ ID NO: 184048 - DNA, 429 bp, Homo sapiens; identical to SEQ ID NO: 129083
  chr17:56326872-56327301
  hypo

SEQ ID NO: 184049 - DNA, 31 bp, Homo sapiens; identical to SEQ ID NO: 30541
  chr17:56388456-56388487
  hypo

SEQ ID NO: 184050 - DNA, 78 bp, Homo sapiens; identical to SEQ ID NO: 93081
  chr17:56389452-56389530
  hypo

SEQ ID NO: 184051 - DNA, 611 bp, Homo sapiens; identical to SEQ ID NO: 129084
  chr17:56401718-56402329
  hypo

SEQ ID NO: 184052 - DNA, 1163 bp, Homo sapiens; identical to SEQ ID NO: 11403
  chr17:56429043-56430206
  hypo

SEQ ID NO: 184053 - DNA, 310 bp, Homo sapiens
  chr17:56435236-56435546
  hypo
ggcagatgctggaggcgtcaactgggccaggggctggctcagggagggccctggggcactgtgggttagagagccgccccgaaggggctgctgagttggatctggtgacttgctgatcaggagaaggtggctctggctggggctgtgtccgaggaataggaggcctggactgggggactccggtttctgggccaggcttcctgccatgccactggaaccgctttttgtagtggtggtgccggtggcggtggtagtggacatggctggaaacctgggtttcccctgtgggcaccaccgagtccaaggaacg

SEQ ID NO: 184054 - DNA, 30 bp, Homo sapiens; identical to SEQ ID NO: 93086
  chr17:56436082-56436112
  hypo

SEQ ID NO: 184055 - DNA, 109 bp, Homo sapiens
  chr17:56439849-56439958
  hypo
acccacccacacacacgcacacgttcaccgccgccaaagaccccacactgctcaccggcctgctgtggcgggggcggcaccggatgcgcagcaccgaagccaggatgat

SEQ ID NO: 184056 - DNA, 33 bp, Homo sapiens; identical to SEQ ID NO: 30545
  chr17:56471127-56471160
  hypo

SEQ ID NO: 184057 - DNA, 33 bp, Homo sapiens
  chr17:56471399-56471432
  hypo
gagcgaaactccgtctccaaaagaaacagaatt

SEQ ID NO: 184058 - DNA, 23 bp, Homo sapiens
  chr17:56482718-56482741
  hypo
tgagccaccgcacccggactgta

SEQ ID NO: 184059 - DNA, 30 bp, Homo sapiens
  chr17:56485190-56485220
  hypo
agacacataaagccacgacggttctactaa

SEQ ID NO: 184060 - DNA, 30 bp, Homo sapiens
  chr17:56569085-56569115
  hypo
agacttgaatgtgttcgtaacatgagttac

SEQ ID NO: 184061 - DNA, 151 bp, Homo sapiens
  chr17:56569816-56569967
  hypo
actgcgcctggcctgccctgttttttgtcatactaaatcatacaaaacatcttacctgcaatggtgtcttcgtttggccaaccagaattcacagtcacagttatagcagtgtgatgccatatggtctggaacccagcgagtcacctaatag

SEQ ID NO: 184062 - DNA, 30 bp, Homo sapiens; identical to SEQ ID NO: 93090
  chr17:56598847-56598877
  hypo

SEQ ID NO: 184063 - DNA, 24 bp, Homo sapiens
  chr17:56688249-56688273
  hypo
aaaaaaagccgctgaaaattttgg

SEQ ID NO: 184064 - DNA, 181 bp, Homo sapiens
  chr17:56742972-56743153
  hypo
aaaaaaacccacaactcattgcgtttacctcactaaagttcctaagcattaaatgatagcaaggtacagctttaaacagtaagcaacggtaacaaccctgcaaccccaaagcattcttaagaaccaaaagaaacaatgaaaaaaaaaaataaggctgggcgcggtggctcacgcctataat

SEQ ID NO: 184065 - DNA, 22 bp, Homo sapiens
  chr17:56773780-56773802
  hypo
gagactccgtctcaaaacataa

SEQ ID NO: 184066 - DNA, 29 bp, Homo sapiens
  chr17:56795651-56795680
  hypo
cctgggctgtttctcggttttcttacata

SEQ ID NO: 184067 - DNA, 839 bp, Homo sapiens; identical to SEQ ID NO: 54407
  chr17:56833161-56834000
  hypo

SEQ ID NO: 184068 - DNA, 291 bp, Homo sapiens; identical to SEQ ID NO: 129094
  chr17:56834019-56834310
  hypo

SEQ ID NO: 184069 - DNA, 31 bp, Homo sapiens; identical to SEQ ID NO: 30548
  chr17:56906694-56906725
  hypo

SEQ ID NO: 184070 - DNA, 42 bp, Homo sapiens
  chr17:57007397-57007439
  hypo
tcatactaccctgaacgtgcctgatctcgcctgaaaatttac

SEQ ID NO: 184071 - DNA, 30 bp, Homo sapiens
  chr17:57076051-57076081
  hypo
ctacagggccaggaacgtaatgaatccatg

SEQ ID NO: 184072 - DNA, 25 bp, Homo sapiens
  chr17:57164466-57164491
  hypo
tttttttgggagatggagtctcgct

SEQ ID NO: 184073 - DNA, 31 bp, Homo sapiens; identical to SEQ ID NO: 93097
  chr17:57185327-57185358
  hypo

SEQ ID NO: 184074 - DNA, 210 bp, Homo sapiens
  chr17:57185657-57185867
  hypo
tgggattcagagtaatgagaagtggcccttgctctcaaggagcagtacagaagacaaataagacaaattgcaatacttacatgataaatagttaagattcttgtatgtttgccgaagaacctaagaatgtcgaaggacttattgcaccaattcataatagcgaacaattagaaacctgtacagctgattagaggccgttggttgcaagca

SEQ ID NO: 184075 - DNA, 27 bp, Homo sapiens
  chr17:57216078-57216105
  hypo
caccgcgcccagcctgttctagtctag

SEQ ID NO: 184076 - DNA, 20 bp, Homo sapiens
  chr17:57217875-57217895
  hypo
cactgcgcccggcccaatct

SEQ ID NO: 184077 - DNA, 40 bp, Homo sapiens; identical to SEQ ID NO: 30551
  chr17:57244236-57244276
  hypo

SEQ ID NO: 184078 - DNA, 30 bp, Homo sapiens; identical to SEQ ID NO: 30552
  chr17:57288334-57288364
  hypo

SEQ ID NO: 184079 - DNA, 150 bp, Homo sapiens
  chr17:57297041-57297191
  hypo
accgcgcccggctgaatcaggattttaaatattcactctgcttttctagtcctgtgggagatatggtcttctccgtaaaatttctccctcagtcctgggtgatttatttcttttgcattgaagtgtgtggcttttcgtgtgttagcagtt

SEQ ID NO: 184080 - DNA, 30 bp, Homo sapiens
  chr17:57320836-57320866
  hypo
cctgggcaacaagaacgaaactcagtaccc

SEQ ID NO: 184081 - DNA, 31 bp, Homo sapiens; identical to SEQ ID NO: 30554
  chr17:57398859-57398890
  hypo

SEQ ID NO: 184082 - DNA, 19 bp, Homo sapiens
  chr17:57402605-57402624
  hypo
ttttgagacagagtctcgc

SEQ ID NO: 184083 - DNA, 19 bp, Homo sapiens
  chr17:57402743-57402762
  hypo
accacgccccaccattact

SEQ ID NO: 184084 - DNA, 79 bp, Homo sapiens
  chr17:57465464-57465543
  hypo
ctagtgaaaacagtccggtgggccagatcgagctttgtggctctgttaattccgccctcttctccgcccccacaccatc

SEQ ID NO: 184085 - DNA, 181 bp, Homo sapiens; identical to SEQ ID NO: 30557
  chr17:57476110-57476291
  hypo

SEQ ID NO: 184086 - DNA, 24 bp, Homo sapiens
  chr17:57495991-57496015
  hypo
gtgagactccgtctcaaaaaaatt

SEQ ID NO: 184087 - DNA, 77 bp, Homo sapiens; identical to SEQ ID NO: 30559
  chr17:57591254-57591331
  hypo

SEQ ID NO: 184088 - DNA, 59 bp, Homo sapiens; identical to SEQ ID NO: 93109
  chr17:57743550-57743609
  hypo

SEQ ID NO: 184089 - DNA, 31 bp, Homo sapiens; identical to SEQ ID NO: 93110
  chr17:57761794-57761825
  hypo

SEQ ID NO: 184090 - DNA, 20 bp, Homo sapiens
  chr17:57768696-57768716
  hypo
ccattatggctgggtgcggt

SEQ ID NO: 184091 - DNA, 160 bp, Homo sapiens; identical to SEQ ID NO: 93112
  chr17:57787135-57787295
  hypo

SEQ ID NO: 184092 - DNA, 39 bp, Homo sapiens; identical to SEQ ID NO: 30562
  chr17:57787534-57787573
  hypo

SEQ ID NO: 184093 - DNA, 41 bp, Homo sapiens
  chr17:57788141-57788182
  hypo
agagaactggccaggcgccgtggctcacgcctgtaatccca

SEQ ID NO: 184094 - DNA, 32 bp, Homo sapiens; identical to SEQ ID NO: 30563
  chr17:57832469-57832501
  hypo

SEQ ID NO: 184095 - DNA, 31 bp, Homo sapiens; identical to SEQ ID NO: 93115
  chr17:57832740-57832771
  hypo

SEQ ID NO: 184096 - DNA, 16 bp, Homo sapiens
  chr17:57866873-57866889
  hypo
tgacaaagcaagtctc

SEQ ID NO: 184097 - DNA, 42 bp, Homo sapiens; identical to SEQ ID NO: 93117
  chr17:57879948-57879990
  hypo

SEQ ID NO: 184098 - DNA, 25 bp, Homo sapiens
  chr17:57881678-57881703
  hypo
gtaaaataaatttgggcctggcgca

SEQ ID NO: 184099 - DNA, 105 bp, Homo sapiens; identical to SEQ ID NO: 93119
  chr17:57902281-57902386
  hypo

SEQ ID NO: 184100 - DNA, 40 bp, Homo sapiens; identical to SEQ ID NO: 93120
  chr17:57932453-57932493
  hypo

SEQ ID NO: 184101 - DNA, 78 bp, Homo sapiens; identical to SEQ ID NO: 93121
  chr17:57937324-57937402
  hypo

SEQ ID NO: 184102 - DNA, 18 bp, Homo sapiens
  chr17:57937581-57937599
  hypo
ttagccaggatggagaac

SEQ ID NO: 184103 - DNA, 43 bp, Homo sapiens
  chr17:57938217-57938260
  hypo
gattacaggtgtgagccaccacgcccagcctgaactttcaaaa

SEQ ID NO: 184104 - DNA, 62 bp, Homo sapiens
  chr17:57948190-57948252
  hypo
ggtccattcagtgcccggagcaactaactcagcaaataatcactgagcgtttaccgttccag

SEQ ID NO: 184105 - DNA, 17 bp, Homo sapiens
  chr17:57948579-57948596
  hypo
agggtctcgctctgtcg

SEQ ID NO: 184106 - DNA, 31 bp, Homo sapiens; identical to SEQ ID NO: 93123
  chr17:58134321-58134352
  hypo

SEQ ID NO: 184107 - DNA, 30 bp, Homo sapiens; identical to SEQ ID NO: 11406
  chr17:58215071-58215101
  hypo

SEQ ID NO: 184108 - DNA, 433 bp, Homo sapiens; identical to SEQ ID NO: 54421
  chr17:58216865-58217298
  hypo

SEQ ID NO: 184109 - DNA, 179 bp, Homo sapiens; identical to SEQ ID NO: 11408
  chr17:58217356-58217535
  hypo

SEQ ID NO: 184110 - DNA, 23 bp, Homo sapiens
  chr17:58350576-58350599
  hypo
gtctgcctcggcctccgaaagtg

SEQ ID NO: 184111 - DNA, 30 bp, Homo sapiens
  chr17:58430052-58430082
  hypo
taaagaccagttgagcggttactgcatttg

SEQ ID NO: 184112 - DNA, 104 bp, Homo sapiens; identical to SEQ ID NO: 93127
  chr17:58471328-58471432
  hypo

SEQ ID NO: 184113 - DNA, 105 bp, Homo sapiens
  chr17:58497634-58497739
  hypo
gtgagccaccgcacccggcagaattatgttgttttaaaacttagcattatataatgtttttaatgatgttatttaatccttatgagtagatttttaaaaaagact

SEQ ID NO: 184114 - DNA, 60 bp, Homo sapiens; identical to SEQ ID NO: 93128
  chr17:58512810-58512870
  hypo

SEQ ID NO: 184115 - DNA, 34 bp, Homo sapiens; identical to SEQ ID NO: 93129
  chr17:58559517-58559551
  hypo

SEQ ID NO: 184116 - DNA, 37 bp, Homo sapiens; identical to SEQ ID NO: 30571
  chr17:58590465-58590502
  hypo

SEQ ID NO: 184117 - DNA, 45 bp, Homo sapiens; identical to SEQ ID NO: 93131
  chr17:58628049-58628094
  hypo

SEQ ID NO: 184118 - DNA, 802 bp, Homo sapiens; identical to SEQ ID NO: 129133
  chr17:58677542-58678344
  hypo

SEQ ID NO: 184119 - DNA, 78 bp, Homo sapiens; identical to SEQ ID NO: 93133
  chr17:58690757-58690835
  hypo

SEQ ID NO: 184120 - DNA, 243 bp, Homo sapiens; identical to SEQ ID NO: 11414
  chr17:58700867-58701110
  hypo

SEQ ID NO: 184121 - DNA, 126 bp, Homo sapiens; identical to SEQ ID NO: 11415
  chr17:58711212-58711338
  hypo

SEQ ID NO: 184122 - DNA, 192 bp, Homo sapiens; identical to SEQ ID NO: 11416
  chr17:58725251-58725443
  hypo

SEQ ID NO: 184123 - DNA, 251 bp, Homo sapiens; identical to SEQ ID NO: 11417
  chr17:58733951-58734202
  hypo

SEQ ID NO: 184124 - DNA, 1531 bp, Homo sapiens; identical to SEQ ID NO: 11418
  chr17:58740341-58741872
  hypo

SEQ ID NO: 184125 - DNA, 750 bp, Homo sapiens; identical to SEQ ID NO: 11419
  chr17:58742891-58743641
  hypo

SEQ ID NO: 184126 - DNA, 17 bp, Homo sapiens
  chr17:58749294-58749311
  hypo
cttttttttctgagacg

SEQ ID NO: 184127 - DNA, 142 bp, Homo sapiens; identical to SEQ ID NO: 93140
  chr17:59161858-59162000
  hypo

SEQ ID NO: 184128 - DNA, 259 bp, Homo sapiens; identical to SEQ ID NO: 93141
  chr17:59239009-59239268
  hypo

SEQ ID NO: 184129 - DNA, 160 bp, Homo sapiens; identical to SEQ ID NO: 93142
  chr17:59278996-59279156
  hypo

SEQ ID NO: 184130 - DNA, 24 bp, Homo sapiens
  chr17:59312555-59312579
  hypo
cccgcctgtcctaagcactttaaa

SEQ ID NO: 184131 - DNA, 30 bp, Homo sapiens
  chr17:59390108-59390138
  hypo
gcctcctaccaccatcggggacatcagtgg

SEQ ID NO: 184132 - DNA, 42 bp, Homo sapiens; identical to SEQ ID NO: 93144
  chr17:59395454-59395496
  hypo

SEQ ID NO: 184133 - DNA, 124 bp, Homo sapiens
  chr17:59415327-59415451
  hypo
gttctgacttaggaactgcagcgtcccttctgtgttgtgagcaactcaaagttaggtcgaatgtcacgcttaatgttgtatctcagtgactaaccctgggcccggcttatgttatgttaggtgc

SEQ ID NO: 184134 - DNA, 362 bp, Homo sapiens; identical to SEQ ID NO: 93146
  chr17:59430809-59431171
  hypo

SEQ ID NO: 184135 - DNA, 45 bp, Homo sapiens
  chr17:59431395-59431440
  hypo
ctcaccaggccaccccgctggttctacttccgcacccacctctgg

SEQ ID NO: 184136 - DNA, 163 bp, Homo sapiens; identical to SEQ ID NO: 30581
  chr17:59434279-59434442
  hypo

SEQ ID NO: 184137 - DNA, 71 bp, Homo sapiens; identical to SEQ ID NO: 93149
  chr17:59445736-59445807
  hypo

SEQ ID NO: 184138 - DNA, 3462 bp, Homo sapiens; identical to SEQ ID NO: 129148
  chr17:59475275-59478737
  hypo

SEQ ID NO: 184139 - DNA, 600 bp, Homo sapiens
  chr17:59520970-59521570
  hypo
caggcctggtggccacgtgggcgcgagcttgggcctcggccccaccctcacccgcttccccctcgttgattgggccccttccccttccggaatccaagatggtggggggggggcgggcttccagggcaatcggagcttcaattggtggaatgcaggccctttgagctgaaggacagcctcagtagccactcagggagctcatgctggtgatggtggtgggcgctcagccaccttacctcacacttaagcagccgaggtgacctcaggaatcggtctcccgcaggctggcgagagccacagtgagaacgaggaaactccagacggcctccgggcaggccccttaccagcctggggcgtcttcctcgataatggaactgagaatcagtccctacctgcccggcaagaagacgggaaaaacctccaactaccttggaggaaatcaataggattacgaggttaatgccagagcaggctgagtgacagttaccaaataaatgatcttgggaggacatggctgaggttaaacgaggcccaataaataaaggagcgtgttcaaaggagaaacttcagaaaatgcaaggacgccggaggcgggggtgg

SEQ ID NO: 184140 - DNA, 30 bp, Homo sapiens; identical to SEQ ID NO: 30585
  chr17:59560584-59560614
  hypo

SEQ ID NO: 184141 - DNA, 18 bp, Homo sapiens
  chr17:59568974-59568992
  hypo
atgacttctaccaaggcg

SEQ ID NO: 184142 - DNA, 31 bp, Homo sapiens; identical to SEQ ID NO: 93154
  chr17:59570612-59570643
  hypo

SEQ ID NO: 184143 - DNA, 30 bp, Homo sapiens; identical to SEQ ID NO: 30586
  chr17:59646336-59646366
  hypo

SEQ ID NO: 184144 - DNA, 30 bp, Homo sapiens; identical to SEQ ID NO: 93156
  chr17:59668556-59668586
  hypo

SEQ ID NO: 184145 - DNA, 30 bp, Homo sapiens
  chr17:59876538-59876568
  hypo
tcatcccgagcaaaccgaagctgaacttct

SEQ ID NO: 184146 - DNA, 23 bp, Homo sapiens
  chr17:59948490-59948513
  hypo
gttgttgttgagatggagtctcg

SEQ ID NO: 184147 - DNA, 37 bp, Homo sapiens
  chr17:60006118-60006155
  hypo
ctttaaaaataaagtcagagccgggcgtggtgtctca

SEQ ID NO: 184148 - DNA, 181 bp, Homo sapiens; identical to SEQ ID NO: 30587
  chr17:60014064-60014245
  hypo

SEQ ID NO: 184149 - DNA, 31 bp, Homo sapiens; identical to SEQ ID NO: 30588
  chr17:60057207-60057238
  hypo

SEQ ID NO: 184150 - DNA, 33 bp, Homo sapiens; identical to SEQ ID NO: 30589
  chr17:60084914-60084947
  hypo

SEQ ID NO: 184151 - DNA, 18 bp, Homo sapiens
  chr17:60127001-60127019
  hypo
aaatgtgaaggctgggcg

SEQ ID NO: 184152 - DNA, 81 bp, Homo sapiens; identical to SEQ ID NO: 93162
  chr17:60218565-60218646
  hypo

SEQ ID NO: 184153 - DNA, 29 bp, Homo sapiens
  chr17:60221589-60221618
  hypo
tcaagctaaggacccgcatgctaactagg

SEQ ID NO: 184154 - DNA, 27 bp, Homo sapiens
  chr17:60263516-60263543
  hypo
cgtgagccaccacgcccagccaaaact

SEQ ID NO: 184155 - DNA, 40 bp, Homo sapiens; identical to SEQ ID NO: 93164
  chr17:60517094-60517134
  hypo

SEQ ID NO: 184156 - DNA, 168 bp, Homo sapiens; identical to SEQ ID NO: 30592
  chr17:60525978-60526146
  hypo

SEQ ID NO: 184157 - DNA, 39 bp, Homo sapiens; identical to SEQ ID NO: 30593
  chr17:60564358-60564397
  hypo

SEQ ID NO: 184158 - DNA, 121 bp, Homo sapiens; identical to SEQ ID NO: 30594
  chr17:60564854-60564975
  hypo

SEQ ID NO: 184159 - DNA, 37 bp, Homo sapiens; identical to SEQ ID NO: 30595
  chr17:60565574-60565611
  hypo

SEQ ID NO: 184160 - DNA, 30 bp, Homo sapiens; identical to SEQ ID NO: 30596
  chr17:60582248-60582278
  hypo

SEQ ID NO: 184161 - DNA, 30 bp, Homo sapiens
  chr17:60669180-60669210
  hypo
ttagttttattttaccgtactacggaaagt

SEQ ID NO: 184162 - DNA, 36 bp, Homo sapiens; identical to SEQ ID NO: 93170
  chr17:60669600-60669636
  hypo

SEQ ID NO: 184163 - DNA, 45 bp, Homo sapiens; identical to SEQ ID NO: 93171
  chr17:60691186-60691231
  hypo

SEQ ID NO: 184164 - DNA, 30 bp, Homo sapiens; identical to SEQ ID NO: 93172
  chr17:60728138-60728168
  hypo

SEQ ID NO: 184165 - DNA, 30 bp, Homo sapiens; identical to SEQ ID NO: 30597
  chr17:60743990-60744020
  hypo

SEQ ID NO: 184166 - DNA, 260 bp, Homo sapiens; identical to SEQ ID NO: 93174
  chr17:60744591-60744851
  hypo

SEQ ID NO: 184167 - DNA, 29 bp, Homo sapiens
  chr17:60747181-60747210
  hypo
gctggaattacaggcgtgagccacggctc

SEQ ID NO: 184168 - DNA, 548 bp, Homo sapiens
  chr17:60747506-60748054
  hypo
ccatatctctctgcacgaggcatattctaggcaggttctgctttcccggtctcatcacttaagtcctgtcatttcgaaggcaggcgccccgtcgtgtccccaaagcatccacatttcccaagctcccttccggtccttgaggcccctcgggtctcagcagccactaaaatccgcttgtctggggcggcagcctcaggtcttagctcattggctaacaagagatgattgacaggtcctgagccagagagcgagcccaccgggctctcagtccgcccagctttgccgggtctccaggagcaggtgtggctggaccactggaatcccagtctgaggccgtgttctagtgggcgcgcagtttcctgcccgactaggcagaatcctgcccgagcatgacactgtgggtggtttggtgaagtcctgttttctcttgccaagaccaagtaagggcttgtttgcctcagctgccctcggatcccaacccctagaaggtgaacctgaaaggcatggaaatcggggcaagggagggcctgggacgggtggatttctca

SEQ ID NO: 184169 - DNA, 120 bp, Homo sapiens
  chr17:60748864-60748984
  hypo
acctgtggtggggaccgggattgatctgggagagtttggagaggaggtgactgggaggcctcgcctgtgttgacgtcaacccagtgggttggttcccagactgggcggctcagtccctga

SEQ ID NO: 184170 - DNA, 30 bp, Homo sapiens
  chr17:60749407-60749437
  hypo
ttttgagtggtctgacgggagccttgtgag

SEQ ID NO: 184171 - DNA, 42 bp, Homo sapiens; identical to SEQ ID NO: 93175
  chr17:60750843-60750885
  hypo

SEQ ID NO: 184172 - DNA, 151 bp, Homo sapiens; identical to SEQ ID NO: 30598
  chr17:60753743-60753894
  hypo

SEQ ID NO: 184173 - DNA, 271 bp, Homo sapiens; identical to SEQ ID NO: 30599
  chr17:60754616-60754887
  hypo

SEQ ID NO: 184174 - DNA, 75 bp, Homo sapiens
  chr17:60755989-60756064
  hypo
gctcaacaagatcttcgggtactgagccgggctgaggcgtgttaggagggcacccgcacacgtgtaggagcaggc

SEQ ID NO: 184175 - DNA, 30 bp, Homo sapiens; identical to SEQ ID NO: 93178
  chr17:60757119-60757149
  hypo

SEQ ID NO: 184176 - DNA, 253 bp, Homo sapiens
  chr17:60757610-60757863
  hypo
gcagtgggtggccatgcagtgcgacacacagctggactggatctgcaagatccccagaggttggccggagtggcgctgggggacgcgggatggagcgaagggtggcggggccaggaattccagggagggtctcctttcctcacaacgtctttgtccttgttcccctaggtacggacgtgcgggagcccgacgacagccctcaaggtgagcaccccccagcccatcccgctacccatcgcgtgggagagggcgt

SEQ ID NO: 184177 - DNA, 30 bp, Homo sapiens
  chr17:60758129-60758159
  hypo
cgccgctcccacgcccgcgctgctcctgca

SEQ ID NO: 184178 - DNA, 50 bp, Homo sapiens
  chr17:60758440-60758490
  hypo
cagcactggtggatcggcctgcacacctctgagagcgatgggcgcttcag

SEQ ID NO: 184179 - DNA, 104 bp, Homo sapiens
  chr17:60759234-60759338
  hypo
gcaccaggcaaacctcggcctgtcggcaaggacaagaagtgcgtgtacatgacagccagccgaggtgagggcaaggtgggggcagagtgcgcagtcagctgtgc

SEQ ID NO: 184180 - DNA, 30 bp, Homo sapiens
  chr17:60759575-60759605
  hypo
ctcccctcccctttccgcagaggactgggg

SEQ ID NO: 184181 - DNA, 30 bp, Homo sapiens; identical to SEQ ID NO: 93181
  chr17:60762204-60762234
  hypo

SEQ ID NO: 184182 - DNA, 30 bp, Homo sapiens
  chr17:60766036-60766066
  hypo
ctccctgttcccctccgcaccgcgctgccc

SEQ ID NO: 184183 - DNA, 766 bp, Homo sapiens
  chr17:60766570-60767336
  hypo
tgctggcacgtgtggcgtcaaggaccctgaggttccaggtccaagacacctccagctccatgcgtaggtggcctctgcgccgggttccttgggtaggaggaggtcaaggccctcacctccctgtccatttgttagcaaacatgtattattaataacaacagggctgacacctaccaagccttggtctgggccaagcgccgagtctggtggagaccgggtctttgcctggtgtgcggccttctcctggccttgtgcctgggaacggggtgagggaagcagagcccagcctgaaccctgaccccttccctgtagacccctccctgagcccgtccccagcagcgctgccccccgccccgggcactgagctctcctacctcaacggcaccttccggctgcttcagaagccgctgcgctggcacgatgccctcctgctgtgtgagagccgcaatgccagcctggcctacgtgcccgacccctacacccaggccttcctcacgcaggctgcccgagggctgcgcacgccgctctggattgggctggctggcgaggaggtgggctcccgacacttttgccctgggccccagccttgcccgggttcccctccctgccccttcctgcccccgccttatccgcaccctatcctgactattcccttcctcccaccccatggccccccatgcccagggctctcggcggtactcctgggtctcagaggagccgctgaactacgtgggctggcaggacggggagccgcagcagccggggg

SEQ ID NO: 184184 - DNA, 30 bp, Homo sapiens; identical to SEQ ID NO: 93184
  chr17:60767578-60767608
  hypo

SEQ ID NO: 184185 - DNA, 52 bp, Homo sapiens; identical to SEQ ID NO: 129171
  chr17:60771356-60771408
  hypo

SEQ ID NO: 184186 - DNA, 30 bp, Homo sapiens
  chr17:60773654-60773684
  hypo
ggagcagcggagggacggaggaccccagtg

SEQ ID NO: 184187 - DNA, 193 bp, Homo sapiens; identical to SEQ ID NO: 129172
  chr17:60781449-60781642
  hypo

SEQ ID NO: 184188 - DNA, 166 bp, Homo sapiens; identical to SEQ ID NO: 93187
  chr17:60793412-60793578
  hypo

SEQ ID NO: 184189 - DNA, 30 bp, Homo sapiens
  chr17:60829452-60829482
  hypo
tgctacagaggattcgagtaaatattatcc

SEQ ID NO: 184190 - DNA, 30 bp, Homo sapiens
  chr17:60842967-60842997
  hypo
ggtctgcttgctttgcgattactattcagc

SEQ ID NO: 184191 - DNA, 222 bp, Homo sapiens; identical to SEQ ID NO: 93188
  chr17:60858151-60858373
  hypo

SEQ ID NO: 184192 - DNA, 30 bp, Homo sapiens; identical to SEQ ID NO: 93189
  chr17:60869515-60869545
  hypo

SEQ ID NO: 184193 - DNA, 469 bp, Homo sapiens; identical to SEQ ID NO: 129173
  chr17:60885401-60885870
  hypo

SEQ ID NO: 184194 - DNA, 29 bp, Homo sapiens
  chr17:60886669-60886698
  hypo
gctttgccgggttgatgtctgtctgtggt

SEQ ID NO: 184195 - DNA, 35 bp, Homo sapiens; identical to SEQ ID NO: 30604
  chr17:61000667-61000702
  hypo

SEQ ID NO: 184196 - DNA, 105 bp, Homo sapiens
  chr17:61050278-61050383
  hypo
tagcccaatgtcttccgagtgaagaaggttttgcttactcctccaggtgggcttgggcatgatgttctctatctattctccccttgcacttggtgtatatagtag

SEQ ID NO: 184197 - DNA, 23 bp, Homo sapiens
  chr17:61200640-61200663
  hypo
aggcgcggtggctcacgcctgta

SEQ ID NO: 184198 - DNA, 121 bp, Homo sapiens
  chr17:61382594-61382715
  hypo
atgggttacacagttccgtggaaaaaacatgttttcccaggctgggtagcgtactcactcactgcctaccttggctgggggtgactcctctgccccgtgtggctctcaggtgggccgcctt

SEQ ID NO: 184199 - DNA, 30 bp, Homo sapiens
  chr17:61396418-61396448
  hypo
caggaggaggctatgcgaagactagcctcg

SEQ ID NO: 184200 - DNA, 30 bp, Homo sapiens
  chr17:61408148-61408178
  hypo
aatgtaggcggagcgcggtggctcctgcct

SEQ ID NO: 184201 - DNA, 30 bp, Homo sapiens
  chr17:61423785-61423815
  hypo
ttttaaatggacaagcgatttagacacttt

SEQ ID NO: 184202 - DNA, 31 bp, Homo sapiens; identical to SEQ ID NO: 30605
  chr17:61447304-61447335
  hypo

SEQ ID NO: 184203 - DNA, 30 bp, Homo sapiens; identical to SEQ ID NO: 30606
  chr17:61483398-61483428
  hypo

SEQ ID NO: 184204 - DNA, 185 bp, Homo sapiens
  chr17:61498924-61499109
  hypo
tccaccagcagaatcggacctgggcagtgtcatctgtggacaccgtcctcagtcccacgtctccaggcaacctgcctcagcctgagtccttcagtccaccatcatccatcagcaacattgccttttataacaaaaccaacaatgcacagaatggccatttgctggaggacgattattacagcccc

SEQ ID NO: 184205 - DNA, 30 bp, Homo sapiens
  chr17:61501492-61501522
  hypo
acgccacacaccacccgcactcacctgtcc

SEQ ID NO: 184206 - DNA, 394 bp, Homo sapiens
  chr17:61514949-61515343
  hypo
cagcgcacagcaccccgagatgcgcacagcccccgcggatgcacacagccccccaagatgcgcacaggccccccgagatgtacacacccctcaagatgcgcacagccgcccccggagataagcacggtccccccagatatgcacagccccccccgaaatgcgcacagccgcccctgctagatgcgcgcaacaccccccccgggttgcgcacagccccctccagatgcgcacagccaccccgctagatgggcacagcccccccgagatgcacacagcacccccagatgcgagcagcccccctgagatgcgcatgtcccccccacggatgcgcacagcccctagagactgcgcctgagatgcggcgcggctcctcccacggcggccccgccaccct

SEQ ID NO: 184207 - DNA, 30 bp, Homo sapiens; identical to SEQ ID NO: 93196
  chr17:61516354-61516384
  hypo

SEQ ID NO: 184208 - DNA, 76 bp, Homo sapiens
  chr17:61521530-61521606
  hypo
gacgcgctttcaccactgcgccgggccaattgttattattttttttatggaagacggggcccgtgaaggccagagg

SEQ ID NO: 184209 - DNA, 211 bp, Homo sapiens; identical to SEQ ID NO: 93197
  chr17:61527569-61527780
  hypo

SEQ ID NO: 184210 - DNA, 31 bp, Homo sapiens; identical to SEQ ID NO: 93198
  chr17:61529704-61529735
  hypo

SEQ ID NO: 184211 - DNA, 609 bp, Homo sapiens; identical to SEQ ID NO: 129178
  chr17:61553819-61554428
  hypo

SEQ ID NO: 184212 - DNA, 30 bp, Homo sapiens; identical to SEQ ID NO: 93200
  chr17:61574320-61574350
  hypo

SEQ ID NO: 184213 - DNA, 115 bp, Homo sapiens
  chr17:61601563-61601678
  hypo
cttctgcgaactcttcggctactcccgagtggaggtgatgcagcaaccctgcacctgcgacttcctcacaggccccaacacaccaagcagcgccgtgtcccgcctagcgcaggcc

SEQ ID NO: 184214 - DNA, 406 bp, Homo sapiens
  chr17:61607515-61607921
  hypo
gttcattctcaacttcgaggacctggcccagctcctggccaagtgcagcagccgcagcttgtcccagcgcctgttgtcccagagcttcctgggctccggtgaggcagagtgagggtggtggtgggagggacgcatgagggtcccctggccgtggctgctctgactcctggccctggtttcagagggctctcatggcaggccaggcggaccagggccaggcacaggcaggggcaagtacaggaccatcagccagatcccacagttcacgctcaacttcgtggagttcaacttggagaagcaccgctccagctccaccacggagattgagatcatcgcgccccataaggtggtggagcggacacagaacgtcactgagaaggtcacccaggtgcgggcctgcagagca

SEQ ID NO: 184215 - DNA, 30 bp, Homo sapiens; identical to SEQ ID NO: 30608
  chr17:61609164-61609194
  hypo

SEQ ID NO: 184216 - DNA, 90 bp, Homo sapiens; identical to SEQ ID NO: 93203
  chr17:61611414-61611504
  hypo

SEQ ID NO: 184217 - DNA, 30 bp, Homo sapiens; identical to SEQ ID NO: 93204
  chr17:61613137-61613167
  hypo

SEQ ID NO: 184218 - DNA, 104 bp, Homo sapiens; identical to SEQ ID NO: 30609
  chr17:61637141-61637245
  hypo

SEQ ID NO: 184219 - DNA, 30 bp, Homo sapiens; identical to SEQ ID NO: 30610
  chr17:61656219-61656249
  hypo

SEQ ID NO: 184220 - DNA, 43 bp, Homo sapiens; identical to SEQ ID NO: 93207
  chr17:61677496-61677539
  hypo

SEQ ID NO: 184221 - DNA, 30 bp, Homo sapiens; identical to SEQ ID NO: 30612
  chr17:61685482-61685512
  hypo

SEQ ID NO: 184222 - DNA, 31 bp, Homo sapiens; identical to SEQ ID NO: 30613
  chr17:61700817-61700848
  hypo

SEQ ID NO: 184223 - DNA, 311 bp, Homo sapiens; identical to SEQ ID NO: 54471
  chr17:61777762-61778073
  hypo

SEQ ID NO: 184224 - DNA, 14 bp, Homo sapiens
  chr17:61778234-61778248
  hypo
ggtatgcgtggttc

SEQ ID NO: 184225 - DNA, 73 bp, Homo sapiens; identical to SEQ ID NO: 129188
  chr17:61778423-61778496
  hypo

SEQ ID NO: 184226 - DNA, 31 bp, Homo sapiens; identical to SEQ ID NO: 30614
  chr17:61780924-61780955
  hypo

SEQ ID NO: 184227 - DNA, 148 bp, Homo sapiens
  chr17:61817225-61817373
  hypo
ccgggacggctgctccgacgaaggcccgggcctggggagatggaatcggtggcagagcgaggagtgactggctccggcagtgcaccaggcaccccgccaggcaggtacctgttcctggtttcaaactccggagctcaagcaatcctac

SEQ ID NO: 184228 - DNA, 28 bp, Homo sapiens
  chr17:61817852-61817880
  hypo
cgagggcgaaactccatctcaaaaaaat

SEQ ID NO: 184229 - DNA, 26 bp, Homo sapiens
  chr17:61857356-61857382
  hypo
tttaatagtaggaaaaactgccgggc

SEQ ID NO: 184230 - DNA, 93 bp, Homo sapiens; identical to SEQ ID NO: 93216
  chr17:61864834-61864927
  hypo

SEQ ID NO: 184231 - DNA, 42 bp, Homo sapiens
  chr17:61892317-61892359
  hypo
gattcataggcgtgagccaccgccctgcattcttaagagaat

SEQ ID NO: 184232 - DNA, 30 bp, Homo sapiens; identical to SEQ ID NO: 93217
  chr17:61895441-61895471
  hypo

SEQ ID NO: 184233 - DNA, 31 bp, Homo sapiens; identical to SEQ ID NO: 93218
  chr17:61908469-61908500
  hypo

SEQ ID NO: 184234 - DNA, 30 bp, Homo sapiens; identical to SEQ ID NO: 93219
  chr17:61910204-61910234
  hypo

SEQ ID NO: 184235 - DNA, 284 bp, Homo sapiens; identical to SEQ ID NO: 129197
  chr17:61920999-61921283
  hypo

SEQ ID NO: 184236 - DNA, 79 bp, Homo sapiens
  chr17:61925861-61925940
  hypo
tataagaagtgggctttgggccgggcgcagtggctcatgcctgtaatcccaagacggatcacctgaggtcaggagtttg

SEQ ID NO: 184237 - DNA, 17 bp, Homo sapiens
  chr17:61927404-61927421
  hypo
acttgtatttataagga

SEQ ID NO: 184238 - DNA, 149 bp, Homo sapiens; identical to SEQ ID NO: 93221
  chr17:62010937-62011086
  hypo

SEQ ID NO: 184239 - DNA, 30 bp, Homo sapiens
  chr17:62012055-62012085
  hypo
gaagcaagaaggcagcgacccccagccacc

SEQ ID NO: 184240 - DNA, 30 bp, Homo sapiens
  chr17:62012793-62012823
  hypo
gtgagccactgcgcccggccccaacagtgc

SEQ ID NO: 184241 - DNA, 30 bp, Homo sapiens; identical to SEQ ID NO: 30618
  chr17:62019009-62019039
  hypo

SEQ ID NO: 184242 - DNA, 30 bp, Homo sapiens; identical to SEQ ID NO: 30619
  chr17:62019292-62019322
  hypo

SEQ ID NO: 184243 - DNA, 232 bp, Homo sapiens
  chr17:62022679-62022911
  hypo
tccatccaggttcccggcaggggtggtgggtcacactcaccacctgcaggagggagaggtagcccagacccacgttgtcgtagttgaccttgacattgagccagcggacctggcctgtgtgcatgaggctctcgcactcagacttgttgttgacctcggagatgtcgaacctctcagaggtggtggtgttgatgcagtagtagaacttgccggcaaacaggttgacacccat

SEQ ID NO: 184244 - DNA, 345 bp, Homo sapiens
  chr17:62050023-62050368
  hypo
cctccaagtcacttcgtggcttccgttcgggctcctcaatctccatctgcttattccgctgcagccgggcctcctcctccaccgcccgctgttctatggctgccagtgactcccgggtgaaggggcgcaagcactcagggcccagaggcaccagggtgcacagagatggtctggccatcctcgcatcctgggctcagagaccagaagggtggtgggtggcctggggagctgcagtgcgcagccccggggtgctgggcggccgcccctccctgggcgggccgtccactcctcacctcctgcttgcccagtggccgagccggggaggtgggcgtgcagactctatca

SEQ ID NO: 184245 - DNA, 194 bp, Homo sapiens
  chr17:62067098-62067292
  hypo
ggctcatctcatactcgaatctccacacttattcccagaagcactcctgaggtacgcgctggcttacactcacacagtcgctggctcactctcacagtcactcgagtgcacactcacggacgcacccacacaaaagctgtgctcccacaggctcagtcatgtgcaaatcacccttcatacgttcacgcagatgc

SEQ ID NO: 184246 - DNA, 30 bp, Homo sapiens
  chr17:62077174-62077204
  hypo
aagggtgtgcgtgcacgtgtgtgcgagcgg

SEQ ID NO: 184247 - DNA, 116 bp, Homo sapiens
  chr17:62131679-62131795
  hypo
tagcggatcacgttcgggtgctcatccgattctcgcaacagctggacctcacggtctgcgaagctaaaacactcggggaggatcctcttcacggccacgtcgcggttgtcaaacat

SEQ ID NO: 184248 - DNA, 38 bp, Homo sapiens; identical to SEQ ID NO: 30620
  chr17:62209842-62209880
  hypo

SEQ ID NO: 184249 - DNA, 21 bp, Homo sapiens
  chr17:62222008-62222029
  hypo
ttttgagatggagtctcgctc

SEQ ID NO: 184250 - DNA, 166 bp, Homo sapiens; identical to SEQ ID NO: 93229
  chr17:62236398-62236564
  hypo

SEQ ID NO: 184251 - DNA, 30 bp, Homo sapiens; identical to SEQ ID NO: 93230
  chr17:62241004-62241034
  hypo

SEQ ID NO: 184252 - DNA, 41 bp, Homo sapiens; identical to SEQ ID NO: 93231
  chr17:62659471-62659512
  hypo

SEQ ID NO: 184253 - DNA, 35 bp, Homo sapiens; identical to SEQ ID NO: 93232
  chr17:62659956-62659991
  hypo

SEQ ID NO: 184254 - DNA, 30 bp, Homo sapiens
  chr17:62675931-62675961
  hypo
agccggggcatcactcgactgcaactactt

SEQ ID NO: 184255 - DNA, 30 bp, Homo sapiens
  chr17:62708225-62708255
  hypo
ggagtcgggtggcttcgcagaagggtcctg

SEQ ID NO: 184256 - DNA, 30 bp, Homo sapiens
  chr17:62772912-62772942
  hypo
cagacgggcaggcaccgtcccaccgtcact

SEQ ID NO: 184257 - DNA, 30 bp, Homo sapiens; identical to SEQ ID NO: 129208
  chr17:62773231-62773261
  hypo

SEQ ID NO: 184258 - DNA, 168 bp, Homo sapiens; identical to SEQ ID NO: 129209
  chr17:62773330-62773498
  hypo

SEQ ID NO: 184259 - DNA, 31 bp, Homo sapiens; identical to SEQ ID NO: 30621
  chr17:62781267-62781298
  hypo

SEQ ID NO: 184260 - DNA, 576 bp, Homo sapiens
  chr17:62782498-62783074
  hypo
gctggccatgactgcccagggcgtgggctgccctgaacaactgcaccgccccttggcacggcacaaagcagatgttcaatacattcctgcccatagagcgaagcctgctgccctgcgtgcttgggccaggctgtgggtgtggcgaagggtagggctgggaggcagctggctgggtgtcccgcatacctgattgtggtgtcaaactcagaggggaagatgatgtcgtggtgctggcagatctggcagatgaagctgcgctgggtgcacaggtcgcagtggtagacatgctgggaggcaaattcaatcagggccttgaggaatccttcatatacctcatctgcgatctgcggagggtaagtaggaatccttcatacaccccgtctgcgatctgcggagggctggtaaactgaggccccaggcctttcaagcagctgcactgagtcgccatggcaccctgcctagagaacttctacccccagtttccatgcgggcaagaaaagaaaacctccctgaatcaggctgagtagtggcagcatccagcccgtgggtactgaggtcactcggggcttatgggat

SEQ ID NO: 184261 - DNA, 285 bp, Homo sapiens; identical to SEQ ID NO: 93236
  chr17:62783321-62783606
  hypo

SEQ ID NO: 184262 - DNA, 38 bp, Homo sapiens
  chr17:62831162-62831200
  hypo
taaaactgcaatcagccgggcacggcagctcacgcctg

SEQ ID NO: 184263 - DNA, 63 bp, Homo sapiens; identical to SEQ ID NO: 129213
  chr17:62915905-62915968
  hypo

SEQ ID NO: 184264 - DNA, 321 bp, Homo sapiens
  chr17:62935834-62936155
  hypo
aaacaaacaaaacaaaacaaaacaaatagtagatctggtcaagcccctcagagctgttacataaaccaactactgagggtaaagacctttggaaggaccatttaaaacacctggggcttcatcgggctggatttgctcggagctacaggtggaatcaagagttctctataatcatcacttgcacagcgtagttttcagggaaatattttcctatttgacaggtgaaacagtatttttcacctgcctgtaggcagttttgagacaatatagtacttttccagaagtgcttccctgaatgactgcgcacgattatgatgacat

SEQ ID NO: 184265 - DNA, 18 bp, Homo sapiens
  chr17:62972670-62972688
  hypo
gtccggcctcagttcttt

SEQ ID NO: 184266 - DNA, 18 bp, Homo sapiens
  chr17:62998000-62998018
  hypo
ccgctgaggtcatgtcgt

SEQ ID NO: 184267 - DNA, 30 bp, Homo sapiens; identical to SEQ ID NO: 93239
  chr17:63049743-63049773
  hypo

SEQ ID NO: 184268 - DNA, 87 bp, Homo sapiens
  chr17:63056650-63056737
  hypo
aaacctaaaataaaagttaaaaaaacccacaacaacaaaaaaggaatagccaaaaggtgtccaaatgtccatcgatgaacgaatgga

SEQ ID NO: 184269 - DNA, 30 bp, Homo sapiens; identical to SEQ ID NO: 93240
  chr17:63060146-63060176
  hypo

SEQ ID NO: 184270 - DNA, 100 bp, Homo sapiens
  chr17:63069465-63069565
  hypo
tcttgggactcagacaggctgcgggcactcagcgactgacccatggactgcgctttctgttatgtaaaacaagcccaacgctgcattgttcagacatatg

SEQ ID NO: 184271 - DNA, 31 bp, Homo sapiens; identical to SEQ ID NO: 93241
  chr17:63089109-63089140
  hypo

SEQ ID NO: 184272 - DNA, 30 bp, Homo sapiens; identical to SEQ ID NO: 93242
  chr17:63132283-63132313
  hypo

SEQ ID NO: 184273 - DNA, 243 bp, Homo sapiens; identical to SEQ ID NO: 93243
  chr17:63152518-63152761
  hypo

SEQ ID NO: 184274 - DNA, 30 bp, Homo sapiens; identical to SEQ ID NO: 93244
  chr17:63204713-63204743
  hypo

SEQ ID NO: 184275 - DNA, 24 bp, Homo sapiens
  chr17:63410186-63410210
  hypo
ctcggtctcacaaaaaaaaaaaaa

SEQ ID NO: 184276 - DNA, 32 bp, Homo sapiens; identical to SEQ ID NO: 93246
  chr17:63459275-63459307
  hypo

SEQ ID NO: 184277 - DNA, 86 bp, Homo sapiens
  chr17:63497914-63498000
  hypo
aacttttatatgatttactcacgttcactcttaggaatgtctcttaagaaaataactagaagtggctgggcgcggtggctcactcc

SEQ ID NO: 184278 - DNA, 25 bp, Homo sapiens
  chr17:63498239-63498264
  hypo
gagcgagactccatctcaaaaaaaa

SEQ ID NO: 184279 - DNA, 351 bp, Homo sapiens; identical to SEQ ID NO: 30624
  chr17:63534021-63534372
  hypo

SEQ ID NO: 184280 - DNA, 30 bp, Homo sapiens
  chr17:63534998-63535028
  hypo
cctggccgcacactgcgcacctttgaggtg

SEQ ID NO: 184281 - DNA, 1722 bp, Homo sapiens; identical to SEQ ID NO: 129221
  chr17:63555672-63557394
  hypo

SEQ ID NO: 184282 - DNA, 31 bp, Homo sapiens; identical to SEQ ID NO: 54491
  chr17:63557793-63557824
  hypo

SEQ ID NO: 184283 - DNA, 688 bp, Homo sapiens; identical to SEQ ID NO: 129224
  chr17:64187874-64188562
  hypo

SEQ ID NO: 184284 - DNA, 158 bp, Homo sapiens; identical to SEQ ID NO: 11454
  chr17:64257869-64258027
  hypo

SEQ ID NO: 184285 - DNA, 174 bp, Homo sapiens; identical to SEQ ID NO: 129226
  chr17:64298538-64298712
  hypo

SEQ ID NO: 184286 - DNA, 686 bp, Homo sapiens; identical to SEQ ID NO: 129227
  chr17:64298988-64299674
  hypo

SEQ ID NO: 184287 - DNA, 22 bp, Homo sapiens
  chr17:64499058-64499080
  hypo
gagccaccgcgcccagcgtgcc

SEQ ID NO: 184288 - DNA, 30 bp, Homo sapiens; identical to SEQ ID NO: 93255
  chr17:64633176-64633206
  hypo

SEQ ID NO: 184289 - DNA, 745 bp, Homo sapiens
  chr17:64671925-64672670
  hypo
cataatagcccctagcgatgccagttctggttcctccgcggggtcccacgccagctgacccagcagtacctgtaacgtgtcccacccttgccagggtttgtgtgcctgcatggttttagaggttccaagtcagagcccctaaaccccttgccttattgctagacagcttgaccgcccccggaacatcacgtgggaagggcgctcggtaaatcctgttctggaggcaatctgtcactccaccagtttcccaatcaacatttgccgaggagttctggctcccggtgcagaactgacttgtggcgacgtgagggaactggcagcttcttagacccaagttctccctcgcagcatcgtcagaagaggcccaaagtagagacgcaaacaaaccctgagaacagcgtgttcttcccagtaacgtgaccgggaaaatgtgagccagaggaaacttgagagctccgtggtgcggctgagctggtggggtgagggttttttccctttttctatctggtccagcccatcggccacttgagatgctcctgaactgagtaaccaagctgttcggagggtactttctcagcaggacaagccctgagctctggaaaaacgcagctagaataacgaggaagcagaggggcctctcccacaccaggcttgccccgacaggtcagcttgcttgtggcccagcgctactgcgcacatgttcctttaagatccctatttccgaggcagccgtggcataattaaa

SEQ ID NO: 184290 - DNA, 387 bp, Homo sapiens
  chr17:64716160-64716547
  hypo
aacagacgagccgtgcgtgctcatcccagtggccgaagaaagtaacaaacaagtagagaaatacaggattggtaatgagaagagagggagggagtatgcaccacagaaaccggtgcagggacaatgtcagaaggagtagggagcctcggggctaaagcatcctttgagcagagatagaagggagtcccgtgcctatctgggtcagaggaagtgcccaactgcaaaggccctcaggcggcagcgtgcttggcgtgtcccagcagatgaagtattgagccagagaacagcggacattttatttactctaactgtgctacccaggaggctgtcatgcccattaagtagcatcattttaacctgttgccccgttaccgagtagaagataat

SEQ ID NO: 184291 - DNA, 486 bp, Homo sapiens
  chr17:64751154-64751640
  hypo
ttttctagacccagtcgctccacagtcaccttcccgatttctgccaggatcagctagccttaccgaagagctaaaaagagattcatcccaaacaagagcttccttggaagcattccatgaagacttgaaacggtgctgcctcccaccacctgacccagtattgtcagtgcctcctctgaggatcgcagaaaatcgcaccccacgcccccccagtgcacattccagacttggagaagcgcggcatggggtggcggtggggagaacacctttctgccagatcaaaagcccagcactttattcagagttttatttatggctccttcagaaggttagtccagtcacgcctccttaataaccgcctcatcacacatgattcaggtgtcctggggccacttcacgctcctggcttcctggcccaaagcccaggagaccgctgaaccccactgcctggcattatttgcgggcgagacaccactggtgaagtgt

SEQ ID NO: 184292 - DNA, 74 bp, Homo sapiens
  chr17:64752171-64752245
  hypo
tctgagaatcagtcacgggggctccacgcgttttggagttttccctcaggaagcgctgccgggtcctcacagtg

SEQ ID NO: 184293 - DNA, 31 bp, Homo sapiens; identical to SEQ ID NO: 30631
  chr17:64781441-64781472
  hypo

SEQ ID NO: 184294 - DNA, 30 bp, Homo sapiens; identical to SEQ ID NO: 93260
  chr17:64781859-64781889
  hypo

SEQ ID NO: 184295 - DNA, 30 bp, Homo sapiens; identical to SEQ ID NO: 11455
  chr17:64877670-64877700
  hypo

SEQ ID NO: 184296 - DNA, 30 bp, Homo sapiens
  chr17:64895166-64895196
  hypo
aagtgcggatgatgtcgcccaggattgctt

SEQ ID NO: 184297 - DNA, 30 bp, Homo sapiens
  chr17:64895670-64895700
  hypo
gcaactcaacctgcacggatttcacatgcc

SEQ ID NO: 184298 - DNA, 31 bp, Homo sapiens; identical to SEQ ID NO: 30633
  chr17:64935531-64935562
  hypo

SEQ ID NO: 184299 - DNA, 222 bp, Homo sapiens
  chr17:64953395-64953617
  hypo
ccttctccatgccttcgttaccttttggtaaaatgaggtcgataacagtatctatctcaaagtattttggaaaaaatcaaataagttaatgtatggccaagcacgtcgaatagagcatgatacacacaaagagctcagtaaccatcagctattagcatttttgtgtgaatgttttccctgggcttactgactctgcatgataaccaacgcaatgaggccagt

SEQ ID NO: 184300 - DNA, 27 bp, Homo sapiens
  chr17:64987078-64987105
  hypo
agccaccgcgcccggcctaagtctcct

SEQ ID NO: 184301 - DNA, 30 bp, Homo sapiens; identical to SEQ ID NO: 30634
  chr17:65026892-65026922
  hypo

SEQ ID NO: 184302 - DNA, 143 bp, Homo sapiens; identical to SEQ ID NO: 93264
  chr17:65027609-65027752
  hypo

SEQ ID NO: 184303 - DNA, 274 bp, Homo sapiens
  chr17:65040724-65040998
  hypo
ggagacgcagccgccggaccctgcccagggcacccacgcctcggcgaccaccatgtcccagaccaaaatgctgaaggtccgcgtgaccctcttctgcatcctggcaggcatcgtgctggccatgacagccgtggtaaccgaccactgggctgtgctgagcccccacatggagcaccacaacactacctgcgaggcggcccacttcggcctctggcggatttgtaccaagcgcatccccatggacgacagcaagacctgcgggcccatcaccctg

SEQ ID NO: 184304 - DNA, 38 bp, Homo sapiens; identical to SEQ ID NO: 30635
  chr17:65109641-65109679
  hypo

SEQ ID NO: 184305 - DNA, 57 bp, Homo sapiens; identical to SEQ ID NO: 54500
  chr17:65242141-65242198
  hypo

SEQ ID NO: 184306 - DNA, 17 bp, Homo sapiens
  chr17:65279482-65279499
  hypo
tccgtcaaaaagaataa

SEQ ID NO: 184307 - DNA, 92 bp, Homo sapiens; identical to SEQ ID NO: 93269
  chr17:65297542-65297634
  hypo

SEQ ID NO: 184308 - DNA, 41 bp, Homo sapiens; identical to SEQ ID NO: 93270
  chr17:65298391-65298432
  hypo

SEQ ID NO: 184309 - DNA, 43 bp, Homo sapiens
  chr17:65314670-65314713
  hypo
agctatttttattattcataccgaataatccctttttatttgt

SEQ ID NO: 184310 - DNA, 18 bp, Homo sapiens
  chr17:65339825-65339843
  hypo
tctgttttttttgagacg

SEQ ID NO: 184311 - DNA, 42 bp, Homo sapiens; identical to SEQ ID NO: 11457
  chr17:65352418-65352460
  hypo

SEQ ID NO: 184312 - DNA, 30 bp, Homo sapiens
  chr17:65353514-65353544
  hypo
taagatacgggatgtcgataccatatcgga

SEQ ID NO: 184313 - DNA, 85 bp, Homo sapiens; identical to SEQ ID NO: 93273
  chr17:65363296-65363381
  hypo

SEQ ID NO: 184314 - DNA, 30 bp, Homo sapiens
  chr17:65528710-65528740
  hypo
ttcacgggaacacgccgtctcgatgttcta

SEQ ID NO: 184315 - DNA, 45 bp, Homo sapiens
  chr17:65573103-65573148
  hypo
aagccaggtctcgcccggatgcagtggctcatggctgtaatccca

SEQ ID NO: 184316 - DNA, 31 bp, Homo sapiens; identical to SEQ ID NO: 93274
  chr17:65593931-65593962
  hypo

SEQ ID NO: 184317 - DNA, 272 bp, Homo sapiens; identical to SEQ ID NO: 93275
  chr17:65668881-65669153
  hypo

SEQ ID NO: 184318 - DNA, 38 bp, Homo sapiens; identical to SEQ ID NO: 93276
  chr17:65711558-65711596
  hypo

SEQ ID NO: 184319 - DNA, 97 bp, Homo sapiens; identical to SEQ ID NO: 30637
  chr17:65712195-65712292
  hypo

SEQ ID NO: 184320 - DNA, 19 bp, Homo sapiens
  chr17:65725992-65726011
  hypo
cccatcatacaatactttt

SEQ ID NO: 184321 - DNA, 30 bp, Homo sapiens
  chr17:65850796-65850826
  hypo
ataaaccatatattcgacatgaacctattg

SEQ ID NO: 184322 - DNA, 30 bp, Homo sapiens
  chr17:65898576-65898606
  hypo
ctccttagttccaagcgtgttggcagaggg

SEQ ID NO: 184323 - DNA, 202 bp, Homo sapiens
  chr17:66384595-66384797
  hypo
gaactacggctttagcggaagctctcttagccatatacaagaaggggaagggcctgctctgcctctgagctgggagacccctacctctgctccgaatgaggatcgatccttcagagatgaactggggcaattatgaggtgaccagaatggcaaaaaggacttgaaacaatcttatttgaaaaacagctaaggccggacgcag

SEQ ID NO: 184324 - DNA, 30 bp, Homo sapiens; identical to SEQ ID NO: 93279
  chr17:66416286-66416316
  hypo

SEQ ID NO: 184325 - DNA, 219 bp, Homo sapiens
  chr17:66416570-66416789
  hypo
ctaccaaattgcctgccgctgtcaagccgcataacagaccaatttttattccacgaggaggagtacctggaaattaggcaagtttgcttccaaatttcatttttaccctctttacaaacacacgctttagtttagtcttggagtttagttttggagttagccttgcatatcccttctgtatcctgtccctcctccacgccgacccgagagcagctgagc

SEQ ID NO: 184326 - DNA, 327 bp, Homo sapiens
  chr17:66420415-66420742
  hypo
taaaagctcacgctgcgaccgacccgcagagccgatgtgggaaatcacaaaacaacagccccagccctgcatgcagggccccaccgcagctttgttttctaagccaaatgtgctcactagagggttccacggatctgcgggagaaagaagccagacctgcactccatccttttacaattggaagctcaatggacacaaaacaatgatcaggagaagtttccataacaaagcctaatggacattgtttcagtgcccaagtggcagctcctctctggctctaggagctgatgctccaagtcttggcccaaacactacttccggccgggt

SEQ ID NO: 184327 - DNA, 26 bp, Homo sapiens
  chr17:66421041-66421067
  hypo
acttccatctcgaaatgatttcaggt

SEQ ID NO: 184328 - DNA, 33 bp, Homo sapiens; identical to SEQ ID NO: 93283
  chr17:66421684-66421717
  hypo

SEQ ID NO: 184329 - DNA, 108 bp, Homo sapiens; identical to SEQ ID NO: 93284
  chr17:66426283-66426391
  hypo

SEQ ID NO: 184330 - DNA, 30 bp, Homo sapiens; identical to SEQ ID NO: 93285
  chr17:66426688-66426718
  hypo

SEQ ID NO: 184331 - DNA, 41 bp, Homo sapiens; identical to SEQ ID NO: 93286
  chr17:66430633-66430674
  hypo

SEQ ID NO: 184332 - DNA, 140 bp, Homo sapiens; identical to SEQ ID NO: 54508
  chr17:66434323-66434463
  hypo

SEQ ID NO: 184333 - DNA, 16 bp, Homo sapiens
  chr17:66439554-66439570
  hypo
gctttgttcttttaaa

SEQ ID NO: 184334 - DNA, 451 bp, Homo sapiens
  chr17:66440109-66440560
  hypo
aaatagtgttaaatcccgagaattcagtaaggtttaatatcctagcatatcgtcgaagtagagagatttctttgtcatgtaataaaacatattctttatggttcagattgtctttttgctggccatgcagacacgccaagttgaaacctgcttctaattatcacgcctactctgtactgaacgaaccacaaaaaacaattaggggtaaacacttttcaacagcagatgcttgaaatcttttacatgtctaccttacgtgccttgacacatttgctgatatgggtcccagacaaagggtgttgttattcttggactgcaatgaagggcacacagcccccctgcaggacacacagcctgacataatttgaatctgccgccattaagacaaagcttcgagataaacctcactaagactcaaaaagcaaacactgcttcacgttcgcaatttgga

SEQ ID NO: 184335 - DNA, 30 bp, Homo sapiens
  chr17:66446578-66446608
  hypo
tctgacccatccctgcggtgcccaatctgt

SEQ ID NO: 184336 - DNA, 231 bp, Homo sapiens
  chr17:66446927-66447158
  hypo
tgcctttcttgaagtgatacacgttcatctgccgtggttttgtgtgactgactaccaccaccaggctgctggagaagaggcgctccacgatgtagacgtccgggatttcatctgggaggaaaagcagccgggaggttacatggattgatcacttccaagaaggattccagcctccatgacactgggcccggcgcaggccaggttccaaaggttctccgggtcttgccggcc

SEQ ID NO: 184337 - DNA, 19 bp, Homo sapiens
  chr17:66449633-66449652
  hypo
ttttgagagggagtctcgc

SEQ ID NO: 184338 - DNA, 33 bp, Homo sapiens
  chr17:66461886-66461919
  hypo
ggcatgagccatcgcgcccggcctgtctcagct

SEQ ID NO: 184339 - DNA, 30 bp, Homo sapiens; identical to SEQ ID NO: 93294
  chr17:66507038-66507068
  hypo

SEQ ID NO: 184340 - DNA, 309 bp, Homo sapiens; identical to SEQ ID NO: 93295
  chr17:66538785-66539094
  hypo

SEQ ID NO: 184341 - DNA, 508 bp, Homo sapiens
  chr17:66539461-66539969
  hypo
taggagtgggtgcattctcctcgctctcagatcaggaaactagagcaactgccccaagcagcatggcgggaagcgtgttctttgtaaattgttcttttcgttacattcgttaaaaggccttgtgtttttcaatctggggggttgcatgggacattttgagttcaaagacaccacgatgaggcacgaagaagatagaaagccagaaggaagaaatgccagggagttcccaccttgagggtctgtctagccacccctcccagaggattggtccttataggcaatgccatctccatggggccagaccctacctgtccagatggaaagctgcgatctcagcattgtgtctctgaaagtcaatgaagtagaagaagtccactggtgtctcctcatctcgctgctgtctggaaggaaggaaggaatcacgccctggactcagacttcagctgggagcctgagaagagagctgatgagcatgaccagcgagaaaggaaaacgggcttttatgctt

SEQ ID NO: 184342 - DNA, 30 bp, Homo sapiens; identical to SEQ ID NO: 30647
  chr17:66588586-66588616
  hypo

SEQ ID NO: 184343 - DNA, 1375 bp, Homo sapiens; identical to SEQ ID NO: 129246
  chr17:66596139-66597514
  hypo

SEQ ID NO: 184344 - DNA, 80 bp, Homo sapiens; identical to SEQ ID NO: 93300
  chr17:66913060-66913140
  hypo

SEQ ID NO: 184345 - DNA, 19 bp, Homo sapiens
  chr17:66913379-66913398
  hypo
ctcaaaaacaaaacaaaac

SEQ ID NO: 184346 - DNA, 24 bp, Homo sapiens
  chr17:67001279-67001303
  hypo
ctcgtccctcctggcttatctttt

SEQ ID NO: 184347 - DNA, 128 bp, Homo sapiens
  chr17:67081065-67081193
  hypo
tggagatagcatattgactctcggttctttattagtgaattcatcatcagtgctacagtctccctgcattctgacacaaaggaatcgcaggtcccgtctgtaccttgcgatggcgagcctcgcgtccg

SEQ ID NO: 184348 - DNA, 30 bp, Homo sapiens
  chr17:67100617-67100647
  hypo
ttaaagagcatacaccgcaggcctgaatcg

SEQ ID NO: 184349 - DNA, 20 bp, Homo sapiens
  chr17:67410119-67410139
  hypo
aggtgtggccgggcgcggtg

SEQ ID NO: 184350 - DNA, 19 bp, Homo sapiens
  chr17:67410378-67410397
  hypo
agagcgagactccctctcg

SEQ ID NO: 184351 - DNA, 30 bp, Homo sapiens; identical to SEQ ID NO: 93306
  chr17:67448226-67448256
  hypo

SEQ ID NO: 184352 - DNA, 210 bp, Homo sapiens; identical to SEQ ID NO: 93307
  chr17:67468375-67468585
  hypo

SEQ ID NO: 184353 - DNA, 30 bp, Homo sapiens
  chr17:68130330-68130360
  hypo
ggggatggttagcagcgataaacattctca

SEQ ID NO: 184354 - DNA, 1743 bp, Homo sapiens; identical to SEQ ID NO: 129250
  chr17:68164453-68166196
  hypo

SEQ ID NO: 184355 - DNA, 32 bp, Homo sapiens; identical to SEQ ID NO: 93309
  chr17:68197135-68197167
  hypo

SEQ ID NO: 184356 - DNA, 27 bp, Homo sapiens
  chr17:70195066-70195093
  hypo
gacaagggccgggcgcggtggctcacg

SEQ ID NO: 184357 - DNA, 175 bp, Homo sapiens; identical to SEQ ID NO: 93310
  chr17:70220135-70220310
  hypo

SEQ ID NO: 184358 - DNA, 52 bp, Homo sapiens; identical to SEQ ID NO: 11470
  chr17:70270192-70270244
  hypo

SEQ ID NO: 184359 - DNA, 94 bp, Homo sapiens; identical to SEQ ID NO: 30655
  chr17:70380739-70380833
  hypo

SEQ ID NO: 184360 - DNA, 30 bp, Homo sapiens; identical to SEQ ID NO: 54523
  chr17:70400150-70400180
  hypo

SEQ ID NO: 184361 - DNA, 149 bp, Homo sapiens
  chr17:70409454-70409603
  hypo
gcaacccaaggtgcacgcacctgagggcccacgattctttgcacagggtgacgcctgctccctttgatgcttgccggatgtgttcccaatgggcaaaaaccagacctcaataaaacccggcattatcaagaggccggtggtttgtgatt

SEQ ID NO: 184362 - DNA, 343 bp, Homo sapiens; identical to SEQ ID NO: 93314
  chr17:70441815-70442158
  hypo

SEQ ID NO: 184363 - DNA, 65 bp, Homo sapiens
  chr17:70507521-70507586
  hypo
tactgcaaagagaaacgaaagccttgaaaaccaaagcactgttatttccgcgtgtatcttccagg

SEQ ID NO: 184364 - DNA, 19 bp, Homo sapiens
  chr17:70585987-70586006
  hypo
gggtgcagtggcccacgcc

SEQ ID NO: 184365 - DNA, 19 bp, Homo sapiens
  chr17:70586245-70586264
  hypo
acagcgagactccgtctca

SEQ ID NO: 184366 - DNA, 583 bp, Homo sapiens
  chr17:70657361-70657944
  hypo
tgttctctgaccatggcgccccctggagttgtgcagtgggacactcctgcttgagcgcagattgctgctcagcctggggtgtagttctggggttcgaggtgcacgctctcaggagaggtagtggagagagtcatgggtttctctgagaattggcaagcgaagggacggcaacctgcagccttgctctccaggctatattccctggccggttgattatgaaaggagaatggcatatccctgacaagccctgcttcaccccggctttcagatcctcccatgtgcgatgagcgtgtgtgttcttgtgtggcaggcccttacatactgttttgattgttatcatcttgccgtgaaaggcctgattgttcaggcctggagatgacatcaccggcttcccactagggcagcctgtcgaggtgtttgatgagcctgcaggtgggaaggggctgggtactccccgcagggctgcccggccctacctgctcagaggagctggcttagcacgcaagggatcttcccccaccctcttggtgcagttctcggaaacttcttggtgcaggctggcgagatgagatgacccatccat

SEQ ID NO: 184367 - DNA, 31 bp, Homo sapiens
  chr17:70680596-70680627
  hypo
cccaggtttgggcaggcgtgccctgctagca

SEQ ID NO: 184368 - DNA, 86 bp, Homo sapiens
  chr17:70705002-70705088
  hypo
gctcacaactcataacgcatgaactttgcctttggctctgttttctgagaaacctaggcaaagccttttttcttttcttttttttt

SEQ ID NO: 184369 - DNA, 721 bp, Homo sapiens
  chr17:70712100-70712821
  hypo
gttgggattacagacgtgagccaccgtgcccggccaaaatgtaccatcttgatcaatttttaagtgcacagacaggtcatggtaagtgtgaaaaaatacctaactcccgccctcgttctcctcgcaccctccctgacccaccccaaaaaggcccaagggagcccccctgcattcccaacctgcaggcatgaggtcatacaagcggggtgttgggcagaggcccctggcagatggcagggtagggcccccagcactccattctggacagaatgaaaacctgacgacctatctgatggaattacacggaagaaaggaaattcgtcttttaagaacaagcgggaggcggatgactgaagtcccaaagaatgctgtggttgaacctttttttttttgttgtttgttttctggcacagtctgtctctatgactgagctgagtaacgtgtttcccgtgacaaaggcccctttcttacgacagtttaatagctccaatacgggggacagccctgactctcccatgggccagcgtctgaaggcggccacagaaaaagggagggaaagccgccgctcttctccaagttggtccagactgaactgagagagtataaggaaaaaaaaaatcggaaactttaacccactcctgaaataaaaaatagaagttaccaaagggatggggaacacacatgcagaggcacagagaagaatatggatgaaaaagtggcc

SEQ ID NO: 184370 - DNA, 353 bp, Homo sapiens
  chr17:70713692-70714045
  hypo
gtccctgtgtggccacggggcactgtcctctccgcatgtgtcatccctccttgttttataagggtacccagtcatgttggacttaggcccaccctaatccagtacgagctgatcttaactaattacatctgcaaagatcctaccgccaaataaggttacagtcacaggtcctggggattaagacttccatacctttctggggtgcatgacttcagcatcgctccttattctggaacttacaggacaggtcactcttgctctgtagctctccctcggagtgaccctgcacatcggctgtctaggaggtgaggctggagaagtgagtcatgaccgcaaggccaccagatcacctc

SEQ ID NO: 184371 - DNA, 30 bp, Homo sapiens
  chr17:70731662-70731692
  hypo
gagtgataaaccagtcgcccttgagccact

SEQ ID NO: 184372 - DNA, 30 bp, Homo sapiens
  chr17:70732052-70732082
  hypo
aggtgagggaaaacgcggcattgagagtga

SEQ ID NO: 184373 - DNA, 34 bp, Homo sapiens; identical to SEQ ID NO: 93318
  chr17:70785405-70785439
  hypo

SEQ ID NO: 184374 - DNA, 30 bp, Homo sapiens; identical to SEQ ID NO: 93319
  chr17:70944321-70944351
  hypo

SEQ ID NO: 184375 - DNA, 121 bp, Homo sapiens; identical to SEQ ID NO: 93320
  chr17:70948869-70948990
  hypo

SEQ ID NO: 184376 - DNA, 22 bp, Homo sapiens
  chr17:70972711-70972733
  hypo
gggcgcggtggctcacgcctgt

SEQ ID NO: 184377 - DNA, 30 bp, Homo sapiens
  chr17:70980811-70980841
  hypo
aaatgtgagaatcaccgcagtgaagcaacg

SEQ ID NO: 184378 - DNA, 35 bp, Homo sapiens
  chr17:71026283-71026318
  hypo
atctgacaggaggcggagctcagaagataaagctc

SEQ ID NO: 184379 - DNA, 47 bp, Homo sapiens
  chr17:71126820-71126867
  hypo
agaacaaataccacacgacgcaccgcttatatcgaggcatccaaagc

SEQ ID NO: 184380 - DNA, 425 bp, Homo sapiens; identical to SEQ ID NO: 129269
  chr17:71160733-71161158
  hypo

SEQ ID NO: 184381 - DNA, 250 bp, Homo sapiens; identical to SEQ ID NO: 54529
  chr17:71161183-71161433
  hypo

SEQ ID NO: 184382 - DNA, 951 bp, Homo sapiens; identical to SEQ ID NO: 129271
  chr17:71161481-71162432
  hypo

SEQ ID NO: 184383 - DNA, 43 bp, Homo sapiens
  chr17:71190855-71190898
  hypo
gcctcccaaagtgatgggattacaggcgcgagagccaccgcgc

SEQ ID NO: 184384 - DNA, 30 bp, Homo sapiens
  chr17:71197410-71197440
  hypo
acctgccttccgatgcggcctgggtcagcg

SEQ ID NO: 184385 - DNA, 253 bp, Homo sapiens; identical to SEQ ID NO: 93325
  chr17:71201619-71201872
  hypo

SEQ ID NO: 184386 - DNA, 211 bp, Homo sapiens; identical to SEQ ID NO: 93326
  chr17:71202330-71202541
  hypo

SEQ ID NO: 184387 - DNA, 150 bp, Homo sapiens; identical to SEQ ID NO: 93327
  chr17:71202869-71203019
  hypo

SEQ ID NO: 184388 - DNA, 30 bp, Homo sapiens; identical to SEQ ID NO: 93328
  chr17:71244879-71244909
  hypo

SEQ ID NO: 184389 - DNA, 210 bp, Homo sapiens
  chr17:71269219-71269429
  hypo
gccccactcactccccgcctggataaactgccctgaccctggagggggtgctggagggagactcagtagagcatggcagaccaaggccaccccaccaccaacatcctgaccttccctccggtcgggggctcatcagactcggcgctgtcttttttaaatttatttattttttttattgagacggagtctctgtctgtcacccgggctgga

SEQ ID NO: 184390 - DNA, 31 bp, Homo sapiens; identical to SEQ ID NO: 93330
  chr17:71271188-71271219
  hypo

SEQ ID NO: 184391 - DNA, 88 bp, Homo sapiens; identical to SEQ ID NO: 93331
  chr17:71272523-71272611
  hypo

SEQ ID NO: 184392 - DNA, 87 bp, Homo sapiens
  chr17:71276453-71276540
  hypo
tggcccgtatcacagcggtgcagagcggcgtgtgcccagtaaacgggcgcacagccctatccacatgggggacgtggagggagatgc

SEQ ID NO: 184393 - DNA, 24 bp, Homo sapiens
  chr17:71279081-71279105
  hypo
aaagcccatgtcgaccggcacggt

SEQ ID NO: 184394 - DNA, 167 bp, Homo sapiens; identical to SEQ ID NO: 93333
  chr17:71280548-71280715
  hypo

SEQ ID NO: 184395 - DNA, 528 bp, Homo sapiens
  chr17:71281744-71282272
  hypo
tgctgcgggctgagccggggctgggggccgctgctgcccacccctcatcctccagagcatgggaggggagggagggcaagtctgggccagccttgccttcctgccttgccaggggaggggccgccacggcgtacgggggagcctgggtgatggtgccagcggcgccctcatcgccatggtaaccaccctccccctcctcggggtcccactcctccttgtccatgatgctgaggacgtcacccagcatggagggccccaggtcgatgtggaaggacatgatggactccgcatgcttcagcccgtacgtggccttgggcacgacaggcagatctgtcagatccccaaaggcctgctcatcgaggagggggtcaggggaatgtggacccgcggccccattccgacggggcactgcctcctccgtgcccgcctcctcatcgccgccctccccgtcattggccttcttcacggggctggatgacaggctcttgggcagcttactggtgcccttctccgcggcctccttctcat

SEQ ID NO: 184396 - DNA, 30 bp, Homo sapiens
  chr17:71288839-71288869
  hypo
aggcagagggaacggcgcgtgcaaacgccg

SEQ ID NO: 184397 - DNA, 30 bp, Homo sapiens
  chr17:71290122-71290152
  hypo
gaagtgtgctgcgtgcgcaaggaggttaag

SEQ ID NO: 184398 - DNA, 1601 bp, Homo sapiens; identical to SEQ ID NO: 54536
  chr17:71306966-71308567
  hypo

SEQ ID NO: 184399 - DNA, 103 bp, Homo sapiens
  chr17:71312421-71312524
  hypo
tcctatttccttggaggggctggaagttccactcattccagtctggtgtttgtcctaaagtatgactctgggcaggtcatttctcttcgtgaaataagctatc

SEQ ID NO: 184400 - DNA, 30 bp, Homo sapiens
  chr17:71320645-71320675
  hypo
acgctgtttctatgtcgtcttaggagcctc

SEQ ID NO: 184401 - DNA, 259 bp, Homo sapiens; identical to SEQ ID NO: 93338
  chr17:71325319-71325578
  hypo

SEQ ID NO: 184402 - DNA, 155 bp, Homo sapiens; identical to SEQ ID NO: 93339
  chr17:71326304-71326459
  hypo

SEQ ID NO: 184403 - DNA, 31 bp, Homo sapiens; identical to SEQ ID NO: 93340
  chr17:71328372-71328403
  hypo

SEQ ID NO: 184404 - DNA, 30 bp, Homo sapiens; identical to SEQ ID NO: 30667
  chr17:71332892-71332922
  hypo

SEQ ID NO: 184405 - DNA, 200 bp, Homo sapiens; identical to SEQ ID NO: 93342
  chr17:71345760-71345960
  hypo

SEQ ID NO: 184406 - DNA, 31 bp, Homo sapiens; identical to SEQ ID NO: 30668
  chr17:71351037-71351068
  hypo

SEQ ID NO: 184407 - DNA, 30 bp, Homo sapiens
  chr17:71353249-71353279
  hypo
gcagctagatgtattcgctatatgcaactg

SEQ ID NO: 184408 - DNA, 30 bp, Homo sapiens
  chr17:71353522-71353552
  hypo
ttttaatcacctaaccgcggatccatggga

SEQ ID NO: 184409 - DNA, 205 bp, Homo sapiens
  chr17:71354223-71354428
  hypo
gtctggcctcgatgacgtagcgggtgatgggccctttgcccgggtctccgctggaccagtgaatggcgatggcagagctgtaccgcacgatgatgggcacgccaggcggtcctggggcacctgcagacagcacacagaggcgagggatgtatggaacccagaacagccacccagcccgtcaccctgggctcgaggaggaacactg

SEQ ID NO: 184410 - DNA, 138 bp, Homo sapiens; identical to SEQ ID NO: 30670
  chr17:71364485-71364623
  hypo

SEQ ID NO: 184411 - DNA, 197 bp, Homo sapiens
  chr17:71391355-71391552
  hypo
gcctggacctggacgcggtactctgtccactcctccaggtcctcgatggtgtagtcccgctccacacggtcctgcaccacgtggctcagcgtcttgccatgcccgtctgaccggctgtacttgatcttatagcccacggactcagggttcccattgtattccatctccgggagaggctgcagcggggcaggggtggc

SEQ ID NO: 184412 - DNA, 84 bp, Homo sapiens
  chr17:71401758-71401842
  hypo
ggttccaggaccgcccgcagataccaaaagccacagctgctcaagtacctgatataaaaaggtgtagtatttgcatgtaaccta

SEQ ID NO: 184413 - DNA, 31 bp, Homo sapiens; identical to SEQ ID NO: 93346
  chr17:71410786-71410817
  hypo

SEQ ID NO: 184414 - DNA, 30 bp, Homo sapiens
  chr17:71416290-71416320
  hypo
ccaagcgcgacagcacgtctttctctggca

SEQ ID NO: 184415 - DNA, 91 bp, Homo sapiens
  chr17:71417095-71417186
  hypo
tgaggatttggcctttttcttggtgactcagggcggtttgcatgaaggtacattaggaaggtgagtcagtgtgatgcggtgcagccgcagg

SEQ ID NO: 184416 - DNA, 30 bp, Homo sapiens
  chr17:71417529-71417559
  hypo
gcaaggctttgcgcacgtgatttgtatcac

SEQ ID NO: 184417 - DNA, 242 bp, Homo sapiens
  chr17:71419535-71419777
  hypo
atctccagaatgtagcggatcagggggctgttgccatcaaagggcttggtccacgtcaggttgatggctcgcctttccacggtgctgagagtggccactgggtgctcgggcgcgtggggcagttgcctggaaaagagacacgtggtcaggcatccctatgtggtctgcaggcaggtgacgggggcgctgtggacacaggttgtgtaggccttgaccttccatgataccgcatgcttagacgt

SEQ ID NO: 184418 - DNA, 129 bp, Homo sapiens
  chr17:71420060-71420189
  hypo
cgcaggtgggcactgcgagagtcgttgcctcctgctgagatcacccggcaggtgtacgtgccgatgtctcccgaccacgtctgtgagatgtgcagggagccgtttctgtccaggcggatacgaggatgg

SEQ ID NO: 184419 - DNA, 298 bp, Homo sapiens; identical to SEQ ID NO: 30671
  chr17:71431600-71431898
  hypo

SEQ ID NO: 184420 - DNA, 30 bp, Homo sapiens; identical to SEQ ID NO: 11477
  chr17:71469605-71469635
  hypo

SEQ ID NO: 184421 - DNA, 171 bp, Homo sapiens; identical to SEQ ID NO: 93349
  chr17:71492641-71492812
  hypo

SEQ ID NO: 184422 - DNA, 230 bp, Homo sapiens; identical to SEQ ID NO: 93350
  chr17:71507290-71507520
  hypo

SEQ ID NO: 184423 - DNA, 30 bp, Homo sapiens
  chr17:71516036-71516066
  hypo
accagcgctttgtggcgtgtaacaaagact

SEQ ID NO: 184424 - DNA, 36 bp, Homo sapiens
  chr17:71533239-71533275
  hypo
gcatgtgcgtgcgtgcgtgtgcgggcgcgcatcatg

SEQ ID NO: 184425 - DNA, 344 bp, Homo sapiens; identical to SEQ ID NO: 93351
  chr17:71548538-71548882
  hypo

SEQ ID NO: 184426 - DNA, 2088 bp, Homo sapiens; identical to SEQ ID NO: 129278
  chr17:71639093-71641181
  hypo

SEQ ID NO: 184427 - DNA, 292 bp, Homo sapiens; identical to SEQ ID NO: 129279
  chr17:71641392-71641684
  hypo

SEQ ID NO: 184428 - DNA, 30 bp, Homo sapiens
  chr17:71708370-71708400
  hypo
aggccaggtcaaaaccgaggcagggtcctc

SEQ ID NO: 184429 - DNA, 30 bp, Homo sapiens
  chr17:71708834-71708864
  hypo
agcgattctaaaactcgagttctcatcagt

SEQ ID NO: 184430 - DNA, 30 bp, Homo sapiens; identical to SEQ ID NO: 93355
  chr17:71744311-71744341
  hypo

SEQ ID NO: 184431 - DNA, 433 bp, Homo sapiens; identical to SEQ ID NO: 93356
  chr17:71744647-71745080
  hypo

SEQ ID NO: 184432 - DNA, 30 bp, Homo sapiens
  chr17:71762038-71762068
  hypo
tccgtaacatatgtccgcctctggactttg

SEQ ID NO: 184433 - DNA, 161 bp, Homo sapiens
  chr17:71772786-71772947
  hypo
cattctccttgcaaagaatggcggatgcagtgagagttgccgtaaaagcgatgaaaaagtcatcggcaatccttaccacatccgtacatcggcagctcggaggcttgactgctggagcgagatgtggcccaagacgccccggtggaggctagggtcctcat

SEQ ID NO: 184434 - DNA, 888 bp, Homo sapiens; identical to SEQ ID NO: 54545
  chr17:71948433-71949321
  hypo

SEQ ID NO: 184435 - DNA, 30 bp, Homo sapiens
  chr17:71991656-71991686
  hypo
agccaccgcacctggcgtgtttgggagatc

SEQ ID NO: 184436 - DNA, 30 bp, Homo sapiens
  chr17:71992294-71992324
  hypo
tagtgtacagtgcaacgttcgcccatggta

SEQ ID NO: 184437 - DNA, 30 bp, Homo sapiens
  chr17:72010236-72010266
  hypo
gatctaagaaaggggcggctggctggaaaa

SEQ ID NO: 184438 - DNA, 145 bp, Homo sapiens
  chr17:72020384-72020529
  hypo
cgtgtcactcctgactcagctccccatgccatccaaccaaattcctctgcctgacatgtaaagttcttcatgacctcgctccatgcacccttctgctcccttggggtagcatcctttctccctgccaccccgcaggctcgccctc

SEQ ID NO: 184439 - DNA, 30 bp, Homo sapiens
  chr17:72038121-72038151
  hypo
gggaaaacggcgaaacgcgtactgcaaaat

SEQ ID NO: 184440 - DNA, 56 bp, Homo sapiens; identical to SEQ ID NO: 93358
  chr17:72198103-72198159
  hypo

SEQ ID NO: 184441 - DNA, 30 bp, Homo sapiens; identical to SEQ ID NO: 30678
  chr17:72207503-72207533
  hypo

SEQ ID NO: 184442 - DNA, 764 bp, Homo sapiens; identical to SEQ ID NO: 129285
  chr17:72208473-72209237
  hypo

SEQ ID NO: 184443 - DNA, 209 bp, Homo sapiens
  chr17:72220053-72220262
  hypo
aaaacgcaggcgagacgctaaagcagccttgtggggcggacaaagctctgagcacaaggaaggggaccaaggctgctgcaatacatggccggggctgaaataagagactcagaggacagagttctggacaggccgggaggtcacagtcgagtgcggttcccagtacagtggaagagctttgagaagtgactggtgttaaaaatcctcct

SEQ ID NO: 184444 - DNA, 84 bp, Homo sapiens
  chr17:72221624-72221708
  hypo
tgtaacccaggccggcgggagtattcggaacagtgggacttgaatgtgaagaagtggccaccgggtgaccgaagagctcagagg

SEQ ID NO: 184445 - DNA, 43 bp, Homo sapiens
  chr17:72243966-72244009
  hypo
cttaagtgcgtgcgtgcgtgcgtgcatgcgtgtgtgtgtgtgt

SEQ ID NO: 184446 - DNA, 30 bp, Homo sapiens
  chr17:72244436-72244466
  hypo
catgtccttgctgccgcctctcctggggcc

SEQ ID NO: 184447 - DNA, 513 bp, Homo sapiens
  chr17:72249016-72249529
  hypo
cctggaagagctggtcgtgaagctgggaatgggccagaatgatctgcaggaggcaggctggggaccgcgttttagaggagtctcaaggagacacgcgtggccagagagtcctgggaggaaaggcagggaagtaggacaggacctggctgcctcggagcctccttcacccttcacagccggccatcttctacccattgttctagaaacagagactacgatgacattgatgatgatgacccctttaacccccaagcctggcgcatggcggctcacagtcccccgaggggacagcttcacagcttctgcagctacagcagtggcctgggaagtcagaccagcctgcagcccccggcccagaccatctccaacgcccctgtctccgagtacatgtacggcctgcacacacacccaggctgggtagcactgcccggacagcatgttgggtggggtccacagtgccgggtgtggggaggaaggcatccaaggccacccgtggtccccactacagccaca

SEQ ID NO: 184448 - DNA, 223 bp, Homo sapiens
  chr17:72249920-72250143
  hypo
cccacgctacgagaacgtgccactaatcgggagagcctcccctccgcctacggtaattggggctctggcccttccttgttggggtaatacataaagacaaaacctcctgccaacccagtgaatcctgtccacaaaggcagaaaagaatgaaactgttctgttattgaatatgcactaaaccagaccgtcgtgggtatcccaggcagtccgctaaggagattgc

SEQ ID NO: 184449 - DNA, 337 bp, Homo sapiens
  chr17:72260299-72260636
  hypo
ctgtacacatctatacgacgcgtcccatgttgggggagtggggcgaggtcatgggagctggtccactctctcctcggaccagcctccccgcaggctcactggcttggccagcacagggacccctgcagctggctgttgtcttctgtggagcgagggaaggtaacagtttagctcccacccatggtgggcagaggtcagcggaggtcagaggcatggagatggccaccgctcagctaggaaatccctgtgcctggtgctcgtgcccgtcatacagtctgctttgctgtcttctttctactttttccttctttttcttctgggacggtgactcagggtc

SEQ ID NO: 184450 - DNA, 22 bp, Homo sapiens
  chr17:72264227-72264249
  hypo
acatttgaggagcaggccaggc

SEQ ID NO: 184451 - DNA, 80 bp, Homo sapiens; identical to SEQ ID NO: 93364
  chr17:72269880-72269960
  hypo

SEQ ID NO: 184452 - DNA, 216 bp, Homo sapiens; identical to SEQ ID NO: 129288
  chr17:72270295-72270511
  hypo

SEQ ID NO: 184453 - DNA, 500 bp, Homo sapiens
  chr17:72277704-72278204
  hypo
tattgccctcctcagagagcaactgcaataactaaacagggtaatgcttagcatatagtcggcactcaggatttttttttaatgcggatgcagcttctggacaaattcctaggatctccccaccaccccttgcttcctgccccaaccagattgagaacctggagctgtcctggcaggacctgtggagatagggaaggggccggtggggtccctcaccccacaccctccctctgccccccagcagccggcaccatggagattgtgtacgtgtacgtcaagaagcgcagcgagttcgggaagcagtgcaatttctcggaccgccaggccgagctgaacatcgacatcatgcccaaccctgagctggccgagcagttcgtggagcggaacccagtggacacgggcatccagtgctcgatcagcatgtcggaacacgaggtgggtccctgccccaagggccctggcctgtcaggtgtggccaggcagggcggccagctggggcc

SEQ ID NO: 184454 - DNA, 35 bp, Homo sapiens; identical to SEQ ID NO: 30682
  chr17:72290213-72290248
  hypo

SEQ ID NO: 184455 - DNA, 517 bp, Homo sapiens; identical to SEQ ID NO: 129289
  chr17:72322040-72322557
  hypo

SEQ ID NO: 184456 - DNA, 30 bp, Homo sapiens; identical to SEQ ID NO: 93369
  chr17:72356239-72356269
  hypo

SEQ ID NO: 184457 - DNA, 600 bp, Homo sapiens
  chr17:72367881-72368481
  hypo
gcagtggccctggcgcgccttgccaccaggaccaggaggccctcctactactaccttctggcgctcacagcctcggatatcatcatccaggtggtcatcgtgttcgcgggcttcctcctgcagggagcagtgctggcccgccaggtgccccaggctgtggtgcgcacggccaacatcctggagtttgctgccaaccacgcctcagtctggatcgccatcctgctcacggttgaccgctacactgccctgtgccaccccctgcaccatcgggccgcctcgtccccaggccggacccgccgggccattgctgctgtcctgagtgctgccctgttgaccggcatccccttctactggtggctggacatgtggagagacaccgactcacccagaacactggacgaggtcctcaagtgggctcactgtctcactgtctatttcatcccttgtggcgtgttcctggtcaccaactcggccatcatccaccggctacggaggaggggccggagtgggctgcagccccgggtgggcaagagcacagccatcctcctgggcatcaccacactgttcaccctcctgtgggcgccccgggtcttcgtcatg

SEQ ID NO: 184458 - DNA, 50 bp, Homo sapiens
  chr17:72370872-72370922
  hypo
gcaaatgcaggtacccggggagggagaaggtccaccggaggaccagataa

SEQ ID NO: 184459 - DNA, 151 bp, Homo sapiens
  chr17:72391681-72391832
  hypo
ttctacctgtacaaacggaacacctagctatgcgtgcacatttatgacatgacccaggcagcattgtttgtaataatgacaaaggattggaggctcctacataggtgactggttccacacttgcggtgtccccatgcgatggatcacagta

SEQ ID NO: 184460 - DNA, 30 bp, Homo sapiens
  chr17:72447437-72447467
  hypo
tcctctgggggtctgcgcgtgaggctcagg

SEQ ID NO: 184461 - DNA, 374 bp, Homo sapiens; identical to SEQ ID NO: 11486
  chr17:72449938-72450312
  hypo

SEQ ID NO: 184462 - DNA, 337 bp, Homo sapiens; identical to SEQ ID NO: 54557
  chr17:72450330-72450667
  hypo

SEQ ID NO: 184463 - DNA, 30 bp, Homo sapiens; identical to SEQ ID NO: 54558
  chr17:72612278-72612308
  hypo

SEQ ID NO: 184464 - DNA, 30 bp, Homo sapiens; identical to SEQ ID NO: 54559
  chr17:72638272-72638302
  hypo

SEQ ID NO: 184465 - DNA, 194 bp, Homo sapiens
  chr17:72700707-72700901
  hypo
atcctccatggtcacagtgaacgtgcggtttttctgattgtccttgatggacacccggtccctcttcacctcctgctctgacccactggttttaacaaggatcttgcagtcacgccaaatagctcctcgacaccaccacttcaagtaggtctcccagcctgatctgtaaacacactgcacggtcaaggagcccc

SEQ ID NO: 184466 - DNA, 30 bp, Homo sapiens; identical to SEQ ID NO: 93375
  chr17:72797753-72797783
  hypo

SEQ ID NO: 184467 - DNA, 30 bp, Homo sapiens; identical to SEQ ID NO: 93376
  chr17:72798145-72798175
  hypo

SEQ ID NO: 184468 - DNA, 163 bp, Homo sapiens; identical to SEQ ID NO: 93377
  chr17:72799714-72799877
  hypo

SEQ ID NO: 184469 - DNA, 202 bp, Homo sapiens; identical to SEQ ID NO: 93378
  chr17:72800412-72800614
  hypo

SEQ ID NO: 184470 - DNA, 35 bp, Homo sapiens
  chr17:72808770-72808805
  hypo
gctgtgcgatttgtgcgctccgcctccacccagat

SEQ ID NO: 184471 - DNA, 30 bp, Homo sapiens
  chr17:72809291-72809321
  hypo
tgagaacaaaagcgtcgcctgcgtgcttcc

SEQ ID NO: 184472 - DNA, 30 bp, Homo sapiens
  chr17:72810924-72810954
  hypo
ccttcctaggtgctgcgacaaacaaggatg

SEQ ID NO: 184473 - DNA, 270 bp, Homo sapiens
  chr17:72811188-72811458
  hypo
gttgaaaatttgaggacggggtgtcagagagggggaccttctccctctgccgctttctggctgtgtcactgaacctctccagccccccagtttcctcatcagtaagatgagggcatcgtcacctgcaccagtgaccttgcagcgggccatgagcatgaaatgaaaccatgtgtgttagcgcttggcagagtgtggaggggctgcagcttgggcagtgatgttatcacagggcagttttgatagcacagggcagggcggatcaaaggacca

SEQ ID NO: 184474 - DNA, 238 bp, Homo sapiens
  chr17:72811679-72811917
  hypo
ctcactcacacgctccgtggtgcggttaaaggacataacacattgccagtcctgggctccttttgcatatgacacagaagcacgcagagtcggagcctttcttctgtaagtgccatgtgctgtagggttagaactggagaggagggaggcaggtggtggacacggcacagcctcagcaggcgtgagttgagcgttcttggtttaaagatccattctcggaagtagcacagcatttgtt

SEQ ID NO: 184475 - DNA, 30 bp, Homo sapiens
  chr17:72815893-72815923
  hypo
cttcactctcctcctcggaccgttcacctt

SEQ ID NO: 184476 - DNA, 210 bp, Homo sapiens
  chr17:72818430-72818640
  hypo
cagagtcaggctcaccgtagacttggctttagaaaatcaactcctgtttcccccagccccttcccacccccaggtctcccaccctgaggctcccggggccctgcagtgctgcggagcaggtgacagtggcctcgagagaggcttttggcagcatcaggagccggaggtggagaccagctcgggaaggtcgacagcacttgtttttttggt

SEQ ID NO: 184477 - DNA, 30 bp, Homo sapiens
  chr17:72818935-72818965
  hypo
tcttcccagtgctggcggaaggtgtgtccc

SEQ ID NO: 184478 - DNA, 97 bp, Homo sapiens
  chr17:72823371-72823468
  hypo
caggttttaccagcacggcactgccctgtctcactccaacccttcagcgtccctacagtcatctccttttttttttttttttagacagagtctcgct

SEQ ID NO: 184479 - DNA, 37 bp, Homo sapiens; identical to SEQ ID NO: 30688
  chr17:72823707-72823744
  hypo

SEQ ID NO: 184480 - DNA, 522 bp, Homo sapiens; identical to SEQ ID NO: 93383
  chr17:72824032-72824554
  hypo

SEQ ID NO: 184481 - DNA, 99 bp, Homo sapiens
  chr17:72827957-72828056
  hypo
cctccacgaggtgggcgcaggctgtcttggcggctgtggctgagccccgggcgtcggtgtggctcttggagccctgctccccatcgcgcatcctggcag

SEQ ID NO: 184482 - DNA, 31 bp, Homo sapiens
  chr17:72848180-72848211
  hypo
gggcccagggtgaacacggcagtccccggcc

SEQ ID NO: 184483 - DNA, 238 bp, Homo sapiens
  chr17:72875511-72875749
  hypo
ccccagcccagccctcgactaccttcaggcacatgttatcagagagcctggggaatagatggtgttccacatggcagctgatgatcgagtggccgaacgcccagtccagcacgggcagccgggccaggttaagcacccccaggctcatcatgtgaatccgacggggcttgttgtcccgggagaacatgggcagtccgatgtgctgtgacagacacgtgggtcacgccgggcagcctgg

SEQ ID NO: 184484 - DNA, 769 bp, Homo sapiens; identical to SEQ ID NO: 129313
  chr17:72920263-72921032
  hypo

SEQ ID NO: 184485 - DNA, 30 bp, Homo sapiens
  chr17:72937707-72937737
  hypo
ggtgttcctgggtggcgccttcatctgcag

SEQ ID NO: 184486 - DNA, 30 bp, Homo sapiens
  chr17:72938054-72938084
  hypo
gatgtgagccacatccgctgcaagtcacag

SEQ ID NO: 184487 - DNA, 156 bp, Homo sapiens
  chr17:72940420-72940576
  hypo
acacattcacatacccgctgcatcagtcacgacacgcctgtgtactgtgagcattctatatactctgcttgcatttctcagaaaagctgtgcaaagagagaatttttgccaagtgacatcatggattttgaaattataaaataattcagggctggg

SEQ ID NO: 184488 - DNA, 905 bp, Homo sapiens; identical to SEQ ID NO: 54573
  chr17:72983605-72984510
  hypo

SEQ ID NO: 184489 - DNA, 30 bp, Homo sapiens; identical to SEQ ID NO: 93386
  chr17:72999556-72999586
  hypo

SEQ ID NO: 184490 - DNA, 44 bp, Homo sapiens; identical to SEQ ID NO: 93387
  chr17:72999879-72999923
  hypo

SEQ ID NO: 184491 - DNA, 30 bp, Homo sapiens; identical to SEQ ID NO: 93388
  chr17:73001498-73001528
  hypo

SEQ ID NO: 184492 - DNA, 121 bp, Homo sapiens
  chr17:73003499-73003620
  hypo
atgatagcggtttttcaaacttcccatgctccactcagccctctccagatttagtaatgtccatcctgaacttaagaattgctgtccaagaaaaaattagccaggcatggcggtggccgcc

SEQ ID NO: 184493 - DNA, 146 bp, Homo sapiens
  chr17:73003739-73003885
  hypo
gtctcaaaaaagaattgctgtccaagctcagatactggaagcctagaaacaggactgtggatcctgatcaaagggggcacctctagggtatcttccttcgcctcacactgccaacgctacccaccccttctcgcaccagcagcctg

SEQ ID NO: 184494 - DNA, 237 bp, Homo sapiens; identical to SEQ ID NO: 93389
  chr17:73016426-73016663
  hypo

SEQ ID NO: 184495 - DNA, 267 bp, Homo sapiens; identical to SEQ ID NO: 93390
  chr17:73016883-73017150
  hypo

SEQ ID NO: 184496 - DNA, 30 bp, Homo sapiens; identical to SEQ ID NO: 93391
  chr17:73031636-73031666
  hypo

SEQ ID NO: 184497 - DNA, 210 bp, Homo sapiens
  chr17:73055603-73055813
  hypo
gggccccgtgaagcacgtgtacagagtcctgcagtgtcaggaagaagagctcacgcagatggtgtccacgatgtccgacggctggaaattcgaacaggtacatctcttaacagagcagcaatcccaggccccgttcaaggggtctgcagctcttcaaacaatcagtgtggatggccaattaataaccacgggagacggctacggccaggt

SEQ ID NO: 184498 - DNA, 35 bp, Homo sapiens; identical to SEQ ID NO: 93393
  chr17:73067478-73067513
  hypo

SEQ ID NO: 184499 - DNA, 223 bp, Homo sapiens; identical to SEQ ID NO: 54578
  chr17:73073460-73073683
  hypo

SEQ ID NO: 184500 - DNA, 86 bp, Homo sapiens; identical to SEQ ID NO: 11496
  chr17:73073967-73074053
  hypo

SEQ ID NO: 184501 - DNA, 406 bp, Homo sapiens; identical to SEQ ID NO: 93396
  chr17:73075226-73075632
  hypo

SEQ ID NO: 184502 - DNA, 364 bp, Homo sapiens; identical to SEQ ID NO: 129325
  chr17:73084121-73084485
  hypo

SEQ ID NO: 184503 - DNA, 241 bp, Homo sapiens
  chr17:73086307-73086548
  hypo
tgctgggattacaggtgtgagccaccgtgtctggcagggctgaattttgaaagaccagttgactggagaaaccgctcgatgggaggggaggctggagagccgactgggcatccataccgtgtatgtgacctgggacttactgggagtgggagaggagacagggaaggccatgtctgcagtgggggtcccagagaggcgggggaagggggtcctcagaccttggtggcagagtttcttttct

SEQ ID NO: 184504 - DNA, 987 bp, Homo sapiens
  chr17:73089509-73090496
  hypo
atgccaaggccaacgcgtgggcctctggccacctcccaggggtggtgcccctctgtgacacctggtacttgggtatgaggaagggatggcttagctgcccagagaaggtggcaggtgggccaggagagacggacagcctgctgaccaccaggctccattctgtcccctccccaggcagcagccacattggcagtgaggccgtggcagcgtcggcagcagaggatgccccaggccctggagcgtgcagatggcagctgggcctgggtggtgctgctggccaccatggtgacccagggcctcaccctgggcttccccacgtgtatcggcatcttcttcactgaattgcaatgggagttccaggccagcaacagcgagacctcttggttcccctccatcctcacggctgtgctccacatggcaggtgagcggcctagggaggggccgatgagaaagtcctaggggttgcggggaagccacaacctccctggccttctgattccctctctctgaggccacaggctttgcctcctgggtgaattcctaaggtttcaccagatttcaccaggggcccctggctggaatccagctggactgggctggagccggggagagagtggggaggtgcctgggttgcaaagccaggcggagccttgcgtcctttctgtgggatccattccgacacaggcgtaggtgtgctggggcgctcagtgccaggctgggaagagcgctggggccagcccaccaagactctcctgctttccagctggctggtctctctgaacctcggttgcttcctctgcaatctgagggtgatgcccggcatcctgcccagctcccacatggaatagcagggaagaccactgtcttccctggaggtgctgggagctgggaaatgtatgcggctgtgaattattaatattttggagaccctcactagggcagggagtggcttcaggataggaaaggggacgcaaggaagacaccagg

SEQ ID NO: 184505 - DNA, 470 bp, Homo sapiens
  chr17:73090970-73091440
  hypo
actgcctcaccctgaccccagcgttgggagcagggcagagggagggttctctgcagtcgccgtggacacagggacctgccctcagctcctgggagctctccagggagactgcagagaccccggcctcggaggggcccggtggacagcagcccgagctgatggcccacaggcctctgcaggcgtgtgtctgctggccgcagctgcccatctccccggctacctcctggctactccctccacttgccaccagcagcctgcctattattccaggtcctgccctcaaactgggagggaggtgaggctcggagaaagcgccaccctcctgggtgagctctgaatctgccacatggcctctggcctgcagggttggggcagggagtgggaatcccagagggctgcttctcacacaggcagagcagggttcctgggccaggggctaggaaccgggcacccggcggggaacctactcc

SEQ ID NO: 184506 - DNA, 37 bp, Homo sapiens
  chr17:73094148-73094185
  hypo
cctggtgggacgcttcggctgccgagtgaccgtgatg

SEQ ID NO: 184507 - DNA, 44 bp, Homo sapiens; identical to SEQ ID NO: 93400
  chr17:73095831-73095875
  hypo

SEQ ID NO: 184508 - DNA, 352 bp, Homo sapiens
  chr17:73096165-73096517
  hypo
gcgggtgctggccaacgcgctggcctcgatgggcgtctccctgggcatcaccctctggccgctgctctcccgctaccttctggagaacctgggctggaggggtaccttccttgtcttcggcgggatctttctccactgctgcatctgcggggccatcataaggcctgtggccaccagtgtggcccctgagaccaaagaatgtcccccgccacctcccgagacacctgcacttggctgcctggctgcatgcggccggaccatccagcgccacctggccttcgacatcctgcggcacaacacaggctactgcgtgtacatactgggtgtgatgtggtccgtcctgggcttccca

SEQ ID NO: 184509 - DNA, 31 bp, Homo sapiens; identical to SEQ ID NO: 30699
  chr17:73096893-73096924
  hypo

SEQ ID NO: 184510 - DNA, 169 bp, Homo sapiens; identical to SEQ ID NO: 93403
  chr17:73100140-73100309
  hypo

SEQ ID NO: 184511 - DNA, 31 bp, Homo sapiens; identical to SEQ ID NO: 93404
  chr17:73101011-73101042
  hypo

SEQ ID NO: 184512 - DNA, 29 bp, Homo sapiens
  chr17:73115544-73115573
  hypo
tttctttttttttttttgagacggagttt

SEQ ID NO: 184513 - DNA, 88 bp, Homo sapiens; identical to SEQ ID NO: 93406
  chr17:73115872-73115960
  hypo

SEQ ID NO: 184514 - DNA, 31 bp, Homo sapiens; identical to SEQ ID NO: 30700
  chr17:73117396-73117427
  hypo

SEQ ID NO: 184515 - DNA, 23 bp, Homo sapiens
  chr17:73119991-73120014
  hypo
gcgaggctcatactcaaaaaaaa

SEQ ID NO: 184516 - DNA, 20 bp, Homo sapiens
  chr17:73124451-73124471
  hypo
accaccgtgcccgggccggc

SEQ ID NO: 184517 - DNA, 290 bp, Homo sapiens
  chr17:73124802-73125092
  hypo
caacaaggagcacatcctgcacgcaggaggtgtcccactcatcatcaactgcctatccagccccaatgaggagacggtgctgtctgccatcaccacgctcatgcacctgagcccgccgggccgcagctttctcccagagctgaccgccacgcccgtggtgcagtgcatgcttcgcttctccctctcggccagcgccaggctccggaacctggcacagatcttcctggaggacttctgctccccccgccaggtggccgaggcccgcagccggcaggcgcactctgccctgg

SEQ ID NO: 184518 - DNA, 30 bp, Homo sapiens
  chr17:73128827-73128857
  hypo
aggtgcggtggctcacgcctataatcccag

SEQ ID NO: 184519 - DNA, 222 bp, Homo sapiens; identical to SEQ ID NO: 93410
  chr17:73131494-73131716
  hypo

SEQ ID NO: 184520 - DNA, 162 bp, Homo sapiens; identical to SEQ ID NO: 93411
  chr17:73132151-73132313
  hypo

SEQ ID NO: 184521 - DNA, 30 bp, Homo sapiens
  chr17:73132858-73132888
  hypo
acaggcgtgagccaccgcgcctggcccaag

SEQ ID NO: 184522 - DNA, 121 bp, Homo sapiens; identical to SEQ ID NO: 30704
  chr17:73135932-73136053
  hypo

SEQ ID NO: 184523 - DNA, 31 bp, Homo sapiens; identical to SEQ ID NO: 30705
  chr17:73136292-73136323
  hypo

SEQ ID NO: 184524 - DNA, 24 bp, Homo sapiens
  chr17:73138376-73138400
  hypo
gggcctggtggctcacgcctgtaa

SEQ ID NO: 184525 - DNA, 24 bp, Homo sapiens
  chr17:73138639-73138663
  hypo
gctaaactccgtcaaggggggagg

SEQ ID NO: 184526 - DNA, 33 bp, Homo sapiens; identical to SEQ ID NO: 93415
  chr17:73148047-73148080
  hypo

SEQ ID NO: 184527 - DNA, 41 bp, Homo sapiens; identical to SEQ ID NO: 93416
  chr17:73151711-73151752
  hypo

SEQ ID NO: 184528 - DNA, 23 bp, Homo sapiens
  chr17:73153031-73153054
  hypo
ccggcccaatcttcccactctta

SEQ ID NO: 184529 - DNA, 121 bp, Homo sapiens; identical to SEQ ID NO: 93418
  chr17:73154764-73154885
  hypo

SEQ ID NO: 184530 - DNA, 121 bp, Homo sapiens
  chr17:73172029-73172150
  hypo
taagtcattcttttagaaagctttactgcttttcagacacagctactataatgttaaatagaacataccttgagacaaatatgcatttaaatgagttagacaaggaaatgaaatttttttt

SEQ ID NO: 184531 - DNA, 42 bp, Homo sapiens; identical to SEQ ID NO: 30708
  chr17:73179829-73179871
  hypo

SEQ ID NO: 184532 - DNA, 181 bp, Homo sapiens; identical to SEQ ID NO: 30709
  chr17:73209660-73209841
  hypo

SEQ ID NO: 184533 - DNA, 155 bp, Homo sapiens; identical to SEQ ID NO: 30710
  chr17:73215294-73215449
  hypo

SEQ ID NO: 184534 - DNA, 259 bp, Homo sapiens
  chr17:73236161-73236420
  hypo
tgaagaagtccaggtcggactgttccctctatgaacaacagaaagggtggtgagccgagggcgggtggggagggcctgccgctggaacggggcgcagccctccaaggactgcacggaagacagccccggaggcactcattgttccccgctgcagctggcacgctctggagggaaggacagctaactgcagcccaggagacatgacgctggaaagtggaggtccttggcacagtagtgctgtcaccgatcctgtgcccct

SEQ ID NO: 184535 - DNA, 30 bp, Homo sapiens
  chr17:73236655-73236685
  hypo
tccatgatgcagaagcggggggcctgtggg

SEQ ID NO: 184536 - DNA, 30 bp, Homo sapiens
  chr17:73237067-73237097
  hypo
ggacaaactgttggtcgtgtccagctccgc

SEQ ID NO: 184537 - DNA, 152 bp, Homo sapiens; identical to SEQ ID NO: 30711
  chr17:73241506-73241658
  hypo

SEQ ID NO: 184538 - DNA, 32 bp, Homo sapiens; identical to SEQ ID NO: 30712
  chr17:73241837-73241869
  hypo

SEQ ID NO: 184539 - DNA, 39 bp, Homo sapiens
  chr17:73242141-73242180
  hypo
cctcagccatcagtgcgacaccttcgctagtgactggca

SEQ ID NO: 184540 - DNA, 183 bp, Homo sapiens; identical to SEQ ID NO: 30713
  chr17:73242493-73242676
  hypo

SEQ ID NO: 184541 - DNA, 79 bp, Homo sapiens
  chr17:73245038-73245117
  hypo
ccctgcttcccaggtcggggctcggcctccccggcagtgtttctgttgtggctgcaaggggaagattctgatggtttag

SEQ ID NO: 184542 - DNA, 18 bp, Homo sapiens
  chr17:73245416-73245434
  hypo
ccccgcctaggttcctct

SEQ ID NO: 184543 - DNA, 215 bp, Homo sapiens; identical to SEQ ID NO: 93427
  chr17:73274192-73274407
  hypo

SEQ ID NO: 184544 - DNA, 398 bp, Homo sapiens
  chr17:73311548-73311946
  hypo
ctctgtctcaaaaaaaaaaaaaagaaaaaaaaagtatttccaagacgcataaaacaggtccactgtcattttttccagttatccaggaacttccataaagcgaacgttttgggctgaaggtcacccaccccatgaacagtcaggtggaactagtgcccagggaaggcaggcagcctgcgccatcatggcctttggctcagaggccacctaagcagccccgcgctgtgggtcaccatctcctccacactcaagtctgaaggtgagcctgtcaggggctcccagctcactgggtggagggaagcgtgtcagggaggggtggggggggcgtgccctgaagagcgaggccatgcgcctacctccagcttttcccctgacacactgagcgactcccggctgca

SEQ ID NO: 184545 - DNA, 29 bp, Homo sapiens
  chr17:73352189-73352218
  hypo
caggcatgagccaccgcacctggccctat

SEQ ID NO: 184546 - DNA, 84 bp, Homo sapiens; identical to SEQ ID NO: 11499
  chr17:73422367-73422451
  hypo

SEQ ID NO: 184547 - DNA, 23 bp, Homo sapiens
  chr17:73425306-73425329
  hypo
gggcacagtggctcacgcctgta

SEQ ID NO: 184548 - DNA, 203 bp, Homo sapiens; identical to SEQ ID NO: 93431
  chr17:73465134-73465337
  hypo

SEQ ID NO: 184549 - DNA, 31 bp, Homo sapiens; identical to SEQ ID NO: 30719
  chr17:73474683-73474714
  hypo

SEQ ID NO: 184550 - DNA, 143 bp, Homo sapiens; identical to SEQ ID NO: 93433
  chr17:73498112-73498255
  hypo

SEQ ID NO: 184551 - DNA, 30 bp, Homo sapiens; identical to SEQ ID NO: 129342
  chr17:73510678-73510708
  hypo

SEQ ID NO: 184552 - DNA, 484 bp, Homo sapiens; identical to SEQ ID NO: 129343
  chr17:73511001-73511485
  hypo

SEQ ID NO: 184553 - DNA, 30 bp, Homo sapiens
  chr17:73517398-73517428
  hypo
ctgtcctcttggcccgtttccttacacatc

SEQ ID NO: 184554 - DNA, 411 bp, Homo sapiens; identical to SEQ ID NO: 93435
  chr17:73517992-73518403
  hypo

SEQ ID NO: 184555 - DNA, 28 bp, Homo sapiens
  chr17:73532529-73532557
  hypo
agtcccacctgcctgtctccccgccttt

SEQ ID NO: 184556 - DNA, 77 bp, Homo sapiens
  chr17:73532630-73532707
  hypo
cgcctggtgagcaccggaacattccaccagcaggacagggctggacccaccctcccgcctgaccatgcctggggcct

SEQ ID NO: 184557 - DNA, 30 bp, Homo sapiens; identical to SEQ ID NO: 93436
  chr17:73542408-73542438
  hypo

SEQ ID NO: 184558 - DNA, 100 bp, Homo sapiens
  chr17:73543233-73543333
  hypo
agagagcaaggacatcgccccgggggtcctgagagggagacgtcttgtttctttggcttcagtacttccagaggatctgtgattgcgaacagtctctgaa

SEQ ID NO: 184559 - DNA, 365 bp, Homo sapiens
  chr17:73545957-73546322
  hypo
cagagcccaggagagacgggccttctcccctactccaggctaacgttgcagtctggcggcttctgcaaatctttgctctcctttcccaacccccctgtcaaaagagttcattgttctctcctcccttggcagaggtcacctgagccaggtatcagatgtgggcggggccgggtaggctggatgccgcgcttcggaggccccagtggctgccaggcagctttggtcagcctcctggtttgaatctgaggagagatagctagggtcctagaatagctggggagggctggtcttggaattccttgaccacccaggggctatgccccgtcccgccctctgtcctgagtgcagccgcgattcagggttgc

SEQ ID NO: 184560 - DNA, 30 bp, Homo sapiens; identical to SEQ ID NO: 93438
  chr17:73552095-73552125
  hypo

SEQ ID NO: 184561 - DNA, 30 bp, Homo sapiens; identical to SEQ ID NO: 93439
  chr17:73561653-73561683
  hypo

SEQ ID NO: 184562 - DNA, 30 bp, Homo sapiens; identical to SEQ ID NO: 93440
  chr17:73566463-73566493
  hypo

SEQ ID NO: 184563 - DNA, 51 bp, Homo sapiens; identical to SEQ ID NO: 93441
  chr17:73569824-73569875
  hypo

SEQ ID NO: 184564 - DNA, 30 bp, Homo sapiens
  chr17:73571041-73571071
  hypo
ggtgcacagggccccgccaggggctggggg

SEQ ID NO: 184565 - DNA, 30 bp, Homo sapiens; identical to SEQ ID NO: 93442
  chr17:73580927-73580957
  hypo

SEQ ID NO: 184566 - DNA, 31 bp, Homo sapiens; identical to SEQ ID NO: 93443
  chr17:73581211-73581242
  hypo

SEQ ID NO: 184567 - DNA, 94 bp, Homo sapiens
  chr17:73583945-73584039
  hypo
gagggggtcaggacccgccgccttctgcattattgatggtcctgtaaggcgggcacctcggggagtagagcctgtagcccctgcgagagcagag

SEQ ID NO: 184568 - DNA, 79 bp, Homo sapiens; identical to SEQ ID NO: 129350
  chr17:73584287-73584366
  hypo

SEQ ID NO: 184569 - DNA, 192 bp, Homo sapiens; identical to SEQ ID NO: 129351
  chr17:73584937-73585129
  hypo

SEQ ID NO: 184570 - DNA, 811 bp, Homo sapiens; identical to SEQ ID NO: 129352
  chr17:73585690-73586501
  hypo

SEQ ID NO: 184571 - DNA, 30 bp, Homo sapiens; identical to SEQ ID NO: 93445
  chr17:73588629-73588659
  hypo

SEQ ID NO: 184572 - DNA, 137 bp, Homo sapiens
  chr17:73590838-73590975
  hypo
aggtggccctagagacgggtgagagtcagagcagggcccgaggcacggctctatgtggctcacccacccgccatgcctacagggacgccctggccaaggcactgtattcccgcctcttccaccggcttctgaggaga

SEQ ID NO: 184573 - DNA, 31 bp, Homo sapiens; identical to SEQ ID NO: 93446
  chr17:73596005-73596036
  hypo

SEQ ID NO: 184574 - DNA, 30 bp, Homo sapiens
  chr17:73597599-73597629
  hypo
cccgtgttcaccgtgcgacattatgcaggg

SEQ ID NO: 184575 - DNA, 437 bp, Homo sapiens
  chr17:73606093-73606530
  hypo
ctattcttttcctgtcgtttctgtgaagcatccagggcttctctggtccaaagtcagtttttacatgaatgtcaggcttaagggattccagtgccaggcaggaagcataagtttggactcttcatttcgcccccgctctttcccggcctccaggaagcggtacctccggcggcgggcagctttgggacagctgaacaccatcctgctggtggcccagcccctgctccagaggcggcagagactgcaggtgcaggggcttgggtggggcggttcagggtagaagccaggctgcctgagctggccgagctggccaaatcccagcagcgttgaccctctcagcccggcctcgcacgggctgtggcttcagacacagtgctccttgaactcatcccttttccctccggccggggtaggccggggcccttgggaggtgctgt

SEQ ID NO: 184576 - DNA, 57 bp, Homo sapiens
  chr17:73607688-73607745
  hypo
ggcgcttggagatcccggctgagctggccgtcatgctgaagacggcggaaagtgagt

SEQ ID NO: 184577 - DNA, 304 bp, Homo sapiens
  chr17:73607993-73608297
  hypo
tcaccgagtgcctgccgcctgaggttcctgcccggcccagcctgactctcccagcagacattgacctgttccctttctccagcttcgtcgccatcggctttcaggtgggcgcccaggcctaagctcttcccgctggcctcaccgctctgagttagcacctgcctgacagatgctgcgtttttttccccgctgtcagctcttgccctccttcctccccagcctttggggctgtgagtagcgctgaattgctctgaaaataaccgttgaatgtaattgtctcaccatagagcgttactggagataa

SEQ ID NO: 184578 - DNA, 79 bp, Homo sapiens; identical to SEQ ID NO: 93449
  chr17:73611622-73611701
  hypo

SEQ ID NO: 184579 - DNA, 1149 bp, Homo sapiens
  chr17:73612816-73613965
  hypo
tgtaccagagccgcccgggccccgtgcctgtgcccgtgcagccatccaggtgggcccccacggggaggtggccagggctgtcccgctcctcggggaatcaccctatgaacttagtgacctcttgcttctcccacgaggcctcccaaagctttcctgaggaaaatcgaccccaaggacgaggctctggccaagctgggtatcaacggtgcccactcgtccccgccggtgagcaccccagcctgtctcccccagagtgtgtgctgctgcactggggagctcaaggctctctggggcgaacttggccttgtgctgtgactcagcccgtgtactttctccgtatccccccagatgctgtcccccagcccaggaaagggccccccgccagctgtggctcctcgacccaaggccccgctacagcttgggccctctagctccatcaaggaaaagcaggggccccttctggacctgtttggccagaagctgcctattgcccacacacccccacctccaccagcgccaccactgcctctgcccgaggacccagggaccctttcagcagagcgtcgttgtaaggaaccacatttctcctgcgccgtgggcttcactggggcagaggcagggttcgcacagactctcggtgcccagggctgaaggcatttctgcgtggctgaggccagctgttcgggcttctggactttggagccatacgtagctggggagtcccagcttccgcgttcccacccagggcagggcctgggcatctttggggctgtcatcgagaggctgtcacacacagggtgttgtccctgacacatacccgacagctctgtgaggaagttagtggccctggctgacatggtcatagaagacccacgagcctcacggacgccagggaaagtttagggcccaaaatggaggcaggagatggtgccatggaaggagtaaggcagctggaggttgggagagccgggcccttggaaggctcgtggggatgaaggtcttccctcccgtgcccccatcactctggctctgcagcccctcactgaggctcctcaccccctcctctctgccaggcttgacacagcccgtggaggaccagggggtctccacccagctactcgcgccctctggcagcgtgtgcttctccta

SEQ ID NO: 184580 - DNA, 994 bp, Homo sapiens
  chr17:73615716-73616710
  hypo
agcaggacccaggagactgcccgagacccaccaccttcctgtagggcgagagtggcagcgacgtgcagctgttagccgtgtcccaccgtgggctgcgactgctcaaggtgacccaaggccccggcctccgccccgaccagctgaagattctctgctcatacaggtgcgctagcccacgaccctgggctagaggtgggggcaggtggcaaggtgacctcagttcatgcccgatccctgcgcagctttgcggaggtgctgggtgtggagtgccggggcggctccaccctggagctgtcactgaagagcgagcagctggtgctgcacacagcccgggcaagggccatcgaggcgctggttgagctattcctgaatgagcttaagaaggtaagtgtggggcacgggttgagaggccgggcagacagccctcaccgatgctgcatctccctgtccgtcttccctgtgggggcaggggctgggagtttgggccaaatccctggaagtctggggtgctaggtggaggggcaggccagcagggggagcaggtgggcaggcaggacagggaggcacaggcagacttgctgctccaggccctcgcctgcttgcccacaggactccggctatgtcatcgccctgcgcagctacatcactgacaactgcagcctcctcagcttccaccgtggggacctcatcaagctgctgccggtggccaccctggagccaggtatcgccagaggccggcaggggctcacacagggagggcatccacttggcagaggctgcccgggggcagagggtccagtgggtgagccacatccctgggtgccttccaggctggcagtttggctctgccgggggccgttccggactctttcctgccgacatagtgcagccggctgccgctcccgacttttccttctccaaggagcagaggagtggctggcacaagggtcagctgtccaacggggaaccagggctggctcggtgggacagggcc

SEQ ID NO: 184581 - DNA, 30 bp, Homo sapiens
  chr17:73618103-73618133
  hypo
gaccagtccaagccccggggcaaggatgag

SEQ ID NO: 184582 - DNA, 39 bp, Homo sapiens
  chr17:73618511-73618550
  hypo
ggcaccatcacgcaccgggaccagcgtggctgagcctag

SEQ ID NO: 184583 - DNA, 22 bp, Homo sapiens
  chr17:73619123-73619145
  hypo
agcaggggccgggcgcggcggc

SEQ ID NO: 184584 - DNA, 30 bp, Homo sapiens; identical to SEQ ID NO: 93452
  chr17:73623167-73623197
  hypo

SEQ ID NO: 184585 - DNA, 30 bp, Homo sapiens; identical to SEQ ID NO: 93453
  chr17:73625478-73625508
  hypo

SEQ ID NO: 184586 - DNA, 30 bp, Homo sapiens; identical to SEQ ID NO: 93454
  chr17:73627728-73627758
  hypo

SEQ ID NO: 184587 - DNA, 191 bp, Homo sapiens; identical to SEQ ID NO: 30728
  chr17:73635124-73635315
  hypo

SEQ ID NO: 184588 - DNA, 409 bp, Homo sapiens; identical to SEQ ID NO: 93456
  chr17:73635982-73636391
  hypo

SEQ ID NO: 184589 - DNA, 30 bp, Homo sapiens; identical to SEQ ID NO: 93457
  chr17:73636707-73636737
  hypo

SEQ ID NO: 184590 - DNA, 113 bp, Homo sapiens; identical to SEQ ID NO: 93458
  chr17:73638312-73638425
  hypo

SEQ ID NO: 184591 - DNA, 235 bp, Homo sapiens
  chr17:73639434-73639669
  hypo
cagccctgggcacagacaggccgaatggccgctctagggcaggcggtgaacaactgctgagtccgcacaggattcggtccctgccctcacaggactcactcctccctgctccttggccaactggcacacaccaggcccggctgtcgggccaactccttcacaggcttcaaacccactgagattaacaaaccagacctgctctccgacagcagcctggcccgctcctttaagaggc

SEQ ID NO: 184592 - DNA, 30 bp, Homo sapiens
  chr17:73641469-73641499
  hypo
actagctgatgacctcggctaagttattta

SEQ ID NO: 184593 - DNA, 157 bp, Homo sapiens
  chr17:73680636-73680793
  hypo
tattgagaatgcccaagcctacgtagcattcggcacttccctgcgctcaacacgatggatggtcttctttaggcttttcctcaacaacactagggttgccttgcacagctgggagacatggaatttccagaagctcgtggagtggctgtgctgggaa

SEQ ID NO: 184594 - DNA, 444 bp, Homo sapiens
  chr17:73691883-73692327
  hypo
actgcagccccttgacagagccgagcatgcacaccctgtctgtgccctccagggcctcgcagatgcccacggctgagcctggagcagtggtgctggtgtggcagtgcacgtgggttctctctgtcactcaggagctggagatactccaccgtcccctggggccccccagctcgctcactccctgccatcccataagcccgtccaactagctgttcctgcacagatccctccctggcagctgtgggtactctgggtgttttctgacttgggcacgcaccagggcaagtcacgctgacagctggcttctcaagtcctaagtgcggctgcctctgagaacacacccatcagacccaggcagcagccacagacccagcgctgcttccaagagactgtggacacatcgctttactggcttgaggctctgtctgcttacaagaaatgtgg

SEQ ID NO: 184595 - DNA, 36 bp, Homo sapiens
  chr17:73693125-73693161
  hypo
ggattacaggtgtgagccaccgcgcccggcccctcc

SEQ ID NO: 184596 - DNA, 47 bp, Homo sapiens
  chr17:73718994-73719041
  hypo
agtaggtgtcctgagcgctgggcccagcccatcgtgatacatctaat

SEQ ID NO: 184597 - DNA, 221 bp, Homo sapiens
  chr17:73726224-73726445
  hypo
cccatgttgggacccgcgttccccgtcctacacgacgccgtgatgcgtgtcagcaggcagcctgctcagtgggcacgccccgccttgccttccccagagggacattggctggcgcccggacagcacccacctgctggtcttctccaccgagtcagccttccactatgaggctgatggcgccaacgtgctggctggcatcatgagccgcaacgatgaacggt

SEQ ID NO: 184598 - DNA, 30 bp, Homo sapiens; identical to SEQ ID NO: 93463
  chr17:73727942-73727972
  hypo

SEQ ID NO: 184599 - DNA, 30 bp, Homo sapiens; identical to SEQ ID NO: 93464
  chr17:73729640-73729670
  hypo

SEQ ID NO: 184600 - DNA, 36 bp, Homo sapiens; identical to SEQ ID NO: 93465
  chr17:73736027-73736063
  hypo

SEQ ID NO: 184601 - DNA, 30 bp, Homo sapiens; identical to SEQ ID NO: 93466
  chr17:73736916-73736946
  hypo

SEQ ID NO: 184602 - DNA, 64 bp, Homo sapiens; identical to SEQ ID NO: 93467
  chr17:73739825-73739889
  hypo

SEQ ID NO: 184603 - DNA, 30 bp, Homo sapiens; identical to SEQ ID NO: 30733
  chr17:73748329-73748359
  hypo

SEQ ID NO: 184604 - DNA, 72 bp, Homo sapiens; identical to SEQ ID NO: 93469
  chr17:73753019-73753091
  hypo

SEQ ID NO: 184605 - DNA, 30 bp, Homo sapiens; identical to SEQ ID NO: 93470
  chr17:73753785-73753815
  hypo

SEQ ID NO: 184606 - DNA, 30 bp, Homo sapiens; identical to SEQ ID NO: 93471
  chr17:73754545-73754575
  hypo

SEQ ID NO: 184607 - DNA, 30 bp, Homo sapiens
  chr17:73768090-73768120
  hypo
ttctccacgggagtccgtgtctgtcttcta

SEQ ID NO: 184608 - DNA, 31 bp, Homo sapiens; identical to SEQ ID NO: 93472
  chr17:73785418-73785449
  hypo

SEQ ID NO: 184609 - DNA, 50 bp, Homo sapiens
  chr17:73792090-73792140
  hypo
ctgtgtgtgtgtgcacgggcgtgtgtgcccaggtgcggtagggagtttca

SEQ ID NO: 184610 - DNA, 37 bp, Homo sapiens; identical to SEQ ID NO: 30734
  chr17:73800543-73800580
  hypo

SEQ ID NO: 184611 - DNA, 39 bp, Homo sapiens
  chr17:73805938-73805977
  hypo
accagcggcgccgccggtccatccgccgtcgggacggca

SEQ ID NO: 184612 - DNA, 214 bp, Homo sapiens
  chr17:73808631-73808845
  hypo
agaaaagatcctcagcgaggagcctcggtggcaaggtacaggcatccacacctcggccgcgccctccctataatcctgctcatagctgccctggggatttggctcaccaccacctactgcctgctctagccgaggccccgacctggcccgcatcccaccctacacccaccattcaaaaggcgcctctaggggcgttttccctgacacatcatgt

SEQ ID NO: 184613 - DNA, 277 bp, Homo sapiens
  chr17:73811152-73811429
  hypo
gagatgactaagccagcgcactcatgctggaggaaggggagcctgcccggccttccctcagggcctgagcctgacttgcctgtgctctgccctccagatctacaagtccaccaagtgcaacgacatgcagcagtcgggcagctgtccccgaggacccttctgcgcctttgcccacgtagaacgtatgctgttcccattgccccggggcagtgccctctcccacccctccctcgcctggctagctcaggcttaggccggggatggcccctggcagtat

SEQ ID NO: 184614 - DNA, 244 bp, Homo sapiens
  chr17:73821493-73821737
  hypo
acccggaggggctccgtttgcattccttggtgctctctgagtgcagctggtgtcccgccctgttctgggcggacgcctgtgtgcgtgtgtgtgtgcctgtccagtgtatattgtgtcttagcttccattttaaaaattgttctgtacagagagagatgcagcaggggcgggagggcagagtgggcggaggggagcagccgcacccccagcaccgggtgtctgcggtaggaacaagagggctgag

SEQ ID NO: 184615 - DNA, 45 bp, Homo sapiens; identical to SEQ ID NO: 30736
  chr17:73822057-73822102
  hypo

SEQ ID NO: 184616 - DNA, 30 bp, Homo sapiens; identical to SEQ ID NO: 30737
  chr17:73825212-73825242
  hypo

SEQ ID NO: 184617 - DNA, 166 bp, Homo sapiens; identical to SEQ ID NO: 30738
  chr17:73830727-73830893
  hypo

SEQ ID NO: 184618 - DNA, 421 bp, Homo sapiens
  chr17:73836060-73836481
  hypo
ggcagccccggctgcgcccagccccaggagggcaatacctcgtgctgggtgacctcgtgggacacaagctgctgcaggaggtggaggtgcacggtgtagctcggctgcgagcggctggccgaagtggctctctgcaatgaggcctctgtgagcagacagggcctcacactgggtgcagccagccccgcaacccagcagaccgccgcaagagctgggcatggccactggcccagtacccgacctacccgcttatggatgagttggaactggaggtggcactggcctcggtctgggtaggtctcagtgcggggttccagggggtaccactggtcctctcggcagcgcaggtcctgacaggcggggatgcccagcccgtgagcgtcagaacctcatagagtcggggcagcggaggcgacaggag

SEQ ID NO: 184619 - DNA, 30 bp, Homo sapiens
  chr17:73836711-73836741
  hypo
gctggaatccacccccggccgcagccacct

SEQ ID NO: 184620 - DNA, 316 bp, Homo sapiens; identical to SEQ ID NO: 93481
  chr17:73870803-73871119
  hypo

SEQ ID NO: 184621 - DNA, 46 bp, Homo sapiens; identical to SEQ ID NO: 54605
  chr17:73874666-73874712
  hypo

SEQ ID NO: 184622 - DNA, 20 bp, Homo sapiens
  chr17:73878573-73878593
  hypo
gccaccgcgcccagcctggc

SEQ ID NO: 184623 - DNA, 66 bp, Homo sapiens; identical to SEQ ID NO: 93483
  chr17:73887193-73887259
  hypo

SEQ ID NO: 184624 - DNA, 30 bp, Homo sapiens; identical to SEQ ID NO: 93484
  chr17:73887636-73887666
  hypo

SEQ ID NO: 184625 - DNA, 161 bp, Homo sapiens
  chr17:73890916-73891077
  hypo
ggctgcggggggtccggccccctcctgctcctggcggcagcacccacttgaggaggtgaccctcactcatggtgcacaagctgcaaacacaacagcccttggtctggcagaagagctccagcagctgcccggggcggggtcagcgcgcggcagggctgggg

SEQ ID NO: 184626 - DNA, 30 bp, Homo sapiens
  chr17:73894876-73894906
  hypo
tttactcttgctgccgatcaatcccatgct

SEQ ID NO: 184627 - DNA, 133 bp, Homo sapiens
  chr17:73895616-73895749
  hypo
ctcagagaagtcaatcggctggtcctgcttgaagagcaggaaggcaagacggtggatgccggagcctcgggcagggaagggggggaggtagggacacgtcacctgtccttcagccacccggttacccgggatg

SEQ ID NO: 184628 - DNA, 21 bp, Homo sapiens
  chr17:73902882-73902903
  hypo
tttttgagatggagtttctgt

SEQ ID NO: 184629 - DNA, 18 bp, Homo sapiens
  chr17:73904255-73904273
  hypo
atatttctctctctaaaa

SEQ ID NO: 184630 - DNA, 32 bp, Homo sapiens; identical to SEQ ID NO: 93489
  chr17:73904784-73904816
  hypo

SEQ ID NO: 184631 - DNA, 30 bp, Homo sapiens; identical to SEQ ID NO: 30742
  chr17:73906660-73906690
  hypo

SEQ ID NO: 184632 - DNA, 111 bp, Homo sapiens; identical to SEQ ID NO: 93491
  chr17:73910327-73910438
  hypo

SEQ ID NO: 184633 - DNA, 171 bp, Homo sapiens; identical to SEQ ID NO: 93492
  chr17:73911101-73911272
  hypo

SEQ ID NO: 184634 - DNA, 30 bp, Homo sapiens; identical to SEQ ID NO: 93493
  chr17:73913886-73913916
  hypo

SEQ ID NO: 184635 - DNA, 30 bp, Homo sapiens; identical to SEQ ID NO: 93494
  chr17:73914267-73914297
  hypo

SEQ ID NO: 184636 - DNA, 45 bp, Homo sapiens; identical to SEQ ID NO: 93495
  chr17:73915887-73915932
  hypo

SEQ ID NO: 184637 - DNA, 30 bp, Homo sapiens
  chr17:73917026-73917056
  hypo
agaacaggaccctgcggccctgctttctga

SEQ ID NO: 184638 - DNA, 31 bp, Homo sapiens; identical to SEQ ID NO: 93496
  chr17:73921368-73921399
  hypo

SEQ ID NO: 184639 - DNA, 129 bp, Homo sapiens; identical to SEQ ID NO: 93497
  chr17:73923088-73923217
  hypo

SEQ ID NO: 184640 - DNA, 30 bp, Homo sapiens; identical to SEQ ID NO: 30744
  chr17:73941135-73941165
  hypo

SEQ ID NO: 184641 - DNA, 21 bp, Homo sapiens
  chr17:73977821-73977842
  hypo
aaatataagctgggtgcggtg

SEQ ID NO: 184642 - DNA, 30 bp, Homo sapiens; identical to SEQ ID NO: 93500
  chr17:73996852-73996882
  hypo

SEQ ID NO: 184643 - DNA, 30 bp, Homo sapiens; identical to SEQ ID NO: 93501
  chr17:74002929-74002959
  hypo

SEQ ID NO: 184644 - DNA, 372 bp, Homo sapiens
  chr17:74003301-74003673
  hypo
tccttgtagctcagccgttccttggagatggggtctgtcaaatccttctcgtagctggactcgtcctgcaggagctgggccagctcttcactgatcatcccggagaggagggcctgctggatggggatgcggcctgtcctcttggggtcgatgagccccccggtcaggtgctgcacctgcaggtgtgggagcacgctctcccggggcatccagcccttctggacggcctcgcccaccgagagcctcttcttggtgacggggtcctcgatgccggtgaaggccttctgggcgttaagcagcctctgtgtggaggtgttctcgatcaggcccctctccatcgccttgtgcacagagtagcgctcacggctgagc

SEQ ID NO: 184645 - DNA, 536 bp, Homo sapiens
  chr17:74003893-74004429
  hypo
tggagatgatagagccgatggagagtgaggagcttggcttggtctccccagctacaagcagcgcaaactcggagatgggcaggtggccgtccttgtacagatggtactcctccttagagatgcgccggcagcggagggcggcctcgatggagtactgcttcccgctcttgcggtccaggagcacagactcctccccacagggccccgaggtggtgacctcctcccagtcacactcgagctcctgcagctgcaagtactggcccctgtcgatgatgcccctcttgtaggcctcgtatggggacatgtccttccccgtctcgggttccaggatggagatcttggtggaaaggttggtctctcgcgtctgggtctcctggctgagctcctcccggctcaccttggcgtggaggtcccggagcgtccgctccttctcgtagatctggtccttctcgcggaggatggccgcctccagccgcgagagctcctggccccgctgggccgccttctgtcgctcgctctccgtcttctggctgagc

SEQ ID NO: 184646 - DNA, 30 bp, Homo sapiens
  chr17:74004697-74004727
  hypo
ggtccttctgcacccggatcacttccttgt

SEQ ID NO: 184647 - DNA, 501 bp, Homo sapiens; identical to SEQ ID NO: 93502
  chr17:74005165-74005666
  hypo

SEQ ID NO: 184648 - DNA, 103 bp, Homo sapiens; identical to SEQ ID NO: 93503
  chr17:74008700-74008803
  hypo

SEQ ID NO: 184649 - DNA, 30 bp, Homo sapiens; identical to SEQ ID NO: 93504
  chr17:74011601-74011631
  hypo

SEQ ID NO: 184650 - DNA, 224 bp, Homo sapiens; identical to SEQ ID NO: 93505
  chr17:74013673-74013897
  hypo

SEQ ID NO: 184651 - DNA, 37 bp, Homo sapiens
  chr17:74014164-74014201
  hypo
ccatcacagaccagtcggaagtcggaatctactcctt

SEQ ID NO: 184652 - DNA, 30 bp, Homo sapiens
  chr17:74014574-74014604
  hypo
caggcggcgggagcacgcttggtctccccg

SEQ ID NO: 184653 - DNA, 30 bp, Homo sapiens; identical to SEQ ID NO: 93507
  chr17:74015074-74015104
  hypo

SEQ ID NO: 184654 - DNA, 156 bp, Homo sapiens; identical to SEQ ID NO: 93508
  chr17:74019374-74019530
  hypo

SEQ ID NO: 184655 - DNA, 384 bp, Homo sapiens
  chr17:74021478-74021862
  hypo
aacgagtggatcgcacgtgaggggagagccaacagggccctgaggacggagctgccccaggccaggagcgcactgctggggagcctgcctggacagtgggagctgcaggtgctgggccctgggcgcccctcctcaggtcccgcctcctgggatggctgctcccaccgggagctgcacactccaccctgggtggggctcaggtgccccagggaggacaggtcactcagcgagagtgttagctgagagtcttaaccactgtctttcccgtccgcccagacacccagcctcggtgtctgttggtgccttgatccctatcggggtaatgggcacccccactcccacaccagcctttcatccctgaggtcatctcgacaccctggaccc

SEQ ID NO: 184656 - DNA, 22 bp, Homo sapiens
  chr17:74022590-74022612
  hypo
cggccatgaacccctaactctt

SEQ ID NO: 184657 - DNA, 377 bp, Homo sapiens; identical to SEQ ID NO: 93510
  chr17:74028158-74028535
  hypo

SEQ ID NO: 184658 - DNA, 30 bp, Homo sapiens; identical to SEQ ID NO: 93511
  chr17:74035601-74035631
  hypo

SEQ ID NO: 184659 - DNA, 33 bp, Homo sapiens
  chr17:74040831-74040864
  hypo
tttgagatggagtttcgctcttgtctcccaggc

SEQ ID NO: 184660 - DNA, 32 bp, Homo sapiens
  chr17:74041103-74041135
  hypo
tgagccaccgcgcccagcgaggaagccaagtt

SEQ ID NO: 184661 - DNA, 30 bp, Homo sapiens; identical to SEQ ID NO: 30749
  chr17:74041568-74041598
  hypo

SEQ ID NO: 184662 - DNA, 227 bp, Homo sapiens; identical to SEQ ID NO: 93513
  chr17:74042042-74042269
  hypo

SEQ ID NO: 184663 - DNA, 171 bp, Homo sapiens; identical to SEQ ID NO: 93514
  chr17:74046448-74046619
  hypo

SEQ ID NO: 184664 - DNA, 206 bp, Homo sapiens; identical to SEQ ID NO: 30751
  chr17:74047791-74047997
  hypo

SEQ ID NO: 184665 - DNA, 45 bp, Homo sapiens
  chr17:74049484-74049529
  hypo
ggttggagcaaccggcgttcaagaaaagagcgaacttcgtcttac

SEQ ID NO: 184666 - DNA, 30 bp, Homo sapiens; identical to SEQ ID NO: 30753
  chr17:74050000-74050030
  hypo

SEQ ID NO: 184667 - DNA, 30 bp, Homo sapiens; identical to SEQ ID NO: 30754
  chr17:74050272-74050302
  hypo

SEQ ID NO: 184668 - DNA, 41 bp, Homo sapiens; identical to SEQ ID NO: 30755
  chr17:74050636-74050677
  hypo

SEQ ID NO: 184669 - DNA, 40 bp, Homo sapiens; identical to SEQ ID NO: 93520
  chr17:74050856-74050896
  hypo

SEQ ID NO: 184670 - DNA, 18 bp, Homo sapiens
  chr17:74059750-74059768
  hypo
aaagcaagactctgtctg

SEQ ID NO: 184671 - DNA, 133 bp, Homo sapiens; identical to SEQ ID NO: 129377
  chr17:74072090-74072223
  hypo

SEQ ID NO: 184672 - DNA, 284 bp, Homo sapiens; identical to SEQ ID NO: 54612
  chr17:74072426-74072710
  hypo

SEQ ID NO: 184673 - DNA, 591 bp, Homo sapiens; identical to SEQ ID NO: 54613
  chr17:74072998-74073589
  hypo

SEQ ID NO: 184674 - DNA, 30 bp, Homo sapiens; identical to SEQ ID NO: 93525
  chr17:74078778-74078808
  hypo

SEQ ID NO: 184675 - DNA, 122 bp, Homo sapiens; identical to SEQ ID NO: 93526
  chr17:74081022-74081144
  hypo

SEQ ID NO: 184676 - DNA, 30 bp, Homo sapiens
  chr17:74081418-74081448
  hypo
tgctcaatgtgctcccggtaggagcgctca

SEQ ID NO: 184677 - DNA, 30 bp, Homo sapiens
  chr17:74081791-74081821
  hypo
tgtgcaggaagatggcgctcagagctgggt

SEQ ID NO: 184678 - DNA, 72 bp, Homo sapiens; identical to SEQ ID NO: 93527
  chr17:74086416-74086488
  hypo

SEQ ID NO: 184679 - DNA, 415 bp, Homo sapiens
  chr17:74086701-74087116
  hypo
agctgctcatttccccgagcctggaggcccagggaaagcggagaaggaccaaggaggggctgaagagctgatgcttggccccaggggggttccccacctcgctgtatttggggaaagccccagtttgcctgtcctctgctgcacacactcccctttctaaagatgggaaggccgggaggcctcggccagctggggcctgccactgctggtctgagcgtgaaagggctgccccaagacaaataactttttctgagttcacacaggagacaaggacagagacagggaagggaggagggaagcctcagggagggcagagctgccatcagccagagaggaccaggccgagggctgcgaaactgtccctgtgcccgctgaagcccgagtggcatcggggacctgccgttcccaccctgct

SEQ ID NO: 184680 - DNA, 51 bp, Homo sapiens; identical to SEQ ID NO: 93528
  chr17:74094004-74094055
  hypo

SEQ ID NO: 184681 - DNA, 31 bp, Homo sapiens; identical to SEQ ID NO: 11512
  chr17:74132738-74132769
  hypo

SEQ ID NO: 184682 - DNA, 30 bp, Homo sapiens; identical to SEQ ID NO: 93530
  chr17:74138723-74138753
  hypo

SEQ ID NO: 184683 - DNA, 59 bp, Homo sapiens; identical to SEQ ID NO: 129385
  chr17:74235821-74235880
  hypo

SEQ ID NO: 184684 - DNA, 973 bp, Homo sapiens; identical to SEQ ID NO: 129386
  chr17:74235976-74236949
  hypo

SEQ ID NO: 184685 - DNA, 395 bp, Homo sapiens; identical to SEQ ID NO: 93531
  chr17:74269540-74269935
  hypo

SEQ ID NO: 184686 - DNA, 30 bp, Homo sapiens; identical to SEQ ID NO: 93532
  chr17:74273292-74273322
  hypo

SEQ ID NO: 184687 - DNA, 30 bp, Homo sapiens; identical to SEQ ID NO: 93533
  chr17:74274054-74274084
  hypo

SEQ ID NO: 184688 - DNA, 114 bp, Homo sapiens
  chr17:74275070-74275184
  hypo
cagagccctggccccggacccatatgtcccatatgctgtcccatagcatacttgcggctatgctgccggacctgctccagttcaaacaccgtgtaggggcggatggaatggtgc

SEQ ID NO: 184689 - DNA, 510 bp, Homo sapiens
  chr17:74303709-74304219
  hypo
cctggccgtccacacgcttgagctgcttgctcaggtcctccacctggccgcccaggtccttcacttggctctccagcgctgacgaaggcgcctggcccacgcccctgcgcttctcccggggcgcccccttgggcacctccttgggcgcgggcaggtgcgggatgctgaacgagctccggacggactgcagcgagcggctgggctcgggcgacgagggctggaagtcgatccgggtattttggaggtcgaggttcttgagcatggccacgatgagcgtgtgcagggccgtgaagttgacggcgcccacctctggcgtgccgatggagaggtccgccagctcccggagggagaccgtggtcgcgggcggcatcgtggctgtcaggagctgtgcgccgccgcggggcgccggccaaccacttcccgctcactgcacgccgcgccttggggcctttcgggggccctgcgaggtcctcggggcgcccctgccccgggtccggccgagtcactgga

SEQ ID NO: 184690 - DNA, 34 bp, Homo sapiens; identical to SEQ ID NO: 93536
  chr17:74333711-74333745
  hypo

SEQ ID NO: 184691 - DNA, 30 bp, Homo sapiens; identical to SEQ ID NO: 93537
  chr17:74362255-74362285
  hypo

SEQ ID NO: 184692 - DNA, 169 bp, Homo sapiens
  chr17:74364506-74364675
  hypo
ctggagtcagcagaacgtgtcacccaggggagccgcttaggagaccgcctctcatcagcaggcctgagcagctgtcccttggccacaccaaatcagtagagccctggttctcagtcagtggcaagtgtgtcccgcaggggcatttggcaaggtccggagacatttttgg

SEQ ID NO: 184693 - DNA, 30 bp, Homo sapiens; identical to SEQ ID NO: 93538
  chr17:74375730-74375760
  hypo

SEQ ID NO: 184694 - DNA, 30 bp, Homo sapiens
  chr17:74387058-74387088
  hypo
ctagcagggcagcccggaactgcgtcagga

SEQ ID NO: 184695 - DNA, 292 bp, Homo sapiens
  chr17:74387384-74387676
  hypo
gctgggggctctggcgagctgctggccttgggcaccccgttgggcagtgcctgggccttctccagcagggcatgggtttccagccaggactcgatacggttcaccagccgccagccaccagtgctaaagtgttgcctgatctcctgctcaaagacctcggggggccgccgcaccagctgggtcatggactgcaccacgcggatcagcgccatctcattgtaacagcgactgttttcatagccttcctgcaggcctcggtcactgtcgaagccggcttcgttgtagtatggtt

SEQ ID NO: 184696 - DNA, 121 bp, Homo sapiens; identical to SEQ ID NO: 93540
  chr17:74388647-74388768
  hypo

SEQ ID NO: 184697 - DNA, 30 bp, Homo sapiens; identical to SEQ ID NO: 93541
  chr17:74389889-74389919
  hypo

SEQ ID NO: 184698 - DNA, 422 bp, Homo sapiens
  chr17:74390230-74390652
  hypo
atctcaacagcatcccgcttggctgctctcaggatcgcttggctgctctcaggatccctgctctttcttttcttactcccttccttccaggacagggccagaactggggcctcagactcagattcagagtctagcatagtgcttggctcgatgcacaggcccagtaagggactgcggagtcaacaaggtggcaggcaaacgggcttgcctgttccggaaggatgcactcagcgctgcctcagtaaacatgactcagagacactaggccccgtccacgaacagaggagtgggaaaatggaatgtggtgtggccacatgctgtcatcctattttgcaggtaaaaaggaagaaactagatcattatgaatcaacacaggttggtcttaagcaaattagagatgatgtgtacgacgacatattctg

SEQ ID NO: 184699 - DNA, 152 bp, Homo sapiens; identical to SEQ ID NO: 93543
  chr17:74391567-74391719
  hypo

SEQ ID NO: 184700 - DNA, 369 bp, Homo sapiens
  chr17:74392143-74392512
  hypo
tggtgacacaaacaggagccccgagaaggcgggggaaggcgaagaccaggcaagggctgactcacagggtgcaaactccagtacggagaagacctcgcccttggcgctggtgaaggtgacgccaggcttgccgccacactgctggcacagcaccggggtttcgctgggccactcagccttcacaggtgactgcccctcgggcttgtcctccttgcgctctacgtcgggcactgcttccatcttctcctcctctacaatggccacattgtccagggtcttcttgaggttttcctgtagcttcttgatgtcatccagaaacttcttctcccgagttggcttctcaggctccacagtcggagaggtgggcga

SEQ ID NO: 184701 - DNA, 30 bp, Homo sapiens; identical to SEQ ID NO: 93545
  chr17:74395428-74395458
  hypo

SEQ ID NO: 184702 - DNA, 40 bp, Homo sapiens; identical to SEQ ID NO: 93546
  chr17:74397332-74397372
  hypo

SEQ ID NO: 184703 - DNA, 30 bp, Homo sapiens
  chr17:74406539-74406569
  hypo
cgtggccaacgcacccgcagtgccacagct

SEQ ID NO: 184704 - DNA, 30 bp, Homo sapiens
  chr17:74406794-74406824
  hypo
caggcattcaggagccggggaagctcaccg

SEQ ID NO: 184705 - DNA, 31 bp, Homo sapiens; identical to SEQ ID NO: 93547
  chr17:74412535-74412566
  hypo

SEQ ID NO: 184706 - DNA, 119 bp, Homo sapiens; identical to SEQ ID NO: 30765
  chr17:74415733-74415852
  hypo

SEQ ID NO: 184707 - DNA, 35 bp, Homo sapiens; identical to SEQ ID NO: 30766
  chr17:74427554-74427589
  hypo

SEQ ID NO: 184708 - DNA, 30 bp, Homo sapiens
  chr17:74431886-74431916
  hypo
cagaccagcctgtcccgcaaagctcagtga

SEQ ID NO: 184709 - DNA, 30 bp, Homo sapiens
  chr17:74432660-74432690
  hypo
ggcccctgccctgcacgctgtccctcgcct

SEQ ID NO: 184710 - DNA, 30 bp, Homo sapiens; identical to SEQ ID NO: 93550
  chr17:74434945-74434975
  hypo

SEQ ID NO: 184711 - DNA, 157 bp, Homo sapiens; identical to SEQ ID NO: 93551
  chr17:74435186-74435343
  hypo

SEQ ID NO: 184712 - DNA, 30 bp, Homo sapiens; identical to SEQ ID NO: 129396
  chr17:74448463-74448493
  hypo

SEQ ID NO: 184713 - DNA, 30 bp, Homo sapiens; identical to SEQ ID NO: 93552
  chr17:74467319-74467349
  hypo

SEQ ID NO: 184714 - DNA, 30 bp, Homo sapiens; identical to SEQ ID NO: 93553
  chr17:74467647-74467677
  hypo

SEQ ID NO: 184715 - DNA, 30 bp, Homo sapiens
  chr17:74468126-74468156
  hypo
gggcccacctggggcggggcaggggagacg

SEQ ID NO: 184716 - DNA, 133 bp, Homo sapiens; identical to SEQ ID NO: 93554
  chr17:74472948-74473081
  hypo

SEQ ID NO: 184717 - DNA, 77 bp, Homo sapiens; identical to SEQ ID NO: 93555
  chr17:74475340-74475417
  hypo

SEQ ID NO: 184718 - DNA, 30 bp, Homo sapiens; identical to SEQ ID NO: 93556
  chr17:74501543-74501573
  hypo

SEQ ID NO: 184719 - DNA, 31 bp, Homo sapiens; identical to SEQ ID NO: 93557
  chr17:74516485-74516516
  hypo

SEQ ID NO: 184720 - DNA, 31 bp, Homo sapiens; identical to SEQ ID NO: 93558
  chr17:74527623-74527654
  hypo

SEQ ID NO: 184721 - DNA, 151 bp, Homo sapiens
  chr17:74529367-74529518
  hypo
tacacgggtgaggacacgtgaggcgacgggtctgaaaatacattgaattttctggagaagcactgtaatgagggacaaatgtgaaaaacccaatttggacttaaacaagcatctcagactttggaggttttacaattgcaataaaaaataa

SEQ ID NO: 184722 - DNA, 195 bp, Homo sapiens; identical to SEQ ID NO: 93559
  chr17:74531808-74532003
  hypo

SEQ ID NO: 184723 - DNA, 69 bp, Homo sapiens; identical to SEQ ID NO: 30770
  chr17:74533184-74533253
  hypo

SEQ ID NO: 184724 - DNA, 688 bp, Homo sapiens; identical to SEQ ID NO: 129399
  chr17:74533674-74534362
  hypo

SEQ ID NO: 184725 - DNA, 65 bp, Homo sapiens; identical to SEQ ID NO: 129400
  chr17:74534387-74534452
  hypo

SEQ ID NO: 184726 - DNA, 94 bp, Homo sapiens; identical to SEQ ID NO: 93562
  chr17:74551786-74551880
  hypo

SEQ ID NO: 184727 - DNA, 30 bp, Homo sapiens; identical to SEQ ID NO: 93563
  chr17:74562033-74562063
  hypo

SEQ ID NO: 184728 - DNA, 191 bp, Homo sapiens
  chr17:74571582-74571773
  hypo
aaagagcagtggagccgccagagctgggaaaaggcaggggaggctttcttcgagccttcggagggagcgtggccctgccagcaccttgattctgggcttctgggctccagaactgtgacgattcaatttctgtggatcgaagccccccaggctgtgatcatttgttccagcagccacggggaaggaacaca

SEQ ID NO: 184729 - DNA, 181 bp, Homo sapiens
  chr17:74574204-74574385
  hypo
ggggaggttgtatcgcgcaatggttctgagccaggttccagacaagaggctcaaactccaggactacctcttactacctaagcggggtacttaacttcttggtgcctcattttgctcatttgtaagggccacattctagggttgctgcgaggcttccgtgagagaacgcaggtaaagtccc

SEQ ID NO: 184730 - DNA, 35 bp, Homo sapiens; identical to SEQ ID NO: 30773
  chr17:74579151-74579186
  hypo

SEQ ID NO: 184731 - DNA, 647 bp, Homo sapiens; identical to SEQ ID NO: 11517
  chr17:74581100-74581747
  hypo

SEQ ID NO: 184732 - DNA, 286 bp, Homo sapiens
  chr17:74621442-74621728
  hypo
ggacgctggtacagccggattatcccttcatcgtgtagccgcttccagacttctctctccagcttgaagtcatggtttatgtaaaagatcagccgcttccatgatgtatcatagtagtgatcagaaaagcgctcatggccctcagtgatgaagccataagcactcacctacatcacggttggaggagaaacacggcctgtagttgctgttgcccaggcttcttctcatggctaattctgtgttgaggggtgggggttcttttccctggctccgtccctaggggtct

SEQ ID NO: 184733 - DNA, 150 bp, Homo sapiens; identical to SEQ ID NO: 93569
  chr17:74623751-74623901
  hypo

SEQ ID NO: 184734 - DNA, 149 bp, Homo sapiens; identical to SEQ ID NO: 93570
  chr17:74625058-74625207
  hypo

SEQ ID NO: 184735 - DNA, 181 bp, Homo sapiens; identical to SEQ ID NO: 93571
  chr17:74629608-74629789
  hypo

SEQ ID NO: 184736 - DNA, 42 bp, Homo sapiens; identical to SEQ ID NO: 93572
  chr17:74638681-74638723
  hypo

SEQ ID NO: 184737 - DNA, 80 bp, Homo sapiens; identical to SEQ ID NO: 93573
  chr17:74640872-74640952
  hypo

SEQ ID NO: 184738 - DNA, 31 bp, Homo sapiens; identical to SEQ ID NO: 93574
  chr17:74645178-74645209
  hypo

SEQ ID NO: 184739 - DNA, 41 bp, Homo sapiens; identical to SEQ ID NO: 93575
  chr17:74651096-74651137
  hypo

SEQ ID NO: 184740 - DNA, 251 bp, Homo sapiens; identical to SEQ ID NO: 30778
  chr17:74667046-74667297
  hypo

SEQ ID NO: 184741 - DNA, 31 bp, Homo sapiens; identical to SEQ ID NO: 30779
  chr17:74703800-74703831
  hypo

SEQ ID NO: 184742 - DNA, 30 bp, Homo sapiens
  chr17:74709463-74709493
  hypo
gctacggcgcctggccgaaatttctgaaca

SEQ ID NO: 184743 - DNA, 30 bp, Homo sapiens; identical to SEQ ID NO: 93578
  chr17:74714603-74714633
  hypo

SEQ ID NO: 184744 - DNA, 31 bp, Homo sapiens; identical to SEQ ID NO: 30780
  chr17:74716633-74716664
  hypo

SEQ ID NO: 184745 - DNA, 30 bp, Homo sapiens; identical to SEQ ID NO: 93580
  chr17:74726627-74726657
  hypo

SEQ ID NO: 184746 - DNA, 225 bp, Homo sapiens; identical to SEQ ID NO: 11518
  chr17:74732258-74732483
  hypo

SEQ ID NO: 184747 - DNA, 262 bp, Homo sapiens; identical to SEQ ID NO: 11519
  chr17:74732943-74733205
  hypo

SEQ ID NO: 184748 - DNA, 31 bp, Homo sapiens
  chr17:74750466-74750497
  hypo
attaagagcagattgtggctgcgcgcagtga

SEQ ID NO: 184749 - DNA, 254 bp, Homo sapiens; identical to SEQ ID NO: 93583
  chr17:74771039-74771293
  hypo

SEQ ID NO: 184750 - DNA, 88 bp, Homo sapiens
  chr17:74771571-74771659
  hypo
aagaacaaagaggagcgagggagaacctggcaaccggggaggccattcagtccttccagagcagtttatataacgtttgaggatatcg

SEQ ID NO: 184751 - DNA, 30 bp, Homo sapiens; identical to SEQ ID NO: 93585
  chr17:74774441-74774471
  hypo

SEQ ID NO: 184752 - DNA, 30 bp, Homo sapiens
  chr17:74815392-74815422
  hypo
atgggagcgacgcgtcgacaagccaaggaa

SEQ ID NO: 184753 - DNA, 30 bp, Homo sapiens
  chr17:74846308-74846338
  hypo
agtagccttcagatccgccaacaccttgat

SEQ ID NO: 184754 - DNA, 190 bp, Homo sapiens
  chr17:74858667-74858857
  hypo
cgtggcctctgcactcgaggtggctagtgtgtgagggccagttgtccccgcgcagtgccactgttgctgatttgtacgcggtgtcagtaaatgctgttatgacattattaatgctgcacactacggcaaaggacaatggcctattgcctcgtaatgtgctgtgtgctgctgcagtcggagcacattaaat

SEQ ID NO: 184755 - DNA, 89 bp, Homo sapiens; identical to SEQ ID NO: 129416
  chr17:74864228-74864317
  hypo

SEQ ID NO: 184756 - DNA, 1691 bp, Homo sapiens; identical to SEQ ID NO: 54635
  chr17:74864602-74866293
  hypo

SEQ ID NO: 184757 - DNA, 333 bp, Homo sapiens
  chr17:74908612-74908945
  hypo
ttgttgtagtttattcgcagatgttcacggcagatgtcctggccactgatggagcaacaaggctggacggatgagccggtcccgctctgctcctcgggtctcggtgtttcaattaactggctcactggagtgacgtttggggcaatgtgcaggatctacatctggctttgctgctgcaagatgcttccggggtgagggaggtggcacgagggagccgtgcgctctgtgatgagactgcagcaaggtgatgtcagccagtccccgcccgcgccccgccgtgtgcggagggaagaagccaaaccctagtgcctgcccagccgctgcatcctgaga

SEQ ID NO: 184758 - DNA, 31 bp, Homo sapiens
  chr17:74920518-74920549
  hypo
ggtcctgtgcggtgcccggggtgggaagcag

SEQ ID NO: 184759 - DNA, 60 bp, Homo sapiens; identical to SEQ ID NO: 93589
  chr17:74928818-74928878
  hypo

SEQ ID NO: 184760 - DNA, 30 bp, Homo sapiens
  chr17:75038988-75039018
  hypo
ccagcctttattacgcgccagagatttctg

SEQ ID NO: 184761 - DNA, 30 bp, Homo sapiens
  chr17:75039424-75039454
  hypo
tggaatacagactgccggcgcgggcccggt

SEQ ID NO: 184762 - DNA, 30 bp, Homo sapiens
  chr17:75071055-75071085
  hypo
actgcaggccaggcgcgccgtcgtttcctc

SEQ ID NO: 184763 - DNA, 137 bp, Homo sapiens; identical to SEQ ID NO: 93590
  chr17:75132758-75132895
  hypo

SEQ ID NO: 184764 - DNA, 38 bp, Homo sapiens
  chr17:75196309-75196347
  hypo
aatgtgatctcggctcgctgcagcctccacctcccagg

SEQ ID NO: 184765 - DNA, 217 bp, Homo sapiens; identical to SEQ ID NO: 93592
  chr17:75196526-75196743
  hypo

SEQ ID NO: 184766 - DNA, 1481 bp, Homo sapiens
  chr17:75206842-75208323
  hypo
tttgttaggcactatcgctcttgtccatgtttcaagaacttggggtgcagtgtgtttcgtgtgaatcgggggcatctgtagacatccacatggtaaaaacctccgttctgctttgggtattaaataaagcacagatccgagatggcaacaaactgaaaggaaggctgaagcggaggcccccactgtgaatgcaggaaagaggttccgtcagcacagggggccgaggcctcaggatggagctgcctggggagccactttgctgaagagggggccgtgccacgtggtgccgcctgctgttcttagacaggacccttgtacctcactgaatctgctgtggaaggacattctgaagtggcgtttcagtggtgaggtggcagtggtgggattaaaggggcccggctcgtagagcagccacgcgctgaagggcacagcagacagcgtgcatgggctgagaggggccgtgggcctggctctgctgcttccttaggtggagttttcagtgactgcagaactctgcacagctgcttttcattctcacgtccgcccccgcccaatctttgaaactaactttgattattccctcctgggtagctctgtcggtgctgtgtaagtttggttttcaattggttctcagcacccagggggtgaccacctcaaccccatctctactatgccaggggctcatcccgctcacccagcctcgccactgttctctcgtgtgagcctcacacggcaggcccggttccatgcccctgcttcccccttgctgggaacgctgtcctcaggctcccctgcctgctctttctttagctttcaccttctccagggccttctgttctgtccagcccagggcagtcctctgaaccactcatgtacgagctcacagtgtttggtgtttctaagacctggcctcttagagtgtgtgtgaagatggtgtatgggagatcttggacctctaggtgcaggtcacaaagaacacagagcttggtgcatgacatgtagcaggatccagcggttgaatggatggtggtgtgtgactctggggaaagagatccgtccatacgcattcagcgtttccctccccagcttcagcacctgcaccctggatcccctggagagcacgatgcgctcgcagcatgccggcctggtgctcgtggatcgtggctgcctaacgctgcctctttttcagattctcattcagattgtggatgcctcgtcagtcatcacttgggatttcgacgtgtgcaaaggggacattgtgtttaacatctatcactccaagaggtcgccacaaccacccaaaaaggactccctgggagcccacagcatcacctctccgggtgggaacaatgtgcagctcatagacaaagtctggcagctgggccgcgactacagcatggtggagtcgcctctgatctgcaaagaaggagaaagcgtgcaggtaaaatcacacacaggtcaaatcgcgcatccgtgactcc

SEQ ID NO: 184767 - DNA, 350 bp, Homo sapiens; identical to SEQ ID NO: 30792
  chr17:75209342-75209692
  hypo

SEQ ID NO: 184768 - DNA, 26 bp, Homo sapiens
  chr17:75211196-75211222
  hypo
tgctggggggacggggtgagtggaaa

SEQ ID NO: 184769 - DNA, 724 bp, Homo sapiens
  chr17:75213326-75214050
  hypo
tgggagtgtttcacaggtgagcggtccggcctcagaagagctttagctcatgtgggagtgtttcacaggtgagtggtcgttcaagaagagctttagctcctgtgggattgtttcacaggtgagcggtccggcctcaggtcacagccgtatgtttgctgatgcagaagcgaacccagtgtttgtcctcgcttctgtaagaagacatgatgtggtttttcttaaacgcagccagatctaacatcactgtgatggggcgatccctgctgtgatgtttccgttgtgataaaaaggattgctttcatcaggcgcctccaagaaaataaaagaggcaggtgtggacctttagaagcctggattaccttatctccactcccctgccaatcagtgggtcttcggggggtcataaaccagtgggcagagcaggctgctggctcggtgaagctcagggcaggccagaaggcggctcagggcagcgtgccagggtgcagaagccagtgcctccctaactgggaaccgcaggatcattggcattcctagtagtccgtatctgtccttggtgggacacagccaaggggtctggctggcacctgggtgggaagcaggggagaccgagggtgccctgcacgtccatgctgggcctgggccgtcagtgtgtccacaggcagtcaggaccttagccgtgccaaaatctgatgatttagtcaacctgcgatggaaggaagag

SEQ ID NO: 184770 - DNA, 30 bp, Homo sapiens
  chr17:75214287-75214317
  hypo
aaaccattagtaatgcgtttgttctctgtt

SEQ ID NO: 184771 - DNA, 36 bp, Homo sapiens
  chr17:75300268-75300304
  hypo
cagcagtggcggcagcggctgcgctgagcctggcaa

SEQ ID NO: 184772 - DNA, 115 bp, Homo sapiens
  chr17:75303151-75303266
  hypo
tgttaatcatccacccggagggagagcgccagtggccttgtgtgacctttgccctttgtctctgtctttaggaggcacgcggacctccagtggccggctccggaggcttggtgac

SEQ ID NO: 184773 - DNA, 60 bp, Homo sapiens
  chr17:75304441-75304501
  hypo
aggacaaggcgcctacgggggcaagggcatgtgcccatctggagccgccacctccatgct

SEQ ID NO: 184774 - DNA, 159 bp, Homo sapiens; identical to SEQ ID NO: 93598
  chr17:75306481-75306640
  hypo

SEQ ID NO: 184775 - DNA, 30 bp, Homo sapiens
  chr17:75350893-75350923
  hypo
ttgcgtccttgaggacgttgacccctggcc

SEQ ID NO: 184776 - DNA, 202 bp, Homo sapiens; identical to SEQ ID NO: 93599
  chr17:75354843-75355045
  hypo

SEQ ID NO: 184777 - DNA, 790 bp, Homo sapiens; identical to SEQ ID NO: 11524
  chr17:75368667-75369457
  hypo

SEQ ID NO: 184778 - DNA, 623 bp, Homo sapiens; identical to SEQ ID NO: 11525
  chr17:75369492-75370115
  hypo

SEQ ID NO: 184779 - DNA, 575 bp, Homo sapiens; identical to SEQ ID NO: 129426
  chr17:75370185-75370760
  hypo

SEQ ID NO: 184780 - DNA, 147 bp, Homo sapiens
  chr17:75373024-75373171
  hypo
tttatgttccatcaccgatgagttgcacagggattcagtccttccgctgttcaggccgggtccttcaggctcagggttcccaggaatggagagggtatcagtgtcttccatggactcaaacttcccgcatcccgcctttgctccccc

SEQ ID NO: 184781 - DNA, 30 bp, Homo sapiens
  chr17:75373433-75373463
  hypo
ggccaaatctgttatcgcaaacacgattac

SEQ ID NO: 184782 - DNA, 30 bp, Homo sapiens; identical to SEQ ID NO: 93603
  chr17:75376920-75376950
  hypo

SEQ ID NO: 184783 - DNA, 30 bp, Homo sapiens; identical to SEQ ID NO: 93604
  chr17:75390082-75390112
  hypo

SEQ ID NO: 184784 - DNA, 31 bp, Homo sapiens; identical to SEQ ID NO: 54642
  chr17:75392295-75392326
  hypo

SEQ ID NO: 184785 - DNA, 388 bp, Homo sapiens; identical to SEQ ID NO: 93606
  chr17:75398243-75398631
  hypo

SEQ ID NO: 184786 - DNA, 216 bp, Homo sapiens
  chr17:75411740-75411956
  hypo
tctccagtgctgccctgtgcccggcaccgaagccgagggaaggcagcattagtatgagctcccagcccaccgggctcctgtctggagctgacgtgcgaccaaggcacacgagggaagcatggcgaggtggacggtgcggaggcataaggagcaaaataaggcagatgcagtggctcagtggctcctggtggctgcgaggagcgtgggcaggacagc

SEQ ID NO: 184787 - DNA, 480 bp, Homo sapiens
  chr17:75413666-75414146
  hypo
ccacatagccaaacaaaagcacgtttctaactgaagctgttggagagttcctgaggactttataccagacaagggccggtaagtggaagttcaatacgcaggagccattccttttgttcacaaatgtttgccgtcttttctgtctatatccgcattcatgtgagggcactcataggtccaccgtccagccccatgctttgtttgctaccaaaaaatttcttaagaattcctcagctgcaaatcctcctaccggagggggggttccaggaacccagccttgctcggggttggggcacctcagcacctgctgcacaggcgttggtcattaaaggtcatgtgccgtatccgtgggccctcggggtctggtggcacctgggcacacagtccagtggcggcctcctacctgccagacactgggagtggggggctcctcattcctgttccctggcggtggggggagtgccccgagctgtcacacat

SEQ ID NO: 184788 - DNA, 30 bp, Homo sapiens
  chr17:75419717-75419747
  hypo
ttccccggctccgcgcggagatcacgtggc

SEQ ID NO: 184789 - DNA, 167 bp, Homo sapiens; identical to SEQ ID NO: 93609
  chr17:75420112-75420279
  hypo

SEQ ID NO: 184790 - DNA, 279 bp, Homo sapiens; identical to SEQ ID NO: 93610
  chr17:75434080-75434359
  hypo

SEQ ID NO: 184791 - DNA, 31 bp, Homo sapiens; identical to SEQ ID NO: 30802
  chr17:75438182-75438213
  hypo

SEQ ID NO: 184792 - DNA, 142 bp, Homo sapiens
  chr17:75445188-75445330
  hypo
gtgctggaaaatgtaaggttgcgtctgtggcccatgtgccgtttctgctggagggttggaccgagggccagccgagaaggctctggggctgctctacctgaatgctgagtgtgtgctgagcggtagagaactttgagaagtg

SEQ ID NO: 184793 - DNA, 30 bp, Homo sapiens
  chr17:75451408-75451438
  hypo
cgctctctgtcccgtcgagcctggctggca

SEQ ID NO: 184794 - DNA, 30 bp, Homo sapiens
  chr17:75451740-75451770
  hypo
cggggttgatggtgccgtctctctctctgt

SEQ ID NO: 184795 - DNA, 89 bp, Homo sapiens
  chr17:75452014-75452103
  hypo
agagcagcatttcctcggggatttgaacacgatctcccccggggcaggggactgccctggaagattcccggcaccgcttcccatgcgcc

SEQ ID NO: 184796 - DNA, 60 bp, Homo sapiens
  chr17:75452367-75452427
  hypo
tgcagggacgccacacgaggagcaggtgtggtgtgcgtcctcctgcgggttctccacctc

SEQ ID NO: 184797 - DNA, 148 bp, Homo sapiens; identical to SEQ ID NO: 30803
  chr17:75452753-75452901
  hypo

SEQ ID NO: 184798 - DNA, 184 bp, Homo sapiens; identical to SEQ ID NO: 30804
  chr17:75473917-75474101
  hypo

SEQ ID NO: 184799 - DNA, 859 bp, Homo sapiens
  chr17:75476523-75477382
  hypo
ggcatttcctgagttcggttcttgccccgcaagtggaagggcagttgaactgaagtctcccactgcccctcctggcctggaagcctgcctcccaccttctgggcagagtgaggagtgggcgtgggccgggagggctgcctcctgtctgggagggctgctcacttgcctgtcacgggggatgagccccctgcagcctcccgtgctgtggccctggctcccacgccggctccactcccctgtggctgcccctgctgggtgcccaccggtcccagggaaaagccactcccctcccggaggactggcgggaggggccctgcctgggagcgtgccgtgtggtccctgtcttagcgcaggatgcctgaggccagatcctccctgggaggcaggatggggcaaaagtctccccgcaggcagagcagggcctggatgggcccaagcagggacgggggcacagaacagcagccgcccagcctgcgtgggagctgagggccaccaagggcagctccagcctgtggggactagcagaggcaccacctctgtgaccagcgagttgtctgcacctgcatgcgcatgcaccagtgagtgtggcgagtctgaggtgtgctgggacctggcccgtgtaccagccagccctgatgggaaccagccccatcctgggtacccctggaaccccactgtgtgggagcacctgggtcctcagcaggcgtcttccgggcgtccgcccccagccccaggcctctgacccgtgtgtggtgtcttaacagcagccaggagcagggccatcgaagggacctacagacagaagaggctttagtgatttcgggaagttcagctccacgtgccccacatacccaagagt

SEQ ID NO: 184800 - DNA, 106 bp, Homo sapiens
  chr17:75478247-75478353
  hypo
cgttggcgacatggccgacacccccagagatgccgggctcaagcaggcgcctgcatcacggaacgagaaggccccggtggacttcggctacgtggggattgactcc

SEQ ID NO: 184801 - DNA, 123 bp, Homo sapiens
  chr17:75490715-75490838
  hypo
ctggctagacatgggttatctcgtttcatgtccgaagctccccgcacccaccctccttgcagagttgaagaggtgctgtgagcagaaaacctgccaagggacccagaacgggaggcggctcta

SEQ ID NO: 184802 - DNA, 30 bp, Homo sapiens; identical to SEQ ID NO: 93618
  chr17:75494654-75494684
  hypo

SEQ ID NO: 184803 - DNA, 74 bp, Homo sapiens; identical to SEQ ID NO: 93619
  chr17:75502858-75502932
  hypo

SEQ ID NO: 184804 - DNA, 223 bp, Homo sapiens
  chr17:75522310-75522533
  hypo
atggctcgggcgggccggcagtgctgggggacccggcgcccccgacccccccagctgctggcccgggtgctaagaccctcactgcctggagccgctggcaatagccagcggatcagagtgtggggcccgccaagaaatcgccctggcccggggagccccctgggcagccccggttcccgcccgcgcctctccctccacaactctccctcaacacctccctctc

SEQ ID NO: 184805 - DNA, 402 bp, Homo sapiens
  chr17:75523090-75523492
  hypo
gatggcggcctgaaccggagtccttcttcccctcctccctctccgctgctgcaatgcccaggccccccgcaacgttcctcgtctgtaatggtgccagaggctttaaatcttgcagaagccacatctgctgcctgcaggtaaacctccctggctgagcccactgcgcacgcctccacgttctggagccagaaacaatgagaagcacaattccggcagcatctctcctcccggtcatttgcatagcacaacctctccctccaccccctcctgtctcccacgtggatcttcatgtaattaattaatatcgcgttcatcagagcttaattcatgttcttgtaatatacaaggattaaaaaaaaatcctaccaagagagcagtaataggctccggcttttctggtct

SEQ ID NO: 184806 - DNA, 30 bp, Homo sapiens
  chr17:75524034-75524064
  hypo
ctgtgtccagggggccgcgtctgagttcgg

SEQ ID NO: 184807 - DNA, 77 bp, Homo sapiens; identical to SEQ ID NO: 30807
  chr17:75544176-75544253
  hypo

SEQ ID NO: 184808 - DNA, 38 bp, Homo sapiens; identical to SEQ ID NO: 93622
  chr17:75548377-75548415
  hypo

SEQ ID NO: 184809 - DNA, 30 bp, Homo sapiens
  chr17:75551431-75551461
  hypo
gagagcgagcacgcccgggagctgggcgcc

SEQ ID NO: 184810 - DNA, 30 bp, Homo sapiens
  chr17:75557086-75557116
  hypo
ggcatcctaaggacccggcgacaattagtc

SEQ ID NO: 184811 - DNA, 42 bp, Homo sapiens
  chr17:75586407-75586449
  hypo
cctctgtgggtttttcgctctgctgattgtttccttgttttt

SEQ ID NO: 184812 - DNA, 30 bp, Homo sapiens
  chr17:75594110-75594140
  hypo
agagggcctggccgccgcctctctggggcc

SEQ ID NO: 184813 - DNA, 117 bp, Homo sapiens
  chr17:75599498-75599615
  hypo
gcgttgacctcacatcgcagctgcccttccctggcttcatttattcaggagagatctatggactaccgccatgaggcacgctcactctctgttcagacctgacggcggatcccgagc

SEQ ID NO: 184814 - DNA, 32 bp, Homo sapiens
  chr17:75603634-75603666
  hypo
agctggcgcaccagccgcggagaggtgagctc

SEQ ID NO: 184815 - DNA, 30 bp, Homo sapiens
  chr17:75604313-75604343
  hypo
agactagggctccagcgaaggagaccgaga

SEQ ID NO: 184816 - DNA, 207 bp, Homo sapiens; identical to SEQ ID NO: 93624
  chr17:75643460-75643667
  hypo

SEQ ID NO: 184817 - DNA, 30 bp, Homo sapiens
  chr17:75704132-75704162
  hypo
gtaagtggaggatgccgggagcaagtgcaa

SEQ ID NO: 184818 - DNA, 30 bp, Homo sapiens
  chr17:75717478-75717508
  hypo
aggtctttcgtgaaccgctattttgaatgc

SEQ ID NO: 184819 - DNA, 50 bp, Homo sapiens
  chr17:75733569-75733619
  hypo
tgccacgccatgccacgccatgccatgccatgccacgccatgtgggggcc

SEQ ID NO: 184820 - DNA, 290 bp, Homo sapiens; identical to SEQ ID NO: 93626
  chr17:75733961-75734251
  hypo

SEQ ID NO: 184821 - DNA, 30 bp, Homo sapiens
  chr17:75736785-75736815
  hypo
ggcagggcagtcttgcgaaggcctgagccc

SEQ ID NO: 184822 - DNA, 23 bp, Homo sapiens
  chr17:75796001-75796024
  hypo
tttgggaggccaaggcgggcgga

SEQ ID NO: 184823 - DNA, 143 bp, Homo sapiens; identical to SEQ ID NO: 93628
  chr17:75797043-75797186
  hypo

SEQ ID NO: 184824 - DNA, 35 bp, Homo sapiens
  chr17:75798044-75798079
  hypo
gccggtgtgcacacacgcacgcatgcacacacatg

SEQ ID NO: 184825 - DNA, 30 bp, Homo sapiens
  chr17:75801941-75801971
  hypo
caaggaggtgatactcgagaacacctaatt

SEQ ID NO: 184826 - DNA, 30 bp, Homo sapiens
  chr17:75827700-75827730
  hypo
tgctccccatggttacggacggctgtgcag

SEQ ID NO: 184827 - DNA, 62 bp, Homo sapiens
  chr17:75828064-75828126
  hypo
gccgatgccagcacccgcctcctgcccccgcctcgttctcaggtcttcggacccaggctgag

SEQ ID NO: 184828 - DNA, 152 bp, Homo sapiens
  chr17:75840891-75841043
  hypo
acacagagccggccccggagcataggacacccaccagcccgccttccgtgaccgctggagcctgtgtcgctgctagtcccccctagctcaggcctgcctccccatgcttctccaaaggctctctctacttgtccactcgccatttgcttgtc

SEQ ID NO: 184829 - DNA, 134 bp, Homo sapiens
  chr17:75844069-75844203
  hypo
cgttcggaagcatggcgctctctgaagtccgtggctgggatgtccatggctgtgacgaccttctgaaaaccatgtggtctctgtcccactttcagcctcacagtgcacgaatgcaagcccggagtaagcgcccc

SEQ ID NO: 184830 - DNA, 30 bp, Homo sapiens
  chr17:75844476-75844506
  hypo
tcctttggaattacacgacaggtacgctct

SEQ ID NO: 184831 - DNA, 310 bp, Homo sapiens
  chr17:75848772-75849082
  hypo
cctgctgctggagcacgcagccctgcagtgaccccgtcgcatatgcttgaacaatattctagagcaccatgaaagactcaggagggtaaagcactagcgcatgtgccgactgagctcccggctggtggaggcagagaggcggcagggcagagccgcggcgtgggcaggagctggggtggaggggggccctgcaccgcgggcagcctggctcctgccctggtcacacagagggagtgcctcacctccgtgcccccaagcccagagtgctgctgccaaggcgaggcgaggaggagggcgccctgtggctgac

SEQ ID NO: 184832 - DNA, 30 bp, Homo sapiens
  chr17:75849286-75849316
  hypo
tcaaagctgtgccatcgacgctctgggaat

SEQ ID NO: 184833 - DNA, 183 bp, Homo sapiens; identical to SEQ ID NO: 93630
  chr17:75875368-75875551
  hypo

SEQ ID NO: 184834 - DNA, 43 bp, Homo sapiens
  chr17:75896716-75896759
  hypo
tgagctgtttcataaatcatcctccggtcgtggatatgaacac

SEQ ID NO: 184835 - DNA, 30 bp, Homo sapiens
  chr17:75902106-75902136
  hypo
ttgaaaagacttacccggtttctcctctcc

SEQ ID NO: 184836 - DNA, 21 bp, Homo sapiens
  chr17:75939669-75939690
  hypo
ccaccgcgcccagcctgagga

SEQ ID NO: 184837 - DNA, 30 bp, Homo sapiens
  chr17:75947653-75947683
  hypo
ctggaccgaagcaaccgcagcgcccccaaa

SEQ ID NO: 184838 - DNA, 26 bp, Homo sapiens
  chr17:75974255-75974281
  hypo
gcgtgagccaccgcgcccggcctaaa

SEQ ID NO: 184839 - DNA, 30 bp, Homo sapiens
  chr17:76017409-76017439
  hypo
gaggggcgtgggccacgcattcagacaagc

SEQ ID NO: 184840 - DNA, 30 bp, Homo sapiens
  chr17:76027680-76027710
  hypo
gcaacaatggcaaacgtgcatctgccagtg

SEQ ID NO: 184841 - DNA, 183 bp, Homo sapiens; identical to SEQ ID NO: 30810
  chr17:76034962-76035145
  hypo

SEQ ID NO: 184842 - DNA, 49 bp, Homo sapiens; identical to SEQ ID NO: 93632
  chr17:76046727-76046776
  hypo

SEQ ID NO: 184843 - DNA, 30 bp, Homo sapiens
  chr17:76054205-76054235
  hypo
actcagtctctggtgcgagccagaattgca

SEQ ID NO: 184844 - DNA, 43 bp, Homo sapiens; identical to SEQ ID NO: 93633
  chr17:76076531-76076574
  hypo

SEQ ID NO: 184845 - DNA, 25 bp, Homo sapiens
  chr17:76085333-76085358
  hypo
ccaccgtgcccgaccacttatcttt

SEQ ID NO: 184846 - DNA, 69 bp, Homo sapiens
  chr17:76089068-76089137
  hypo
ctcctatggccggtacgatttaatccagaacagtgagtcaccagccagtcctcccgtagctgttcccca

SEQ ID NO: 184847 - DNA, 31 bp, Homo sapiens; identical to SEQ ID NO: 30811
  chr17:76093764-76093795
  hypo

SEQ ID NO: 184848 - DNA, 30 bp, Homo sapiens; identical to SEQ ID NO: 93637
  chr17:76098261-76098291
  hypo

SEQ ID NO: 184849 - DNA, 30 bp, Homo sapiens; identical to SEQ ID NO: 30812
  chr17:76100495-76100525
  hypo

SEQ ID NO: 184850 - DNA, 189 bp, Homo sapiens; identical to SEQ ID NO: 93639
  chr17:76100940-76101129
  hypo

SEQ ID NO: 184851 - DNA, 30 bp, Homo sapiens
  chr17:76103149-76103179
  hypo
tggacatacacctgcgtatgtatatccaat

SEQ ID NO: 184852 - DNA, 54 bp, Homo sapiens; identical to SEQ ID NO: 93640
  chr17:76104280-76104334
  hypo

SEQ ID NO: 184853 - DNA, 63 bp, Homo sapiens
  chr17:76106966-76107029
  hypo
gctctgaagaaatacgggaggtcctcactggagggtctggggccacacggtgggtccggagac

SEQ ID NO: 184854 - DNA, 31 bp, Homo sapiens; identical to SEQ ID NO: 93641
  chr17:76109601-76109632
  hypo

SEQ ID NO: 184855 - DNA, 134 bp, Homo sapiens; identical to SEQ ID NO: 93642
  chr17:76114989-76115123
  hypo

SEQ ID NO: 184856 - DNA, 30 bp, Homo sapiens
  chr17:76118224-76118254
  hypo
atgttccacgaggcccggctctgcagcctc

SEQ ID NO: 184857 - DNA, 310 bp, Homo sapiens
  chr17:76118505-76118815
  hypo
aactcagggcctgcccgtcactgcaagcagaagaccacgcctgcccagcgccccgagttcagctcacggacagctggccctccctctagaccatggttctggtcacatggtcctaagtggacccagggccaggcctgcagggagctgggcaggccagcttggtgctccggggccactcaccttcagccgggtgcgaatattgtcctgctggaggcgggaggcccgcttctgcgtcaccttgtagtcccaggagcagaagacggtgatggcgtggatgccagaggtgctgcccacccggtagctctccccg

SEQ ID NO: 184858 - DNA, 118 bp, Homo sapiens; identical to SEQ ID NO: 30815
  chr17:76121807-76121925
  hypo

SEQ ID NO: 184859 - DNA, 190 bp, Homo sapiens; identical to SEQ ID NO: 30816
  chr17:76129455-76129645
  hypo

SEQ ID NO: 184860 - DNA, 30 bp, Homo sapiens
  chr17:76131586-76131616
  hypo
cctcctgggctcaagcgatcctcccgccgg

SEQ ID NO: 184861 - DNA, 143 bp, Homo sapiens; identical to SEQ ID NO: 93645
  chr17:76132636-76132779
  hypo

SEQ ID NO: 184862 - DNA, 321 bp, Homo sapiens; identical to SEQ ID NO: 93646
  chr17:76137869-76138190
  hypo

SEQ ID NO: 184863 - DNA, 30 bp, Homo sapiens
  chr17:76138589-76138619
  hypo
tctcacccagcatcacgacgcatcagttca

SEQ ID NO: 184864 - DNA, 241 bp, Homo sapiens; identical to SEQ ID NO: 30818
  chr17:76145401-76145642
  hypo

SEQ ID NO: 184865 - DNA, 198 bp, Homo sapiens
  chr17:76152519-76152717
  hypo
aaacagagaagtcactcgcaagcagaaagcagatacctggcgtaggtgggtgaaggcctgctggaatgcgctgacgggctggttttgatctgggtctagggagaagagcactttgggtgccgtgagcaggctggtctcctgcaggagcctcgcattcttcaaaagtccttttaattaattaatttttttagaaacagg

SEQ ID NO: 184866 - DNA, 96 bp, Homo sapiens; identical to SEQ ID NO: 93649
  chr17:76153509-76153605
  hypo

SEQ ID NO: 184867 - DNA, 95 bp, Homo sapiens; identical to SEQ ID NO: 93650
  chr17:76153904-76153999
  hypo

SEQ ID NO: 184868 - DNA, 30 bp, Homo sapiens
  chr17:76157188-76157218
  hypo
tgaagacccacgagccggcctccttcaacc

SEQ ID NO: 184869 - DNA, 30 bp, Homo sapiens
  chr17:76162137-76162167
  hypo
ccagagagccaagcacggcagaggactgca

SEQ ID NO: 184870 - DNA, 30 bp, Homo sapiens
  chr17:76162858-76162888
  hypo
ccagaccctctgtaccggtttttcttggga

SEQ ID NO: 184871 - DNA, 274 bp, Homo sapiens; identical to SEQ ID NO: 93651
  chr17:76166932-76167206
  hypo

SEQ ID NO: 184872 - DNA, 302 bp, Homo sapiens; identical to SEQ ID NO: 93652
  chr17:76167731-76168033
  hypo

SEQ ID NO: 184873 - DNA, 45 bp, Homo sapiens; identical to SEQ ID NO: 93653
  chr17:76173532-76173577
  hypo

SEQ ID NO: 184874 - DNA, 200 bp, Homo sapiens; identical to SEQ ID NO: 93654
  chr17:76175394-76175594
  hypo

SEQ ID NO: 184875 - DNA, 28 bp, Homo sapiens
  chr17:76175854-76175882
  hypo
actagactaagtgtggccaggcgtggtg

SEQ ID NO: 184876 - DNA, 81 bp, Homo sapiens; identical to SEQ ID NO: 30823
  chr17:76176964-76177045
  hypo

SEQ ID NO: 184877 - DNA, 455 bp, Homo sapiens
  chr17:76187063-76187518
  hypo
agtactgtcccagccgatgggttgtccgactgggagcagaggaagccttgaggacctactcacagataggaattgaaggtactagtgtgacctctccgtggccgcattgggtgtccttaagcatgtggcagtgattcagaatgctgggggttgggggggctgtgctgcaccacctgggcctcgaggggcatttcccaaacaccaggcactttataaacctccctgctcaggggcaggtgcccaggaccccttgctgcagggactactggaggcaggagaggtccgggggaggtccacggctcagtcgaccatgcctggcctttcttgctcagccatccatacccaggcccgtaaggctgcgggctgtggttggcatagggaggtgaagtgaacagaggaacgttccccatccgctgctgaatgtggaatgcggtcactattcctaaaaagcaata

SEQ ID NO: 184878 - DNA, 31 bp, Homo sapiens; identical to SEQ ID NO: 30825
  chr17:76204092-76204123
  hypo

SEQ ID NO: 184879 - DNA, 41 bp, Homo sapiens
  chr17:76209677-76209718
  hypo
ctggaaacccaggtcgtgcagtcaacgatgtactcgccggg

SEQ ID NO: 184880 - DNA, 501 bp, Homo sapiens
  chr17:76215738-76216239
  hypo
ccagcttttctgcagcgtgccatagaccatctcttagccctcgtgggtcagagtctctgttgcatattgtcttttgttgtttttcacaaccttttagaaacataaaaagcattcttagcccgtgggctggacaaaaaaaggccatgacgggctgtatggatttggcccagcaggcccttgcttgccaagccctgttttagacaaggagcagcttgtgtgcctggaaccatcatgggcacaggggaggagcagagtggatgtggaggtgtgagctggaaaccaggtcccagagcgctgagaaagacagagggtttttgcccttgcaaatagagcaactgaaatctgacaccatccagttccagaaagccctgaagtgctggtggacgctgcggggtgctccgctctagggttacagggatgaagatgcagtctggtagggggagtccactcacctgttggaagatgtgattaagaaaagtagactttcagggccgggcatgg

SEQ ID NO: 184881 - DNA, 30 bp, Homo sapiens
  chr17:76221593-76221623
  hypo
gagacagcagtgcccgctgcccagaagaga

SEQ ID NO: 184882 - DNA, 374 bp, Homo sapiens; identical to SEQ ID NO: 129441
  chr17:76227787-76228161
  hypo

SEQ ID NO: 184883 - DNA, 108 bp, Homo sapiens; identical to SEQ ID NO: 129442
  chr17:76228213-76228321
  hypo

SEQ ID NO: 184884 - DNA, 196 bp, Homo sapiens; identical to SEQ ID NO: 93664
  chr17:76232493-76232689
  hypo

SEQ ID NO: 184885 - DNA, 31 bp, Homo sapiens; identical to SEQ ID NO: 93665
  chr17:76260378-76260409
  hypo

SEQ ID NO: 184886 - DNA, 41 bp, Homo sapiens; identical to SEQ ID NO: 93666
  chr17:76275113-76275154
  hypo

SEQ ID NO: 184887 - DNA, 18 bp, Homo sapiens
  chr17:76331607-76331625
  hypo
tctttctctttttttttt

SEQ ID NO: 184888 - DNA, 165 bp, Homo sapiens; identical to SEQ ID NO: 129447
  chr17:76337743-76337908
  hypo

SEQ ID NO: 184889 - DNA, 385 bp, Homo sapiens; identical to SEQ ID NO: 129448
  chr17:76338190-76338575
  hypo

SEQ ID NO: 184890 - DNA, 167 bp, Homo sapiens; identical to SEQ ID NO: 54657
  chr17:76349230-76349397
  hypo

SEQ ID NO: 184891 - DNA, 31 bp, Homo sapiens; identical to SEQ ID NO: 30829
  chr17:76364857-76364888
  hypo

SEQ ID NO: 184892 - DNA, 692 bp, Homo sapiens
  chr17:76395085-76395777
  hypo
caaggtgggtagggtcgtcttcacccagagcagaaatgctgcgagtgggtggggtagtgccccaggagaaggttgggtgcagttaccaggagaagggtgaatgggtgctgtgtggcaagaagagcaggcgtctgccacgctgaggacttcaggcctgagacatggccagcatgcaggacagaggttggcctggaagtcctctggctaggagtagccccagctggtgtgactgattcaggtggacggcacaggtgaaggcgaggccacgtggaggtggctcctcattgggggcaggacgccttcctgttgtgagtcaggtgccgttttctctgtccgtgttcaggccggaagaactcccgcacaatgctgctcccactcctgcggaggttcccagagcaggtccgagtctccctctttcacacgccgcacctccgtgggctgcttcggctcctcatccctgagcgcttcaacgagaccatcggcctccagcacattaaggtgtacctcttcgacaacagcgtcatcttgagcgggtgagtgcttcccaccgtcagtgcttttgccctcctgctctgcaggctggagggcagtggaataggaacagtgggaaacccgttcccctcagtcttggagaacctgcttgtaggtctggctgctgtgcacccgcggcacctccccgacactgtctctgc

SEQ ID NO: 184893 - DNA, 39 bp, Homo sapiens; identical to SEQ ID NO: 93671
  chr17:76396176-76396215
  hypo

SEQ ID NO: 184894 - DNA, 130 bp, Homo sapiens
  chr17:76396782-76396912
  hypo
accaaccgccaggaccgctacgtgttcctgcaggactgtgcggagattgccgacttcttcacggagctggtggacgcggtgggggatgtgtccctgcagctgcagggggacgacacggtgcaggtggtgg

SEQ ID NO: 184895 - DNA, 140 bp, Homo sapiens; identical to SEQ ID NO: 30831
  chr17:76397568-76397708
  hypo

SEQ ID NO: 184896 - DNA, 590 bp, Homo sapiens; identical to SEQ ID NO: 93673
  chr17:76404588-76405178
  hypo

SEQ ID NO: 184897 - DNA, 30 bp, Homo sapiens; identical to SEQ ID NO: 93674
  chr17:76422625-76422655
  hypo

SEQ ID NO: 184898 - DNA, 30 bp, Homo sapiens
  chr17:76424683-76424713
  hypo
cttctctgaggtgaccgtcagaaagccaat

SEQ ID NO: 184899 - DNA, 542 bp, Homo sapiens; identical to SEQ ID NO: 93675
  chr17:76425212-76425754
  hypo

SEQ ID NO: 184900 - DNA, 147 bp, Homo sapiens
  chr17:76430186-76430333
  hypo
ggttccagccctgggcgccgaacttgcgcctctctgccaccacagcgtggaagtagcacagggcgaagagcatgcacttgaactccatctccttggtgcacatctccagggtgtcctgtggggcacacgctccggtcaggtattagg

SEQ ID NO: 184901 - DNA, 335 bp, Homo sapiens
  chr17:76441609-76441944
  hypo
gcacaacgtgttcaacgtctaaagacgaaccttgatcccgccccagccttgatgctggaggaagtccactggtgagaccactccggccttaaaagggaaccgcaggaggaaatccagctccactgggttcagctccttcttcatggacaggacctgggggaacatcgaggtgtacacacttaacgcagccagtaaaacgtcagcagccctgaagatgcgcgctggactcgaagaggagttcacactcccggcctgcagggggcgccctgtcctgcccctttggtttggggtaaagttttgtcttcacctcgtctcgctttttaagttgtgaaata

SEQ ID NO: 184902 - DNA, 31 bp, Homo sapiens; identical to SEQ ID NO: 93677
  chr17:76449723-76449754
  hypo

SEQ ID NO: 184903 - DNA, 30 bp, Homo sapiens
  chr17:76451881-76451911
  hypo
ccagcggatgttttccgatgctaatccccc

SEQ ID NO: 184904 - DNA, 245 bp, Homo sapiens
  chr17:76455087-76455332
  hypo
tcttgtttttgatccgggacagcttctcttgtgcctctgccagctctgcattagcctcctccagtgcctgcctcttgggcgccacgtcgcagtagacctcgtagaagcggacgatgttgatgcaccaggagcacaggccggcggcggccgtggacttggagcggatgaactcggggtcgaacgtcgggttgccttggtagggcctagcgagggaaccagagggccggagtcgtcaccctgtcctg

SEQ ID NO: 184905 - DNA, 42 bp, Homo sapiens; identical to SEQ ID NO: 93679
  chr17:76456116-76456158
  hypo

SEQ ID NO: 184906 - DNA, 194 bp, Homo sapiens
  chr17:76457711-76457905
  hypo
ggatcagttggtctgcgctctcattcttctgcttgagctcagcctcctgaatcgccaacttggctttcaaatcatccacctggggaaggagaaaccgagaaacagcaagtgtgggccgcagccgacacacgccgccctgcactgggcagacgagggctgggagccacagaggggcagaacggcagggccgtgtc

SEQ ID NO: 184907 - DNA, 30 bp, Homo sapiens
  chr17:76458976-76459006
  hypo
tttggcaacaagttccgttctcttcttggc

SEQ ID NO: 184908 - DNA, 142 bp, Homo sapiens; identical to SEQ ID NO: 93680
  chr17:76459427-76459569
  hypo

SEQ ID NO: 184909 - DNA, 273 bp, Homo sapiens
  chr17:76460802-76461075
  hypo
cccgatctgtccgcacgctgcatgtcctcagccttcctgaactggccctggagccttggctgcgccggggctgattggaaaccacccctccctggcacaggattgcaggacaatgaaacaaaaaaacccaacagcccaccttggtttacaattctgatgatttgttcatcatgaattttttagcgctaatttgattttcaaaaatattacattaaaacctcacttatcgctctccctctccctctccccacggtctccctctcatgctgagcc

SEQ ID NO: 184910 - DNA, 239 bp, Homo sapiens
  chr17:76464456-76464695
  hypo
tcagataccaaaggacgactgtaaaacatttcttttggccccaagatacctctaacgacccacgtgaaaaagtctccaggctccggttcatcagacagccccacccctcacactctcctaacaggatttcacatcccatgaaggatcagtcctcctgctctatgcagagcaaaaacccataccctgtaggccacgggcaccaagctgggctcttgaggccctgccgaagacgggagccc

SEQ ID NO: 184911 - DNA, 30 bp, Homo sapiens; identical to SEQ ID NO: 93681
  chr17:76472339-76472369
  hypo

SEQ ID NO: 184912 - DNA, 204 bp, Homo sapiens
  chr17:76482431-76482635
  hypo
aatcgtttggatcaccgtgatctccggcactggcgtgatcttcttgaacccaaagcgcaacttgtccaggcacgtgggcaggtacttgtcaaagaggatcatcaggttggccttctccgactgcaccttgcgcctctcgatccagctgctcaccaccctgggggtgacaggaggcgccgatgacacagccgctgctctgggtct

SEQ ID NO: 184913 - DNA, 173 bp, Homo sapiens
  chr17:76487504-76487677
  hypo
agagtccagggcccgcgaaccttgttgtcatccatgactgtgttgagagactcgatccacatggggtctatgtctccgtcaaggatgatccacttggggccgtcatgggtgatgttggccaggtctcgcatgatggtggagaacaggcctgggggaggcgcgtggtatgaccc

SEQ ID NO: 184914 - DNA, 30 bp, Homo sapiens; identical to SEQ ID NO: 93683
  chr17:76498565-76498595
  hypo

SEQ ID NO: 184915 - DNA, 253 bp, Homo sapiens; identical to SEQ ID NO: 93684
  chr17:76498805-76499058
  hypo

SEQ ID NO: 184916 - DNA, 262 bp, Homo sapiens; identical to SEQ ID NO: 93685
  chr17:76501114-76501376
  hypo

SEQ ID NO: 184917 - DNA, 91 bp, Homo sapiens; identical to SEQ ID NO: 93686
  chr17:76503567-76503658
  hypo

SEQ ID NO: 184918 - DNA, 30 bp, Homo sapiens
  chr17:76510878-76510908
  hypo
gccagtggcgttcccgaatggcagggttct

SEQ ID NO: 184919 - DNA, 30 bp, Homo sapiens; identical to SEQ ID NO: 93687
  chr17:76521187-76521217
  hypo

SEQ ID NO: 184920 - DNA, 577 bp, Homo sapiens
  chr17:76522591-76523168
  hypo
acacataagagcactcgtgcacggccccaaggtcagtccggcggagaccacgtttctggacttgaaaggataactacttgagaaaagaaagcagtggggttcccagacttaccccctgatctcacccttgagcaaaaataccttattcagggacttgtaggggttggggtcgctgaaggagaacggggcctcgcgcctgaacctctccctgaactcatgttgcttgagctgcgagagaagagtgcaaagtacagagagtcacggggcggccacctgccccaagggtggccccaccctgtatgccgcagggccctgggtgagccccacgctgctccccggaaatcccgccaccctgccccaggtataatacctcgaattgctggcatttccgccgcaggatgctgacctcgttggcctggagtggtgccacggtcagcttcacctgaatggccagtttcttggtatttgcccagtgctccggcagctcctgcgggaagcaaaggcagaggagggctcctttctcatttcttttcttaaaccttctattgtgaaataattagagactggtaagaagctg

SEQ ID NO: 184921 - DNA, 30 bp, Homo sapiens
  chr17:76525512-76525542
  hypo
ccctgctcacctggacgcagccacacccac

SEQ ID NO: 184922 - DNA, 466 bp, Homo sapiens; identical to SEQ ID NO: 93689
  chr17:76526202-76526668
  hypo

SEQ ID NO: 184923 - DNA, 465 bp, Homo sapiens; identical to SEQ ID NO: 93690
  chr17:76533245-76533710
  hypo

SEQ ID NO: 184924 - DNA, 49 bp, Homo sapiens; identical to SEQ ID NO: 93691
  chr17:76556842-76556891
  hypo

SEQ ID NO: 184925 - DNA, 30 bp, Homo sapiens
  chr17:76563100-76563130
  hypo
gatcatatttgcagtcggcaaaaaccttca

SEQ ID NO: 184926 - DNA, 139 bp, Homo sapiens
  chr17:76563674-76563813
  hypo
tcctatgcagagtgccgtgtcccgaaggtgatccaagaagaaagcggctggaatgcttggatggacacacgtgtagaaaattctgcttcctcgccggtgtggctcatgccccctctccctgaagcgctccctgactatt

SEQ ID NO: 184927 - DNA, 30 bp, Homo sapiens
  chr17:76564118-76564148
  hypo
cgaggagacaggcaccgaggaccaggagct

SEQ ID NO: 184928 - DNA, 30 bp, Homo sapiens
  chr17:76565427-76565457
  hypo
ttggccctcgccctgcgaggaaggggtacc

SEQ ID NO: 184929 - DNA, 30 bp, Homo sapiens
  chr17:76565660-76565690
  hypo
gacgtccaggcacgccgcctgcaggacctg

SEQ ID NO: 184930 - DNA, 65 bp, Homo sapiens
  chr17:76566019-76566084
  hypo
aggtggtttgatgtgcgattagagaagcccacaaagcactagatgggtctcggggtacggggact

SEQ ID NO: 184931 - DNA, 30 bp, Homo sapiens; identical to SEQ ID NO: 93692
  chr17:76572297-76572327
  hypo

SEQ ID NO: 184932 - DNA, 30 bp, Homo sapiens
  chr17:76617575-76617605
  hypo
gccactgtggcgagccggggtgcccagagg

SEQ ID NO: 184933 - DNA, 176 bp, Homo sapiens
  chr17:76617892-76618068
  hypo
ccgcctgcgctgccccggctgatggcgctggattcctcgagccacacctgtcaaagcagggctgaacctaacggctgcccaggtctagtcccttctcaaacatgccacttccgtgtcctgaagcacaggtctgcggcggacctccccaggccaggatgccccgttgttggagtcac

SEQ ID NO: 184934 - DNA, 67 bp, Homo sapiens
  chr17:76618315-76618382
  hypo
ttgtgttccgtggtccgtgccacccccaggctgcacctgcctagtgcagttccgaagctcctcctgg

SEQ ID NO: 184935 - DNA, 178 bp, Homo sapiens
  chr17:76618702-76618880
  hypo
tctgctgcaaagaggcgccgggaggagctgcagggaggcccccacaggaagggagagcacgggaggtgggtctcggcacccgtcggggcatggccccttcttcccctcactggggtgccacatgcccgcccggggtctgcaggaagcgaggggtactgtcctccgattagatggtcag

SEQ ID NO: 184936 - DNA, 30 bp, Homo sapiens
  chr17:76641074-76641104
  hypo
ttggaaagtggccagcgtagctgaacagta

SEQ ID NO: 184937 - DNA, 215 bp, Homo sapiens; identical to SEQ ID NO: 93696
  chr17:76669914-76670129
  hypo

SEQ ID NO: 184938 - DNA, 287 bp, Homo sapiens
  chr17:76670691-76670978
  hypo
gaggagccgtggcgacgcggccctgtgaaaacccgcagctcctccacctgcctcctcagggctgcgccctgcaccgccctggtccagggtcctgtggaggggcggggcgagacggccagacagccagccacctgctctgcctggactggcatgctggccctggcggagtggcaggagctgccctgagagtccctgagagaacggcaggaaaatgctgcgtgtcacggctcccttcatactgtaatgaggaggggcagggccagctcacacagcgcctgcaggggaag

SEQ ID NO: 184939 - DNA, 30 bp, Homo sapiens; identical to SEQ ID NO: 93698
  chr17:76671437-76671467
  hypo

SEQ ID NO: 184940 - DNA, 30 bp, Homo sapiens; identical to SEQ ID NO: 93699
  chr17:76672141-76672171
  hypo

SEQ ID NO: 184941 - DNA, 30 bp, Homo sapiens
  chr17:76672602-76672632
  hypo
ttgctttgcagcagcgagtgccacgtaatc

SEQ ID NO: 184942 - DNA, 242 bp, Homo sapiens
  chr17:76673413-76673655
  hypo
ggcagagtgtcaggcgatgaggggggctgggctgcggtcggacaccaggccccaggcccggccctgcctggccctgcctgctgcttctcaactcccgcttcctcacatgcaagctggagatgccccacctccacctccctgggttccggagagtcaaaaagagatcccatattcaaagagcacatctcagcgcctagccgacacactcgatggcagccgctgttaccgctgacacgcagttc

SEQ ID NO: 184943 - DNA, 30 bp, Homo sapiens; identical to SEQ ID NO: 30838
  chr17:76676228-76676258
  hypo

SEQ ID NO: 184944 - DNA, 437 bp, Homo sapiens
  chr17:76677377-76677814
  hypo
gcagtgacccgggcacggtcctcaagcagggagtgtgcgggcccctttccctcttccctttgcctggctctcccactcacctctgaagcctcagttctggggcaacaactccaggaagcctttcctagtttcaccctagcgccccgatgcctgggactgcagctgtgggtctgaccattaaccactcactgcctctgtccatcgccccaccgccagacagtacaatcctcagagacactgccatcctgacaactccacctggatttccaaaggcaccttgactcctgtccagaacagagctgcacccgccaactagtcccatctcatctacagagggcacggcaccgcagacacttccagcacacgcctgacggcagtttcacagtcccctgatatccagccaacccatggccaagtcctagcactgttaaagtctt

SEQ ID NO: 184945 - DNA, 30 bp, Homo sapiens
  chr17:76678131-76678161
  hypo
tgagctcctcttacccgggcatattcatat

SEQ ID NO: 184946 - DNA, 198 bp, Homo sapiens; identical to SEQ ID NO: 93702
  chr17:76690198-76690396
  hypo

SEQ ID NO: 184947 - DNA, 189 bp, Homo sapiens; identical to SEQ ID NO: 30839
  chr17:76722779-76722968
  hypo

SEQ ID NO: 184948 - DNA, 45 bp, Homo sapiens; identical to SEQ ID NO: 30840
  chr17:76766752-76766797
  hypo

SEQ ID NO: 184949 - DNA, 30 bp, Homo sapiens
  chr17:76783616-76783646
  hypo
cgctgaacaaatctccgttaggggcactgt

SEQ ID NO: 184950 - DNA, 31 bp, Homo sapiens; identical to SEQ ID NO: 30841
  chr17:76794654-76794685
  hypo

SEQ ID NO: 184951 - DNA, 30 bp, Homo sapiens; identical to SEQ ID NO: 93706
  chr17:76798761-76798791
  hypo

SEQ ID NO: 184952 - DNA, 30 bp, Homo sapiens
  chr17:76799479-76799509
  hypo
ggtcctggtgcaggccgccttcttcaccaa

SEQ ID NO: 184953 - DNA, 63 bp, Homo sapiens
  chr17:76801792-76801855
  hypo
tcttaacctgcatgacgctagcaggcaagacgtcccacaaaaaacgctcgggactccgagctc

SEQ ID NO: 184954 - DNA, 30 bp, Homo sapiens
  chr17:76802137-76802167
  hypo
tcctgtgaggttggcgattcgtccaactcc

SEQ ID NO: 184955 - DNA, 462 bp, Homo sapiens
  chr17:76818617-76819079
  hypo
gacagcggagtcagacgtgggcttcggggtcaggagccctgccctcattcatgtcccccgcaccgctcactaactgggatctgaggcactctgagctctggggcctcttctcacccggacccggggctgcctggcgcctcccacgcctacgtatccatatggtagctactcacgctggaaggttctgaaacaatacaccacatccagtctctgctcctggttctacttgcaacccactgcatctggtcctgactcactgctctggaactgccttcctcagagtcgcctaaggcctccaggcatgaggccagctgggtctgcaggccctttactaggaggctgcgcagtgcgccggtgcacccactccctccagaagagcttcccctctccccaggctctccagccccgtctccccagctgcttccccgactcctcactggcacaaagcggggctgtttccag

SEQ ID NO: 184956 - DNA, 273 bp, Homo sapiens
  chr17:76851772-76852045
  hypo
ctcctgcttggggggcgccgcgccgcggtaccacgcacaggagccgtcacttctcttgatgcaggcgaagaacttggcctggtgcccgttgatgttcttctctgtgacccagtccatccagaggcactcgtccggggaggagatgtagcacgggatcatggggcagcgcgtgatctggggaggggcacacggagggggacggagtcagggacccaggaaggggtgggcagaggctgctctgggggcatgtccagaacccggcaatgtgcctac

SEQ ID NO: 184957 - DNA, 30 bp, Homo sapiens; identical to SEQ ID NO: 30844
  chr17:76852368-76852398
  hypo

SEQ ID NO: 184958 - DNA, 30 bp, Homo sapiens
  chr17:76853785-76853815
  hypo
agctcctccacccggcgcaggggcgctggg

SEQ ID NO: 184959 - DNA, 207 bp, Homo sapiens
  chr17:76857915-76858122
  hypo
ttcaagtgatccactgcgcccagccaaaaaattgtatcttttcaatggtcctagttattgggctaacatgaacgtggctgtcatgtataaatgtgaagagaggaccgcctctggtctgattaagacttggttgggtgtacacaccgtgagcatctgcagcgatgttctacttatgtctgtctccgagaaaagcgaggcatgagtctg

SEQ ID NO: 184960 - DNA, 31 bp, Homo sapiens; identical to SEQ ID NO: 30845
  chr17:76862114-76862145
  hypo

SEQ ID NO: 184961 - DNA, 30 bp, Homo sapiens
  chr17:76883265-76883295
  hypo
ttcgccagggaagtccggcttgagtttctc

SEQ ID NO: 184962 - DNA, 30 bp, Homo sapiens; identical to SEQ ID NO: 93711
  chr17:76895229-76895259
  hypo

SEQ ID NO: 184963 - DNA, 240 bp, Homo sapiens
  chr17:76897063-76897303
  hypo
gaggcagtgggcaagcggcaacgctgtggtgcccaggacgccggcaggcacagcgccacgtccacgggcaccgcccgttcccaccctgcaggacgccacagcatcagacgagacggcccgtgtgaagcgccgagaacagagtctggcttccgggagggctcaggaaatgccgagagctcggcagagacacccacgtggtgctggattccacgcacgaggaaccgacgggcagacgtggag

SEQ ID NO: 184964 - DNA, 130 bp, Homo sapiens; identical to SEQ ID NO: 54663
  chr17:76921422-76921552
  hypo

SEQ ID NO: 184965 - DNA, 146 bp, Homo sapiens
  chr17:76933824-76933970
  hypo
gagaatcagataagccggagttcgcctcctaccgccagctgggtgacctgagcatgcgtgcttcatgggctccacctctccttcattatttggaaaatgggatcgtgctagtacctgtctgaaggagctcacggaacagcgtggag

SEQ ID NO: 184966 - DNA, 40 bp, Homo sapiens; identical to SEQ ID NO: 93713
  chr17:76963989-76964029
  hypo

SEQ ID NO: 184967 - DNA, 30 bp, Homo sapiens; identical to SEQ ID NO: 93714
  chr17:76968735-76968765
  hypo

SEQ ID NO: 184968 - DNA, 28 bp, Homo sapiens
  chr17:76974849-76974877
  hypo
aaaaatggccaactggccaggcgcgatg

SEQ ID NO: 184969 - DNA, 42 bp, Homo sapiens; identical to SEQ ID NO: 93716
  chr17:76975544-76975586
  hypo

SEQ ID NO: 184970 - DNA, 73 bp, Homo sapiens; identical to SEQ ID NO: 30847
  chr17:76977963-76978036
  hypo

SEQ ID NO: 184971 - DNA, 212 bp, Homo sapiens; identical to SEQ ID NO: 93718
  chr17:76987615-76987827
  hypo

SEQ ID NO: 184972 - DNA, 30 bp, Homo sapiens; identical to SEQ ID NO: 93719
  chr17:76988314-76988344
  hypo

SEQ ID NO: 184973 - DNA, 30 bp, Homo sapiens; identical to SEQ ID NO: 30849
  chr17:76989950-76989980
  hypo

SEQ ID NO: 184974 - DNA, 737 bp, Homo sapiens
  chr17:76990982-76991719
  hypo
cagagcaagactatgtctaaaataaaaaacggttttggaggcaaatgcaggaggaagcaggttcccagcgactgggctgtggaagccacactgtgggctggggcaggcgtctcttacctggcggctggatgccggcagcagcccgcagggcgttgtagttggacacccagttctcgtggtccacgctgcccttgtagcccaccaccttcacccactccgggttctcgttcaccacatcacccgtagtggtcgtccactccttgcccaggccgcccacgtacagacgctcgtccttcactgccagccattcggccttgaagcctggccaagcagagtgtccttaggccccgcacccagctcccgccgcacccctgcacctggctcccacccggccccgcacctgtccttagaccccgcacctgactcccgcccggctccacacctgcctcccctccggcccgcacctggctcccgcccagggccggccggctgccctcccctcagctcctgaaggttcagtgaccactctcaagtctcctctgatccccaactccccgctcctcaagctgtaaccccaaccttaggattatccttaaaggctagaaaagctgaaaagtgacagcactctgaaggggcacgtgtgtcccaggggagtgcgggtgctgccctcggccacacctgaggtctcaccgagcatcactctaactccagtggccggagaggggcttggtgctggg

SEQ ID NO: 184975 - DNA, 30 bp, Homo sapiens
  chr17:76992085-76992115
  hypo
gagctccctgtaccccgctttcctccctat

SEQ ID NO: 184976 - DNA, 1191 bp, Homo sapiens; identical to SEQ ID NO: 93722
  chr17:76992706-76993897
  hypo

SEQ ID NO: 184977 - DNA, 31 bp, Homo sapiens; identical to SEQ ID NO: 30853
  chr17:76994831-76994862
  hypo

SEQ ID NO: 184978 - DNA, 153 bp, Homo sapiens
  chr17:76995120-76995273
  hypo
acccccttctccacgccgcagcctgctgggctgagaagatacaaaaacagggtgacaattccacatggaactttcggacagtcctaggttttagccccagggtgaggttcaaggagtgaacaaggcacatacgtggaacctgctgctcagagt

SEQ ID NO: 184979 - DNA, 28 bp, Homo sapiens
  chr17:76995583-76995611
  hypo
tctgagatagggcctcgctctgttgccc

SEQ ID NO: 184980 - DNA, 1464 bp, Homo sapiens
  chr17:76996175-76997639
  hypo
ccttacctgcatttctgacatgcgtcttagacatttcaagacacgagtcctgtgcagcttttccctcaagcctacttgctcctcgtctccccttgggaagggtagtggtgacgggtggccaccgtgtccacagtggtctggttcaagctctctcaggatcctgggagatgtgcttttctgtgtgaatatacacttcgataaaaacataaggcactgccaccacgaaaaacctgactggcctcatcctccgtcttccttcctcagcattgactccgtggacaggttctgtcctcttccatggcccttcctcaccatgccatgccggctgcctccctccacccctcctgcctctccgcccctgacactcccataccccccgccatgaagttgccctgccagctgccccccaccaacatcccctgacactccctcgccacctgccatgaagtagcatccatcagatggcacactcccagcttcagcggcttcctcaggtcctggggtgaacccactctgctcccgctcagccctcacactgtaccatctcctctgcctgccggctggctacatagacctccttctgtcccctgaccacactggccctggcagagcctgcagttccccctgcctggaacagtcgggcctgctcttcgcaccagcagctcggtctctcctacggggcatcagctccctgggaagacttgcccactcgccctccctcccatgccgctccggctctcccaccgtccctgcctggctaggtgattatttctgctcctggggcagggatctggccactgtcacagccccagcacctgacgcactgccaggcagggagcagacagtctgcacgcattggctgaagggaaagagatgccaggtgagccattagccacttcttcaacagcccctctgcactctaccgggggccccaccttaggcatattatgaacccacaacctggatcaagcaccccaaagatcgagctgctcagctgccacatctgagctgcaggcccgggaagacggtgcttgccagcacagaacaacggtgcctgcatagactgctgtcagacatcgtgaggtgtcgtcgtcaccagcccctggaacccccatgttcttccctgttcaactccctcagcactccggagagccactgtcctcaccttcaccattcctgtcaaatctccggcccacttctcccaggagaccactctgtggccaacttcagcagccgaggcccctgggtggggctcacacctgccactcaggtcagtccccccagccgccgggcacctgctcttctggttcctcccttccatccacaggctgccccaagtcgcccaccttgtcaccattttacctccagaccccacactcccacagacactcaactgctgctgaataaatggcgaatctgttaatgaaggaaaacccttccctgagtccccggcacctctgtccc

SEQ ID NO: 184981 - DNA, 157 bp, Homo sapiens
  chr17:76997942-76998099
  hypo
gatacccacaggcaccgcaaaccaggtcctcctcaggaactccctgtcctggcagtgccggccctcaggagccatcccaggaagcaattcgtcctaaccctcctccctccccagccccacgtgtcccacccagcttgagactcgcttcccttctccc

SEQ ID NO: 184982 - DNA, 290 bp, Homo sapiens
  chr17:76998487-76998777
  hypo
ttgcaaactaccacccgtgggccaaatgcagtctcccgcctagtgtgtagatgcggcctgtgtggcctggtatgtggttgcagcttggtgtgtagactctgcctggtgtgtagacgcggcctgcgtagacgcggcctgctgtgtagtcacgtcctggtgtgtagatgtggctgattaaagccagctaggactcctccctggcatgctgagtctggctgcaccgttgagtggtcgcaacagactgtggaggctgaaaatactgactccctgtccctcgacagatccctggt

SEQ ID NO: 184983 - DNA, 195 bp, Homo sapiens
  chr17:76998993-76999188
  hypo
tcctggcatctacaccgtggcacacgctccccacccgggaggctcatgtcctctgaccacatggaaccagaggtgtctgagtcccggcgtctctgcccctctggggaatcagtgtgacggaggcaggggcctttcctccaggagctcagcacagttggggagacagactttgaacagtcccgtgtggtcagtgtt

SEQ ID NO: 184984 - DNA, 146 bp, Homo sapiens
  chr17:76999461-76999607
  hypo
gtgcctggctgccggcgcctgctgcaggcaagagtttgcatgttctttaaaaagctgggttctttttcgggggtggggggtgggggggctcttttgtttgttgccagccagaaacaacagaaatgaaccggcgagggtaagacaca

SEQ ID NO: 184985 - DNA, 155 bp, Homo sapiens; identical to SEQ ID NO: 93731
  chr17:77002124-77002279
  hypo

SEQ ID NO: 184986 - DNA, 526 bp, Homo sapiens
  chr17:77002640-77003166
  hypo
tgtctatggtgtgggcgcacagcttcagaaccctctacggtttgcagttactgccttgtaaagaggctgtgtctgcttaatttgtatcatcgatgttacacctggaggaattttagccaaaaggcgaccttctcagttgaaaggcacattccaaatggcaccacacatctgggaaggtgtccttttccagagtgtgtgaaaataacgggatgggatcatcgccccatggacctggatcagggctgccttccacaccgcggtggcacctgcacgagcccacctgcttactgccaccttctctcctcacgctttcctccaggctcggctcccgggacacaaaggccgaatcgccaggactttcactcaacccggcaacaccctcagagccattctggggggtcccagtctcacctctgccccactcccacatggtggcatcacgcactgtcttaagtcttaagccagacttcaacgccttcttcacttcccataaaaccatcccagaggaacgcggggagcagcgtcc

SEQ ID NO: 184987 - DNA, 31 bp, Homo sapiens; identical to SEQ ID NO: 93733
  chr17:77004087-77004118
  hypo

SEQ ID NO: 184988 - DNA, 61 bp, Homo sapiens; identical to SEQ ID NO: 93734
  chr17:77043871-77043932
  hypo

SEQ ID NO: 184989 - DNA, 238 bp, Homo sapiens
  chr17:77044160-77044398
  hypo
cgagccctagctggccggccacctcctttcctctcgccaccttccacccctgcgctgtgctgaccccaccgcctcttccccgatccctggactccgactccctggctttggcattcagtgagacgccctgcacacacagaaagccaaagcgatcggtgctcccagatcccgcagcctctggagagagctgacggcagatgaaatcaccagggcggggcacccgcgagaaccctctggg

SEQ ID NO: 184990 - DNA, 90 bp, Homo sapiens
  chr17:77069646-77069736
  hypo
gggatccactgccctcgctcactgtaagcttcccaggactgaagccccaaagaggagccctctgccttctctgtcctccccatgggtcag

SEQ ID NO: 184991 - DNA, 152 bp, Homo sapiens
  chr17:77070098-77070250
  hypo
cactccaggccctgcacgcttaggggtagagcaactactactgttgggcacaggcgtggggctgtagaaagaaatccgtgtttcactggaaaactatgcatcctacataggacaccagcttccacatggcccgatactaacctactaacctt

SEQ ID NO: 184992 - DNA, 81 bp, Homo sapiens; identical to SEQ ID NO: 54668
  chr17:77070948-77071029
  hypo

SEQ ID NO: 184993 - DNA, 264 bp, Homo sapiens; identical to SEQ ID NO: 54669
  chr17:77071239-77071503
  hypo

SEQ ID NO: 184994 - DNA, 27 bp, Homo sapiens
  chr17:77073231-77073258
  hypo
cgtgaaccactgcgtctggcctagggt

SEQ ID NO: 184995 - DNA, 406 bp, Homo sapiens
  chr17:77073673-77074079
  hypo
attgttaaaatgtttcgattaatcctataatagtttccattaattgctcaatgtttctgtcctcggaccagttagatattatgacaaggacaccaccaaaccaatcagcttttacttgtcttcgctggaggagctcttggcgtggaagccccgcttggaggatggctttaatgtggccctggagcccctggcgtgtcgccagccccctctgagcagccagaggccccggactttgttgtgtcatgacatgatgggcgggtacctggatgacaggtgaggacctggccttacattgatgttgcttacattgttctcctttgctggggtgggggctggaggggcgggagagagtgccatgtgtagaaagagcactgggcggggagtcaggagacgggcattggaggga

SEQ ID NO: 184996 - DNA, 405 bp, Homo sapiens; identical to SEQ ID NO: 93739
  chr17:77074635-77075040
  hypo

SEQ ID NO: 184997 - DNA, 384 bp, Homo sapiens
  chr17:77076343-77076727
  hypo
cggggatgagcgctcgtaccaggcagtggctgaccggctggtccagatcactcagttttttcgttttgatggctggctgatcaacatcgagaactcgctgagtgtgagtgcccagccctcacccacctccccgccccttgctgtgttgccgcccacctccacctctttcctgccttggcctcacctcgccccacgcctgggctgcaggttgcagcagtaagagccacttctcgcctcccaggcagtgccaactctgaaatcttagttacacgcagtgagacagaatctcctccgactgtttccagcaagcgtgcttggccggctcccacgtttcccgcccctgcctgtgagcacacctttccttttccgcgctctgctctgggc

SEQ ID NO: 184998 - DNA, 30 bp, Homo sapiens; identical to SEQ ID NO: 93742
  chr17:77078503-77078533
  hypo

SEQ ID NO: 184999 - DNA, 30 bp, Homo sapiens; identical to SEQ ID NO: 93743
  chr17:77081181-77081211
  hypo

SEQ ID NO: 185000 - DNA, 30 bp, Homo sapiens; identical to SEQ ID NO: 93744
  chr17:77081745-77081775
  hypo

SEQ ID NO: 185001 - DNA, 31 bp, Homo sapiens; identical to SEQ ID NO: 93745
  chr17:77084213-77084244
  hypo

SEQ ID NO: 185002 - DNA, 219 bp, Homo sapiens
  chr17:77084523-77084742
  hypo
cctagtagagcgtggcgtgtggcagaatcgcaccgccccggctccccagcccaccgccatgcagggctcgcgtgcgggaaaactaatatgccggcgtttaagcctgtgcccctctgctgggtgtaactgcgctgaaataaatgatctgacaatgtgaagcgtgcagtcgagtcctggtgtgatggggcgcgggcagcaccagcccggccctggatgctg

SEQ ID NO: 185003 - DNA, 61 bp, Homo sapiens
  chr17:77086020-77086081
  hypo
tcgcgatgcagccgggcgctggcccgtccctggccctgggcgcccacggtggactgggctc

SEQ ID NO: 185004 - DNA, 30 bp, Homo sapiens
  chr17:77104527-77104557
  hypo
ccggagggcatctgtcgcgggcaaccaaag

SEQ ID NO: 185005 - DNA, 57 bp, Homo sapiens
  chr17:77105064-77105121
  hypo
ccacagcgtgggaaccgctgtcccgatgctcacctgggcatgcgctgcaggacctgt

SEQ ID NO: 185006 - DNA, 305 bp, Homo sapiens
  chr17:77113251-77113556
  hypo
ccccccaggagtctgcggtgaggaggccccactgcctggaaggacagatgccgcctctgcctggagcagcccagtgtgttaggacccctgctcagatgtggatgggtctgacgctcagccaccctggcagggacaggcaggagtccgcgtccttgctgaaggtgggctttgcggtggggaggaggagcgcccagcagggaagtggctgctcacctccctcacctgcgcctccaccccacgctcccatcacccggggccacgcacgctttgttcacaccacacacgttagttcagtgagcacctac

SEQ ID NO: 185007 - DNA, 47 bp, Homo sapiens
  chr17:77121064-77121111
  hypo
ctcctccgggcctggcgtggtgatggctctgtcgtcgccagttctgg

SEQ ID NO: 185008 - DNA, 30 bp, Homo sapiens
  chr17:77121592-77121622
  hypo
aggtcccccagcctgcgtgtgggacaacgg

SEQ ID NO: 185009 - DNA, 30 bp, Homo sapiens; identical to SEQ ID NO: 93748
  chr17:77126522-77126552
  hypo

SEQ ID NO: 185010 - DNA, 927 bp, Homo sapiens; identical to SEQ ID NO: 93749
  chr17:77126789-77127716
  hypo

SEQ ID NO: 185011 - DNA, 30 bp, Homo sapiens
  chr17:77133243-77133273
  hypo
gcatggactcacacacgcagcctctgtgca

SEQ ID NO: 185012 - DNA, 30 bp, Homo sapiens
  chr17:77133720-77133750
  hypo
cctggcccgggcacgcggggagggtgtcgg

SEQ ID NO: 185013 - DNA, 30 bp, Homo sapiens
  chr17:77134298-77134328
  hypo
catccgtgtgcaacacgcacactcagaccg

SEQ ID NO: 185014 - DNA, 30 bp, Homo sapiens
  chr17:77135185-77135215
  hypo
actctcacccacacacgcacagcacatgcg

SEQ ID NO: 185015 - DNA, 30 bp, Homo sapiens
  chr17:77141015-77141045
  hypo
tccaaaggagacgagcgcacctgtgctccc

SEQ ID NO: 185016 - DNA, 30 bp, Homo sapiens
  chr17:77141292-77141322
  hypo
acaggagcctgcgcacgtcctatccgagtg

SEQ ID NO: 185017 - DNA, 273 bp, Homo sapiens
  chr17:77141617-77141890
  hypo
acaggccagcccagtcggctctgagagggggccccgccccaccgccctggccttccttctgggggcgcagaggcctgctgagcactggccccgcatgtggtggcagcagggaggaaatggggcattcgccgctctgtggttgtgttttttctgccaccaccacaggcaaggcgttcggcaaagtgagtgcatagttcccactcagcacctggacccactgacacgtggatccatgcggcccacacgggggctctcagccgggcgacggtgccc

SEQ ID NO: 185018 - DNA, 20 bp, Homo sapiens
  chr17:77142196-77142216
  hypo
aagagcggatatgaatacag

SEQ ID NO: 185019 - DNA, 31 bp, Homo sapiens
  chr17:77151474-77151505
  hypo
agtgggcagggaggtccggggcggcaggctc

SEQ ID NO: 185020 - DNA, 30 bp, Homo sapiens
  chr17:77164764-77164794
  hypo
gacaggccagccgcacggggctgcggcctc

SEQ ID NO: 185021 - DNA, 30 bp, Homo sapiens
  chr17:77174107-77174137
  hypo
cactgagcaacccgccgatcctccaccgag

SEQ ID NO: 185022 - DNA, 256 bp, Homo sapiens; identical to SEQ ID NO: 129469
  chr17:77178615-77178871
  hypo

SEQ ID NO: 185023 - DNA, 101 bp, Homo sapiens; identical to SEQ ID NO: 54671
  chr17:77178962-77179063
  hypo

SEQ ID NO: 185024 - DNA, 248 bp, Homo sapiens; identical to SEQ ID NO: 54672
  chr17:77179081-77179329
  hypo

SEQ ID NO: 185025 - DNA, 102 bp, Homo sapiens; identical to SEQ ID NO: 11540
  chr17:77179380-77179482
  hypo

SEQ ID NO: 185026 - DNA, 159 bp, Homo sapiens; identical to SEQ ID NO: 11541
  chr17:77179617-77179776
  hypo

SEQ ID NO: 185027 - DNA, 404 bp, Homo sapiens; identical to SEQ ID NO: 129474
  chr17:77179799-77180203
  hypo

SEQ ID NO: 185028 - DNA, 30 bp, Homo sapiens
  chr17:77191905-77191935
  hypo
tggccagctcccgtgcggctgcactcgctt

SEQ ID NO: 185029 - DNA, 52 bp, Homo sapiens; identical to SEQ ID NO: 93755
  chr17:77194210-77194262
  hypo

SEQ ID NO: 185030 - DNA, 30 bp, Homo sapiens
  chr17:77199988-77200018
  hypo
acgaagtccaagcaccgtaggaaagagtga

SEQ ID NO: 185031 - DNA, 223 bp, Homo sapiens
  chr17:77200392-77200615
  hypo
gcgggtacacaccagcgggtgccggggagcagggggcgtaggtggggttggggcagaatgtaagtctgaacagaggagagattactgacgtgaaagtaacttctcatgactcagggcttaatatcctggaaaggacacgcgtaccagtccagtgaacagctccttgaagcgcacacataccgacagcattcagtcaacgaggtcgacgcgctggaactacttt

SEQ ID NO: 185032 - DNA, 86 bp, Homo sapiens
  chr17:77206525-77206611
  hypo
atcaggtctcacggccgcacaatatcccatcgagtgcccgccgcatacttcacgtaactatccctttacggcggacaggtaagatg

SEQ ID NO: 185033 - DNA, 30 bp, Homo sapiens
  chr17:77207208-77207238
  hypo
ttctccagcgtccggcggtctcagtcctgg

SEQ ID NO: 185034 - DNA, 214 bp, Homo sapiens
  chr17:77224253-77224467
  hypo
aagacctcactatctcgcctctcctccctggcgctatccgtgggctctccgtgttccctccggcctgtgccttggcaaagctgtccgctccggagcgggcggggtggccatgaagcctgagagagaggtgtgtgtcctgctctctgcaccgtgacgcctcccgctccctgaaaaccagggagaaattactctgcccaagcggaacacgcccgga

SEQ ID NO: 185035 - DNA, 30 bp, Homo sapiens
  chr17:77233371-77233401
  hypo
aaaggttactgcggtcgtttagtttgcatg

SEQ ID NO: 185036 - DNA, 30 bp, Homo sapiens
  chr17:77235090-77235120
  hypo
ttccctgcacctccccggaggctcttgtgc

SEQ ID NO: 185037 - DNA, 30 bp, Homo sapiens; identical to SEQ ID NO: 93756
  chr17:77259778-77259808
  hypo

SEQ ID NO: 185038 - DNA, 30 bp, Homo sapiens
  chr17:77275554-77275584
  hypo
cggcccggcacggtacggcactgtcacggc

SEQ ID NO: 185039 - DNA, 70 bp, Homo sapiens
  chr17:77283968-77284038
  hypo
aggattgtcacattgcggcacgtcgcagacagtgagtgcggctgtgcatgggacgcgctctgccagttaa

SEQ ID NO: 185040 - DNA, 117 bp, Homo sapiens
  chr17:77294568-77294685
  hypo
tgaccaagggtgcagcggtcaacaagccaacgcttcacttgatggagagggtcaggaagattctgcggccaccaggtcgccaagtccatgcttggtggaacacggcacaccaggaga

SEQ ID NO: 185041 - DNA, 102 bp, Homo sapiens
  chr17:77333499-77333601
  hypo
catgcctcaggtccccgtgggcacatgcgtgtacaagaagagcccattcacaaatcggatcaagaaaatgcagttgcgccgggcacggtggctcacgcctgt

SEQ ID NO: 185042 - DNA, 193 bp, Homo sapiens
  chr17:77345897-77346090
  hypo
cgaggtaggcacagccgtgatcaccaggacggaatgggttccctgagccccccggggcaggcacggccatgatcaccaggacagaatgggttccctgagcctaggccacgtggcccacacccacagttgggtgccctctgctccaggaggagaggctccagaaaatcacagtccacatcgtccatgccaccaa

SEQ ID NO: 185043 - DNA, 30 bp, Homo sapiens
  chr17:77353239-77353269
  hypo
acacacatcctaaaacgcaaacacaagcag

SEQ ID NO: 185044 - DNA, 30 bp, Homo sapiens; identical to SEQ ID NO: 93757
  chr17:77361651-77361681
  hypo

SEQ ID NO: 185045 - DNA, 30 bp, Homo sapiens
  chr17:77370691-77370721
  hypo
aggttggcacacgcacggcacatgtgtaca

SEQ ID NO: 185046 - DNA, 32 bp, Homo sapiens
  chr17:77385163-77385195
  hypo
ggacgaagcggtgggcgcgggggggcggtgtg

SEQ ID NO: 185047 - DNA, 30 bp, Homo sapiens
  chr17:77388473-77388503
  hypo
aagctaactctcacacggtagtgagcgcag

SEQ ID NO: 185048 - DNA, 30 bp, Homo sapiens; identical to SEQ ID NO: 93758
  chr17:77395128-77395158
  hypo

SEQ ID NO: 185049 - DNA, 38 bp, Homo sapiens
  chr17:77395379-77395417
  hypo
cacaaatgaggaaaccgaggcaccgggaggcaaaggtg

SEQ ID NO: 185050 - DNA, 30 bp, Homo sapiens
  chr17:77407182-77407212
  hypo
tgagcacatttttttcgtgccccggcacca

SEQ ID NO: 185051 - DNA, 30 bp, Homo sapiens; identical to SEQ ID NO: 93760
  chr17:77768372-77768402
  hypo

SEQ ID NO: 185052 - DNA, 30 bp, Homo sapiens; identical to SEQ ID NO: 93761
  chr17:77768672-77768702
  hypo

SEQ ID NO: 185053 - DNA, 195 bp, Homo sapiens
  chr17:77769050-77769245
  hypo
ctctgctggtaccccgctctcgttccctctcacgttcccgctccctctctcgctccctctccctttctcgatcccgctcccggtccctatcccggtctcggtcccggtcccgaggggcctctgcgcggcaggtgctgctggtgctggtgctgctcgctggcggggacaaacccatgtttcgaaggccctcccggg

SEQ ID NO: 185054 - DNA, 175 bp, Homo sapiens; identical to SEQ ID NO: 54682
  chr17:77771455-77771630
  hypo

SEQ ID NO: 185055 - DNA, 531 bp, Homo sapiens; identical to SEQ ID NO: 129489
  chr17:77774709-77775240
  hypo

SEQ ID NO: 185056 - DNA, 30 bp, Homo sapiens; identical to SEQ ID NO: 129490
  chr17:77776012-77776042
  hypo

SEQ ID NO: 185057 - DNA, 316 bp, Homo sapiens; identical to SEQ ID NO: 129491
  chr17:77776679-77776995
  hypo

SEQ ID NO: 185058 - DNA, 442 bp, Homo sapiens; identical to SEQ ID NO: 129492
  chr17:77777052-77777494
  hypo

SEQ ID NO: 185059 - DNA, 191 bp, Homo sapiens; identical to SEQ ID NO: 54687
  chr17:77777712-77777903
  hypo

SEQ ID NO: 185060 - DNA, 523 bp, Homo sapiens; identical to SEQ ID NO: 129494
  chr17:77777943-77778466
  hypo

SEQ ID NO: 185061 - DNA, 30 bp, Homo sapiens; identical to SEQ ID NO: 54691
  chr17:77781709-77781739
  hypo

SEQ ID NO: 185062 - DNA, 61 bp, Homo sapiens; identical to SEQ ID NO: 129501
  chr17:77788284-77788345
  hypo

SEQ ID NO: 185063 - DNA, 232 bp, Homo sapiens; identical to SEQ ID NO: 129502
  chr17:77788400-77788632
  hypo

SEQ ID NO: 185064 - DNA, 30 bp, Homo sapiens; identical to SEQ ID NO: 30876
  chr17:77791080-77791110
  hypo

SEQ ID NO: 185065 - DNA, 623 bp, Homo sapiens
  chr17:77807458-77808081
  hypo
actagaactctgaggccgggcgcagagctgccctgtccgttccgggggtccatctccagcggggaagggcaggagagggcgagccccgccggcaccgcgtggaaggggcctccgcccaggtctgacagccgccgcagggggaacatggttacctccgctccgggcgtcctcaccctgggggccagcctgggtctctcgcggttggcgggttggcgagaggggagcccgccccgaggccccaggtgctcagctccccgcccccccgcgggaatggcgcttccccttccgacgccctccggctacaccgtcacgtactccttgaaagtaacggtgaggcagttcgcggtgacgtcggtgataattatattcccaaagaagggcttgaactcgctcagcgactctgcaggttcgtcctgggcctcggctggaggcttctccgccgtcgtggtgggtgccgctgccgccgccaccgccaccgccgccgacgccggtgtctcgggcttcacctggagggagctgggcggctccccggcctcgctgcgcgtcttgacgcagcgcaagtctatgggttcatccaggtctgagtctagcaggatgacctcgggctgcgggagggcggcggc

SEQ ID NO: 185066 - DNA, 506 bp, Homo sapiens
  chr17:77808374-77808880
  hypo
caaaggcctccttggtcggggacagcttgcgggagccggcatcctggggctgcggatcgctaaccccggacacctcctcctccctcctcttgggcggcgcctccaccttcttctcctctgcgcccgccgcctttttaaaagtcctgtcggcaggagggtggcgctcgtcggctgcccgcttcttgtggctgggggagcgagcctccccctctgccacctcgccggacttgatcttcaccgcctgcatgccgttctccatgtatttgctcatcacgatcacgatgcgtccgttcttgttcttgttcttgactatcttcatcttgcccccaatcccgttgcccgtcacagcctctttgggggccggcatcattccgttgggggggcccttctcggagcctttgcctggagcacccgccgcaccggccaggggcttcaccgcccccaggtagcctttggcccccgcaccttgcgcccacttgtcgggcgggtggctcttggcccccagg

SEQ ID NO: 185067 - DNA, 383 bp, Homo sapiens; identical to SEQ ID NO: 129505
  chr17:77813599-77813982
  hypo

SEQ ID NO: 185068 - DNA, 212 bp, Homo sapiens
  chr17:77824716-77824928
  hypo
cagaggtccagatccacggggactgacctgacagaactcttggccatggccagttaggactgttgagacaagtaggagctggggcgctgcacacctgctgactgtccctctgccatgtggaagcaggagcatggtgtggtaagagccagacggacccaggcttctccccgctctcccgccggccaccggcgtgactccgagcaccagtgtat

SEQ ID NO: 185069 - DNA, 622 bp, Homo sapiens
  chr17:77825381-77826003
  hypo
ctgcaagcgtcggggcgtgtccacacccttgtccgacgtgtccctggcatctggcacagtgcccagcacgtacctgtcagatgaatgttgaattaataggatttgtgtgaggaccgagtgagctcacacagccagatgaagctggtccacccgtacgggctggcaagagccgttggccacattctcagacattttgtgaacccgttgttgaacccagccatgattacaaattaaatgattggcatttacaattaaattatgtaaagaacaacaataataaatgctcactactgactccttcctagtgatttcctcagattcacatgttcccgggttctttgtgtcccctgtgtgtggtggaaaacgccacgcaggggcagctgctgctgcacatctcggcccaattctgccttcagcgctgtcctaatggtagcttgaagccagctatggctggagcttttactcaacagaaattggtaaacacgacaaatcgtgacttgattttttcttttgttgattgtctatactttagaaagtgatagaaaaaaaaaaaagaaagtgatgaaaaagtgttaatcatgcagattaaacttaaaagtgtgtcctgttggctgggcacgat

SEQ ID NO: 185070 - DNA, 30 bp, Homo sapiens
  chr17:77898852-77898882
  hypo
cgcagccggtgaaaacgcctggaagagagt

SEQ ID NO: 185071 - DNA, 128 bp, Homo sapiens
  chr17:77899565-77899693
  hypo
ccagctctggtcccccggccccaggtcctggacgctggctccgcgcagcagcaggcggcctccggaggacacgatgtgactggctgccgctacgtcgcactcagatgagtctgcgccggatcgacctg

SEQ ID NO: 185072 - DNA, 64 bp, Homo sapiens; identical to SEQ ID NO: 93776
  chr17:77900546-77900610
  hypo

SEQ ID NO: 185073 - DNA, 31 bp, Homo sapiens; identical to SEQ ID NO: 93777
  chr17:77908724-77908755
  hypo

SEQ ID NO: 185074 - DNA, 31 bp, Homo sapiens; identical to SEQ ID NO: 93778
  chr17:77911917-77911948
  hypo

SEQ ID NO: 185075 - DNA, 194 bp, Homo sapiens; identical to SEQ ID NO: 93779
  chr17:77912318-77912512
  hypo

SEQ ID NO: 185076 - DNA, 154 bp, Homo sapiens; identical to SEQ ID NO: 93780
  chr17:77913050-77913204
  hypo

SEQ ID NO: 185077 - DNA, 143 bp, Homo sapiens
  chr17:77913690-77913833
  hypo
tggtcagctaatacactaccacgtccctgggacaaagcagatcattgtcagaggatcttgcaaacacaaacacgcacgcacgtgtgcatgcatgcatgcacgcagggacacacgcacacatcgacccattcaagccccagctg

SEQ ID NO: 185078 - DNA, 761 bp, Homo sapiens
  chr17:77914402-77915163
  hypo
caggtgcggtggctgcgcgttccactgcagcgtttcaggagctgactttcctctgggtggctgtagatctgacttctgtcacttccagactctaattttgtcattaatatgaaaaggttcctctcatgttgcccaaaagcattttccttaggtttctaccgtcccctgtccccttcacgcccagccccaccccctcccgtgcccagggcctctgaggaggtcccctcaacccctgtccggtgtcgggggcccgacctatctgcggaagccgaagccgtcctgcggcgtctttgggcccttcttgccttccctcagggacttgggggaaggcatctccaccgtgcccccgtagggacagctctccgagccgggatggtggccggtgcactccaccgcgggcatggagccgctgtcccacatgcctgacccgcacagcttacacagatcgtgcaggctgcaggggatccggggcaggaggcggaactggtacagcaaactcctcgcctgcagacagaggacggggggtgaggaggggccgggggacagcctggcagcctagggtccccatgggagtggccaaagacagcaacagcagcaacaacggcctgcacctcgggggctcaccgagtcctggactgagggctctgcctgcatctcccaccatcaccggcaccacggggccctgggtcttaggtggctgcagtgatgggacccacaaggcactcgggctgtgctcacaggtggctcgaggtgaacaaggc

SEQ ID NO: 185079 - DNA, 30 bp, Homo sapiens
  chr17:77915553-77915583
  hypo
cctgtccgtcagccccggtgaattcgttcc

SEQ ID NO: 185080 - DNA, 31 bp, Homo sapiens; identical to SEQ ID NO: 93783
  chr17:77915952-77915983
  hypo

SEQ ID NO: 185081 - DNA, 189 bp, Homo sapiens; identical to SEQ ID NO: 93784
  chr17:77917678-77917867
  hypo

SEQ ID NO: 185082 - DNA, 1160 bp, Homo sapiens
  chr17:77918539-77919699
  hypo
ggtctgaagccagccacgtgggacgggaaggcagtcgccgtatggggggctaatgtgtggctgtgggtggggggcggcgaggcggacaggggcagcaggcagggtggccacggtggttcaggggccatggtcccaacctccccagccctggcccctgccctggtcacctggtagtgggcccagcaggcctcccagatccgcagcgcttcggcctcggggaactcccgcttgaagcacagaaggagccagcggtggcagaagagcatctgcaggccgtcctcgcccagcgagaccaggtgctggtagaagcgcacgtgcgtcagccgcagcagctcgcgcaggtacagctgggggtgaggccgtcacgcgttagttagctccggtcccatgcggcctgctgcccaggaagcccactcccactggggcccttccctgggccaccccagcctggaaaagcacacccaggggcctctacctgctgcatgtgcctgcccccccaacgctccattccgccgctggaatcggctcacacctgcctctgccagttcctcccagatctgactgttccggaggctgtggtgtggtccagggtgaggcagagtgttgtgcccgggcgtggcaggacgctggcagccgctccatggccaggaaggctccccaccctcagtgcacacttgggggctgtttcccacgtccactcctcctggtgaggtgagtggatcatccagggagcccccccacccctcttcggctacgctcacccagatctatcatcttccagagctgttttagggcaggaaggggacgtatctgagccccaggatgctcgattcctgccattaaggtcatctcccaatgatgtgggacaagatcggggctatttctggcagcactcgggcccaggccgctgacttcatcaatgccgctggaaaatcaatctccagcattcagtgagtcacccagccatgcgctgccatgagccgtcagaggcgaatggcgttggacactgtaactgcctccccaagcaatgtggacacccgacgtcacacacacccgttgatgcagagtgagcaggcttggctgggttcagccccccggcccaggtggagttagatcacagctggggggatcctggggcagagctcggggccacatgcccc

SEQ ID NO: 185083 - DNA, 30 bp, Homo sapiens
  chr17:77919907-77919937
  hypo
ccagcctgtcatcagcgacccactaacagt

SEQ ID NO: 185084 - DNA, 698 bp, Homo sapiens; identical to SEQ ID NO: 93787
  chr17:77921126-77921824
  hypo

SEQ ID NO: 185085 - DNA, 30 bp, Homo sapiens; identical to SEQ ID NO: 30888
  chr17:77922760-77922790
  hypo

SEQ ID NO: 185086 - DNA, 392 bp, Homo sapiens
  chr17:77923298-77923690
  hypo
tgagctaacgagccccgcagctccgaggcccgagtgcttggtttaatgactgcacttatcccaccctatcactcacgttcctgggagacccatttttgaaagaaactatgggtcacgaaacatattatcaatgctgaattgcacctcaaattgccttttcaaatgacattttcctccgcggctcggcggggtgggccgggctggccccggcggttaccttttctgctggatctcagagtactcctttcgcttctgcagccgcagcgcctcccgctcctccgacgtggactcgtggctgtaatagcgcagcaggaagggccagacctccccgcggattgacacatcaataccgccaaagaaaatggcctggaggaagcggcaaaagttgggga

SEQ ID NO: 185087 - DNA, 171 bp, Homo sapiens; identical to SEQ ID NO: 30890
  chr17:77923949-77924120
  hypo

SEQ ID NO: 185088 - DNA, 347 bp, Homo sapiens; identical to SEQ ID NO: 93791
  chr17:77926414-77926761
  hypo

SEQ ID NO: 185089 - DNA, 190 bp, Homo sapiens
  chr17:77928335-77928525
  hypo
ctgccgtggctgcgccgcggacgggcccagaagaccgagggctcctgacatcttcccaagtggaccctgcgggagctgcgcttcagaatcgttgctcacaacacagggcaggtctcgagtctgaggccccaccgcacccatgggtgcccccttctgtcatctgctcattgaaccgcggggctgctgtgac

SEQ ID NO: 185090 - DNA, 468 bp, Homo sapiens
  chr17:77928736-77929204
  hypo
ctcgctttggcagtcacggatggagggccccctccctgctgccgtggccacagaagactggtcccctggagggccggagccgatttcaaaccaggcaagagtccaggacacaggggccaccacacacctcccccagcaacgtgcctccaggcaggagttggcttaaaccctctcgcaaccccttaggggcaaattatttgcattaattaatggattgattcattaattcaagatactgtgcttgggacctacagctggggttccataagctcaaactagagcgaaggtgatggagacctcagttcgctttcattggggtacgtctggcaggtaccccaggccctgtgtggtcatggaggacgaggtctggtgcccctcgaggccggctgctgtggggtgggggttgcatcgtgtctcttcatcttcagctcccagccctggcttggcgcagaacacacagacatttaa

SEQ ID NO: 185091 - DNA, 88 bp, Homo sapiens
  chr17:77930344-77930432
  hypo
gctgggcccggtggtcgctttaagttgctgagtttgagggcggtttgtttcacagcaacggatcactgacacacgcaggacaagccag

SEQ ID NO: 185092 - DNA, 31 bp, Homo sapiens; identical to SEQ ID NO: 93795
  chr17:77932289-77932320
  hypo

SEQ ID NO: 185093 - DNA, 93 bp, Homo sapiens; identical to SEQ ID NO: 93796
  chr17:77937608-77937701
  hypo

SEQ ID NO: 185094 - DNA, 84 bp, Homo sapiens; identical to SEQ ID NO: 93797
  chr17:77946277-77946361
  hypo

SEQ ID NO: 185095 - DNA, 254 bp, Homo sapiens
  chr17:77948843-77949097
  hypo
tccgtcacctcctcgccatgccgtccccactgccagtgggcgcaacgttacttgcaaggccacaaacacccggaacaatccgccaggccgcgtcactcctcaccctccagcagggctttggatttttggacagcgagttctgtttcattttgttttgtttttccctttgcatttggtgaactccgtgtcaggaaagctagtctttgggattcaaggaagaacaaaacaaacccgatctcctgtaatctacctgg

SEQ ID NO: 185096 - DNA, 31 bp, Homo sapiens; identical to SEQ ID NO: 93798
  chr17:77949673-77949704
  hypo

SEQ ID NO: 185097 - DNA, 34 bp, Homo sapiens; identical to SEQ ID NO: 30894
  chr17:77951520-77951554
  hypo

SEQ ID NO: 185098 - DNA, 282 bp, Homo sapiens
  chr17:77953036-77953318
  hypo
agagcacacacgctccggggatgcacacccacgcccagagcacacgcgctccggggacgcacacccacgcccagagcacacacgctccagggatgcacacccacgccctggaccccagcagagggatcaagggctcaggcatccccagtgccgccaatcacgtggccctctcgaggtgaagctgcgacactgtgtggaaacccaggggagatgggagaggcctgaagcgggaggcgggaggaccgcatagctgcaaatgcatctgggcgtgaagacgtccct

SEQ ID NO: 185099 - DNA, 401 bp, Homo sapiens
  chr17:77953786-77954187
  hypo
cacggctgtgggcaccggtgcctccccagaccctctgggcagcccatccttgcacctggaggagcagctcaccgtgccgtggagggtggccgcgaggttcatctgggcctccgagcctcccagcgcatcccactgctctgcagaaacagaataatcaccacccaggctggtggcttcccaacttttccgtgacgttcccctaggcaatttaaaaatggagtgaatactgataataatttgactaaatttaggtgttccccttaggcatctgattaaatttcatgaactctttttcaggcttgcagcccaaattccccttctctcttggcttcacggcacgggcttcttgaccaccatgtagggtcagcaaattccgcctaacaagccggagctttccttcc

SEQ ID NO: 185100 - DNA, 62 bp, Homo sapiens; identical to SEQ ID NO: 93801
  chr17:77954475-77954537
  hypo

SEQ ID NO: 185101 - DNA, 30 bp, Homo sapiens; identical to SEQ ID NO: 30895
  chr17:77955152-77955182
  hypo

SEQ ID NO: 185102 - DNA, 270 bp, Homo sapiens; identical to SEQ ID NO: 93803
  chr17:77955470-77955740
  hypo

SEQ ID NO: 185103 - DNA, 101 bp, Homo sapiens; identical to SEQ ID NO: 93804
  chr17:77956293-77956394
  hypo

SEQ ID NO: 185104 - DNA, 107 bp, Homo sapiens
  chr17:77975263-77975370
  hypo
ccggctgccaggctgcgctgggcccggaggggtgggcgggggttcctggagcatcctcagggggcggcgggcgctctcggggtatccccgggcgccctggttggccc

SEQ ID NO: 185105 - DNA, 485 bp, Homo sapiens; identical to SEQ ID NO: 93805
  chr17:77975730-77976215
  hypo

SEQ ID NO: 185106 - DNA, 182 bp, Homo sapiens; identical to SEQ ID NO: 30896
  chr17:77976564-77976746
  hypo

SEQ ID NO: 185107 - DNA, 306 bp, Homo sapiens; identical to SEQ ID NO: 93807
  chr17:77980904-77981210
  hypo

SEQ ID NO: 185108 - DNA, 30 bp, Homo sapiens; identical to SEQ ID NO: 30898
  chr17:77982972-77983002
  hypo

SEQ ID NO: 185109 - DNA, 554 bp, Homo sapiens; identical to SEQ ID NO: 93809
  chr17:77983869-77984423
  hypo

SEQ ID NO: 185110 - DNA, 385 bp, Homo sapiens
  chr17:77987118-77987503
  hypo
aataacctgggctgtgcgaccctggagcctcgcctgccctggctcacctgggtggtgctcccccagcccctgcagcccctccggcgggtgcacgcagacattgttcttggagtagatgatctctccatccaggacagagggggacccgctgccgctgccaccgggggtgagggtcaggaggtccgaggctttggaggaggccctgcgaaggaggcggcccagagacattgccgggcaagtgtttccatcctccgcatgcgtcggcccgggcagggctcgtcaagacctgcctgggggaggaagagagaggagatggtcaaggttgtggacttgcgttctgtctcacagcagtacgtgtcgcctcggcacccggtgggttctggtt

SEQ ID NO: 185111 - DNA, 31 bp, Homo sapiens; identical to SEQ ID NO: 93812
  chr17:77989974-77990005
  hypo

SEQ ID NO: 185112 - DNA, 32 bp, Homo sapiens; identical to SEQ ID NO: 93813
  chr17:77991172-77991204
  hypo

SEQ ID NO: 185113 - DNA, 102 bp, Homo sapiens
  chr17:78007923-78008025
  hypo
aattaggaactactaacgcaatcaccaaaattgctagaggattaaataattccacagataaaaactttttttttcctttttttttttttttttgagacatag

SEQ ID NO: 185114 - DNA, 101 bp, Homo sapiens; identical to SEQ ID NO: 54705
  chr17:78009417-78009518
  hypo

SEQ ID NO: 185115 - DNA, 580 bp, Homo sapiens; identical to SEQ ID NO: 54706
  chr17:78009923-78010503
  hypo

SEQ ID NO: 185116 - DNA, 21 bp, Homo sapiens
  chr17:78021779-78021800
  hypo
aaaaaacaagccgggcgcggt

SEQ ID NO: 185117 - DNA, 176 bp, Homo sapiens; identical to SEQ ID NO: 93818
  chr17:78022347-78022523
  hypo

SEQ ID NO: 185118 - DNA, 173 bp, Homo sapiens
  chr17:78023955-78024128
  hypo
ctggagaagagtcacgaccgccacgcaatggcctcgagcgagcgcaggcagaaggaggaggagctgcaggccgcccgcgctctctacaccaagacctgcgcagccgccaacgaggagcgcaaaaagtgtaaggcaacccggcagccccacacgccatccggtcctggagggtt

SEQ ID NO: 185119 - DNA, 188 bp, Homo sapiens; identical to SEQ ID NO: 93820
  chr17:78024750-78024938
  hypo

SEQ ID NO: 185120 - DNA, 226 bp, Homo sapiens; identical to SEQ ID NO: 93821
  chr17:78026927-78027153
  hypo

SEQ ID NO: 185121 - DNA, 20 bp, Homo sapiens
  chr17:78031663-78031683
  hypo
gatttcgtctcaaaaaaaaa

SEQ ID NO: 185122 - DNA, 217 bp, Homo sapiens
  chr17:78032356-78032573
  hypo
ccaggacatgcgtgacgacatccgcgtgatgacacaagtggtaaagaaggccgagacggagaggatccgggcagaaatcgagaagaaaaagcaggtattctgcaaactcgacacatgtttaatgatcaccagaccgtggagcttcaaaaaggggctcagctttgcctcctgcgtgaaggcttccggccggaggggtggcggccggcctgggtggcgt

SEQ ID NO: 185123 - DNA, 147 bp, Homo sapiens
  chr17:78033080-78033227
  hypo
ttagcctgcagggacctcttccggggaggactgaagtctttctaacaattctcacccccgtgggcagccggccttccgggtagctcctacatctctgcacctcgtggagtagggagtggagggaacgaagggggtgaaagctgctcc

SEQ ID NO: 185124 - DNA, 30 bp, Homo sapiens
  chr17:78040824-78040854
  hypo
gactgtttaattacacggctcagctgccac

SEQ ID NO: 185125 - DNA, 606 bp, Homo sapiens
  chr17:78041104-78041710
  hypo
tcctcctcctcggcccgcagtcactagaaccccctcccaagacaagcaaaggcacctggttttctgggatcccctgcctaacttgtgtgcaattgcaagaaagcatatgcgttcacccggagtcttccttccctctcttgctccgtgggagcacaccacactcactgttctgcacctctttgctttttccatttaacagcgtgtccctagagcgcttcccaagtcaaaatataaacaccgctcgttcccgcctttctaccacatggcattccgctgggatacttctacggggaagcttcctgcccggggcatcgagggcgttcgcgtccgtctgttatggcggtgctgctgtagataaccggatccgcgaatgctaacgctcaccaggatgctatatagccttttttatattgcctatcaagcccggaatgtctgggtctagcgggtattgctaagtaggattgtgacagtcacgcccccggcagcggtgtttcaaagtcccctgacagctcagcatgttgtcacacttcaggactgtgccaatccgattgatgaagaaaatagataatcttgttttataaaacgtgcatgcgcagaatgttgagt

SEQ ID NO: 185126 - DNA, 30 bp, Homo sapiens
  chr17:78051540-78051570
  hypo
tgagcatctcttccccggcttattcgctat

SEQ ID NO: 185127 - DNA, 213 bp, Homo sapiens; identical to SEQ ID NO: 93824
  chr17:78055252-78055465
  hypo

SEQ ID NO: 185128 - DNA, 152 bp, Homo sapiens
  chr17:78059763-78059915
  hypo
cagccctaattttgctttttgatgaatatccggtctagggggaagaagtggggcccctggagcttgaaatcaaaaggctgagcaagctgatcgacgagcacgatggcaaggcggtccaggcccaggtgacctggctgcgcctgcagcaggag

SEQ ID NO: 185129 - DNA, 158 bp, Homo sapiens; identical to SEQ ID NO: 93825
  chr17:78061501-78061659
  hypo

SEQ ID NO: 185130 - DNA, 30 bp, Homo sapiens; identical to SEQ ID NO: 93826
  chr17:78063748-78063778
  hypo

SEQ ID NO: 185131 - DNA, 48 bp, Homo sapiens; identical to SEQ ID NO: 93827
  chr17:78073419-78073467
  hypo

SEQ ID NO: 185132 - DNA, 195 bp, Homo sapiens
  chr17:78077293-78077488
  hypo
atcgcatgtgggttccggctgctcctgggaggagccaggctaatagaatgtttgccataaaatattaatgtacagagaagcgaaacaaaggtcgttggtacttgttaaccttaccagcagaataatgaaagcgaacccccatatctcatctgcacgcgacatccttgttgtgtctgtacccgaggctccaggtgc

SEQ ID NO: 185133 - DNA, 30 bp, Homo sapiens
  chr17:78077776-78077806
  hypo
gggctcccagccaggcgtggtcactcctga

SEQ ID NO: 185134 - DNA, 121 bp, Homo sapiens; identical to SEQ ID NO: 93828
  chr17:78078980-78079101
  hypo

SEQ ID NO: 185135 - DNA, 303 bp, Homo sapiens
  chr17:78083552-78083855
  hypo
tggtcctgactcgcccggccctggctcctctccaggcaggcgtgtgcaggcatgtgcaggtacacaggcaggcatgctgtacacacgcatgatgtcatccccagcctcatcctctcactgtctcagttttccccgtggctggcgccagggctctgggccaccctcaccttgacaggtttccctcttcccaggatcctgccatcagcagctcgggccctgccgggagctacaggccctacgacgagggtctgcggaggggggttttcatcaccaacgagaccggccagccgctgattgggaagg

SEQ ID NO: 185136 - DNA, 113 bp, Homo sapiens; identical to SEQ ID NO: 93830
  chr17:78086405-78086518
  hypo

SEQ ID NO: 185137 - DNA, 31 bp, Homo sapiens; identical to SEQ ID NO: 93831
  chr17:78096141-78096172
  hypo

SEQ ID NO: 185138 - DNA, 30 bp, Homo sapiens
  chr17:78104224-78104254
  hypo
caatgttggaatagacgtggcaagagcatt

SEQ ID NO: 185139 - DNA, 30 bp, Homo sapiens; identical to SEQ ID NO: 93832
  chr17:78112873-78112903
  hypo

SEQ ID NO: 185140 - DNA, 94 bp, Homo sapiens
  chr17:78122142-78122236
  hypo
cctccagagcacctgggaccacaggtgtccacgcgcagccactaaccgctttcttatctgacactttaagtgcttcttcgtacccagctcctct

SEQ ID NO: 185141 - DNA, 30 bp, Homo sapiens
  chr17:78133975-78134005
  hypo
ggtgtgatcctcccacggtacatttcatct

SEQ ID NO: 185142 - DNA, 31 bp, Homo sapiens; identical to SEQ ID NO: 93834
  chr17:78135900-78135931
  hypo

SEQ ID NO: 185143 - DNA, 212 bp, Homo sapiens
  chr17:78143781-78143993
  hypo
ctgcttgtccactgccgttcagttcagccagagattgggccacattcagtcctcgcttccctgggagggggaaggtaagtgcgcgcagtccatccggcgaagagcaggtcagcctacggagggctcagcctacggaggggctcagccgacacaggtctgatggggcccgagagtggtcccaggggagtgggaggggccggcatcttcctcat

SEQ ID NO: 185144 - DNA, 201 bp, Homo sapiens; identical to SEQ ID NO: 93835
  chr17:78155301-78155502
  hypo

SEQ ID NO: 185145 - DNA, 173 bp, Homo sapiens; identical to SEQ ID NO: 30910
  chr17:78158228-78158401
  hypo

SEQ ID NO: 185146 - DNA, 41 bp, Homo sapiens; identical to SEQ ID NO: 93837
  chr17:78159114-78159155
  hypo

SEQ ID NO: 185147 - DNA, 411 bp, Homo sapiens
  chr17:78163402-78163813
  hypo
tggcttctctcctgcccggtgtagagtggcaagactgcatccgtccacacacctgaccgtgcagttgccgccatcttctcgggattctgcttgcctagggcaggcctctggggaagccagcaccccaggctgacctctctctgccccaggcggagaaggacattctggagcagagcctggacgaggcgcgggggagccgacaggagctggtggagcgcatccactcgctgcgggagcgggccgtggctgccgagaggcagcgagagcaggtgccgtgtgagcccttcctcccttgtgactctcctggggcttgtctcaggggtgcggacaggtctgtggggaagccagattccttcatccacgccgagctcacataattttgctgaacgaatctgtcggcctgttcatctg

SEQ ID NO: 185148 - DNA, 201 bp, Homo sapiens; identical to SEQ ID NO: 93839
  chr17:78165106-78165307
  hypo

SEQ ID NO: 185149 - DNA, 30 bp, Homo sapiens; identical to SEQ ID NO: 30913
  chr17:78178841-78178871
  hypo

SEQ ID NO: 185150 - DNA, 34 bp, Homo sapiens; identical to SEQ ID NO: 93841
  chr17:78179549-78179583
  hypo

SEQ ID NO: 185151 - DNA, 85 bp, Homo sapiens; identical to SEQ ID NO: 93842
  chr17:78182031-78182116
  hypo

SEQ ID NO: 185152 - DNA, 30 bp, Homo sapiens; identical to SEQ ID NO: 93843
  chr17:78183302-78183332
  hypo

SEQ ID NO: 185153 - DNA, 30 bp, Homo sapiens; identical to SEQ ID NO: 93844
  chr17:78188488-78188518
  hypo

SEQ ID NO: 185154 - DNA, 97 bp, Homo sapiens; identical to SEQ ID NO: 93845
  chr17:78188822-78188919
  hypo

SEQ ID NO: 185155 - DNA, 258 bp, Homo sapiens
  chr17:78190740-78190998
  hypo
ccagggatgggagacgtggcagaggcctgggccccggacgcagcctgtctactccctgcccaccccctcctcccgccccttgcacctcacctggggcaggccagtgaggaggctggcgcggctgggagagcagctgctgaccgaggtgaaggcattgcgaaagaggaggctgcggcgggccaaggcgtccaggtgcggggtggcgatggcgctgttgttgtacgcgccactctcaaagcctccgtcatccgctgcgtg

SEQ ID NO: 185156 - DNA, 130 bp, Homo sapiens; identical to SEQ ID NO: 93847
  chr17:78195403-78195533
  hypo

SEQ ID NO: 185157 - DNA, 30 bp, Homo sapiens
  chr17:78211094-78211124
  hypo
gtttgtgttcaggggcgcttctcctgtttt

SEQ ID NO: 185158 - DNA, 30 bp, Homo sapiens
  chr17:78211376-78211406
  hypo
ggtggccaaagccttcggtaagacgcctgt

SEQ ID NO: 185159 - DNA, 31 bp, Homo sapiens; identical to SEQ ID NO: 93848
  chr17:78217103-78217134
  hypo

SEQ ID NO: 185160 - DNA, 31 bp, Homo sapiens; identical to SEQ ID NO: 93849
  chr17:78222247-78222278
  hypo

SEQ ID NO: 185161 - DNA, 30 bp, Homo sapiens
  chr17:78227582-78227612
  hypo
ctccatgagaggacacggcaaaaccaggcc

SEQ ID NO: 185162 - DNA, 84 bp, Homo sapiens
  chr17:78227882-78227966
  hypo
ctgcccgggcagtcccggccaatgtcagcgcagcaaggggagggcctctgtaaccagggctgctggctgcggggctccccactg

SEQ ID NO: 185163 - DNA, 30 bp, Homo sapiens; identical to SEQ ID NO: 93850
  chr17:78236931-78236961
  hypo

SEQ ID NO: 185164 - DNA, 184 bp, Homo sapiens; identical to SEQ ID NO: 93851
  chr17:78256872-78257056
  hypo

SEQ ID NO: 185165 - DNA, 688 bp, Homo sapiens
  chr17:78271716-78272404
  hypo
tgccttgatgacagagtgagactctgtctctaaacaatgaaaataaattttacaagttgctttatatttagatttactgttgccagatggcctgggttcaaaccccagctctgtcagtcaggaccctgcgttgactacttagccaggacccctgcttctgagatccctcccctgtcctgggagtttgttgtggggattcggtgagggcctgcaaaggagctgacgccctaggctgggggctgagggaagccctgtctcctgcgtgagttaaactctgctcagccacgcgcggtgctcctcttgctctgtgtgcacggtgcttgcttcctgttgggactccagactcccagggagatgactccctggccagctcagctcactgcgggatctttattcccttccagctggcggctgtacctggtgaacctgtgccaaagatgcatggacacaaggacgtacacctggctgggcgccctgcctgtcctgcactgctgtatggagctggccccgcggcacaaggatgcctggagacagcctgaggacacctgggccgctctggagggactctccttctcaccgttccgggaacaaatgctagatacgtaagtcgtagagttgtgcttatctacatgaatctgggaagactgactcctacattgtgcacccggagtcccggtgggctctgcag

SEQ ID NO: 185166 - DNA, 32 bp, Homo sapiens; identical to SEQ ID NO: 93853
  chr17:78280675-78280707
  hypo

SEQ ID NO: 185167 - DNA, 30 bp, Homo sapiens
  chr17:78321447-78321477
  hypo
ctgcagaacctctacgagagcctctacgac

SEQ ID NO: 185168 - DNA, 30 bp, Homo sapiens
  chr17:78322469-78322499
  hypo
gtgcttagaggcagcggggagcggtgcaga

SEQ ID NO: 185169 - DNA, 30 bp, Homo sapiens; identical to SEQ ID NO: 93854
  chr17:78322832-78322862
  hypo

SEQ ID NO: 185170 - DNA, 30 bp, Homo sapiens; identical to SEQ ID NO: 93855
  chr17:78323628-78323658
  hypo

SEQ ID NO: 185171 - DNA, 195 bp, Homo sapiens
  chr17:78326747-78326942
  hypo
cagtctgtccacatcgatgacctccggagatccaccctcatggtttctgatgtgaccaggctgcagcatgtcaccatcagccagctgttcgcgcccggagacttgcctgagcgtgagtcacgaggcggagcccctgggggagcaggtggtggaagggcagatggcaggtgtggagcgtggcgtgcacatggcact

SEQ ID NO: 185172 - DNA, 60 bp, Homo sapiens; identical to SEQ ID NO: 93857
  chr17:78330432-78330492
  hypo

SEQ ID NO: 185173 - DNA, 305 bp, Homo sapiens; identical to SEQ ID NO: 93858
  chr17:78337244-78337549
  hypo

SEQ ID NO: 185174 - DNA, 259 bp, Homo sapiens; identical to SEQ ID NO: 93859
  chr17:78338097-78338356
  hypo

SEQ ID NO: 185175 - DNA, 328 bp, Homo sapiens; identical to SEQ ID NO: 30919
  chr17:78354367-78354695
  hypo

SEQ ID NO: 185176 - DNA, 30 bp, Homo sapiens
  chr17:78355537-78355567
  hypo
gggcaagggctgggcggggatcacacagca

SEQ ID NO: 185177 - DNA, 59 bp, Homo sapiens
  chr17:78362263-78362322
  hypo
atgacggagaggggcgctcttagccaagggatacacagggcagcgcggcactacgctgc

SEQ ID NO: 185178 - DNA, 106 bp, Homo sapiens; identical to SEQ ID NO: 93861
  chr17:78387297-78387403
  hypo

SEQ ID NO: 185179 - DNA, 179 bp, Homo sapiens; identical to SEQ ID NO: 54711
  chr17:78388503-78388682
  hypo

SEQ ID NO: 185180 - DNA, 91 bp, Homo sapiens; identical to SEQ ID NO: 54712
  chr17:78389460-78389551
  hypo

SEQ ID NO: 185181 - DNA, 30 bp, Homo sapiens
  chr17:78395068-78395098
  hypo
aatcttcctatggaccgggtcccggggaat

SEQ ID NO: 185182 - DNA, 47 bp, Homo sapiens
  chr17:78395661-78395708
  hypo
cagccccctacgtgtcgggcttcctggccttccgagaggtgcccttc

SEQ ID NO: 185183 - DNA, 380 bp, Homo sapiens
  chr17:78404955-78405335
  hypo
aggccgggtctctggcgcgcctccatgccccttcaagaaggtgctatcctggtgttcctgaggagcagggcgagcctgggcctgagggaacaggtacacaggcagcagcactcagggccggggagtgctggccccacccgcctgcgctcactcgaaagctgctttggagggctgggctgcaggggcagaggctctggaaaagaggcccaggctgtgtagctgcccttccttgatggagcagactctattctagaaatttctataagaagtagactcactccaggacaagtggggctggggggagcggatgccgaggggctctgcgggcaccttgtgcctaaagtcacggggggcacaggagagagcgggaactaggtgga

SEQ ID NO: 185184 - DNA, 30 bp, Homo sapiens; identical to SEQ ID NO: 93865
  chr17:78410002-78410032
  hypo

SEQ ID NO: 185185 - DNA, 73 bp, Homo sapiens
  chr17:78416214-78416287
  hypo
gggacggtgtgacaccggctgcggctacactggtggcagcttctgcagtcatgcctcgcgtgctcggcgcacc

SEQ ID NO: 185186 - DNA, 43 bp, Homo sapiens
  chr17:78421120-78421163
  hypo
ggcccagagccctacttttcacgggtgggctaagaaacagagg

SEQ ID NO: 185187 - DNA, 497 bp, Homo sapiens; identical to SEQ ID NO: 129525
  chr17:78428376-78428873
  hypo

SEQ ID NO: 185188 - DNA, 137 bp, Homo sapiens
  chr17:78442641-78442778
  hypo
aggaacacgccaccccgaggaacatgcaaacggagaagatccctgcagatccaaggatgccacaacccgacgggcgctgaggaagcacgattatctaagaaaaagccactgttgaacaacaacgcgcagcacggcgc

SEQ ID NO: 185189 - DNA, 1346 bp, Homo sapiens; identical to SEQ ID NO: 129527
  chr17:78449590-78450936
  hypo

SEQ ID NO: 185190 - DNA, 994 bp, Homo sapiens; identical to SEQ ID NO: 129528
  chr17:78450959-78451953
  hypo

SEQ ID NO: 185191 - DNA, 459 bp, Homo sapiens; identical to SEQ ID NO: 54718
  chr17:78452108-78452567
  hypo

SEQ ID NO: 185192 - DNA, 118 bp, Homo sapiens
  chr17:78475920-78476038
  hypo
tgtgttcctgcaccacggctcttgcctcaaagccacccactctgcggtgacgtccgacgcagacagcgcacacacggattacgttggaactcatagccaggagcggcttgggaattct

SEQ ID NO: 185193 - DNA, 30 bp, Homo sapiens; identical to SEQ ID NO: 30921
  chr17:78489283-78489313
  hypo

SEQ ID NO: 185194 - DNA, 30 bp, Homo sapiens
  chr17:78499305-78499335
  hypo
ctgagccccggatttcggactcccagcccc

SEQ ID NO: 185195 - DNA, 34 bp, Homo sapiens
  chr17:78517568-78517602
  hypo
ggattataggcgtgagccacggtgccctgcctac

SEQ ID NO: 185196 - DNA, 28 bp, Homo sapiens
  chr17:78518167-78518195
  hypo
cgtgagccacggcgcccggcctttcact

SEQ ID NO: 185197 - DNA, 156 bp, Homo sapiens; identical to SEQ ID NO: 93872
  chr17:78529318-78529474
  hypo

SEQ ID NO: 185198 - DNA, 30 bp, Homo sapiens
  chr17:78539678-78539708
  hypo
aggagctgcatctagcgctgggacagcttt

SEQ ID NO: 185199 - DNA, 33 bp, Homo sapiens
  chr17:78561141-78561174
  hypo
tgttgccgtgtgtagcggcggttattcttgctg

SEQ ID NO: 185200 - DNA, 128 bp, Homo sapiens; identical to SEQ ID NO: 93873
  chr17:78582534-78582662
  hypo

SEQ ID NO: 185201 - DNA, 189 bp, Homo sapiens; identical to SEQ ID NO: 30922
  chr17:78587645-78587834
  hypo

SEQ ID NO: 185202 - DNA, 268 bp, Homo sapiens; identical to SEQ ID NO: 30923
  chr17:78590517-78590785
  hypo

SEQ ID NO: 185203 - DNA, 30 bp, Homo sapiens; identical to SEQ ID NO: 30924
  chr17:78593766-78593796
  hypo

SEQ ID NO: 185204 - DNA, 339 bp, Homo sapiens; identical to SEQ ID NO: 93877
  chr17:78598705-78599044
  hypo

SEQ ID NO: 185205 - DNA, 247 bp, Homo sapiens
  chr17:78599525-78599772
  hypo
gaatgttggtgtggaccctcccgatgtggtgaagaccacgccctgtgcacgcttggaatgctggatcggtgagtatgcctccctcacgcgctgccacaaaggccgtctggccggctctggcctgggcggggctcgccaagcctgtggtctggtccaggggcccgtctccagctgtgcaaatctgaggggtttttctttctggagtcacatcacctttgagtaatttccgatgcgctcacctgtgatt

SEQ ID NO: 185206 - DNA, 587 bp, Homo sapiens
  chr17:78611007-78611594
  hypo
gatgagggagagcagacgtcatgtctgtgagcaaacaaggggcccatgcccagcgtggctctgggtgtcatggcctccctgctaggtcatccggatgaagcctggggctgtggagtcagctcgtgagaaatgggatccaggtcctgagcgtgctggaactggcgagacggggtcacagcacacacctgcgtttccagccctgcccctgctgacggccaagacctcttttcccacccctgctccgcccccctctggataataagttgctgttctagttcatagaagtgacacttgtcccttttcagagaagcaggggagaggctgttttgttttatggcccgacattaaatactacaacagtaatactaaaaacaatcctgctgaagagctgcgcgtgccccactcttggggaactctgctgtggcagcagagtgcggatgagctgcatgctgagcagggagtgtcatttagcggaaatggttttgtgtgccagctaatggtagctgtgtatcagaagaggtgagaatgcaaaggtttgtcagatgtgtggaaattctgtcatcccaagggaacgtttgggaggtctt

SEQ ID NO: 185207 - DNA, 31 bp, Homo sapiens; identical to SEQ ID NO: 30927
  chr17:78614859-78614890
  hypo

SEQ ID NO: 185208 - DNA, 30 bp, Homo sapiens
  chr17:78617319-78617349
  hypo
aaacactggccttcacggcgtgtcagcttg

SEQ ID NO: 185209 - DNA, 35 bp, Homo sapiens
  chr17:78617730-78617765
  hypo
gcgcctgcgcactgcgtttcgtgtgcctgcgttct

SEQ ID NO: 185210 - DNA, 86 bp, Homo sapiens; identical to SEQ ID NO: 93882
  chr17:78620630-78620716
  hypo

SEQ ID NO: 185211 - DNA, 48 bp, Homo sapiens; identical to SEQ ID NO: 93883
  chr17:78630807-78630855
  hypo

SEQ ID NO: 185212 - DNA, 180 bp, Homo sapiens
  chr17:78637756-78637936
  hypo
gctctgcatcttccccgtgacagccgcgtgggcatttgctcttgaccctgtggtggctgagacagaaaccttggaggagtcactcacttctgttggagcaaaatgcaggcctcctccagggctgcgtctgggagggacttgggtggtggagtgtttatgacttagcgcagagggctctta

SEQ ID NO: 185213 - DNA, 410 bp, Homo sapiens; identical to SEQ ID NO: 93884
  chr17:78642230-78642640
  hypo

SEQ ID NO: 185214 - DNA, 30 bp, Homo sapiens; identical to SEQ ID NO: 93885
  chr17:78642839-78642869
  hypo

SEQ ID NO: 185215 - DNA, 30 bp, Homo sapiens
  chr17:78644277-78644307
  hypo
cctgcccgctgcttcgtctttttctatttg

SEQ ID NO: 185216 - DNA, 27 bp, Homo sapiens
  chr17:78647003-78647030
  hypo
cgccacgcccagccctctttttacatt

SEQ ID NO: 185217 - DNA, 236 bp, Homo sapiens; identical to SEQ ID NO: 93886
  chr17:78649356-78649592
  hypo

SEQ ID NO: 185218 - DNA, 30 bp, Homo sapiens; identical to SEQ ID NO: 93887
  chr17:78654633-78654663
  hypo

SEQ ID NO: 185219 - DNA, 251 bp, Homo sapiens; identical to SEQ ID NO: 93888
  chr17:78667553-78667804
  hypo

SEQ ID NO: 185220 - DNA, 524 bp, Homo sapiens
  chr17:78668006-78668530
  hypo
tcgaggcagttgccccgtgctcacgaatccctgacacagctggtgacctctccaggtgacctcttcaagcctggtcccaggggcaggcatgcccgggcatggccctcgcagatggctttgctggcctggtctggcaaccgttgaataaatactgatttcccacccaggtgaggcgcatggtagatgtttgttctgtgcattgcgttggtcggcctccacagtcgcacaatctctcagtggagtgagagtgtcttccatatgtggggccgtggtgctgaaggcttgtgcgttgagtgcctcctttcccgtgaatgtgttggttctggtgaccagggtggagcctccctgcgccccttccttccatccagcatcaggttcccagttctctgcctgccaggcaggcgtgcacatatggagtgtctgggaacctgcagctgttgatcacggctggtggtagctccgcacttaagtaaggaggagtgattttcccgaggagatgtggtattggtcggagttgctgggaa

SEQ ID NO: 185221 - DNA, 30 bp, Homo sapiens
  chr17:78680162-78680192
  hypo
actggagtagctcctcgcatgacccacctg

SEQ ID NO: 185222 - DNA, 30 bp, Homo sapiens
  chr17:78680594-78680624
  hypo
tgtgaattaaacgagcgagagctgacatct

SEQ ID NO: 185223 - DNA, 30 bp, Homo sapiens
  chr17:78681023-78681053
  hypo
tgttttcagaaggaccgcgtacttctgaga

SEQ ID NO: 185224 - DNA, 30 bp, Homo sapiens; identical to SEQ ID NO: 93890
  chr17:78683257-78683287
  hypo

SEQ ID NO: 185225 - DNA, 185 bp, Homo sapiens
  chr17:78691302-78691487
  hypo
ttattttgcacatcacgtggcatgccaccggagacaggcgcgtgttcttccagatctagacagccataagctgcactgtagagcatgcagtcctgttgccgagtctttcagccttcagataggctccctccatcaaaacgaagcctgcagcattacagatgatacactgtcggtacacaatgtaa

SEQ ID NO: 185226 - DNA, 42 bp, Homo sapiens
  chr17:78691699-78691741
  hypo
taagaattcacgtagcggaacgtttatcgggagaaggattaa

SEQ ID NO: 185227 - DNA, 30 bp, Homo sapiens
  chr17:78706101-78706131
  hypo
tgttaaatagagacccgctcccctttcagc

SEQ ID NO: 185228 - DNA, 30 bp, Homo sapiens
  chr17:78706384-78706414
  hypo
aaggcaatgcgataccgtatgtctttaatt

SEQ ID NO: 185229 - DNA, 189 bp, Homo sapiens; identical to SEQ ID NO: 129532
  chr17:78720008-78720197
  hypo

SEQ ID NO: 185230 - DNA, 31 bp, Homo sapiens
  chr17:78725780-78725811
  hypo
taggtatttgtagacacgtgaatgaaggagt

SEQ ID NO: 185231 - DNA, 69 bp, Homo sapiens
  chr17:78733859-78733928
  hypo
catgttttatttagccggagcgtagggctttgggatttaggcgccaggagtatgcgggtgggaaggttc

SEQ ID NO: 185232 - DNA, 30 bp, Homo sapiens; identical to SEQ ID NO: 93891
  chr17:78744800-78744830
  hypo

SEQ ID NO: 185233 - DNA, 90 bp, Homo sapiens; identical to SEQ ID NO: 93892
  chr17:78745062-78745152
  hypo

SEQ ID NO: 185234 - DNA, 291 bp, Homo sapiens
  chr17:78747663-78747954
  hypo
cagagctccctcagacgtcgaccgcttctgattccctccagacagctcccggtggacacgcagggctatgcggcctgccctgggggctatggtgctgaatcctgacaaaggccctcttctcgggctgtcagaaaggacgaggctgagtcaggctttaatgtaaaccatcactccctgtttttctatttcttcgttgaaagaagcactgatcattgtgttcactagaaacacctcaagtttttaaaaggctcctctcctgttggtgtgactcgagggcgctgtgacatcctg

SEQ ID NO: 185235 - DNA, 209 bp, Homo sapiens
  chr17:78759714-78759923
  hypo
cacactccagcacatcgtgtgttcaccttctaaccgggaagctctccttgttcaggagttttcatagagcgtctgtccatggggagaggagtggctaggtggggtgggtggtggtgtcccggaaccagtcccccagggatacccagggatgactgtatatgcccggaccaagtcctgaaggtcatagcagaggccgcttctgcacagtg

SEQ ID NO: 185236 - DNA, 46 bp, Homo sapiens
  chr17:78760395-78760441
  hypo
aaacgaaagtgactccggagaatggaagagccgcagcagctggatt

SEQ ID NO: 185237 - DNA, 54 bp, Homo sapiens; identical to SEQ ID NO: 93895
  chr17:78760829-78760883
  hypo

SEQ ID NO: 185238 - DNA, 30 bp, Homo sapiens
  chr17:78764713-78764743
  hypo
tagagaaagcctgtccggctccacacgcgc

SEQ ID NO: 185239 - DNA, 30 bp, Homo sapiens
  chr17:78764992-78765022
  hypo
tcatgtggctgcaaacggcttctctccttt

SEQ ID NO: 185240 - DNA, 30 bp, Homo sapiens; identical to SEQ ID NO: 30933
  chr17:78768925-78768955
  hypo

SEQ ID NO: 185241 - DNA, 30 bp, Homo sapiens; identical to SEQ ID NO: 93897
  chr17:78771228-78771258
  hypo

SEQ ID NO: 185242 - DNA, 30 bp, Homo sapiens; identical to SEQ ID NO: 93898
  chr17:78773646-78773676
  hypo

SEQ ID NO: 185243 - DNA, 30 bp, Homo sapiens; identical to SEQ ID NO: 30934
  chr17:78774033-78774063
  hypo

SEQ ID NO: 185244 - DNA, 557 bp, Homo sapiens
  chr17:78775494-78776051
  hypo
tgaaaatcagtaattcattaacgtctgccagtcactgctgagatgagtaacgaggcactagacgctgatttagaaatgaagaggtggaagcaaaacccgagagatcgccgagcgagggggaggtgagtgattggcggaaacgggggaccgccgccacctagcagatcacccctgcctgcccgagcacagccacctcagcgttcccgtgcgcgccacgccagggcgcacggtgctgcacgggggtccttatgcccgggcgcctctcattaaggtccccccacgggcagagggaagacgggcaccgggtccccttcgtgttcgatgtgcaccccagcaaggcctccttagctcatccggattggtaggggtggaggaggcttggttctgagatgaaattgcagacgtgcagccaagggggaatgtgagaggttcagaggccaccccagggaacctgcacacagcacggagatcttccgtttccttcacagtggtacccaaaccctggtatttgtcatcaaaacaaaggcctgcgccacagagcacggagctgtaacatc

SEQ ID NO: 185245 - DNA, 30 bp, Homo sapiens
  chr17:78782704-78782734
  hypo
tttcacctgttgatgcgcgtttgaattgtt

SEQ ID NO: 185246 - DNA, 32 bp, Homo sapiens
  chr17:78782969-78783001
  hypo
ggcattctgccttttcggggttttttttattt

SEQ ID NO: 185247 - DNA, 32 bp, Homo sapiens
  chr17:78783240-78783272
  hypo
ctcggccacccaagtgccgggattacaggcgt

SEQ ID NO: 185248 - DNA, 116 bp, Homo sapiens; identical to SEQ ID NO: 93901
  chr17:78789605-78789721
  hypo

SEQ ID NO: 185249 - DNA, 247 bp, Homo sapiens
  chr17:78791759-78792006
  hypo
agataaatcctggcaagaaaccgcatgccacaggtgagcccggaagtgtgggggaaggtggagataaaccctcctgccaatggcagtgaaggagagtttgaggaggcgcgggccctgttggggggccaccccggcatctgccacatctgttgttggagtgtcatctgttttattttagtcgccattttgcatcagggtcagctgtgttgactcagcagagaaacaggtaccacgagtcatccagcca

SEQ ID NO: 185250 - DNA, 209 bp, Homo sapiens
  chr17:78794033-78794242
  hypo
gcagcttgaaagaggcggtgtttttgcggaacagttattgacgatcttgtcagtcatttcattaaaacggttttcagcatatgtgtttctcatctgcaggtgtgggacccaagacacaagtgtgttggggctccatgtccaccccacgatgccccccgtgccccttctccgtgctgtttcctagggctgtgtcccgggcagccacccct

SEQ ID NO: 185251 - DNA, 30 bp, Homo sapiens; identical to SEQ ID NO: 93902
  chr17:78795526-78795556
  hypo

SEQ ID NO: 185252 - DNA, 37 bp, Homo sapiens; identical to SEQ ID NO: 93903
  chr17:78796144-78796181
  hypo

SEQ ID NO: 185253 - DNA, 30 bp, Homo sapiens
  chr17:78801663-78801693
  hypo
actgccgcaaagctacgatttttactatca

SEQ ID NO: 185254 - DNA, 187 bp, Homo sapiens
  chr17:78801931-78802118
  hypo
tggccactgtgctggcggatcacagcatcgttgtcagcgtgaggaagcttccccggtgtctgaacgagtctgatcaggcagagacgagcagggagtggcacttagcgacctgctgtagtcatgctcctgggagcatgctcctgagaccatgcgaggtctcaggaaggatgtgcgcctcatatgagaa

SEQ ID NO: 185255 - DNA, 30 bp, Homo sapiens
  chr17:78803164-78803194
  hypo
caaccggggctctgcggggcggttttggcc

SEQ ID NO: 185256 - DNA, 30 bp, Homo sapiens; identical to SEQ ID NO: 93904
  chr17:78803459-78803489
  hypo

SEQ ID NO: 185257 - DNA, 193 bp, Homo sapiens
  chr17:78805983-78806176
  hypo
cattcattgggaacccgtgatccaggggctttacaaatgggcatgtgtgagcataggcagcataggctgccgtggccccaggtgtcagggtgcaggcggctcctgtcttggaggcttccatcccccgtggaagctcgtgctggccactggagcaacattcccgcaggtgggaaggccgcgaggagtggacgag

SEQ ID NO: 185258 - DNA, 142 bp, Homo sapiens
  chr17:78811168-78811310
  hypo
acagggaggggcctgacggcaccatcacagcgcagagctcagccctgaccgccaggactcctttccctgactgcatgccgacccctcctgatgaggcactttgggcctggccctggtgtctctcccgcgtccctccaggacg

SEQ ID NO: 185259 - DNA, 282 bp, Homo sapiens
  chr17:78811560-78811842
  hypo
gaacagcagtgaaaccgtaaacatgccccccaccagctgccgtggcctccgcccagacccttgctgcccaggctcagccggctcctcctgtgccctgtgaagtggcctcgtgtggaagcccgtccataatgctcagtggatttcctctgttctctccgcaggcaagcctgggacctggctgttgacatctgtctgtctcagctgccgacgatcatcgaggaaggcactgcgtttcgggtgagtccctccaagggcaccctgtgcatccgcggcggcagccac

SEQ ID NO: 185260 - DNA, 402 bp, Homo sapiens
  chr17:78812100-78812502
  hypo
tttcaccacagacgcgttgtggatctcccccaggcctctgactctcagccctgtgggacagtgacccacggggggtttggtgctgaaccctggagggcgttctgcccccggccgcactgcacgggcgctggagagctgagccaccctacggcggaacctgggtttagtcgccgcacctgcaagtgagggtggccccgggccttcgcggcagctccctaggaccccctcgtggtttcttaatgagcttttgccttacgtgaggcgccaagtctgaaaatagataaataagacggaggccctgccctccagaaacccgtgaggaaagaggagcctctcacatctgtgcagaatgcaagggagcaatcggcaagagggcgcggcagacacggggaggccagggat

SEQ ID NO: 185261 - DNA, 31 bp, Homo sapiens; identical to SEQ ID NO: 30940
  chr17:78817768-78817799
  hypo

SEQ ID NO: 185262 - DNA, 234 bp, Homo sapiens; identical to SEQ ID NO: 93909
  chr17:78818426-78818660
  hypo

SEQ ID NO: 185263 - DNA, 30 bp, Homo sapiens; identical to SEQ ID NO: 93910
  chr17:78820878-78820908
  hypo

SEQ ID NO: 185264 - DNA, 30 bp, Homo sapiens
  chr17:78821518-78821548
  hypo
tcctagaaagcagatcgggtggtggtacct

SEQ ID NO: 185265 - DNA, 30 bp, Homo sapiens
  chr17:78821782-78821812
  hypo
agccagcgtcgcaggcgtgctgtaggactg

SEQ ID NO: 185266 - DNA, 77 bp, Homo sapiens
  chr17:78822273-78822350
  hypo
tcaaaaccaagaacacgcagtgatagcagcaacgcaaccaaacaacatttgacagaagcccacgttttcccttcgtg

SEQ ID NO: 185267 - DNA, 30 bp, Homo sapiens
  chr17:78824561-78824591
  hypo
acataccatgtacatcggggactccaaaac

SEQ ID NO: 185268 - DNA, 31 bp, Homo sapiens; identical to SEQ ID NO: 93911
  chr17:78829655-78829686
  hypo

SEQ ID NO: 185269 - DNA, 30 bp, Homo sapiens
  chr17:78830185-78830215
  hypo
agcggtgcggtggggcggtgggtgcggaac

SEQ ID NO: 185270 - DNA, 94 bp, Homo sapiens
  chr17:78836324-78836418
  hypo
tggtgatggtcctccgaagctccgcccaccatgatgtctgctccgccccctcgtgttgctggtggtcctctggagctccgcccaccatgatgtc

SEQ ID NO: 185271 - DNA, 30 bp, Homo sapiens
  chr17:78848664-78848694
  hypo
ccttcccagcaccccgctcataacaagggc

SEQ ID NO: 185272 - DNA, 30 bp, Homo sapiens
  chr17:78856660-78856690
  hypo
gacactagaccgcgcgacgtgtgtgtaaaa

SEQ ID NO: 185273 - DNA, 30 bp, Homo sapiens; identical to SEQ ID NO: 93913
  chr17:78856996-78857026
  hypo

SEQ ID NO: 185274 - DNA, 30 bp, Homo sapiens
  chr17:78865127-78865157
  hypo
gggtgtgatctagagcggcgttttcagcca

SEQ ID NO: 185275 - DNA, 152 bp, Homo sapiens
  chr17:78867011-78867163
  hypo
gagtgcctgtgcctgtgtgtgcgccggggcgtgtgtgccagggtgtgtgcgccagggtgcgtgtgtaccagggtgtgtgtgcgccgggtgtgtgtgtgcgccaggtgtgtgcgcgcgccaggtgtgtgtgcgccagggtgtgtgtgtgctgg

SEQ ID NO: 185276 - DNA, 30 bp, Homo sapiens
  chr17:78869512-78869542
  hypo
cctctgttctaaagcgcaggcgcccccatc

SEQ ID NO: 185277 - DNA, 301 bp, Homo sapiens
  chr17:78870123-78870424
  hypo
acccatcccatccacggccgcgccgacaccccacacagccgccccgacaccccacgcggcctcgctgacaccccacggccgcagcaacaccccacacggcctcgccaacaccccacggccatgccgacaccccacacggccgcaccgacacatcccacggccgcaccgacacaccccacggccgcaccgacaccccgcatagccaccccggcaccccacggccgcgccgacaccccacacagccgcgccgacaccccacacggccgcgccgtcacaccacagctgcgggggcagcaccttt

SEQ ID NO: 185278 - DNA, 53 bp, Homo sapiens
  chr17:78871405-78871458
  hypo
gacatcgctgccttacgctcaccagctatttctttgggcgctccccattggca

SEQ ID NO: 185279 - DNA, 30 bp, Homo sapiens
  chr17:78871779-78871809
  hypo
gtcattccctgtcctcgggggcaattttta

SEQ ID NO: 185280 - DNA, 532 bp, Homo sapiens
  chr17:78872484-78873016
  hypo
cgccccgactccccccgccccggctccccccgcacctgctcacccaacccctgctcaccccgcccctgctcaccccgccgtctccgtctagtgagttttgatgatgggcttttcacttgtgttcagcttcaagctttctttctacttccattgtggttcctggggatggcggtccagccacaatgacagcagcgcatgacaggagcccaaagacccgaaacagacgcagggcatccgccaaggcagttcccaccgggcaaccctgtgggtgtgctcccagccttggccagctgctgccttgagcacctctggatagaacgagtccagagcttgcaccatgccctccagggtatggagaactgaaaggttcactacacaacaacccagacacgccagcttagcccagacacgccaacttgttaattttcattgagaaataacgttgcagctttgtgcatttggctgtccactaaaatatgccaagtgcccagaaagcgcagagttgactccgtatattcgagtataaatcaag

SEQ ID NO: 185281 - DNA, 184 bp, Homo sapiens
  chr17:78873840-78874024
  hypo
cgaagccagtaccatcggctctgggcatctcccacccctccctgcagaagtgggcgtcctccctctgcagccaaggggaccggcgtttactcaggttgactcctggccaggagtcggggactcctctttgtgccccaacacatccttctctcagccgggcatctgtggccgtctcctccccgcc

SEQ ID NO: 185282 - DNA, 137 bp, Homo sapiens
  chr17:78874422-78874559
  hypo
ttctttcacaggaagcgacagcagcatcacccctcggtgctcacctggtgaccgtctgccaagggcctggtggccccgccaccctacctggcccatgctccatggggttctcggttcactctcgtccctccactcac

SEQ ID NO: 185283 - DNA, 450 bp, Homo sapiens
  chr17:78876641-78877091
  hypo
cccgccttccctcccgaaaccctgcgtctcggccagagtccaagcacacccgtgctgagaggcgaggcgggagttaattctgctcgggactctggtggcctgagaaggctcttcccgcagaaacagcctcatcccgagagcgctggcaggaacgcagatcagaggcctgggctagatgggaccagttttcacgactctgctagatacggtgacattttttacggttttgaaaatgagttaccatagaaatggatccaggatggactaatgcaagggaggggagggcgagaaaggaacacagccctgcggagcctggagccggccctggtgcagctgtggcaagcgccctgctcacccagaggaggagctgggggccctggccagcggcagagccagaagccccgcaggccgcctgtgctctccacacctgaacacgggattctgcgggag

SEQ ID NO: 185284 - DNA, 110 bp, Homo sapiens; identical to SEQ ID NO: 93919
  chr17:78877956-78878066
  hypo

SEQ ID NO: 185285 - DNA, 30 bp, Homo sapiens; identical to SEQ ID NO: 93920
  chr17:78880016-78880046
  hypo

SEQ ID NO: 185286 - DNA, 30 bp, Homo sapiens; identical to SEQ ID NO: 30946
  chr17:78880733-78880763
  hypo

SEQ ID NO: 185287 - DNA, 346 bp, Homo sapiens
  chr17:78882479-78882825
  hypo
gcttcctgtaacctcggctctttaaagcaacacttctgataccagggttagggtttcagaaaatgcagccgccttaggagcctcattggcagctactttccactaaaacatcttccatttctctctctcaggagtttcctttaacagtgtttacactcagatttggagagtcctgctgcacctggctgctgacccctatccagaggtctcggacgtggccatgaaagtactcaacagcatcgcctacaaggtacgtgccgggcgctccccaccgcgctccagctgctggttctcggttacgagtatgcatgccaggaactccaggtgtgcccgggtccacaccaca

SEQ ID NO: 185288 - DNA, 198 bp, Homo sapiens; identical to SEQ ID NO: 93923
  chr17:78894342-78894540
  hypo

SEQ ID NO: 185289 - DNA, 30 bp, Homo sapiens; identical to SEQ ID NO: 93924
  chr17:78895049-78895079
  hypo

SEQ ID NO: 185290 - DNA, 30 bp, Homo sapiens
  chr17:78898247-78898277
  hypo
ccctggagcaggaacggccatgttggggta

SEQ ID NO: 185291 - DNA, 31 bp, Homo sapiens; identical to SEQ ID NO: 93925
  chr17:78898616-78898647
  hypo

SEQ ID NO: 185292 - DNA, 30 bp, Homo sapiens; identical to SEQ ID NO: 93926
  chr17:78911562-78911592
  hypo

SEQ ID NO: 185293 - DNA, 30 bp, Homo sapiens; identical to SEQ ID NO: 93927
  chr17:78915131-78915161
  hypo

SEQ ID NO: 185294 - DNA, 30 bp, Homo sapiens; identical to SEQ ID NO: 93928
  chr17:78923917-78923947
  hypo

SEQ ID NO: 185295 - DNA, 460 bp, Homo sapiens
  chr17:78935152-78935612
  hypo
ttcagggaagccccacgctgagcgtgccccctcccctacagccgcgtcatgacgtaccgggagcacacagcctgggtggtgaaggcctccctgcagaagcgtcccgacggccacatcgtgagtgtgaggtgaggagcgccgatatttagcagccgttctgctgtaaaaacattattttcccctccatttaaaatacgtccttggtatttaaacagctggaaggggatggcatttcgggcagtaattaactcctgccctggaactggccagaaagatcaggcgcagcccgtaggggcccaggggccacagctgctcccctgctgggggacacctgacctgcaggcgctttgggaactttcctgggctgccaactgcggagggttccggggggagttgggcagctgctctccctccacgggcaggggtggcagggtggcaggggcggcgcgtctgccaggca

SEQ ID NO: 185296 - DNA, 30 bp, Homo sapiens
  chr17:78935884-78935914
  hypo
ccaggctctgtctcccgggactgcaggccc

SEQ ID NO: 185297 - DNA, 30 bp, Homo sapiens; identical to SEQ ID NO: 93930
  chr17:78936277-78936307
  hypo

SEQ ID NO: 185298 - DNA, 199 bp, Homo sapiens; identical to SEQ ID NO: 93931
  chr17:78936613-78936812
  hypo

SEQ ID NO: 185299 - DNA, 30 bp, Homo sapiens
  chr17:78937823-78937853
  hypo
tcctgaaaaaaccacgcagggcccggggca

SEQ ID NO: 185300 - DNA, 30 bp, Homo sapiens; identical to SEQ ID NO: 93932
  chr17:78938329-78938359
  hypo

SEQ ID NO: 185301 - DNA, 30 bp, Homo sapiens; identical to SEQ ID NO: 93933
  chr17:78939091-78939121
  hypo

SEQ ID NO: 185302 - DNA, 30 bp, Homo sapiens
  chr17:78939655-78939685
  hypo
agaaggttccggcacgaatcccatccccac

SEQ ID NO: 185303 - DNA, 203 bp, Homo sapiens; identical to SEQ ID NO: 93934
  chr17:78940078-78940281
  hypo

SEQ ID NO: 185304 - DNA, 186 bp, Homo sapiens; identical to SEQ ID NO: 93935
  chr17:78968279-78968465
  hypo

SEQ ID NO: 185305 - DNA, 30 bp, Homo sapiens; identical to SEQ ID NO: 30949
  chr17:78968910-78968940
  hypo

SEQ ID NO: 185306 - DNA, 30 bp, Homo sapiens; identical to SEQ ID NO: 93937
  chr17:78973135-78973165
  hypo

SEQ ID NO: 185307 - DNA, 30 bp, Homo sapiens; identical to SEQ ID NO: 30950
  chr17:78973676-78973706
  hypo

SEQ ID NO: 185308 - DNA, 38 bp, Homo sapiens
  chr17:78975639-78975677
  hypo
gggcgcggtggctcacgcctgtaatcccagcactttgg

SEQ ID NO: 185309 - DNA, 38 bp, Homo sapiens
  chr17:78975916-78975954
  hypo
aagaaatgcgtgggacagaatggcgggtccatcctgga

SEQ ID NO: 185310 - DNA, 129 bp, Homo sapiens
  chr17:78999726-78999855
  hypo
cctcctctgggccccggtagctctggcgttaagtcggctggagactggcttggccacggccgccatctctagccagccctggggcaactgcccccggctgcgtcccaccctgcccgcctcctagcccct

SEQ ID NO: 185311 - DNA, 52 bp, Homo sapiens
  chr17:79001012-79001064
  hypo
agggaagccatctgcgcggcgcccagcagcatggagacgtctgggtcctccc

SEQ ID NO: 185312 - DNA, 90 bp, Homo sapiens
  chr17:79001564-79001654
  hypo
cctgcccagctccagacgtgtggctgaagcggccagctcggccagttcgtcccggcgccacatgtgtccttcctccggccccagacccca

SEQ ID NO: 185313 - DNA, 1048 bp, Homo sapiens; identical to SEQ ID NO: 129538
  chr17:79007513-79008561
  hypo

SEQ ID NO: 185314 - DNA, 908 bp, Homo sapiens; identical to SEQ ID NO: 129539
  chr17:79008840-79009748
  hypo

SEQ ID NO: 185315 - DNA, 31 bp, Homo sapiens; identical to SEQ ID NO: 30953
  chr17:79020691-79020722
  hypo

SEQ ID NO: 185316 - DNA, 211 bp, Homo sapiens; identical to SEQ ID NO: 93943
  chr17:79027367-79027578
  hypo

SEQ ID NO: 185317 - DNA, 30 bp, Homo sapiens; identical to SEQ ID NO: 93944
  chr17:79032984-79033014
  hypo

SEQ ID NO: 185318 - DNA, 31 bp, Homo sapiens; identical to SEQ ID NO: 93945
  chr17:79040987-79041018
  hypo

SEQ ID NO: 185319 - DNA, 31 bp, Homo sapiens; identical to SEQ ID NO: 93946
  chr17:79041934-79041965
  hypo

SEQ ID NO: 185320 - DNA, 183 bp, Homo sapiens; identical to SEQ ID NO: 93947
  chr17:79042374-79042557
  hypo

SEQ ID NO: 185321 - DNA, 445 bp, Homo sapiens
  chr17:79044046-79044491
  hypo
ccgtgcctggccagaggttggtcttgcaaggcaaatttgcccatgaagaaaggaacaggccctgctccaagctgtggcctgggtctgccctccacactgagcggacgtccaggcagccttcgggctgggtattgaatgtgctctgccgggcaaccttggtcacttgtggccaaaagggaggtggaaatgtggaaagaaacccctctgccccgtcagaccttaaacctccttgcggacactgggcaaaggaagaggcaaaaggtgctttggagggaggagagaggcacagggagggttgctgcagaggggttcctagtggacgcgggggcaggagaaggccctggcgtgcctgtcccgctgcagctgtgggagctgggcttggccaggtcgctcaacccgtggggagaaggtgtcgggttagctcagcccccgcagagcctcatct

SEQ ID NO: 185322 - DNA, 237 bp, Homo sapiens; identical to SEQ ID NO: 30956
  chr17:79045479-79045716
  hypo

SEQ ID NO: 185323 - DNA, 483 bp, Homo sapiens
  chr17:79046032-79046515
  hypo
gcgttgggagacctgcgcaggccccacctcagtccacaacaatgttccttgattccctccggcttcctgctccttcacctcctcctgcgcagcccggcctgacccatgtaatcagggaacaggaggggctctcctcagtgtccctatgtccatgccttgtggccacctgagcacttctcagggtccagtggaaaactctcctgccctgtttgacgcccacactcgtcagtttcaccttggtgccaagagcagacgatctgctccaggccccacttgggccacagcctcacagccgtctccacgtccccacccgaacctggcatttcctgaattcctggcccctgtccgagaaggaggctaaccctcctgggagagctctggcaggtgctgacccaagtccgtggggtcttcaacctttgcagacacctgcgcccagaggccacgcctcccactctgagcacaggcgggcggacgctgtctggc

SEQ ID NO: 185324 - DNA, 55 bp, Homo sapiens; identical to SEQ ID NO: 93950
  chr17:79047313-79047368
  hypo

SEQ ID NO: 185325 - DNA, 455 bp, Homo sapiens
  chr17:79048171-79048626
  hypo
gtgcgtgcacggatacgtgagtgctggtgtgcgtgcatggatgcgtgtgagtacgtgtgtgtatgcacaaatacatgtgagtgccagtgtgtgtgcatgcacggatacatgtgaatgcctgtgtctgtgcgtgcatggatgcgtacgagttgcctgtgtgtgtgcacgtgcacagatgtgtgagtgcctgttcgtgtgcgtgcatggatgtgtgagtgcctgtgtgtgcgtgcacggatgcgtgagtgcctgtgtgcgtgcacggatgcgttgagtgcctctgtgtctgcgtgcacggatgcgtatgagtgcctgtgtgtgtgcatgcacggatgcgtgtctgtgcgtctgtgtgcgtgcacagatgcgtgtgagtgcctgtgtgtgtgcacggatgcataagtgcctgtgtgtctgtgtgcatgtacggatgcgtgtgagtgcatgtgggtgta

SEQ ID NO: 185326 - DNA, 33 bp, Homo sapiens
  chr17:79050213-79050246
  hypo
tggcagccggtgagacgccgcagtttgctctgc

SEQ ID NO: 185327 - DNA, 156 bp, Homo sapiens
  chr17:79050943-79051099
  hypo
gcaactcctggtgggcgtgggtttctcttcggggtgatgaaagtgtccgggcagtcagctagctcaactggtgagcgcatgatgctgacgatgccacagttgtggactcgatccccacaccggccacagtcccaatttcttagccgggcatggcag

SEQ ID NO: 185328 - DNA, 695 bp, Homo sapiens
  chr17:79051338-79052033
  hypo
gcctgggtgacagagactctgtctcaaaaaaaaaaaaaagtaaaaatggtgaattttatgttatgtgaatttttctcaattttaaaaaaagagcctaatgctgggaggacggatgcttgggcttcccgcccgtcctgaggctggtggtgctgagtatgcgggtggctgtgggagcgggtgccgtctcaggtgcgagccagacaccgtgggtgcgggtgcaggtgtgggtaccgttttgggtgggagccgggcgctgtgggtgcaggttccacctcggagctgggtgctgtgggcacaggtgcgggtgccatcttgggtgggagccaggcactgtgggtgccagtgccatcttagatctgggcactctgggtgcaggtgccatctcggagctggatgctgtgggtgcgggtgccgtattgggtgggagccggacgctgtgggtgcaggttccacctcggagctgggtgctgtgggcacaggtgcgggtgccatcttgggtgggagccaggcactgtgggtgccagtgccatcttagatctgggcactctgggtgccggtgcgggtgtcgtcttgggtgggagccgggcactgtgggtgcaggtgccatctcggagctggatgctgtgggtgcgggtgccgtattgggtgggagccggatgctgtgggtgcaggttccacctcggagctgggtgctg

SEQ ID NO: 185329 - DNA, 35 bp, Homo sapiens; identical to SEQ ID NO: 93953
  chr17:79052329-79052364
  hypo

SEQ ID NO: 185330 - DNA, 164 bp, Homo sapiens
  chr17:79052898-79053062
  hypo
caagcagaaccaacccgaggacagaaagatgctggccgggcatgcctggggcctgggttcctcagcctcacctgactcaggtgctgttttccttgctggggagcaggggcccagccggggtcttgaggcagccctgtccccatcagctgcgctcagacctgtcc

SEQ ID NO: 185331 - DNA, 429 bp, Homo sapiens
  chr17:79053490-79053919
  hypo
tccttctgatggcgacggctctgccggtctgttctggctcatgtgctgtgtgccctggcccgctggcactcagcttacatttgaacctcgtctttagagttaaggtcccacctgtgctgtggaccagacgtgggcctcccagtgagtggggggcatctgataggtgaggctgcttaggaagcctggcacaccctgtccctcagcagggtgggcctgggtaagtctgcccgccgcatgggagggagtgtggagagatgaagagatgagggagcccgagaacgcatggcctcacgtctcaccccaagggaggctctcaacggctgtggagccctcgctactccgtcttcaggcccctgaaggacacaggcaaccgcggacaagacttagttgctcagcggaactcactgcccctaccggtgcctctcactg

SEQ ID NO: 185332 - DNA, 30 bp, Homo sapiens
  chr17:79054249-79054279
  hypo
gtggggctgggggctcgggctggcggggat

SEQ ID NO: 185333 - DNA, 141 bp, Homo sapiens
  chr17:79059744-79059885
  hypo
cctggttccatgccccggctttggccacttgcggtgaagctggtgcctgactctgctgccggggagtgcaggagctccttctctggcctctgcagttccctgggctctcggcccgtcctgccccaccgccactcctgtccg

SEQ ID NO: 185334 - DNA, 87 bp, Homo sapiens
  chr17:79060174-79060261
  hypo
gctgccagtggtccgcgctgcgttgggttcatgggccttggttttgtgttttattgtttgaatctcaggctgcgctgaagaaatacc

SEQ ID NO: 185335 - DNA, 238 bp, Homo sapiens; identical to SEQ ID NO: 30959
  chr17:79060659-79060897
  hypo

SEQ ID NO: 185336 - DNA, 134 bp, Homo sapiens
  chr17:79061382-79061516
  hypo
ctggtggagctggatcggccccaaaggagaggacgggactaggccaggggcagatgagaaggataagtgagagtctgtggaaacagccatacgggggagctgggggtccctcgggtgcccgctgctgtttgcag

SEQ ID NO: 185337 - DNA, 620 bp, Homo sapiens
  chr17:79062264-79062884
  hypo
tgtccatcactcagtccgttttagagcatttttcaatcagcagtcactcctgggcccctggccccaccagtcaccagcctgccattggcctccgtagacttgcctgttatggacattctgcgtagctggaatcccacagtgtccggcctttggtgcctggtggctcacgtggcacggagggttcttaaagctcatcgtgccgtagcctgcgccagcctcctcccctcttactgtcgggggtcagcctttcttccttttcatggctaaatcgtgttccatcgtgtgggtaccggaggctccatcctgctcagggccagggccgtctccctggcacggccggtactgccctgtggctgagctcgctgggagctggagatcgcggcggggtagcatagggccggacaaaggcagaggctgggggctgtcggagccactccccctccctcctgcaggctggagccagaggcctgaggcccccacgcagtcactgtggccctgccgcaccagctccctggttttcaggtgccctgcctcccactgccaggcctcttcaggagggccctgaccgcacacctggcctctgcctgccctccgcgctgctctgccgtgggccccgggtg

SEQ ID NO: 185338 - DNA, 98 bp, Homo sapiens; identical to SEQ ID NO: 30962
  chr17:79065508-79065606
  hypo

SEQ ID NO: 185339 - DNA, 56 bp, Homo sapiens; identical to SEQ ID NO: 93959
  chr17:79067465-79067521
  hypo

SEQ ID NO: 185340 - DNA, 31 bp, Homo sapiens; identical to SEQ ID NO: 93960
  chr17:79069908-79069939
  hypo

SEQ ID NO: 185341 - DNA, 75 bp, Homo sapiens; identical to SEQ ID NO: 93961
  chr17:79072578-79072653
  hypo

SEQ ID NO: 185342 - DNA, 306 bp, Homo sapiens; identical to SEQ ID NO: 30964
  chr17:79072863-79073169
  hypo

SEQ ID NO: 185343 - DNA, 328 bp, Homo sapiens
  chr17:79073678-79074006
  hypo
caggcgtccttccatcgctggctgagcctttctccctttccctccacagtacatcgacgccatcagcaacaagcagggcgagctggagaattacgtgtccgacggctacaagaccgcactgacagaggagcgcaggcgcttctgcttcctggtggagaagcagtgcgccgtggccaagaactccgcggcctaccactccaaggtgaggcggctgggggctgcgctgtgccggcgctgggccttgctggcagaaatgacccaggcccctgccccagccccagccccgtgaacacaccggggcagtgtccaggctcgaactctcgtttat

SEQ ID NO: 185344 - DNA, 287 bp, Homo sapiens
  chr17:79074738-79075025
  hypo
cacatgctgctgccctcgtgacctctgagagacccctctgcccgtcatctgttgagggcccctccttgggccggtagactcttggccctgtgtttcccgctaggcgtcccccggcacagtcctgcggccctgtgtctcccgctaggtgtcccccggcacagtcctgcggccctgtgtctcccgctaggcgtcccccagcacagtcctgcagccctgtgtttccggcatccccagccttgtcgttccttgtgggggaatcccgccctgggatccgccatgtcccagga

SEQ ID NO: 185345 - DNA, 30 bp, Homo sapiens; identical to SEQ ID NO: 93965
  chr17:79077103-79077133
  hypo

SEQ ID NO: 185346 - DNA, 681 bp, Homo sapiens; identical to SEQ ID NO: 93966
  chr17:79077360-79078041
  hypo

SEQ ID NO: 185347 - DNA, 37 bp, Homo sapiens; identical to SEQ ID NO: 93967
  chr17:79078511-79078548
  hypo

SEQ ID NO: 185348 - DNA, 531 bp, Homo sapiens
  chr17:79079545-79080076
  hypo
caatcttggtgccatccgtggcttagcgtgacactggggctgcgaggcaggagcaactgctctgcccgggctctggggccttgcagttgggtctggtggggccggcagctcccaccaggttgaggacagcccgggccaccttgcccttgaggctgagcacacagtgggagcgggctgcggtctttgtctccctggagcactgtctctgttgctccagagacagccgcgcagccatgctggggagctagagggacttgtgcatggatggtggtcggtgggggatggggagcctctgggctgagcgtggctcttacctggggcctctcttccaggcggggctggtttcccttctcctacacccgggtcttggacagcgatggcagtgacaggctgcacatgaggtgagctctgggcccaacgggagtgtaagatccccagctcgggagaggggctgtgatgacaccaggtccctgggcttggattgctcggctgggcttccggctccttgtctgctaccgcagggccatcccc

SEQ ID NO: 185349 - DNA, 30 bp, Homo sapiens; identical to SEQ ID NO: 30970
  chr17:79080644-79080674
  hypo

SEQ ID NO: 185350 - DNA, 538 bp, Homo sapiens; identical to SEQ ID NO: 93971
  chr17:79082609-79083147
  hypo

SEQ ID NO: 185351 - DNA, 124 bp, Homo sapiens; identical to SEQ ID NO: 30973
  chr17:79083369-79083493
  hypo

SEQ ID NO: 185352 - DNA, 330 bp, Homo sapiens
  chr17:79084398-79084728
  hypo
ttctcggcactcagtcgcctgctagataacctgggcttgcacacggtgctggccccagtgacagtcgctcactctgcccgggctctgcggggggccgtctgcagctgaggcaggctcctggctccctccaggcccgcaagtgaggcaggctccgcaggcgccgtccagggagagccagagccccagctgtgtgccgactccgagtgctccagggttctaggtctcctggcagctcgcccgtggtcccccctcctctgcacccccgagtcctcagaccccatgctgcctccaactgagccttgtgtttccttgcagcgccgatgtggaagt

SEQ ID NO: 185353 - DNA, 164 bp, Homo sapiens
  chr17:79086356-79086520
  hypo
gaggcccaagcgcccacgctggacccgattccagaagggcccaccttctgaagacacgaagaaacagctgacgcgagaagacagaaaacaggtgctgtccgcccggctctgggtctggagtcacccaactggtcgaaatgcatttgtgacggctccgtttcttc

SEQ ID NO: 185354 - DNA, 176 bp, Homo sapiens
  chr17:79086874-79087050
  hypo
aaattagaaaagccaccggtctcccctgcggccttgcttaggggcctctgaggggaggctctctgtgaggagacagagcccaggcctctgcattctgaggccagcgccctgcccgcccaacagctcccccacacatgacgcaggccctcctcagggtcctccgctcttggacacgt

SEQ ID NO: 185355 - DNA, 517 bp, Homo sapiens; identical to SEQ ID NO: 93976
  chr17:79093913-79094430
  hypo

SEQ ID NO: 185356 - DNA, 127 bp, Homo sapiens
  chr17:79094704-79094831
  hypo
ggcctgaggtggcctcggcctcagcctcgaggtctgagaagtaggcagagtctcggtagggattcttctcgttgaggccactgagggaggtggagagccgtgtctcgggcccggggccctcaccctc

SEQ ID NO: 185357 - DNA, 222 bp, Homo sapiens; identical to SEQ ID NO: 30978
  chr17:79097036-79097258
  hypo

SEQ ID NO: 185358 - DNA, 349 bp, Homo sapiens
  chr17:79097958-79098307
  hypo
cgggagtggtgggggcggttggggaagcagcagaggtgaggcagggaggggcgcccaccccggggcggaccactcccctggcggctcggccctgccccttccgagtctacaccaggtgtgaatgaacgctccgggctaggcactcaggataggggcttccaggctgcggccgtgggagatcccagcaccaccgtcagcccctctgcctggcacggcccgacctacgctcccgtgaaggcagccaacaccccacccagaccctctccccagggacaggtactcaccaaggcccccgtctcaggacagaccccccggcatgctgaagacgggccgttggccctgtacgtat

SEQ ID NO: 185359 - DNA, 30 bp, Homo sapiens; identical to SEQ ID NO: 30980
  chr17:79099231-79099261
  hypo

SEQ ID NO: 185360 - DNA, 591 bp, Homo sapiens
  chr17:79099761-79100352
  hypo
ggcgtctggggctgacggggccacgtgtccttcgccacttcttccagcatgtccccccggggtccccaggggctgggcatcctggcccaagcaggacagaaccctccctccagggtccttcgaagcagggtctgtctccctcaagccccaaagcgagggcttagcagagtgtggggttggcgcggggctgcagggtgctggctgactgcctcggggacagagaacaggccagcttgacagtacgcatctcttcgtctaaacctgcaaagtgggtgtcaaaccattgtcttcccaatttttcaaaaacgtcataaaatccctctgcatagtggttgtctgatgctgcatgagatgaacctggccggtcctcgcaagccccctgaggcaggacccgccctatgcccttccttcaggggaggggcctggcctagggcttcccggccgctggcccgcgcccgccctcacctgtgcacgaaattgttgcgatgaaggtgcaggacgccacaggccacctcacaggccatgcgctgcagggtccgggggtcgggagccatggactccgccacccggcagctccgcaggtagcccttg

SEQ ID NO: 185361 - DNA, 31 bp, Homo sapiens; identical to SEQ ID NO: 93983
  chr17:79102269-79102300
  hypo

SEQ ID NO: 185362 - DNA, 357 bp, Homo sapiens; identical to SEQ ID NO: 93984
  chr17:79102633-79102990
  hypo

SEQ ID NO: 185363 - DNA, 261 bp, Homo sapiens
  chr17:79104767-79105028
  hypo
agagctgagtcttccggtctccccagatcacacccaacgcccagcacctgggccccggagggaggccaccccatctccccacccagccctcacctgagcgcccaggctgcttggccatgggcaaggagacctccgtgagtggcaggacgtacacgtcgggcccgttctgtgctgccgtggccggggagccctgcgccaggtcggctgcgtactcgtccccctccgcattctcaaactcctgcgggccgggccgggcatgag

SEQ ID NO: 185364 - DNA, 30 bp, Homo sapiens; identical to SEQ ID NO: 30985
  chr17:79105544-79105574
  hypo

SEQ ID NO: 185365 - DNA, 30 bp, Homo sapiens
  chr17:79107722-79107752
  hypo
cttgtctgggcagcccggactcccctttgc

SEQ ID NO: 185366 - DNA, 198 bp, Homo sapiens
  chr17:79108113-79108311
  hypo
tacaggccttgcctgcgggatcccacgacagctcccgcggcccccaggcctcaccttgaacccgataccgcccttcttacagcacaggcaggccagcatgaggacgatgacggcgaagagcccggagaaagacacagccaccacggcgagggaggatggccaggacagctcgctgagcggggcgccgtctgcgggaga

SEQ ID NO: 185367 - DNA, 31 bp, Homo sapiens; identical to SEQ ID NO: 93988
  chr17:79113512-79113543
  hypo

SEQ ID NO: 185368 - DNA, 55 bp, Homo sapiens; identical to SEQ ID NO: 93989
  chr17:79114514-79114569
  hypo

SEQ ID NO: 185369 - DNA, 199 bp, Homo sapiens
  chr17:79133080-79133279
  hypo
tcattcacagagagcgagcgagatccccaacatggggcagctgggagggcgccggcggcctgcgagtgaccggccaggtagcagtcctgggggcagtggcggggactctcgggggctgggcgtgctgccgcgcgggtaaatccaatgcggggaagccccggacccgcaccccggaggtcagagcgcacttgtgtgtgcc

SEQ ID NO: 185370 - DNA, 185 bp, Homo sapiens; identical to SEQ ID NO: 93990
  chr17:79135398-79135583
  hypo

SEQ ID NO: 185371 - DNA, 183 bp, Homo sapiens; identical to SEQ ID NO: 93991
  chr17:79135803-79135986
  hypo

SEQ ID NO: 185372 - DNA, 265 bp, Homo sapiens
  chr17:79154927-79155192
  hypo
tccagcaccacgcggcgtctacgtctgctctggcccaagcagcacccccaatccgtgcgtgcaccccacgaattgactccctatccacccaggaccaggatggaggaggacttctcctcccagatgaagaagatggccttggccatgggcacgtccctatcagacaaggacattgagctgctgcccacagacatgagacaccacggtacagcatgcccccgcccggcgcggccccccgcccgtccagccccgctgtggtcaggag

SEQ ID NO: 185373 - DNA, 239 bp, Homo sapiens
  chr17:79155470-79155709
  hypo
cttcattgagtggaacgagatcaagtaatggctggcggccacggaggggtggggcccaggccacccagaccacgccgaatgcccacatggcggacccggccttcccccaccgggtccccgctggccttgcagctggcagggctgggccagaaccagctagaagcccaggaggctcagaggcccaggctcccggcccgaagtgcccttgcctacaaggtggggggcgaacggctcgtgag

SEQ ID NO: 185374 - DNA, 31 bp, Homo sapiens; identical to SEQ ID NO: 30987
  chr17:79164758-79164789
  hypo

SEQ ID NO: 185375 - DNA, 775 bp, Homo sapiens
  chr17:79166315-79167090
  hypo
tcagccctcagggctcgggtcagtgcagagctgctctcctccagctgctgcctcagctcttccagctccgcccgctgcctgcggccagggaggagtcagcaggtgaggggtcatcgagtaaggagtcagggatgggagaggtcagcgggtgagggggcgggggggaggggtcagccagcgaggggtccctgggagagggcgtggtgcccccgggcggcacctggctgcctgctggcccagccgctccctctcctcagccacctcactgtacagccgctgccgttgctgctgcagcgcccactgctcctgctccaggtgctgctggaacctgcgggacggtcaggactggctctcgggggccgggacgggcggtcccaggacccacccaccgcaggggcacgggccgaccacaggcctgactcacagctggagagcagccctccggggccctgcccctccccctcggcagtcaaggcccctcaaagccaccgcccgggggcaggcaaggccacgaggaacttgcccatcagccaagcgcagcaattccctgagctccaggccctcgtggcactttgggaagtggctgtggagccgcgtccaggcccccttttccctcagcccgtgtgccggcctcaccctgttcagcattgccccacgggcatggagggcgggaggcaggtgcctcgtggggccttatccacctcccctgcctccggcctgagggtgccaggtgcctggctccgtgacctgagcaagctcgcgccagggcctcgtc

SEQ ID NO: 185376 - DNA, 37 bp, Homo sapiens; identical to SEQ ID NO: 93995
  chr17:79168719-79168756
  hypo

SEQ ID NO: 185377 - DNA, 279 bp, Homo sapiens
  chr17:79169405-79169684
  hypo
gtgacagcaggcccacggccccgccccagagcctggcagctagagaggcaggagtggaccagctcggtgccacggtgctcccccagacagccccacccaccgctgtggccctgacacaccgagacaggaatgaggactccaagtccggtcctgttctgggggctgtgccagctgagcctggcctgtgagccgggcttgggacgccgtgcagtagggagcaaagcctcaccagctcgtgctgcgcctgtgcctgggccacacgctcggtgcatctctggt

SEQ ID NO: 185378 - DNA, 30 bp, Homo sapiens; identical to SEQ ID NO: 93996
  chr17:79173808-79173838
  hypo

SEQ ID NO: 185379 - DNA, 435 bp, Homo sapiens
  chr17:79175937-79176372
  hypo
ggaaatttctatcctcggaggtgtgagccccccagaccctgatgcctgcccacctctgtgttctaggctcaggcccccccccaccgccccaagatcggtcacctctcagcctcctcctccgtcacctccttccgcctgggcaagcccgtgctgcccccagtattgttccgggctgagtgggtggcactggagacattcttcggcagcttcccaaagccgctgctctcactgccctcacaggtggctgccttgatgatgttgctgacaggtaagaagaaaacaccctcgtctcaccgcccaggggaacagctctgcccacaggcagcaggtgcccactcccggaagtcccaggactgagcctggaagtggtgctggcaggctggcagccggggcagagggggacagcggcaggtgcgaggccggctctcccgtgcc

SEQ ID NO: 185380 - DNA, 30 bp, Homo sapiens; identical to SEQ ID NO: 93998
  chr17:79177508-79177538
  hypo

SEQ ID NO: 185381 - DNA, 34 bp, Homo sapiens; identical to SEQ ID NO: 93999
  chr17:79183371-79183405
  hypo

SEQ ID NO: 185382 - DNA, 30 bp, Homo sapiens; identical to SEQ ID NO: 94000
  chr17:79193747-79193777
  hypo

SEQ ID NO: 185383 - DNA, 31 bp, Homo sapiens; identical to SEQ ID NO: 54726
  chr17:79197096-79197127
  hypo

SEQ ID NO: 185384 - DNA, 259 bp, Homo sapiens; identical to SEQ ID NO: 129544
  chr17:79205173-79205432
  hypo

SEQ ID NO: 185385 - DNA, 341 bp, Homo sapiens
  chr17:79206045-79206386
  hypo
ccgcaaagccccagcggtgacaggaaggagtgacccagaccccaaggggaggagccctcgcctcgatacctcggggacctggaatggccccggggagtaggttccccagggttgggggaccgtggctggctgaaggcatcatggcaggctggtaggtgtcaccccgcggcaggagcctccgggtactgggactctcgggcccggggcgcatggcgctggccaccacctctgcggccttctggatggtggagaggaaggcttcgcctgccgagcctgtacccgaggagagggagatgggacggccgcccagtgcggcccccacccgcgttctctgggagcag

SEQ ID NO: 185386 - DNA, 71 bp, Homo sapiens; identical to SEQ ID NO: 94005
  chr17:79216890-79216961
  hypo

SEQ ID NO: 185387 - DNA, 479 bp, Homo sapiens
  chr17:79223888-79224367
  hypo
ttcagctgctcgtcccgttgagaggcatacggaagaaaggcagaataggaaaccgtgaaaagtctttttcagaaagaagaaaatcaaaagaatcaaacaggttcaggtaacagagcataggaattggaaccaacaaacatggccagactaaaaccggagacaaaaccccacatgcccgaactcctgaagtggctcagagctccgggagcccagggggcgccttttggctctgccttccgcgctgcaggtgcaaggagggcgagctgcacctggagaagccaggccgcagcgactgggacgtggctgctgcacctgccctccctcggaccggctgtcctgaggccacagggcaagatgcgcgggcaggaagcgtgtgtcttacgaacatcctgggaggtgcccgtgccagggctggcccggagctcccacacctgctcccaggggcttggcacaggaggctggagcggctgtgccctgcg

SEQ ID NO: 185388 - DNA, 30 bp, Homo sapiens
  chr17:79224768-79224798
  hypo
ccgagctccgaggcccgagggtgtgggagc

SEQ ID NO: 185389 - DNA, 68 bp, Homo sapiens; identical to SEQ ID NO: 30991
  chr17:79226307-79226375
  hypo

SEQ ID NO: 185390 - DNA, 30 bp, Homo sapiens; identical to SEQ ID NO: 94007
  chr17:79226872-79226902
  hypo

SEQ ID NO: 185391 - DNA, 126 bp, Homo sapiens
  chr17:79230307-79230433
  hypo
acagtcacatcagacggcccccagacgaagtgacttttaaacacactcccggcatcccacggacggagtgcctcatccactcaagtgccgccccaagttcaggaggaggctcgggatcccagggcg

SEQ ID NO: 185392 - DNA, 30 bp, Homo sapiens; identical to SEQ ID NO: 94009
  chr17:79232593-79232623
  hypo

SEQ ID NO: 185393 - DNA, 30 bp, Homo sapiens; identical to SEQ ID NO: 94010
  chr17:79233105-79233135
  hypo

SEQ ID NO: 185394 - DNA, 178 bp, Homo sapiens
  chr17:79234792-79234970
  hypo
gcaccatgcatgggcacgggggacagaaatggccttcgcctctccttagctgtggtgtggtgcccactggggtcaccctgtgagctgacctccaggcactctttgccgaaggctctccctgtgtgacctagtcctccctccttcccccgctccccggccaatcgtaagcatcacacgt

SEQ ID NO: 185395 - DNA, 30 bp, Homo sapiens
  chr17:79235552-79235582
  hypo
gccgcaatgtgcctcggggcttgtaggatg

SEQ ID NO: 185396 - DNA, 30 bp, Homo sapiens
  chr17:79237345-79237375
  hypo
ccctcgtcctggctcgctgactttcaggct

SEQ ID NO: 185397 - DNA, 30 bp, Homo sapiens; identical to SEQ ID NO: 94012
  chr17:79239557-79239587
  hypo

SEQ ID NO: 185398 - DNA, 30 bp, Homo sapiens; identical to SEQ ID NO: 94013
  chr17:79248036-79248066
  hypo

SEQ ID NO: 185399 - DNA, 186 bp, Homo sapiens
  chr17:79253770-79253956
  hypo
aacgctacaggggccgctctgccagccccccgcatgccgatggtcttttcccgtctgcgccggatttacgcctctcttttcagccggttaccatgttccaaccgggcacgaatcactcgctcttgtcattttggtggagaaggtaatgctgctggaattatggaagagcccgatccacatttacag

SEQ ID NO: 185400 - DNA, 30 bp, Homo sapiens; identical to SEQ ID NO: 30994
  chr17:79254214-79254244
  hypo

SEQ ID NO: 185401 - DNA, 30 bp, Homo sapiens; identical to SEQ ID NO: 30995
  chr17:79254580-79254610
  hypo

SEQ ID NO: 185402 - DNA, 30 bp, Homo sapiens
  chr17:79255946-79255976
  hypo
gagcagcctttcagcgggtacccacgcgcg

SEQ ID NO: 185403 - DNA, 31 bp, Homo sapiens; identical to SEQ ID NO: 30996
  chr17:79256352-79256383
  hypo

SEQ ID NO: 185404 - DNA, 30 bp, Homo sapiens
  chr17:79257006-79257036
  hypo
ctggcttgcttcctcgcgtgtacctctcac

SEQ ID NO: 185405 - DNA, 30 bp, Homo sapiens; identical to SEQ ID NO: 94018
  chr17:79279038-79279068
  hypo

SEQ ID NO: 185406 - DNA, 36 bp, Homo sapiens
  chr17:79292567-79292603
  hypo
tttcccagtgccggccgggcatggtggcgggcgcct

SEQ ID NO: 185407 - DNA, 97 bp, Homo sapiens; identical to SEQ ID NO: 30997
  chr17:79294050-79294147
  hypo

SEQ ID NO: 185408 - DNA, 337 bp, Homo sapiens
  chr17:79296201-79296538
  hypo
cgcctcgcttctgcccgtcgctctcaccacaaccctccccgccccggtgtctcactcatgcctcacacctggactctccagtggcgcacaccttagagggtctcacatgggaagccccatggtgggcccagccgggttcagcacgtgggcctcctgggagccgccccacacctgcgcttctcaggggcgcccgctgtgggtcctgctgtgggtctgcagaccacactttgagagcaggctccccgggtggtggccgacgcctgtcacctgtggccccgcttaacccacccttcaccggcactgagtccccccgcacagaccccgggatccaaccccc

SEQ ID NO: 185409 - DNA, 181 bp, Homo sapiens; identical to SEQ ID NO: 54732
  chr17:79319123-79319304
  hypo

SEQ ID NO: 185410 - DNA, 30 bp, Homo sapiens
  chr17:79500075-79500105
  hypo
gggcatggaacctcacggcttccaaggcag

SEQ ID NO: 185411 - DNA, 39 bp, Homo sapiens; identical to SEQ ID NO: 94022
  chr17:79505401-79505440
  hypo

SEQ ID NO: 185412 - DNA, 30 bp, Homo sapiens; identical to SEQ ID NO: 94023
  chr17:79505666-79505696
  hypo

SEQ ID NO: 185413 - DNA, 30 bp, Homo sapiens; identical to SEQ ID NO: 94024
  chr17:79506958-79506988
  hypo

SEQ ID NO: 185414 - DNA, 30 bp, Homo sapiens
  chr17:79514259-79514289
  hypo
gggggcaagggccccgcccaccacctccct

SEQ ID NO: 185415 - DNA, 60 bp, Homo sapiens
  chr17:79523603-79523663
  hypo
aagcagtgactgtggggcagtcgcagggctgacaggtgcggcagaggcagaagaggcacc

SEQ ID NO: 185416 - DNA, 255 bp, Homo sapiens
  chr17:79539641-79539896
  hypo
aagcagtcgtgctctcgggcactgggactccccactgggagagcacatcaaatgcctcctctccacccatggcgcttggcctggcactcaggcgcgatctgcgacaggcagaagggtctgcgttcccctcaggttggacctgtgccctgtctatcctccaaaagcacatgaatcctcacagtctgaatgctaactcttagaatcttactcacacctctgaaaacccgactttccagaaaccgagtacttggacat

SEQ ID NO: 185417 - DNA, 20 bp, Homo sapiens
  chr17:79542140-79542160
  hypo
tttgagagggagtctcgctc

SEQ ID NO: 185418 - DNA, 436 bp, Homo sapiens; identical to SEQ ID NO: 94026
  chr17:79542406-79542842
  hypo

SEQ ID NO: 185419 - DNA, 97 bp, Homo sapiens
  chr17:79543262-79543359
  hypo
ttaaatcctaaaagcacggaaagagtatgtaggtagatgcatagttctgggggaaagaattacagttggccgttgcacaacgcgggtttgaactgag

SEQ ID NO: 185420 - DNA, 139 bp, Homo sapiens; identical to SEQ ID NO: 94028
  chr17:79544178-79544317
  hypo

SEQ ID NO: 185421 - DNA, 21 bp, Homo sapiens
  chr17:79566025-79566046
  hypo
tattttaggccaggcacggtg

SEQ ID NO: 185422 - DNA, 99 bp, Homo sapiens; identical to SEQ ID NO: 94030
  chr17:79597563-79597662
  hypo

SEQ ID NO: 185423 - DNA, 31 bp, Homo sapiens; identical to SEQ ID NO: 94031
  chr17:79608475-79608506
  hypo

SEQ ID NO: 185424 - DNA, 309 bp, Homo sapiens; identical to SEQ ID NO: 94032
  chr17:79609052-79609361
  hypo

SEQ ID NO: 185425 - DNA, 56 bp, Homo sapiens; identical to SEQ ID NO: 94033
  chr17:79611881-79611937
  hypo

SEQ ID NO: 185426 - DNA, 537 bp, Homo sapiens; identical to SEQ ID NO: 94034
  chr17:79612315-79612852
  hypo

SEQ ID NO: 185427 - DNA, 225 bp, Homo sapiens
  chr17:79619076-79619301
  hypo
atgtggaggtgtgagcgtgtttgtgcataagagtgtcatgcccgtgtgtgcgcacacgtgtgagtggacactcctcggtgcgttgatgggagcgcggtgcctgtgtgcgcacacgagtgagtggacactcctcggtgcactgatgggagcgagatgcccgtgtgtgcgcatgtgtgagtggacactcctcggtgcattgtgccatggctgtccctgggtggcagt

SEQ ID NO: 185428 - DNA, 88 bp, Homo sapiens; identical to SEQ ID NO: 94036
  chr17:79626615-79626703
  hypo

SEQ ID NO: 185429 - DNA, 30 bp, Homo sapiens; identical to SEQ ID NO: 94037
  chr17:79632434-79632464
  hypo

SEQ ID NO: 185430 - DNA, 205 bp, Homo sapiens; identical to SEQ ID NO: 31004
  chr17:79634635-79634840
  hypo

SEQ ID NO: 185431 - DNA, 125 bp, Homo sapiens
  chr17:79635129-79635254
  hypo
atccatgctaaggagcggcgtttttttctccccaaaagtagcgaagattcatcagagtttttagcagggcacggccaattcatgtttactctaagcaaaaaaagggtcaccgagcgatgatggag

SEQ ID NO: 185432 - DNA, 43 bp, Homo sapiens; identical to SEQ ID NO: 94040
  chr17:79637466-79637509
  hypo

SEQ ID NO: 185433 - DNA, 30 bp, Homo sapiens
  chr17:79640081-79640111
  hypo
gtgacggaggcccccgggagtcagcagagc

SEQ ID NO: 185434 - DNA, 343 bp, Homo sapiens; identical to SEQ ID NO: 94041
  chr17:79648939-79649282
  hypo

SEQ ID NO: 185435 - DNA, 61 bp, Homo sapiens; identical to SEQ ID NO: 31007
  chr17:79653802-79653863
  hypo

SEQ ID NO: 185436 - DNA, 1226 bp, Homo sapiens; identical to SEQ ID NO: 94043
  chr17:79655114-79656340
  hypo

SEQ ID NO: 185437 - DNA, 36 bp, Homo sapiens; identical to SEQ ID NO: 94044
  chr17:79657391-79657427
  hypo

SEQ ID NO: 185438 - DNA, 41 bp, Homo sapiens
  chr17:79658809-79658850
  hypo
gcggctccagggaccgaggctgccccgacaaacctgttgct

SEQ ID NO: 185439 - DNA, 30 bp, Homo sapiens
  chr17:79659226-79659256
  hypo
ggtcccagcagcgtcgctgtgggtctggcc

SEQ ID NO: 185440 - DNA, 30 bp, Homo sapiens; identical to SEQ ID NO: 94046
  chr17:79659532-79659562
  hypo

SEQ ID NO: 185441 - DNA, 30 bp, Homo sapiens; identical to SEQ ID NO: 94047
  chr17:79660229-79660259
  hypo

SEQ ID NO: 185442 - DNA, 30 bp, Homo sapiens; identical to SEQ ID NO: 31010
  chr17:79663024-79663054
  hypo

SEQ ID NO: 185443 - DNA, 30 bp, Homo sapiens
  chr17:79663494-79663524
  hypo
aggcagagcgccagcgccagatccagctgg

SEQ ID NO: 185444 - DNA, 65 bp, Homo sapiens; identical to SEQ ID NO: 94049
  chr17:79664244-79664309
  hypo

SEQ ID NO: 185445 - DNA, 119 bp, Homo sapiens
  chr17:79668266-79668385
  hypo
ctcacagggggagacgcatacccgaggccccttctcagcagacagaacgaggacacaagtctcagggcagatacgcgcatccgcaagtgtagacaggaaaaaccgtgaatttacttgaa

SEQ ID NO: 185446 - DNA, 30 bp, Homo sapiens; identical to SEQ ID NO: 94051
  chr17:79673954-79673984
  hypo

SEQ ID NO: 185447 - DNA, 114 bp, Homo sapiens; identical to SEQ ID NO: 94052
  chr17:79674300-79674414
  hypo

SEQ ID NO: 185448 - DNA, 30 bp, Homo sapiens
  chr17:79681850-79681880
  hypo
gggtgtggagtccccgggcagggccgtggg

SEQ ID NO: 185449 - DNA, 154 bp, Homo sapiens; identical to SEQ ID NO: 31011
  chr17:79682600-79682754
  hypo

SEQ ID NO: 185450 - DNA, 30 bp, Homo sapiens
  chr17:79683742-79683772
  hypo
tcctcgagaacccccggcctgcctcggggc

SEQ ID NO: 185451 - DNA, 252 bp, Homo sapiens; identical to SEQ ID NO: 94054
  chr17:79687597-79687849
  hypo

SEQ ID NO: 185452 - DNA, 31 bp, Homo sapiens; identical to SEQ ID NO: 94055
  chr17:79695442-79695473
  hypo

SEQ ID NO: 185453 - DNA, 103 bp, Homo sapiens; identical to SEQ ID NO: 31012
  chr17:79705355-79705458
  hypo

SEQ ID NO: 185454 - DNA, 251 bp, Homo sapiens; identical to SEQ ID NO: 129563
  chr17:79761561-79761812
  hypo

SEQ ID NO: 185455 - DNA, 921 bp, Homo sapiens; identical to SEQ ID NO: 129564
  chr17:79761833-79762754
  hypo

SEQ ID NO: 185456 - DNA, 30 bp, Homo sapiens; identical to SEQ ID NO: 94057
  chr17:79768944-79768974
  hypo

SEQ ID NO: 185457 - DNA, 366 bp, Homo sapiens
  chr17:79769294-79769660
  hypo
ccgcaatgccatccacgcgaatctgtttgcgtccttcgtgctgaaagccagctccgtgctggtcattgatgggctgctcaggacccgctacagccagaaaattggcgacgacctcagtgtcagcacctggctcagtgatggagtgagcccccctcggcggccccaggcaggtgggtgggtgggcagccaggcaggtggccacgtagccgcgctcacactgcacctgtaccaggcggtggctggctgccgtgtggccgcggtgttcatgcaatatggcatcgtggccaactactgctggctgctggtggagggcctgtacctgcacaacctgctgggcctggccaccctccccgagaggagcttctt

SEQ ID NO: 185458 - DNA, 261 bp, Homo sapiens; identical to SEQ ID NO: 94059
  chr17:79772551-79772812
  hypo

SEQ ID NO: 185459 - DNA, 43 bp, Homo sapiens
  chr17:79776470-79776513
  hypo
tgacatatgcgtgcacgccaacactacacagcagatagtgact

SEQ ID NO: 185460 - DNA, 42 bp, Homo sapiens
  chr17:79776572-79776614
  hypo
cacagcagatagtgacttgtgtgtgcacgccactacacagca

SEQ ID NO: 185461 - DNA, 21 bp, Homo sapiens
  chr17:79776972-79776993
  hypo
cacgccaacactacacggcag

SEQ ID NO: 185462 - DNA, 21 bp, Homo sapiens
  chr17:79777112-79777133
  hypo
catgcgcgtgcacgccaacac

SEQ ID NO: 185463 - DNA, 31 bp, Homo sapiens; identical to SEQ ID NO: 31013
  chr17:79781434-79781465
  hypo

SEQ ID NO: 185464 - DNA, 279 bp, Homo sapiens
  chr17:79792217-79792496
  hypo
ccaaagtgctgggattacaggcgcaggcgtgagccaccgcccccagcctctagggttcttgccgacaccacccgggctacattttggggctcccatcctggggacccactgaggcccggaggggtcgggttcaagcctgtgtagacccagggccccctcacctggctatgtcagggtacccatcgctgcaggcaatgtgcaggggtgtccagcccgcctcatctcgctggtgaatgtcagccccgtatttgaccagcagcttcacgcattccaggtttc

SEQ ID NO: 185465 - DNA, 103 bp, Homo sapiens; identical to SEQ ID NO: 31014
  chr17:79803002-79803105
  hypo

SEQ ID NO: 185466 - DNA, 166 bp, Homo sapiens
  chr17:79803520-79803686
  hypo
catcttggcgatgacgatgttctcatggtccttgtacgtctctcccagtttatcccaaatgggagccaactgtttgcagtgaccacaccatggggcatctgaaaagaaagcagttctagggtgtgtcctggacacaaagccactggcagacgcttccccaggagtc

SEQ ID NO: 185467 - DNA, 244 bp, Homo sapiens
  chr17:79804098-79804342
  hypo
gcatctgggccagccgtgtggacaagagggctcctacaggtccccaaaggtgtgacaagaatggtggtcttcacaccatcttgggctccgtcctcttactctgaagatcttactttgaggacgaagcccaggacactgagagcccagagaccccaaggtggcggctctacccgggaggcagccctggcccggggacgcgcctgcaccttgattttgccctccaggaagcggtggcagaactctg

SEQ ID NO: 185468 - DNA, 310 bp, Homo sapiens
  chr17:79826861-79827171
  hypo
tacccttgggtgcctcctccacgggggtcaggaactcgtactcctcggcccggggcccatagctgcctaccatgtagtcagtcttgtcaactgcggcacaaggaagagggcggtcagcggccccgcttccccgcctggcagcacgcacccaagcggccccctctgccctgcccggggccccactcactcttgacgcctttcctgtacgtatgctggatgtacttcatgccggacactatctctcggttaacctgcaggacccgaagcgaggatcagggaaggtcggtccggaccccagccccagccccgc

SEQ ID NO: 185469 - DNA, 21 bp, Homo sapiens
  chr17:79831259-79831280
  hypo
ctgttgggccgggcgcggtgg

SEQ ID NO: 185470 - DNA, 30 bp, Homo sapiens
  chr17:79844007-79844037
  hypo
tccaacaccgaggcccgggccaagggcacc

SEQ ID NO: 185471 - DNA, 178 bp, Homo sapiens; identical to SEQ ID NO: 94065
  chr17:79844240-79844418
  hypo

SEQ ID NO: 185472 - DNA, 310 bp, Homo sapiens; identical to SEQ ID NO: 31016
  chr17:79846190-79846500
  hypo

SEQ ID NO: 185473 - DNA, 121 bp, Homo sapiens; identical to SEQ ID NO: 94067
  chr17:79851769-79851890
  hypo

SEQ ID NO: 185474 - DNA, 30 bp, Homo sapiens
  chr17:79862460-79862490
  hypo
aggtgccgtctgcccgtctcacttccggcc

SEQ ID NO: 185475 - DNA, 32 bp, Homo sapiens; identical to SEQ ID NO: 94068
  chr17:79863960-79863992
  hypo

SEQ ID NO: 185476 - DNA, 192 bp, Homo sapiens
  chr17:79869957-79870149
  hypo
ccctgagactggcctggtgagcgaggaaaggccgctgggcgcttccactctgcaggccggggctgaaataacccgagttccgttctcacagaaaggtgcggctgccacctcttgacacagaggccggatgggcaggtgtcctcgatggccaggccgtatcagggtacaaccgcagcagtgcaaggggcttcc

SEQ ID NO: 185477 - DNA, 437 bp, Homo sapiens
  chr17:79870435-79870872
  hypo
gccttcttcaccagcacgcaggggagtcgccagtgagaaaatgggatcctgccacctgccaaaaagggaaagcggcatcaggcgggcctgggagcctctcgcagtcacacctgccccagctcgggaaagctgtctgcggtccctgccttcccatccccttccctcccgtgtcaactgcggcggggctctggttggcggcagcttcattgttaccaagctgcagaacggatgtgggagaggtcacctcttaggtggtgactcaaaggtcggcacccacactagctcggtctcctcaaaactccgtgtccttgtccaccactgagcggcgtgcacacacagggtggggcagcagtggccccagggctgcctccgtctccagggatgagtcactagcaactctgggccccaccttccacttgtaccgctggggcaggtgg

SEQ ID NO: 185478 - DNA, 372 bp, Homo sapiens
  chr17:79871390-79871762
  hypo
ctggagcaggagcacgcgggcagaatccctctccccgcggggattgtgtgtgccacatcagccagggcaggagtggcacacgcagggtctccgccaaccaccgaggtcaggccctctggagaccaccacgcttcagtcatgcctcaggcaccactgcaaacacctcagagcttcctccacactcagctcacgagagaagacagacaaggcccagcacacagaggtgcggggaagcaggctgctgcagcggctcactcacctgctataggcggggatctccaagcccagctcggccatgaggagccgcatgacgtcatcacacttcccatgtagcttcagggcagcccagtcatccttcggggtccactgagg

SEQ ID NO: 185479 - DNA, 30 bp, Homo sapiens; identical to SEQ ID NO: 94071
  chr17:79872354-79872384
  hypo

SEQ ID NO: 185480 - DNA, 440 bp, Homo sapiens; identical to SEQ ID NO: 94072
  chr17:79873415-79873855
  hypo

SEQ ID NO: 185481 - DNA, 30 bp, Homo sapiens; identical to SEQ ID NO: 31020
  chr17:79878636-79878666
  hypo

SEQ ID NO: 185482 - DNA, 127 bp, Homo sapiens; identical to SEQ ID NO: 94074
  chr17:79880222-79880349
  hypo

SEQ ID NO: 185483 - DNA, 188 bp, Homo sapiens; identical to SEQ ID NO: 129575
  chr17:79885889-79886077
  hypo

SEQ ID NO: 185484 - DNA, 501 bp, Homo sapiens; identical to SEQ ID NO: 94076
  chr17:79887407-79887908
  hypo

SEQ ID NO: 185485 - DNA, 31 bp, Homo sapiens; identical to SEQ ID NO: 11567
  chr17:79889370-79889401
  hypo

SEQ ID NO: 185486 - DNA, 30 bp, Homo sapiens; identical to SEQ ID NO: 94078
  chr17:79890687-79890717
  hypo

SEQ ID NO: 185487 - DNA, 573 bp, Homo sapiens; identical to SEQ ID NO: 94079
  chr17:79892729-79893302
  hypo

SEQ ID NO: 185488 - DNA, 30 bp, Homo sapiens
  chr17:79898717-79898747
  hypo
cctctgggagtaggcgaggtcaacgacgta

SEQ ID NO: 185489 - DNA, 307 bp, Homo sapiens
  chr17:79899060-79899367
  hypo
ctgtcatggaccagcgccccgaagatgatgcaggccacgaaggcctggacgatcttgaggagccccgacaccgtggccatatagctgctcacctggccgggccgggcccgcgtcagggccacctccacagcgtaggccaggaagaggagcccggcgaagacactggctgccaggcggaagtccctggcagcacagccggcgggctcgggggaacactcccgccgggcaaagtacagcggatacaggaccgcagccgtcgcgcatagcagggtggccagcatggcgaaggcggcggtgaagttgcccc

SEQ ID NO: 185490 - DNA, 30 bp, Homo sapiens
  chr17:79906349-79906379
  hypo
gccagcgtcctcttcgtgtcctagggctcg

SEQ ID NO: 185491 - DNA, 171 bp, Homo sapiens; identical to SEQ ID NO: 94081
  chr17:79906752-79906923
  hypo

SEQ ID NO: 185492 - DNA, 277 bp, Homo sapiens
  chr17:79913169-79913446
  hypo
tttttttttgttctggtttttcttcttttgttttctcaggacctctatttttaaataaggagggagctacccggcgtggggctcccggggcccacacactcacggcacgtccttgagtgtgtggcgcagctcgcggccgaggttctggatgtacagccgcaggccctcctgcaccggctgccccgtcaggtgcacgttgtccaccgtcagctgtgcctcgtcaaacagccactgcaccacgaacacagggcctgcgggcggcggggctcagttcggc

SEQ ID NO: 185493 - DNA, 70 bp, Homo sapiens; identical to SEQ ID NO: 31027
  chr17:79914599-79914669
  hypo

SEQ ID NO: 185494 - DNA, 192 bp, Homo sapiens; identical to SEQ ID NO: 129579
  chr17:79917288-79917480
  hypo

SEQ ID NO: 185495 - DNA, 209 bp, Homo sapiens
  chr17:79940108-79940317
  hypo
tgctgggattacaggcatgagccaccgcgcccagcgcattgttacttctcagtgttcacctgcccgtggtctgtgtggtggtgtctggtgggaaccagtgagtgcgattttgaggcaggtcctgcaataccatagccatgttttcaggtgcccttttcctctgctaatggtaccacttgcttacaaagtgcagccggtgcagaggaatg

SEQ ID NO: 185496 - DNA, 85 bp, Homo sapiens; identical to SEQ ID NO: 94085
  chr17:79942954-79943039
  hypo

SEQ ID NO: 185497 - DNA, 78 bp, Homo sapiens
  chr17:79946357-79946435
  hypo
tggggcagctctttcgagacaccagggacagcaggaggtggtggggccgttggtggtaaagcccggagcccccagcct

SEQ ID NO: 185498 - DNA, 507 bp, Homo sapiens
  chr17:79950560-79951067
  hypo
cgggttctgctccggcgcattttgaggccttgtgttttcctgagccctgcgtctcggggcctctgggccgagtctccagccatttggagggaaggcaaatccaaggccctttgttggctgctctgtgggacgggagcttagggagtgtgtcccagcctgtgcgcagaggacacccgccgtgtgtgtggtgcgcacgtgctccacaggctagaggcccttggggaaggggctcccctgtaggcagtggacccagggagaccatggggctaagtccacgaccctgtggggcctctgcagccagaccaggctgtcagagtcggggcctgggtgggaaagggatgcccctcccccaggattgaggacgtgaaaaataaaggccacgaaacaaaagaaaacacgtcaaacccacacacgtggccgagtccccaggtgtcggggctgggcctgtcctgggtgtggcaccttgggcttttctgcttggtctgttctcatttcagggaggcaagt

SEQ ID NO: 185499 - DNA, 26 bp, Homo sapiens
  chr17:79951366-79951392
  hypo
gcgtgagccaccgcgcccggctgagt

SEQ ID NO: 185500 - DNA, 454 bp, Homo sapiens
  chr17:79951968-79952422
  hypo
ctggggctggatgtgacggcatgtgcccgtctcccgggctgccatgcacatcaggcatgtgtgggaggcgtgctgcatatacctgcccacccatgcacgggtccagctgtgcctcctgcggggcgaggctcagaaagacactggtggcagagtccgacatggacttataagcacggcctccccggccacaggcaagcgggcgtgagcggagtgcagcgcccctccctccatgcttcggtgacatcaggcgtcggctttgaaggaggacatcaggcggtggagacaggggcacctcctcttagtgggcggcttaagatgaaagcccagacgtcggtaccctgactctcaggctcctgagtacaggtgtccgtgagccgcattccggagccagtgctgctcgcccctcctgtgcggtccctgggccctgccggcagctccacgtcctgccagcggc

SEQ ID NO: 185501 - DNA, 30 bp, Homo sapiens; identical to SEQ ID NO: 94087
  chr17:79953893-79953923
  hypo

SEQ ID NO: 185502 - DNA, 379 bp, Homo sapiens
  chr17:79961364-79961743
  hypo
ctccccagccatgtggccactcgctggcaggcccgggccatgagcatcggtgcggatgctgtgctcagcctgggggcggcgccgtctcctctgggtgggattcgaggcctgatgcctctgcctggtgcaggagggatgttgtgctgagggtgttccccgtgctttggatgtaaaatttgggcatggagtttgtggtgtcttcagaggcagtcccgcctgcgtcctttgtgcatgcctgtccacgccggtcgcagcggtctccccacagagcccgcgcccacgccctggcacagcctctcctgctgtgcacgtcccaggcctttgatggcgtccacgtgctccgccgcctgcctccgagggtggccggggcgctgagtaa

SEQ ID NO: 185503 - DNA, 30 bp, Homo sapiens
  chr17:79962170-79962200
  hypo
gtccttagtcctgcccgtcctttctggcct

SEQ ID NO: 185504 - DNA, 270 bp, Homo sapiens
  chr17:79963938-79964208
  hypo
gtgtgcgtgtccttgcgtgtgcacgtgtgtgcttgggggcgtgtgtgtgtccttgcgggtacacatgcgtgcttggggtgtgtgtgcatgtccttgtgggtgcacgtgtgtgcacgggtgtgtgtgtgtgcgtccttgcatgtgcacaggtgtgtgtgtgtgtgtgtgtccttgcgggtgcatgtgcatgcttggggggcgtgtgcgtgtccttgcgggtgcacgtgcgtgtttgggggtgtgtgtgtgtccttgcgggtgcacgtgtgc

SEQ ID NO: 185505 - DNA, 159 bp, Homo sapiens
  chr17:79964537-79964696
  hypo
gctggggaggggggacgggaattcccccaggggccaggccttgactgccctgcagggccctcgctgtcgcttttttccctcacagtgtctcatccctcaacctctgttttccatccaaaggcatctctgtgaatccacctggcgcgggagcggcgctga

SEQ ID NO: 185506 - DNA, 30 bp, Homo sapiens; identical to SEQ ID NO: 94091
  chr17:79966351-79966381
  hypo

SEQ ID NO: 185507 - DNA, 237 bp, Homo sapiens; identical to SEQ ID NO: 94092
  chr17:79972010-79972247
  hypo

SEQ ID NO: 185508 - DNA, 520 bp, Homo sapiens
  chr17:79977135-79977655
  hypo
cccccacttgcgccccgacccacgctcacgcaccagctgcggaagcaccttctccagctggtccacgtccacacggagcgcgtcttctgcctgggcctgccgcacgccgcggactgctgcttctgcggtgagaaacgcgagaggtgggggatgctggggggatcttaaacccgagcccagtgagggcctcagcctgggccggtgccccccccaacacccacgggcagcccccagaaccaggccacagcacctgacaaacaggctcaggagacccaagtttaggcccttgtgggaaacgggaaaacacgtcttggttttcccgctggaaaaacgcaaaattccggatgctgtgcccggagggagcgtgggccctgggctcacccacaacgaagaccttcagcaactccaccatgagctgcagcgcgtccccgctcactgcaaggcagggggaggttatgcgggaccctcacccaccgctctggctgggtgctccagacatacccccgccctcccgaggcct

SEQ ID NO: 185509 - DNA, 30 bp, Homo sapiens
  chr17:79978344-79978374
  hypo
tggtgtcctgggagcgcagagcggggctgc

SEQ ID NO: 185510 - DNA, 31 bp, Homo sapiens
  chr17:79982079-79982110
  hypo
cctgaaaaggggcccacggggagggccttgg

SEQ ID NO: 185511 - DNA, 31 bp, Homo sapiens; identical to SEQ ID NO: 94095
  chr17:79986711-79986742
  hypo

SEQ ID NO: 185512 - DNA, 1269 bp, Homo sapiens; identical to SEQ ID NO: 129585
  chr17:79988349-79989618
  hypo

SEQ ID NO: 185513 - DNA, 41 bp, Homo sapiens; identical to SEQ ID NO: 54754
  chr17:79989899-79989940
  hypo

SEQ ID NO: 185514 - DNA, 30 bp, Homo sapiens; identical to SEQ ID NO: 94098
  chr17:80004952-80004982
  hypo

SEQ ID NO: 185515 - DNA, 374 bp, Homo sapiens; identical to SEQ ID NO: 31035
  chr17:80005249-80005623
  hypo

SEQ ID NO: 185516 - DNA, 181 bp, Homo sapiens; identical to SEQ ID NO: 129588
  chr17:80009036-80009217
  hypo

SEQ ID NO: 185517 - DNA, 31 bp, Homo sapiens; identical to SEQ ID NO: 54757
  chr17:80010342-80010373
  hypo

SEQ ID NO: 185518 - DNA, 30 bp, Homo sapiens
  chr17:80011181-80011211
  hypo
cccccaggaagacccgcagaatgcacctga

SEQ ID NO: 185519 - DNA, 85 bp, Homo sapiens
  chr17:80011808-80011893
  hypo
tgatcactgccccacgctgcgggtggaggccctgaagatggccctctccttcgtgcagagaacctttaacgtggacatgtacgag

SEQ ID NO: 185520 - DNA, 30 bp, Homo sapiens
  chr17:80014607-80014637
  hypo
ggctgatcagtgcccgtgtggactcacaca

SEQ ID NO: 185521 - DNA, 268 bp, Homo sapiens
  chr17:80018604-80018872
  hypo
agtggaagggcaagtcgccggtgggcttcgctccctcctgcctggatatctcctcctgcaaaagcccaaggccctggtcatggccccagcccctcaccccctgcaaggccgggctcccaccagccccagcacctgcctgacaccgcagcttcagctcctggctcacagcagcgatgccctccagggtcttcaccttggccagctcctctcgcagctcctggtgcacctgcagcctgagacagaggccctgtcacgcaggctgggctcc

SEQ ID NO: 185522 - DNA, 793 bp, Homo sapiens; identical to SEQ ID NO: 94103
  chr17:80019099-80019892
  hypo

SEQ ID NO: 185523 - DNA, 31 bp, Homo sapiens; identical to SEQ ID NO: 31039
  chr17:80021087-80021118
  hypo

SEQ ID NO: 185524 - DNA, 138 bp, Homo sapiens; identical to SEQ ID NO: 31040
  chr17:80030811-80030949
  hypo

SEQ ID NO: 185525 - DNA, 45 bp, Homo sapiens
  chr17:80031798-80031843
  hypo
tgtgcatgcgtatatcgttttaaaggcatgcgtgtactgatgact

SEQ ID NO: 185526 - DNA, 65 bp, Homo sapiens
  chr17:80038871-80038936
  hypo
cgcacgcaggtccccacggtgctacgtcaggtgggagtcggggtgggaacgctcagaatggcacc

SEQ ID NO: 185527 - DNA, 88 bp, Homo sapiens; identical to SEQ ID NO: 31042
  chr17:80040621-80040709
  hypo

SEQ ID NO: 185528 - DNA, 30 bp, Homo sapiens
  chr17:80041224-80041254
  hypo
gtcagcactgctctcgttgaagaacgcatc

SEQ ID NO: 185529 - DNA, 200 bp, Homo sapiens
  chr17:80041639-80041839
  hypo
ccactcacccttcccgcccgtgtgccacagcacatgctgctcgaaggatgtgtcccgggagttggcgaagctggtgctgtcgagctgggggaacctggcctggaggtacgcccgcttctcagccgaccctggtgaagagaggaagcgcggctggtgagccagggcggcggggccaggagggcagcgggaggcaccggggg

SEQ ID NO: 185530 - DNA, 31 bp, Homo sapiens; identical to SEQ ID NO: 31043
  chr17:80042177-80042208
  hypo

SEQ ID NO: 185531 - DNA, 232 bp, Homo sapiens; identical to SEQ ID NO: 94110
  chr17:80042508-80042740
  hypo

SEQ ID NO: 185532 - DNA, 30 bp, Homo sapiens
  chr17:80043490-80043520
  hypo
ctgagagctgaggccgggtccccgagggca

SEQ ID NO: 185533 - DNA, 876 bp, Homo sapiens
  chr17:80045800-80046676
  hypo
gcagctcccgtgccaccggccctgcttaccactcactaccaggttgccgttctctgacacctcgaaggcacgggaggcctccaggagccgtacctccagggacactgtccctgcagagcgggagagttggagatcagagggcagcacccgccccccagctacccccgccttggtcctggggtacccctcaccagtcttgggcaggatggtggcctggtgcagcaccacatcctcaaacaccacaggcagctgctcgacgcccaggcccagggcgcgggccagcgtcttccacactatgctcaggtagccagtggcggggaagaggacgcgaccgtcgagggtgtggtccaccaggtagtggtcaggagactcggagctggtgtctgcgggagggcacaggcctcagcacagagcgggcgtctgtggggagggaagagtctgcccacccgccgggcccctgctcaccgatgttgtagatggcggctgagggggaacctgaaccgttggggaagtcctcggcggccggcacgtcccaggccaggctgtggtcccacttgatgagtggggagatgaggggagttcctcggggagctgggaactccacaggtgggaacaaggcattggggttggcgtcgatgctacggagaagggaggcatgggtagcacacccgtcaccggggtccaggggctctgggttcagcccacccactgcctgcggtggaccatccagggctgctgccaccggcctgggtcagtgaggggcccgcagccccgctcacccaccccacgccgtccccgactccgggagacgagacccgggctgggaagggacccaccctgagaggtgcagcctgccgatgccggccaggaagaact

SEQ ID NO: 185534 - DNA, 60 bp, Homo sapiens; identical to SEQ ID NO: 31047
  chr17:80047422-80047482
  hypo

SEQ ID NO: 185535 - DNA, 31 bp, Homo sapiens; identical to SEQ ID NO: 31048
  chr17:80048709-80048740
  hypo

SEQ ID NO: 185536 - DNA, 161 bp, Homo sapiens; identical to SEQ ID NO: 94116
  chr17:80049201-80049362
  hypo

SEQ ID NO: 185537 - DNA, 31 bp, Homo sapiens; identical to SEQ ID NO: 31049
  chr17:80050213-80050244
  hypo

SEQ ID NO: 185538 - DNA, 31 bp, Homo sapiens; identical to SEQ ID NO: 31050
  chr17:80050505-80050536
  hypo

SEQ ID NO: 185539 - DNA, 948 bp, Homo sapiens
  chr17:80050745-80051693
  hypo
gcaccccggaaccccggcagagcccaccttgctccttgaagccatctgtattggtgccggcgttcaggatggtggcgtacacccgccgggccagggacttcttggtcagcaggacggccaccacaccctccgagcggcagtacccattccctgggtagagcagcacctcaggcccggggctcagccccacgccggcccccaccccaccaggaggagctctggggtgtggggtgggtgcttgggtgggggatccccggagctggcaggatcctgctcagcgtggggactgtgcggggggccgtcctgtgccactgtcccgcctgccctggccgcgcagccgcacactcacccgctgtgtcgaaggccttgcaggtgccctcggggctgagcatccccagcctcaagaactgcacggaggtgttgggcttcagcaggacattgatgccccccacgatggcggcagggcactgcccgctgtggatggcctggtaggcgttctgcagggccatcaggctggaggagcaggctgtgtccagtgcgatgctgggccctgcaaggaagggtgctgcggctcaggtggggctgtgagcacacgagacccctgagcacacctcctgccaccaggctggacacacactgcacggagtgagcccacgccacgtggtttctgctcagcatgtggggacctgaaggccacccacctccgcaggaggctgggcaggacccacctctgaagtcgaagaagaaggagagccggttggccatcatcgctcgctggcagcccaccatgctgtagcccacgagtgtctcggggtctcggctcagggcctccgaggtctcagagccgctcacgcccacccagacgccagtgtgtgttcctcggagtgaatctgggttgatgcctgccacaaacagtggtcaaggtgccacggccgggccccacagcgc

SEQ ID NO: 185540 - DNA, 283 bp, Homo sapiens
  chr17:80062706-80062989
  hypo
gcccggcttggaggtttgaagctggtggaatctcagggaggacatagcctgtcctattgcagggaaggtgcggccctcactcccgtctcagcctgggggcatgagaactctgagcacaaagaggacggagctggtccccagctttctggccaccctgtgagtttcttctcctgcacctgagcctcagctcagctcttgaccaagttggcctctggtggctcattctccaggctgctccgggctctctgggtgcccctgggcacacctacgtggcttcctaggg

SEQ ID NO: 185541 - DNA, 105 bp, Homo sapiens; identical to SEQ ID NO: 94121
  chr17:80077689-80077794
  hypo

SEQ ID NO: 185542 - DNA, 285 bp, Homo sapiens
  chr17:80084434-80084719
  hypo
acctcccagcagaggcgctgatgccaatcctgctgccaccggcaaaagttccgtgtggctacaggactctcagacactgctgctgggagcagcctctgggtgggtggcggaggctgaggcgatgctgtccaccacacgtggcacgcgggcagccttgactacgcaagcccctggggcacgtacacgtgtgttttcacacacactgcagcctgtaaggttactattctaacagtatctgtgacggtaaaggactggaaatagcctaaaatgcgcatgaaggagaga

SEQ ID NO: 185543 - DNA, 114 bp, Homo sapiens; identical to SEQ ID NO: 31052
  chr17:80085171-80085285
  hypo

SEQ ID NO: 185544 - DNA, 167 bp, Homo sapiens; identical to SEQ ID NO: 31053
  chr17:80085323-80085490
  hypo

SEQ ID NO: 185545 - DNA, 30 bp, Homo sapiens; identical to SEQ ID NO: 94124
  chr17:80096498-80096528
  hypo

SEQ ID NO: 185546 - DNA, 30 bp, Homo sapiens; identical to SEQ ID NO: 94125
  chr17:80096759-80096789
  hypo

SEQ ID NO: 185547 - DNA, 39 bp, Homo sapiens
  chr17:80100747-80100786
  hypo
acagcccacactggccgggtacgtggctcacgcctgtaa

SEQ ID NO: 185548 - DNA, 31 bp, Homo sapiens; identical to SEQ ID NO: 31054
  chr17:80104070-80104101
  hypo

SEQ ID NO: 185549 - DNA, 30 bp, Homo sapiens; identical to SEQ ID NO: 94127
  chr17:80112645-80112675
  hypo

SEQ ID NO: 185550 - DNA, 30 bp, Homo sapiens
  chr17:80120782-80120812
  hypo
aggacccctctgagcgggcacagccagggc

SEQ ID NO: 185551 - DNA, 30 bp, Homo sapiens
  chr17:80129455-80129485
  hypo
tgacgccgccccaacgtctgcagtagcctt

SEQ ID NO: 185552 - DNA, 30 bp, Homo sapiens
  chr17:80131380-80131410
  hypo
caaagacaggagacgcgtctacaacaaggc

SEQ ID NO: 185553 - DNA, 30 bp, Homo sapiens; identical to SEQ ID NO: 31055
  chr17:80132885-80132915
  hypo

SEQ ID NO: 185554 - DNA, 188 bp, Homo sapiens; identical to SEQ ID NO: 94129
  chr17:80135499-80135687
  hypo

SEQ ID NO: 185555 - DNA, 72 bp, Homo sapiens; identical to SEQ ID NO: 94130
  chr17:80139083-80139155
  hypo

SEQ ID NO: 185556 - DNA, 161 bp, Homo sapiens; identical to SEQ ID NO: 94131
  chr17:80144202-80144363
  hypo

SEQ ID NO: 185557 - DNA, 31 bp, Homo sapiens; identical to SEQ ID NO: 11572
  chr17:80156992-80157023
  hypo

SEQ ID NO: 185558 - DNA, 237 bp, Homo sapiens
  chr17:80159380-80159617
  hypo
ctgcacaggagggcgcgtcggtcggtggctcacctgtggacgcgctccagctccaggcgatgctcctggaatgccagctgctgctgctgctgcagctcctccaccttcctggcctctctggctagcgcctgcctcagcttagctgcctctatcttgagctcgctcacctctgcccgcctggcctcttcccactccctggcctgggcgaaggcggcgtcatagcgctccagctcgagg

SEQ ID NO: 185559 - DNA, 31 bp, Homo sapiens; identical to SEQ ID NO: 31059
  chr17:80163308-80163339
  hypo

SEQ ID NO: 185560 - DNA, 31 bp, Homo sapiens; identical to SEQ ID NO: 94134
  chr17:80172375-80172406
  hypo

SEQ ID NO: 185561 - DNA, 110 bp, Homo sapiens; identical to SEQ ID NO: 94135
  chr17:80176132-80176242
  hypo

SEQ ID NO: 185562 - DNA, 30 bp, Homo sapiens
  chr17:80179916-80179946
  hypo
tccgctcccacgttcgtggacaggagcctc

SEQ ID NO: 185563 - DNA, 30 bp, Homo sapiens
  chr17:80181967-80181997
  hypo
acacacccctacacccgtgcagacacaccc

SEQ ID NO: 185564 - DNA, 1107 bp, Homo sapiens; identical to SEQ ID NO: 129594
  chr17:80186329-80187436
  hypo

SEQ ID NO: 185565 - DNA, 760 bp, Homo sapiens; identical to SEQ ID NO: 129596
  chr17:80189390-80190150
  hypo

SEQ ID NO: 185566 - DNA, 677 bp, Homo sapiens; identical to SEQ ID NO: 94140
  chr17:80201406-80202083
  hypo

SEQ ID NO: 185567 - DNA, 177 bp, Homo sapiens
  chr17:80202409-80202586
  hypo
cttttcttcccagccccgttacaaccgagttcacgtggggggccgcagtgcagccccagcggtggcagctcttggagtctgtccgtttagtatgtttcccccacgagcgtcgctgggtgagtggcctggagagctcccggtgttaacatttcgatcctagaccgggggacgtgtcac

SEQ ID NO: 185568 - DNA, 139 bp, Homo sapiens; identical to SEQ ID NO: 94142
  chr17:80207967-80208106
  hypo

SEQ ID NO: 185569 - DNA, 30 bp, Homo sapiens; identical to SEQ ID NO: 31061
  chr17:80208423-80208453
  hypo

SEQ ID NO: 185570 - DNA, 30 bp, Homo sapiens
  chr17:80209232-80209262
  hypo
acgtgctggcagtgcgacttacaaatttga

SEQ ID NO: 185571 - DNA, 571 bp, Homo sapiens
  chr17:80221650-80222221
  hypo
gccaaggccacaccccgcaccaccctgctctattggctcgtcacaccttcaaggcaatgcaggctccaggcccttgagaagccagtccaccaccaagggccgccagacaggctcccagggcggagtctctgctgagctttccctgggttggtgatgggatttttcattcctgtggcctcctctggtcacgtgaggcccgtgatgggacacactgggtgcccctctctgtaacgggttccccaggaccacaggtgctgccaaagatattttgtgtcacataaacttagaaacgtcggtttcttgtagtagcacagattacgtgcttgtgctgagaaaagatgtcaaagaatcaaatcaacagtcctccctttcccgtgacaaaagggctaacagaggccctgaacaggttttcctttggccagttgcccaaggggactcacccaaccatccacctacaaatgtgccgcggagccttctcactgggagggctccacagacgtggcacagccactcttcagacaaaaagctctgttcccaaagagggctcctgccagaccgaagctctgctgtt

SEQ ID NO: 185572 - DNA, 36 bp, Homo sapiens; identical to SEQ ID NO: 94145
  chr17:80224601-80224637
  hypo

SEQ ID NO: 185573 - DNA, 97 bp, Homo sapiens; identical to SEQ ID NO: 94146
  chr17:80229864-80229961
  hypo

SEQ ID NO: 185574 - DNA, 36 bp, Homo sapiens; identical to SEQ ID NO: 94147
  chr17:80230200-80230236
  hypo

SEQ ID NO: 185575 - DNA, 30 bp, Homo sapiens
  chr17:80231983-80232013
  hypo
gacagagcaggcccgcgccctgggaggtcc

SEQ ID NO: 185576 - DNA, 48 bp, Homo sapiens
  chr17:80232300-80232348
  hypo
cacgtccatgtgtctcgagacctgtcgcatcctcgctgaaactcaaga

SEQ ID NO: 185577 - DNA, 89 bp, Homo sapiens; identical to SEQ ID NO: 94148
  chr17:80239661-80239750
  hypo

SEQ ID NO: 185578 - DNA, 310 bp, Homo sapiens
  chr17:80240740-80241050
  hypo
cagccctgggcaaatcgtgtatcccctagtcagcttctccagggtgaccggcagtgactgaagtccctgttccctgttccaccctccctgcgcagggctgggcacaccgggcgccgtcagtacactgtctgcaatggccgagaaggcagcgctccatgcaggaggaacgatgcgtccttgccactgccctcatttgtgacttgggacagctgctcccagcaggatggtgtcctttcctccagagccaggggaggagtgaggcctggtgcccgggcggtacctgcctcacccaggtcgcagagagctattc

SEQ ID NO: 185579 - DNA, 30 bp, Homo sapiens
  chr17:80246696-80246726
  hypo
gggacttcaaccctgcggtcttcctcccaa

SEQ ID NO: 185580 - DNA, 141 bp, Homo sapiens; identical to SEQ ID NO: 94149
  chr17:80247837-80247978
  hypo

SEQ ID NO: 185581 - DNA, 162 bp, Homo sapiens; identical to SEQ ID NO: 94150
  chr17:80251904-80252066
  hypo

SEQ ID NO: 185582 - DNA, 73 bp, Homo sapiens; identical to SEQ ID NO: 94151
  chr17:80254256-80254329
  hypo

SEQ ID NO: 185583 - DNA, 99 bp, Homo sapiens; identical to SEQ ID NO: 94152
  chr17:80257490-80257589
  hypo

SEQ ID NO: 185584 - DNA, 49 bp, Homo sapiens; identical to SEQ ID NO: 31064
  chr17:80260759-80260808
  hypo

SEQ ID NO: 185585 - DNA, 115 bp, Homo sapiens
  chr17:80275865-80275980
  hypo
ccccctggtttggccgtggggaaggagcctgggcctgcacccgcacccaacgctgcagccgaccagctgaccgtggctctgcgttccatgtcctggaggcgggaggtctgaggta

SEQ ID NO: 185586 - DNA, 114 bp, Homo sapiens; identical to SEQ ID NO: 129597
  chr17:80277697-80277811
  hypo

SEQ ID NO: 185587 - DNA, 189 bp, Homo sapiens
  chr17:80285254-80285443
  hypo
aggctgggggtccccgagctcttccccgacctgctctggatgctggagcccctgccctccttcccttccctgtgcctgtagagggtgtgcaatgctgacctcacgaaacaaagaagacacgcgggggcgggagacagagttgcccgcagcacagcggggaccccatctgccttgcgggtcagccctttt

SEQ ID NO: 185588 - DNA, 30 bp, Homo sapiens
  chr17:80288094-80288124
  hypo
tccgcaccaccccgccgaccgtgtccggga

SEQ ID NO: 185589 - DNA, 568 bp, Homo sapiens; identical to SEQ ID NO: 94157
  chr17:80289190-80289758
  hypo

SEQ ID NO: 185590 - DNA, 59 bp, Homo sapiens
  chr17:80290201-80290260
  hypo
ggaaagttcacgcaccgcccagcacgcctgcgcatgcctgttcccgctccctggtgccc

SEQ ID NO: 185591 - DNA, 567 bp, Homo sapiens
  chr17:80294440-80295007
  hypo
cgtgagccactgtgctggcggcatttgcttttctttgtaacttgattctctgggttcccttgcctttcatccttgcccacccacgtgactgcagcctgtggggcttcctcctaatgtcccgaagataactcgtcatccttgaccccgccgccacctcgggttctagtggaggatgtggcccgcctgccacccccacaggcaccgggtcctccaggcctccttgacccacttccaacccacctgggatgtctgcgcgttaccagcccagatgcctcttggagccttccacctgcaccccatctcctgtcccaacaggctgggcccctcctcccgggctggccaagccagtacctccgcaggggccgcaggtgcagcaccctctgtgggggagctagggggatcgctcctctgctctgcgcacttttatgaaagggcctctgaccctcccactgtcctgctcactctgcccgcgcacccccggccacctgggggccgccccccaaagccctcggcccgtggacagactcgcagcctcctgggagccgagccaaccggccccacagattt

SEQ ID NO: 185592 - DNA, 30 bp, Homo sapiens
  chr17:80303557-80303587
  hypo
gttcccggctgtcacgcagggtcacgtcgt

SEQ ID NO: 185593 - DNA, 90 bp, Homo sapiens; identical to SEQ ID NO: 94159
  chr17:80303789-80303879
  hypo

SEQ ID NO: 185594 - DNA, 651 bp, Homo sapiens; identical to SEQ ID NO: 129601
  chr17:80329349-80330000
  hypo

SEQ ID NO: 185595 - DNA, 541 bp, Homo sapiens; identical to SEQ ID NO: 54768
  chr17:80332161-80332702
  hypo

SEQ ID NO: 185596 - DNA, 31 bp, Homo sapiens
  chr17:80338862-80338893
  hypo
accaaatgcagaaaccgcgcaggatggagcc

SEQ ID NO: 185597 - DNA, 30 bp, Homo sapiens; identical to SEQ ID NO: 94162
  chr17:80348287-80348317
  hypo

SEQ ID NO: 185598 - DNA, 30 bp, Homo sapiens; identical to SEQ ID NO: 94163
  chr17:80349821-80349851
  hypo

SEQ ID NO: 185599 - DNA, 30 bp, Homo sapiens; identical to SEQ ID NO: 31069
  chr17:80350125-80350155
  hypo

SEQ ID NO: 185600 - DNA, 30 bp, Homo sapiens; identical to SEQ ID NO: 94165
  chr17:80350390-80350420
  hypo

SEQ ID NO: 185601 - DNA, 30 bp, Homo sapiens; identical to SEQ ID NO: 94166
  chr17:80351442-80351472
  hypo

SEQ ID NO: 185602 - DNA, 153 bp, Homo sapiens
  chr17:80352180-80352333
  hypo
ttagtaaatgactattagattatcacctgcttccttaaagcaggactcagcacggcaaccaaggaatcaacaataagcaatgctctcagcttccagaatcgcatgtgtctctcccctctcgggcgggtggtgagtccccggaggacacctgac

SEQ ID NO: 185603 - DNA, 142 bp, Homo sapiens
  chr17:80354749-80354891
  hypo
ccaggacacagtcaggccaaacgcccccaatccacgccaggggagactgtgcccagggctgcggcacacacggcctgaagccggctgcagggagtgggcttggccagccgctggctacagcgggaactgtccagcctgtggc

SEQ ID NO: 185604 - DNA, 324 bp, Homo sapiens
  chr17:80355876-80356200
  hypo
tcagacatgtggccccgtagacaccagcctcctgggtgttgggactggcgctagacctgggaatcactcagcaccggcccggcacacagcagatgctccgtgaactcagcctcgctcccagggacacgccccccacacccaccgtgcttgcctgagccaggagccccacgcccaggccccgcccgcgcctcctaccagctctcggctccaccgtcttgttggcaccctcctccatgaacatgaaccgccctccgccgaagtcctccaggtagttggagaggtacagcagcgaggtgtagtcgaaggagccgtaggtcacctgag

SEQ ID NO: 185605 - DNA, 30 bp, Homo sapiens; identical to SEQ ID NO: 31070
  chr17:80361659-80361689
  hypo

SEQ ID NO: 185606 - DNA, 30 bp, Homo sapiens
  chr17:80361999-80362029
  hypo
caggcgggaggggacgctcgtgggtcccaa

SEQ ID NO: 185607 - DNA, 30 bp, Homo sapiens; identical to SEQ ID NO: 31071
  chr17:80367012-80367042
  hypo

SEQ ID NO: 185608 - DNA, 135 bp, Homo sapiens
  chr17:80369330-80369465
  hypo
ctgcgaatccgctccgcttcctccctggtgatgacgacatcggtgacacctctgccgcactttcggggagtgcagcctgtgaagggacagccagggtgagacgcagtttccaaggccaccggcgcatgcccttcc

SEQ ID NO: 185609 - DNA, 119 bp, Homo sapiens
  chr17:80371141-80371260
  hypo
agagagggtcccccgcggcacaggagcgactcggcaggaaggggaaggggcagcagacagcagacagcatcgccccatgacacacgtggcaaccaaagcacagacgctgctgggtccat

SEQ ID NO: 185610 - DNA, 30 bp, Homo sapiens; identical to SEQ ID NO: 94170
  chr17:80373333-80373363
  hypo

SEQ ID NO: 185611 - DNA, 40 bp, Homo sapiens; identical to SEQ ID NO: 94171
  chr17:80391607-80391647
  hypo

SEQ ID NO: 185612 - DNA, 119 bp, Homo sapiens
  chr17:80393111-80393230
  hypo
gcccccaggccccggcgaccacggtctgcttcctatctcggtggatttgcccgtctgggcattccacgggtaccgagtcacacagtgtatgacctgtgctcctccgggctgtcagctgc

SEQ ID NO: 185613 - DNA, 30 bp, Homo sapiens
  chr17:80394085-80394115
  hypo
cctgaggctttgggacgagctgctgagcgc

SEQ ID NO: 185614 - DNA, 377 bp, Homo sapiens
  chr17:80394872-80395249
  hypo
gactgggacccgggccggccgcatacactctggagtctcctacactgagacccgggcctggctgtctcaggcggctcccatgttggctctgggtacagccccgggaggcgtgtccagggccgtgttggccgcctcccctggagccactcacctgtttgctttctcacccagtcctcctcatgcagaagtaccggcggtgcggctttccgcagctgtgggcagccagtgccttcaagggtgccacggggcccagccaggccgtgccccctgttgagcaccacctcaggaaccacgtgcagtggctgcaggtggcgggcagcgggcccacggactcactgcagggcatcatcctgaccggctggcagaggtaagtcctg

SEQ ID NO: 185615 - DNA, 434 bp, Homo sapiens
  chr17:80397796-80398230
  hypo
ccaaagcaggctggagagtgacgcgggaggcacccctcagacacagtgaatccgcagaaatgcacgcaggtcggaggtggggaacggctccacctttgctgcacacacgtcctgcccacctggccgagcaggtgtggggctcaggcgcccggccctggaaggccccgcaccctggacccagcactcacacttccaggtctcctgagggagcagcgggacccatgggcaggggcaggcaccggggaaccccttggggtcggcagggggcttggccagaggagctgtgtgtgtggaaactcgcaggccacacgggaaattagcgactgcgtggtgctgatgcagaaagaaaaatggccgagacgcgcggagagcgggacccgcaggcgcggcggcccagggacggggacgcggccggtgagaggacgcagaatgag

SEQ ID NO: 185616 - DNA, 30 bp, Homo sapiens; identical to SEQ ID NO: 31073
  chr17:80404883-80404913
  hypo

SEQ ID NO: 185617 - DNA, 30 bp, Homo sapiens; identical to SEQ ID NO: 94174
  chr17:80438897-80438927
  hypo

SEQ ID NO: 185618 - DNA, 25 bp, Homo sapiens
  chr17:80445587-80445612
  hypo
tcgaagtaggattgccgcttgaagc

SEQ ID NO: 185619 - DNA, 541 bp, Homo sapiens
  chr17:80445731-80446272
  hypo
gaagctaaggcagaaagatcgcctgagcccaggataaacttacctgtgtttatctttcaggatgcttaaatggcagaggccaagcccagactccagacggacatgcggataaggccctgctgcggcagatggaaggcatttacgctgacatccctgtgcggcgtccggagtccagtgcacacgtgcaggagctgtaccaggagtggctggaggggatcaactcccccaaggcccgagaggtgctgcataccacgtaccagagccaggagcgtggcacacacagcctggacatcaagtggtgaagtcaggccagggccttccagctgctcttggggccagagccaagagcctctcagtagagggaggggctgccctgagtggagtattaaagacacttaagaaaaccgctcaatggattactttggtttctccgagttccctgctaccccgtttattggaggcccctcaggcagtttcatgtggtgctatcttcataataggtgtgggattggaactttttttttctttttttttttttgag

SEQ ID NO: 185620 - DNA, 30 bp, Homo sapiens
  chr17:80447351-80447381
  hypo
catcatcagcactgtcgtggggtgggagtc

SEQ ID NO: 185621 - DNA, 200 bp, Homo sapiens
  chr17:80448677-80448877
  hypo
ccacagctggcctgccgtgaagccgcccctgcaggtcgcgtggggaggccaggctgaggcactgggcaccaacatgagacaccagaggtcccccgtgcctgctggtgggttatagccatggggactgtgtgcattttcttctgcacaggagaaaagtggcgagatttccttcattgtaaccggaacggtattagccgtca

SEQ ID NO: 185622 - DNA, 30 bp, Homo sapiens
  chr17:80450700-80450730
  hypo
cagatactctcaccccgactgcttggacgt

SEQ ID NO: 185623 - DNA, 160 bp, Homo sapiens; identical to SEQ ID NO: 94178
  chr17:80451149-80451309
  hypo

SEQ ID NO: 185624 - DNA, 34 bp, Homo sapiens
  chr17:80451583-80451617
  hypo
gccaacccagagggccgtgacactccagcccttt

SEQ ID NO: 185625 - DNA, 181 bp, Homo sapiens; identical to SEQ ID NO: 31076
  chr17:80479372-80479553
  hypo

SEQ ID NO: 185626 - DNA, 101 bp, Homo sapiens; identical to SEQ ID NO: 94180
  chr17:80487528-80487629
  hypo

SEQ ID NO: 185627 - DNA, 26 bp, Homo sapiens
  chr17:80488078-80488104
  hypo
gaaataggccgggcacgttgggtcac

SEQ ID NO: 185628 - DNA, 278 bp, Homo sapiens; identical to SEQ ID NO: 94182
  chr17:80491462-80491740
  hypo

SEQ ID NO: 185629 - DNA, 217 bp, Homo sapiens; identical to SEQ ID NO: 11574
  chr17:80503129-80503346
  hypo

SEQ ID NO: 185630 - DNA, 284 bp, Homo sapiens
  chr17:80517077-80517361
  hypo
cagtgtttgatttggtgtcctgagtgtctgtatgtggatgtggagtgcggttttccactgagcttcagtctgaggttgcgcggttggtgctcgctgttcttcccatctctgctactggctggcgaccgtgcggactccacagctgcgctcagctcagagccagcttcgtgtgcagagcccagcagagatggcggagccacttggcatccaagcaccttgccctgtttgtgtccacctggttctgccgtgagaacccctgggttttaagccgttaggctggtatg

SEQ ID NO: 185631 - DNA, 181 bp, Homo sapiens; identical to SEQ ID NO: 94184
  chr17:80519707-80519888
  hypo

SEQ ID NO: 185632 - DNA, 192 bp, Homo sapiens
  chr17:80524559-80524751
  hypo
accctgaggttgggtcggctcccaactccgcctctcctcccacctgctgctttcttttcatcctgcgtttccttgcttgcccctccccacacctgcacagacctttgtcagggggaacccaggtccccggggcctccaggtggagcgagcctgagcaacctgactttccaaacctgccgtccacccagcagg

SEQ ID NO: 185633 - DNA, 30 bp, Homo sapiens
  chr17:80525363-80525393
  hypo
ctgctgcgtcccgggcgcccccagctgact

SEQ ID NO: 185634 - DNA, 30 bp, Homo sapiens
  chr17:80525949-80525979
  hypo
ccagcccccggggagcggggtcttcagggt

SEQ ID NO: 185635 - DNA, 30 bp, Homo sapiens
  chr17:80526263-80526293
  hypo
cgtttagtcattcaacgcacatcttagggt

SEQ ID NO: 185636 - DNA, 206 bp, Homo sapiens; identical to SEQ ID NO: 31079
  chr17:80535281-80535487
  hypo

SEQ ID NO: 185637 - DNA, 18 bp, Homo sapiens
  chr17:80541421-80541439
  hypo
tcaaaacaaaaatacact

SEQ ID NO: 185638 - DNA, 507 bp, Homo sapiens
  chr17:80554479-80554986
  hypo
ccactaaggaggtgtcgctcctccaactttgttctttttaaaaatcgcttcagccattctaggtccttggcatttccgcgtgaactgtaggattcctacaccaagcctgctggcgtcttgattgggacggtgttgaatccagagtgtgtggcagagctggcggagcccctctttctttgatctctgccgatctccttgatttcacgtttgttttattccacagaccaccccctccccatcttctcacctacttcaggttccatttcatggtaggaaattcctgtagtcctcccgggcttgctgaagtgctgctccaagttacagtccccgggttgtcaggcgtggcgagagccccttgtgctcagagctctcacggaacacagagcaagcctgtctacgagttcagccggtgaggggcaggggctggtgaaggcggcggcgcctctgggtgtgcccaggggcagggtcgcctccaggccccacgcgctaagccgtgactccctgtaa

SEQ ID NO: 185639 - DNA, 218 bp, Homo sapiens; identical to SEQ ID NO: 94188
  chr17:80562620-80562838
  hypo

SEQ ID NO: 185640 - DNA, 397 bp, Homo sapiens; identical to SEQ ID NO: 31080
  chr17:80563137-80563534
  hypo

SEQ ID NO: 185641 - DNA, 30 bp, Homo sapiens
  chr17:80563837-80563867
  hypo
gggcctagtcgggggcggtctatccgaact

SEQ ID NO: 185642 - DNA, 934 bp, Homo sapiens
  chr17:80571116-80572050
  hypo
cagaaggctgcagatggccagcgcccccgactacagtggtgggagcgggaggtggccaggggttcacacaggcatcaacgccaaacacagggtgggtatgggtcagggctgcgttccacagggcacaagccgcctgtccccgcaagacatcccagggccacaggggagggaggacagaccagaaacgcagccggagtcatccatgcccacgcacctgtacgatcagacaggaaagctgctgagtaggcaccgtctgaggcagtcactctggagtcccttcgcacccacgtccggggcacaggaggttcgtgggggaggcagcagcccggccttgtttcccatacactgcgcttcccatcagttccacttgaaaagcagctgcgctcccgagtccgccggcctagggacaccgtgtccttgccgctctacagtgatttttaaaaagcacatgcctggggagggccggtgccgccagggcctcacatgaggcacgtccgtgcaggccctcgccacgttcctggtgaacgggcctgtgacacagccccgccgtccgcatcagttctgaggctgttcacgtgcactgcgagaaaacccacccttcttgcatgcatttcccccagattcatgtttatcaactggtaattacgctcctactcccccacccagagtcagatctcaagtgttagacaagccagggtgacgccggctcacttgaagctgccacttcaacatgcagggacattgctgctgccagccaccctccacctccacaggccagcaggagcctcagacctcccagagccacacaggcctcctacagatgcatttcctccctccctcctccagaggtgcccttggggcacagggagagaggagggcaggccgccccgtcccgacacagggagagaggagggcaggccgtcccatccccgac

SEQ ID NO: 185643 - DNA, 30 bp, Homo sapiens; identical to SEQ ID NO: 94192
  chr17:80573582-80573612
  hypo

SEQ ID NO: 185644 - DNA, 21 bp, Homo sapiens
  chr17:80578015-80578036
  hypo
tactacctaaagggctgggtg

SEQ ID NO: 185645 - DNA, 81 bp, Homo sapiens; identical to SEQ ID NO: 94194
  chr17:80578335-80578416
  hypo

SEQ ID NO: 185646 - DNA, 30 bp, Homo sapiens; identical to SEQ ID NO: 94195
  chr17:80585228-80585258
  hypo

SEQ ID NO: 185647 - DNA, 121 bp, Homo sapiens; identical to SEQ ID NO: 31082
  chr17:80593583-80593704
  hypo

SEQ ID NO: 185648 - DNA, 22 bp, Homo sapiens
  chr17:80594123-80594145
  hypo
aagactccgtctcaaaaaaaaa

SEQ ID NO: 185649 - DNA, 36 bp, Homo sapiens
  chr17:80600024-80600060
  hypo
atgggtctgcaaccccggggcagtactggtccgtgg

SEQ ID NO: 185650 - DNA, 121 bp, Homo sapiens
  chr17:80600119-80600240
  hypo
caagctctgccccgacagatcagcggcagcatacgattctcacagaagcatgaaccccactgtgaacggcacacgcgagggatggaggctgcacgctcctcctgagactctaatgcctgat

SEQ ID NO: 185651 - DNA, 35 bp, Homo sapiens
  chr17:80600299-80600334
  hypo
atgaaaccagtccccggtgccgaaaaggctgcaga

SEQ ID NO: 185652 - DNA, 87 bp, Homo sapiens
  chr17:80600934-80601021
  hypo
aatctgcgtgtcttacgcaccctgactcatttttacaataactctgaggcaggcattgttatcaaccttatttcacgtacaaagaaa

SEQ ID NO: 185653 - DNA, 20 bp, Homo sapiens
  chr17:80603698-80603718
  hypo
gtacatcaagaatgatctgg

SEQ ID NO: 185654 - DNA, 121 bp, Homo sapiens
  chr17:80603957-80604078
  hypo
cagcactccagcctgggcaagagcaagatccgtctcggaaaaagaaaaaaaaaaagatctacaactatactcaacaatacggaaaaaaaaaatcacaaacatgatgttgagtaagaaacct

SEQ ID NO: 185655 - DNA, 140 bp, Homo sapiens; identical to SEQ ID NO: 94199
  chr17:80604377-80604517
  hypo

SEQ ID NO: 185656 - DNA, 120 bp, Homo sapiens; identical to SEQ ID NO: 94200
  chr17:80607967-80608087
  hypo

SEQ ID NO: 185657 - DNA, 112 bp, Homo sapiens; identical to SEQ ID NO: 94201
  chr17:80614272-80614384
  hypo

SEQ ID NO: 185658 - DNA, 30 bp, Homo sapiens
  chr17:80615677-80615707
  hypo
gccgggggtaacgccgagcttctcctggag

SEQ ID NO: 185659 - DNA, 30 bp, Homo sapiens; identical to SEQ ID NO: 94202
  chr17:80617839-80617869
  hypo

SEQ ID NO: 185660 - DNA, 30 bp, Homo sapiens; identical to SEQ ID NO: 94203
  chr17:80621621-80621651
  hypo

SEQ ID NO: 185661 - DNA, 30 bp, Homo sapiens; identical to SEQ ID NO: 31085
  chr17:80622926-80622956
  hypo

SEQ ID NO: 185662 - DNA, 111 bp, Homo sapiens; identical to SEQ ID NO: 94205
  chr17:80624870-80624981
  hypo

SEQ ID NO: 185663 - DNA, 30 bp, Homo sapiens
  chr17:80627864-80627894
  hypo
ttgggaatctattttcgaatgcggagataa

SEQ ID NO: 185664 - DNA, 25 bp, Homo sapiens
  chr17:80628724-80628749
  hypo
aagcgccctacgagtttcaaaacca

SEQ ID NO: 185665 - DNA, 30 bp, Homo sapiens; identical to SEQ ID NO: 31086
  chr17:80635505-80635535
  hypo

SEQ ID NO: 185666 - DNA, 81 bp, Homo sapiens; identical to SEQ ID NO: 94207
  chr17:80645604-80645685
  hypo

SEQ ID NO: 185667 - DNA, 30 bp, Homo sapiens
  chr17:80650238-80650268
  hypo
gagaatccaggcctcgctgaccgtatcgga

SEQ ID NO: 185668 - DNA, 30 bp, Homo sapiens; identical to SEQ ID NO: 94208
  chr17:80654028-80654058
  hypo

SEQ ID NO: 185669 - DNA, 30 bp, Homo sapiens; identical to SEQ ID NO: 94209
  chr17:80654327-80654357
  hypo

SEQ ID NO: 185670 - DNA, 497 bp, Homo sapiens; identical to SEQ ID NO: 94210
  chr17:80654593-80655090
  hypo

SEQ ID NO: 185671 - DNA, 1706 bp, Homo sapiens; identical to SEQ ID NO: 54776
  chr17:80655504-80657210
  hypo

SEQ ID NO: 185672 - DNA, 230 bp, Homo sapiens
  chr17:80660559-80660789
  hypo
ctgggaagggctgaccggctgtgctgtgggaagggccaggtgtggccggcctggaagtagctgagccagggacccagtgccggcgaggccggcccacctgccgcctttgttcctcccacggtgcccgctggtcttcctgtcgctgcagaggggctccctcctcacaggagaaaacatggcccccaggtttcaccccttggagagagaacggcctcactcactctcaggtc

SEQ ID NO: 185673 - DNA, 62 bp, Homo sapiens
  chr17:80661016-80661078
  hypo
cgaggcagaggccgtcgccaggcccctctctgctctcccctgcactacgggacccctgcacc

SEQ ID NO: 185674 - DNA, 125 bp, Homo sapiens
  chr17:80661290-80661415
  hypo
acatggctgcaccagcgcccacccccgacgggagacagcacgtgccttccgagtgctcataggggaagcctgcgtccgccttccagccctgtggtctctggtcttcccagcgggtgagggccccg

SEQ ID NO: 185675 - DNA, 30 bp, Homo sapiens
  chr17:80668615-80668645
  hypo
agaccccacacaggccgacaggagccacgt

SEQ ID NO: 185676 - DNA, 30 bp, Homo sapiens
  chr17:80668937-80668967
  hypo
gtttaccgctgccagcgtaggtgctgccca

SEQ ID NO: 185677 - DNA, 306 bp, Homo sapiens
  chr17:80671047-80671353
  hypo
ctccagacaggccgccgccatctgtgcgtgtcacatatctatgcagagactgctgcagacaggccgccgccatctgtgggcgtcgcatgcccatgcagagactgctccagacaggccgccgccatctgtgggcgtcgcatgcccacgcagtgactgctccagacgggccgccgccatctgtgggcgtcgcgtgcccacgcagagactgctccggactggccgccgccatctgtgggcgtcgcatgtctatacagagactgctccagactggccgccgccatctgtgggtgtcgcatgtctatgtag

SEQ ID NO: 185678 - DNA, 31 bp, Homo sapiens
  chr17:80673405-80673436
  hypo
tacacacagaaaagtgcgtgaacacacacat

SEQ ID NO: 185679 - DNA, 75 bp, Homo sapiens
  chr17:80678255-80678330
  hypo
gccacgggtgctcccgcctagaggaggacgttcagccggtgtgggctcagagcgggggccgtgcagcagccgtgg

SEQ ID NO: 185680 - DNA, 31 bp, Homo sapiens; identical to SEQ ID NO: 31093
  chr17:80680723-80680754
  hypo

SEQ ID NO: 185681 - DNA, 30 bp, Homo sapiens; identical to SEQ ID NO: 94215
  chr17:80687437-80687467
  hypo

SEQ ID NO: 185682 - DNA, 46 bp, Homo sapiens
  chr17:80692469-80692515
  hypo
ctcatgcatggccgggcgtggtggttcacggctgtaatcccagcac

SEQ ID NO: 185683 - DNA, 979 bp, Homo sapiens; identical to SEQ ID NO: 129618
  chr17:80692874-80693853
  hypo

SEQ ID NO: 185684 - DNA, 24 bp, Homo sapiens
  chr17:80703675-80703699
  hypo
taagaaactactggccgggtgggg

SEQ ID NO: 185685 - DNA, 361 bp, Homo sapiens
  chr17:80712024-80712385
  hypo
cgcccggctggagttttattattactcagatcagtctccctgagaatttgagggccagggttttttagaggtaatctgggggaaagggtgggggtggctgattggttaggggtatacaatcataggggagtcggaaatgatcctccgtgatgtgctgaatcgcgtctgcgtggggccccaggagcagtgggcgggtccaggtggagctatcatgggtccgtggatcctagtgtaggtgtcagacatggaaacaatctgaaaagatatctttaaaggccagtctcaggttctgcaatagtgacatggtctgcaggagtaactggggaactcgcatgtcttgtgatctcaagaataatggctg

SEQ ID NO: 185686 - DNA, 27 bp, Homo sapiens
  chr17:80712865-80712892
  hypo
atgtccccaaggaagtcgggctacagc

SEQ ID NO: 185687 - DNA, 87 bp, Homo sapiens
  chr17:80712951-80713038
  hypo
tggtctcgtcagggaaggcgggacatcttgggtgggagggcgtccagggcattggtggattcaaatatttcacgattggtgattggt

SEQ ID NO: 185688 - DNA, 258 bp, Homo sapiens
  chr17:80720792-80721050
  hypo
cttctctgcgtttcccggatgccagttgcagttgttttccatgtatgaagacttgcagcccagcgtatggtctgttttgttgaacattccgcgtgcacttgagaaaaatgtctgttctgttgttgggtagattgttctctaaatgtcacgtaagtaaggtgggtgatagtgctgtttaggtttcagcgattttctcttacttgttctatcagttcctgaaacaggagtgtcgaagttttcaaccgtgtctcctttcat

SEQ ID NO: 185689 - DNA, 163 bp, Homo sapiens
  chr17:80732518-80732681
  hypo
cacctcccagacggagcggcggccgggcgggggctgccccccacccgagtgtgtctacctgtcgtttgtggtgggacatttagactgctgccctcccaatttggtattaaaactcaatattgcaaacagtccacgtaaaattgtgtaccgttctgactgattt

SEQ ID NO: 185690 - DNA, 41 bp, Homo sapiens
  chr17:80744318-80744359
  hypo
aatttgatctctgtccggtctcttaacgggcttctaggggt

SEQ ID NO: 185691 - DNA, 252 bp, Homo sapiens; identical to SEQ ID NO: 94224
  chr17:80744600-80744852
  hypo

SEQ ID NO: 185692 - DNA, 274 bp, Homo sapiens
  chr17:80745051-80745325
  hypo
tggcaaagagtgaggcgtgctgtcctgccgtttagggcagagcacccaggcggtttggcagcagcacctcagaactattcagagatttgccctcagcaagagtgagcaattgtctgacgcagccggctgaaatccctgggaagggaatgaatgaaactgccgtgaagcaacgcctggcggggccgggcttctggcagctcctggggccagcacgtcccttccagagcgtctgaagccctgggcggctgctggagcatctcgagtctttccagag

SEQ ID NO: 185693 - DNA, 287 bp, Homo sapiens; identical to SEQ ID NO: 94226
  chr17:80747039-80747326
  hypo

SEQ ID NO: 185694 - DNA, 260 bp, Homo sapiens; identical to SEQ ID NO: 94227
  chr17:80747739-80747999
  hypo

SEQ ID NO: 185695 - DNA, 104 bp, Homo sapiens
  chr17:80749265-80749369
  hypo
catggatcattaacctcttttctagcatcttacctctgtggtggttcacttttgcgagcttttgctgggccttggaaggtgcgtgggctcgctgctcctctctt

SEQ ID NO: 185696 - DNA, 151 bp, Homo sapiens
  chr17:80749613-80749764
  hypo
tcatgaaacagtcatgcgtcccctaacaatgagggtagtcctgagaactgcgtcgttgggcagtgtcgtcgtgtgaacaccgtagcgtgcacttaaacatagatggtgtggcctgctgctcccaggccaggtggtgcggcctgctgcactc

SEQ ID NO: 185697 - DNA, 104 bp, Homo sapiens
  chr17:80762941-80763045
  hypo
cacagccaggcggcccgccctgcactcacccttggcaggagcagctgtgtacgcgggggccttgctcagcgcagggctgggctgcacgccgagcgcagactctg

SEQ ID NO: 185698 - DNA, 160 bp, Homo sapiens
  chr17:80763315-80763475
  hypo
ggtgaccggtgagacgcagcacctggtgatgaaggggcggtgtgtggcctgggcggtggcagtggtggccgttcaggaaggggctgccaggaggcagagggtcccgaaggccgggtgcttccccagggaaggcgctggtcctgtcgtctgtgtacccatc

SEQ ID NO: 185699 - DNA, 128 bp, Homo sapiens; identical to SEQ ID NO: 94229
  chr17:80767311-80767439
  hypo

SEQ ID NO: 185700 - DNA, 30 bp, Homo sapiens
  chr17:80767971-80768001
  hypo
ttcgggtctacccctcgcctacccattagc

SEQ ID NO: 185701 - DNA, 30 bp, Homo sapiens; identical to SEQ ID NO: 94230
  chr17:80768989-80769019
  hypo

SEQ ID NO: 185702 - DNA, 113 bp, Homo sapiens
  chr17:80771619-80771732
  hypo
acgcaaggggctcacggagcctctgggcagacagtacacgtctggaacttgtttaattgtgattgagtctgtcggtgacagtgagctctgaggagcccgctggtggacgctgg

SEQ ID NO: 185703 - DNA, 754 bp, Homo sapiens
  chr17:80772714-80773468
  hypo
gtttccaggagactgacaaggcgtggcatgggggatgtctggcgctggcagagctgggcaggagaggcctgttgctgccgtctcgactcgtggatggtgagtagctgaggcacggtcaggggggatgtctggcgctggcggagctgggcaggagaggcctgttgctgccatctcgactcgtggatggtgagtagctgaagcacggtcagctgcgtcaccaggctgtccgtggcaggctgcagcccttcgtctgaacccatctccgcggtgtggccctgccgcgggcacgcccagaagagcttgagaacaaggtctgtctacctttttctcgcattggcctttgtaatttcctaattgcctcttttgtctgctgtggaattttaatgccacagattaccctgtgtagctggttttggagggccacgaatccttgtaatgtctgattttcttactccccaaaaccggttttcattcttgagggacattgtcgccccttaaggacacatgcagtggcacctgcttcagttgtagaaccaggtacccctggcagcatcctgggtcacctggagtgacgtggtgctccctggagatgaggctcacgccagcgtgaaaccagggtgggaactggggtggagggccaggggagctctgcagtggccagcagtggggtggggacagagggcacagcatggcagatgcaggggcactgccccagaccagctcttgtgccgtggccacacgcagccctgtctgt

SEQ ID NO: 185704 - DNA, 30 bp, Homo sapiens
  chr17:80773870-80773900
  hypo
ccataatttaatttccgaacattttcattg

SEQ ID NO: 185705 - DNA, 166 bp, Homo sapiens; identical to SEQ ID NO: 94234
  chr17:80775960-80776126
  hypo

SEQ ID NO: 185706 - DNA, 30 bp, Homo sapiens
  chr17:80780343-80780373
  hypo
atctcaaagaggaacgaaggctcgcacgag

SEQ ID NO: 185707 - DNA, 190 bp, Homo sapiens
  chr17:80793756-80793946
  hypo
gtgtagcagggacagcgaggcacggtttggatgaggacaagatgtttgttaccctacaaccagggagggtgtcgggtgacaccctgggctcagaccccgcgctcagcacccgtctcccaccgtgggctgccacagaagctacaaggcaccgggtcaaggccaagcaaatgaaacacgtaatgatagctct

SEQ ID NO: 185708 - DNA, 75 bp, Homo sapiens
  chr17:80794409-80794484
  hypo
ttcagttttcgaagccgcattatttcacattgctgatacctctagcgcctgaaacacaagcgctcagaggagcaa

SEQ ID NO: 185709 - DNA, 1224 bp, Homo sapiens; identical to SEQ ID NO: 94237
  chr17:80797611-80798835
  hypo

SEQ ID NO: 185710 - DNA, 174 bp, Homo sapiens
  chr17:80816691-80816865
  hypo
gaggagggtgcggctcgtgggtggctgcctggggctaccccgtgtagacttgctgggactttgtctagacaagagaactgctgtcagtggcgcttcctgcggggggatgagtgcggctctcagcgcctctgtggggctgggggtcttgggccgtgaggccggggccaggctgcg

SEQ ID NO: 185711 - DNA, 34 bp, Homo sapiens
  chr17:80818623-80818657
  hypo
cttgtcttgtttcatcgcccgtgtccgggctgtg

SEQ ID NO: 185712 - DNA, 218 bp, Homo sapiens; identical to SEQ ID NO: 31102
  chr17:80819086-80819304
  hypo

SEQ ID NO: 185713 - DNA, 36 bp, Homo sapiens; identical to SEQ ID NO: 94240
  chr17:80820742-80820778
  hypo

SEQ ID NO: 185714 - DNA, 31 bp, Homo sapiens; identical to SEQ ID NO: 31103
  chr17:80821581-80821612
  hypo

SEQ ID NO: 185715 - DNA, 35 bp, Homo sapiens; identical to SEQ ID NO: 94242
  chr17:80825505-80825540
  hypo

SEQ ID NO: 185716 - DNA, 59 bp, Homo sapiens
  chr17:80827937-80827996
  hypo
tctaacaggagccccgaacctctgggtgggctccgtgtcgcttgcgtgcctcactcatc

SEQ ID NO: 185717 - DNA, 85 bp, Homo sapiens
  chr17:80828570-80828655
  hypo
cagcagattcttgggcgcaggtgatcggcacgctgggtggcgtgggaggaagcaagtggggcacgggaatcgcctgtgcgtgctc

SEQ ID NO: 185718 - DNA, 30 bp, Homo sapiens; identical to SEQ ID NO: 94244
  chr17:80829931-80829961
  hypo

SEQ ID NO: 185719 - DNA, 79 bp, Homo sapiens; identical to SEQ ID NO: 31104
  chr17:80830875-80830954
  hypo

SEQ ID NO: 185720 - DNA, 155 bp, Homo sapiens; identical to SEQ ID NO: 94246
  chr17:80831394-80831549
  hypo

SEQ ID NO: 185721 - DNA, 765 bp, Homo sapiens
  chr17:80832118-80832883
  hypo
ctgaaggactgtaggacgcactgtgggctgcaggcttgaagaaggatgtgagtttctggagtagcctggactgcacagccagggcctccccggcatgtggcggggccagcgttggcctgggtcccacttggctttgatctcgtggggctttggtttttggaggtcctgggtgcgtctccaccatggctcccgggttcccttgcgcacaccgagccagcagctgctggggcctcagggctcgcagctcacaggcttctgacgcctcagcctggagctggcgttgtgcccctcgcccctttacctgtgccatcccggccgcagacccaagggtgcccttggagccgtgcccgccggcctgggtgtcaggcttgtccaacgggttcttagagaacctgggccccatccctccttggcccacgcagactccaggcatccggccgggcgggctgtgagtcaggctgcaccaggtgagcgtgtgggatgctgctggtgcgagcctccctgcccaggagccctgcgcacccgggtatcggttggggtgtgcccttccagatctccctcccttggtttgtcataggtgaccacattttaattaccagcttttatgcccgtcaatttgggaacgtgatacaatcttgatttctctaactttcacaagttcttcggtgggtcctgtaacagtgggtgcttgggatcagagcatcagagtggaattttcgcagggaaatggaaatgcctgatcgagctgggcggtggcagcagccg

SEQ ID NO: 185722 - DNA, 30 bp, Homo sapiens
  chr17:80833719-80833749
  hypo
agctcaggtgtgactcgaaagcacttaaaa

SEQ ID NO: 185723 - DNA, 356 bp, Homo sapiens
  chr17:80839228-80839584
  hypo
tcattcggtcaggccgcttgccgccgatgaggggtgcagagcttctgcagcatcctggggaggtcccggaacgtgggtctgggctgtgctgatgctggagcagccagcggggagagctgccaggccactcctgacagccccgcacccgctctggatggaagcttctcgctcccagccgatacgggcctgctgcctgctgctggggctggaggggcccctctgcttgagccttggggtaccccgtgcctacgtgccctcctggctttgcccatggttggtggccgtgttttgggctgcgttgatgtcgttgtggagcccgctctgggcctcggcacgtctgagcttgattggggtgg

SEQ ID NO: 185724 - DNA, 30 bp, Homo sapiens; identical to SEQ ID NO: 94249
  chr17:80840988-80841018
  hypo

SEQ ID NO: 185725 - DNA, 30 bp, Homo sapiens; identical to SEQ ID NO: 31107
  chr17:80846060-80846090
  hypo

SEQ ID NO: 185726 - DNA, 465 bp, Homo sapiens
  chr17:80847830-80848295
  hypo
gctctgcagggtggggcgggtccctgggaccagcctggccttgcggggacgcagacctgaccccgcctcatcccacacagagcaggagctggctctgttgacgtcagcttgtgcctcatccagaccatagacgggcccagaagtcagctcccagaagctacggaccccatgaccccacgaccccacatcatgctggggctgcttttgctgtgccctctgaccctgacatctggtcactggtcagcttcgcctgtgaatggggggccccaggttactcatgttgtgtgtgatgacgtcacatcttgggcgtgtggttgggtcttgcaggagagtgggacagaggccggagaggggaccggggtctgggctggacctgggcggggagcaaagttcccacgagaagtcagccgagaaggctctggagttcccggacagcaaagcaaatgcagccggggtctgggctgt

SEQ ID NO: 185727 - DNA, 30 bp, Homo sapiens; identical to SEQ ID NO: 94252
  chr17:80849360-80849390
  hypo

SEQ ID NO: 185728 - DNA, 30 bp, Homo sapiens
  chr17:80856042-80856072
  hypo
gggagcacacggcacggctctgggttttgg

SEQ ID NO: 185729 - DNA, 30 bp, Homo sapiens; identical to SEQ ID NO: 94253
  chr17:80857064-80857094
  hypo

SEQ ID NO: 185730 - DNA, 30 bp, Homo sapiens; identical to SEQ ID NO: 94254
  chr17:80857336-80857366
  hypo

SEQ ID NO: 185731 - DNA, 30 bp, Homo sapiens
  chr17:80858330-80858360
  hypo
cgtttgtgtaaagcccgtgtgtgcacagat

SEQ ID NO: 185732 - DNA, 201 bp, Homo sapiens; identical to SEQ ID NO: 94255
  chr17:80859371-80859572
  hypo

SEQ ID NO: 185733 - DNA, 128 bp, Homo sapiens; identical to SEQ ID NO: 94256
  chr17:80859832-80859960
  hypo

SEQ ID NO: 185734 - DNA, 198 bp, Homo sapiens; identical to SEQ ID NO: 94257
  chr17:80860236-80860434
  hypo

SEQ ID NO: 185735 - DNA, 30 bp, Homo sapiens; identical to SEQ ID NO: 94258
  chr17:80862582-80862612
  hypo

SEQ ID NO: 185736 - DNA, 30 bp, Homo sapiens; identical to SEQ ID NO: 94259
  chr17:80863867-80863897
  hypo

SEQ ID NO: 185737 - DNA, 30 bp, Homo sapiens; identical to SEQ ID NO: 94260
  chr17:80864547-80864577
  hypo

SEQ ID NO: 185738 - DNA, 141 bp, Homo sapiens; identical to SEQ ID NO: 94261
  chr17:80867213-80867354
  hypo

SEQ ID NO: 185739 - DNA, 311 bp, Homo sapiens
  chr17:80867899-80868210
  hypo
gtgcatgtacggcgccgtgttatccactcaccagcccaggctcatctgggtttccagcctttggctattgtagggaagctgctgtgcacatctagacgtacaagtcttggtacgtttcacgtttcctggctgactaccaggagcagcatcgcagggtgtggggcacatgtgtgacttctcagcagccgagccaacttcccagaccctgctgctgcacgtccccatccacaagtgaccccttggtgtggtcggctctgaacgtgggccctctgggtgagtagaggcctctcgctgctgctggagtctgcctc

SEQ ID NO: 185740 - DNA, 30 bp, Homo sapiens; identical to SEQ ID NO: 94263
  chr17:80870908-80870938
  hypo

SEQ ID NO: 185741 - DNA, 158 bp, Homo sapiens
  chr17:80873072-80873230
  hypo
aggacgccggcatgtcggtgacatgccgcccgcaggagcatcaggtgcgccctggccgcaggtgccccggaggtgtcgaaccgcagatttcttcagacgttttttgcacattttgtgggaaaagtggctcaacccttgggagtcgtctgcgtccccat

SEQ ID NO: 185742 - DNA, 30 bp, Homo sapiens; identical to SEQ ID NO: 31109
  chr17:80878135-80878165
  hypo

SEQ ID NO: 185743 - DNA, 30 bp, Homo sapiens; identical to SEQ ID NO: 94266
  chr17:80878834-80878864
  hypo

SEQ ID NO: 185744 - DNA, 350 bp, Homo sapiens; identical to SEQ ID NO: 94267
  chr17:80879333-80879683
  hypo

SEQ ID NO: 185745 - DNA, 156 bp, Homo sapiens
  chr17:80882753-80882909
  hypo
ggtgtggctgtacacgatgggcagcagagggcctctcttcacactcgttgcttcctttcagaggagctgatcacgcagtacctggctgagcttcggaaccccgaggagatgactcgctgtggcttctcgttggccttgggcgcccttccaggcttc

SEQ ID NO: 185746 - DNA, 30 bp, Homo sapiens; identical to SEQ ID NO: 94269
  chr17:80885667-80885697
  hypo

SEQ ID NO: 185747 - DNA, 30 bp, Homo sapiens; identical to SEQ ID NO: 94270
  chr17:80887026-80887056
  hypo

SEQ ID NO: 185748 - DNA, 30 bp, Homo sapiens; identical to SEQ ID NO: 31112
  chr17:80887371-80887401
  hypo

SEQ ID NO: 185749 - DNA, 30 bp, Homo sapiens; identical to SEQ ID NO: 94272
  chr17:80887939-80887969
  hypo

SEQ ID NO: 185750 - DNA, 30 bp, Homo sapiens; identical to SEQ ID NO: 94273
  chr17:80888617-80888647
  hypo

SEQ ID NO: 185751 - DNA, 852 bp, Homo sapiens
  chr17:80888852-80889704
  hypo
ccacggacgtgcttgcggacgctcatcagccacccggcaagtgagagctctgtgttcctgaggatggaatgtcaagtgagaaacatcgctgctttctagaagtttctggctttacatggaggcagagtatagaccctgtgggccttgacctcagaattgggaacatcctctggaagggttgttcccagcatgtgcgaggacgaggacacgggcctggtgtcccctcgggcggggcctcggcagcctctcccatgagagcacagatgccgctctcggcaaacaggaactcggcccagccatgttttcttttctcgttacgactataatcagctgcacataaaggggcagttcgatcgattttgataggtgtccacccttaaaatcttccccagtcaggacggtgggctccagcccaaggtttcctcccagcccttcgagtccgtgcccctgacctgcgtcaccatagcctcagcccatggtcacttgaggcgctgggccgcgtgccggtcgctcattcctccgtgccggtcgctcattccgccttgccgttcgctcattcctccttgctgaccagtcgtgtctgttggtggaggcaccacagtgcatctgtctgtgggcattttggttgttgccgcatcggggctgttgctggtagagctgcaggcagtctgtgtgtgcgagcctgtgggtaggtgtgcacagctgggcctccctctctgtgggctgcggagcccagctctcctgtgtgttagtcggcctgtgctaaagctctcctgatgctcctgtcgcccagaggggacctccccagcctccttttctgtggggtaaataccgaggcgccgcaggctggct

SEQ ID NO: 185752 - DNA, 30 bp, Homo sapiens
  chr17:80890132-80890162
  hypo
tacatggtatagcgtcggcacaggcacctt

SEQ ID NO: 185753 - DNA, 55 bp, Homo sapiens
  chr17:80894203-80894258
  hypo
ctcgcgtgtttccacgtctgcttgtagcgctttccgcttcgccgttccctgcggc

SEQ ID NO: 185754 - DNA, 127 bp, Homo sapiens; identical to SEQ ID NO: 31114
  chr17:80895932-80896059
  hypo

SEQ ID NO: 185755 - DNA, 364 bp, Homo sapiens
  chr17:80897173-80897537
  hypo
gtcctgtcgtctctccggggtggggcggtggcgcttccctccggcaaatgcactgcatccctgtcccagatccggaagaccacggccagccaggtgtacgagacattgctcacctacagtgacgtcgtgggcgcggatgtgctggacgaggtggtgactgtgctcagtgacactgcgtggtgagtgaaggcccttcctgcacggccacctgggcctggcaccgcccctcttcctgtccccaccgtgtctactcgtctctcccaaaaccctctgataggaggaggaaagagggttcccaggtctccacatcctctgcttaggttttacaaggcagccgtgctgctgtagccgaaacctcttctca

SEQ ID NO: 185756 - DNA, 31 bp, Homo sapiens; identical to SEQ ID NO: 31115
  chr17:80898078-80898109
  hypo

SEQ ID NO: 185757 - DNA, 30 bp, Homo sapiens; identical to SEQ ID NO: 31116
  chr17:80898720-80898750
  hypo

SEQ ID NO: 185758 - DNA, 350 bp, Homo sapiens
  chr17:80898971-80899321
  hypo
cccctccttggcctcgcttggtctgtcctcccgcagtccctgcgctgggcgtggtccttcccgaggggcaccccttgttgggaaggaaccgtcctcctgcgattccggaaagggctcaggctcgaggctctgctggagaacgtgctcctgtgacgtcttttctgccctcagcctggctatggatgtcgggggtgaggtctcctttccctgactgcggccatggaagcttgacgcgggacctccgcacacctgaggttctccggtgggcactcgagagactcacggctctccctctcctcacagggacgcggagcttgcagtggtgagagagcagcgcaaccgtctgtgtg

SEQ ID NO: 185759 - DNA, 30 bp, Homo sapiens
  chr17:80907354-80907384
  hypo
ggtgccctgagacccgcaagctgctcccgc

SEQ ID NO: 185760 - DNA, 30 bp, Homo sapiens; identical to SEQ ID NO: 94279
  chr17:80916110-80916140
  hypo

SEQ ID NO: 185761 - DNA, 115 bp, Homo sapiens
  chr17:80917376-80917491
  hypo
tcctgcagacggctgcggggacttccccaccaggtgacgcagcctcgccgggttttggcatcttgtccttagcagcccgggtgtgttgggtgtctcggggcggggggacgagcct

SEQ ID NO: 185762 - DNA, 30 bp, Homo sapiens; identical to SEQ ID NO: 31118
  chr17:80917847-80917877
  hypo

SEQ ID NO: 185763 - DNA, 364 bp, Homo sapiens; identical to SEQ ID NO: 94282
  chr17:80918441-80918805
  hypo

SEQ ID NO: 185764 - DNA, 30 bp, Homo sapiens; identical to SEQ ID NO: 94283
  chr17:80923584-80923614
  hypo

SEQ ID NO: 185765 - DNA, 202 bp, Homo sapiens; identical to SEQ ID NO: 94284
  chr17:80935244-80935446
  hypo

SEQ ID NO: 185766 - DNA, 30 bp, Homo sapiens; identical to SEQ ID NO: 94285
  chr17:80963016-80963046
  hypo

SEQ ID NO: 185767 - DNA, 31 bp, Homo sapiens; identical to SEQ ID NO: 31121
  chr17:80963751-80963782
  hypo

SEQ ID NO: 185768 - DNA, 165 bp, Homo sapiens; identical to SEQ ID NO: 94287
  chr17:80964418-80964583
  hypo

SEQ ID NO: 185769 - DNA, 30 bp, Homo sapiens
  chr17:80964914-80964944
  hypo
ctccctgaaggctggcgaggagcatctttt

SEQ ID NO: 185770 - DNA, 196 bp, Homo sapiens
  chr17:80965438-80965634
  hypo
ggaggcagctgtgggcgacaggtgagtacacgccagcccactcctgagagcctggatcccgctggggcatgagaggcgcctctcggacgggggctgattgacgcctgcttccactgcgcatgcccgacccctccccatgactcccccagcttcatgcttccctggaaaggtaaagccacaccgggtctctcaccaa

SEQ ID NO: 185771 - DNA, 374 bp, Homo sapiens
  chr17:80965856-80966230
  hypo
aacagcgcccagccgcgatgctgccggcaccttcctctgcaggagacctcgcgctctcaagaggaggcgcagggaagaggcacgctctcaagaggaggaggaggcgcagggaagaggtgcgctatgcgcttaatcctgcaccgagacgtcagattctcagggcaggagcttttgtgggcaccgcacctagcacagggcctggacccagtgagcagatgtgaatgagaggcctgtgcgctggcctgagaggctggctaactttctccaggttcctagaagaagccactttcaaggctttcgagaagtgttgtgagctaattcatttgaaagcctctgtgccaacaggcggagcagaaagcgcaggccgctggagt

SEQ ID NO: 185772 - DNA, 179 bp, Homo sapiens
  chr17:80967461-80967640
  hypo
gactccccgtggattcgccacagaggccgagtcctgaagacggcaaaggggcgagaccttcgatgggcagcgcaggagggtcaagcgtgtctgggtgaacccaggtgaggtgccctcggtgcatggtgctgggtgcgagggaggaaggaggggccgggctgaggcgggaggcaaatgaa

SEQ ID NO: 185773 - DNA, 198 bp, Homo sapiens
  chr17:80968045-80968243
  hypo
caaccaccaggcaggcggctcttctccagcactgctgctgctgagccacgccccagggtccagagtcaccagcaccgggggcttcggccgccactcctgagcagcgatgttgaaggcgaaggtgaaggaggagcacccaggcctgacagcccgaactacagcccagcagagcccggaggcagccgtccagtgtgaccc

SEQ ID NO: 185774 - DNA, 30 bp, Homo sapiens
  chr17:80968669-80968699
  hypo
ccaggatgcagggcacggcggctccaccca

SEQ ID NO: 185775 - DNA, 30 bp, Homo sapiens; identical to SEQ ID NO: 94293
  chr17:80978691-80978721
  hypo

SEQ ID NO: 185776 - DNA, 83 bp, Homo sapiens; identical to SEQ ID NO: 94294
  chr17:80982743-80982826
  hypo

SEQ ID NO: 185777 - DNA, 31 bp, Homo sapiens; identical to SEQ ID NO: 94295
  chr17:80983791-80983822
  hypo

SEQ ID NO: 185778 - DNA, 343 bp, Homo sapiens; identical to SEQ ID NO: 94296
  chr17:80995218-80995561
  hypo

SEQ ID NO: 185779 - DNA, 31 bp, Homo sapiens; identical to SEQ ID NO: 94297
  chr17:80997107-80997138
  hypo

SEQ ID NO: 185780 - DNA, 35 bp, Homo sapiens; identical to SEQ ID NO: 94298
  chr17:80997454-80997489
  hypo

SEQ ID NO: 185781 - DNA, 30 bp, Homo sapiens
  chr17:80998180-80998210
  hypo
ccaccaactaaaaacgtatcatctgccaac

SEQ ID NO: 185782 - DNA, 295 bp, Homo sapiens; identical to SEQ ID NO: 94299
  chr17:81008590-81008885
  hypo

SEQ ID NO: 185783 - DNA, 37 bp, Homo sapiens; identical to SEQ ID NO: 54779
  chr17:81009161-81009198
  hypo

SEQ ID NO: 185784 - DNA, 63 bp, Homo sapiens
  chr17:81014243-81014306
  hypo
acagtagacttaagtgcggatgtggtccctcgagttccatttttcagccgcccacattcctgg

SEQ ID NO: 185785 - DNA, 275 bp, Homo sapiens
  chr17:81015925-81016200
  hypo
gtccaggggccacaccgggacctgccctcagctctgccacgtcctggccaagtggccttggcatgccagccctggtgtccacagaggcatccattcctcatggcaaagtggagtcaagtcggctgatgcaggcgagacacctggccggcctggggagccgcaccagcgctccccacattgcactgctgactgaggggtgctcggtgccgcggcttcacacggtcagtgcacagacatgaacgctggactgagaagccgccgcgtgcacctggccc

SEQ ID NO: 185786 - DNA, 128 bp, Homo sapiens
  chr17:81021376-81021504
  hypo
ggagcgccatggctgcgtagctttgctgtgcaccgtgcagggcggcggccagcacagcttggtgcccaggaactgctgacggaccgaaggaggagcgcctgagacagtgccagcgaataggcccctgc

SEQ ID NO: 185787 - DNA, 30 bp, Homo sapiens; identical to SEQ ID NO: 31127
  chr17:81024108-81024138
  hypo

SEQ ID NO: 185788 - DNA, 30 bp, Homo sapiens; identical to SEQ ID NO: 94304
  chr17:81024338-81024368
  hypo

SEQ ID NO: 185789 - DNA, 30 bp, Homo sapiens
  chr17:81028887-81028917
  hypo
tcgagcacacgcacacgtgcacacaggcat

SEQ ID NO: 185790 - DNA, 724 bp, Homo sapiens
  chr17:81032433-81033157
  hypo
gcaagctgggtgtgccgacggcgctggatggcaccatacgttgtccccgttgaggggtgactcctgctcccatgattagggccaaagggtcacaacctctgcagctcccacgtggctcaggggaaatgccaaaacagaggaacagccctcggccgcagccgggggatgcgtgggtgccctgcacactggccttcaacgtttgtgagtttcaggccttcggtagttggcatatgggacactccctctccccgcaggccgtggggataccggctccttccgaggcgtttctgccgtgagcgtcctccagaacgagtgggctgaggccctcggctgacgtcctgggtgaccgcagacctgctgtgtgtggccggccggccggaccttagcacgtcatcactgggctcacggtcctgcccctgagcacatctgaccggccgtggtcagggtccacgcagacgtccacctctgtgtacaaatccaccgtgtactgtagatggcccctcctgacaccaccccgcggaggccgaggaccctccttccctgtggggtctgagtgcccgagatggcagagtcactacagctcaccagccctggggccatggtcggttcatggccgggcggagggtgagatgctgccatgaacagctgctacaaacaactgctaggacggtgtggggccagcgtgccacacagaactgtctctcactgccgagctggcggctgg

SEQ ID NO: 185791 - DNA, 289 bp, Homo sapiens
  chr17:81033465-81033754
  hypo
ttacgagaaggttggcgaaaatggcctgggagggaaacgggtggcaaatgacttgggaggtggtggttgggcggggccgtgggatgaactgtgctcacgtgaacgacagactgcgacgttcttcagtatttttcaaatgctgaaagagaaaatttcatggacgcgcttggggaaaccgtgtgatgtttttctggaggaatccagctactctgggaggagctgtttctttagtgagtggattcaggtgactggtcatcttgggcagcacattggccgtcaacacacattt

SEQ ID NO: 185792 - DNA, 457 bp, Homo sapiens; identical to SEQ ID NO: 54781
  chr17:81036701-81037158
  hypo

SEQ ID NO: 185793 - DNA, 602 bp, Homo sapiens; identical to SEQ ID NO: 129624
  chr17:81038241-81038843
  hypo

SEQ ID NO: 185794 - DNA, 522 bp, Homo sapiens; identical to SEQ ID NO: 129625
  chr17:81038865-81039387
  hypo

SEQ ID NO: 185795 - DNA, 548 bp, Homo sapiens
  chr17:81042716-81043264
  hypo
atttggagcgggtatcgtcctcactgactctctgtgggtgcgggtggggtgtgtgacgggagctccgggcctggctgacagtgtctctcctctgcagcgggctgacgcacgaggcacacaggaaggaggtggagcaggtgtatctgcgctgtgcggcgggtgccgtggagtggatgtacccaacaggtgctctcatcgttaacctgcggcccaacaccttctcgcctgcccggcacctgaccgtgtgcatcaggtccttcacggactcctcgggggccaatatttatttggaaaaaactggagaactgagactgctggtaccagacggggacggcaggcccggccgggtgcagtgttttggcctggagcagggcggcctgttcgtggaggccacgccgcagcaggatatcggccggaggaccacaggcttccagtacgagctggttaggaggcacagggcgtcggacctgcacgagctgtctggtgagtgtcctgcctggggcgggggcggcgggcctcgtcatcacggggctggtgatgtggcaggt

SEQ ID NO: 185796 - DNA, 813 bp, Homo sapiens
  chr17:81048443-81049256
  hypo
cagtgaggggaccctcgggtggactggggtcaccacgcttctgtcgttgaccagctctctctcagccgaggccacctccactcacatgaggcgccctgggctgggacctctggccctgtggtacggggcaggtgctggcgtgcagtctcacctgtggaggataaaagtgctgcctgaaatttgagatcccccagtgctccctccttgttgcttccggacgtgagtggtggtctgtgctgctggcctctgtccagcacgtgcctgcatcaggcccagcatggtctgcagacccccagccggcgagtgggatgggggtccacataggtgaactaagtgtcaagggtgggccacaccccggggcccccataggagagcgcaccgggcggcttccagcttgggggtcaggaggcccccgtggtgggggctgcagtgtgagtctgtacacatcagcaggaaggggatttggccagaagctcccattctggagggttgctgggatggcagaggtgcccccccagtgccaggctggaccggcctcaaggtgctcagcagtgccaggctggaccggcctcgaggcgcccccagtgccaggctggaccgggcctcgaggcgctcagcaggctgtgcagtttctttttcctgataccttaatggaagcaaatgcaggaggaggtgggtgggccggtgagtcaggcactgagcccggctgggaggcgccctcacccctgcctggcggaaagtgctggccttgtctctgggtccctcctacctccaccctgcggggtccacaaagacctgcgcttgcccagtgca

SEQ ID NO: 185797 - DNA, 405 bp, Homo sapiens
  chr17:81049916-81050321
  hypo
ggggaggccaggccccgcagggttcaggggcttcagagggggttctgtgagcagggcttggcttgaaagccatttggggcatgcacctcatcccgcggccaggtggcatccggggaaggggccgggccgatggccctgactggaactcactgccctgctgggtgaggccccacgccggtggcaggtggacgcgtcgctgcctgcttagggatccccttcctggaatcttggcctcgctggcccttccagccacatggggggtcccgcgggatgggatcctccttttgggtgccgctgccgtcgcgacccagggaagtgggcagcagagctgtggggagtgtctgcccttcgaggaagctgggaaatgagggtggtcccggcgccgtgggccgtggaggtgggttg

SEQ ID NO: 185798 - DNA, 381 bp, Homo sapiens; identical to SEQ ID NO: 94311
  chr17:81050554-81050935
  hypo

SEQ ID NO: 185799 - DNA, 30 bp, Homo sapiens
  chr17:81051482-81051512
  hypo
ggtttggcctcccgtcgtgtggtgccgtgg

SEQ ID NO: 185800 - DNA, 316 bp, Homo sapiens
  chr17:81051923-81052239
  hypo
gggcagggggaggtgcggtggtcttgctgtgtgcttgcctttgctcactccctgtccccatctccttccccgcacagccgttcgaggctccatccagcaagttacccacgagcctgagcggcaggactcagccatccacctgcgcgtgagcagactctatcggcagaaaagcagggtcttcgagccggtgcccgagggtgacggccactggcaggggcgcgtcaggacgctgctggagtgtggcgtgcggccggggcatggcgacttcctcttcactggccacatgcacttcggggaggcgcggctcggctgtgcc

SEQ ID NO: 185801 - DNA, 30 bp, Homo sapiens
  chr17:81052821-81052851
  hypo
ccgccggttgtttccgttcccgagaataaa

SEQ ID NO: 185802 - DNA, 30 bp, Homo sapiens
  chr17:81059043-81059073
  hypo
accaggtgcttccttcgtcctgaccacacc

SEQ ID NO: 185803 - DNA, 17 bp, Homo sapiens
  chr17:81061265-81061282
  hypo
atgggaggccgggtgcg

SEQ ID NO: 185804 - DNA, 468 bp, Homo sapiens
  chr17:81062113-81062581
  hypo
acgcgaccatgggtacgttggccacctgaaggttgagtcccgcagcctagagactggagcgtggggaccaggaggagcttcttagcggaactgggctggggctcatgcagccctccaggagcccccgacgcgacgccctggctcatcccgggtgaagaggctgctgagtctgaactgatgacagtggacgggtggccgccggttcccaacgcatggttgggcctggaacccaggtgactctgggagatgtggtcacagtcacagccgtctgtgggcctttgggttcaaaacagcgcgagtcacaggagacagaagggaatctgagcttgcgattgctcattcttgtcaccctcctggctctgggacacctctgccatctcctaccaagggtaccccattcctggcgagttggaaagtggcctcatgggcagaaaacgagggcaaagggagctgcgtgctgtgagagac

SEQ ID NO: 185805 - DNA, 181 bp, Homo sapiens
  chr17:81063042-81063223
  hypo
ccgaagcaacagaagcgttcgcactggctctgggtgcagcctgcatcttcagccctggggcactgatgctgggcagcttctcggcttcactcgggaagggactcaggagcgaggtggtggggaagccagcagcttggctgaggcggcagtggaggtggtccagctccgcgactgctcccac

SEQ ID NO: 185806 - DNA, 428 bp, Homo sapiens; identical to SEQ ID NO: 94315
  chr17:81068539-81068967
  hypo

SEQ ID NO: 185807 - DNA, 30 bp, Homo sapiens
  chr17:81069223-81069253
  hypo
gtatgtgtaggggtgcgtgtgtgtggctgt

SEQ ID NO: 185808 - DNA, 142 bp, Homo sapiens
  chr17:81080730-81080872
  hypo
tgtgggccgcagagccgtgggctcggaagaagcacagcccaccatgccgtggatctccacgcgtggctcctctccacgcctgtgggttgctccaaagctgcagcgtcacgcgcagatgccaggtagccgtgatggaggctcg

SEQ ID NO: 185809 - DNA, 262 bp, Homo sapiens
  chr17:81101702-81101964
  hypo
ccttgctgtcaccaccgtggctggtctgtcagtcggggaacttgggaaccccagaatcctgcaggccgaagggaccttgccctcgagagggggtgaggaaacgaggctgagacgacctttgccagtgcccttggggggcgaagcgggatctggccttggcgtctgcccttttcaagggtcctccctgcacgcctggcgcctgtccctccccacagtggggagcaggggagccccactctacgtcccccgtttactgtcccca

SEQ ID NO: 185810 - DNA, 193 bp, Homo sapiens; identical to SEQ ID NO: 94317
  chr17:81102240-81102433
  hypo

SEQ ID NO: 185811 - DNA, 178 bp, Homo sapiens; identical to SEQ ID NO: 94318
  chr17:81104182-81104360
  hypo

SEQ ID NO: 185812 - DNA, 30 bp, Homo sapiens; identical to SEQ ID NO: 94319
  chr18:48897-48927
  hypo

SEQ ID NO: 185813 - DNA, 45 bp, Homo sapiens; identical to SEQ ID NO: 94320
  chr18:72941-72986
  hypo

SEQ ID NO: 185814 - DNA, 30 bp, Homo sapiens; identical to SEQ ID NO: 94321
  chr18:165387-165417
  hypo

SEQ ID NO: 185815 - DNA, 93 bp, Homo sapiens; identical to SEQ ID NO: 94322
  chr18:196511-196604
  hypo

SEQ ID NO: 185816 - DNA, 251 bp, Homo sapiens; identical to SEQ ID NO: 94323
  chr18:196806-197057
  hypo

SEQ ID NO: 185817 - DNA, 30 bp, Homo sapiens
  chr18:214893-214923
  hypo
acaggtttgtctcgccgaacatcaggacct

SEQ ID NO: 185818 - DNA, 30 bp, Homo sapiens; identical to SEQ ID NO: 94324
  chr18:245845-245875
  hypo

SEQ ID NO: 185819 - DNA, 29 bp, Homo sapiens
  chr18:318780-318809
  hypo
ctgcgcccggctggaaaggttcttttaag

SEQ ID NO: 185820 - DNA, 92 bp, Homo sapiens
  chr18:320959-321051
  hypo
agtagatgctcaatagatacacgtggaattgaacgcttggccacctggattagctgtgtatggatgtctacggaaaagaactaacattggtg

SEQ ID NO: 185821 - DNA, 138 bp, Homo sapiens; identical to SEQ ID NO: 94325
  chr18:380755-380893
  hypo

SEQ ID NO: 185822 - DNA, 43 bp, Homo sapiens; identical to SEQ ID NO: 94326
  chr18:460334-460377
  hypo

SEQ ID NO: 185823 - DNA, 22 bp, Homo sapiens
  chr18:483103-483125
  hypo
aaatcacatgtgatgctgtagc

SEQ ID NO: 185824 - DNA, 30 bp, Homo sapiens
  chr18:495668-495698
  hypo
atagcgccttgtctacgttgctcactcagt

SEQ ID NO: 185825 - DNA, 1811 bp, Homo sapiens; identical to SEQ ID NO: 129629
  chr18:499313-501124
  hypo

SEQ ID NO: 185826 - DNA, 22 bp, Homo sapiens
  chr18:520334-520356
  hypo
ttacaggcgtgagtcactttcc

SEQ ID NO: 185827 - DNA, 28 bp, Homo sapiens
  chr18:558857-558885
  hypo
cgcacccggcccaaacaccattatttgt

SEQ ID NO: 185828 - DNA, 30 bp, Homo sapiens
  chr18:565883-565913
  hypo
taagtacctgcaacacggccggctctttcc

SEQ ID NO: 185829 - DNA, 794 bp, Homo sapiens
  chr18:580158-580952
  hypo
ggctgttcttgccagctcaggcgtcaactcgtggaaaccggttaatgacccgaggggacagcggattctcgcctaagcaagatcccgcagatgggagggcgtaggaagaggttccccgggccggctccaggccccagcgggcgtgggcgttggcagtgagcgaggggtggtcccgcgccgcgccggcggggggcgcccgaatgagagcgcggggcggtgccgttgggaccacggcggccagagcggcaggatggcttccggcttcaagaagcccagcgctgcctccaccggccaaaagagaaaggtggcacctaagcccgagctcactgaggatcagaagcaagaagttcgggaagcatttgacctcttcgacgtggacggaagtgggaccatcgacgcgaaggagctgaaggtggccatgagagcgctgggcttcgaacccaggaaggaagagatgaagaaaatgatctccgaggtggacagggaaggcacggggaagatcagcttcaatgacttcctggccgtgatgacgcagaagatgtccgagaaggacaccaaagaagaaatcctgaaggccttcaggctctttgatgacgatgagaccgggaagatctcgttcaaaaacctgaagcgtgtggccaacgagctgggggagaacctcacggatgaggagctgcaggagatgatcgacgaagctgatcgggatggggacggcgaagtgaacgaggaggagttccttcggatcatgaagaagaccagcctttactgaagtcggttcagaagctaaagtgact

SEQ ID NO: 185830 - DNA, 22 bp, Homo sapiens
  chr18:597424-597446
  hypo
actggcaaaaactaagcggagc

SEQ ID NO: 185831 - DNA, 98 bp, Homo sapiens; identical to SEQ ID NO: 31139
  chr18:635704-635802
  hypo

SEQ ID NO: 185832 - DNA, 30 bp, Homo sapiens; identical to SEQ ID NO: 31140
  chr18:686331-686361
  hypo

SEQ ID NO: 185833 - DNA, 38 bp, Homo sapiens
  chr18:698118-698156
  hypo
agaaatatcacacaagtagaacacgtgttaatccatat

SEQ ID NO: 185834 - DNA, 423 bp, Homo sapiens; identical to SEQ ID NO: 54788
  chr18:712015-712438
  hypo

SEQ ID NO: 185835 - DNA, 1572 bp, Homo sapiens; identical to SEQ ID NO: 54790
  chr18:811502-813074
  hypo

SEQ ID NO: 185836 - DNA, 30 bp, Homo sapiens
  chr18:843168-843198
  hypo
gacaggtggagtctccgtctcaaaaacaac

SEQ ID NO: 185837 - DNA, 22 bp, Homo sapiens
  chr18:883065-883087
  hypo
cggtctactaaattgctacttg

SEQ ID NO: 185838 - DNA, 164 bp, Homo sapiens; identical to SEQ ID NO: 94337
  chr18:930035-930199
  hypo

SEQ ID NO: 185839 - DNA, 30 bp, Homo sapiens; identical to SEQ ID NO: 31143
  chr18:940771-940801
  hypo

SEQ ID NO: 185840 - DNA, 30 bp, Homo sapiens; identical to SEQ ID NO: 31144
  chr18:941133-941163
  hypo

SEQ ID NO: 185841 - DNA, 96 bp, Homo sapiens; identical to SEQ ID NO: 94340
  chr18:1098041-1098137
  hypo

SEQ ID NO: 185842 - DNA, 27 bp, Homo sapiens
  chr18:1406559-1406586
  hypo
gactccgtctcaaaaaaaaaaaaaaaa

SEQ ID NO: 185843 - DNA, 30 bp, Homo sapiens
  chr18:1436605-1436635
  hypo
tgagcacagagacgacgtgatctgactggc

SEQ ID NO: 185844 - DNA, 81 bp, Homo sapiens; identical to SEQ ID NO: 94342
  chr18:1772177-1772258
  hypo

SEQ ID NO: 185845 - DNA, 30 bp, Homo sapiens; identical to SEQ ID NO: 11593
  chr18:1777065-1777095
  hypo

SEQ ID NO: 185846 - DNA, 78 bp, Homo sapiens; identical to SEQ ID NO: 94344
  chr18:1798115-1798193
  hypo

SEQ ID NO: 185847 - DNA, 47 bp, Homo sapiens; identical to SEQ ID NO: 94345
  chr18:1800380-1800427
  hypo

SEQ ID NO: 185848 - DNA, 94 bp, Homo sapiens; identical to SEQ ID NO: 94346
  chr18:1847232-1847326
  hypo

SEQ ID NO: 185849 - DNA, 31 bp, Homo sapiens
  chr18:1852273-1852304
  hypo
gcgagactccgtctcaaaaaaaaaaaaaata

SEQ ID NO: 185850 - DNA, 35 bp, Homo sapiens; identical to SEQ ID NO: 94347
  chr18:1928648-1928683
  hypo

SEQ ID NO: 185851 - DNA, 64 bp, Homo sapiens; identical to SEQ ID NO: 94348
  chr18:1955268-1955332
  hypo

SEQ ID NO: 185852 - DNA, 330 bp, Homo sapiens; identical to SEQ ID NO: 94349
  chr18:2405968-2406298
  hypo

SEQ ID NO: 185853 - DNA, 22 bp, Homo sapiens
  chr18:2417423-2417445
  hypo
tggatcaccaggtcaggagatc

SEQ ID NO: 185854 - DNA, 21 bp, Homo sapiens
  chr18:2417684-2417705
  hypo
ggttgtgcagcaaatattaca

SEQ ID NO: 185855 - DNA, 21 bp, Homo sapiens
  chr18:2485456-2485477
  hypo
tgagacagactcttgccctgt

SEQ ID NO: 185856 - DNA, 93 bp, Homo sapiens; identical to SEQ ID NO: 94353
  chr18:2565717-2565810
  hypo

SEQ ID NO: 185857 - DNA, 286 bp, Homo sapiens; identical to SEQ ID NO: 129648
  chr18:2571377-2571663
  hypo

SEQ ID NO: 185858 - DNA, 30 bp, Homo sapiens; identical to SEQ ID NO: 31147
  chr18:2755855-2755885
  hypo

SEQ ID NO: 185859 - DNA, 1881 bp, Homo sapiens; identical to SEQ ID NO: 54809
  chr18:2846544-2848425
  hypo

SEQ ID NO: 185860 - DNA, 193 bp, Homo sapiens; identical to SEQ ID NO: 94357
  chr18:2851483-2851676
  hypo

SEQ ID NO: 185861 - DNA, 30 bp, Homo sapiens
  chr18:2853339-2853369
  hypo
cgtcagtgtggtggacgcagcctctgaatc

SEQ ID NO: 185862 - DNA, 30 bp, Homo sapiens
  chr18:2853774-2853804
  hypo
tgatgcctaccgcagcgggtgctgcattgc

SEQ ID NO: 185863 - DNA, 181 bp, Homo sapiens
  chr18:2876294-2876475
  hypo
aaagctagcttgttactctatgtgataaggaaattaattcaagaggaaatggaaaaataagcagcttacaattgtgatttctccagcagatatatcttttgtactgggaaacagtctcctgtagaatattttcattttgaacacactgcattggtcttagatctgttattttaaaaatacg

SEQ ID NO: 185864 - DNA, 742 bp, Homo sapiens; identical to SEQ ID NO: 11596
  chr18:2906054-2906796
  hypo

SEQ ID NO: 185865 - DNA, 167 bp, Homo sapiens; identical to SEQ ID NO: 129652
  chr18:2907033-2907200
  hypo

SEQ ID NO: 185866 - DNA, 30 bp, Homo sapiens; identical to SEQ ID NO: 94360
  chr18:2909774-2909804
  hypo

SEQ ID NO: 185867 - DNA, 128 bp, Homo sapiens; identical to SEQ ID NO: 94361
  chr18:2910111-2910239
  hypo

SEQ ID NO: 185868 - DNA, 35 bp, Homo sapiens; identical to SEQ ID NO: 94362
  chr18:2910451-2910486
  hypo

SEQ ID NO: 185869 - DNA, 149 bp, Homo sapiens; identical to SEQ ID NO: 94363
  chr18:2913120-2913269
  hypo

SEQ ID NO: 185870 - DNA, 128 bp, Homo sapiens; identical to SEQ ID NO: 94364
  chr18:2921215-2921343
  hypo

SEQ ID NO: 185871 - DNA, 217 bp, Homo sapiens; identical to SEQ ID NO: 94365
  chr18:2921974-2922191
  hypo

SEQ ID NO: 185872 - DNA, 212 bp, Homo sapiens; identical to SEQ ID NO: 94366
  chr18:2937550-2937762
  hypo

SEQ ID NO: 185873 - DNA, 30 bp, Homo sapiens; identical to SEQ ID NO: 94367
  chr18:2944634-2944664
  hypo

SEQ ID NO: 185874 - DNA, 30 bp, Homo sapiens; identical to SEQ ID NO: 31152
  chr18:2947828-2947858
  hypo

SEQ ID NO: 185875 - DNA, 30 bp, Homo sapiens; identical to SEQ ID NO: 94369
  chr18:3000510-3000540
  hypo

SEQ ID NO: 185876 - DNA, 166 bp, Homo sapiens
  chr18:3011265-3011431
  hypo
cagcttctcttaagcataatgcgtgcctattgactctcgactgtgccatcaaacgttaaaacagaacctgtcgtttcatttctagctttctatggctacctctatcaaaagttgggcatggagataccttaagtctggctggggcggttgctcacgcctgtaatcc

SEQ ID NO: 185877 - DNA, 30 bp, Homo sapiens
  chr18:3011890-3011920
  hypo
tgtggccggctctgccgcttctcccccgct

SEQ ID NO: 185878 - DNA, 163 bp, Homo sapiens
  chr18:3026812-3026975
  hypo
cacccaacctgtttgctttctttgaactggatggttatcattcttagtcctgggcacaaagattcttccagttggtcgatggactttcttattttcaccggtcatgtgctgccaggtcataaaaccagggatcttgaaggccaaggtacggaaccgcagctgc

SEQ ID NO: 185879 - DNA, 162 bp, Homo sapiens; identical to SEQ ID NO: 94371
  chr18:3051274-3051436
  hypo

SEQ ID NO: 185880 - DNA, 234 bp, Homo sapiens
  chr18:3061439-3061673
  hypo
tctcgattctgcccccgcaacgagttgcttctcttctttctctgcacagtcttcactttcatgaagccaaatgcctccttgcaattcagctcctggttttgagtgtgtaaggaagacacacgcttctcgtgaaattctggagaatgtctccggactgcgtgggaagcttatgaaccagaggtgcctgtactgacagaagcctgtgagcaaagagggttccgagaactggttagc

SEQ ID NO: 185881 - DNA, 30 bp, Homo sapiens
  chr18:3063406-3063436
  hypo
gcttccctgaggccccggacctcgaccatt

SEQ ID NO: 185882 - DNA, 136 bp, Homo sapiens; identical to SEQ ID NO: 31155
  chr18:3119809-3119945
  hypo

SEQ ID NO: 185883 - DNA, 161 bp, Homo sapiens
  chr18:3126625-3126786
  hypo
gtgtgcctgcctgggcgtgcaagcatagcgtcatacataggacacgccacactacagaaagtcacgtgcttaccttgtatgcctcctcactgacagccttgacattggcttctctccattttcctggtaccccatcaatgacctcgcgatagttcacataa

SEQ ID NO: 185884 - DNA, 127 bp, Homo sapiens; identical to SEQ ID NO: 94374
  chr18:3135594-3135721
  hypo

SEQ ID NO: 185885 - DNA, 272 bp, Homo sapiens; identical to SEQ ID NO: 31156
  chr18:3214252-3214524
  hypo

SEQ ID NO: 185886 - DNA, 601 bp, Homo sapiens; identical to SEQ ID NO: 31157
  chr18:3214823-3215424
  hypo

SEQ ID NO: 185887 - DNA, 30 bp, Homo sapiens; identical to SEQ ID NO: 129662
  chr18:3261997-3262027
  hypo

SEQ ID NO: 185888 - DNA, 36 bp, Homo sapiens; identical to SEQ ID NO: 11600
  chr18:3262088-3262124
  hypo

SEQ ID NO: 185889 - DNA, 257 bp, Homo sapiens
  chr18:3330572-3330829
  hypo
tgtcacaggggaatgacggcagctgtgccaatagaaaaggaaaaggactacctgggggcggccatgtccaacatggaggctccatcttctctttttttgttatcacgtgtacagtaataaagaaatgggcaacatggtgcacctcaggcagagacgcgcctggataataaaaaaaggttaggatgggggataccagagattcgtgccctatgcaaatagcacaactggtctaaccagtctttcttgccctttcttgc

SEQ ID NO: 185890 - DNA, 330 bp, Homo sapiens; identical to SEQ ID NO: 94379
  chr18:3360374-3360704
  hypo

SEQ ID NO: 185891 - DNA, 30 bp, Homo sapiens; identical to SEQ ID NO: 94380
  chr18:3360913-3360943
  hypo

SEQ ID NO: 185892 - DNA, 37 bp, Homo sapiens; identical to SEQ ID NO: 94381
  chr18:3412986-3413023
  hypo

SEQ ID NO: 185893 - DNA, 239 bp, Homo sapiens; identical to SEQ ID NO: 94382
  chr18:3415133-3415372
  hypo

SEQ ID NO: 185894 - DNA, 36 bp, Homo sapiens; identical to SEQ ID NO: 94383
  chr18:3417142-3417178
  hypo

SEQ ID NO: 185895 - DNA, 91 bp, Homo sapiens; identical to SEQ ID NO: 94384
  chr18:3421738-3421829
  hypo

SEQ ID NO: 185896 - DNA, 90 bp, Homo sapiens
  chr18:3439667-3439757
  hypo
ttcaggactagtagacgtgtgtgaattgttgcctgtctcagggaaaggagaaaagaaaaataggaatggggccaggcgtggcacctcatg

SEQ ID NO: 185897 - DNA, 87 bp, Homo sapiens; identical to SEQ ID NO: 31160
  chr18:3443524-3443611
  hypo

SEQ ID NO: 185898 - DNA, 121 bp, Homo sapiens; identical to SEQ ID NO: 94386
  chr18:3443850-3443971
  hypo

SEQ ID NO: 185899 - DNA, 95 bp, Homo sapiens; identical to SEQ ID NO: 31161
  chr18:3445348-3445443
  hypo

SEQ ID NO: 185900 - DNA, 632 bp, Homo sapiens; identical to SEQ ID NO: 11602
  chr18:3447897-3448529
  hypo

SEQ ID NO: 185901 - DNA, 36 bp, Homo sapiens; identical to SEQ ID NO: 54821
  chr18:3448759-3448795
  hypo

SEQ ID NO: 185902 - DNA, 3100 bp, Homo sapiens; identical to SEQ ID NO: 54822
  chr18:3449164-3452264
  hypo

SEQ ID NO: 185903 - DNA, 43 bp, Homo sapiens; identical to SEQ ID NO: 31166
  chr18:3534579-3534622
  hypo

SEQ ID NO: 185904 - DNA, 39 bp, Homo sapiens; identical to SEQ ID NO: 94392
  chr18:3535410-3535449
  hypo

SEQ ID NO: 185905 - DNA, 27 bp, Homo sapiens
  chr18:3553809-3553836
  hypo
cgtgagccaccacgcccggcccacaca

SEQ ID NO: 185906 - DNA, 18 bp, Homo sapiens
  chr18:3567918-3567936
  hypo
tagagtttccctctgtcg

SEQ ID NO: 185907 - DNA, 33 bp, Homo sapiens; identical to SEQ ID NO: 94395
  chr18:3570504-3570537
  hypo

SEQ ID NO: 185908 - DNA, 98 bp, Homo sapiens
  chr18:3580249-3580347
  hypo
cagtggagtgggggacgctccaggcaccagcaatggcgcaactgtctcttccaccaaaaggcacaagtccctttttcagtgcgcgaaatgtagttttg

SEQ ID NO: 185909 - DNA, 214 bp, Homo sapiens
  chr18:3580779-3580993
  hypo
ggtcaggggtggtgccgaagcgtcttccacctgccgtgcggaccgtggaaaataaaaggctctgcccccggggtgagtgtggccggttgtaccctgcagtagcgtctgccctgagctgccagtgctgggtatcccccagccccaggaaatgtggggtcggccgggaccctcacagctctgaatttgcttctgttatttacggctttttgctgct

SEQ ID NO: 185910 - DNA, 263 bp, Homo sapiens; identical to SEQ ID NO: 31169
  chr18:3581879-3582142
  hypo

SEQ ID NO: 185911 - DNA, 24 bp, Homo sapiens
  chr18:3588162-3588186
  hypo
tatatatttttggggccgggcgct

SEQ ID NO: 185912 - DNA, 63 bp, Homo sapiens
  chr18:3592366-3592429
  hypo
tgccagacaaatcagcggtctggctggagtcctccaccggcaaaaatgcgcaaaccctggcaa

SEQ ID NO: 185913 - DNA, 31 bp, Homo sapiens; identical to SEQ ID NO: 94398
  chr18:3599046-3599077
  hypo

SEQ ID NO: 185914 - DNA, 37 bp, Homo sapiens; identical to SEQ ID NO: 31170
  chr18:3600254-3600291
  hypo

SEQ ID NO: 185915 - DNA, 36 bp, Homo sapiens; identical to SEQ ID NO: 94400
  chr18:3600530-3600566
  hypo

SEQ ID NO: 185916 - DNA, 93 bp, Homo sapiens
  chr18:3602007-3602100
  hypo
aatgaatgaataaataaataaataaaacatatgatttaccttggcccactataattttgcactacagggtggcagctccgtgctatgtacaag

SEQ ID NO: 185917 - DNA, 77 bp, Homo sapiens; identical to SEQ ID NO: 94401
  chr18:3608038-3608115
  hypo

SEQ ID NO: 185918 - DNA, 94 bp, Homo sapiens; identical to SEQ ID NO: 94402
  chr18:3610053-3610147
  hypo

SEQ ID NO: 185919 - DNA, 28 bp, Homo sapiens
  chr18:3613114-3613142
  hypo
gcatgagccaccacgcctggccttttag

SEQ ID NO: 185920 - DNA, 31 bp, Homo sapiens; identical to SEQ ID NO: 31172
  chr18:3614529-3614560
  hypo

SEQ ID NO: 185921 - DNA, 30 bp, Homo sapiens
  chr18:3616329-3616359
  hypo
tggcacagccctgggcgatgtgtacatgta

SEQ ID NO: 185922 - DNA, 30 bp, Homo sapiens
  chr18:3616715-3616745
  hypo
ttaaaccaccctaggcggcagagggagacc

SEQ ID NO: 185923 - DNA, 17 bp, Homo sapiens
  chr18:3623492-3623509
  hypo
aaaggaaaagccagccg

SEQ ID NO: 185924 - DNA, 36 bp, Homo sapiens
  chr18:3628498-3628534
  hypo
ataattacaaaatgaagattccgaaaccaccacgta

SEQ ID NO: 185925 - DNA, 18 bp, Homo sapiens
  chr18:3636418-3636436
  hypo
ggtttgttttttgagacg

SEQ ID NO: 185926 - DNA, 155 bp, Homo sapiens; identical to SEQ ID NO: 31174
  chr18:3637283-3637438
  hypo

SEQ ID NO: 185927 - DNA, 38 bp, Homo sapiens
  chr18:3640024-3640062
  hypo
ttacaggcgtgagccacggcacccggccccagagttgc

SEQ ID NO: 185928 - DNA, 30 bp, Homo sapiens; identical to SEQ ID NO: 94407
  chr18:3640433-3640463
  hypo

SEQ ID NO: 185929 - DNA, 23 bp, Homo sapiens
  chr18:3647472-3647495
  hypo
ttttttttttttaaaccgagact

SEQ ID NO: 185930 - DNA, 140 bp, Homo sapiens
  chr18:3648337-3648477
  hypo
ctgtggcaatatttacgcatgtaaagcatcttagttgaataccaaattcaaacaaaatcaatacaaaatggattttacagttaattttaatgggtgtgatgtatcgtttaagagggtgtgatttccgggttcataacatc

SEQ ID NO: 185931 - DNA, 25 bp, Homo sapiens
  chr18:3657608-3657633
  hypo
ttttttttttttgagacggagtctt

SEQ ID NO: 185932 - DNA, 25 bp, Homo sapiens
  chr18:3662972-3662997
  hypo
gtaagaacctgaatctcggctgggt

SEQ ID NO: 185933 - DNA, 100 bp, Homo sapiens; identical to SEQ ID NO: 94411
  chr18:3668965-3669065
  hypo

SEQ ID NO: 185934 - DNA, 80 bp, Homo sapiens; identical to SEQ ID NO: 94412
  chr18:3669444-3669524
  hypo

SEQ ID NO: 185935 - DNA, 19 bp, Homo sapiens
  chr18:3702319-3702338
  hypo
ctgacgtctaccttgaatt

SEQ ID NO: 185936 - DNA, 30 bp, Homo sapiens
  chr18:3712385-3712415
  hypo
ctgtagcacttggccgaggcctagataccc

SEQ ID NO: 185937 - DNA, 287 bp, Homo sapiens
  chr18:3729120-3729407
  hypo
gcccgcgcactcacccgtgctgctctggatggtcctaacggtggtggtggtgcgcggcggcgaggacgacctcagggacacgcactcgtcgtcctgggagcagcctttctcaatggcccgcacatagctgtggctccgcatgcggaagcagccgggcatgggcaggtccagcgcttccacggcctgcgactccagctcgctgaacacggactcgcacacggactcgaactgcccgttcacttccatctcgctcacctgcgggcagacacaggcgttgtgacactcgc

SEQ ID NO: 185938 - DNA, 1037 bp, Homo sapiens; identical to SEQ ID NO: 11607
  chr18:3879109-3880146
  hypo

SEQ ID NO: 185939 - DNA, 30 bp, Homo sapiens; identical to SEQ ID NO: 94416
  chr18:3880495-3880525
  hypo

SEQ ID NO: 185940 - DNA, 30 bp, Homo sapiens; identical to SEQ ID NO: 94417
  chr18:3881532-3881562
  hypo

SEQ ID NO: 185941 - DNA, 65 bp, Homo sapiens
  chr18:3920622-3920687
  hypo
ttgccttgcacttggcgttcagttagggcgaaactctctctctcccactccgctccacccaagga

SEQ ID NO: 185942 - DNA, 170 bp, Homo sapiens
  chr18:3931024-3931194
  hypo
aagacggtaagctcccggcatggcttctgggtgtagtcactgtgccaagcttaaggctgggccagtcccacgaactgctcctgcctccaccggctcactctaccaagtctggacttgccacatatatgctgctgcctgggctcccttcagcttctcgccggcatctcact

SEQ ID NO: 185943 - DNA, 30 bp, Homo sapiens; identical to SEQ ID NO: 94419
  chr18:3955020-3955050
  hypo

SEQ ID NO: 185944 - DNA, 196 bp, Homo sapiens; identical to SEQ ID NO: 94420
  chr18:3986861-3987057
  hypo

SEQ ID NO: 185945 - DNA, 18 bp, Homo sapiens
  chr18:4008918-4008936
  hypo
tttgaaacggagtctcgc

SEQ ID NO: 185946 - DNA, 77 bp, Homo sapiens; identical to SEQ ID NO: 31179
  chr18:4009175-4009252
  hypo

SEQ ID NO: 185947 - DNA, 38 bp, Homo sapiens
  chr18:4042774-4042812
  hypo
aataaaattatggttcatagcaacgatgtatatcactt

SEQ ID NO: 185948 - DNA, 253 bp, Homo sapiens; identical to SEQ ID NO: 54827
  chr18:4454777-4455030
  hypo

SEQ ID NO: 185949 - DNA, 13 bp, Homo sapiens
  chr18:4455258-4455271
  hypo
cggaggctgagcg

SEQ ID NO: 185950 - DNA, 167 bp, Homo sapiens; identical to SEQ ID NO: 129678
  chr18:4455561-4455728
  hypo

SEQ ID NO: 185951 - DNA, 18 bp, Homo sapiens
  chr18:4509886-4509904
  hypo
aaaagtatctcagcagcc

SEQ ID NO: 185952 - DNA, 240 bp, Homo sapiens
  chr18:5133033-5133273
  hypo
ctcagctttccgcctcgggttttggtaagctggtttggtgtccatgggggcctggctcttgagctgctccaggctgagagcagcgagctgcgggttcccgggaggcagcgaggcgggttgatggggccgccctcccgcctaagcctggccagctccaccaccaccgaccacgatggctgcgccccgggccgcgaggaagatggaacacagcttcttctccaggaccgagagcccagaatg

SEQ ID NO: 185953 - DNA, 155 bp, Homo sapiens
  chr18:5149402-5149557
  hypo
tgaaaatagagatacaaatgtcgtagccaagtgtccaggaaccgttcagctgagcttcatattacaactcagatattggaaaaatccagtatactccagttattgtaccacctaggttatcctctgccatgagcgagcctcgtctctccatctgc

SEQ ID NO: 185954 - DNA, 30 bp, Homo sapiens; identical to SEQ ID NO: 31180
  chr18:5285184-5285214
  hypo

SEQ ID NO: 185955 - DNA, 36 bp, Homo sapiens
  chr18:5388295-5388331
  hypo
gggattacaggcgtgagccaccgcacctggccgata

SEQ ID NO: 185956 - DNA, 30 bp, Homo sapiens
  chr18:5423426-5423456
  hypo
aagtaaggtgctgggcgatctatcaacgca

SEQ ID NO: 185957 - DNA, 19 bp, Homo sapiens
  chr18:5441430-5441449
  hypo
aaagaatacaggtaaaaat

SEQ ID NO: 185958 - DNA, 18 bp, Homo sapiens
  chr18:5441748-5441766
  hypo
caccgcgcccggcctcga

SEQ ID NO: 185959 - DNA, 222 bp, Homo sapiens
  chr18:5469571-5469793
  hypo
agccaactgcagcctgcaagtcgagtgggcggaatgagcccaatgggcctgagcaaaaatcaagcataggcgccacccgccctagaggcttccggctggaaaaggaacgtccgaaagatcctgtgacactactaaaacacaagtccacgctggagacaaatactatactttggatcgttccttctgctgttgtagaatgaattttttttttttttttttgag

SEQ ID NO: 185960 - DNA, 41 bp, Homo sapiens; identical to SEQ ID NO: 94431
  chr18:5533863-5533904
  hypo

SEQ ID NO: 185961 - DNA, 429 bp, Homo sapiens; identical to SEQ ID NO: 54836
  chr18:5542728-5543157
  hypo

SEQ ID NO: 185962 - DNA, 24 bp, Homo sapiens
  chr18:5617635-5617659
  hypo
aacgcaaataacaaggaaggatta

SEQ ID NO: 185963 - DNA, 1282 bp, Homo sapiens; identical to SEQ ID NO: 129689
  chr18:5628201-5629483
  hypo

SEQ ID NO: 185964 - DNA, 256 bp, Homo sapiens; identical to SEQ ID NO: 11616
  chr18:5629569-5629825
  hypo

SEQ ID NO: 185965 - DNA, 530 bp, Homo sapiens; identical to SEQ ID NO: 11617
  chr18:5630124-5630654
  hypo

SEQ ID NO: 185966 - DNA, 30 bp, Homo sapiens
  chr18:5653393-5653423
  hypo
ggattcggttgaactcgagtagagatttgg

SEQ ID NO: 185967 - DNA, 17 bp, Homo sapiens
  chr18:5796120-5796137
  hypo
gggcgcggtggctcacg

SEQ ID NO: 185968 - DNA, 16 bp, Homo sapiens
  chr18:5796376-5796392
  hypo
gcgacagagcgagact

SEQ ID NO: 185969 - DNA, 295 bp, Homo sapiens; identical to SEQ ID NO: 54844
  chr18:5894650-5894945
  hypo

SEQ ID NO: 185970 - DNA, 1228 bp, Homo sapiens; identical to SEQ ID NO: 54845
  chr18:5895017-5896245
  hypo

SEQ ID NO: 185971 - DNA, 199 bp, Homo sapiens
  chr18:6284880-6285079
  hypo
agtcggagcccggaacggggagggaaaacatccacaagttggggagtaggcacaggcctcagagcctggcagggcagcctggcatgggcgggggcgggaatgaaccctaaacaaggcgttgagggcacccacctggaggctgacccagcgaggggagtccagtttccggagggcgtcgagaggacggcttctgcggggc

SEQ ID NO: 185972 - DNA, 241 bp, Homo sapiens; identical to SEQ ID NO: 129697
  chr18:6414203-6414444
  hypo

SEQ ID NO: 185973 - DNA, 25 bp, Homo sapiens
  chr18:6430134-6430159
  hypo
gcccggcctgacataaagttttgtg

SEQ ID NO: 185974 - DNA, 166 bp, Homo sapiens
  chr18:6444199-6444365
  hypo
caggatagtcactaaagcaagcgggacttgacattctccttcgattctgcagcaactgcggcacggtgctgatggcagggctgttgtaggccaagacaggcctaagacaatcccttgtcttccagaagaccaccaggatggctgcgtagtagaaaggagagcttta

SEQ ID NO: 185975 - DNA, 30 bp, Homo sapiens
  chr18:6493368-6493398
  hypo
tagctggactcacaacgacatcggaatagc

SEQ ID NO: 185976 - DNA, 30 bp, Homo sapiens; identical to SEQ ID NO: 54849
  chr18:6646431-6646461
  hypo

SEQ ID NO: 185977 - DNA, 30 bp, Homo sapiens; identical to SEQ ID NO: 54850
  chr18:6659987-6660017
  hypo

SEQ ID NO: 185978 - DNA, 30 bp, Homo sapiens; identical to SEQ ID NO: 54852
  chr18:6795203-6795233
  hypo

SEQ ID NO: 185979 - DNA, 678 bp, Homo sapiens
  chr18:6929366-6930044
  hypo
gggagagccctgtagagtccccgcccagcgtgcccacccagggtttccacccagtgtccccgcccaggtcctcaaccaggtccccgcccagcgtccccgcccagcctcccggggtctacaccaggccacctgcgctcgctggttgacagcacagccccttccggctagcttgacggcctccgcccgatccaccctgcgtgaatacaattatttccctctgccttccactcggagagagcggccaggatgccaactggcttcactggaaacaccccggccccccagccctcctggggcatctctaggtgacaccccacaaggcctgaggcctctacgccttctctcccatccgcagtgaccctgcctcgcacctgccacgtgggtccagccacactgtcccggcagacgctctcaccttagcctcgggctggacttactgcttccaaaagcgctgggcacagccttatatgactgaccccgcccccgagtcccaggccgccccatgcaaccgcccaaccgcccaaccgccactccaaaggtcaccaaccactgctccaggccacgggctgcctctccccacggctctagggcccttcccctccaccgcaggctgaccccgcccacctcaccaacagacacgccaactgcgtctggccccgcccccgccgttctctcttc

SEQ ID NO: 185980 - DNA, 30 bp, Homo sapiens; identical to SEQ ID NO: 54853
  chr18:6950931-6950961
  hypo

SEQ ID NO: 185981 - DNA, 70 bp, Homo sapiens; identical to SEQ ID NO: 31189
  chr18:6953008-6953078
  hypo

SEQ ID NO: 185982 - DNA, 30 bp, Homo sapiens; identical to SEQ ID NO: 54854
  chr18:7037492-7037522
  hypo

SEQ ID NO: 185983 - DNA, 30 bp, Homo sapiens
  chr18:7049130-7049160
  hypo
gagatctgcattgagcgttctaatgcgttg

SEQ ID NO: 185984 - DNA, 322 bp, Homo sapiens; identical to SEQ ID NO: 129705
  chr18:7116449-7116771
  hypo

SEQ ID NO: 185985 - DNA, 56 bp, Homo sapiens; identical to SEQ ID NO: 54856
  chr18:7116826-7116882
  hypo

SEQ ID NO: 185986 - DNA, 475 bp, Homo sapiens; identical to SEQ ID NO: 129709
  chr18:7117615-7118090
  hypo

SEQ ID NO: 185987 - DNA, 44 bp, Homo sapiens; identical to SEQ ID NO: 129710
  chr18:7118131-7118175
  hypo

SEQ ID NO: 185988 - DNA, 30 bp, Homo sapiens; identical to SEQ ID NO: 54860
  chr18:7127507-7127537
  hypo

SEQ ID NO: 185989 - DNA, 30 bp, Homo sapiens
  chr18:7173246-7173276
  hypo
ggctccagaattgagcgttgtgattttgca

SEQ ID NO: 185990 - DNA, 30 bp, Homo sapiens
  chr18:7175098-7175128
  hypo
cctccatgtggcccacgccaggattaggga

SEQ ID NO: 185991 - DNA, 30 bp, Homo sapiens; identical to SEQ ID NO: 54861
  chr18:7204771-7204801
  hypo

SEQ ID NO: 185992 - DNA, 22 bp, Homo sapiens
  chr18:7351428-7351450
  hypo
gtcttttttttttttttgagac

SEQ ID NO: 185993 - DNA, 81 bp, Homo sapiens; identical to SEQ ID NO: 31191
  chr18:7351749-7351830
  hypo

SEQ ID NO: 185994 - DNA, 30 bp, Homo sapiens
  chr18:7417850-7417880
  hypo
ggctaagctcctcctcgtgtcactttatct

SEQ ID NO: 185995 - DNA, 30 bp, Homo sapiens; identical to SEQ ID NO: 54862
  chr18:7419870-7419900
  hypo

SEQ ID NO: 185996 - DNA, 24 bp, Homo sapiens
  chr18:7426983-7427007
  hypo
tgggcaagtggtaagtagaagcga

SEQ ID NO: 185997 - DNA, 24 bp, Homo sapiens
  chr18:7427306-7427330
  hypo
accggaaatgagctatgattttaa

SEQ ID NO: 185998 - DNA, 30 bp, Homo sapiens; identical to SEQ ID NO: 54863
  chr18:7542474-7542504
  hypo

SEQ ID NO: 185999 - DNA, 212 bp, Homo sapiens; identical to SEQ ID NO: 54864
  chr18:7566543-7566755
  hypo

SEQ ID NO: 186000 - DNA, 1937 bp, Homo sapiens; identical to SEQ ID NO: 54865
  chr18:7566780-7568717
  hypo

SEQ ID NO: 186001 - DNA, 30 bp, Homo sapiens; identical to SEQ ID NO: 54867
  chr18:7605703-7605733
  hypo

SEQ ID NO: 186002 - DNA, 30 bp, Homo sapiens; identical to SEQ ID NO: 54868
  chr18:7647070-7647100
  hypo

SEQ ID NO: 186003 - DNA, 30 bp, Homo sapiens; identical to SEQ ID NO: 54869
  chr18:7789601-7789631
  hypo

SEQ ID NO: 186004 - DNA, 30 bp, Homo sapiens; identical to SEQ ID NO: 54870
  chr18:7926629-7926659
  hypo

SEQ ID NO: 186005 - DNA, 30 bp, Homo sapiens; identical to SEQ ID NO: 54871
  chr18:8003570-8003600
  hypo

SEQ ID NO: 186006 - DNA, 51 bp, Homo sapiens; identical to SEQ ID NO: 54872
  chr18:8016760-8016811
  hypo

SEQ ID NO: 186007 - DNA, 30 bp, Homo sapiens; identical to SEQ ID NO: 54873
  chr18:8129093-8129123
  hypo

SEQ ID NO: 186008 - DNA, 30 bp, Homo sapiens; identical to SEQ ID NO: 54874
  chr18:8249539-8249569
  hypo

SEQ ID NO: 186009 - DNA, 410 bp, Homo sapiens
  chr18:8348209-8348619
  hypo
acacagacttgctgccgattcattaaggcagagctggggacctgcttccccccattttgccctgaagcgctctgcattaggcggccctaattgctggtgttggagccgccaggagacctttcctgtcgcagcacctggtgcagaagacatagatgctgcacttccctccagcggggtccccggtacatctgacaggacctgtcattatctaagacttccttgtcaccaccatgcctccccttttagcccacgtgttctgggaagagacccttgtcagttttcctggcacctgccaccggctgcacacctggcattgaaatggcgctggaacgtgttgtgattattttccctctttaatgaacccacctgagggacatttagtttcttaatccagtcgcctgtttcccagg

SEQ ID NO: 186010 - DNA, 200 bp, Homo sapiens; identical to SEQ ID NO: 129726
  chr18:8367258-8367458
  hypo

SEQ ID NO: 186011 - DNA, 81 bp, Homo sapiens; identical to SEQ ID NO: 129727
  chr18:8367503-8367584
  hypo

SEQ ID NO: 186012 - DNA, 30 bp, Homo sapiens; identical to SEQ ID NO: 54876
  chr18:8379043-8379073
  hypo

SEQ ID NO: 186013 - DNA, 30 bp, Homo sapiens; identical to SEQ ID NO: 54877
  chr18:8383007-8383037
  hypo

SEQ ID NO: 186014 - DNA, 34 bp, Homo sapiens; identical to SEQ ID NO: 94472
  chr18:8400563-8400597
  hypo

SEQ ID NO: 186015 - DNA, 30 bp, Homo sapiens; identical to SEQ ID NO: 54878
  chr18:8470342-8470372
  hypo

SEQ ID NO: 186016 - DNA, 246 bp, Homo sapiens; identical to SEQ ID NO: 94474
  chr18:8612036-8612282
  hypo

SEQ ID NO: 186017 - DNA, 52 bp, Homo sapiens; identical to SEQ ID NO: 31196
  chr18:8612503-8612555
  hypo

SEQ ID NO: 186018 - DNA, 30 bp, Homo sapiens; identical to SEQ ID NO: 94476
  chr18:8616576-8616606
  hypo

SEQ ID NO: 186019 - DNA, 525 bp, Homo sapiens
  chr18:8625459-8625984
  hypo
tgggcatactccttccggctgtactgctgattccacgggatgtgagcccccactaatgcctactagaaatgaatccaggcccctttctcaaatcacaattggaatgagagactcaaccagctgtgttataactgcactcagcactaagagctttctgttagctattaacctgttaacagcccgcaggtgctagcgacctgtctgtggaagaagggataagatctggtctggtggtctggcggtggcttaaaagtagccccattgaggtgctctgagaatgccgttttgttttgaatgctacagctgcggtgtactcagcttactaactcctcttggcaggtcaccctcagctctgattgtttgtccaccatgtgtgtgtttgctttcatctgcgttaattgctgcttcatctgtggcatcatcggtcacctaatgcttgaatgttagtgccatgtcttcattcttcatccgtgtccctgtctgggccgcagctgcagccaagccgcagtgcctgccttctggagg

SEQ ID NO: 186020 - DNA, 30 bp, Homo sapiens; identical to SEQ ID NO: 94478
  chr18:8658999-8659029
  hypo

SEQ ID NO: 186021 - DNA, 805 bp, Homo sapiens
  chr18:8659284-8660089
  hypo
agaggcagcgccccgcgcagaacgcccgtgcctgggaagaggcctgcactccagcagacttccatgttcgctggaagcctcccttcctgactgtgaattgggacaatgcgcagacttccatgttcgttggaagcctcccttcctgactgtgaattgggacgatgcgcgggattttctgaaacctcagttcctccgtctgtaagatgagattgtggggaggagggcggacctgtaagtgcccagccacgagggctgagagattcgaactcctttgctgccgcgaagaagggcctgttccccggaggccaggtgggctccaggccaagctcgcagaggggccaggtgtgctctggcggtgagagggccgcgcgtcccggcacacaccccgcccatttcagcaccctctccaccctcctcagatgaccagagaaatccaagcaggcccttggctttcaagattcagcttcagccatgcataagtccttcactgaagtggcagaggaaggacgagcggctttgttggattggggctggagccccgtgcccggctgtgggtgctcgtgggagagcctcgcccggccctgcgcttcccgagagttcgccgggagcacaagccctggagagcccatgggcagagctcaccagccccacctcacagagagggaaactccgaagtggccgtggatttgcccagggtcacccagtgacagacagctcagactcctttcccagctccggccaccgaagcttgcaggcgcgtccgttccagctcagataagcacctccgccacgctttcctcacgcc

SEQ ID NO: 186022 - DNA, 101 bp, Homo sapiens; identical to SEQ ID NO: 31199
  chr18:8662985-8663086
  hypo

SEQ ID NO: 186023 - DNA, 30 bp, Homo sapiens
  chr18:8685469-8685499
  hypo
actcctcacagcgaacgtgcccgagcaagt

SEQ ID NO: 186024 - DNA, 20 bp, Homo sapiens
  chr18:8699668-8699688
  hypo
taggacgacccttctctggg

SEQ ID NO: 186025 - DNA, 218 bp, Homo sapiens
  chr18:8708638-8708856
  hypo
cttctgagttgttttcgtagctcaaaatgttccttgtggtgagcttttctaggggccctctgttttcttttcaggtgagagggccgtcatgcccgtctctccactagcctgtgtacgaatggtcacataaatcccactgccagtgtttcagttgtggggactgttcagttgccatttactgtggagaaggtgtcacttgcatccgtttactctgcctg

SEQ ID NO: 186026 - DNA, 57 bp, Homo sapiens
  chr18:8711910-8711967
  hypo
agactgtgttttgctcgagtgctcggagacagtcagacaagccggagtgctcgttgt

SEQ ID NO: 186027 - DNA, 30 bp, Homo sapiens
  chr18:8724468-8724498
  hypo
gtcccccacctcagacgagtatttgagagc

SEQ ID NO: 186028 - DNA, 184 bp, Homo sapiens; identical to SEQ ID NO: 94482
  chr18:8732472-8732656
  hypo

SEQ ID NO: 186029 - DNA, 146 bp, Homo sapiens; identical to SEQ ID NO: 94483
  chr18:8733059-8733205
  hypo

SEQ ID NO: 186030 - DNA, 66 bp, Homo sapiens
  chr18:8733741-8733807
  hypo
gcactgaggaggctacaggagcgtcctcgcaggtgggagtgggccggccagctggctgggtcagtg

SEQ ID NO: 186031 - DNA, 44 bp, Homo sapiens; identical to SEQ ID NO: 11630
  chr18:8748271-8748315
  hypo

SEQ ID NO: 186032 - DNA, 30 bp, Homo sapiens
  chr18:8751876-8751906
  hypo
cttagctcagggcagcggtgacgcggaaaa

SEQ ID NO: 186033 - DNA, 197 bp, Homo sapiens
  chr18:8778933-8779130
  hypo
gctgctccttgggcgcgtgtcagaaaccctggtacctgggatgcgttgagccgcccacccagccggtgggattattgaggaaggagtttctgttcagcagaatggtggaatggagcgccctgggaactgcaggcccgcaaccaaaacccaaaggaagctggcgccccggcgcaaggtaggcacgtgggcagtcaccc

SEQ ID NO: 186034 - DNA, 216 bp, Homo sapiens; identical to SEQ ID NO: 94485
  chr18:8783991-8784207
  hypo

SEQ ID NO: 186035 - DNA, 63 bp, Homo sapiens; identical to SEQ ID NO: 94486
  chr18:8787324-8787387
  hypo

SEQ ID NO: 186036 - DNA, 125 bp, Homo sapiens; identical to SEQ ID NO: 94487
  chr18:8794466-8794591
  hypo

SEQ ID NO: 186037 - DNA, 30 bp, Homo sapiens
  chr18:8799715-8799745
  hypo
aaaacgtgtttcccacgcattcacgcagat

SEQ ID NO: 186038 - DNA, 744 bp, Homo sapiens
  chr18:8799965-8800709
  hypo
tgtgtgatagaagcacgtggcggggtggggtccagacactcagacccaggtctgccaagtgggccagtgttcacagtagtgagtaaggagctcactaacgcatgcacaaccctctgtctgtccaaggacggaagatggacgagctctactgtaacgacagctggttctctgggagggaacattcccggttagaggatttgcctctctgtgactggcatgagtattagccaggcagctgggatgcaagagccagggtacgtgtctcacagagctgcacagagccgggccgttcccgaaacgccgagcacctcgcaaggcgattagtagcatgggaaacctagccaagccgttttcccaaggacaagttctcagtcacagtattcctcaggccttggtctttgctttgtgacatatggaacgttctcacaattgaactcaagtagatggcaacatttatcacgtccacagaggtttaaaaaaaactgcatataccgatcaaccttgggatggctcataacaaatcatcaggttggcaaacatttggctccgcagacattccctgtttccctgtcttcagccacgtgagctcgcagtcatgacctgggcgctttagagccacagtgaatgctttcagtttccccagccatcctgaagagcagaggctgcgcacacgcaagagggaatcttacagttttccttgagctccaagactcacgccactgcgttaagcatttgaggccagca

SEQ ID NO: 186039 - DNA, 155 bp, Homo sapiens; identical to SEQ ID NO: 94489
  chr18:8814258-8814413
  hypo

SEQ ID NO: 186040 - DNA, 150 bp, Homo sapiens; identical to SEQ ID NO: 94490
  chr18:8823064-8823214
  hypo

SEQ ID NO: 186041 - DNA, 90 bp, Homo sapiens
  chr18:8826026-8826116
  hypo
gaagggggagagggcacgccagtgaagcaggacttatctgctccccctggctacacgctcactgagaacgtggcccggatcctcaacaag

SEQ ID NO: 186042 - DNA, 30 bp, Homo sapiens
  chr18:8827049-8827079
  hypo
gacgtgtctgtccagcgagtgattccaact

SEQ ID NO: 186043 - DNA, 178 bp, Homo sapiens; identical to SEQ ID NO: 31205
  chr18:8829962-8830140
  hypo

SEQ ID NO: 186044 - DNA, 141 bp, Homo sapiens; identical to SEQ ID NO: 94493
  chr18:8856546-8856687
  hypo

SEQ ID NO: 186045 - DNA, 30 bp, Homo sapiens; identical to SEQ ID NO: 94494
  chr18:8934446-8934476
  hypo

SEQ ID NO: 186046 - DNA, 189 bp, Homo sapiens
  chr18:8937277-8937466
  hypo
gcatgccacgtgactcgggccacatagccacattcctctcaaggctcagaagaatctaaagttccaacagctctaagtttgaatcatttcatttcacaaagggcaaggacttcagagagtaagacgggggaaggaggatacagtgttctcctggagagaggtgcggtctgcaggcgcagcctgggagca

SEQ ID NO: 186047 - DNA, 32 bp, Homo sapiens; identical to SEQ ID NO: 31206
  chr18:9101196-9101228
  hypo

SEQ ID NO: 186048 - DNA, 32 bp, Homo sapiens
  chr18:9101467-9101499
  hypo
tacaggcgtgagccacgcgcccggccaggtgt

SEQ ID NO: 186049 - DNA, 142 bp, Homo sapiens; identical to SEQ ID NO: 94496
  chr18:9196881-9197023
  hypo

SEQ ID NO: 186050 - DNA, 21 bp, Homo sapiens
  chr18:9284914-9284935
  hypo
ataggccaggccaggcgcagt

SEQ ID NO: 186051 - DNA, 94 bp, Homo sapiens
  chr18:9285996-9286090
  hypo
ttgtttcatttctcttcggtacataccatggagtacaaacactaggtcatagagtaggtgcatgtttcactttattagaaactgacagttatcg

SEQ ID NO: 186052 - DNA, 157 bp, Homo sapiens
  chr18:9288472-9288629
  hypo
aaggagccacgcgtgcgtaactgcagcctgctcaagtctggctgcacgccacacagaggccaaacatgagaacccacatgtgatgaaaggagggcaaacttttttttttttttgtgggggcggggagggggacagagtcttgcccggtcactcaggc

SEQ ID NO: 186053 - DNA, 159 bp, Homo sapiens
  chr18:9333468-9333627
  hypo
aaggtgccccgcggacggtctggtctagcgggctctaacttaatcaccctggaatcttctttaaaaagcaaattccggccgggcactatggttcacacctgtcatcccaacgatttaggagaccgcggtgggaggatcgcttgagccccgaaatttgaa

SEQ ID NO: 186054 - DNA, 34 bp, Homo sapiens; identical to SEQ ID NO: 94500
  chr18:9364506-9364540
  hypo

SEQ ID NO: 186055 - DNA, 389 bp, Homo sapiens; identical to SEQ ID NO: 94501
  chr18:9417388-9417777
  hypo

SEQ ID NO: 186056 - DNA, 225 bp, Homo sapiens; identical to SEQ ID NO: 94502
  chr18:9428290-9428515
  hypo

SEQ ID NO: 186057 - DNA, 30 bp, Homo sapiens
  chr18:9429160-9429190
  hypo
gaatggtgtttgaggcgatgaactacgtgc

SEQ ID NO: 186058 - DNA, 492 bp, Homo sapiens
  chr18:9478437-9478929
  hypo
caggaggcttcacagcgaacaccacatgcctcgcgcccaaaaggacagcagaccgcgcttcagaacggaaccgccttctccatgtaaacttttgacgtaaactgtgtgcttcagggtggcctcttcttctccgagatcctctcctgcgtcccgagtttgggaatggcccggccgtgctcaggcccaggcggtggaggcctcggtgtagtagtgccgtgcttgtcgacgttcccaggagtccgggttcagaagccccctctccggtggattggcagcttcgcggtagctgggctagtcttcctctggaaactcagtaaaaagagtcggcgctgtccgcctgagcgcgggtttcctaccgagctagaggccagcctgcctcaggcgcagaagggtttgccgccggccttggtcagggcgagcagctccctggtggcgcccagagctggggtgtcctggggcgcggcaggcggaaaggcacgcgcgggccagggg

SEQ ID NO: 186059 - DNA, 30 bp, Homo sapiens
  chr18:9495204-9495234
  hypo
gtcagaagttggaggcgggcagccttgggg

SEQ ID NO: 186060 - DNA, 30 bp, Homo sapiens; identical to SEQ ID NO: 31211
  chr18:9498624-9498654
  hypo

SEQ ID NO: 186061 - DNA, 43 bp, Homo sapiens
  chr18:9514020-9514063
  hypo
gcctgtagtcacagccgcttaggagcctaggagattgaggctg

SEQ ID NO: 186062 - DNA, 102 bp, Homo sapiens
  chr18:9514122-9514224
  hypo
tctcctccgctgacgccccacccaaaaaaaggtagatactggaattttccccttaaggcatcttacttttcttgggtaggtcgtgttcgctatttgggatac

SEQ ID NO: 186063 - DNA, 21 bp, Homo sapiens
  chr18:9535686-9535707
  hypo
aatcaagcaattcatgaggag

SEQ ID NO: 186064 - DNA, 22 bp, Homo sapiens
  chr18:9535902-9535924
  hypo
cccagcagggataggaaggaga

SEQ ID NO: 186065 - DNA, 78 bp, Homo sapiens; identical to SEQ ID NO: 31213
  chr18:9535962-9536040
  hypo

SEQ ID NO: 186066 - DNA, 30 bp, Homo sapiens; identical to SEQ ID NO: 31214
  chr18:9536977-9537007
  hypo

SEQ ID NO: 186067 - DNA, 252 bp, Homo sapiens
  chr18:9539460-9539712
  hypo
ctacaggacatgatccgtgacttagtcatcatgttattaacattaaactttatagtgcagagatgagtcggggaagaaagaacgtagcattctttaagatgcaggtttcatttctcagcctcaaggctcagctacagaataagctgtggcccgactgcctgcctaccattttacagacgggagactgaggctcagagcagtgacatggcctgcatgggtcactattgcccccactgtcgcgcacatccctga

SEQ ID NO: 186068 - DNA, 300 bp, Homo sapiens
  chr18:9547706-9548006
  hypo
atcccaggtcacatgcgtggcgaatgcccactgaacctcggctctcatggaagcaggaaagacaccgagattcaagccttctagtaggttgaggacgctgtgctcatggcatcttcggagattttggtactggcagggtggatgcttgcaaaatacttgacatcgctgtcacggtccatctgaagagccatgatggtctgctccacagcctcctggtggcagctggcagaggccaagaaatagtctggaaatgacatgtgcataggacagatgaaaccagtccaacggaacacttcagag

SEQ ID NO: 186069 - DNA, 224 bp, Homo sapiens; identical to SEQ ID NO: 94512
  chr18:9569202-9569426
  hypo

SEQ ID NO: 186070 - DNA, 204 bp, Homo sapiens; identical to SEQ ID NO: 94513
  chr18:9615429-9615633
  hypo

SEQ ID NO: 186071 - DNA, 30 bp, Homo sapiens
  chr18:9658752-9658782
  hypo
ttggtcatccatgaacgagcttttccccac

SEQ ID NO: 186072 - DNA, 31 bp, Homo sapiens; identical to SEQ ID NO: 94514
  chr18:9659944-9659975
  hypo

SEQ ID NO: 186073 - DNA, 160 bp, Homo sapiens
  chr18:9688381-9688541
  hypo
aaagcagctttcatgcgcatgcgccatcgctcatgcgggatgtgggtgtggtcatcacagaccttcccacctctatgaaatggggaaatggaagcgacactgagctctcctggattgacttggatatatcaattctttctctcctcggtgtgcactcttt

SEQ ID NO: 186074 - DNA, 650 bp, Homo sapiens; identical to SEQ ID NO: 129744
  chr18:9707861-9708511
  hypo

SEQ ID NO: 186075 - DNA, 826 bp, Homo sapiens; identical to SEQ ID NO: 129745
  chr18:9708783-9709609
  hypo

SEQ ID NO: 186076 - DNA, 30 bp, Homo sapiens; identical to SEQ ID NO: 94518
  chr18:9720231-9720261
  hypo

SEQ ID NO: 186077 - DNA, 30 bp, Homo sapiens
  chr18:9738028-9738058
  hypo
cctttaatgggtgagcgtggatgcagcagc

SEQ ID NO: 186078 - DNA, 80 bp, Homo sapiens; identical to SEQ ID NO: 94519
  chr18:9758084-9758164
  hypo

SEQ ID NO: 186079 - DNA, 19 bp, Homo sapiens
  chr18:9791400-9791419
  hypo
ttttttttttttgagacgg

SEQ ID NO: 186080 - DNA, 248 bp, Homo sapiens; identical to SEQ ID NO: 94521
  chr18:9797314-9797562
  hypo

SEQ ID NO: 186081 - DNA, 30 bp, Homo sapiens; identical to SEQ ID NO: 31220
  chr18:9800134-9800164
  hypo

SEQ ID NO: 186082 - DNA, 154 bp, Homo sapiens; identical to SEQ ID NO: 94523
  chr18:9800801-9800955
  hypo

SEQ ID NO: 186083 - DNA, 31 bp, Homo sapiens; identical to SEQ ID NO: 94524
  chr18:9805773-9805804
  hypo

SEQ ID NO: 186084 - DNA, 30 bp, Homo sapiens
  chr18:9809046-9809076
  hypo
gtgtgtgcgcgcgcacgcgtgggtgtgcga

SEQ ID NO: 186085 - DNA, 129 bp, Homo sapiens; identical to SEQ ID NO: 94525
  chr18:9833345-9833474
  hypo

SEQ ID NO: 186086 - DNA, 208 bp, Homo sapiens
  chr18:9835950-9836158
  hypo
cctgctgtgagaacgcgtcagagcacacacagccctgcagccctcctctgcttgattttgatgagatgttgtgaatgatttcccttgcttttggctgcaataccttaaacatgtgggatggttttgacagaaaataattccaccacacagttaacagccgtctcccgctcaccgctgctgtgctgctcgtggccggcttaattggtct

SEQ ID NO: 186087 - DNA, 270 bp, Homo sapiens
  chr18:9838067-9838337
  hypo
cacttatggtgtgcccggcattattctgagcactttataatatcaacctccttttcccttacgtaaacactgaacattgctgtaaaatgtccacccagcctggtggaatgcatggacgacatagacctgagggaggtgagcactgaagggtatttactggtggagacgatcgctttctttctgtgagcagtgcacttgggctgcctgcctgtatttaccctctcatgtgaggtgctcatctgggccacctgggaacgactctgagccaaa

SEQ ID NO: 186088 - DNA, 16 bp, Homo sapiens
  chr18:9874718-9874734
  hypo
gcgaaactccatctca

SEQ ID NO: 186089 - DNA, 30 bp, Homo sapiens; identical to SEQ ID NO: 94528
  chr18:9875829-9875859
  hypo

SEQ ID NO: 186090 - DNA, 90 bp, Homo sapiens; identical to SEQ ID NO: 94529
  chr18:9883099-9883189
  hypo

SEQ ID NO: 186091 - DNA, 216 bp, Homo sapiens; identical to SEQ ID NO: 94530
  chr18:9887793-9888009
  hypo

SEQ ID NO: 186092 - DNA, 254 bp, Homo sapiens
  chr18:9912766-9913020
  hypo
accctaatacctggatcgcacatgaaaacttggatttggtgcctacttctagactgctgtttcgtctcgtttattttctagacaaactgtgctgctccatggcagtagcatcaatatgtcttttgtttcgtggcgctacctagggatttaaattcaaaccgtatcacaaaatacaataaaggtttatttacagcacattggtttcatttgacgttcctgtaccggactaccctggcaatcggctaaagttttgt

SEQ ID NO: 186093 - DNA, 139 bp, Homo sapiens; identical to SEQ ID NO: 94532
  chr18:9917586-9917725
  hypo

SEQ ID NO: 186094 - DNA, 30 bp, Homo sapiens
  chr18:9954344-9954374
  hypo
tttaatgatctcttacggttagaaaacaca

SEQ ID NO: 186095 - DNA, 137 bp, Homo sapiens
  chr18:9962326-9962463
  hypo
ttttgaaaaacacagatgagaagcacttggagaaattcactgtccaaacttaacggtcttggacaagtctgggcccttcatcataccatgctgcctttagggaaaaaagggggtgggaatgacggtgaaattgatct

SEQ ID NO: 186096 - DNA, 30 bp, Homo sapiens; identical to SEQ ID NO: 94533
  chr18:9969878-9969908
  hypo

SEQ ID NO: 186097 - DNA, 30 bp, Homo sapiens; identical to SEQ ID NO: 94534
  chr18:9970486-9970516
  hypo

SEQ ID NO: 186098 - DNA, 30 bp, Homo sapiens
  chr18:10026778-10026808
  hypo
ggctaaaactgcagccgctttgttaattct

SEQ ID NO: 186099 - DNA, 286 bp, Homo sapiens
  chr18:10031147-10031433
  hypo
tggccagaacgctgccggcgcagaacccaaatcagatagtcgagtgcatgcctgggcccttacaaacgattaagaccaaatcaaggccaaagaaaatgaataacagatgtctgggagatgctgaggccttaaaagtgtttatcacgtctgactttgagaaaatattggctgggatcagataagaggcaactcccggggccagcggtgccttgtcctaaggtgcccgctgagctcaggaggtgcgggctgcagggccccaagcaggcgcaggcgtcctccagccccg

SEQ ID NO: 186100 - DNA, 84 bp, Homo sapiens
  chr18:10047641-10047725
  hypo
agcagtaagcccagccgtcggcatgcagagctgttcccatctgtaccaacgaagcccaaagcttccgaacgtattccatatcca

SEQ ID NO: 186101 - DNA, 104 bp, Homo sapiens; identical to SEQ ID NO: 94535
  chr18:10069171-10069275
  hypo

SEQ ID NO: 186102 - DNA, 31 bp, Homo sapiens; identical to SEQ ID NO: 31221
  chr18:10078821-10078852
  hypo

SEQ ID NO: 186103 - DNA, 250 bp, Homo sapiens
  chr18:10150711-10150961
  hypo
tcattcacgtggaagcgtgttctgtgtgctgcatccatgtggaagcctgttctgtgtgtgctgcatccacgtggaagcatgttctgtgtgtgctgcatccacgtggaagcgtgttctctgtgtgctgcatccacgtggaagcatgttctgcgtgtgctgcatccatgtggaagcgtgttctgtgtgctgcatccatgtggaagcatgttctgtgtgtgctgcatccacgtggaagcgtgttctctgtgtg

SEQ ID NO: 186104 - DNA, 485 bp, Homo sapiens
  chr18:10165790-10166275
  hypo
tcgagattgtctccacggacggccgggggattcctgtccctcacagaggccttttttcttctctgaatcggtgtctctaagggccgggtttctgtgcactgggtggtacctgccagatgagtttaattctgccccgcacataccggcgaggacccatcccgctcaagctctctgctggggacttcaggcccaaggtgaatgcgcgcagggcctgtggcaggggatgagggctagtgcaggccgaggggagcagctacagaggtagggtttccatacccagagacgggcatggacactagaaagggaggatcccctagctgggagggaagccaggacagtgaagacgtagtgggtctaacggggggtaccgcatgagccgaggtgcagaggctggacccagcggggacgccgaggggactgctcctgcagcctggggaaaagaagggggcgtcagaaggtctccgagccagcggggatcgtgttca

SEQ ID NO: 186105 - DNA, 47 bp, Homo sapiens
  chr18:10166508-10166555
  hypo
gggaatggagtttggcgtgcaagcatggagtccgcaggcccgtgctc

SEQ ID NO: 186106 - DNA, 27 bp, Homo sapiens
  chr18:10267732-10267759
  hypo
ctttcacaatttaaacgatgtagtgga

SEQ ID NO: 186107 - DNA, 30 bp, Homo sapiens
  chr18:10268321-10268351
  hypo
gtctgctcctcggtccgtttggaggtgggc

SEQ ID NO: 186108 - DNA, 30 bp, Homo sapiens
  chr18:10280902-10280932
  hypo
gtgagccaccgcgcccggccatcagataca

SEQ ID NO: 186109 - DNA, 30 bp, Homo sapiens
  chr18:10299160-10299190
  hypo
atacatacatatacacgcatatgcaagtat

SEQ ID NO: 186110 - DNA, 30 bp, Homo sapiens
  chr18:10320489-10320519
  hypo
cagtgtaagcgtccacgacgatgctgagag

SEQ ID NO: 186111 - DNA, 24 bp, Homo sapiens
  chr18:10333813-10333837
  hypo
gagagttgggcgcagcggctcacg

SEQ ID NO: 186112 - DNA, 99 bp, Homo sapiens; identical to SEQ ID NO: 94537
  chr18:10336857-10336956
  hypo

SEQ ID NO: 186113 - DNA, 30 bp, Homo sapiens
  chr18:10374624-10374654
  hypo
gaaatcagatgaccacggaatgccataggt

SEQ ID NO: 186114 - DNA, 279 bp, Homo sapiens; identical to SEQ ID NO: 94538
  chr18:10414333-10414612
  hypo

SEQ ID NO: 186115 - DNA, 147 bp, Homo sapiens
  chr18:10460166-10460313
  hypo
tcggcaggtgaaaaaccgtggaatatattcatctagataattcagattgttaaaactttgttgaggacgggcacggtggctcacgcctgtaatcccaggccaagggcctcctttgggaggccaaggcgggcagatcacctgcggtca

SEQ ID NO: 186116 - DNA, 497 bp, Homo sapiens
  chr18:10474224-10474721
  hypo
catctttcaaatgatctcaggtaacgggaggaaggtgtgaatgtcatgaattaaaacggcccacagataatccagaaacctggggttagccaggagcatccccgcaacccgccgttccctcggggcctttgtgaaggtctgctgaataggaaaagcctgcccactttctagcagagacaccaaagagcctcaaaacaccaaaaagcacggggagccttgagtgcgaggtctgagtgaggaggcaggtgcggctggggaacttgctgggcgggcgtgggccgggctgtgggctccgaacccgaccttggactagtcctttgcacccactcaggttctggttccttttcctcaccttcatgcgcctgcacgggctctgatctcttctgctctttttagtactgggggaaaaattaaccatcatcacgtttattttcttacctgcctctctaccccgttgcactcctgggtgtggctccgcagatggagtctgaaagccc

SEQ ID NO: 186117 - DNA, 266 bp, Homo sapiens
  chr18:10485482-10485748
  hypo
tgtcggatcatctatcggtcagacgagcaccaccctcccatcctgcccccaaaggcagacctgaccatcggcctgcacggggagtgggtgagccagcgctgtgaggtgcgccccgaagtcctcttcctcacccgccacttcatcttccatgacaacaacaacacctgggagggccactactaccactactcagacccggtgtgcaagcaccccaccttctccatctacgcccggggccgctacagccgcggcgtcctctcgtccag

SEQ ID NO: 186118 - DNA, 30 bp, Homo sapiens
  chr18:10527703-10527733
  hypo
gtagtatgtattatacgcgggcctgaaaat

SEQ ID NO: 186119 - DNA, 65 bp, Homo sapiens
  chr18:10538266-10538331
  hypo
tttggaagtgaagagcggggagaagcgccaggaggtgcatgctcatgtggcgggacagtgctgcc

SEQ ID NO: 186120 - DNA, 33 bp, Homo sapiens; identical to SEQ ID NO: 94542
  chr18:10578688-10578721
  hypo

SEQ ID NO: 186121 - DNA, 377 bp, Homo sapiens; identical to SEQ ID NO: 31224
  chr18:10589090-10589467
  hypo

SEQ ID NO: 186122 - DNA, 31 bp, Homo sapiens; identical to SEQ ID NO: 94544
  chr18:10696517-10696548
  hypo

SEQ ID NO: 186123 - DNA, 30 bp, Homo sapiens
  chr18:10697017-10697047
  hypo
gtttgaatgtgcaacgcccctgctcctcct

SEQ ID NO: 186124 - DNA, 30 bp, Homo sapiens; identical to SEQ ID NO: 31225
  chr18:10705420-10705450
  hypo

SEQ ID NO: 186125 - DNA, 527 bp, Homo sapiens
  chr18:10725370-10725897
  hypo
atggtggagaacagccggcccacattggcggtcaacctgaccagagcccgccagtactggttggagggcatgctgtggcatgaaataggtcagggtgtgggtatccgggtggatgggtaggcatgaaaggggcctgggagctgggagtcgtgggaaggaggggccccactaactcccccttttgtttctcccctgtccctcctgaggtcggggctttcccttcctgagcagccgcctccgccctctggctcacagaggtaggccagaacatgcctgcccacgctctgggctcgccttcatctcttggtcctttcgggtatatttttctctctccacttcctctccgacttctctccacagtggcggcagggctggtgaggccctgacaggccagagggagaacgctcagggtcccaccaggccaaccaccacgcgggccctccagggtggatggaaggccagatcctgggaatggacttggcttgaggacacacggcgcctggtttaggaggcgactggccaggctg

SEQ ID NO: 186126 - DNA, 30 bp, Homo sapiens
  chr18:10853082-10853112
  hypo
ccttgtaggagcattcggtgagggaagagc

SEQ ID NO: 186127 - DNA, 30 bp, Homo sapiens
  chr18:10871068-10871098
  hypo
agagtgtctgcccaccgggactgcacgagg

SEQ ID NO: 186128 - DNA, 82 bp, Homo sapiens
  chr18:11024137-11024219
  hypo
ggcgccaaggccgcagaggcaccgaaagcgagcgagggtgcacactgtcacctctcactacgatagtgcaaagtactgtttg

SEQ ID NO: 186129 - DNA, 39 bp, Homo sapiens; identical to SEQ ID NO: 94547
  chr18:11116412-11116451
  hypo

SEQ ID NO: 186130 - DNA, 30 bp, Homo sapiens
  chr18:11244979-11245009
  hypo
tgggtcctcacggggcggaaaggcaaaagg

SEQ ID NO: 186131 - DNA, 30 bp, Homo sapiens
  chr18:11386829-11386859
  hypo
cgaggagagcggcctcgggagaaaccaaac

SEQ ID NO: 186132 - DNA, 272 bp, Homo sapiens
  chr18:11533022-11533294
  hypo
cagtgggatactgcttaggggcgctgtcaggggccacactgcccgcggtggggtgcaggttgggtgcactaactggggcgtcattccccacggttagggaaaggttggggttgctatccgctatccggggctgctccccatcgtggggagcggattgggggccttaaggatccgtggctgcactattcactgtggggagcaggctgtagcgctctctgagacgtcactgctggggtgtcactgccttcagcggggggctggttaggagtcct

SEQ ID NO: 186133 - DNA, 30 bp, Homo sapiens
  chr18:11533620-11533650
  hypo
cgggaatcctgggtacggcagggcccccac

SEQ ID NO: 186134 - DNA, 41 bp, Homo sapiens
  chr18:11534214-11534255
  hypo
tacagcgcccaggagcggtaggagggcggcgagctgcggcc

SEQ ID NO: 186135 - DNA, 89 bp, Homo sapiens
  chr18:11571295-11571384
  hypo
gagtccctgatgagacggacagcgggtggcactgggaaccttaggatgcgctaaaatacggagcttcttgaaatcgaggcatttaacag

SEQ ID NO: 186136 - DNA, 46 bp, Homo sapiens; identical to SEQ ID NO: 94548
  chr18:11589693-11589739
  hypo

SEQ ID NO: 186137 - DNA, 390 bp, Homo sapiens
  chr18:11821761-11822151
  hypo
ctgcaggagggagccgggaggtccttgagcaggggccccagtaaatgcttcagagctagaatgtcctccctttccagctcaccaagggctgaagcacaagggcctcccgcctccctgcagcgcacatccgccctctggcgaggccaggccggcatccagtgtggcccggtggccagaacgcgcccaggccatggccgccgctccgtaggcctccgtttcacgggtgctaagtaagtcgaaaagcaagggcatctgataggagcctcagtttctcctccgcctgccaggaggtcttgtgcgtgcagagcggcggatgcgtgtggcaccgcaggcgcggggcgagggcggctccggagaggcccaggggcttagcgcgcctggctttccaca

SEQ ID NO: 186138 - DNA, 167 bp, Homo sapiens
  chr18:11877622-11877789
  hypo
aagggcgatgttcccggtagtactccaagtgcacttaacacgtgtggacaagatcttagtccaggtagcagtagggctgatcctcggctgtggggcctttccacggggaccggcactccagcctggcctttcaccacccttttcccggcacacccctgtgggatgac

SEQ ID NO: 186139 - DNA, 176 bp, Homo sapiens; identical to SEQ ID NO: 94551
  chr18:11881074-11881250
  hypo

SEQ ID NO: 186140 - DNA, 30 bp, Homo sapiens
  chr18:11884441-11884471
  hypo
cttcatcttgtcttacgctttccgagcaag

SEQ ID NO: 186141 - DNA, 30 bp, Homo sapiens; identical to SEQ ID NO: 31227
  chr18:11905551-11905581
  hypo

SEQ ID NO: 186142 - DNA, 37 bp, Homo sapiens
  chr18:11929333-11929370
  hypo
agtagtgaaagttctaagacaccggatcatttccaga

SEQ ID NO: 186143 - DNA, 45 bp, Homo sapiens
  chr18:11946059-11946104
  hypo
gtgtgtgtgcacgcgcacgcgtgcgtagcattcagctatcaacca

SEQ ID NO: 186144 - DNA, 17 bp, Homo sapiens
  chr18:11954067-11954084
  hypo
cccggccaacctaggct

SEQ ID NO: 186145 - DNA, 17 bp, Homo sapiens
  chr18:11954551-11954568
  hypo
ggagtctcgctctgtcg

SEQ ID NO: 186146 - DNA, 17 bp, Homo sapiens
  chr18:11954687-11954704
  hypo
agctgcctcagtgtaat

SEQ ID NO: 186147 - DNA, 31 bp, Homo sapiens; identical to SEQ ID NO: 94555
  chr18:11971653-11971684
  hypo

SEQ ID NO: 186148 - DNA, 30 bp, Homo sapiens
  chr18:11978932-11978962
  hypo
gccaccacacctggccgaacagatatttat

SEQ ID NO: 186149 - DNA, 36 bp, Homo sapiens; identical to SEQ ID NO: 31229
  chr18:11979847-11979883
  hypo

SEQ ID NO: 186150 - DNA, 30 bp, Homo sapiens
  chr18:11991296-11991326
  hypo
ggggaaaaatagccacgagactaaaggagg

SEQ ID NO: 186151 - DNA, 221 bp, Homo sapiens; identical to SEQ ID NO: 31230
  chr18:11992148-11992369
  hypo

SEQ ID NO: 186152 - DNA, 195 bp, Homo sapiens; identical to SEQ ID NO: 31231
  chr18:11992750-11992945
  hypo

SEQ ID NO: 186153 - DNA, 30 bp, Homo sapiens; identical to SEQ ID NO: 94559
  chr18:11999295-11999325
  hypo

SEQ ID NO: 186154 - DNA, 46 bp, Homo sapiens; identical to SEQ ID NO: 94560
  chr18:11999659-11999705
  hypo

SEQ ID NO: 186155 - DNA, 65 bp, Homo sapiens
  chr18:12059557-12059622
  hypo
gccccaacccaccccaggctgcgggcagtgcggccctggatagcgcacctacccctttgcctttc

SEQ ID NO: 186156 - DNA, 214 bp, Homo sapiens; identical to SEQ ID NO: 31232
  chr18:12093610-12093824
  hypo

SEQ ID NO: 186157 - DNA, 78 bp, Homo sapiens; identical to SEQ ID NO: 94562
  chr18:12208465-12208543
  hypo

SEQ ID NO: 186158 - DNA, 412 bp, Homo sapiens; identical to SEQ ID NO: 129772
  chr18:12253734-12254146
  hypo

SEQ ID NO: 186159 - DNA, 310 bp, Homo sapiens; identical to SEQ ID NO: 129773
  chr18:12254304-12254614
  hypo

SEQ ID NO: 186160 - DNA, 30 bp, Homo sapiens
  chr18:12273882-12273912
  hypo
cagggacagacgcctcgtggctaattggac

SEQ ID NO: 186161 - DNA, 217 bp, Homo sapiens
  chr18:12277182-12277399
  hypo
ggcacatacatgctccgggtgctggatgacaaggaagagcggccatccctccggtcacaagccaagggcaggttcacgtgtggatagggatgcaggctgtcgccggctcttgagccaaacactgtgtttcgtttggctcaatgacgaatgttgaagatgcttttatgttctgagccacatgcacttggaggccgctggtcacgctgctcaggagtgg

SEQ ID NO: 186162 - DNA, 697 bp, Homo sapiens; identical to SEQ ID NO: 31235
  chr18:12279586-12280283
  hypo

SEQ ID NO: 186163 - DNA, 31 bp, Homo sapiens; identical to SEQ ID NO: 31236
  chr18:12291393-12291424
  hypo

SEQ ID NO: 186164 - DNA, 139 bp, Homo sapiens
  chr18:12291803-12291942
  hypo
aggacagcaacaggacgagacttacacacagcacacagctacccgacagccccatacggttacagttacatcccccaggttcccgtgtggcagagcccaagttaagccacagagctgtgagacgcgctcatcccagcca

SEQ ID NO: 186165 - DNA, 20 bp, Homo sapiens
  chr18:12292167-12292187
  hypo
ccccctttacaaaatcgcac

SEQ ID NO: 186166 - DNA, 1454 bp, Homo sapiens; identical to SEQ ID NO: 129777
  chr18:12307602-12309056
  hypo

SEQ ID NO: 186167 - DNA, 30 bp, Homo sapiens; identical to SEQ ID NO: 94571
  chr18:12326151-12326181
  hypo

SEQ ID NO: 186168 - DNA, 30 bp, Homo sapiens; identical to SEQ ID NO: 94572
  chr18:12329176-12329206
  hypo

SEQ ID NO: 186169 - DNA, 421 bp, Homo sapiens; identical to SEQ ID NO: 94573
  chr18:12375056-12375477
  hypo

SEQ ID NO: 186170 - DNA, 121 bp, Homo sapiens; identical to SEQ ID NO: 31240
  chr18:12375776-12375897
  hypo

SEQ ID NO: 186171 - DNA, 31 bp, Homo sapiens; identical to SEQ ID NO: 94575
  chr18:12380135-12380166
  hypo

SEQ ID NO: 186172 - DNA, 269 bp, Homo sapiens
  chr18:12396676-12396945
  hypo
cgtgtgtcacctggccgcccgcacccccatgcctgcctgcgagggcctttctgggctgctgtccagagcgcatgcgccgccctgctgcgacctctccgcaagggctgcagggtgggccaggtgcgtctctgctggagcgctcttctaaaaaagggcatggctccacttactatttacttaaaaacaatgcatctttttctgttggagtggtgggcgattggggattgctcctttgtttcccacaaacagaagcaagggccgagaggggg

SEQ ID NO: 186173 - DNA, 30 bp, Homo sapiens
  chr18:12407114-12407144
  hypo
cccggagggctgtctcgtttacctcgggag

SEQ ID NO: 186174 - DNA, 615 bp, Homo sapiens; identical to SEQ ID NO: 11651
  chr18:12407707-12408322
  hypo

SEQ ID NO: 186175 - DNA, 42 bp, Homo sapiens; identical to SEQ ID NO: 11652
  chr18:12408339-12408381
  hypo

SEQ ID NO: 186176 - DNA, 30 bp, Homo sapiens; identical to SEQ ID NO: 94578
  chr18:12423751-12423781
  hypo

SEQ ID NO: 186177 - DNA, 30 bp, Homo sapiens
  chr18:12429974-12430004
  hypo
tagtggccctgccccgacggccagcggcca

SEQ ID NO: 186178 - DNA, 30 bp, Homo sapiens
  chr18:12431226-12431256
  hypo
agggcacacagggccggggaggaggattag

SEQ ID NO: 186179 - DNA, 99 bp, Homo sapiens; identical to SEQ ID NO: 94579
  chr18:12431470-12431569
  hypo

SEQ ID NO: 186180 - DNA, 30 bp, Homo sapiens; identical to SEQ ID NO: 94580
  chr18:12432587-12432617
  hypo

SEQ ID NO: 186181 - DNA, 318 bp, Homo sapiens; identical to SEQ ID NO: 94581
  chr18:12432918-12433236
  hypo

SEQ ID NO: 186182 - DNA, 453 bp, Homo sapiens
  chr18:12433980-12434433
  hypo
cccaaacacaaagcccgggtccccggccggccgacgtcttcctcctgccttttctctcggggctgtttggacatggcaccttcctccagcatctaggctgagttctgggtttccccgccccgttctgctctgcgtactcgtccctggcgttgccactctgtgaccttgcctgcgtgtcgcgtgcccgctgcggaagccgggccgcggggcttgggagctgaggggaggccgagtccggagatgcgcggcgcgagcccggccggcccgcacatggtcactccgccaggcttggaggaccctggaggggccctcagagtggccactgcggacgccatcctccagcccgggtgcagcccccggaggctgcgggtcccgctgccatctccactgccacctcgtgcgaggcccaggccgggatcccccgccagagctgctcccgtaaatgctcatcac

SEQ ID NO: 186183 - DNA, 162 bp, Homo sapiens; identical to SEQ ID NO: 94583
  chr18:12460293-12460455
  hypo

SEQ ID NO: 186184 - DNA, 30 bp, Homo sapiens; identical to SEQ ID NO: 31245
  chr18:12655872-12655902
  hypo

SEQ ID NO: 186185 - DNA, 30 bp, Homo sapiens; identical to SEQ ID NO: 94585
  chr18:12673427-12673457
  hypo

SEQ ID NO: 186186 - DNA, 39 bp, Homo sapiens
  chr18:12699045-12699084
  hypo
ggtttagaacgaaaacgttggtttcgataatgtaaacat

SEQ ID NO: 186187 - DNA, 34 bp, Homo sapiens
  chr18:12701658-12701692
  hypo
ttgcactcagtcgagcgagcgctgcagaaactgg

SEQ ID NO: 186188 - DNA, 87 bp, Homo sapiens
  chr18:12741268-12741355
  hypo
gtaactgggactacacgggttcgccatcaccttttttgttctttgcaggccttcaatgggttgaatgaggcccgctggctttggaga

SEQ ID NO: 186189 - DNA, 31 bp, Homo sapiens; identical to SEQ ID NO: 94588
  chr18:12749282-12749313
  hypo

SEQ ID NO: 186190 - DNA, 25 bp, Homo sapiens
  chr18:12849278-12849303
  hypo
cgggtgcagaagctcacgcctgtaa

SEQ ID NO: 186191 - DNA, 24 bp, Homo sapiens
  chr18:12849542-12849566
  hypo
agcgaaaccctgtctcaaaaaata

SEQ ID NO: 186192 - DNA, 36 bp, Homo sapiens; identical to SEQ ID NO: 94591
  chr18:12849992-12850028
  hypo

SEQ ID NO: 186193 - DNA, 77 bp, Homo sapiens; identical to SEQ ID NO: 94592
  chr18:12854821-12854898
  hypo

SEQ ID NO: 186194 - DNA, 40 bp, Homo sapiens
  chr18:12856101-12856141
  hypo
gtctaggaactctagcgcaatgagccgtagttctttccca

SEQ ID NO: 186195 - DNA, 21 bp, Homo sapiens
  chr18:12909994-12910015
  hypo
aaatcaagccaggcgcggtgg

SEQ ID NO: 186196 - DNA, 30 bp, Homo sapiens; identical to SEQ ID NO: 94593
  chr18:12912688-12912718
  hypo

SEQ ID NO: 186197 - DNA, 42 bp, Homo sapiens; identical to SEQ ID NO: 31249
  chr18:12949140-12949182
  hypo

SEQ ID NO: 186198 - DNA, 31 bp, Homo sapiens; identical to SEQ ID NO: 11658
  chr18:12991134-12991165
  hypo

SEQ ID NO: 186199 - DNA, 194 bp, Homo sapiens; identical to SEQ ID NO: 31251
  chr18:13033465-13033659
  hypo

SEQ ID NO: 186200 - DNA, 108 bp, Homo sapiens
  chr18:13036731-13036839
  hypo
gagggctgaggtgctcggcagcagccttgagggcagacattaggggactcccagtctttgtccggaccggggtttcctgggatggggggcaagcggtcctggggcacg

SEQ ID NO: 186201 - DNA, 30 bp, Homo sapiens
  chr18:13043041-13043071
  hypo
gtcaccgcatgtcctcgccagcacctggca

SEQ ID NO: 186202 - DNA, 30 bp, Homo sapiens
  chr18:13055813-13055843
  hypo
tcaaggcagtccagccgcattggaggaacg

SEQ ID NO: 186203 - DNA, 453 bp, Homo sapiens; identical to SEQ ID NO: 94597
  chr18:13131735-13132188
  hypo

SEQ ID NO: 186204 - DNA, 149 bp, Homo sapiens; identical to SEQ ID NO: 94598
  chr18:13135169-13135318
  hypo

SEQ ID NO: 186205 - DNA, 30 bp, Homo sapiens
  chr18:13161466-13161496
  hypo
aagctacgggagccacgcattctgtcctca

SEQ ID NO: 186206 - DNA, 30 bp, Homo sapiens
  chr18:13161832-13161862
  hypo
gaagccttgtgagcacgggctccttgggac

SEQ ID NO: 186207 - DNA, 136 bp, Homo sapiens; identical to SEQ ID NO: 94599
  chr18:13162993-13163129
  hypo

SEQ ID NO: 186208 - DNA, 91 bp, Homo sapiens; identical to SEQ ID NO: 94600
  chr18:13165626-13165717
  hypo

SEQ ID NO: 186209 - DNA, 102 bp, Homo sapiens
  chr18:13181959-13182061
  hypo
gatctcatcccgagacggctcctaggtggcgatgacggtacggacatgctggagaaaggaaggattcacaccccacctgggaccgagcgggacagggcaagc

SEQ ID NO: 186210 - DNA, 162 bp, Homo sapiens
  chr18:13195828-13195990
  hypo
acccggccaagaagtacatagacatttttaaaaagagataagaggaaaaagataagcagacatgggagacacacggctcctacgtgtacagagaatcaggctgtttgtttacttcacctccgttggtctttggggctccacgctgcccgcctttcctaccct

SEQ ID NO: 186211 - DNA, 222 bp, Homo sapiens; identical to SEQ ID NO: 94601
  chr18:13212917-13213139
  hypo

SEQ ID NO: 186212 - DNA, 1068 bp, Homo sapiens; identical to SEQ ID NO: 129793
  chr18:13217135-13218203
  hypo

SEQ ID NO: 186213 - DNA, 326 bp, Homo sapiens; identical to SEQ ID NO: 94602
  chr18:13231193-13231519
  hypo

SEQ ID NO: 186214 - DNA, 222 bp, Homo sapiens; identical to SEQ ID NO: 31255
  chr18:13233039-13233261
  hypo

SEQ ID NO: 186215 - DNA, 300 bp, Homo sapiens; identical to SEQ ID NO: 94604
  chr18:13252606-13252906
  hypo

SEQ ID NO: 186216 - DNA, 183 bp, Homo sapiens; identical to SEQ ID NO: 94605
  chr18:13254435-13254618
  hypo

SEQ ID NO: 186217 - DNA, 30 bp, Homo sapiens
  chr18:13256836-13256866
  hypo
ggcaggtgtgtgtgccggggaaggaaacct

SEQ ID NO: 186218 - DNA, 90 bp, Homo sapiens
  chr18:13257120-13257210
  hypo
ccgcgctggagggtccggcgggacagacgtgcacagcctcgcggccctggctcagaaaggcctgaacccatgtgccgtgggtctggtttt

SEQ ID NO: 186219 - DNA, 17 bp, Homo sapiens
  chr18:13263219-13263236
  hypo
tgcgtgggggctgagtc

SEQ ID NO: 186220 - DNA, 30 bp, Homo sapiens
  chr18:13279789-13279819
  hypo
tgcgtggcgcttcatcgtcatgggcaattt

SEQ ID NO: 186221 - DNA, 237 bp, Homo sapiens
  chr18:13292801-13293038
  hypo
ctgatacaagtttttcattggcgatcccgttactgaattgcctcaataattccagggcacaaaggccactggagagagatctaggagttttccaaccccggggatgcccggaaatgagacgatgacggaggccatgcggattccacgagttcagcgaggtcttggagagaatgccctggaggcaggcgagctttggttctggggctcgagcaccacgtcccaggaatgctgtgaacc

SEQ ID NO: 186222 - DNA, 149 bp, Homo sapiens
  chr18:13296051-13296200
  hypo
cgctcttgcctcttccgtcaagggctcctgcgcctggcgggcatctctcgtgcatccctccagcgcggtttcacgagtgctgtgcccagaagccaggaggcatgacctgtcatgttagagcaggaacagagtgccgtagatgacttctg

SEQ ID NO: 186223 - DNA, 141 bp, Homo sapiens; identical to SEQ ID NO: 94608
  chr18:13311611-13311752
  hypo

SEQ ID NO: 186224 - DNA, 30 bp, Homo sapiens
  chr18:13319292-13319322
  hypo
cgagtaacagaggtgcgcagtggcggggca

SEQ ID NO: 186225 - DNA, 23 bp, Homo sapiens
  chr18:13325752-13325775
  hypo
ttcctttttttttttttgagacg

SEQ ID NO: 186226 - DNA, 30 bp, Homo sapiens
  chr18:13375816-13375846
  hypo
cctcccgcccgccagcgccttgctcttcaa

SEQ ID NO: 186227 - DNA, 30 bp, Homo sapiens
  chr18:13376146-13376176
  hypo
tcctcccaggctgtgcgggcactggcctct

SEQ ID NO: 186228 - DNA, 55 bp, Homo sapiens; identical to SEQ ID NO: 94610
  chr18:13381475-13381530
  hypo

SEQ ID NO: 186229 - DNA, 30 bp, Homo sapiens; identical to SEQ ID NO: 94611
  chr18:13383190-13383220
  hypo

SEQ ID NO: 186230 - DNA, 30 bp, Homo sapiens; identical to SEQ ID NO: 94612
  chr18:13383547-13383577
  hypo

SEQ ID NO: 186231 - DNA, 311 bp, Homo sapiens; identical to SEQ ID NO: 94613
  chr18:13387327-13387638
  hypo

SEQ ID NO: 186232 - DNA, 30 bp, Homo sapiens
  chr18:13392535-13392565
  hypo
ctctgtcccaggtgccgtcatagtggtgga

SEQ ID NO: 186233 - DNA, 131 bp, Homo sapiens
  chr18:13393099-13393230
  hypo
cccacagaccttccgcgcattcctcatccctctcctctgcaaggttgcacctgtggctgacccacggatgccctcagcccccgccttccagagctgcccagagaatgctcgctttaggagatattgagagc

SEQ ID NO: 186234 - DNA, 129 bp, Homo sapiens; identical to SEQ ID NO: 94615
  chr18:13400463-13400592
  hypo

SEQ ID NO: 186235 - DNA, 280 bp, Homo sapiens; identical to SEQ ID NO: 94616
  chr18:13404254-13404534
  hypo

SEQ ID NO: 186236 - DNA, 39 bp, Homo sapiens; identical to SEQ ID NO: 94617
  chr18:13404773-13404812
  hypo

SEQ ID NO: 186237 - DNA, 78 bp, Homo sapiens; identical to SEQ ID NO: 94618
  chr18:13412927-13413005
  hypo

SEQ ID NO: 186238 - DNA, 30 bp, Homo sapiens
  chr18:13425701-13425731
  hypo
ccgtgctggggttgacggcctggggaggca

SEQ ID NO: 186239 - DNA, 183 bp, Homo sapiens
  chr18:13425934-13426117
  hypo
gagagggaggctgagattccccgagggcaggacggtggaccacagtgaccctgtgggaagaggtctggggacggatggcccatggcggcagggtgcgcagagctcctgggtgctgggccatcaggccacactgcacaggtgaaaccggctctcaacaggacatgccctcggggaagaactgaa

SEQ ID NO: 186240 - DNA, 41 bp, Homo sapiens
  chr18:13426841-13426882
  hypo
catgggtgtttatgtagcccacgccctatgaggtcagtgag

SEQ ID NO: 186241 - DNA, 68 bp, Homo sapiens; identical to SEQ ID NO: 94620
  chr18:13432047-13432115
  hypo

SEQ ID NO: 186242 - DNA, 30 bp, Homo sapiens
  chr18:13441005-13441035
  hypo
atggggagacgctcacggcgcgggttgcct

SEQ ID NO: 186243 - DNA, 365 bp, Homo sapiens; identical to SEQ ID NO: 94621
  chr18:13442500-13442865
  hypo

SEQ ID NO: 186244 - DNA, 203 bp, Homo sapiens
  chr18:13458110-13458313
  hypo
ccaagactacagcctgcagaacgcgcagggcctgggcatggggaagcacggatgaggagcctgctgctgatgctgagcaggagccgtggaggggtctacaccactctgctgactctgcgtgatgaggattcaaaatgccattcacgcaaaacaaatttagcaactaagaagtagagcggcgcgctgctttagaagcactatgt

SEQ ID NO: 186245 - DNA, 507 bp, Homo sapiens
  chr18:13460974-13461481
  hypo
tgccgtctgcatggccggggcccttctgcagcccccactgcaccaacctttgtccgcctttattgttggtgaacacagtgcccacctcaccatgctggggtggcctggcttgctgtctcttgagtaccgtgggaactgaggcgggctggccttgtctccccagcgcctgctcacagaaggtgccccatgatgtctgtcgtgcagatgaatgtgtccacgcgtgctgggctagtacagaagatcggtaggcaggggtcttcgtggccagggcctgaggaggaccgatagccttggggactgcatgggttttgagagtctgggggaaccagggggaagtaggaggacatagtaaacaaaggtcaagaagagcgaggaagacgtggggatggggacacgtacctgactgaggaaaatggattctaggaacacaaacgtcattgaagaaggagagtgtgtgttactggttgagggtgtcctggtccttggcatcttgaacaaataatcaga

SEQ ID NO: 186246 - DNA, 87 bp, Homo sapiens
  chr18:13461540-13461627
  hypo
acgaaagtacactccacagggtggtagcatgccctagcaagcggctcctgagcccggttacagaattttctccgctttaaagactct

SEQ ID NO: 186247 - DNA, 43 bp, Homo sapiens
  chr18:13462965-13463008
  hypo
gggcaagctgaaggcagatcccgactgccaggggcagcagcca

SEQ ID NO: 186248 - DNA, 88 bp, Homo sapiens; identical to SEQ ID NO: 94622
  chr18:13477884-13477972
  hypo

SEQ ID NO: 186249 - DNA, 168 bp, Homo sapiens; identical to SEQ ID NO: 94623
  chr18:13481382-13481550
  hypo

SEQ ID NO: 186250 - DNA, 241 bp, Homo sapiens; identical to SEQ ID NO: 94624
  chr18:13491220-13491461
  hypo

SEQ ID NO: 186251 - DNA, 121 bp, Homo sapiens; identical to SEQ ID NO: 31261
  chr18:13498451-13498572
  hypo

SEQ ID NO: 186252 - DNA, 85 bp, Homo sapiens; identical to SEQ ID NO: 31262
  chr18:13498972-13499057
  hypo

SEQ ID NO: 186253 - DNA, 241 bp, Homo sapiens; identical to SEQ ID NO: 31263
  chr18:13499116-13499357
  hypo

SEQ ID NO: 186254 - DNA, 84 bp, Homo sapiens; identical to SEQ ID NO: 31264
  chr18:13499656-13499740
  hypo

SEQ ID NO: 186255 - DNA, 61 bp, Homo sapiens
  chr18:13503352-13503413
  hypo
gttcccagccggcagcgtggtccctgccaccaggtgcttgaacaaacggccatgtgtatga

SEQ ID NO: 186256 - DNA, 45 bp, Homo sapiens; identical to SEQ ID NO: 94630
  chr18:13505524-13505569
  hypo

SEQ ID NO: 186257 - DNA, 120 bp, Homo sapiens
  chr18:13514460-13514580
  hypo
ttgaccatggatatccgagtcaggtgggcctcgctgacaggtgagccaggattctagggccaaatagagacagacgaggtaatgggaaaggctgacatcataggccgtggtagccctctc

SEQ ID NO: 186258 - DNA, 151 bp, Homo sapiens
  chr18:13518869-13519020
  hypo
ctagtcattttccttgcaggccgctagggtaggaagggtctcggggatgaatttattcctagttcaccattctacggaggatataattttgtgaagactcagctttcttcagcagcagtgttcgttgtgggagccccgcagtggaaatgcc

SEQ ID NO: 186259 - DNA, 148 bp, Homo sapiens
  chr18:13519310-13519458
  hypo
tgtggcatcaacctacgtggctctccctggtgttccggagggagccggggagctggggtcagctctttccctgtctgccttgggtttcccttctttcattgatttcctcaaggggatgcttaccttttctaaaaagacttgacaactt

SEQ ID NO: 186260 - DNA, 203 bp, Homo sapiens; identical to SEQ ID NO: 94632
  chr18:13525324-13525527
  hypo

SEQ ID NO: 186261 - DNA, 75 bp, Homo sapiens
  chr18:13528923-13528998
  hypo
ctgctgttggtctgtggcccacgctttgggtagcgagagcttagatcctcggccgtggttctagcttcccaatgc

SEQ ID NO: 186262 - DNA, 270 bp, Homo sapiens; identical to SEQ ID NO: 31266
  chr18:13532098-13532368
  hypo

SEQ ID NO: 186263 - DNA, 227 bp, Homo sapiens; identical to SEQ ID NO: 94634
  chr18:13550419-13550646
  hypo

SEQ ID NO: 186264 - DNA, 36 bp, Homo sapiens; identical to SEQ ID NO: 94635
  chr18:13571914-13571950
  hypo

SEQ ID NO: 186265 - DNA, 30 bp, Homo sapiens
  chr18:13583406-13583436
  hypo
gacctaggggagggacgtggtggtcacggc

SEQ ID NO: 186266 - DNA, 361 bp, Homo sapiens
  chr18:13583718-13584079
  hypo
tggggggcccggccgcgccgaagcctgcttgagtcaccgagccagggcgctgcggctccccactgctggcggagtcttattgttgtgtctctcgctttgcctttcacagttctggcatggcagggcttaatgaatgtcaggctcagagggaagagaatggaacctgcgagcactttctgccactcacagagcggggtcacctcgccctgctcccccagctgcctacaggcctgccgtgcccttcccatctccgcagcctcagcctggcttcccttgaggaccaccaccgcccttagcccatctcccacacccatcttgctgagagtgcaggtgagcccggcccacccgaagccacgttgcc

SEQ ID NO: 186267 - DNA, 58 bp, Homo sapiens; identical to SEQ ID NO: 94636
  chr18:13590479-13590537
  hypo

SEQ ID NO: 186268 - DNA, 30 bp, Homo sapiens
  chr18:13606534-13606564
  hypo
cacgcagagcatttgcgtttctacataaag

SEQ ID NO: 186269 - DNA, 255 bp, Homo sapiens; identical to SEQ ID NO: 94637
  chr18:13621653-13621908
  hypo

SEQ ID NO: 186270 - DNA, 30 bp, Homo sapiens
  chr18:13645211-13645241
  hypo
cccctatgtgcagcacgagattgatcttcc

SEQ ID NO: 186271 - DNA, 30 bp, Homo sapiens; identical to SEQ ID NO: 94638
  chr18:13649582-13649612
  hypo

SEQ ID NO: 186272 - DNA, 118 bp, Homo sapiens
  chr18:13654303-13654421
  hypo
gagccaagaagcactcggctcagatgcctcggagacagtgcaaaccaagcgacagacagaacgggcggggttggaggggatgatggcagggagagagggcaagcgctatgtccaatgc

SEQ ID NO: 186273 - DNA, 30 bp, Homo sapiens
  chr18:13745237-13745267
  hypo
gacatgactcaggtccgcatttctgaaagc

SEQ ID NO: 186274 - DNA, 30 bp, Homo sapiens
  chr18:13821924-13821954
  hypo
ggctcagctctctagcgctggaagctggag

SEQ ID NO: 186275 - DNA, 346 bp, Homo sapiens; identical to SEQ ID NO: 54928
  chr18:13823934-13824280
  hypo

SEQ ID NO: 186276 - DNA, 429 bp, Homo sapiens
  chr18:13826241-13826670
  hypo
ggggccatcatcgccggcatctgggctttctgcacgggctgcggcattgtcttcatcctgtactcagaatccacctacgtcatcctgtgcctcatctccatgttcttcgctatgctgttcctcctggtgtctctgtacatacacatgttcctcctggcgcggactcacgtcaagcggatcgcggctctgcccggggccagctctgcgcggcagaggaccagcatgcagggcgcggtcaccgtcaccatgctgctgggcgtgtttaccgtgtgctgggccccgttcttccttcatctcactttaatgctttcttgccctcagaacctctactgctctcgcttcatgtctcacttcaatatgtacctcatactcatcatgtgtaattccgtgatggaccctctcatatatgccttccgcagccaagagatg

SEQ ID NO: 186277 - DNA, 139 bp, Homo sapiens; identical to SEQ ID NO: 94641
  chr18:13836863-13837002
  hypo

SEQ ID NO: 186278 - DNA, 18 bp, Homo sapiens
  chr18:13837301-13837319
  hypo
cctctcacattcttaaga

SEQ ID NO: 186279 - DNA, 30 bp, Homo sapiens; identical to SEQ ID NO: 94643
  chr18:14145851-14145881
  hypo

SEQ ID NO: 186280 - DNA, 146 bp, Homo sapiens; identical to SEQ ID NO: 94644
  chr18:14221784-14221930
  hypo

SEQ ID NO: 186281 - DNA, 31 bp, Homo sapiens; identical to SEQ ID NO: 31267
  chr18:14392672-14392703
  hypo

SEQ ID NO: 186282 - DNA, 30 bp, Homo sapiens
  chr18:14432273-14432303
  hypo
ccaggatcgcattaccgcaggccctaacag

SEQ ID NO: 186283 - DNA, 30 bp, Homo sapiens; identical to SEQ ID NO: 11663
  chr18:14726130-14726160
  hypo

SEQ ID NO: 186284 - DNA, 30 bp, Homo sapiens
  chr18:15004001-15004031
  hypo
ggctgacctctgcgccgggaggactcatct

SEQ ID NO: 186285 - DNA, 30 bp, Homo sapiens
  chr18:15004569-15004599
  hypo
gaaccctgccaccatcgggttgccgcccag

SEQ ID NO: 186286 - DNA, 124 bp, Homo sapiens; identical to SEQ ID NO: 129809
  chr18:15197983-15198107
  hypo

SEQ ID NO: 186287 - DNA, 97 bp, Homo sapiens; identical to SEQ ID NO: 129810
  chr18:15198163-15198260
  hypo

SEQ ID NO: 186288 - DNA, 22 bp, Homo sapiens
  chr18:18659891-18659913
  hypo
ttttcttcaaagttttagggtc

SEQ ID NO: 186289 - DNA, 21 bp, Homo sapiens
  chr18:18693552-18693573
  hypo
cttttttttttttctccgagg

SEQ ID NO: 186290 - DNA, 34 bp, Homo sapiens; identical to SEQ ID NO: 94650
  chr18:18700053-18700087
  hypo

SEQ ID NO: 186291 - DNA, 18 bp, Homo sapiens
  chr18:18738934-18738952
  hypo
actccctctcaaaaaaaa

SEQ ID NO: 186292 - DNA, 89 bp, Homo sapiens; identical to SEQ ID NO: 94652
  chr18:18997461-18997550
  hypo

SEQ ID NO: 186293 - DNA, 121 bp, Homo sapiens; identical to SEQ ID NO: 94653
  chr18:19064404-19064525
  hypo

SEQ ID NO: 186294 - DNA, 31 bp, Homo sapiens; identical to SEQ ID NO: 94654
  chr18:19079791-19079822
  hypo

SEQ ID NO: 186295 - DNA, 181 bp, Homo sapiens
  chr18:19216810-19216991
  hypo
agcaagactccgtttcaaaaaaaaaaaaaaaaagaaagattcaggttccagcaggatgtttccaattaagagtcacttccatgtctgctccttgtcacaggctgatgtatatttctgcacaatctgaatccgacttctattctgaagttttaagatttgagtcagagggctgggcgtggtg

SEQ ID NO: 186296 - DNA, 240 bp, Homo sapiens; identical to SEQ ID NO: 94656
  chr18:19243721-19243961
  hypo

SEQ ID NO: 186297 - DNA, 33 bp, Homo sapiens; identical to SEQ ID NO: 31270
  chr18:19253262-19253295
  hypo

SEQ ID NO: 186298 - DNA, 26 bp, Homo sapiens
  chr18:19267459-19267485
  hypo
ccacacccagccgcctctgttaaact

SEQ ID NO: 186299 - DNA, 39 bp, Homo sapiens
  chr18:19395657-19395696
  hypo
gctgatttgaatgctcgaaacaagcgccgacagacacca

SEQ ID NO: 186300 - DNA, 24 bp, Homo sapiens
  chr18:19596546-19596570
  hypo
accgcaccccgctggcactggatt

SEQ ID NO: 186301 - DNA, 30 bp, Homo sapiens
  chr18:19669525-19669555
  hypo
gttctctctgacagacggaagagttataga

SEQ ID NO: 186302 - DNA, 2524 bp, Homo sapiens; identical to SEQ ID NO: 129823
  chr18:19748741-19751265
  hypo

SEQ ID NO: 186303 - DNA, 61 bp, Homo sapiens; identical to SEQ ID NO: 129824
  chr18:19751774-19751835
  hypo

SEQ ID NO: 186304 - DNA, 168 bp, Homo sapiens; identical to SEQ ID NO: 129825
  chr18:19751869-19752037
  hypo

SEQ ID NO: 186305 - DNA, 60 bp, Homo sapiens; identical to SEQ ID NO: 94660
  chr18:19769947-19770007
  hypo

SEQ ID NO: 186306 - DNA, 31 bp, Homo sapiens; identical to SEQ ID NO: 31273
  chr18:19775129-19775160
  hypo

SEQ ID NO: 186307 - DNA, 35 bp, Homo sapiens; identical to SEQ ID NO: 31274
  chr18:19778301-19778336
  hypo

SEQ ID NO: 186308 - DNA, 30 bp, Homo sapiens; identical to SEQ ID NO: 31275
  chr18:19780713-19780743
  hypo

SEQ ID NO: 186309 - DNA, 81 bp, Homo sapiens; identical to SEQ ID NO: 94664
  chr18:20109532-20109613
  hypo

SEQ ID NO: 186310 - DNA, 30 bp, Homo sapiens; identical to SEQ ID NO: 11671
  chr18:20261870-20261900
  hypo

SEQ ID NO: 186311 - DNA, 133 bp, Homo sapiens; identical to SEQ ID NO: 94666
  chr18:20380479-20380612
  hypo

SEQ ID NO: 186312 - DNA, 210 bp, Homo sapiens; identical to SEQ ID NO: 11672
  chr18:20512627-20512837
  hypo

SEQ ID NO: 186313 - DNA, 1246 bp, Homo sapiens; identical to SEQ ID NO: 11673
  chr18:20512902-20514148
  hypo

SEQ ID NO: 186314 - DNA, 22 bp, Homo sapiens
  chr18:20554443-20554465
  hypo
tgtttttgagactctccgccac

SEQ ID NO: 186315 - DNA, 22 bp, Homo sapiens
  chr18:20554704-20554726
  hypo
gccactgcgcctggcctatttt

SEQ ID NO: 186316 - DNA, 31 bp, Homo sapiens; identical to SEQ ID NO: 94671
  chr18:20668996-20669027
  hypo

SEQ ID NO: 186317 - DNA, 218 bp, Homo sapiens
  chr18:20696269-20696487
  hypo
tacgggtgtgagccaccgtgcccggccgctacgtttaactcttaacctctaagattcattgcccctgggagtagttgctcttcaaggataacacatggctcagggactgcctgtcacaccccaacctgagaatcagcagagactaccacggggcccatcaggccactaggcaggtgccactcccctggcagggagagaggtgccggtggccaccgacc

SEQ ID NO: 186318 - DNA, 243 bp, Homo sapiens; identical to SEQ ID NO: 129832
  chr18:20715394-20715637
  hypo

SEQ ID NO: 186319 - DNA, 1040 bp, Homo sapiens; identical to SEQ ID NO: 54947
  chr18:20715850-20716890
  hypo

SEQ ID NO: 186320 - DNA, 164 bp, Homo sapiens
  chr18:20770342-20770506
  hypo
gtggccactgtgagccgaaggaaaccgggtgactcggggtaccggctacagagggctctcccctcttcaggaattcccaggcagggctgttgagcctcgggatgcagtgtccttgagtctcgaggtgtcgaggagaggctggaggaggacgtgggttctgcgtt

SEQ ID NO: 186321 - DNA, 30 bp, Homo sapiens
  chr18:20787249-20787279
  hypo
agaggggagtggaaacgctggtgagtcagg

SEQ ID NO: 186322 - DNA, 220 bp, Homo sapiens; identical to SEQ ID NO: 31284
  chr18:20790546-20790766
  hypo

SEQ ID NO: 186323 - DNA, 261 bp, Homo sapiens; identical to SEQ ID NO: 94676
  chr18:20800424-20800685
  hypo

SEQ ID NO: 186324 - DNA, 330 bp, Homo sapiens
  chr18:20829537-20829867
  hypo
gatgaaatttttcagcgtcttttacgtacgttttgttctctttgatcttcaagataaacctgggaagcagccccatcaggttttctcatctcatctcgttttggaggatgagggtgaggctcagggaggttgagtgactttctccctgttgcctgatttgctgaaggtggacctgaccccccgcccccgacagccctttccactgctagcgatcttctcggacatcctggtgagagcccttgtctagggagctactctgtgctgcttattcagtaccatgaaggagagaaaagcaggaaggcagtgcatggggcacgagctggaagcagc

SEQ ID NO: 186325 - DNA, 194 bp, Homo sapiens; identical to SEQ ID NO: 31286
  chr18:20846711-20846905
  hypo

SEQ ID NO: 186326 - DNA, 257 bp, Homo sapiens
  chr18:20853661-20853918
  hypo
aagtcattcgcctcacggtcacattccatttactcagtcaccgcaagtctcctgccacctaaagccagtcactgtggaaagctctgcttgctgatggtcataaggataacagtaaggtttactgtctgtttactgtgtgccggtatgctaagcacaacacatacatacattactataatttttttccatttaattgtttcaacaaacgtttgagaggattaaattacctttccatttttattttattttttttgcga

SEQ ID NO: 186327 - DNA, 48 bp, Homo sapiens
  chr18:20882092-20882140
  hypo
tggtgggagagatggcgccagccacctgtcactcgccagccacctgtg

SEQ ID NO: 186328 - DNA, 43 bp, Homo sapiens; identical to SEQ ID NO: 31287
  chr18:20910922-20910965
  hypo

SEQ ID NO: 186329 - DNA, 642 bp, Homo sapiens; identical to SEQ ID NO: 94679
  chr18:20911024-20911666
  hypo

SEQ ID NO: 186330 - DNA, 31 bp, Homo sapiens; identical to SEQ ID NO: 31289
  chr18:21000859-21000890
  hypo

SEQ ID NO: 186331 - DNA, 30 bp, Homo sapiens
  chr18:21030971-21031001
  hypo
acatctgaccatgccgaaccacctggcctt

SEQ ID NO: 186332 - DNA, 44 bp, Homo sapiens; identical to SEQ ID NO: 94681
  chr18:21042373-21042417
  hypo

SEQ ID NO: 186333 - DNA, 156 bp, Homo sapiens; identical to SEQ ID NO: 94682
  chr18:21104195-21104351
  hypo

SEQ ID NO: 186334 - DNA, 30 bp, Homo sapiens
  chr18:21121358-21121388
  hypo
gagagaaggtgtgcacggctggcatcacgg

SEQ ID NO: 186335 - DNA, 27 bp, Homo sapiens
  chr18:21130735-21130762
  hypo
caccacgcctggcccagttcttacatt

SEQ ID NO: 186336 - DNA, 95 bp, Homo sapiens; identical to SEQ ID NO: 31290
  chr18:21164537-21164632
  hypo

SEQ ID NO: 186337 - DNA, 769 bp, Homo sapiens; identical to SEQ ID NO: 54951
  chr18:21242240-21243009
  hypo

SEQ ID NO: 186338 - DNA, 45 bp, Homo sapiens; identical to SEQ ID NO: 94686
  chr18:21306853-21306898
  hypo

SEQ ID NO: 186339 - DNA, 31 bp, Homo sapiens; identical to SEQ ID NO: 94687
  chr18:21314132-21314163
  hypo

SEQ ID NO: 186340 - DNA, 31 bp, Homo sapiens; identical to SEQ ID NO: 31292
  chr18:21338239-21338270
  hypo

SEQ ID NO: 186341 - DNA, 204 bp, Homo sapiens; identical to SEQ ID NO: 94689
  chr18:21388619-21388823
  hypo

SEQ ID NO: 186342 - DNA, 31 bp, Homo sapiens; identical to SEQ ID NO: 54954
  chr18:21393784-21393815
  hypo

SEQ ID NO: 186343 - DNA, 30 bp, Homo sapiens; identical to SEQ ID NO: 54955
  chr18:21405537-21405567
  hypo

SEQ ID NO: 186344 - DNA, 74 bp, Homo sapiens; identical to SEQ ID NO: 94692
  chr18:21422658-21422732
  hypo

SEQ ID NO: 186345 - DNA, 43 bp, Homo sapiens; identical to SEQ ID NO: 94693
  chr18:21426404-21426447
  hypo

SEQ ID NO: 186346 - DNA, 31 bp, Homo sapiens; identical to SEQ ID NO: 94694
  chr18:21441717-21441748
  hypo

SEQ ID NO: 186347 - DNA, 31 bp, Homo sapiens; identical to SEQ ID NO: 94695
  chr18:21459202-21459233
  hypo

SEQ ID NO: 186348 - DNA, 30 bp, Homo sapiens
  chr18:21461678-21461708
  hypo
gccaatgttaagcaccgcgtcactgaggga

SEQ ID NO: 186349 - DNA, 79 bp, Homo sapiens
  chr18:21461949-21462028
  hypo
ctactatggcaacgccgtccacggatcctgcagggcctgcccatgtcctcacactaacaggtaccgtagcagcttgaca

SEQ ID NO: 186350 - DNA, 30 bp, Homo sapiens
  chr18:21507770-21507800
  hypo
tccagcggggagggacgggcagttctagat

SEQ ID NO: 186351 - DNA, 155 bp, Homo sapiens
  chr18:21508085-21508240
  hypo
gatttaacatttctacgcctgctttccgaggctgcatgaaaaatttgaagaaaaccagtggtgtcgttagattgaatgatactgtgggagtaaccaaaaagtgctcggaagactggaaggtaagtgaaagttcagaacctcgtgaaggagtgctt

SEQ ID NO: 186352 - DNA, 31 bp, Homo sapiens; identical to SEQ ID NO: 94696
  chr18:21520175-21520206
  hypo

SEQ ID NO: 186353 - DNA, 31 bp, Homo sapiens; identical to SEQ ID NO: 94697
  chr18:21536808-21536839
  hypo

SEQ ID NO: 186354 - DNA, 23 bp, Homo sapiens
  chr18:21546285-21546308
  hypo
gatgaccaggccaggcgcggtgg

SEQ ID NO: 186355 - DNA, 248 bp, Homo sapiens; identical to SEQ ID NO: 54957
  chr18:21594466-21594714
  hypo

SEQ ID NO: 186356 - DNA, 121 bp, Homo sapiens
  chr18:21608974-21609095
  hypo
ccgcgcccctacgtaatatttttaaatgattgcctaaaattaattagtgtttgagttgcttgtataaatagatgtgtgtggtgttgttgttgttgttgttgtttttgtgtgagacggagtc

SEQ ID NO: 186357 - DNA, 193 bp, Homo sapiens
  chr18:21656907-21657100
  hypo
tggatggattcttaacgtttgtttccagttctaccatccatttctgtagctcctcacctgaggtcagaattgttagcattcatgtctataatcctggtcccttcgacgtcacgttgagagatgccgtttctccgggagcaggtgttcactcctctgttgggcttgcacccttttgtcccggtgtgtcccctgc

SEQ ID NO: 186358 - DNA, 166 bp, Homo sapiens
  chr18:21702068-21702234
  hypo
acccttgggctctgccgatggtagcctatcctggtacgtgcacgcctgggataggtgactgcttgaccatgcccaaatgcgagtacgggaccaacctacttttaggggtgctcaggtaacgaagggggaactagccaggcacagtggctcacacctgtaatcccag

SEQ ID NO: 186359 - DNA, 20 bp, Homo sapiens
  chr18:21720212-21720232
  hypo
gtctatctactcactttggg

SEQ ID NO: 186360 - DNA, 31 bp, Homo sapiens; identical to SEQ ID NO: 31293
  chr18:21730971-21731002
  hypo

SEQ ID NO: 186361 - DNA, 31 bp, Homo sapiens; identical to SEQ ID NO: 94704
  chr18:21779334-21779365
  hypo

SEQ ID NO: 186362 - DNA, 19 bp, Homo sapiens
  chr18:21796451-21796470
  hypo
cagagcgagactgtgtctc

SEQ ID NO: 186363 - DNA, 30 bp, Homo sapiens; identical to SEQ ID NO: 94706
  chr18:21839134-21839164
  hypo

SEQ ID NO: 186364 - DNA, 117 bp, Homo sapiens
  chr18:21849310-21849427
  hypo
ctttcccttccattccggtcttaacgatttgctaaaatttaccctcttctgttgcttctgggtatgttgcaccttctgtaagaatttatttagtcacctgacgccggtataagtcag

SEQ ID NO: 186365 - DNA, 30 bp, Homo sapiens; identical to SEQ ID NO: 94708
  chr18:21897134-21897164
  hypo

SEQ ID NO: 186366 - DNA, 30 bp, Homo sapiens; identical to SEQ ID NO: 94709
  chr18:22049809-22049839
  hypo

SEQ ID NO: 186367 - DNA, 205 bp, Homo sapiens; identical to SEQ ID NO: 94710
  chr18:22098634-22098839
  hypo

SEQ ID NO: 186368 - DNA, 30 bp, Homo sapiens
  chr18:22316693-22316723
  hypo
ccccgctcttgtcctcgtctccctctgtct

SEQ ID NO: 186369 - DNA, 33 bp, Homo sapiens
  chr18:22552212-22552245
  hypo
ttctatgttgtttgtttgtgacggagtttcact

SEQ ID NO: 186370 - DNA, 31 bp, Homo sapiens; identical to SEQ ID NO: 31295
  chr18:22596097-22596128
  hypo

SEQ ID NO: 186371 - DNA, 187 bp, Homo sapiens; identical to SEQ ID NO: 94712
  chr18:22597054-22597241
  hypo

SEQ ID NO: 186372 - DNA, 70 bp, Homo sapiens
  chr18:22636371-22636441
  hypo
cgaaatcaacatccgcggttgccctgagatagcatcacccatcgttccgccggtgcgccctccctgagat

SEQ ID NO: 186373 - DNA, 25 bp, Homo sapiens
  chr18:22640190-22640215
  hypo
gaatgtgtattacttttgcaccgtg

SEQ ID NO: 186374 - DNA, 148 bp, Homo sapiens; identical to SEQ ID NO: 54963
  chr18:22653838-22653986
  hypo

SEQ ID NO: 186375 - DNA, 28 bp, Homo sapiens
  chr18:22654045-22654073
  hypo
gtgtgcacgcgcacgggaatatgcctgt

SEQ ID NO: 186376 - DNA, 45 bp, Homo sapiens
  chr18:22658457-22658502
  hypo
tgagccaattacacgcgaggcagaattatgcgtgggtgctgctgt

SEQ ID NO: 186377 - DNA, 29 bp, Homo sapiens
  chr18:22668457-22668486
  hypo
caggtgtgagccaccgtgcccggccaaca

SEQ ID NO: 186378 - DNA, 128 bp, Homo sapiens; identical to SEQ ID NO: 94718
  chr18:22721785-22721913
  hypo

SEQ ID NO: 186379 - DNA, 264 bp, Homo sapiens
  chr18:22756669-22756933
  hypo
ggggctccgagggatcgcagcgtagtgcaacagattacaccagcttgcccaagtcggccgccccggtgttgctttccttacagaataaatgacaaagatgaaactgctcccggaaaattctagacactcacacatgctcaccagcacacgtgcgcgtgcacgcacacactcataagcacacgctccctggctggctccaacattcggcgctggcgtggaacctggtgtttactcccaatactcgctgtgacctgagcacttacc

SEQ ID NO: 186380 - DNA, 75 bp, Homo sapiens
  chr18:22787365-22787440
  hypo
acaggactccaggaccgactctccagcaccgcctctccatcgccagttcttgctactaaccgctgccttcttgga

SEQ ID NO: 186381 - DNA, 171 bp, Homo sapiens; identical to SEQ ID NO: 94720
  chr18:22804888-22805059
  hypo

SEQ ID NO: 186382 - DNA, 30 bp, Homo sapiens
  chr18:22806741-22806771
  hypo
actctttgggattggcggggcagcttccac

SEQ ID NO: 186383 - DNA, 419 bp, Homo sapiens
  chr18:22806989-22807408
  hypo
tcatgagggaggtctcctctacgaagagctcgtggcagtagacacactggagggccgctcggtcctcatttggggagcattcggggtggcactctgcaatgtgtttttggaggtcttccgggaagtcaaagccttcctcacactgactgcacttctgagtgtccttcatcttccagtcctccatcctggaaccggactgagagccgtccttgttcctctcatgaacctgcatgtgtccgtgtaaggaactagaggacagaaacccacggcgacaaatggcacatttatatggcttgttggacgtgtgagtctttaagtggatcttcaagtgatcacttctggaaaacgcagcatcacattcactgcagtggtacttcttgtccccggtgtggagttttatgtggcgatctcggctgcgc

SEQ ID NO: 186384 - DNA, 30 bp, Homo sapiens
  chr18:22866052-22866082
  hypo
cctggggctgcagtgcgcgctctcagggga

SEQ ID NO: 186385 - DNA, 532 bp, Homo sapiens; identical to SEQ ID NO: 129852
  chr18:22929186-22929718
  hypo

SEQ ID NO: 186386 - DNA, 1428 bp, Homo sapiens; identical to SEQ ID NO: 129853
  chr18:22929926-22931354
  hypo

SEQ ID NO: 186387 - DNA, 30 bp, Homo sapiens; identical to SEQ ID NO: 94724
  chr18:23584863-23584893
  hypo

SEQ ID NO: 186388 - DNA, 155 bp, Homo sapiens; identical to SEQ ID NO: 94725
  chr18:23652340-23652495
  hypo

SEQ ID NO: 186389 - DNA, 1125 bp, Homo sapiens; identical to SEQ ID NO: 129859
  chr18:23806174-23807299
  hypo

SEQ ID NO: 186390 - DNA, 18 bp, Homo sapiens
  chr18:23841146-23841164
  hypo
tttttttttttttttttg

SEQ ID NO: 186391 - DNA, 17 bp, Homo sapiens
  chr18:23841463-23841480
  hypo
agcactgtcatctttag

SEQ ID NO: 186392 - DNA, 131 bp, Homo sapiens; identical to SEQ ID NO: 31302
  chr18:23988506-23988637
  hypo

SEQ ID NO: 186393 - DNA, 31 bp, Homo sapiens; identical to SEQ ID NO: 31303
  chr18:24035812-24035843
  hypo

SEQ ID NO: 186394 - DNA, 30 bp, Homo sapiens; identical to SEQ ID NO: 94731
  chr18:24050614-24050644
  hypo

SEQ ID NO: 186395 - DNA, 228 bp, Homo sapiens
  chr18:24059430-24059658
  hypo
gaaggggctgaaaaacgcgcgctgccagggcagaaaaggctgcgtgggctccgtggaagcagagcaggcaaggggtgtggagagaaagaggaaagggctggaagggaagggtgcttgggccgcggaggcacaggcctggcggaggtgaaagcctctcagagaagaaaacgttccccattggaagcaacaaacgctgggagtaataaaaagaaacgcagggctgctgat

SEQ ID NO: 186396 - DNA, 30 bp, Homo sapiens
  chr18:24126884-24126914
  hypo
gactcgtacagggcgcgcttgggcgcagcc

SEQ ID NO: 186397 - DNA, 30 bp, Homo sapiens
  chr18:24127221-24127251
  hypo
cgatggctttgttctcgtaccaggtcacat

SEQ ID NO: 186398 - DNA, 525 bp, Homo sapiens; identical to SEQ ID NO: 54969
  chr18:24127690-24128215
  hypo

SEQ ID NO: 186399 - DNA, 30 bp, Homo sapiens; identical to SEQ ID NO: 11693
  chr18:24367819-24367849
  hypo

SEQ ID NO: 186400 - DNA, 33 bp, Homo sapiens
  chr18:24409811-24409844
  hypo
agagacacacctaaaccacgtgggggagacaaa

SEQ ID NO: 186401 - DNA, 28 bp, Homo sapiens
  chr18:24514511-24514539
  hypo
ctaaagcgtactctgccagccaagtggc

SEQ ID NO: 186402 - DNA, 30 bp, Homo sapiens; identical to SEQ ID NO: 54979
  chr18:24570651-24570681
  hypo

SEQ ID NO: 186403 - DNA, 2416 bp, Homo sapiens; identical to SEQ ID NO: 54983
  chr18:25755555-25757971
  hypo

SEQ ID NO: 186404 - DNA, 38 bp, Homo sapiens; identical to SEQ ID NO: 94737
  chr18:26202688-26202726
  hypo

SEQ ID NO: 186405 - DNA, 31 bp, Homo sapiens; identical to SEQ ID NO: 94738
  chr18:27426191-27426222
  hypo

SEQ ID NO: 186406 - DNA, 140 bp, Homo sapiens
  chr18:27755724-27755864
  hypo
tccctcatccctgtggcagggcgtgcgacaagcgggggctcccctcgatgtcctctcaatgtccggtggcttgtcttctttggccgatattttcatctcgtcgtccagcagcttccgtttctgtcttgctagggtctcgg

SEQ ID NO: 186407 - DNA, 100 bp, Homo sapiens
  chr18:27932658-27932758
  hypo
acccagtcgggtgtgcgcggcctcggggcgacactgacatgccagcccccggtcaccatggccccctccagactttgggtactgacgagcatgggaggga

SEQ ID NO: 186408 - DNA, 20 bp, Homo sapiens
  chr18:28563773-28563793
  hypo
acataaccatcctggctaac

SEQ ID NO: 186409 - DNA, 30 bp, Homo sapiens
  chr18:28692590-28692620
  hypo
ttctctcagtttcaacgaatcttagactgc

SEQ ID NO: 186410 - DNA, 151 bp, Homo sapiens; identical to SEQ ID NO: 31308
  chr18:28934935-28935086
  hypo

SEQ ID NO: 186411 - DNA, 121 bp, Homo sapiens; identical to SEQ ID NO: 94742
  chr18:29026531-29026652
  hypo

SEQ ID NO: 186412 - DNA, 23 bp, Homo sapiens
  chr18:29032473-29032496
  hypo
ccgtctcaaaaaaaaaaaaaaaa

SEQ ID NO: 186413 - DNA, 31 bp, Homo sapiens; identical to SEQ ID NO: 31309
  chr18:29114802-29114833
  hypo

SEQ ID NO: 186414 - DNA, 173 bp, Homo sapiens
  chr18:29199776-29199949
  hypo
cttcatcatcacaaaacgttctgttggacactattaaaagtgagtattgatagaaagggcgagtggaaggcagaggaaggaccttccaaggaaactgcagatatgtgtgaaaagccaaacccaaaagccaaggttggagagagagagagcagggactccggcacatcggggat

SEQ ID NO: 186415 - DNA, 44 bp, Homo sapiens
  chr18:29200380-29200424
  hypo
gattacaggcgtcagccactgtgcccaggcgacaaatttcaatt

SEQ ID NO: 186416 - DNA, 18 bp, Homo sapiens
  chr18:29248668-29248686
  hypo
aaagttgtaatctggccg

SEQ ID NO: 186417 - DNA, 37 bp, Homo sapiens; identical to SEQ ID NO: 11704
  chr18:29265159-29265196
  hypo

SEQ ID NO: 186418 - DNA, 46 bp, Homo sapiens; identical to SEQ ID NO: 31312
  chr18:29269412-29269458
  hypo

SEQ ID NO: 186419 - DNA, 55 bp, Homo sapiens; identical to SEQ ID NO: 31313
  chr18:29293794-29293849
  hypo

SEQ ID NO: 186420 - DNA, 100 bp, Homo sapiens; identical to SEQ ID NO: 94750
  chr18:29325110-29325210
  hypo

SEQ ID NO: 186421 - DNA, 62 bp, Homo sapiens; identical to SEQ ID NO: 94751
  chr18:29366853-29366915
  hypo

SEQ ID NO: 186422 - DNA, 31 bp, Homo sapiens; identical to SEQ ID NO: 94752
  chr18:29391614-29391645
  hypo

SEQ ID NO: 186423 - DNA, 40 bp, Homo sapiens
  chr18:29520729-29520769
  hypo
gattacaagcgtgagccaccgcgcccggccgaaaattttt

SEQ ID NO: 186424 - DNA, 46 bp, Homo sapiens; identical to SEQ ID NO: 31314
  chr18:29521105-29521151
  hypo

SEQ ID NO: 186425 - DNA, 22 bp, Homo sapiens
  chr18:29549642-29549664
  hypo
atgaatatttttgggccgggcg

SEQ ID NO: 186426 - DNA, 30 bp, Homo sapiens
  chr18:29558471-29558501
  hypo
ctgtgtcgccccccacgacgtttcttacct

SEQ ID NO: 186427 - DNA, 31 bp, Homo sapiens; identical to SEQ ID NO: 94756
  chr18:29593107-29593138
  hypo

SEQ ID NO: 186428 - DNA, 171 bp, Homo sapiens; identical to SEQ ID NO: 54993
  chr18:29598281-29598452
  hypo

SEQ ID NO: 186429 - DNA, 52 bp, Homo sapiens; identical to SEQ ID NO: 129886
  chr18:29598682-29598734
  hypo

SEQ ID NO: 186430 - DNA, 158 bp, Homo sapiens; identical to SEQ ID NO: 94759
  chr18:29610272-29610430
  hypo

SEQ ID NO: 186431 - DNA, 20 bp, Homo sapiens
  chr18:29668748-29668768
  hypo
caccacgcctggtcttgact

SEQ ID NO: 186432 - DNA, 81 bp, Homo sapiens
  chr18:29670903-29670984
  hypo
gtggatcccatcttatcgatttatcctttttttgttcttctttttttttgagagtctcactctgtcgccagggctggagtg

SEQ ID NO: 186433 - DNA, 20 bp, Homo sapiens
  chr18:29864726-29864746
  hypo
ttttttgagacagtctcgct

SEQ ID NO: 186434 - DNA, 1426 bp, Homo sapiens; identical to SEQ ID NO: 129891
  chr18:30050220-30051646
  hypo

SEQ ID NO: 186435 - DNA, 30 bp, Homo sapiens; identical to SEQ ID NO: 94764
  chr18:30092956-30092986
  hypo

SEQ ID NO: 186436 - DNA, 1930 bp, Homo sapiens; identical to SEQ ID NO: 129892
  chr18:30349740-30351670
  hypo

SEQ ID NO: 186437 - DNA, 1613 bp, Homo sapiens; identical to SEQ ID NO: 129898
  chr18:31802046-31803659
  hypo

SEQ ID NO: 186438 - DNA, 178 bp, Homo sapiens; identical to SEQ ID NO: 55008
  chr18:31803673-31803851
  hypo

SEQ ID NO: 186439 - DNA, 27 bp, Homo sapiens
  chr18:31998645-31998672
  hypo
ggagtgagccaccgctcccggcctctt

SEQ ID NO: 186440 - DNA, 1865 bp, Homo sapiens; identical to SEQ ID NO: 11724
  chr18:32556604-32558469
  hypo

SEQ ID NO: 186441 - DNA, 73 bp, Homo sapiens; identical to SEQ ID NO: 94770
  chr18:32702564-32702637
  hypo

SEQ ID NO: 186442 - DNA, 44 bp, Homo sapiens; identical to SEQ ID NO: 94771
  chr18:32957797-32957841
  hypo

SEQ ID NO: 186443 - DNA, 20 bp, Homo sapiens
  chr18:32971688-32971708
  hypo
ttctgtttttttgagacgga

SEQ ID NO: 186444 - DNA, 81 bp, Homo sapiens
  chr18:32989493-32989574
  hypo
cactaaacttcatcgcgcacacaaccaggcactgcaggattttgaaagggtgctgaaggatagatacgggctgattcccaa

SEQ ID NO: 186445 - DNA, 128 bp, Homo sapiens
  chr18:32991119-32991247
  hypo
gtggagggtcatgcgcggtgaggttttcagaaagctcgactgggagggaggagaaatggatcagaaagggatttggatggttggaatgaccggaattatctgattactaagcgcgtgcgctctctctc

SEQ ID NO: 186446 - DNA, 31 bp, Homo sapiens; identical to SEQ ID NO: 94773
  chr18:33036599-33036630
  hypo

SEQ ID NO: 186447 - DNA, 119 bp, Homo sapiens; identical to SEQ ID NO: 94774
  chr18:33041504-33041623
  hypo

SEQ ID NO: 186448 - DNA, 79 bp, Homo sapiens; identical to SEQ ID NO: 55020
  chr18:33077969-33078048
  hypo

SEQ ID NO: 186449 - DNA, 92 bp, Homo sapiens
  chr18:33078642-33078734
  hypo
caccacgcccggccggttcttaatctcttaggattcacagactcttgagcatggaatctgtgcttcctatccctgccgcacacccccacctc

SEQ ID NO: 186450 - DNA, 95 bp, Homo sapiens
  chr18:33485571-33485666
  hypo
gttgagattcctccccgaggcgcgcaatccttggctgagctccacagaattcctgggctgtgggaatgaggagtaagcggcggtgttgctctcct

SEQ ID NO: 186451 - DNA, 539 bp, Homo sapiens; identical to SEQ ID NO: 129919
  chr18:33530036-33530575
  hypo

SEQ ID NO: 186452 - DNA, 22 bp, Homo sapiens
  chr18:33548597-33548619
  hypo
ccataatggccccaacgcccaa

SEQ ID NO: 186453 - DNA, 39 bp, Homo sapiens
  chr18:33550614-33550653
  hypo
tagccccccgcctcccgcctttttttttttttttttttt

SEQ ID NO: 186454 - DNA, 18 bp, Homo sapiens
  chr18:33596484-33596502
  hypo
ctgttttgttaaaactgt

SEQ ID NO: 186455 - DNA, 30 bp, Homo sapiens
  chr18:33645327-33645357
  hypo
cagctctagtccattcgtgagaacttttcg

SEQ ID NO: 186456 - DNA, 21 bp, Homo sapiens
  chr18:33653263-33653284
  hypo
ggccttcgatcttagaccagg

SEQ ID NO: 186457 - DNA, 30 bp, Homo sapiens; identical to SEQ ID NO: 94779
  chr18:33682070-33682100
  hypo

SEQ ID NO: 186458 - DNA, 1292 bp, Homo sapiens; identical to SEQ ID NO: 129924
  chr18:33766768-33768060
  hypo

SEQ ID NO: 186459 - DNA, 31 bp, Homo sapiens; identical to SEQ ID NO: 94781
  chr18:33793348-33793379
  hypo

SEQ ID NO: 186460 - DNA, 30 bp, Homo sapiens; identical to SEQ ID NO: 94782
  chr18:34127677-34127707
  hypo

SEQ ID NO: 186461 - DNA, 132 bp, Homo sapiens; identical to SEQ ID NO: 94783
  chr18:34297788-34297920
  hypo

SEQ ID NO: 186462 - DNA, 30 bp, Homo sapiens; identical to SEQ ID NO: 94784
  chr18:34340776-34340806
  hypo

SEQ ID NO: 186463 - DNA, 36 bp, Homo sapiens; identical to SEQ ID NO: 94785
  chr18:34366182-34366218
  hypo

SEQ ID NO: 186464 - DNA, 30 bp, Homo sapiens
  chr18:34842139-34842169
  hypo
aaccactcccagtgccgcgctctcacccgc

SEQ ID NO: 186465 - DNA, 30 bp, Homo sapiens
  chr18:34864580-34864610
  hypo
gctcagcccagtcaacgccacctccctccc

SEQ ID NO: 186466 - DNA, 31 bp, Homo sapiens; identical to SEQ ID NO: 31324
  chr18:34889651-34889682
  hypo

SEQ ID NO: 186467 - DNA, 30 bp, Homo sapiens; identical to SEQ ID NO: 94787
  chr18:34983626-34983656
  hypo

SEQ ID NO: 186468 - DNA, 30 bp, Homo sapiens
  chr18:35126233-35126263
  hypo
atctcctcatctcctcgcccaggtctcaca

SEQ ID NO: 186469 - DNA, 892 bp, Homo sapiens; identical to SEQ ID NO: 129943
  chr18:35144968-35145860
  hypo

SEQ ID NO: 186470 - DNA, 703 bp, Homo sapiens; identical to SEQ ID NO: 11733
  chr18:35146061-35146764
  hypo

SEQ ID NO: 186471 - DNA, 437 bp, Homo sapiens; identical to SEQ ID NO: 31327
  chr18:35249613-35250050
  hypo

SEQ ID NO: 186472 - DNA, 121 bp, Homo sapiens; identical to SEQ ID NO: 31328
  chr18:36298626-36298747
  hypo

SEQ ID NO: 186473 - DNA, 30 bp, Homo sapiens
  chr18:36795824-36795854
  hypo
tttattaatcagagacgttttcaggaggga

SEQ ID NO: 186474 - DNA, 121 bp, Homo sapiens
  chr18:36889350-36889471
  hypo
tctcccacgttgctcgagcctccccgatgggagccaccccctgctccgtggggctggtccaatcaaccgcccaagggctgacaagtgcgggcgcgtggcgcggaactggtgggcagctccg

SEQ ID NO: 186475 - DNA, 121 bp, Homo sapiens; identical to SEQ ID NO: 31330
  chr18:36939329-36939450
  hypo

SEQ ID NO: 186476 - DNA, 18 bp, Homo sapiens
  chr18:37053945-37053963
  hypo
ttaaaaacaaaaaagaaa

SEQ ID NO: 186477 - DNA, 83 bp, Homo sapiens
  chr18:37109504-37109587
  hypo
cgaggaatacacaagcggctggtcgtggagaggaacacaccgacaagtaccggcatgtggcaggccaacgaccggcagaacta

SEQ ID NO: 186478 - DNA, 22 bp, Homo sapiens
  chr18:37154072-37154094
  hypo
cgtctcaaaaaaaaaaaaaaaa

SEQ ID NO: 186479 - DNA, 101 bp, Homo sapiens
  chr18:37198431-37198532
  hypo
gtgggaactggggcaacgcgcagcgctcatgggccagcacaagttccaggtgggtgtgggctcggcgggaccgcaatcagagcgtccggtctgagctgccg

SEQ ID NO: 186480 - DNA, 31 bp, Homo sapiens; identical to SEQ ID NO: 94797
  chr18:37382687-37382718
  hypo

SEQ ID NO: 186481 - DNA, 30 bp, Homo sapiens; identical to SEQ ID NO: 11736
  chr18:38242390-38242420
  hypo

SEQ ID NO: 186482 - DNA, 2283 bp, Homo sapiens; identical to SEQ ID NO: 129952
  chr18:42258978-42261261
  hypo

SEQ ID NO: 186483 - DNA, 30 bp, Homo sapiens
  chr18:42291033-42291063
  hypo
ggatcagtgagcccccgctgctgggggagt

SEQ ID NO: 186484 - DNA, 48 bp, Homo sapiens
  chr18:42295259-42295307
  hypo
ctgggcaggtcacagcggcagtgaggcgtggtacgaagtgatgggctg

SEQ ID NO: 186485 - DNA, 30 bp, Homo sapiens; identical to SEQ ID NO: 55048
  chr18:42399574-42399604
  hypo

SEQ ID NO: 186486 - DNA, 8 bp, Homo sapiens
  chr18:42530942-42530950
  hypo
agttatgg

SEQ ID NO: 186487 - DNA, 68 bp, Homo sapiens; identical to SEQ ID NO: 11740
  chr18:42531891-42531959
  hypo

SEQ ID NO: 186488 - DNA, 30 bp, Homo sapiens; identical to SEQ ID NO: 94803
  chr18:43262596-43262626
  hypo

SEQ ID NO: 186489 - DNA, 140 bp, Homo sapiens; identical to SEQ ID NO: 94804
  chr18:43299704-43299844
  hypo

SEQ ID NO: 186490 - DNA, 193 bp, Homo sapiens; identical to SEQ ID NO: 94805
  chr18:43307166-43307359
  hypo

SEQ ID NO: 186491 - DNA, 30 bp, Homo sapiens; identical to SEQ ID NO: 31337
  chr18:43308141-43308171
  hypo

SEQ ID NO: 186492 - DNA, 30 bp, Homo sapiens; identical to SEQ ID NO: 55050
  chr18:43309895-43309925
  hypo

SEQ ID NO: 186493 - DNA, 30 bp, Homo sapiens; identical to SEQ ID NO: 55051
  chr18:43316950-43316980
  hypo

SEQ ID NO: 186494 - DNA, 30 bp, Homo sapiens; identical to SEQ ID NO: 94809
  chr18:43404530-43404560
  hypo

SEQ ID NO: 186495 - DNA, 67 bp, Homo sapiens
  chr18:43410023-43410090
  hypo
gctccgccatgaaaccgacaagcagctcagctttctctctagttaacagaagcgtgactacgcccac

SEQ ID NO: 186496 - DNA, 30 bp, Homo sapiens; identical to SEQ ID NO: 31338
  chr18:43416003-43416033
  hypo

SEQ ID NO: 186497 - DNA, 30 bp, Homo sapiens
  chr18:43450033-43450063
  hypo
tttcaggtctgcacacgattatgatgcatc

SEQ ID NO: 186498 - DNA, 181 bp, Homo sapiens
  chr18:43450341-43450522
  hypo
gtagatgttttaacacgataaaatgacttccacaagacactgttttccacaggcaccaccgaggcaacacagaatgtattcatggtccacgctagcacacactgccactatgcctaacaaccacagtgaccaggctgctccctagaagccagatctctctaggctgcgatgccgggaatga

SEQ ID NO: 186499 - DNA, 30 bp, Homo sapiens; identical to SEQ ID NO: 94811
  chr18:43467765-43467795
  hypo

SEQ ID NO: 186500 - DNA, 30 bp, Homo sapiens
  chr18:43534630-43534660
  hypo
agttctgggtagagtcgctcactgcgaagc

SEQ ID NO: 186501 - DNA, 26 bp, Homo sapiens
  chr18:43559605-43559631
  hypo
ttgctttttttttagacggagtcttg

SEQ ID NO: 186502 - DNA, 25 bp, Homo sapiens
  chr18:43577160-43577185
  hypo
tttgttttcttggagacggagtctt

SEQ ID NO: 186503 - DNA, 33 bp, Homo sapiens; identical to SEQ ID NO: 94814
  chr18:43599471-43599504
  hypo

SEQ ID NO: 186504 - DNA, 31 bp, Homo sapiens; identical to SEQ ID NO: 31339
  chr18:43605713-43605744
  hypo

SEQ ID NO: 186505 - DNA, 30 bp, Homo sapiens; identical to SEQ ID NO: 94816
  chr18:43606965-43606995
  hypo

SEQ ID NO: 186506 - DNA, 194 bp, Homo sapiens; identical to SEQ ID NO: 94817
  chr18:43613982-43614176
  hypo

SEQ ID NO: 186507 - DNA, 31 bp, Homo sapiens; identical to SEQ ID NO: 31340
  chr18:43627251-43627282
  hypo

SEQ ID NO: 186508 - DNA, 21 bp, Homo sapiens
  chr18:43629543-43629564
  hypo
aatcccataaaaatgaacaac

SEQ ID NO: 186509 - DNA, 31 bp, Homo sapiens; identical to SEQ ID NO: 94820
  chr18:43637142-43637173
  hypo

SEQ ID NO: 186510 - DNA, 18 bp, Homo sapiens
  chr18:43663645-43663663
  hypo
tagaaacttacaaagagc

SEQ ID NO: 186511 - DNA, 30 bp, Homo sapiens; identical to SEQ ID NO: 94822
  chr18:43744272-43744302
  hypo

SEQ ID NO: 186512 - DNA, 121 bp, Homo sapiens; identical to SEQ ID NO: 31342
  chr18:43767224-43767345
  hypo

SEQ ID NO: 186513 - DNA, 104 bp, Homo sapiens; identical to SEQ ID NO: 94824
  chr18:43779975-43780079
  hypo

SEQ ID NO: 186514 - DNA, 98 bp, Homo sapiens
  chr18:43906112-43906210
  hypo
ggtagcaatcgctaacgcatccacctgactagacatgctcttcccttgtctaatcccctctgcagtattttcttttcttctttttttgagatggagtc

SEQ ID NO: 186515 - DNA, 337 bp, Homo sapiens
  chr18:43906509-43906846
  hypo
ttagggtacgaatcacttctaccttcagttaggattagatctggccatgaacacagagacccgagtctcagtagtttaaaaaagacaggagtttatttttcttgcaccgaggttgtgaaggggacacactgtccaccgcagccatgtgtggtgagtgggagccgtctgtgttcttgagggcttcagcggcagaggggagaccgtccaaggagggcttcagcggcagaggggagaccgtccaaggagggcttcagcggcagaggggagaccgtccaaggagggcttcagcggcagaggggagaccgtccaaggagggcttcagcggcagaggggagac

SEQ ID NO: 186516 - DNA, 314 bp, Homo sapiens; identical to SEQ ID NO: 129968
  chr18:43913440-43913754
  hypo

SEQ ID NO: 186517 - DNA, 1137 bp, Homo sapiens; identical to SEQ ID NO: 129969
  chr18:43914155-43915292
  hypo

SEQ ID NO: 186518 - DNA, 34 bp, Homo sapiens; identical to SEQ ID NO: 129970
  chr18:43924113-43924147
  hypo

SEQ ID NO: 186519 - DNA, 45 bp, Homo sapiens; identical to SEQ ID NO: 31345
  chr18:44010835-44010880
  hypo

SEQ ID NO: 186520 - DNA, 30 bp, Homo sapiens
  chr18:44087509-44087539
  hypo
cgctggtcttaactgcgacggtgtaggagg

SEQ ID NO: 186521 - DNA, 30 bp, Homo sapiens; identical to SEQ ID NO: 94829
  chr18:44139320-44139350
  hypo

SEQ ID NO: 186522 - DNA, 85 bp, Homo sapiens; identical to SEQ ID NO: 94830
  chr18:44140396-44140481
  hypo

SEQ ID NO: 186523 - DNA, 30 bp, Homo sapiens
  chr18:44257084-44257114
  hypo
gcacaggctgcttcccggacgatgacagcc

SEQ ID NO: 186524 - DNA, 30 bp, Homo sapiens; identical to SEQ ID NO: 31346
  chr18:44259958-44259988
  hypo

SEQ ID NO: 186525 - DNA, 123 bp, Homo sapiens; identical to SEQ ID NO: 94832
  chr18:44260342-44260465
  hypo

SEQ ID NO: 186526 - DNA, 509 bp, Homo sapiens; identical to SEQ ID NO: 129972
  chr18:44335940-44336449
  hypo

SEQ ID NO: 186527 - DNA, 151 bp, Homo sapiens; identical to SEQ ID NO: 11745
  chr18:44337012-44337163
  hypo

SEQ ID NO: 186528 - DNA, 30 bp, Homo sapiens
  chr18:44422700-44422730
  hypo
gcactcagaggaagtcgtgtgtccttccgc

SEQ ID NO: 186529 - DNA, 27 bp, Homo sapiens
  chr18:44531779-44531806
  hypo
tctgtcagcagtggcccgaccttggct

SEQ ID NO: 186530 - DNA, 30 bp, Homo sapiens; identical to SEQ ID NO: 11748
  chr18:44581294-44581324
  hypo

SEQ ID NO: 186531 - DNA, 45 bp, Homo sapiens; identical to SEQ ID NO: 94837
  chr18:44700790-44700835
  hypo

SEQ ID NO: 186532 - DNA, 105 bp, Homo sapiens; identical to SEQ ID NO: 94838
  chr18:44701014-44701119
  hypo

SEQ ID NO: 186533 - DNA, 500 bp, Homo sapiens; identical to SEQ ID NO: 129984
  chr18:44773466-44773966
  hypo

SEQ ID NO: 186534 - DNA, 581 bp, Homo sapiens; identical to SEQ ID NO: 55069
  chr18:44774201-44774782
  hypo

SEQ ID NO: 186535 - DNA, 30 bp, Homo sapiens
  chr18:45052314-45052344
  hypo
agtcccaaacacaagcgagacaattaacct

SEQ ID NO: 186536 - DNA, 31 bp, Homo sapiens; identical to SEQ ID NO: 31352
  chr18:45058416-45058447
  hypo

SEQ ID NO: 186537 - DNA, 291 bp, Homo sapiens
  chr18:45121092-45121383
  hypo
gatgaggcaagatcgcgaacaaaaaaatgtaatttataaggcgtctgtggactggaatttatcatcggatccgctcgccgccgctcaattgatatgtagttgatttcaaacaacaccccccaggcgcccagagggaacattttttagattttacgcttggatatatctgtttaactcgccatttaccaaaacaacggctgatgacagcacaaaccagtcactctggagaaaacacgcacgcatgctctcatacacacgctctcgcccgcgtgtgcgcgcacacacacatgc

SEQ ID NO: 186538 - DNA, 35 bp, Homo sapiens; identical to SEQ ID NO: 94842
  chr18:45186645-45186680
  hypo

SEQ ID NO: 186539 - DNA, 79 bp, Homo sapiens; identical to SEQ ID NO: 31353
  chr18:45353783-45353862
  hypo

SEQ ID NO: 186540 - DNA, 23 bp, Homo sapiens
  chr18:45439574-45439597
  hypo
agccacagcgcccagcctgttac

SEQ ID NO: 186541 - DNA, 31 bp, Homo sapiens; identical to SEQ ID NO: 31355
  chr18:45443477-45443508
  hypo

SEQ ID NO: 186542 - DNA, 31 bp, Homo sapiens; identical to SEQ ID NO: 94846
  chr18:45536044-45536075
  hypo

SEQ ID NO: 186543 - DNA, 201 bp, Homo sapiens; identical to SEQ ID NO: 94847
  chr18:45554568-45554769
  hypo

SEQ ID NO: 186544 - DNA, 30 bp, Homo sapiens; identical to SEQ ID NO: 94848
  chr18:45556157-45556187
  hypo

SEQ ID NO: 186545 - DNA, 323 bp, Homo sapiens
  chr18:45567033-45567356
  hypo
catcatcttcgtcgtcgtcatcgtcctccttgtcatcctcctcccccccgtcccccccaggctccatgatctccaggcacacgttcacgatgcactggatctccagcatcctggctgcgttgaggatgtgcttgacattgccagcggtgatggtgagcgtggaggtgtaggcgaactccaggatagcagccagagcctcaggctggacaaagtcgatctcatagacgtagggctggctggctagggtgccggctgtgaaaagcttcttgaagtacttgctgcaggcagccaggacggagcggtgggtccgatactcctgctcc

SEQ ID NO: 186546 - DNA, 190 bp, Homo sapiens; identical to SEQ ID NO: 94850
  chr18:45579500-45579690
  hypo

SEQ ID NO: 186547 - DNA, 87 bp, Homo sapiens; identical to SEQ ID NO: 94851
  chr18:45594042-45594129
  hypo

SEQ ID NO: 186548 - DNA, 813 bp, Homo sapiens; identical to SEQ ID NO: 130005
  chr18:45687756-45688569
  hypo

SEQ ID NO: 186549 - DNA, 195 bp, Homo sapiens
  chr18:45820418-45820613
  hypo
tcattagcacgaatgcggtgtttacctccctggggaagggcaagcaagctgctggcgtggttcagcatgcaccttcccctgggagcccggagagcacattagcagaggcttggagaggggactaggcaatcagcaggtgcgtgtgcacatgccagcctggaatttgaaattaatcacctgcggaaggcacaatgg

SEQ ID NO: 186550 - DNA, 31 bp, Homo sapiens; identical to SEQ ID NO: 94853
  chr18:45822972-45823003
  hypo

SEQ ID NO: 186551 - DNA, 31 bp, Homo sapiens; identical to SEQ ID NO: 31357
  chr18:45854284-45854315
  hypo

SEQ ID NO: 186552 - DNA, 31 bp, Homo sapiens; identical to SEQ ID NO: 31358
  chr18:45868799-45868830
  hypo

SEQ ID NO: 186553 - DNA, 155 bp, Homo sapiens; identical to SEQ ID NO: 31359
  chr18:45917049-45917204
  hypo

SEQ ID NO: 186554 - DNA, 2578 bp, Homo sapiens; identical to SEQ ID NO: 55082
  chr18:45934609-45937187
  hypo

SEQ ID NO: 186555 - DNA, 87 bp, Homo sapiens
  chr18:46041294-46041381
  hypo
ctgcagctggcccagcgtggggccgtgcgccagtccaaacggcccagctggagaattctctgcctctgccaccgccgccattggcaa

SEQ ID NO: 186556 - DNA, 2254 bp, Homo sapiens; identical to SEQ ID NO: 130009
  chr18:46065663-46067917
  hypo

SEQ ID NO: 186557 - DNA, 779 bp, Homo sapiens
  chr18:46142030-46142809
  hypo
cccattgagggcagccgcatggggcgctagctcctcatactccgggttgcaggtgccaggggccgggggcttcctgcaggcatctcctgactgcagaggaagcctggacaggagaccccggggcagctgaggtgaggcgccgctgggctaccccatgtgaatctggctgggcagcaaacactagagtagaaggaatggccgagaggacgtgaggacacaagaggcacccgcagagcgagtcctcttccttcctcggggcaccaaaaggctgcaggtttgggatgggtctcaattctgtcccctttctcggcaactattatgggtttggggtgatgaccatgcccaggctccctcatgggaccctgacacagccctgagacactcgggcatgtttgggagagccccgcagagccggccagaggctgctgctgcaggcagagcctggcactcaatcctcctggaaacggctccgtgtagagttcctgcaaaacccggttctccgactgcacctgttaggtgtgccagggagcccttgataagatctgacgtcttccaggaataatgggcgtggccttgtgtattgacttctcctgcaggtggctccttttcagccctctctggacatcggcggttttattcccatccagcggaggccagcttcccggggccaggcacggagcctgcttggggccagctctccggaacctgtgcccagctggggaataagcacatgctcagcacttgaagaattcactgctcactggcgagtcagtatggaa

SEQ ID NO: 186558 - DNA, 136 bp, Homo sapiens
  chr18:46189303-46189439
  hypo
ttggagctgtaatggcggatgctgctgtatacgctttctgtacatgtcttttggtgagcatcgggcacatttctgtgtgtttatacctgggagtgaatttctgggtcatacggcgtgcacacgttcagctcaggtg

SEQ ID NO: 186559 - DNA, 341 bp, Homo sapiens
  chr18:46287801-46288142
  hypo
gatggacaagctgatcgagatcctgaacagcatgcggaacaacagcagcgacgtggacaccaagctcaccaccttcatggaggaggcccagaactccaccaactccgaggagatgctgggcgagatcgtgcgcacaatctaccagaaggctgtgtccgaccgcagcttcgccttcaccgctgccaagctctgcgacaagatggcgctctttatggtggaggggaccaagttccggagcctgctcctcaacatgctgcaggtaactggacgccggccaccaccgccccgcgccccctgcccctctgcgttcggtgagttattcctagcgagaaggctgcgag

SEQ ID NO: 186560 - DNA, 229 bp, Homo sapiens
  chr18:46385807-46386036
  hypo
gagtccatgctgacccggtcgctgctcctagaggtcatcgagctccacgctaacagctggaaccctctgacgccccccatcacgcagtactacaacagaaccatccagaaactgacagcctgacagccagggggcctggcaggcggcccacgggcagctggggccctggtgcacagggccagatggacaggcgggaggacaggggtggccctggcgggagaaagaaatg

SEQ ID NO: 186561 - DNA, 49 bp, Homo sapiens
  chr18:46386611-46386660
  hypo
ctcttttgtttattgtgttttatttttcaaaagtcggttgctttgaagt

SEQ ID NO: 186562 - DNA, 306 bp, Homo sapiens
  chr18:46418912-46419218
  hypo
acagggctgggcgcccgtgaggaggtgggccctgatttggcaggtgtgcatgaggccccctccacacatgcatgctggtgcgggtgccagcacggccacagtggagggtaagaacacacttccaggcggcactgccagccctcgccgtgttccagcttgttgacaccgtgatggcataattacagtttcaatcgcagattaataataagtcatttttgcaaacgaggaggcaggtctgcactggaaagggccccaaagggcctgtcgcctctgctatctgaggctgctggccgccgtttgatgttt

SEQ ID NO: 186563 - DNA, 30 bp, Homo sapiens
  chr18:46419524-46419554
  hypo
ggagggtcccatccccgacagagaccgaag

SEQ ID NO: 186564 - DNA, 30 bp, Homo sapiens; identical to SEQ ID NO: 55086
  chr18:46450960-46450990
  hypo

SEQ ID NO: 186565 - DNA, 30 bp, Homo sapiens; identical to SEQ ID NO: 55087
  chr18:46453447-46453477
  hypo

SEQ ID NO: 186566 - DNA, 30 bp, Homo sapiens; identical to SEQ ID NO: 55088
  chr18:46454032-46454062
  hypo

SEQ ID NO: 186567 - DNA, 31 bp, Homo sapiens; identical to SEQ ID NO: 55089
  chr18:46476386-46476417
  hypo

SEQ ID NO: 186568 - DNA, 140 bp, Homo sapiens
  chr18:46481277-46481417
  hypo
agcgcccggcccagaaatgggatttttaaggtgtctgggaaatgtatcatattttcaccttagaaaggcttagaaagagtaccagactagaggtcagaaaacctgattccaggctggggcgttgccgctcactggttaag

SEQ ID NO: 186569 - DNA, 82 bp, Homo sapiens
  chr18:46486895-46486977
  hypo
cggccccttgtgtgggttttataaggaccagttagaactctgtcaaagaggtaaggctagcgtctgagtttaaaaacaaaca

SEQ ID NO: 186570 - DNA, 186 bp, Homo sapiens; identical to SEQ ID NO: 55092
  chr18:46501831-46502017
  hypo

SEQ ID NO: 186571 - DNA, 584 bp, Homo sapiens; identical to SEQ ID NO: 130020
  chr18:46502486-46503070
  hypo

SEQ ID NO: 186572 - DNA, 30 bp, Homo sapiens
  chr18:46517319-46517349
  hypo
ccaccaggtgctgcgcgaccctgtgaaggt

SEQ ID NO: 186573 - DNA, 85 bp, Homo sapiens
  chr18:46524823-46524908
  hypo
gctgggagggtgtcctggccccgagccagacctcccactgacaacaggcccagtcctgagccccgtggggacacccttccatccc

SEQ ID NO: 186574 - DNA, 256 bp, Homo sapiens
  chr18:46547226-46547482
  hypo
ggacagaggcggccgcgtggcgggcaaggggaaagaggcgctggctctggagctggggaagctgggtccaagcccctgcagtccctgtgtgagctggggcccagagctacctcctgaggcctcagtttcccctctgtttcggagctggtgggagagtgactgagactgggtgaagtgtgtggagagtggcagggggctcgtccagtgtgggtcccggatcccgcatgggaacccttgcagtcgtcagggcctggct

SEQ ID NO: 186575 - DNA, 232 bp, Homo sapiens
  chr18:46578115-46578347
  hypo
gggctgaggttccaggcgctgcccccgtccgtgctggctagtgaaggcctggtcccctccacagactgggttcccaaactgctgtctcccaagtgtgcactactggtcatggggggactgaaagagcgggtagagagagcagcgtgaacacacagccgttattggaaaacctgaacatgcagacagcactgcgcattccccgaaccatagcgccagctcctctcccacagtg

SEQ ID NO: 186576 - DNA, 31 bp, Homo sapiens; identical to SEQ ID NO: 31366
  chr18:46624147-46624178
  hypo

SEQ ID NO: 186577 - DNA, 30 bp, Homo sapiens
  chr18:46666298-46666328
  hypo
tcccaataggcacagcggtaatcctgctgg

SEQ ID NO: 186578 - DNA, 30 bp, Homo sapiens; identical to SEQ ID NO: 94872
  chr18:47009520-47009550
  hypo

SEQ ID NO: 186579 - DNA, 45 bp, Homo sapiens; identical to SEQ ID NO: 94873
  chr18:47012297-47012342
  hypo

SEQ ID NO: 186580 - DNA, 93 bp, Homo sapiens; identical to SEQ ID NO: 31367
  chr18:47019806-47019899
  hypo

SEQ ID NO: 186581 - DNA, 27 bp, Homo sapiens
  chr18:47171180-47171207
  hypo
agagtcttcagccaggcgcagtggctc

SEQ ID NO: 186582 - DNA, 152 bp, Homo sapiens
  chr18:47285296-47285448
  hypo
ccggccagtggtatttgtttttaatcaccacacagagctattgtgaggaccaaataaagaaatggatgtgaaggcgtgctgcgaactgcgccatgtggggtgttttctcattgttcaggtagcattcagcgtgaggccggtgttttcacagc

SEQ ID NO: 186583 - DNA, 30 bp, Homo sapiens
  chr18:47343869-47343899
  hypo
tcgcagtggcaaatccgtactggcctgcag

SEQ ID NO: 186584 - DNA, 31 bp, Homo sapiens; identical to SEQ ID NO: 94877
  chr18:47500682-47500713
  hypo

SEQ ID NO: 186585 - DNA, 1774 bp, Homo sapiens; identical to SEQ ID NO: 130026
  chr18:47719962-47721736
  hypo

SEQ ID NO: 186586 - DNA, 411 bp, Homo sapiens; identical to SEQ ID NO: 55098
  chr18:47792568-47792979
  hypo

SEQ ID NO: 186587 - DNA, 89 bp, Homo sapiens; identical to SEQ ID NO: 31370
  chr18:47812103-47812192
  hypo

SEQ ID NO: 186588 - DNA, 222 bp, Homo sapiens; identical to SEQ ID NO: 130030
  chr18:47813481-47813703
  hypo

SEQ ID NO: 186589 - DNA, 31 bp, Homo sapiens; identical to SEQ ID NO: 94882
  chr18:48135893-48135924
  hypo

SEQ ID NO: 186590 - DNA, 271 bp, Homo sapiens; identical to SEQ ID NO: 31371
  chr18:48190330-48190601
  hypo

SEQ ID NO: 186591 - DNA, 31 bp, Homo sapiens; identical to SEQ ID NO: 94884
  chr18:48256054-48256085
  hypo

SEQ ID NO: 186592 - DNA, 17 bp, Homo sapiens
  chr18:48319514-48319531
  hypo
tgtggcacctggccaca

SEQ ID NO: 186593 - DNA, 29 bp, Homo sapiens
  chr18:48403659-48403688
  hypo
acaattgtatataattatggtcgggcgcg

SEQ ID NO: 186594 - DNA, 21 bp, Homo sapiens
  chr18:48493428-48493449
  hypo
tttttttttttaacagagtct

SEQ ID NO: 186595 - DNA, 200 bp, Homo sapiens
  chr18:48493688-48493888
  hypo
aaagtgatgggattacaggtgtgagccacggcgcccggccagctgctggatattttgaccacctcaagtacgctgagcacgaaatcagtgcatctggcagtacacaggagcttgaaatactttttttaaaagttgttattcaaactgaaggagtttttccctgtggtctgtaatcgccacgtgcccgttctgtatacagc

SEQ ID NO: 186596 - DNA, 229 bp, Homo sapiens; identical to SEQ ID NO: 130036
  chr18:48494203-48494432
  hypo

SEQ ID NO: 186597 - DNA, 30 bp, Homo sapiens
  chr18:48547099-48547129
  hypo
ttgacacatggcaggcgcaggtggattaaa

SEQ ID NO: 186598 - DNA, 30 bp, Homo sapiens
  chr18:48594820-48594850
  hypo
tctgaaaaacataatcgcggtgctatttat

SEQ ID NO: 186599 - DNA, 159 bp, Homo sapiens
  chr18:48661655-48661814
  hypo
aaaaaaaaaaaaaaaaaacttcatagtgaaagacgaccacagcatactcagcttacctggcacacactgctgtccagcccagcaatcagatagtacagtagtcccccttatccacgcacagtttcagttacccgaggtcagcctcggtccaaaaacacc

SEQ ID NO: 186600 - DNA, 30 bp, Homo sapiens
  chr18:48662468-48662498
  hypo
gcccgctctgggactcgtagctgacactgc

SEQ ID NO: 186601 - DNA, 86 bp, Homo sapiens; identical to SEQ ID NO: 31375
  chr18:48664887-48664973
  hypo

SEQ ID NO: 186602 - DNA, 22 bp, Homo sapiens
  chr18:48665502-48665524
  hypo
gggctgcattatagccggactc

SEQ ID NO: 186603 - DNA, 121 bp, Homo sapiens
  chr18:48725412-48725533
  hypo
ttaagaaaatgaatccccgtttcctcctccctagacactcttcccacagtattgctcaggtgatctcacgcagtggctatcttttctagaggttattatttctgtttttgttgagacaaga

SEQ ID NO: 186604 - DNA, 96 bp, Homo sapiens
  chr18:48725592-48725688
  hypo
gacctcctaggctcaagtgatcatcccgcctcagcctccccagtgcatcaccacgcccggcgcgcatcaccacacgtggctaattttgtttatctt

SEQ ID NO: 186605 - DNA, 30 bp, Homo sapiens
  chr18:51676084-51676114
  hypo
tgtttttgggggaagcggttgctcccattt

SEQ ID NO: 186606 - DNA, 22 bp, Homo sapiens
  chr18:51676784-51676806
  hypo
gtgagcaggcattcccgcctga

SEQ ID NO: 186607 - DNA, 30 bp, Homo sapiens
  chr18:51716778-51716808
  hypo
gagtgagcgtgagtgcgacctgtgatggga

SEQ ID NO: 186608 - DNA, 30 bp, Homo sapiens; identical to SEQ ID NO: 94892
  chr18:51793433-51793463
  hypo

SEQ ID NO: 186609 - DNA, 30 bp, Homo sapiens
  chr18:51798807-51798837
  hypo
tttttgggggaaaacgaaagtagtctttca

SEQ ID NO: 186610 - DNA, 20 bp, Homo sapiens
  chr18:51799125-51799145
  hypo
gccaccgtgcccgaccagta

SEQ ID NO: 186611 - DNA, 24 bp, Homo sapiens
  chr18:52525887-52525911
  hypo
ggcgtgagccactgtgcccagcca

SEQ ID NO: 186612 - DNA, 261 bp, Homo sapiens
  chr18:52576693-52576954
  hypo
tgtcatttttctggccgcaaatgtttgaggccagtggcgcctttgccagagttttacttggttccgttgggctcattttgttcactcagcctggcaggctgtgaactactggcctaggtctcatgcctgtcaagggcgagtcaggtgtgaaatggtgaggggtgtgtgagcaagtggtgtggggtccggccactgtgtatagtcaaacatgccgactgctacagtggggcacacagcgccgggtactggcatgggtgctgg

SEQ ID NO: 186613 - DNA, 30 bp, Homo sapiens
  chr18:52831056-52831086
  hypo
atggttagtggacaccgcgtccattttaca

SEQ ID NO: 186614 - DNA, 24 bp, Homo sapiens
  chr18:52930313-52930337
  hypo
actgagtcacggtgcccagccgat

SEQ ID NO: 186615 - DNA, 28 bp, Homo sapiens
  chr18:53037338-53037366
  hypo
aaagagaaggccgggcgcaatggctcat

SEQ ID NO: 186616 - DNA, 21 bp, Homo sapiens
  chr18:53074040-53074061
  hypo
gatagcagtgatgaacaaacc

SEQ ID NO: 186617 - DNA, 195 bp, Homo sapiens
  chr18:53074508-53074703
  hypo
acatattggctaaacaactttcttctgcaaaaatgatgtatacaagggaacatgtaatactatgtcacaattttttaaattaaacaaggaaaacgctgtaaatgagcagacacaacatccgtcaatcaatccttctggagacaaaggagatcaacatgcagccccgtctacagaacaagtcggcatctccagtga

SEQ ID NO: 186618 - DNA, 32 bp, Homo sapiens; identical to SEQ ID NO: 31377
  chr18:53106925-53106957
  hypo

SEQ ID NO: 186619 - DNA, 31 bp, Homo sapiens; identical to SEQ ID NO: 31378
  chr18:53107196-53107227
  hypo

SEQ ID NO: 186620 - DNA, 160 bp, Homo sapiens; identical to SEQ ID NO: 94898
  chr18:53126064-53126224
  hypo

SEQ ID NO: 186621 - DNA, 1860 bp, Homo sapiens; identical to SEQ ID NO: 130050
  chr18:53254613-53256473
  hypo

SEQ ID NO: 186622 - DNA, 399 bp, Homo sapiens; identical to SEQ ID NO: 55115
  chr18:53256997-53257396
  hypo

SEQ ID NO: 186623 - DNA, 41 bp, Homo sapiens; identical to SEQ ID NO: 130052
  chr18:53257760-53257801
  hypo

SEQ ID NO: 186624 - DNA, 33 bp, Homo sapiens; identical to SEQ ID NO: 94902
  chr18:53333159-53333192
  hypo

SEQ ID NO: 186625 - DNA, 19 bp, Homo sapiens
  chr18:53437908-53437927
  hypo
gggtgcggtggctcacgcc

SEQ ID NO: 186626 - DNA, 30 bp, Homo sapiens
  chr18:53969652-53969682
  hypo
cgagctgcctctgtccgccggcagcccact

SEQ ID NO: 186627 - DNA, 30 bp, Homo sapiens
  chr18:54056774-54056804
  hypo
gtatgtcgctgaacccgccaatggccgcag

SEQ ID NO: 186628 - DNA, 22 bp, Homo sapiens
  chr18:54266812-54266834
  hypo
agacagtctcactctgttgccc

SEQ ID NO: 186629 - DNA, 31 bp, Homo sapiens; identical to SEQ ID NO: 31383
  chr18:54306859-54306890
  hypo

SEQ ID NO: 186630 - DNA, 29 bp, Homo sapiens
  chr18:54377546-54377575
  hypo
tgatacacgttcttctaggcttttaaaat

SEQ ID NO: 186631 - DNA, 164 bp, Homo sapiens; identical to SEQ ID NO: 31384
  chr18:54398592-54398756
  hypo

SEQ ID NO: 186632 - DNA, 158 bp, Homo sapiens; identical to SEQ ID NO: 31385
  chr18:54483259-54483417
  hypo

SEQ ID NO: 186633 - DNA, 30 bp, Homo sapiens; identical to SEQ ID NO: 31386
  chr18:54581775-54581805
  hypo

SEQ ID NO: 186634 - DNA, 31 bp, Homo sapiens; identical to SEQ ID NO: 31387
  chr18:54609486-54609517
  hypo

SEQ ID NO: 186635 - DNA, 291 bp, Homo sapiens; identical to SEQ ID NO: 94910
  chr18:54694220-54694511
  hypo

SEQ ID NO: 186636 - DNA, 30 bp, Homo sapiens
  chr18:54716640-54716670
  hypo
taaacacacacgtcccgcattcttttccag

SEQ ID NO: 186637 - DNA, 30 bp, Homo sapiens; identical to SEQ ID NO: 11789
  chr18:54724442-54724472
  hypo

SEQ ID NO: 186638 - DNA, 31 bp, Homo sapiens; identical to SEQ ID NO: 31389
  chr18:55138397-55138428
  hypo

SEQ ID NO: 186639 - DNA, 18 bp, Homo sapiens
  chr18:55279960-55279978
  hypo
cctggcctgtcccacttt

SEQ ID NO: 186640 - DNA, 30 bp, Homo sapiens; identical to SEQ ID NO: 94914
  chr18:55292543-55292573
  hypo

SEQ ID NO: 186641 - DNA, 54 bp, Homo sapiens; identical to SEQ ID NO: 94915
  chr18:55315833-55315887
  hypo

SEQ ID NO: 186642 - DNA, 134 bp, Homo sapiens; identical to SEQ ID NO: 31391
  chr18:55329688-55329822
  hypo

SEQ ID NO: 186643 - DNA, 28 bp, Homo sapiens
  chr18:55366664-55366692
  hypo
ttgttgttaagacaggagtctcggccgg

SEQ ID NO: 186644 - DNA, 31 bp, Homo sapiens; identical to SEQ ID NO: 94918
  chr18:55373610-55373641
  hypo

SEQ ID NO: 186645 - DNA, 30 bp, Homo sapiens
  chr18:55397577-55397607
  hypo
aaggctgcagggaggcgtgtctggagcgct

SEQ ID NO: 186646 - DNA, 111 bp, Homo sapiens
  chr18:55398779-55398890
  hypo
cgatcatctttggcacgtgtggccatgacccacatgaggatttataagcgacctagtcaccgggacttcatgtggttaccttttctgaatggctcccggttctcctctgct

SEQ ID NO: 186647 - DNA, 30 bp, Homo sapiens; identical to SEQ ID NO: 31393
  chr18:55400152-55400182
  hypo

SEQ ID NO: 186648 - DNA, 31 bp, Homo sapiens; identical to SEQ ID NO: 94920
  chr18:55423988-55424019
  hypo

SEQ ID NO: 186649 - DNA, 31 bp, Homo sapiens; identical to SEQ ID NO: 94921
  chr18:55425542-55425573
  hypo

SEQ ID NO: 186650 - DNA, 46 bp, Homo sapiens; identical to SEQ ID NO: 94922
  chr18:55426741-55426787
  hypo

SEQ ID NO: 186651 - DNA, 45 bp, Homo sapiens; identical to SEQ ID NO: 31394
  chr18:55427026-55427071
  hypo

SEQ ID NO: 186652 - DNA, 26 bp, Homo sapiens
  chr18:55445745-55445771
  hypo
gccaccgcgcccggcctataatctca

SEQ ID NO: 186653 - DNA, 188 bp, Homo sapiens; identical to SEQ ID NO: 94925
  chr18:55760788-55760976
  hypo

SEQ ID NO: 186654 - DNA, 24 bp, Homo sapiens
  chr18:55761695-55761719
  hypo
gacgtgagccactgcacccagcca

SEQ ID NO: 186655 - DNA, 181 bp, Homo sapiens; identical to SEQ ID NO: 94927
  chr18:55784749-55784930
  hypo

SEQ ID NO: 186656 - DNA, 34 bp, Homo sapiens
  chr18:55817733-55817767
  hypo
aggcgtgagccactgcacccggccgttttttgat

SEQ ID NO: 186657 - DNA, 40 bp, Homo sapiens; identical to SEQ ID NO: 94928
  chr18:55821160-55821200
  hypo

SEQ ID NO: 186658 - DNA, 30 bp, Homo sapiens
  chr18:55828587-55828617
  hypo
aagcctggatggtgtcgttaacggtgaagt

SEQ ID NO: 186659 - DNA, 30 bp, Homo sapiens
  chr18:55847403-55847433
  hypo
caacgcatccctctccgagccgcggtgcgc

SEQ ID NO: 186660 - DNA, 56 bp, Homo sapiens; identical to SEQ ID NO: 94929
  chr18:55847724-55847780
  hypo

SEQ ID NO: 186661 - DNA, 299 bp, Homo sapiens
  chr18:55850817-55851116
  hypo
gcttttcatgttgcatcttaccgagttgattgagtattcacttcgaagctccatgctgcacgcatgggcctgtaaatagctttttcgtgcacttgtgggtgtcatttcagatcgcttcatcggatttcagttacccaagtttttacttggttcaccgtaagtttgcaaaaaagactttttgttatcctgaacattgcaggtggaaacatgattaattttgaattatttttgtttaacttctaccctctttcctatttacagcctattttgtttattttaacttccgctgttaagacttc

SEQ ID NO: 186662 - DNA, 52 bp, Homo sapiens
  chr18:55852264-55852316
  hypo
tacagtttcatcagcaccaggcgtgcacggcgttagtcatggtccttgctct

SEQ ID NO: 186663 - DNA, 30 bp, Homo sapiens; identical to SEQ ID NO: 94931
  chr18:55866441-55866471
  hypo

SEQ ID NO: 186664 - DNA, 30 bp, Homo sapiens
  chr18:55888837-55888867
  hypo
cagcagaggtgtgtacgggcactgctttaa

SEQ ID NO: 186665 - DNA, 31 bp, Homo sapiens; identical to SEQ ID NO: 94932
  chr18:55894720-55894751
  hypo

SEQ ID NO: 186666 - DNA, 118 bp, Homo sapiens
  chr18:55922277-55922395
  hypo
tacttgtcattattccgtgtggcggaaggtgggaaaataccgtgtgtgctgttaaacatgccaggtccctgcactggttagacagagtctcagtgctgtgctccgttgggaaagaagt

SEQ ID NO: 186667 - DNA, 30 bp, Homo sapiens; identical to SEQ ID NO: 94933
  chr18:55922732-55922762
  hypo

SEQ ID NO: 186668 - DNA, 193 bp, Homo sapiens
  chr18:55923974-55924167
  hypo
aaagccctgtttccacgggagctgacaccacggtaagttcacagcgtgtttacatgtgtttactgatttcaacttcgatgcttactctgcggcgtaaccaaaataaaacctcaccctctgttccgggagtttccctgcttcaggccagtggatctgaatgtttggccgagttctggcacgatgatttgtggtc

SEQ ID NO: 186669 - DNA, 30 bp, Homo sapiens
  chr18:55924659-55924689
  hypo
agatactaacagatgcgtttttaaagcaca

SEQ ID NO: 186670 - DNA, 185 bp, Homo sapiens; identical to SEQ ID NO: 94935
  chr18:55945679-55945864
  hypo

SEQ ID NO: 186671 - DNA, 43 bp, Homo sapiens; identical to SEQ ID NO: 94936
  chr18:55947808-55947851
  hypo

SEQ ID NO: 186672 - DNA, 31 bp, Homo sapiens; identical to SEQ ID NO: 94937
  chr18:55976208-55976239
  hypo

SEQ ID NO: 186673 - DNA, 174 bp, Homo sapiens; identical to SEQ ID NO: 94938
  chr18:55977130-55977304
  hypo

SEQ ID NO: 186674 - DNA, 262 bp, Homo sapiens
  chr18:55992341-55992603
  hypo
tactatgtcaaccacaacaaccggaccactcagtggcacagaccaagcctgatgtgagtaccgtgtgatggtcaggaacacgtgcacgtgcactgcacagctagggacaaatatggcggccctttgggacaaggctgggaaataaatcatatgtctataagagcagatggtggtgtggtacgagattcctctccatttacgtaaagcatgcaagagcagtcagaacttgtatattgtaagcgattgcctttgagtcacatgc

SEQ ID NO: 186675 - DNA, 48 bp, Homo sapiens
  chr18:56002734-56002782
  hypo
gttcatcaactgtcacgggtggtgaggaaccaacggtaatgatccact

SEQ ID NO: 186676 - DNA, 30 bp, Homo sapiens
  chr18:56008414-56008444
  hypo
catccaacttaaaaccgcaggccatagaag

SEQ ID NO: 186677 - DNA, 170 bp, Homo sapiens
  chr18:56008829-56008999
  hypo
tgttgtttgggttcgcgctcctaatcacacacaccgggagatcctcctatgaagctaacttgtttttgcctccaaaatagcttgcagaagatggtgcgtccggatcagccacaaacagtaacaaccatctaatcgagcctcagatccgccggcctcgtagcctcagctcg

SEQ ID NO: 186678 - DNA, 39 bp, Homo sapiens; identical to SEQ ID NO: 94940
  chr18:56036806-56036845
  hypo

SEQ ID NO: 186679 - DNA, 30 bp, Homo sapiens
  chr18:56061273-56061303
  hypo
tcttccacgtgaggacgctgaagccctgtg

SEQ ID NO: 186680 - DNA, 137 bp, Homo sapiens
  chr18:56062043-56062180
  hypo
caagtgctgccaaagcgagcacgtgaatggttagcttttaaaacccaagaagttactttgctcattcttggaatcacacatcaatacctggagggggcggttttaaacacagtttgagcactcgcggcagaggcagc

SEQ ID NO: 186681 - DNA, 116 bp, Homo sapiens; identical to SEQ ID NO: 94941
  chr18:56063562-56063678
  hypo

SEQ ID NO: 186682 - DNA, 31 bp, Homo sapiens; identical to SEQ ID NO: 31396
  chr18:56277829-56277860
  hypo

SEQ ID NO: 186683 - DNA, 30 bp, Homo sapiens; identical to SEQ ID NO: 31397
  chr18:56335503-56335533
  hypo

SEQ ID NO: 186684 - DNA, 142 bp, Homo sapiens
  chr18:56359259-56359401
  hypo
agcgagactccgtctcaaaaaaaaaaaaaaaaaaaaaaaaagagggtggttgtggaatgcgttgggctgactggtttccagtgggagacatccaggaagtttttagctctgtatttacatggtgctacgtgagccaaggacc

SEQ ID NO: 186685 - DNA, 41 bp, Homo sapiens
  chr18:56483561-56483602
  hypo
gaagacaatttttccacggaccaggggtggggaagatgaaa

SEQ ID NO: 186686 - DNA, 181 bp, Homo sapiens
  chr18:56483781-56483962
  hypo
tgccggttcctaacaggccacagaccggtaccttcacagaagaaacaacctgggccccttgcctattgttagtgtgtcccttcccacagtcacaccctcttgtacctgtccctgggaggaaaacacaaggtatcagtaagtttgaaattccccggccgggcgcggtggctcacgcctgtaa

SEQ ID NO: 186687 - DNA, 30 bp, Homo sapiens
  chr18:56529850-56529880
  hypo
acgattatacaccttcgtgacctttagcgg

SEQ ID NO: 186688 - DNA, 62 bp, Homo sapiens
  chr18:56814248-56814310
  hypo
gcagtcctcaggcatcgccagctgatcctagtgcacgctgatgcttgcgctgctgctgtaaa

SEQ ID NO: 186689 - DNA, 44 bp, Homo sapiens; identical to SEQ ID NO: 31399
  chr18:56815805-56815849
  hypo

SEQ ID NO: 186690 - DNA, 420 bp, Homo sapiens; identical to SEQ ID NO: 130085
  chr18:56887906-56888326
  hypo

SEQ ID NO: 186691 - DNA, 271 bp, Homo sapiens; identical to SEQ ID NO: 130086
  chr18:56888384-56888655
  hypo

SEQ ID NO: 186692 - DNA, 51 bp, Homo sapiens; identical to SEQ ID NO: 55143
  chr18:56888686-56888737
  hypo

SEQ ID NO: 186693 - DNA, 881 bp, Homo sapiens; identical to SEQ ID NO: 130095
  chr18:56936004-56936885
  hypo

SEQ ID NO: 186694 - DNA, 30 bp, Homo sapiens
  chr18:57165267-57165297
  hypo
cactggtgattctcccgagaggagatgcca

SEQ ID NO: 186695 - DNA, 527 bp, Homo sapiens; identical to SEQ ID NO: 130104
  chr18:57363522-57364049
  hypo

SEQ ID NO: 186696 - DNA, 562 bp, Homo sapiens; identical to SEQ ID NO: 130105
  chr18:57364448-57365010
  hypo

SEQ ID NO: 186697 - DNA, 30 bp, Homo sapiens
  chr18:57677787-57677817
  hypo
ccctgccggagaggccggagacacgcgaga

SEQ ID NO: 186698 - DNA, 191 bp, Homo sapiens
  chr18:57684683-57684874
  hypo
tgggtaatagtcttccgtaaatcgcgcttccccctccggcactccggtgactgctgagagagacgccgagccagcaaataagaatgctccctggtggatttgttggtaaataagacatctcgcgtcgggggcagctcgccggggcgagggcgaggacagcaggaggtgaaccgcgtcgctggccgccgcct

SEQ ID NO: 186699 - DNA, 30 bp, Homo sapiens
  chr18:58014943-58014973
  hypo
ttgctcagtatcacacggaaaatatatgac

SEQ ID NO: 186700 - DNA, 22 bp, Homo sapiens
  chr18:58371075-58371097
  hypo
gggcgcggtggctcacgcctgt

SEQ ID NO: 186701 - DNA, 713 bp, Homo sapiens; identical to SEQ ID NO: 130110
  chr18:59000630-59001343
  hypo

SEQ ID NO: 186702 - DNA, 31 bp, Homo sapiens; identical to SEQ ID NO: 94953
  chr18:59482707-59482738
  hypo

SEQ ID NO: 186703 - DNA, 499 bp, Homo sapiens; identical to SEQ ID NO: 31405
  chr18:59483203-59483702
  hypo

SEQ ID NO: 186704 - DNA, 30 bp, Homo sapiens
  chr18:59529841-59529871
  hypo
ggagggtggcacccacggagggcatagaag

SEQ ID NO: 186705 - DNA, 203 bp, Homo sapiens; identical to SEQ ID NO: 94955
  chr18:59533472-59533675
  hypo

SEQ ID NO: 186706 - DNA, 30 bp, Homo sapiens
  chr18:59588539-59588569
  hypo
ctgttcccgggataccgggcaggtgagcac

SEQ ID NO: 186707 - DNA, 36 bp, Homo sapiens
  chr18:59589238-59589274
  hypo
gcaggagggttgcaccgcagcgggtgagcaagcaaa

SEQ ID NO: 186708 - DNA, 30 bp, Homo sapiens; identical to SEQ ID NO: 94956
  chr18:59728670-59728700
  hypo

SEQ ID NO: 186709 - DNA, 209 bp, Homo sapiens
  chr18:59728759-59728968
  hypo
aaaaaaaaaaaatgcaataaaatagtgaggacaaaagggcaacattccattcccgtgaataaaaagcatggaatggctgaaatcgctaattatactattaacacaaaggagtttaggaataaaattcgtcatgaaggggaaccagtgcaggagcacaattccaataaccccggcacctgtgaagggagctctgccggtcagtttataat

SEQ ID NO: 186710 - DNA, 84 bp, Homo sapiens
  chr18:59834318-59834402
  hypo
ttatttagtgtatctcttccactagaatgtaagctccttaagaacacagactgacacctcgttctctcccgtatgccttgtcta

SEQ ID NO: 186711 - DNA, 30 bp, Homo sapiens
  chr18:59874030-59874060
  hypo
accaccccctctccccgccccgcagcttct

SEQ ID NO: 186712 - DNA, 40 bp, Homo sapiens; identical to SEQ ID NO: 31406
  chr18:59975662-59975702
  hypo

SEQ ID NO: 186713 - DNA, 87 bp, Homo sapiens; identical to SEQ ID NO: 94958
  chr18:59987231-59987318
  hypo

SEQ ID NO: 186714 - DNA, 40 bp, Homo sapiens; identical to SEQ ID NO: 55167
  chr18:59992690-59992730
  hypo

SEQ ID NO: 186715 - DNA, 165 bp, Homo sapiens; identical to SEQ ID NO: 94960
  chr18:60004627-60004792
  hypo

SEQ ID NO: 186716 - DNA, 31 bp, Homo sapiens; identical to SEQ ID NO: 31408
  chr18:60010358-60010389
  hypo

SEQ ID NO: 186717 - DNA, 31 bp, Homo sapiens; identical to SEQ ID NO: 94962
  chr18:60010760-60010791
  hypo

SEQ ID NO: 186718 - DNA, 189 bp, Homo sapiens; identical to SEQ ID NO: 94963
  chr18:60077429-60077618
  hypo

SEQ ID NO: 186719 - DNA, 30 bp, Homo sapiens
  chr18:60109451-60109481
  hypo
catcgagcatggcatcgtcaccaactggga

SEQ ID NO: 186720 - DNA, 121 bp, Homo sapiens; identical to SEQ ID NO: 31409
  chr18:60110133-60110254
  hypo

SEQ ID NO: 186721 - DNA, 42 bp, Homo sapiens
  chr18:60110313-60110355
  hypo
ggagtatgacgagtccagcccctccatcgtccaccacaaatg

SEQ ID NO: 186722 - DNA, 20 bp, Homo sapiens
  chr18:60111509-60111529
  hypo
acaaggtcaagagatcgaga

SEQ ID NO: 186723 - DNA, 181 bp, Homo sapiens
  chr18:60111708-60111889
  hypo
gagcgagactccgtctcaaaaaaaaaaaaagtgttaattgaatgcagaccccagggagaagcagcttctggggcatacacgttaagtgacaaaatggcaaagtatgatgctgcgggggacacacgccaccagagaaaggaaaaagcctcagatgggcaggcatgtaactccctaaacacac

SEQ ID NO: 186724 - DNA, 165 bp, Homo sapiens; identical to SEQ ID NO: 31410
  chr18:60117013-60117178
  hypo

SEQ ID NO: 186725 - DNA, 194 bp, Homo sapiens; identical to SEQ ID NO: 94966
  chr18:60120641-60120835
  hypo

SEQ ID NO: 186726 - DNA, 32 bp, Homo sapiens; identical to SEQ ID NO: 31412
  chr18:60127357-60127389
  hypo

SEQ ID NO: 186727 - DNA, 31 bp, Homo sapiens; identical to SEQ ID NO: 94968
  chr18:60129833-60129864
  hypo

SEQ ID NO: 186728 - DNA, 158 bp, Homo sapiens; identical to SEQ ID NO: 94969
  chr18:60154517-60154675
  hypo

SEQ ID NO: 186729 - DNA, 30 bp, Homo sapiens; identical to SEQ ID NO: 94970
  chr18:60186063-60186093
  hypo

SEQ ID NO: 186730 - DNA, 501 bp, Homo sapiens; identical to SEQ ID NO: 55169
  chr18:60189546-60190047
  hypo

SEQ ID NO: 186731 - DNA, 1612 bp, Homo sapiens; identical to SEQ ID NO: 55170
  chr18:60190084-60191696
  hypo

SEQ ID NO: 186732 - DNA, 96 bp, Homo sapiens; identical to SEQ ID NO: 55171
  chr18:60191978-60192074
  hypo

SEQ ID NO: 186733 - DNA, 31 bp, Homo sapiens; identical to SEQ ID NO: 55172
  chr18:60193831-60193862
  hypo

SEQ ID NO: 186734 - DNA, 98 bp, Homo sapiens; identical to SEQ ID NO: 55173
  chr18:60194121-60194219
  hypo

SEQ ID NO: 186735 - DNA, 147 bp, Homo sapiens; identical to SEQ ID NO: 94976
  chr18:60210293-60210440
  hypo

SEQ ID NO: 186736 - DNA, 31 bp, Homo sapiens; identical to SEQ ID NO: 94977
  chr18:60210719-60210750
  hypo

SEQ ID NO: 186737 - DNA, 84 bp, Homo sapiens; identical to SEQ ID NO: 31416
  chr18:60216458-60216542
  hypo

SEQ ID NO: 186738 - DNA, 166 bp, Homo sapiens; identical to SEQ ID NO: 94979
  chr18:60217645-60217811
  hypo

SEQ ID NO: 186739 - DNA, 88 bp, Homo sapiens; identical to SEQ ID NO: 94980
  chr18:60229134-60229222
  hypo

SEQ ID NO: 186740 - DNA, 27 bp, Homo sapiens
  chr18:60229521-60229548
  hypo
accgtgcccagccgtcccatgtctttt

SEQ ID NO: 186741 - DNA, 137 bp, Homo sapiens; identical to SEQ ID NO: 31418
  chr18:60234751-60234888
  hypo

SEQ ID NO: 186742 - DNA, 35 bp, Homo sapiens; identical to SEQ ID NO: 94983
  chr18:60242134-60242169
  hypo

SEQ ID NO: 186743 - DNA, 30 bp, Homo sapiens
  chr18:60242715-60242745
  hypo
caattgtggtgtaagcggacactatgcaca

SEQ ID NO: 186744 - DNA, 30 bp, Homo sapiens
  chr18:60253214-60253244
  hypo
ctttcgtgggtatgtcggtgtgaggtgtag

SEQ ID NO: 186745 - DNA, 31 bp, Homo sapiens; identical to SEQ ID NO: 94984
  chr18:60254709-60254740
  hypo

SEQ ID NO: 186746 - DNA, 51 bp, Homo sapiens; identical to SEQ ID NO: 130124
  chr18:60263492-60263543
  hypo

SEQ ID NO: 186747 - DNA, 540 bp, Homo sapiens; identical to SEQ ID NO: 130125
  chr18:60263660-60264200
  hypo

SEQ ID NO: 186748 - DNA, 71 bp, Homo sapiens; identical to SEQ ID NO: 94986
  chr18:60273153-60273224
  hypo

SEQ ID NO: 186749 - DNA, 30 bp, Homo sapiens
  chr18:60287257-60287287
  hypo
gcacccacaaagattcggctggggcatacc

SEQ ID NO: 186750 - DNA, 19 bp, Homo sapiens
  chr18:60346046-60346065
  hypo
agtccggcctaaagtgata

SEQ ID NO: 186751 - DNA, 91 bp, Homo sapiens
  chr18:60377412-60377503
  hypo
aaaaaaaagttcaataagtacttgttgaatgaatgtcccaggtaatttacattattagggtattggggtgggtttacgccgcctgtatttc

SEQ ID NO: 186752 - DNA, 1436 bp, Homo sapiens; identical to SEQ ID NO: 130127
  chr18:60382938-60384374
  hypo

SEQ ID NO: 186753 - DNA, 29 bp, Homo sapiens
  chr18:60415770-60415799
  hypo
gccccgcccaaattcggaatagttatatt

SEQ ID NO: 186754 - DNA, 30 bp, Homo sapiens
  chr18:60425234-60425264
  hypo
taaataaaagctcgtcggttatagtgtggt

SEQ ID NO: 186755 - DNA, 81 bp, Homo sapiens
  chr18:60430702-60430783
  hypo
gtgcagcaagtcatgcgaacacctcattcagccttttgcagcctgtactgaactgctgtcgctcatcgcacccttgttttg

SEQ ID NO: 186756 - DNA, 27 bp, Homo sapiens
  chr18:60476063-60476090
  hypo
ggcgtgagccaccgtgcctggcctgga

SEQ ID NO: 186757 - DNA, 29 bp, Homo sapiens
  chr18:60476904-60476933
  hypo
agcctggcgacagagcaagactccatctc

SEQ ID NO: 186758 - DNA, 187 bp, Homo sapiens; identical to SEQ ID NO: 94992
  chr18:60523277-60523464
  hypo

SEQ ID NO: 186759 - DNA, 34 bp, Homo sapiens; identical to SEQ ID NO: 94993
  chr18:60534963-60534997
  hypo

SEQ ID NO: 186760 - DNA, 38 bp, Homo sapiens; identical to SEQ ID NO: 94994
  chr18:60549763-60549801
  hypo

SEQ ID NO: 186761 - DNA, 170 bp, Homo sapiens; identical to SEQ ID NO: 94995
  chr18:60609800-60609970
  hypo

SEQ ID NO: 186762 - DNA, 98 bp, Homo sapiens; identical to SEQ ID NO: 94996
  chr18:60614283-60614381
  hypo

SEQ ID NO: 186763 - DNA, 203 bp, Homo sapiens; identical to SEQ ID NO: 94997
  chr18:60645389-60645592
  hypo

SEQ ID NO: 186764 - DNA, 211 bp, Homo sapiens; identical to SEQ ID NO: 94998
  chr18:60645978-60646189
  hypo

SEQ ID NO: 186765 - DNA, 30 bp, Homo sapiens
  chr18:60648507-60648537
  hypo
acagacagggacctccgccttcacctcgcc

SEQ ID NO: 186766 - DNA, 44 bp, Homo sapiens; identical to SEQ ID NO: 94999
  chr18:60654358-60654402
  hypo

SEQ ID NO: 186767 - DNA, 30 bp, Homo sapiens; identical to SEQ ID NO: 95000
  chr18:60660313-60660343
  hypo

SEQ ID NO: 186768 - DNA, 30 bp, Homo sapiens; identical to SEQ ID NO: 95001
  chr18:60660703-60660733
  hypo

SEQ ID NO: 186769 - DNA, 31 bp, Homo sapiens
  chr18:60675741-60675772
  hypo
caccctgatcacagaacgcttatcatagctg

SEQ ID NO: 186770 - DNA, 31 bp, Homo sapiens; identical to SEQ ID NO: 95002
  chr18:60740620-60740651
  hypo

SEQ ID NO: 186771 - DNA, 227 bp, Homo sapiens; identical to SEQ ID NO: 95003
  chr18:60813470-60813697
  hypo

SEQ ID NO: 186772 - DNA, 192 bp, Homo sapiens; identical to SEQ ID NO: 95004
  chr18:60878882-60879074
  hypo

SEQ ID NO: 186773 - DNA, 89 bp, Homo sapiens
  chr18:60935228-60935317
  hypo
ccagctaatcagcggcgatgcctttattttctctaacattcctgcattccttttgcatctcttttcacgcatggcggaagccactagaa

SEQ ID NO: 186774 - DNA, 112 bp, Homo sapiens; identical to SEQ ID NO: 95005
  chr18:60959764-60959876
  hypo

SEQ ID NO: 186775 - DNA, 166 bp, Homo sapiens; identical to SEQ ID NO: 95006
  chr18:60973500-60973666
  hypo

SEQ ID NO: 186776 - DNA, 30 bp, Homo sapiens
  chr18:60977626-60977656
  hypo
gaaagaccctctccccgtatcgcctgcctg

SEQ ID NO: 186777 - DNA, 170 bp, Homo sapiens
  chr18:60992576-60992746
  hypo
aaaataccacaaattaggtagcgtaaaacaacagaaatttattctctcacagctctgtgggctggaagtcaaaaagcaaggcgaaagcaggcccacgctttctctgaagctcgggtacagtctgttcttgcctctccctagcttctggtggtggccggcaatccttaatg

SEQ ID NO: 186778 - DNA, 53 bp, Homo sapiens; identical to SEQ ID NO: 95008
  chr18:61144211-61144264
  hypo

SEQ ID NO: 186779 - DNA, 30 bp, Homo sapiens
  chr18:61144575-61144605
  hypo
tgcaaccgtgattcacggaggagaaaatac

SEQ ID NO: 186780 - DNA, 31 bp, Homo sapiens; identical to SEQ ID NO: 95009
  chr18:61164471-61164502
  hypo

SEQ ID NO: 186781 - DNA, 31 bp, Homo sapiens; identical to SEQ ID NO: 31427
  chr18:61261736-61261767
  hypo

SEQ ID NO: 186782 - DNA, 40 bp, Homo sapiens; identical to SEQ ID NO: 95011
  chr18:61450037-61450077
  hypo

SEQ ID NO: 186783 - DNA, 30 bp, Homo sapiens; identical to SEQ ID NO: 55182
  chr18:63411688-63411718
  hypo

SEQ ID NO: 186784 - DNA, 30 bp, Homo sapiens; identical to SEQ ID NO: 55183
  chr18:63416927-63416957
  hypo

SEQ ID NO: 186785 - DNA, 526 bp, Homo sapiens; identical to SEQ ID NO: 130142
  chr18:63417369-63417895
  hypo

SEQ ID NO: 186786 - DNA, 30 bp, Homo sapiens; identical to SEQ ID NO: 55186
  chr18:63421750-63421780
  hypo

SEQ ID NO: 186787 - DNA, 112 bp, Homo sapiens; identical to SEQ ID NO: 31429
  chr18:66360548-66360660
  hypo

SEQ ID NO: 186788 - DNA, 482 bp, Homo sapiens; identical to SEQ ID NO: 55188
  chr18:67067488-67067970
  hypo

SEQ ID NO: 186789 - DNA, 118 bp, Homo sapiens; identical to SEQ ID NO: 55189
  chr18:67067995-67068113
  hypo

SEQ ID NO: 186790 - DNA, 783 bp, Homo sapiens; identical to SEQ ID NO: 11831
  chr18:67068592-67069375
  hypo

SEQ ID NO: 186791 - DNA, 43 bp, Homo sapiens; identical to SEQ ID NO: 95020
  chr18:67073949-67073992
  hypo

SEQ ID NO: 186792 - DNA, 30 bp, Homo sapiens
  chr18:67097702-67097732
  hypo
acaaaacgtagaaaacgataaagaagttag

SEQ ID NO: 186793 - DNA, 27 bp, Homo sapiens
  chr18:67941008-67941035
  hypo
tgtctgaggctgggtgcggtggctcat

SEQ ID NO: 186794 - DNA, 150 bp, Homo sapiens; identical to SEQ ID NO: 55192
  chr18:67955796-67955946
  hypo

SEQ ID NO: 186795 - DNA, 550 bp, Homo sapiens; identical to SEQ ID NO: 130151
  chr18:67956669-67957219
  hypo

SEQ ID NO: 186796 - DNA, 21 bp, Homo sapiens
  chr18:67972152-67972173
  hypo
agtttcatggccgagcgcggt

SEQ ID NO: 186797 - DNA, 28 bp, Homo sapiens
  chr18:67980296-67980324
  hypo
tgagccaccacaccgggtccatggattt

SEQ ID NO: 186798 - DNA, 91 bp, Homo sapiens; identical to SEQ ID NO: 95025
  chr18:67985373-67985464
  hypo

SEQ ID NO: 186799 - DNA, 267 bp, Homo sapiens
  chr18:67991028-67991295
  hypo
tgttattgcagttctatggaacgcctttactgtcgtgccaggacacaggctgggacatggcaggcagcggaggagcagtcggagtcagtgctgaaggagtgcacaggtctagctagagtccagctgggaaggatgtggacactggcccacacgttagagtttataccaaaaagcaaggtgccaaaagaacaaaaggtagatgcaggcttgttctttataaacatcatcgggcggggcatggtagctcagcctgtaatcccagcactt

SEQ ID NO: 186800 - DNA, 371 bp, Homo sapiens; identical to SEQ ID NO: 95027
  chr18:67991979-67992350
  hypo

SEQ ID NO: 186801 - DNA, 362 bp, Homo sapiens
  chr18:67992599-67992961
  hypo
tcctttggaaggatcacggagctattgtctggacagctcttctcccatggaagtctctgcggttcctcctcaagtgggagggcgcgctttccccgaggatgagagtcaggtagaccaggacctagttgtcgccccagagatcttcgtggatcagtccgtgaatggcttgttgattggcaccacgggagtcatgttgcagagcccgagagcgggtcacgatgatgtccctccactctcaccattgctacctccaatgcagaataatcaaatccaaaggaacttcagtggactcactggcacagaagcccacgtggctgaaagtatgcgctgtcatttgaattttgatccgaactctgctcctg

SEQ ID NO: 186802 - DNA, 41 bp, Homo sapiens; identical to SEQ ID NO: 31437
  chr18:68042711-68042752
  hypo

SEQ ID NO: 186803 - DNA, 46 bp, Homo sapiens; identical to SEQ ID NO: 31438
  chr18:68053093-68053139
  hypo

SEQ ID NO: 186804 - DNA, 31 bp, Homo sapiens; identical to SEQ ID NO: 95032
  chr18:68059453-68059484
  hypo

SEQ ID NO: 186805 - DNA, 31 bp, Homo sapiens; identical to SEQ ID NO: 95033
  chr18:68088585-68088616
  hypo

SEQ ID NO: 186806 - DNA, 30 bp, Homo sapiens
  chr18:68124858-68124888
  hypo
catttgttaaacgtgcggcactaggtccag

SEQ ID NO: 186807 - DNA, 31 bp, Homo sapiens
  chr18:68180999-68181030
  hypo
cctggctccccccgtccgtctgcaaaatgga

SEQ ID NO: 186808 - DNA, 30 bp, Homo sapiens
  chr18:69341414-69341444
  hypo
cctaccgctgcttcccgttgtgtgacacgg

SEQ ID NO: 186809 - DNA, 30 bp, Homo sapiens
  chr18:70216050-70216080
  hypo
aatgcacccaggctgcgaagatatgtatta

SEQ ID NO: 186810 - DNA, 129 bp, Homo sapiens; identical to SEQ ID NO: 130158
  chr18:70535425-70535554
  hypo

SEQ ID NO: 186811 - DNA, 508 bp, Homo sapiens; identical to SEQ ID NO: 55201
  chr18:70535575-70536083
  hypo

SEQ ID NO: 186812 - DNA, 676 bp, Homo sapiens; identical to SEQ ID NO: 130160
  chr18:70536187-70536863
  hypo

SEQ ID NO: 186813 - DNA, 31 bp, Homo sapiens; identical to SEQ ID NO: 95038
  chr18:71003886-71003917
  hypo

SEQ ID NO: 186814 - DNA, 30 bp, Homo sapiens
  chr18:71479535-71479565
  hypo
ttagagacttggcagcggtaaggcgcagag

SEQ ID NO: 186815 - DNA, 31 bp, Homo sapiens; identical to SEQ ID NO: 95039
  chr18:71745556-71745587
  hypo

SEQ ID NO: 186816 - DNA, 30 bp, Homo sapiens; identical to SEQ ID NO: 95040
  chr18:71822329-71822359
  hypo

SEQ ID NO: 186817 - DNA, 30 bp, Homo sapiens; identical to SEQ ID NO: 95041
  chr18:71825745-71825775
  hypo

SEQ ID NO: 186818 - DNA, 182 bp, Homo sapiens; identical to SEQ ID NO: 31441
  chr18:71844278-71844460
  hypo

SEQ ID NO: 186819 - DNA, 84 bp, Homo sapiens; identical to SEQ ID NO: 95043
  chr18:71847877-71847961
  hypo

SEQ ID NO: 186820 - DNA, 173 bp, Homo sapiens; identical to SEQ ID NO: 95044
  chr18:71867253-71867426
  hypo

SEQ ID NO: 186821 - DNA, 31 bp, Homo sapiens; identical to SEQ ID NO: 95045
  chr18:71872660-71872691
  hypo

SEQ ID NO: 186822 - DNA, 34 bp, Homo sapiens; identical to SEQ ID NO: 95046
  chr18:71874052-71874086
  hypo

SEQ ID NO: 186823 - DNA, 100 bp, Homo sapiens; identical to SEQ ID NO: 31442
  chr18:71879692-71879792
  hypo

SEQ ID NO: 186824 - DNA, 172 bp, Homo sapiens; identical to SEQ ID NO: 95048
  chr18:71889076-71889248
  hypo

SEQ ID NO: 186825 - DNA, 49 bp, Homo sapiens; identical to SEQ ID NO: 95049
  chr18:71904649-71904698
  hypo

SEQ ID NO: 186826 - DNA, 30 bp, Homo sapiens; identical to SEQ ID NO: 130163
  chr18:71958282-71958312
  hypo

SEQ ID NO: 186827 - DNA, 223 bp, Homo sapiens; identical to SEQ ID NO: 130164
  chr18:71958561-71958784
  hypo

SEQ ID NO: 186828 - DNA, 31 bp, Homo sapiens; identical to SEQ ID NO: 95051
  chr18:71982746-71982777
  hypo

SEQ ID NO: 186829 - DNA, 62 bp, Homo sapiens; identical to SEQ ID NO: 95052
  chr18:71983205-71983267
  hypo

SEQ ID NO: 186830 - DNA, 31 bp, Homo sapiens; identical to SEQ ID NO: 95053
  chr18:72035257-72035288
  hypo

SEQ ID NO: 186831 - DNA, 30 bp, Homo sapiens
  chr18:72049072-72049102
  hypo
tcaacatcggctgagcggtgccctcgtcct

SEQ ID NO: 186832 - DNA, 30 bp, Homo sapiens
  chr18:72112029-72112059
  hypo
cggtgcagcaccagccgacaaaacacagtc

SEQ ID NO: 186833 - DNA, 598 bp, Homo sapiens; identical to SEQ ID NO: 130167
  chr18:72123591-72124189
  hypo

SEQ ID NO: 186834 - DNA, 30 bp, Homo sapiens
  chr18:72154865-72154895
  hypo
cgtagccaggcaagccggtattctgtctcc

SEQ ID NO: 186835 - DNA, 30 bp, Homo sapiens
  chr18:72165418-72165448
  hypo
cattgttaggcgattcgttgttgtgtgcac

SEQ ID NO: 186836 - DNA, 31 bp, Homo sapiens; identical to SEQ ID NO: 31446
  chr18:72171141-72171172
  hypo

SEQ ID NO: 186837 - DNA, 31 bp, Homo sapiens; identical to SEQ ID NO: 31447
  chr18:72171538-72171569
  hypo

SEQ ID NO: 186838 - DNA, 30 bp, Homo sapiens
  chr18:72177248-72177278
  hypo
cccaacctctggccccgtggagccctcagc

SEQ ID NO: 186839 - DNA, 461 bp, Homo sapiens
  chr18:72177630-72178091
  hypo
tcccatcaggctcctcggggagagcagcgcttctgtgcccgggagcagcgaaggtcacacaggaggacccgcacctcctcgtgtcggtggctccgctggtataatcaggactcacgtggtgttcctcgtgtcgtggcccttattgcagagggagcagcacaggctttcctggaagctcccctcggtcatgtggggtgactccagagagccccaccttgcgagactggaccagtccaagtggcctggagccacagcggcctggcagtacctggggagggggtgatgacaggtgcacacggaggcccatgtggtctgtctggagaatgccggagatgtgaaatatgtaatcctgagtgtggcttctagaaggaaggttcgcaaagctgaatatccactcgtgctgttcccttctcacaggagattcctgtcaacgtccgattctgcctcgaaggcatggagga

SEQ ID NO: 186840 - DNA, 337 bp, Homo sapiens; identical to SEQ ID NO: 95057
  chr18:72189897-72190234
  hypo

SEQ ID NO: 186841 - DNA, 31 bp, Homo sapiens; identical to SEQ ID NO: 95058
  chr18:72213717-72213748
  hypo

SEQ ID NO: 186842 - DNA, 253 bp, Homo sapiens; identical to SEQ ID NO: 31449
  chr18:72226537-72226790
  hypo

SEQ ID NO: 186843 - DNA, 52 bp, Homo sapiens; identical to SEQ ID NO: 95060
  chr18:72239211-72239263
  hypo

SEQ ID NO: 186844 - DNA, 45 bp, Homo sapiens; identical to SEQ ID NO: 95061
  chr18:72263658-72263703
  hypo

SEQ ID NO: 186845 - DNA, 271 bp, Homo sapiens
  chr18:72335126-72335397
  hypo
gtgtgaatgtgaatccgtgtgtgtctgtatgtctgtgaatatgtgactgcgtgtgtgagtgcgggtgttagtgtgtgtgcatgtgagtgtgtgtgtgcatgagtgtgagactgcgtgtttgagtgcaagtgtgagtgcgtgagggtaagtgcatgtgtgaaactgcattgtgagtgtgagtgcgcgtgtgcgtctgtgactttgggtgtgtgcacatgagggcggcagagcgagagctgcagctcgcttcgtagatactctttaggaggga

SEQ ID NO: 186846 - DNA, 57 bp, Homo sapiens
  chr18:72342002-72342059
  hypo
aaagagcttgagcacgaatggtgatatgtaatgagattatacgtgttgttcattgga

SEQ ID NO: 186847 - DNA, 30 bp, Homo sapiens
  chr18:72342927-72342957
  hypo
gagtgccagtgagccgccttagatagaagc

SEQ ID NO: 186848 - DNA, 63 bp, Homo sapiens; identical to SEQ ID NO: 31450
  chr18:72344371-72344434
  hypo

SEQ ID NO: 186849 - DNA, 307 bp, Homo sapiens; identical to SEQ ID NO: 95065
  chr18:72347357-72347664
  hypo

SEQ ID NO: 186850 - DNA, 137 bp, Homo sapiens
  chr18:72378033-72378170
  hypo
gaaggtgcatggtgacgtggtgcagtgggagcctcagcctgactgctgtgtgcacgccccgcagaagcataggttggagggtgagggcgctctgtgtgccctgtgtgccccgttttcagactcgccattggctacca

SEQ ID NO: 186851 - DNA, 30 bp, Homo sapiens
  chr18:72394805-72394835
  hypo
ccatcagggcgattgcgctttgttgtgtgt

SEQ ID NO: 186852 - DNA, 30 bp, Homo sapiens
  chr18:72457752-72457782
  hypo
ggatgtctgttgtagcgtctaactccagct

SEQ ID NO: 186853 - DNA, 30 bp, Homo sapiens
  chr18:72458083-72458113
  hypo
gtactgagtgctgtgcgagtgtacctaaac

SEQ ID NO: 186854 - DNA, 31 bp, Homo sapiens; identical to SEQ ID NO: 31452
  chr18:72487985-72488016
  hypo

SEQ ID NO: 186855 - DNA, 216 bp, Homo sapiens
  chr18:72543640-72543856
  hypo
accttttggccaatgcgaatgatgctgcctccccatccgtcgatgccacgtgtccccctcacccctgccctgctgtgcatcaccctgagtgtggggacctctccatatacctgatgccacatgccactcccacccctgctgtgtgtcaccgtgtgtggaggggcctccctgtgctcctgacgccctttacctcccaccctccgtgtgctgtggccc

SEQ ID NO: 186856 - DNA, 30 bp, Homo sapiens; identical to SEQ ID NO: 31453
  chr18:72547176-72547206
  hypo

SEQ ID NO: 186857 - DNA, 171 bp, Homo sapiens
  chr18:72568949-72569120
  hypo
ttcaaagaaggcactcgttaattagataaaggctaaagctctcattatttttaaatgatttaagaacgggtaaagatcttacagcgtatactgcagctctaatagttctctgcttactgccttgtaataagagtattaaagacagatgggcaaggccgatttaaaccaatt

SEQ ID NO: 186858 - DNA, 159 bp, Homo sapiens; identical to SEQ ID NO: 95068
  chr18:72604259-72604418
  hypo

SEQ ID NO: 186859 - DNA, 246 bp, Homo sapiens
  chr18:72611941-72612187
  hypo
gcaggtagacggatgcgtgctgtctttgtgttggcattcatttgtttgcgtaaaatcactttctgaaatgtactttaatgtttatgtgccaaatgtttaaatgtccattgaaaccgtgaggctgaaaactgcattattcgtgatggctagtacagtgtatacgtgattagggttggtgaagcaggggcactgctaatagttagatcctctgaggacttctcagaacactcccgagttgagccagtg

SEQ ID NO: 186860 - DNA, 138 bp, Homo sapiens
  chr18:72617314-72617452
  hypo
tgcacaggtttcctgcgggtgacagagaggccagcgcagcgcctgctgttcaggagcgtctcagaggcacacgagagccggttggctgctcgcgcagagagcgcatgtggacacctggacagccgcgtgacttggaag

SEQ ID NO: 186861 - DNA, 31 bp, Homo sapiens; identical to SEQ ID NO: 31454
  chr18:72632026-72632057
  hypo

SEQ ID NO: 186862 - DNA, 115 bp, Homo sapiens; identical to SEQ ID NO: 95072
  chr18:72632538-72632653
  hypo

SEQ ID NO: 186863 - DNA, 29 bp, Homo sapiens
  chr18:72646480-72646509
  hypo
ttagctgggcatggtggctcacgcctata

SEQ ID NO: 186864 - DNA, 28 bp, Homo sapiens
  chr18:72646748-72646776
  hypo
gagactcggtctcaaaaacaaacaaaaa

SEQ ID NO: 186865 - DNA, 225 bp, Homo sapiens; identical to SEQ ID NO: 95075
  chr18:72670001-72670226
  hypo

SEQ ID NO: 186866 - DNA, 33 bp, Homo sapiens
  chr18:72670448-72670481
  hypo
gtttgatgaggagcccgccgtgcacacacctga

SEQ ID NO: 186867 - DNA, 127 bp, Homo sapiens; identical to SEQ ID NO: 31455
  chr18:72741504-72741631
  hypo

SEQ ID NO: 186868 - DNA, 30 bp, Homo sapiens
  chr18:72760021-72760051
  hypo
ttggtattcataactcgttaaccacgtgct

SEQ ID NO: 186869 - DNA, 263 bp, Homo sapiens; identical to SEQ ID NO: 95077
  chr18:72764592-72764855
  hypo

SEQ ID NO: 186870 - DNA, 245 bp, Homo sapiens
  chr18:72777721-72777966
  hypo
cgtggcctccagacgcggagcactgctgcacatcccctgcagcccgatactgtttctcagcatctggcaaatggcccagatgcattctggtgacaataacgtattctatcatggatagcatctagaaatcgtgaagagcaggcatgagaggaaaggagagtggtaccttctttgtttaaatacaagtgccgtttaaaatctcttcctgagagagcatggagaccagctcacgctttgaccagttc

SEQ ID NO: 186871 - DNA, 76 bp, Homo sapiens
  chr18:72778314-72778390
  hypo
cttgatcactcctcccgttagcagtagcccacggccctcggctcggatgctaattcctaaccgtgcgtagtcctgt

SEQ ID NO: 186872 - DNA, 30 bp, Homo sapiens
  chr18:72799730-72799760
  hypo
aatgacgcggcactcgagcactgtctaatt

SEQ ID NO: 186873 - DNA, 31 bp, Homo sapiens; identical to SEQ ID NO: 95078
  chr18:72801127-72801158
  hypo

SEQ ID NO: 186874 - DNA, 167 bp, Homo sapiens
  chr18:72819559-72819726
  hypo
tgacaaagattacctcgtttcaaataaactagctctaattcactccttgggactggaggaaagggctcacctaacctggtatcaagacatctgtgcccgataccggaacacagccaggatctgttagtaggcaacggggtccaccatgaccccgtgtggaccccact

SEQ ID NO: 186875 - DNA, 31 bp, Homo sapiens
  chr18:72823620-72823651
  hypo
agggttgtttcagtgccgatgagaggtttgg

SEQ ID NO: 186876 - DNA, 695 bp, Homo sapiens
  chr18:72844251-72844946
  hypo
cccacgtgggcaccccgcgcacaggcagtgcggcgtcctgctaggtgcacagctttataccacttacaggttgcaagtagcaacgagaaaaatgctagattttacaggaaaataatattcataaatctcccgctgtgaattacagtataactcagagctgtctttgttttgctgctgcgatgaagtcaattctgtttcgggtggaaatgatacacacagagcccaaggtggaagccagtcccctcgcatttggtgaggtttgtagccagtcccagctggagcgcggaacagctgaacccactcgacgccggcaattcctggagttttcttttctcttcttgagagcagagctgcggaggacgtgaggggactttcttgggtgctgtgccctgaggtgaggcccctttatccttttcaccaggcggtattgcctcacaccggttccccagagggaaatggtcccaaaggtacctctcccgggctggccctggggaccgcggctggtcactctttcttcatgctgatgtcgtggaaggggtggtcgtgtgtttcaaacagagagcaagtacacatgctcatattccacacatcttttgatccatccaaactatacggagacatgcaattttgttcatgttttattgtccctagaagagttcattttccccaaaagatccccgcggctcagtggtaga

SEQ ID NO: 186877 - DNA, 319 bp, Homo sapiens; identical to SEQ ID NO: 95079
  chr18:72895945-72896264
  hypo

SEQ ID NO: 186878 - DNA, 166 bp, Homo sapiens
  chr18:72914981-72915147
  hypo
aaaaattgggtagagcgatttttatgaaacattcaacatttcacagtccttttcaaatgaaaaggaaagcaaatcgttactatatttttcctcaacaagaagcagagacataacttgattaataccagatgattattttcatcttggtatccggagtcaatttaat

SEQ ID NO: 186879 - DNA, 30 bp, Homo sapiens
  chr18:72915409-72915439
  hypo
tgcgatacactttcacggtgatataggtaa

SEQ ID NO: 186880 - DNA, 238 bp, Homo sapiens; identical to SEQ ID NO: 55213
  chr18:72921090-72921328
  hypo

SEQ ID NO: 186881 - DNA, 30 bp, Homo sapiens
  chr18:72950322-72950352
  hypo
ctgtagccacctgtgcggggtacgttggaa

SEQ ID NO: 186882 - DNA, 30 bp, Homo sapiens
  chr18:72956163-72956193
  hypo
ggtgacctttgctgtcggtggcccttccac

SEQ ID NO: 186883 - DNA, 296 bp, Homo sapiens
  chr18:72956538-72956834
  hypo
cggctttctccagtgcggttgggccggaaccccgggatggtgagcctttctttgtggtcgttgctctgccaatcttgagtccgtccttgctttttgctggcataaagcgctttgggtatgctgtgttctgcaggctcagtgcagcgttgagcttcagtgccccgtgtttcctgggggatgaggttcccggtgagtctccctgttatgacttgagacagtggataatagttacaaaaggaggccttggtttagtgagagctggttcaggtggctgaaaaacacgaccgtttgaccga

SEQ ID NO: 186884 - DNA, 486 bp, Homo sapiens
  chr18:72960667-72961153
  hypo
tgacatatagatatacgtttacttgcctaattatacttgctgttaacaatacatcatgtgtttgcctgtgcgtccagctttgcgagtgtgatggtttaattaccctctgtggtgtctgcacgctctgctaagtcttgtgtgggggaacggttagaaatagccgcagaggcaaggatttagaagctggtgtgccgtgaagccatagggtcacccaccagcagcagtaccaggcgagccacctccgcgtgggaggaggcccaggtgtctgcttcctaacgcggggcctgagccgggcaccctggggtggagaggcttggatgggagccccagatctgggccactgtggtccctgggctactgggggaaagccaggtccttcaccgccctcctgcctacccggggctctgggctccaggccgtggctgctctctgtcccttgtccctgcggccacccaggccccacctgctacccgggcaggctgctca

SEQ ID NO: 186885 - DNA, 107 bp, Homo sapiens
  chr18:72972082-72972189
  hypo
gggcaggcctggccccggaggggttctttctgtgccccaggccagcctcttagcctgcggcttctcgtgtttccctggccttcagtcactaacgtgtgaattcattt

SEQ ID NO: 186886 - DNA, 31 bp, Homo sapiens; identical to SEQ ID NO: 95082
  chr18:72997866-72997897
  hypo

SEQ ID NO: 186887 - DNA, 35 bp, Homo sapiens
  chr18:73282766-73282801
  hypo
taagctggctgggcgcggtggttcacgcctgtaat

SEQ ID NO: 186888 - DNA, 30 bp, Homo sapiens
  chr18:73349008-73349038
  hypo
gacatgcagcatggacggcgttctgagcag

SEQ ID NO: 186889 - DNA, 30 bp, Homo sapiens
  chr18:73349304-73349334
  hypo
tcgtgcagcaggaatcgacagggaagggtc

SEQ ID NO: 186890 - DNA, 31 bp, Homo sapiens; identical to SEQ ID NO: 31460
  chr18:73424173-73424204
  hypo

SEQ ID NO: 186891 - DNA, 30 bp, Homo sapiens
  chr18:73574178-73574208
  hypo
gacagacccacatcccgacatccagaacct

SEQ ID NO: 186892 - DNA, 30 bp, Homo sapiens
  chr18:73769171-73769201
  hypo
ggtccagcactgacacgagaactttaatac

SEQ ID NO: 186893 - DNA, 30 bp, Homo sapiens
  chr18:73769512-73769542
  hypo
acagagcgggcccctcggcttccagccaat

SEQ ID NO: 186894 - DNA, 30 bp, Homo sapiens
  chr18:74032582-74032612
  hypo
agacatccttaagaacgtgccattcaagtt

SEQ ID NO: 186895 - DNA, 31 bp, Homo sapiens; identical to SEQ ID NO: 31461
  chr18:74058618-74058649
  hypo

SEQ ID NO: 186896 - DNA, 31 bp, Homo sapiens; identical to SEQ ID NO: 95085
  chr18:74060163-74060194
  hypo

SEQ ID NO: 186897 - DNA, 503 bp, Homo sapiens
  chr18:74062228-74062731
  hypo
tggagagcagagagccgggggagtggccacttcagagtggggccaggacagctggggccaccgccttcccggcgcaaggtgggccaggccccacaggtggccccagaattgcaaagccaatggcagcttcctaagtggtcaccgaaacgcactttcagtgtggacccgccggcctgtgtgtattcagcaatcccagccatccaacctgacctcgggctgcaaagacgatcgtggccggagccggctggctctttgcgaaagcggcgggacccggggacagcaggctgcctgcgccgcttccctccgggtggcaggcccactctctgcgggcaccgcgtcctgctcacccgtgttgtggtcgggccgcagagcaggccccttgacggggggatccggagccgcctggtgccggcacagcctcagggagcagcccctaagctgccccgtgacagtcaatcgcccgctttccccccgtgggaagtctgtgccgtgaccagagcctc

SEQ ID NO: 186898 - DNA, 97 bp, Homo sapiens
  chr18:74065276-74065373
  hypo
ctcagaaatccaaaacgtcttgttttgatccactgaggacctccaatcatctcgctgacaggatccacaccctaggtcgctgcggtgatccatgcgg

SEQ ID NO: 186899 - DNA, 30 bp, Homo sapiens
  chr18:74067661-74067691
  hypo
ccctccctttagactcggtaaccctgtcct

SEQ ID NO: 186900 - DNA, 133 bp, Homo sapiens
  chr18:74068649-74068782
  hypo
aaaataaaagtgctgcgatgaatgcagccattcgtggtaaggttttacattgttgggggtggggggcgtcatgatacccagcttccgcacctagcacgacatgggcaaactgcagacacggagaccccgcgcc

SEQ ID NO: 186901 - DNA, 322 bp, Homo sapiens
  chr18:74069253-74069575
  hypo
caacagcattttcaccgcagagtggcgcacccagcgcagagtggcgtccccagcgcagagtggcgtccccagcgcagagtggcgcacccagcgcagagtggcgtacccagcggagagtggcgtacccagcggagagtggcgtacccagcggagagtggcgtacccagcggagagtggtgtacccagcggagagtggcgtacccagcgcagagtggcgtacccaaggctagacgctccggttgggggaaggacgcccagtgctgttcagagttccatttcctgcccagcacatctggaaagccacattcgggaacttatctag

SEQ ID NO: 186902 - DNA, 178 bp, Homo sapiens
  chr18:74073694-74073872
  hypo
gcgctagctctcttccgaggcggaatctacgcattcccacagacgtgtctcctttgccagattcgctcagttcgaatggtgggaagaatggaacaggcacacggccccagggaggagtgcgatggagccagtgaacaatgagggtctcatcatcatacccctccgccaagcctgcttc

SEQ ID NO: 186903 - DNA, 90 bp, Homo sapiens
  chr18:74074286-74074376
  hypo
cagtttccactccagcgcagcggctcgggatgtgaggtgtctgctcaggagttccccggctgttcttccatggagcggccaggtcacagg

SEQ ID NO: 186904 - DNA, 30 bp, Homo sapiens
  chr18:74074970-74075000
  hypo
agagcacggctctcacgtaggtctgtcaga

SEQ ID NO: 186905 - DNA, 30 bp, Homo sapiens
  chr18:74082021-74082051
  hypo
cttgccagtcgtgttcgtaatgcagagaaa

SEQ ID NO: 186906 - DNA, 390 bp, Homo sapiens
  chr18:74082313-74082703
  hypo
gcccacagacggccccgaagggtcaggttccaagtcaaagcatataggattatttacacatctagtgaaaaaaacaaaaagaaggtcatgcttcagtgatgagcatcatggtgcacctttcccagctaccgcatcgaaacccagacatccaattcatcatgagacctacttgtttgggggcgtctgcggaggtggtatgaacttcagaaccccgaggcccatcggactcaaacaccactgtgggaacaaggggtttgttaacagatcagcgtgtgagcttccggacgtgcacattaaatgagtccattacagattaagtacttccacaaaaaaagacaccagcgcctagcctgtggctggaaaataccaatttaccgtaacacttacagt

SEQ ID NO: 186907 - DNA, 34 bp, Homo sapiens
  chr18:74082938-74082972
  hypo
tgacagtttccagcccgatcgggtgcaagctctc

SEQ ID NO: 186908 - DNA, 720 bp, Homo sapiens
  chr18:74083287-74084007
  hypo
agatggcaggccccccgccgcctggtaggggctgaaatctcagtatctccctcgctgcggatggtcaagccactgacagaagagacccctcttcctctgctccccttggggatagctgggcgggagggcgatacctgagtgtgcccgcatgtgggccctgaggtggccgggctggtggaagctctttccgcactcgatgcagacgaactctcctggccgggcctgcgtccggagtgtccctgcggtggcgaggtggtggtggtggcagggccgtggtggggttggcgtggaggtgaggaggcaggagagcgagggggaagcgagaggaaaacatcattagtctgtctaatgtgtcatcatgtgaggctcccttcaggccctggtgacaactgtcagccttcatctcggctctgctgacaggccaggcactctcaggactgcaaggatgcataaattacagcgaattaaaaaccactccctgggacaggaggtgcccgccaggcagcacgtcgggctgtgcagctccgagcaactgcaggctgggcacagccatcacccggctctgtcaagcagcacatccagcaaatcagagtgacaccggcgtgacagagacgaggctcatggaaaataggaagtgagcgggaccagagcccaccgtgacccggccgcgatcctgggagacccacgcagagtgagtgcggccacagggtggccccacct

SEQ ID NO: 186909 - DNA, 30 bp, Homo sapiens
  chr18:74088759-74088789
  hypo
ttaaaactatgagtccggtggatcaagtgg

SEQ ID NO: 186910 - DNA, 214 bp, Homo sapiens
  chr18:74089101-74089315
  hypo
cgcgcctcccacccacgacagcctcctcaggttacaccgtccacccagagcacatgggcggggagaagatgaggatctaagaccacgcctcagggacgccactcctgagtcacacctcaagccaacgtgaatgacgagaccctcgggtgtccgggcctacggcctcatcctaaaaagttcacaagtgctcagcgggctcttcaaagcaggaatg

SEQ ID NO: 186911 - DNA, 1464 bp, Homo sapiens
  chr18:74090915-74092379
  hypo
atgcccctcggccaccggctcctgtttgatggagtgtaggacgggggggcgccccagccacgccgggctgggcctgcaaggccgcgtcgcccctggaccccgcagcacaggtggccagagtcctcagctcctgggctgccttcgaggggggctcgcggggaggtagaggaggagcgcccccttcgccctttgcaggaggtggaccctgaggctgagcactgaatttggctttcagggagtccggggcactgtgcttatttgtgggggcaaagccagcccccgctggggggaccccaaacttctccacaggcttgctattggccgagggctgcgcgccagcccgggcgatgacggtgggcgtaggggtggcgctcctgctgaagcccccgccacccggggcaggcaccggtttggagctagcctcctgcctgggcttggccaggggcccctgtgtggccgcgccatgtggctcctggccgtgacaaggtttggtctgtcgatacccgtcagggccgggcgcccacagagcgcagggacctccggaatggctctccttattcttaggcatgctagcggcttttgtgaccactcccaggggagaagagccacttttggaccccggcatcccccctggcacctgagtgcgggtgaaccgagcaaggagcaaaggctggcattctttgccaccgagggcaggcggggggcccgtgcgtccgctccgggaaaggaaaaccaaattgcttctgatgcttttgtaaccattgggctgaatccacgggggagccacggagttgcagctgacgcggtgccagatgcgtttgtgcatccacaggacctcggggtagtaggtcttgtggctgcagtaaggacacgggtgaacgactaaagccgcctgcagggaggaggccgtctccttattgctggggtcatcccgcgtcgacctcgcacttaaatctagcggcatgaggtctggggccagcgcccgcttccctcccccagagtgttccttgttgtgcaaatcggacagcttttctgcagggtgacccgtctggccctccgctcccgtactggaagggaactccacaccatcaccagggacgggcacctcctgcttggggtgaaatgctggcatctttaagtccatagaaaatctgtgctgctcttgccttctagaagtctctctgctactgttttcaagtatggacacagaagctgcgatccctgccttggactcgccggtgtctctttccgaggcgttatctcccatcttgtgactctggtctccactggagagctcggtcgaagtcacctcttcggaaaagcagcagcggcgcggctgtccccctagaggaggcaaaatatgaaacgggaagttaccatttctcatcagaacacagcaagacacacggtgcgtacagctacagcatgttccaagccatctgtcttcagcgggagaagccaccc

SEQ ID NO: 186912 - DNA, 30 bp, Homo sapiens
  chr18:74093128-74093158
  hypo
ggtgtgggctgtgctcggaggttttaaggc

SEQ ID NO: 186913 - DNA, 155 bp, Homo sapiens
  chr18:74093648-74093803
  hypo
agtgcgcaattcatacgccgtgttaaaggacttgtccatgtaaaaaacgccagcagttaagggctgatcagcagaactggtgcggagatgagacaaaggaagaaaaaactatccaactcctaccggctcctaaaggctaatatttaaataaagtc

SEQ ID NO: 186914 - DNA, 53 bp, Homo sapiens
  chr18:74094278-74094331
  hypo
gaatggtgctcagtacgttcgactcatttctaaatattcgaaaaaggcaacat

SEQ ID NO: 186915 - DNA, 895 bp, Homo sapiens
  chr18:74096592-74097487
  hypo
tggcttttgatgtttcggtggccctgatcctgaaacggaagaactcggctagagaagtgtccggggagggggctccagctccctggttgaggaaatgcctggttccgtggctcccatgccacacagggagaaagtctgcaagaaaaagcacttctgctcctcagtccccaccaatctgacagcccctgggtggcagtgctcaccgggcactttattagaattgaaggaaagagaacggtgctgatttgagcatggcgtggccctgcatagatggctgcctctaaccctgaccgcagtgccgagggcacacaccagagagggaaggctggctcagaaaggcctggcagcggccctgtgcagagggagcaggatctccaacactcaccccatgctctccgggtgcacggaagcacgtgccaggaggaggcagccgggtccgagcagccctagagaaggcgcacgtcgctcccaaccccacgagtgtgcacacgcgtgccacagacggtgactatggctgctctgtcctcggctcaaacacaccaggggctcccgggttcctttctaagcaggaccttcctagatgtgtcttggaaacacaaacatggattaggtcttgggtgacttcactgcgtcccaagctggccctggcctggctggtgccgcacaccgccgacaagcatgtttcacacggggcccagggagtggcagacttgcactgtctgaagtccctgaggcaacatcttcaacacacacaaccgccctcaaaagcacagaaatgcggtgagggcactttgtataaagttactcccctttcacttaaaatattttttattactgtagtaaaatatacataacaaaaaagtctgcagccacgcagccacgctgaggcgctccc

SEQ ID NO: 186916 - DNA, 30 bp, Homo sapiens
  chr18:74099365-74099395
  hypo
gcacaggcccgcacacgctctgccattgac

SEQ ID NO: 186917 - DNA, 31 bp, Homo sapiens; identical to SEQ ID NO: 95094
  chr18:74100531-74100562
  hypo

SEQ ID NO: 186918 - DNA, 30 bp, Homo sapiens
  chr18:74110089-74110119
  hypo
accataaagaagcgtcgctcaggtttggtt

SEQ ID NO: 186919 - DNA, 35 bp, Homo sapiens
  chr18:74113519-74113554
  hypo
ctccgaggccatctccgaaacgccctgcagctgct

SEQ ID NO: 186920 - DNA, 354 bp, Homo sapiens
  chr18:74113766-74114120
  hypo
accaaccacacccccgcgctccatctctccaccaaccacacccccgcgccgcacccctccactactgtttataggctctcaagagggacagggaaaaccagtattgtttgagtgccaactctgcataaacaatttccacagaatgactgcacatgcatgtgcgtgcctatgtgcatgtgtgtacgcgcgtgtgtacacgtttgtgtgtacacgtgcgcgcatgtgtgcacgtgaacgtgaccagtggtctctgcatcccacagggaggggagggcttctctgaaaagaaattgtatatgcacaagccttagccccgcgccttctatttgctgaagacatcgcctcggtcaacac

SEQ ID NO: 186921 - DNA, 31 bp, Homo sapiens; identical to SEQ ID NO: 95097
  chr18:74115004-74115035
  hypo

SEQ ID NO: 186922 - DNA, 30 bp, Homo sapiens; identical to SEQ ID NO: 95098
  chr18:74115420-74115450
  hypo

SEQ ID NO: 186923 - DNA, 30 bp, Homo sapiens; identical to SEQ ID NO: 95099
  chr18:74115900-74115930
  hypo

SEQ ID NO: 186924 - DNA, 64 bp, Homo sapiens; identical to SEQ ID NO: 95100
  chr18:74116223-74116287
  hypo

SEQ ID NO: 186925 - DNA, 31 bp, Homo sapiens; identical to SEQ ID NO: 95101
  chr18:74117535-74117566
  hypo

SEQ ID NO: 186926 - DNA, 118 bp, Homo sapiens; identical to SEQ ID NO: 95102
  chr18:74118863-74118981
  hypo

SEQ ID NO: 186927 - DNA, 61 bp, Homo sapiens; identical to SEQ ID NO: 95103
  chr18:74119405-74119466
  hypo

SEQ ID NO: 186928 - DNA, 30 bp, Homo sapiens; identical to SEQ ID NO: 95104
  chr18:74119937-74119967
  hypo

SEQ ID NO: 186929 - DNA, 486 bp, Homo sapiens
  chr18:74120284-74120770
  hypo
gctggtgtggacagcaagctccgaggggctgcggcgtgcgtctctcctgacagcgacacacttgagaccctccgggagttccagccggggtgaaaccagtcacaagggaaaatagcaaaaattaagaagaagtgcatggctctggtatagctcggaaagtacactgtgaggtttaagggatggtttaaaaggaaccaggaggtgaaaaacgtctaaaggcggaaggtgtcaatgtttgtcatccaactaggaaactgagggcacatggctcccaagactgtgtgagacactggcaccctaacaccaagaagaacatgaccgctaacgacagaaagaggcgtaaaaagaggcctttccaaactgacccacgtgaatgtttgcatagtgacacgtttgtgttcgctcgctaattcacagaaaacaacttccacaaagctgtccttagatttccagtaatgtatcaccctcagtcgacaaacattttcc

SEQ ID NO: 186930 - DNA, 138 bp, Homo sapiens
  chr18:74128213-74128351
  hypo
aggactgccccttttcgtatcgcacaccaggaatgaagcgccctggccttcaccacctttagacaaagctagtgatgctccccaagtctgtgagaatgctgtgatgttcttgggcagagcctacgctgaaatgtcgcc

SEQ ID NO: 186931 - DNA, 30 bp, Homo sapiens
  chr18:74129939-74129969
  hypo
ttcggtaaaaataaacgtcagttgaatatg

SEQ ID NO: 186932 - DNA, 30 bp, Homo sapiens; identical to SEQ ID NO: 95106
  chr18:74130201-74130231
  hypo

SEQ ID NO: 186933 - DNA, 30 bp, Homo sapiens; identical to SEQ ID NO: 95107
  chr18:74130468-74130498
  hypo

SEQ ID NO: 186934 - DNA, 260 bp, Homo sapiens; identical to SEQ ID NO: 31473
  chr18:74133242-74133502
  hypo

SEQ ID NO: 186935 - DNA, 183 bp, Homo sapiens
  chr18:74134218-74134401
  hypo
acgcagaagagcctgcggagagcgggccggtccctcggcactccctgcactgcggcagtaagaagcagaccacggtctccaggggcctgacggatgatgaccatgtactcatacactcaggctatggagcagagctgcacctgcaaacacgtgactgccctaactttccggaagctaaatgta

SEQ ID NO: 186936 - DNA, 187 bp, Homo sapiens
  chr18:74134940-74135127
  hypo
ctctaaatcttaatgcgtctggccacctggagtttgcatggagaccctgggctgtgcacaccgcaggactctcacctggaacactcggagaccccaggattcaagcactctgcagctggcagcacaatctaacagagacccattaaaacggatgtccacaacacaatttacacgcattctttacaag

SEQ ID NO: 186937 - DNA, 162 bp, Homo sapiens
  chr18:74135456-74135618
  hypo
gtgaaaaggttcccccgaaacacacgcaggtgaaaaggcttccccgaaacacacgcaggtgaaaaggctcccccgaaacacacacaggtaaaaaggcttcacccctgaaacacccacacgcaggtgaaagggtccccccgaaacacacgcaggtgaaaaggc

SEQ ID NO: 186938 - DNA, 46 bp, Homo sapiens
  chr18:74136485-74136531
  hypo
tgaaaaggctccccccgaaacacacacgcaggtgaaaaggttcccc

SEQ ID NO: 186939 - DNA, 30 bp, Homo sapiens
  chr18:74137890-74137920
  hypo
cagcgctgctcttcgcggcacagggaattt

SEQ ID NO: 186940 - DNA, 240 bp, Homo sapiens; identical to SEQ ID NO: 95111
  chr18:74141718-74141958
  hypo

SEQ ID NO: 186941 - DNA, 94 bp, Homo sapiens
  chr18:74143479-74143573
  hypo
acctcatgttgcgaccgattccctttgttggaggtggggcccgaggggcggtgtctgggccatggggatgggtcccttacgaatggcttggtgc

SEQ ID NO: 186942 - DNA, 466 bp, Homo sapiens
  chr18:74143893-74144359
  hypo
ccaggtgtgttcaggcggccccgcccaccactgccctggcgggaacaggacagggtctgctattctaagcagccaccaatgccagggccaatggcaaagttcccgtggatgagacgctttggagatagtctctgcagatgtcaccagttgaacaaggaaggactccttaaggaaaggacaggctttgggatctatctagagatcctcaaaatgtggcgcccacagcactcctcaagcaatgggatggccagtcctccagcacctgccctcctccgcagcctctgccttcggcaccaacaccgtgcaaagcaccagcaccatcgatacctgctcaccccataggcctctgccttgagtgctcatgctgtggaaagcctcagtactgtcattacctgctctccccacaggtctctgccttccgtgccaacaccgtgcaaagcaccagcaccaccgctacgttctcacc

SEQ ID NO: 186943 - DNA, 1197 bp, Homo sapiens
  chr18:74144937-74146134
  hypo
caacaacaccaaaagcgagacctggccgcacatcctgagtccacacatcctgagtggcaacgacactgaaatccacacatgcggcactttccattgaagactctgtaggcttctgagatgctcccattaaatactaactgtaaggccagcctctgctgcgactgctgttcatcgctgtttctgttatcagacaggaagatctctagagtctagacatccagtaaaaagcaccactgaccgctgagtactcccgtgcaaaactacccactcccgaatacaacatttctccatggagttcgctgtcaactctgaagaacagaattcatcaaggtgcagctccagccactgttctcagcgtgagtcctgcggggccctcaagaaaaagcaggtctggcccctgtcttcaatgagatggcaatttgaggatgcctgacgcaaggcggatgctggggacagagagggtcatcctgcctgaaaagaatgtgtccacgcaacagggaggaatggggccagcctgaggcccaggtttgcattccaccctgggtgccgtaccgcggctgcacgctcaggccttgtggaggagacatgggagccttgagtctgggcatagcatccgggtcacagcaaggtggagaggggagaagacgggcaggtgccagagctgaaatgcatatggagctgggagccacctcagcttgcaaggaggaacaccaaagggctgggcagaagggtgggaatccgtgcgttaagcaaacgcctagtgaagaatcgagaaaggatgggcttagtcgcagcacatcacggatacaggagggcgacaacacaaccaacacaggcaggtgcagaatcatcagtcggaatgactagaatctcccaaaaagctcagcagcaaggcatcatctcacagtgccacgtccccagctccacaggggtgcacaccgctccatggcatcacacctctcctggccgggaaaccccaccgcgaccgccagcaccttttctcacaggtgcaccaagccctcggcaacgccttacccaacccagcacctgctgctctggccgttgctgtccgttcttccagctggtcaggaactgacggctcggagtggaatcagacctccctctttaccaggagcgatcctgcctggtccatgagatgccctatctcacgggaacggggtgcaagaaccaaattca

SEQ ID NO: 186944 - DNA, 52 bp, Homo sapiens
  chr18:74147443-74147495
  hypo
gtgaacaatcaccgtcgtgttcatgtgtgcgggagcgcggattaagagtggg

SEQ ID NO: 186945 - DNA, 282 bp, Homo sapiens
  chr18:74148371-74148653
  hypo
atcgttttgagcctctcgtgggacccatgatgaacactgtgtgaggacaagcgctcctcccaacccatgacttggcttcagagagagctttgcccgtgttgcgtccaagccaggacaccgctgagtccccgagagactcagcatcgcgagtggattcagctgcaaggtcagtgcgcgaaggtattgtgagagctcctcctgctctaccttgaagaaacgcttagaagaagtaccatataaaggttgcccacacccagcaggcttggccgcacaggcagacac

SEQ ID NO: 186946 - DNA, 284 bp, Homo sapiens
  chr18:74149034-74149318
  hypo
cacacacacacacacacacacataccgtctctcaccctccctaagctattctaattgctgtctgtgttctatcagaaagaaagaaggacagttgttgaacctctgtgcccagccgcatgactgcagcctggccttcctcacagccagcgcaccagcacggacagccagccagcctccaagcacgtgctcagcaaacaccttacagcaaaagcctcagtgcgcctggtgacagtggaaagaagatgggctctgaggacggggctgctgggcggcagggaggcagc

SEQ ID NO: 186947 - DNA, 172 bp, Homo sapiens; identical to SEQ ID NO: 95116
  chr18:74149886-74150058
  hypo

SEQ ID NO: 186948 - DNA, 1791 bp, Homo sapiens
  chr18:74153252-74155043
  hypo
ggccaggccagagcccggggagtcagcagcggcacaggcggagccagggctgctgggctgggaggccgagtcaccctcactgagtgatccgcagcgggcccgcgccgccctgtccccgtcactgtccctctcgcggcgcgcgcggcgatgcacgcgtgagtgcagcaccatctgatgataggtgcggaagatcttgccgcactcgaagcactcggaggacttgccctggccggtggtggctgcggccctgcggttggggcgcgcggccgagcggggatcgaggtggccggcgggcgcggggtccccaggcccgctcgcgcgcttccgcgggggcccctgcgcggctggtgcatcctgctcacgcttgcgcttctcctggctcaccaggacgtactcgcgcctgtccttgtcgaaggccacgtccccggccagcgcctcgtcccaggccccgtacttgaggtactcggccggctcggccaccttaccccgcgtggccagctgccaggcctggtagctgttgaccgggtccagctcagccacccgccgtccggcctgcgtgccagggcacgagtcgccggccgccgacggcctcaggttcaggcactggaggaagaactgcttggtgtccgagggcccctccgccccctcctcggccggggcgcgcgtgcggctggcctcgactctgcggtggatggcattgtgggcgttcaagctgtccaggtttgtaaacaggttcccgcacttggcgcagacctcgtagaggctcaggccggcgacgatcacctcctcctggaccacgttgttgatggtggcgatggggtccagctcactcttgggcctgttcttgctgcccgtcttggggccgtgcgccttcatgtggttcttgaggaaccagggctccttgaacctacggccgcagatgtggcagccgtggtcgaaggagccccggtgcttcttcatgtgcgccttcaggaaccaggtctggctgaaggcctggccacacacctcgcacgggaactccccggggctcagctcgggcttgccgttctccacgcaggcctcgccgctgccgggcccctgcgcggtgatgtggtccctctcgatgtggctcagcagcgactcctcccgcagcgtcgcgtagctgcacagcctgcacttgaacggcttgtgcgcctggtgcacgtgcagctccaggtccttcttacgctcgaactggctcttgcagaaggagcactggaccgctgccttggcctcccccggggcgcatgcggacccctctgcccccttcttgctgctccgcagcaggactctgccgctgtcggcctgcgaggccccgttcaggaccctggcgccgtcggcctgcgaggccccgttcagcagccggttgcaggccgaggcgctcttggtggggctggcgcaggcgtccaggccctcggaggcgcgcatctcacccagcggcgcctcgcccgcctccggctcgtgtccctgaatcagagtccccgtgcggtggctccggatgtgaatcttcaggttgcccttctgggaagcccggtggtcgcagtagggacacttgtagggcttctcgcccgtgtgcttgcgcatgtgctgcgaaagcgagctctggaaggggaagctcttgccgcagatgcagcaggtgtggcaggtagccttgtccccatccacctcgtggccccggccggccctggtggggctggggcctcgcctcagctccatctcggcctctctgttgcgatccatccgaaggacgggcgcggccggtggtggcggcac

SEQ ID NO: 186949 - DNA, 31 bp, Homo sapiens; identical to SEQ ID NO: 95119
  chr18:74155961-74155992
  hypo

SEQ ID NO: 186950 - DNA, 66 bp, Homo sapiens; identical to SEQ ID NO: 95120
  chr18:74156515-74156581
  hypo

SEQ ID NO: 186951 - DNA, 484 bp, Homo sapiens
  chr18:74159157-74159641
  hypo
agagcttccaacttcaaaacacgccatgggcggccgccccaattaggaggattattgggacgtcagcggccctgctggcacgacgggctgtgctttaaatcccgccaacccctgtaagccaggagggtttcgatgggatgcctcctccacctttatcctggtccctagtggggcgtgcctcacgtaggagcagcgccgtgtgataaagtgctacctacctcagttccagccgcagacatttccgtcctgggctgctctattccactttctcaaacgcacgccaaatacaagttgttccaactctccctgtaacacacgggcctggagataaccagccttataaaacttgtgcatgtgagcctgccacccaaaccacagggaatacggaaaggttctgcaacaacacagatgctcagagccaaggtggagggtacagcatgtgtccagctgacatgcaatatggcgcccacgcacctcggacggc

SEQ ID NO: 186952 - DNA, 31 bp, Homo sapiens; identical to SEQ ID NO: 31479
  chr18:74168121-74168152
  hypo

SEQ ID NO: 186953 - DNA, 30 bp, Homo sapiens
  chr18:74168590-74168620
  hypo
cacagtcaaccccgacggtcagaatgaagg

SEQ ID NO: 186954 - DNA, 321 bp, Homo sapiens
  chr18:74170467-74170788
  hypo
ttttctagacaggtacgaagggaatcccgtccctgagaggaccaagggcacaggagtagtgctcgggaccctcaggacggggcatgcactgtgggcaacgccaggcctcaccgtcgtgcgtgtgcatgcctcaccgtcgtgcgtgtgcgtgcctcaccgtcgtgtgtgcgtgcctcaccgtcgtgtgtgcgtgcctcaccgtcgtgcgtgtgcatgcctgtaggcaatgccaggcctcaccgtcgtgcgtgtgtgtgcctcgtgtgcgtgcctcaccgtcgtgcgtgtgcgtgcctcaccgtcgtgcgtgtgcgtgcctca

SEQ ID NO: 186955 - DNA, 366 bp, Homo sapiens
  chr18:74171116-74171482
  hypo
acgctgcagcagtaacggggcgccgggcccacctgctgcccctctcctgtgcatagggcgctctctccctgccccgagcttcggcttctcctccatgcacggtcactgctggaggcacactggacccagtgccagctcgggaaatcctgggccggtgacagccctgacccgtggccaccatccactcaacatcattgagccctcccacaggcacccaagctctctgaggacagccgtcctagcttccttcgtgggagaaaactctggccctccactgccggccagggaggcctcgcgtgccaagctggccctgagctcagcccaggatttgtgccattcaggacgtggcggccgtgtgcaccccat

SEQ ID NO: 186956 - DNA, 143 bp, Homo sapiens; identical to SEQ ID NO: 95125
  chr18:74171505-74171648
  hypo

SEQ ID NO: 186957 - DNA, 52 bp, Homo sapiens; identical to SEQ ID NO: 95126
  chr18:74172240-74172292
  hypo

SEQ ID NO: 186958 - DNA, 193 bp, Homo sapiens
  chr18:74175493-74175686
  hypo
tgcgcatcacactgccgaccgccagaaatgccaggcccctgggtggctctcgctcttcttggggatgggtctgtggggcgccacctactcacctcctccgcagcatctgcgtttacaaaacacactagggtactagggagccagtctgtgaccgcaacgcagacgtgcccactgaaatcggtgtcccacttat

SEQ ID NO: 186959 - DNA, 28 bp, Homo sapiens
  chr18:74175989-74176017
  hypo
ggactcaaggccgggcgcgggtgctcac

SEQ ID NO: 186960 - DNA, 135 bp, Homo sapiens
  chr18:74176910-74177045
  hypo
ccccagggatacagccgtgcatccgatgagggcagctgcaccctcctcaccttcaggcaacctcgaggggagccgccagaggagagaggctccagaggtgccagggcccagggctcgccacgcagctcaaggctg

SEQ ID NO: 186961 - DNA, 30 bp, Homo sapiens
  chr18:74177575-74177605
  hypo
acccctgatgtgctgcgatgagaagggcct

SEQ ID NO: 186962 - DNA, 30 bp, Homo sapiens
  chr18:74182692-74182722
  hypo
gggcgcggtggctaccgcctgtaatcccag

SEQ ID NO: 186963 - DNA, 189 bp, Homo sapiens; identical to SEQ ID NO: 31484
  chr18:74183547-74183736
  hypo

SEQ ID NO: 186964 - DNA, 30 bp, Homo sapiens
  chr18:74192331-74192361
  hypo
tgaatgctgggttagcgaactacaggcccg

SEQ ID NO: 186965 - DNA, 24 bp, Homo sapiens
  chr18:74192763-74192787
  hypo
caccgcacccggctggtttttaca

SEQ ID NO: 186966 - DNA, 442 bp, Homo sapiens
  chr18:74194232-74194674
  hypo
cttttcccttcatcgcgacctattattccattgcccgttctttatttttgtttgtattttactgtagatggtccccaacttaggaaagtttgacttacactttttcaactttaccaggtgaggaagccacaggcagtcagcagaaagcagtgagctgctccctccacaggcccggcagcggcagccccgcgatctccagggtggacgtcggtacttcatggcaacctgcactgccaggtgctcctgcccaactgtcggctaacatttacccattccaagcgcacttaaggtaggtgaggctatgttaccatgttcagtagactgaagggtattaaacgcatttccgacttaaaagtatcttcaacttaggatgggtttctgggaaggcagccctgtcgtaaattagagagtatctgtctgtatcaaacgtgtgaccttacgt

SEQ ID NO: 186967 - DNA, 268 bp, Homo sapiens; identical to SEQ ID NO: 31486
  chr18:74195358-74195626
  hypo

SEQ ID NO: 186968 - DNA, 75 bp, Homo sapiens
  chr18:74196404-74196479
  hypo
atgtaacactcctaacgatataacaccgtgctctaaaatggcggccgccctaaccccgctcgggccaagaaggtg

SEQ ID NO: 186969 - DNA, 31 bp, Homo sapiens; identical to SEQ ID NO: 55221
  chr18:74204793-74204824
  hypo

SEQ ID NO: 186970 - DNA, 30 bp, Homo sapiens
  chr18:74246647-74246677
  hypo
ccccgttcaaaaagccggccattcaggaga

SEQ ID NO: 186971 - DNA, 30 bp, Homo sapiens
  chr18:74246923-74246953
  hypo
tggctggttgctcggcggcgggaagaggag

SEQ ID NO: 186972 - DNA, 30 bp, Homo sapiens
  chr18:74252716-74252746
  hypo
aaacaatggggctctcgctcagatgttccc

SEQ ID NO: 186973 - DNA, 151 bp, Homo sapiens
  chr18:74260504-74260655
  hypo
actaccaaaggcactcgggtaaataccctcgctccatgaacagccttgtggaggcctctgtggaaatgcgtgctctgaaatgcactgctctgaaacacgcctttggtcatggggtgagtgtgtgcttcacatacctcggatggctggtggt

SEQ ID NO: 186974 - DNA, 31 bp, Homo sapiens; identical to SEQ ID NO: 95134
  chr18:74273198-74273229
  hypo

SEQ ID NO: 186975 - DNA, 31 bp, Homo sapiens; identical to SEQ ID NO: 31487
  chr18:74274870-74274901
  hypo

SEQ ID NO: 186976 - DNA, 204 bp, Homo sapiens; identical to SEQ ID NO: 95136
  chr18:74275175-74275379
  hypo

SEQ ID NO: 186977 - DNA, 35 bp, Homo sapiens; identical to SEQ ID NO: 95137
  chr18:74299117-74299152
  hypo

SEQ ID NO: 186978 - DNA, 31 bp, Homo sapiens; identical to SEQ ID NO: 95138
  chr18:74299794-74299825
  hypo

SEQ ID NO: 186979 - DNA, 313 bp, Homo sapiens
  chr18:74301964-74302277
  hypo
ggcttaaaatagctgcgcttctggtcgctttattacacctagacggcgactcctcctccaccattgctcggaaaagcagggatcctacatgcagtctctgcagaacgtctgtctgctaaagaaggaatcgctccgaataatccagtcaatgaaaaacgctgaagtcatgagcagtgagatgtagtgaggaaccttcaagccctgagcccttttgctcctgcttctgccttgaggtcctcagctctgcatgcacggtcggtcctagggcccggggcagcccaggtgagggggcggcttccggagaacctctcct

SEQ ID NO: 186980 - DNA, 643 bp, Homo sapiens
  chr18:74323519-74324162
  hypo
ctgcggtggagggggcgatgtgcctgcgtgtgtgcctgcgtgtgtgtgtgtgcctgcgtgtgtacctgcgtgtctgcctgcgtgtgtgcttgcggtggcgggggcggtgtgcctgcgtgtgtgtgtgtgtgcctgcgtgtgtacctgcgtgtctgcctgcgtgtgtgcctgcggtggcgggggcggtgtgcctgcgtgtgtgcctgcgtgtgtgtgtgcgtgcgtgtctgcctgcgtgtgtgcctgcggtggagggggcgatgtgcctgcgtgtgtgcgtgtgtgcgtgtctgcctgcgtgtgtgcctgcggtggagggggcgatgtgcctgcgtgtgtacctgcgtgtctgcctgcgtgtgtgcctgcggtggagggggcgatgtgcctgcgtgtgtacctgcgtgtgtgtgtgtgcctgcgtgtgtgcctgcggtggagggggcgatgtgcctgcgtgtgtacctgcgtgtctgcctgcgtgtgtgcctgcggtggcgggggcggtgtgcctgcgtggtgggctccctggagtgatgggcattagccttctcatgactgccgcctgggagactggttattccaaaggacctggcgcccaacgccagcacgaccgaagccttgaaggcgagcaggcaccctc

SEQ ID NO: 186981 - DNA, 627 bp, Homo sapiens
  chr18:74325505-74326132
  hypo
gtctcgtgcaagccccgcctctcccttactagcaaagttgtgaggacagcgcctgcacgcaacacttgcttactaacttgtaactgttattacagaaagcgtggagccaaacagatggcagaggcccaaggaagagcgcgctaaacccgaagtagatctgatttcacatcttgacttggcgattgtttagctgggtcagggtaaatgcctcactgttcctcgtctgtaaatgaacacgggtgctgaggttggggtgagcgcctcaccgagcctcagtttctcatctgtaaaatggacacctgtgcgcgcctcgcggcaggggctgctgagcacgcggatgggtcctctggaggctgggccgccaagaggcggcggctgcaccatctgatgctagagaacgagaaccgcagtgcgtgcccgacacaaagggaaggacaggggacactggaacaggggagacgacatggaagaaatctgggggagccaaaagccgccatgccgagaagggggtcggaggaggcgcgggagagaaaagcccagggctgtacactcgcatccctctgctgccggcccttcgggtacattcaaatactgggcatgagtcccgcagacaaggctttgaaagga

SEQ ID NO: 186982 - DNA, 27 bp, Homo sapiens
  chr18:74326393-74326420
  hypo
tttgagacggagtctcgcatgcccggc

SEQ ID NO: 186983 - DNA, 26 bp, Homo sapiens
  chr18:74326539-74326565
  hypo
gccaccgcgcccggccgacgcctcca

SEQ ID NO: 186984 - DNA, 22 bp, Homo sapiens
  chr18:74381417-74381439
  hypo
gccggtaatgctagcacgttga

SEQ ID NO: 186985 - DNA, 290 bp, Homo sapiens
  chr18:74396239-74396529
  hypo
gaagaggccacgagtcgattctgtgcccagctcagactgtggctgatgcgcagaggcacgtgggctcttggagggtggggatgagctgggcagccccacggctcctcctggcagggcccccatgctgcgcgtctgtgggctcttggagggtggggatgagctgggcagccgcacggctcctcctggcagatcccccatgctgcgcgtctgtgggttccacggcagccagttccaggcacagggcattcttggtgcacttgtcaggtgattgactccgtgcagcgatctcc

SEQ ID NO: 186986 - DNA, 154 bp, Homo sapiens
  chr18:74399784-74399938
  hypo
cttcgcacagctctccggggctgtctccaggaggccctattttattggccattgatgccatgtctgctcagagatacaatcagaaaatatgattggtgttcccgcatgacacacaggaggaggcacggatggcattacacaaacggcccaacag

SEQ ID NO: 186987 - DNA, 114 bp, Homo sapiens
  chr18:74419744-74419858
  hypo
gtcttgcagaaatctcggtctcccttttaaggcattgttttcaatgtaagatggcaaaggcaaatccagtaaaaggttgtggctaataccggacatttacggccctgagaacag

SEQ ID NO: 186988 - DNA, 281 bp, Homo sapiens
  chr18:74420126-74420407
  hypo
gctctgctcaggaagcggctgtgaacccgctgccttcctaacacaagtgttagttctctcagggtgccgtggccttaacagcaagagccacagcgtctgtgctcccaactgccagggactctggcttccgggaggtggcctgagaaccagctcagacagcagggatgggccgggcctggccctctgctcggggccacccaggcctcaggagcctcctgttttacaactgtcatacccgggatccaaatccctttcccctgccggcgcggatcaaagaaggg

SEQ ID NO: 186989 - DNA, 36 bp, Homo sapiens; identical to SEQ ID NO: 95143
  chr18:74420788-74420824
  hypo

SEQ ID NO: 186990 - DNA, 45 bp, Homo sapiens
  chr18:74424291-74424336
  hypo
ggattacaggcgtgagccaccgcgcccggccggattaattgcata

SEQ ID NO: 186991 - DNA, 206 bp, Homo sapiens; identical to SEQ ID NO: 95144
  chr18:74426496-74426702
  hypo

SEQ ID NO: 186992 - DNA, 30 bp, Homo sapiens
  chr18:74436019-74436049
  hypo
aaacaaccacagctccgcaacacgaaatgc

SEQ ID NO: 186993 - DNA, 121 bp, Homo sapiens; identical to SEQ ID NO: 95145
  chr18:74443716-74443837
  hypo

SEQ ID NO: 186994 - DNA, 31 bp, Homo sapiens; identical to SEQ ID NO: 95146
  chr18:74451537-74451568
  hypo

SEQ ID NO: 186995 - DNA, 31 bp, Homo sapiens; identical to SEQ ID NO: 95147
  chr18:74451803-74451834
  hypo

SEQ ID NO: 186996 - DNA, 39 bp, Homo sapiens; identical to SEQ ID NO: 95148
  chr18:74471097-74471136
  hypo

SEQ ID NO: 186997 - DNA, 301 bp, Homo sapiens
  chr18:74500997-74501298
  hypo
gaggcaccgagagtgagcgagggctgccagggctgccagcacacctgggaacccagccacccacgtgcccctccaggcccggacctgcctctcagcgcccagagctgcccctgcagtgccccgtgttccctccccagccacgcttgcggttggcgctccccacggtcccgacggggctttctcatgggatccatcaatgcgcagtttagacaccccaggctctcccgccctacacggagatgagaaaaaggttgatagaataaattacattaggccgggtgaggtggctcacgcctgtaat

SEQ ID NO: 186998 - DNA, 534 bp, Homo sapiens
  chr18:74503931-74504465
  hypo
tggttgctagaagagcggcagattggatggagcagggagttcgggtgtgacaggatgactgtggtgtggtggtaggacttcgacgtgtggacccccaggtatttggaaatgtaggtccggggcgcacctgagggctcaggactggaagtgcacttggggagccacggatgcgctcccagaagtgcgcccaagaggaacagtgtggggcctgagcaggcgggaagcttgaggagtgcccacccgcagggaatgggaaggacagcgcagcagcttgaggagaggacgctcagagagtgagcttcagaggaacacccagggtgtgaggcgcgcaacccaggcgtggcacagctgcatggaaacccggggcaaagtggcatgagcagctgccaggaagtccagagggctccgtggtaggcagacgttctgtgacggagcccacggcaggtgcaagtgtgagctgagacctgagtctgctaaggagaagtgaggacgcccctgataaggttttgaagctgaaggcgccacaggagtctt

SEQ ID NO: 186999 - DNA, 31 bp, Homo sapiens; identical to SEQ ID NO: 95151
  chr18:74518062-74518093
  hypo

SEQ ID NO: 187000 - DNA, 96 bp, Homo sapiens
  chr18:74518707-74518803
  hypo
caccgctggtctttacgatgaccggttgtgacatgtgagcctcagtcctcgctatatcagggagtagcttcctccgactatcggaatcacccttgc

SEQ ID NO: 187001 - DNA, 30 bp, Homo sapiens
  chr18:74536280-74536310
  hypo
caacaggcgtttcagcgagctttcgcacac

SEQ ID NO: 187002 - DNA, 30 bp, Homo sapiens
  chr18:74536591-74536621
  hypo
ttccacggccacaggcggggcacccattcc

SEQ ID NO: 187003 - DNA, 326 bp, Homo sapiens
  chr18:74569871-74570197
  hypo
atgtgaaaacatcagcgatgtttggttactatggattcagtacactttttacgtttcttaagtattttaagattctaatgatattgtgtagggaggtcttttggccatatgttgtgttacgtgcctgtaggaaagcgatgcatttgtgtgtgttagttttccctgccatcctccctgattctctatgcagcctcatctacacataataatcgggtagtaagtttttggttctgtgttgttgcaactagcatatgcgcagtttttaaaaaaaaatcacccttatatcatttattcgttttcatagtatgtagcgatggcatattcac

SEQ ID NO: 187004 - DNA, 172 bp, Homo sapiens; identical to SEQ ID NO: 95154
  chr18:74586686-74586858
  hypo

SEQ ID NO: 187005 - DNA, 188 bp, Homo sapiens
  chr18:74592527-74592715
  hypo
aaagaacaggcttttccgaagttgtatctatttatgttgacagaggtggaaaaagcgttttattctttcttgaggttctggtttatgatttggagacagtcatgggtgttgacaattctgagagcgttcatactgcctggccttctctcgtgggtgtgtgggcagcacctgcacgtgtgggagaggag

SEQ ID NO: 187006 - DNA, 30 bp, Homo sapiens; identical to SEQ ID NO: 95156
  chr18:74598246-74598276
  hypo

SEQ ID NO: 187007 - DNA, 30 bp, Homo sapiens
  chr18:74601142-74601172
  hypo
gcaaatatctgccttcgaagctcaccggca

SEQ ID NO: 187008 - DNA, 210 bp, Homo sapiens; identical to SEQ ID NO: 95157
  chr18:74625649-74625859
  hypo

SEQ ID NO: 187009 - DNA, 30 bp, Homo sapiens; identical to SEQ ID NO: 95158
  chr18:74626242-74626272
  hypo

SEQ ID NO: 187010 - DNA, 63 bp, Homo sapiens; identical to SEQ ID NO: 95159
  chr18:74627686-74627749
  hypo

SEQ ID NO: 187011 - DNA, 362 bp, Homo sapiens; identical to SEQ ID NO: 95160
  chr18:74631682-74632044
  hypo

SEQ ID NO: 187012 - DNA, 30 bp, Homo sapiens
  chr18:74633259-74633289
  hypo
tcaacagcgagctctcgttgagccatgcag

SEQ ID NO: 187013 - DNA, 80 bp, Homo sapiens; identical to SEQ ID NO: 95161
  chr18:74633614-74633694
  hypo

SEQ ID NO: 187014 - DNA, 19 bp, Homo sapiens
  chr18:74633753-74633772
  hypo
gtggcgtggtctcggctca

SEQ ID NO: 187015 - DNA, 31 bp, Homo sapiens; identical to SEQ ID NO: 31497
  chr18:74670146-74670177
  hypo

SEQ ID NO: 187016 - DNA, 66 bp, Homo sapiens
  chr18:74680246-74680312
  hypo
ggtgcaggaggccgccggcgagtggcaggccctcacccacgtcttctgatgcgagttggaagtaca

SEQ ID NO: 187017 - DNA, 231 bp, Homo sapiens; identical to SEQ ID NO: 95164
  chr18:74691006-74691237
  hypo

SEQ ID NO: 187018 - DNA, 459 bp, Homo sapiens
  chr18:74696509-74696968
  hypo
ttcctcaagcacctccggcttcacatgcatctcggaggaaatccacgcgtaaatgcgggtgggcaatgccacctgagcccctgcacgcctgctgggacagagcacgtccagggtacagtgcggctgagccagaggcggcagccacccttgtactcagcttagttggggattctgggagcccttagtccccgctcagtggagctgagcagagggtaccttaccagcttaaaaattttggaaagcgtgccctgggcatcgactcccttgaatcccttgtgagccgatttatagtcggacgctctgcctccgtagccaaatcctggtctctggccttcggccccctgcaagagaagaccacggagctcaacctccacccgcggtgctgggcacgctgcttgagccactgggagctgccaccagggccccggggaagggcccaggccccggactggactggtg

SEQ ID NO: 187019 - DNA, 30 bp, Homo sapiens
  chr18:74697233-74697263
  hypo
cgggtttggaggactcggaccctggggggc

SEQ ID NO: 187020 - DNA, 35 bp, Homo sapiens; identical to SEQ ID NO: 95165
  chr18:74697570-74697605
  hypo

SEQ ID NO: 187021 - DNA, 197 bp, Homo sapiens
  chr18:74720162-74720359
  hypo
gaaaatcctccttctcgccagcactgctctccagggcggggccggcagggtcggtgcctcccaggcaggggctggtgcatgcagccccatcttggtctcagtgaagcccaggtggccacagccccagtgcaccccagagaagaggcctcccagaaggacgggggaccctcagaaactacctgcgggtagtggtggtg

SEQ ID NO: 187022 - DNA, 135 bp, Homo sapiens
  chr18:74720706-74720841
  hypo
cctactcctggcccgcggcggtgcagccctggacagccaggcactagcatgatgtctgacatgcagccacacctggcggacgcttccccttcagggcctccaagttttggcatccgcaggcgtcctgtcccccgt

SEQ ID NO: 187023 - DNA, 166 bp, Homo sapiens
  chr18:74721775-74721941
  hypo
cgatgggtgaggacccgccggcgtcttaccttgtacatgttgcacagcccaggctggctgcgggcatgagagggcagagggctccggcccggctttagccagggtacctgccgggggacacagagtgggctgcgtgagtccgggtgggcgccgccggcaatgcccc

SEQ ID NO: 187024 - DNA, 137 bp, Homo sapiens
  chr18:74723210-74723347
  hypo
ccgtggataagcctgcgggagttgctgtgctgatgagacttggctgtcctcataagcagtgactcccatcagctggtgtccatgagcgtgagcaagtgtacgctatgtacagggccaacaagcgaagaactttccat

SEQ ID NO: 187025 - DNA, 30 bp, Homo sapiens; identical to SEQ ID NO: 95166
  chr18:74724277-74724307
  hypo

SEQ ID NO: 187026 - DNA, 252 bp, Homo sapiens; identical to SEQ ID NO: 95167
  chr18:74726188-74726440
  hypo

SEQ ID NO: 187027 - DNA, 733 bp, Homo sapiens; identical to SEQ ID NO: 95168
  chr18:74728302-74729035
  hypo

SEQ ID NO: 187028 - DNA, 100 bp, Homo sapiens; identical to SEQ ID NO: 95169
  chr18:74729466-74729566
  hypo

SEQ ID NO: 187029 - DNA, 238 bp, Homo sapiens
  chr18:74731841-74732079
  hypo
gtccaggaggatggccgggctgagaacctcccaggccaggcagtaacctgggaggcaggagggcctgtgcagggaactgaccatctgtgagcaacagcaggggtatcacagccttgatggctgtgaacagactgtggaaagggcagagcaggcagctatgtggcgagaagacagggcttggtttggggagcagcggggcctggggagggaagattctagtggacggcctctgtggagg

SEQ ID NO: 187030 - DNA, 30 bp, Homo sapiens
  chr18:74732317-74732347
  hypo
acagatattcttctacgtcggtttccacaa

SEQ ID NO: 187031 - DNA, 30 bp, Homo sapiens
  chr18:74732587-74732617
  hypo
tcccagggctttactcggggctggtctcat

SEQ ID NO: 187032 - DNA, 147 bp, Homo sapiens; identical to SEQ ID NO: 95170
  chr18:74733724-74733871
  hypo

SEQ ID NO: 187033 - DNA, 285 bp, Homo sapiens; identical to SEQ ID NO: 95171
  chr18:74734079-74734364
  hypo

SEQ ID NO: 187034 - DNA, 1804 bp, Homo sapiens; identical to SEQ ID NO: 95172
  chr18:74736586-74738390
  hypo

SEQ ID NO: 187035 - DNA, 31 bp, Homo sapiens; identical to SEQ ID NO: 95173
  chr18:74743579-74743610
  hypo

SEQ ID NO: 187036 - DNA, 30 bp, Homo sapiens
  chr18:74749804-74749834
  hypo
tccgaacaggcctcccgaggtctgcagcgt

SEQ ID NO: 187037 - DNA, 575 bp, Homo sapiens; identical to SEQ ID NO: 95174
  chr18:74755404-74755979
  hypo

SEQ ID NO: 187038 - DNA, 30 bp, Homo sapiens
  chr18:74756531-74756561
  hypo
ccccacctccctcctcgcacctgggacgca

SEQ ID NO: 187039 - DNA, 30 bp, Homo sapiens; identical to SEQ ID NO: 95175
  chr18:74758676-74758706
  hypo

SEQ ID NO: 187040 - DNA, 357 bp, Homo sapiens; identical to SEQ ID NO: 95176
  chr18:74759062-74759419
  hypo

SEQ ID NO: 187041 - DNA, 25 bp, Homo sapiens
  chr18:74760839-74760864
  hypo
tcaagaataatctctacgagggcag

SEQ ID NO: 187042 - DNA, 84 bp, Homo sapiens; identical to SEQ ID NO: 95178
  chr18:74761163-74761247
  hypo

SEQ ID NO: 187043 - DNA, 186 bp, Homo sapiens
  chr18:74763241-74763427
  hypo
cctttcacttgcgggcgaatgacgcgagcatctctcagttgctttgtagctctctaatgataaaattaacctacttaaatggtcacatccactgtttattttaaaatccacccaccactgtcggcctggctcacagtgaattaaccgttcaacagttaaggagagactgcccgacagagcccacct

SEQ ID NO: 187044 - DNA, 649 bp, Homo sapiens; identical to SEQ ID NO: 95180
  chr18:74763719-74764368
  hypo

SEQ ID NO: 187045 - DNA, 457 bp, Homo sapiens; identical to SEQ ID NO: 95181
  chr18:74770084-74770541
  hypo

SEQ ID NO: 187046 - DNA, 233 bp, Homo sapiens; identical to SEQ ID NO: 31508
  chr18:74782715-74782948
  hypo

SEQ ID NO: 187047 - DNA, 30 bp, Homo sapiens
  chr18:74787604-74787634
  hypo
tctattgaagacccgcgtgaactcatcttg

SEQ ID NO: 187048 - DNA, 30 bp, Homo sapiens
  chr18:74787950-74787980
  hypo
tttatcatgaaccttcgcaatctcaaactt

SEQ ID NO: 187049 - DNA, 30 bp, Homo sapiens
  chr18:74788444-74788474
  hypo
tcgaggcggcaccgtcgctgctgagtcctg

SEQ ID NO: 187050 - DNA, 30 bp, Homo sapiens
  chr18:74788812-74788842
  hypo
tctggagccaggcgccgaggcaccaatccc

SEQ ID NO: 187051 - DNA, 30 bp, Homo sapiens
  chr18:74789581-74789611
  hypo
tcctcgatgctgggccggcccggggcggtg

SEQ ID NO: 187052 - DNA, 160 bp, Homo sapiens; identical to SEQ ID NO: 95183
  chr18:74794098-74794258
  hypo

SEQ ID NO: 187053 - DNA, 16 bp, Homo sapiens
  chr18:74797927-74797943
  hypo
gcgcccggccctcagt

SEQ ID NO: 187054 - DNA, 101 bp, Homo sapiens
  chr18:74805145-74805246
  hypo
gctgggccggctctccgggagcatcagggatccggttggagagaggctcatacggcggtcccaggggccacctcgagggggttgaccggagctgggtctgg

SEQ ID NO: 187055 - DNA, 79 bp, Homo sapiens
  chr18:74806377-74806456
  hypo
gttgctcataagtgccggttcccggactctgcaggaggcacaccttaacggggacactttactgcgggtgccacgttaa

SEQ ID NO: 187056 - DNA, 118 bp, Homo sapiens
  chr18:74806768-74806886
  hypo
cacttccatctaaatcgcttaaaaatatgacattaaaaacacagttgttcagttataagggtctcgtttcgtgtgctgtgggccacatgtgtctagaggctaacgtgtcaccaggcag

SEQ ID NO: 187057 - DNA, 245 bp, Homo sapiens
  chr18:74815190-74815435
  hypo
attattactattaaataaaaacgcactacagacctcagcgaagaggtctggagactgaaattcaattccgttcaattccgcggacatttctaaagcatctgggtgtaagtcgggggttcccctgaccctcaccccggcccatcttcagcagccggacattctagtgcaccaccatctgcctcgagttggagacacataattttatgttgaattaaagtaccaacgaaatggaataatttcccttg

SEQ ID NO: 187058 - DNA, 30 bp, Homo sapiens
  chr18:74822249-74822279
  hypo
cgaggcagcgtgatgcggtgtggggaccgg

SEQ ID NO: 187059 - DNA, 179 bp, Homo sapiens
  chr18:74822938-74823117
  hypo
gctttggagtcttcgcggtgtacgggaccttaaagctgagctggctgtattgcctcgtggctgctccagtcctgtgctagacctctcgctgggtctcggggttctcagcgcctgttcagaaagcctggcaatgtttgcctgggaggaaaagctccataaatacacgctgaagacacgac

SEQ ID NO: 187060 - DNA, 430 bp, Homo sapiens; identical to SEQ ID NO: 95188
  chr18:74832018-74832448
  hypo

SEQ ID NO: 187061 - DNA, 38 bp, Homo sapiens; identical to SEQ ID NO: 31512
  chr18:74841695-74841733
  hypo

SEQ ID NO: 187062 - DNA, 829 bp, Homo sapiens; identical to SEQ ID NO: 130190
  chr18:74844287-74845116
  hypo

SEQ ID NO: 187063 - DNA, 41 bp, Homo sapiens
  chr18:74847360-74847401
  hypo
ggattacaggcctgagccaccacgcccggccaggactgaat

SEQ ID NO: 187064 - DNA, 107 bp, Homo sapiens
  chr18:74867170-74867277
  hypo
cgggagcggtgcagccgcaagccaaggagcaccggcgactgccgggagacactgaggccggggaggcagggaacggattctcgctcacagcccgcaagaaggggcca

SEQ ID NO: 187065 - DNA, 177 bp, Homo sapiens
  chr18:74877173-74877350
  hypo
acccaacaggaatgccgtgaggattgcgcgagctcatattctggggccgacagaaccacgcctccttcagggttgcgtgtccaagtacttgtggaataagttaacctgcccagtgaacactgtgaccacttctcaggtgacatccactggtgcagcgaggttctggccctcaagggg

SEQ ID NO: 187066 - DNA, 30 bp, Homo sapiens
  chr18:74877611-74877641
  hypo
gagccgagtggagaccgcaagcctgggcgt

SEQ ID NO: 187067 - DNA, 30 bp, Homo sapiens
  chr18:74898029-74898059
  hypo
cccccgacaattcaacgttatttcatgtag

SEQ ID NO: 187068 - DNA, 30 bp, Homo sapiens
  chr18:74928966-74928996
  hypo
cctctctcaccccaacgcgctgagcatttt

SEQ ID NO: 187069 - DNA, 635 bp, Homo sapiens; identical to SEQ ID NO: 55227
  chr18:74961320-74961955
  hypo

SEQ ID NO: 187070 - DNA, 152 bp, Homo sapiens; identical to SEQ ID NO: 11846
  chr18:74962018-74962170
  hypo

SEQ ID NO: 187071 - DNA, 134 bp, Homo sapiens; identical to SEQ ID NO: 11847
  chr18:74962209-74962343
  hypo

SEQ ID NO: 187072 - DNA, 30 bp, Homo sapiens
  chr18:75036940-75036970
  hypo
aattcgcatgaaaaccgtcttcacggtgca

SEQ ID NO: 187073 - DNA, 137 bp, Homo sapiens; identical to SEQ ID NO: 95196
  chr18:75087207-75087344
  hypo

SEQ ID NO: 187074 - DNA, 433 bp, Homo sapiens
  chr18:75088108-75088541
  hypo
gccacagtcaggatccgtagctccaagactggctgccccctttccattaaccttggacttgcagattcacagaagcccattccctgggctgcaagcgctgctcggtaacggcgcttgtttgcttcgtttcacggcggactccctagagcttggaatggtgcccggaacacagcagcgctcgaagaacaaacaccgtggggtctcttctgaggtgccattggcatggtacagagaacaatcaactggcgacactccggtgaatttttgtttacaatgtttattttattttacaatacgtttttattttacaactttattcacaattttctgttgtgtgtagtctaaccccgtagaagttttgtgtggacgagtcttcacttgtcctgtgcacacctgagagtggcgttgctgggtcgtgcggtggttttctgtt

SEQ ID NO: 187075 - DNA, 30 bp, Homo sapiens
  chr18:75119280-75119310
  hypo
gttgtggggaggagacgcacctttgtgagc

SEQ ID NO: 187076 - DNA, 209 bp, Homo sapiens; identical to SEQ ID NO: 95197
  chr18:75120505-75120714
  hypo

SEQ ID NO: 187077 - DNA, 101 bp, Homo sapiens; identical to SEQ ID NO: 95198
  chr18:75214586-75214687
  hypo

SEQ ID NO: 187078 - DNA, 196 bp, Homo sapiens; identical to SEQ ID NO: 31517
  chr18:75229787-75229983
  hypo

SEQ ID NO: 187079 - DNA, 582 bp, Homo sapiens
  chr18:75230326-75230908
  hypo
gggaaccacgaggctcggagctgagtggtggcctcaaggacccttccagaatgcgaatgaatatttactggaaagagaccattaacccaaagcaaccagaacgctttgaagagacaagatggattttcctttccgtggagggaagaagggctcgccgaggcagatgagttagcacgaaaaagagggcgtcgtcctttcgaatacgtttgactgaagaaagtctcaggcttatcaggtccatatcacacatattcatagattccttaacttttacgtcagaagcgaatccactttccttctttatgtcctttattattgtgaaatcaaaggactccgaaaggaaatttactcctgtgtttaaaactgaagtctagctcgtgcttctgaaatgacgcataaataattcaagcttgagagggaagaactggccacactttggaggcgccgagctggggaacctggtgtccgaagccaagctctgctcgggcccaggaggacgcagggacatcgcactgtcccccacgcctggcctgtgctcctttaatcttggtcctaatgatcgaattaaagagggatacaaat

SEQ ID NO: 187080 - DNA, 30 bp, Homo sapiens
  chr18:75319363-75319393
  hypo
gtgcctccagacaggcgcacgaccttaacg

SEQ ID NO: 187081 - DNA, 234 bp, Homo sapiens; identical to SEQ ID NO: 31518
  chr18:75339281-75339515
  hypo

SEQ ID NO: 187082 - DNA, 38 bp, Homo sapiens
  chr18:75361203-75361241
  hypo
gaggccatcctaaaacgcaggtatgactcttttttttt

SEQ ID NO: 187083 - DNA, 63 bp, Homo sapiens
  chr18:75571259-75571322
  hypo
tccaagaaacagacaaggatccgctcagtgcggcgcaggcacgtgccatgcctgtttgatgcc

SEQ ID NO: 187084 - DNA, 521 bp, Homo sapiens; identical to SEQ ID NO: 130197
  chr18:75612004-75612525
  hypo

SEQ ID NO: 187085 - DNA, 30 bp, Homo sapiens
  chr18:75694542-75694572
  hypo
tgtgcagcaggcagacgtgaatgaggagag

SEQ ID NO: 187086 - DNA, 30 bp, Homo sapiens
  chr18:75820704-75820734
  hypo
gatgcatgaatacatcgaggttcacaaagc

SEQ ID NO: 187087 - DNA, 43 bp, Homo sapiens
  chr18:75845222-75845265
  hypo
ctcatgttttagaaacccttacgcccattttaaggataatgaa

SEQ ID NO: 187088 - DNA, 283 bp, Homo sapiens; identical to SEQ ID NO: 31519
  chr18:75873523-75873806
  hypo

SEQ ID NO: 187089 - DNA, 30 bp, Homo sapiens
  chr18:75906442-75906472
  hypo
ttccccaactagagccgcaaacacaaacag

SEQ ID NO: 187090 - DNA, 72 bp, Homo sapiens
  chr18:75957355-75957427
  hypo
ctaatcagtccacgtcgcctcatttcagcgcgcctggcgtctccagccccgtgtccccgcaccgcggcacta

SEQ ID NO: 187091 - DNA, 1060 bp, Homo sapiens; identical to SEQ ID NO: 31520
  chr18:75998624-75999684
  hypo

SEQ ID NO: 187092 - DNA, 30 bp, Homo sapiens; identical to SEQ ID NO: 95205
  chr18:76000172-76000202
  hypo

SEQ ID NO: 187093 - DNA, 379 bp, Homo sapiens; identical to SEQ ID NO: 95206
  chr18:76123567-76123946
  hypo

SEQ ID NO: 187094 - DNA, 378 bp, Homo sapiens
  chr18:76129256-76129634
  hypo
ggtctacatttccctgtatttcgcagtaacacacggcacagaccgcgtgcctttcctccatctgcttaccgagtcggcgcggccacttaccacccatggcagcacattgcaaggtttgtccgtataaaagaaagtgccggcagatcgtgacgtggaggcctcggacctgtacactctcccgtgactctgccacaggccaggctttgctgcgatcactaaaacctggttcgaaatgagccactttagccctccgcatggtggcctcctaggcatccaggcagagggaccctccccgacagcgctctgggggcagcccaggaaggctcagtgctgcggtaattcggggcctccaggtccaccttacgctcatccacggcc

SEQ ID NO: 187095 - DNA, 464 bp, Homo sapiens
  chr18:76151087-76151551
  hypo
cccgtccacacagtgcgcaggtcaacactaggagtcggtggcttctgcggcctggcacggtccacggtgctgcgggttccaaaacgccaggcgagccccacggcctgcgggtgcccgggaggtgcagactgaagggcaagaccttgtcagagagagaaagaagcaataacgcatccgatttcacctgctcgcggagagagctacacagcccaccccgacacttttacacgacgaaaggggcttcgcggtccggcaagcctgagctgaaacgcaggtccatcgcttaccctgcagcagttcttcaagcttcggggcttcggtttcttcctccaccccagggggacggctgtgcagggccgtggtgtggcctgagccgggctgcgtttgtggcttccttcccggcacctgctgtgtcctcggggtcttcggtggccgctcccatcgtggacagaggccaacagagg

SEQ ID NO: 187096 - DNA, 508 bp, Homo sapiens; identical to SEQ ID NO: 31524
  chr18:76189658-76190166
  hypo

SEQ ID NO: 187097 - DNA, 30 bp, Homo sapiens
  chr18:76235219-76235249
  hypo
gtcacgctatgcacacggccacagtcaatg

SEQ ID NO: 187098 - DNA, 30 bp, Homo sapiens
  chr18:76235480-76235510
  hypo
tcctgaggatgacaacgttcccaggtgcca

SEQ ID NO: 187099 - DNA, 156 bp, Homo sapiens
  chr18:76252106-76252262
  hypo
acagaatgcccggaacgcccagaatgcctggaatgcccagaatacccagaatgcccgaaattcccggaacacccggaatacccagaaagcccagaatttctggaacatccagaattcccagaacatccagcatgcctggaacgtgtggaataccca

SEQ ID NO: 187100 - DNA, 132 bp, Homo sapiens; identical to SEQ ID NO: 95210
  chr18:76412641-76412773
  hypo

SEQ ID NO: 187101 - DNA, 545 bp, Homo sapiens
  chr18:76435960-76436505
  hypo
cgttcactcaggaagccgaagcccagaagagtgaggtctcaaagttcacagcacgtggcctagaattcaggggtgcagagctcctgcttggtaactcatcccctgtgcggtgatgcttctgatcccacagcaatgcctgcttctgcgaggctggtccagggctggaacggagccctgtgccgtgatgcttccgatcccacagcaatgccacgctcctccagagctggagcagattccgatcccacagcaatgccacgctcctccagggctggagcagattctgatcccacagcaaggccgcgcttctccaaggctggagcagattctgatcccaccgcaatgccgcgcttctccaagactggagcacattctgatcccaccgcaatgccgcatttctccaaggctggagcagattccgatcccaccgcaatgccgcatttctccagggctggagcagattccaatcccacagcaaggccgcgcttctctaagactggagcagattctgatcccaccgcaatgccgcacttctccaaggctggagc

SEQ ID NO: 187102 - DNA, 62 bp, Homo sapiens
  chr18:76437855-76437917
  hypo
cctctcccaggtctgcggtgacctctcgggaccctcccccaggtctgcggtgacctctcggg

SEQ ID NO: 187103 - DNA, 30 bp, Homo sapiens
  chr18:76457201-76457231
  hypo
tggtggtggtgagcgcggcgctccccatgc

SEQ ID NO: 187104 - DNA, 30 bp, Homo sapiens
  chr18:76457712-76457742
  hypo
agtatctgcagacaccgtggtaatcacgct

SEQ ID NO: 187105 - DNA, 30 bp, Homo sapiens; identical to SEQ ID NO: 31526
  chr18:76463640-76463670
  hypo

SEQ ID NO: 187106 - DNA, 329 bp, Homo sapiens; identical to SEQ ID NO: 31527
  chr18:76477466-76477795
  hypo

SEQ ID NO: 187107 - DNA, 168 bp, Homo sapiens
  chr18:76480513-76480681
  hypo
acagcagactctgcacgcttggggaggaagggaagaccaaggcttgagggaaaccatcgaaggatgaggccattgtttgaaatgattctcctcagctgcaaggatggataagggtgtcgctgatctgaggctggccaggccgtgctgggccgacgtccttgccgactg

SEQ ID NO: 187108 - DNA, 628 bp, Homo sapiens; identical to SEQ ID NO: 31528
  chr18:76486292-76486920
  hypo

SEQ ID NO: 187109 - DNA, 30 bp, Homo sapiens; identical to SEQ ID NO: 95216
  chr18:76487287-76487317
  hypo

SEQ ID NO: 187110 - DNA, 30 bp, Homo sapiens
  chr18:76488070-76488100
  hypo
atggcctaggagtgccgtggaggcagcgac

SEQ ID NO: 187111 - DNA, 224 bp, Homo sapiens
  chr18:76491136-76491360
  hypo
tgcggaacgctgcgtcgttcctagtgtctcctatgcagatcccagcgtcgtacctggtgcctcccgtgcagagccccgcagcgtttgtgtcttgcatggtgcgttctgcgttcagggcctgtgctgcacccatcttgatcatctccgtgcttctcacgctggactcacaagagcctggcactgttcagcccctgggtgcctggacgtcacgtcagcctagccgc

SEQ ID NO: 187112 - DNA, 474 bp, Homo sapiens; identical to SEQ ID NO: 95217
  chr18:76495817-76496291
  hypo

SEQ ID NO: 187113 - DNA, 30 bp, Homo sapiens
  chr18:76527168-76527198
  hypo
agcccagctggcagccggtgagacacagac

SEQ ID NO: 187114 - DNA, 115 bp, Homo sapiens
  chr18:76531048-76531163
  hypo
agagaacagagatcacgcttgctgtcgttctatcattccatcacctttccaagtacccctgaggctcggaattccctggtggtcccggaggaggcagcggcgtgctgtgcgtctc

SEQ ID NO: 187115 - DNA, 30 bp, Homo sapiens
  chr18:76531875-76531905
  hypo
gtgtcctgaggctgccggcccttcgttgcc

SEQ ID NO: 187116 - DNA, 326 bp, Homo sapiens; identical to SEQ ID NO: 95218
  chr18:76534697-76535023
  hypo

SEQ ID NO: 187117 - DNA, 31 bp, Homo sapiens; identical to SEQ ID NO: 31529
  chr18:76543110-76543141
  hypo

SEQ ID NO: 187118 - DNA, 211 bp, Homo sapiens
  chr18:76546829-76547040
  hypo
tacataccaatctcccgcacacgccacacgtgcaggagagggaaggaaggcggctgcgttgtcaccagtcaccaaccctcctgtcccgctcctgggtgttccggtgcgaccctcagcctctgcacctgaggtcacctgtgccaactctcaccctctgcacccaagggcacctgtgccaaccctcagcctctgcacccgaggacacctgtgc

SEQ ID NO: 187119 - DNA, 213 bp, Homo sapiens; identical to SEQ ID NO: 95220
  chr18:76552754-76552967
  hypo

SEQ ID NO: 187120 - DNA, 30 bp, Homo sapiens; identical to SEQ ID NO: 95221
  chr18:76557144-76557174
  hypo

SEQ ID NO: 187121 - DNA, 30 bp, Homo sapiens
  chr18:76590042-76590072
  hypo
ggctgatctaaggagcggtcgaggaagcca

SEQ ID NO: 187122 - DNA, 251 bp, Homo sapiens; identical to SEQ ID NO: 95222
  chr18:76626238-76626489
  hypo

SEQ ID NO: 187123 - DNA, 295 bp, Homo sapiens; identical to SEQ ID NO: 95223
  chr18:76653366-76653661
  hypo

SEQ ID NO: 187124 - DNA, 30 bp, Homo sapiens
  chr18:76654148-76654178
  hypo
tgtgtgcgcctacgccgtgtgcacgtgtgt

SEQ ID NO: 187125 - DNA, 213 bp, Homo sapiens; identical to SEQ ID NO: 95224
  chr18:76660959-76661172
  hypo

SEQ ID NO: 187126 - DNA, 1052 bp, Homo sapiens
  chr18:76685332-76686384
  hypo
tccccacagggttagcaaagacgcaagagggcgtgaagccacgcggtcgcacacctggtaccgcgcacagtgagaaaggagggcaagtgcgctgagacccaggagggagggcagccctcccctgcgctgctgaggctcgtttctttcaatgtgtccctggctctgtgctgtatcgtgcgtttcagtgtgcatgaaatatcttgtgcaatcatttacgtgaaattagagctagtaggaaaatgtatcgtcaggcgtggaagagcgcactgcaccttctttttacttgcgcgcacctgaggattgtctaaaatccaggcctcacgggactcccagagcccgtgctcgtcacagctgctggctacagaaacacagcctgcaaagtcggcctcaccgccagccagacgagcccagccagtttccacgagcaggggagggcacacccggaggccaccgtggaaagcagcctggctgccctcgggaagccacacgcggagccgccgcggcccagcactcccacccctcgatgtgtgcccaggtcgaaggaaggcttgccacccgaaggcctgcacgggaaagctcacagcagcgttctccaaacagccaaaacgcggaagcaaccccgatgtgcgtgggctggtgaatgcaggcccagcgcggagtgcgcacagcccggaacggcattcagccaagaaaagacccacagccgggaacagcatattcagccaagaaaagaaagggcggcctggggcgctctgcaccgcgggtgagccgtgagaacacggcgctccgggagagaagccagcacgagacgctgcctcgggcgcgactccatttacttgaagtccagagcccgtaaatccgcgagacagacatggaggagcggcttaccaggtctggaagcagggaggggagtgagggactgctgaggggtgcgggtttcatgtggggccatgagaaggttctagaattagatggtggcgatggttgctccacgctgccatgggggcagctgagggaaaggaggtgggatcggggctcggccagctctcgcc

SEQ ID NO: 187127 - DNA, 97 bp, Homo sapiens
  chr18:76689832-76689929
  hypo
gagcaagcagtgacatgtgtgaccacgaaggtgactccctaaagcatgtagcacaaaagccaaacacaaagaaggccgcacacgtgattccacacat

SEQ ID NO: 187128 - DNA, 30 bp, Homo sapiens; identical to SEQ ID NO: 31533
  chr18:76957871-76957901
  hypo

SEQ ID NO: 187129 - DNA, 313 bp, Homo sapiens; identical to SEQ ID NO: 31534
  chr18:76999755-77000068
  hypo

SEQ ID NO: 187130 - DNA, 162 bp, Homo sapiens
  chr18:77050732-77050894
  hypo
agctgttcctattcggctgtcttggctgccccccttccatttcttgtaaggtctaagtaagtttgtgttttgatacatccgctgattatgtatgtgtcttactttgtttaactagaatcttcacaagaaagtttattgctctaggtgcgtggcatatctcag

SEQ ID NO: 187131 - DNA, 189 bp, Homo sapiens
  chr18:77076162-77076351
  hypo
aatcaagtgatgacatcggaaacaggattattagagagctcctgactgagtaaagaaaaatctaaatgacaaatggccggtcgtgcaggtggagattgcgttctgtggttgcctgcgccatccctgagagcatccagagaaaacagggaaaaatgtccactgcaaccttccacccgccgcctgaatgtg

SEQ ID NO: 187132 - DNA, 257 bp, Homo sapiens; identical to SEQ ID NO: 95229
  chr18:77083045-77083302
  hypo

SEQ ID NO: 187133 - DNA, 30 bp, Homo sapiens; identical to SEQ ID NO: 95230
  chr18:77085730-77085760
  hypo

SEQ ID NO: 187134 - DNA, 203 bp, Homo sapiens
  chr18:77089861-77090064
  hypo
ctccgcgtagaaacacgtgtgaggagcttaacacacaggaacacattcataggaattgctttttccattgtatgttttattagactagcagttatttgccccgagcaatgcagcctaaatgtgcctctgtttatttttgttctttgataggatgaatccacggcagaaatcacattctacatgaagggcgctgacgtggccat

SEQ ID NO: 187135 - DNA, 30 bp, Homo sapiens
  chr18:77092672-77092702
  hypo
gtaaaagtggacccacgctgttcaaaccca

SEQ ID NO: 187136 - DNA, 314 bp, Homo sapiens
  chr18:77126099-77126413
  hypo
tattgattctttttaccggacacctgggaggtgcagaactgtagggaagagacccgtccgtggtcgctaaaggtttgagtgtagagggtgaccggagaggcatcccgagggggtgtgggtgtggaagctgctctgtctggcgcggtggtggcggacacctgaccgtgcctctctcagagcccgctggacggcaccagcatggagctaagggaggaggaatgcagacagcggcccatgaaccgcagaaccacactgtgggctgggaagaaaggagctcttttcagtggccttgggaaaggcgtttgactgtggtt

SEQ ID NO: 187137 - DNA, 172 bp, Homo sapiens
  chr18:77127870-77128042
  hypo
ccaggtcattaaggacggggagacagaggcgctggccagatcacagagcccaggagacatcacggccagagcagcgtggggtcctgtgtggggccctgggcaggaaaagcacatttgagaaaaaccaggacctccacaccatttctctgccacggtgcgtgtctgtgtctcc

SEQ ID NO: 187138 - DNA, 164 bp, Homo sapiens
  chr18:77138793-77138957
  hypo
tctccgtattttccacgcaggcggcagcctccgccaggagtttcacctgttcattttcttccgcgtcgtttcccatcagggtgggccccgtcacctgaaatgctggcggagctgtgtgcgtggggttccgaaggcgtttcaccaaccagcggagggactgccca

SEQ ID NO: 187139 - DNA, 46 bp, Homo sapiens; identical to SEQ ID NO: 95232
  chr18:77143640-77143686
  hypo

SEQ ID NO: 187140 - DNA, 82 bp, Homo sapiens
  chr18:77145368-77145450
  hypo
ccacaccgccggggccggccacaccgccggggccaggccacaccgccggggccaggccacaccgccacggcaggccacaccg

SEQ ID NO: 187141 - DNA, 858 bp, Homo sapiens; identical to SEQ ID NO: 130200
  chr18:77159884-77160742
  hypo

SEQ ID NO: 187142 - DNA, 88 bp, Homo sapiens; identical to SEQ ID NO: 95234
  chr18:77161629-77161717
  hypo

SEQ ID NO: 187143 - DNA, 380 bp, Homo sapiens; identical to SEQ ID NO: 31537
  chr18:77166683-77167063
  hypo

SEQ ID NO: 187144 - DNA, 21 bp, Homo sapiens
  chr18:77167728-77167749
  hypo
gccaccgcgcctggccacctc

SEQ ID NO: 187145 - DNA, 359 bp, Homo sapiens; identical to SEQ ID NO: 31538
  chr18:77174744-77175103
  hypo

SEQ ID NO: 187146 - DNA, 595 bp, Homo sapiens
  chr18:77181263-77181858
  hypo
caggccactgttcccagaactcgagggttccctgacaccaagatgacatgtggcacagacctggaatcacgaggaaatgcccgtcctcctcccacgggcagacaggtcgagtgtgtttccagagaccgggccgtccgtggggcagtagcgcctggatgacgtctgctttcgcctggagccctggctgcaaggggcggtgccgggcaagggccaccccaggggtctgggagtgcagtgtcgggcctgtggaggtggagagcagggatcagcctctttttgtggatgaggaaatggagacacgtggaaacttctggtaagaagctgtcaagcctccaggtttcggttctggacaggtgcggggcaggtattggagcactttgggctctgaggtccacgtggcccagcggcctccaggagtcagctgcaaggcggagtccctgtccacaagctgcgttgcaggcacagagaccaggagagggctgtgaagcaactctgtgtttactgggctgaagcagcagctcttggcagtgccgccaccatgggctgtgtcctgtccccgtggcgacatcacagctgagcgcgaagctggaagctt

SEQ ID NO: 187147 - DNA, 30 bp, Homo sapiens
  chr18:77182889-77182919
  hypo
cctacagggagctgtcggctctgggcgagg

SEQ ID NO: 187148 - DNA, 274 bp, Homo sapiens; identical to SEQ ID NO: 95239
  chr18:77183184-77183458
  hypo

SEQ ID NO: 187149 - DNA, 30 bp, Homo sapiens; identical to SEQ ID NO: 95240
  chr18:77183673-77183703
  hypo

SEQ ID NO: 187150 - DNA, 269 bp, Homo sapiens; identical to SEQ ID NO: 95241
  chr18:77185305-77185574
  hypo

SEQ ID NO: 187151 - DNA, 145 bp, Homo sapiens; identical to SEQ ID NO: 95242
  chr18:77186374-77186519
  hypo

SEQ ID NO: 187152 - DNA, 30 bp, Homo sapiens; identical to SEQ ID NO: 95243
  chr18:77192626-77192656
  hypo

SEQ ID NO: 187153 - DNA, 201 bp, Homo sapiens
  chr18:77192930-77193131
  hypo
ccaggtcatgcagctcgtgtccctctgtgcaaagtaaccgaacagcctcccacagccctcaccgtcgtaccccgccctgctgcgtttgctcccaccgccctccatggacgccgtgtccctcctcctggccctcagtcagggccttctgtttgtcttgcagcaatcatggaatttgggggctggcggcgctgcgcacatcac

SEQ ID NO: 187154 - DNA, 386 bp, Homo sapiens; identical to SEQ ID NO: 55240
  chr18:77193398-77193784
  hypo

SEQ ID NO: 187155 - DNA, 442 bp, Homo sapiens; identical to SEQ ID NO: 95246
  chr18:77194171-77194613
  hypo

SEQ ID NO: 187156 - DNA, 328 bp, Homo sapiens
  chr18:77194819-77195147
  hypo
ggcgctggggtgaggcgttttcgccagcacttgcagatgatgttaatgtgatgtttgtggcctgtgtgcttgatgccaattagtacctccctcgttggtgcttgaagcaaggaaatgcgggagacacctgagcgcacagtggcccgtttgacatttaaagtctccaccctcccaggtgggaaaggtcagacagcgctgcaccacgctccgtcactgcaggcctgcacctccccatccctgcctcggtttttactgaccgaaagcttgttattgctcagtgggaaggatattagataggacaagaaacgaggctgtgaaaggaggagtg

SEQ ID NO: 187157 - DNA, 1762 bp, Homo sapiens
  chr18:77196526-77198288
  hypo
cccgcacccggcgtccgcgtcctcccacgcccgctgtctccgtcctccccatccccatgtgtttcgcagttgggaagtgaagcacgtgagcagaacgcagcaccttctctccaggaagcattcggagcatggactctgggttaggaaagggtgtttgctcctctggataggtgctcgctcttacttgtgggtgctgaggggcgtgagggggtccggcatccgggtacctgtgggcgctgaggggcgtgagggggtccggcatccggggcttctcccatttagggcctttccttcagagggaaggaggccagccccctccagtgagcactgagcgtgccccctgccgtctctgtggggatgtcattgttcccacgccggggagagaccaccccaggccagcccctattcttctggccacattgccatgatcacaccgtccgcaccctgaggccacccccattacggctgccacggcgctaaaaacaccagcatcaaagcaacagggccgtggtttagcctggaagagcggggccctggagccgtctgcgagggggtctgggtggttcaggatggccggcagcccctggtggacgtggtccctgcggggtctggcgggacctcggccatggtgatgggtgcgccccctctgcagggtggggcctgcgggtaaggacagtcccgccccctgtgcgtgtgaggggatagtggagagaggggtctggcgtgggcctcactgctcctgggaaaccaaagatgaagacgcctgcttaggactcaccttgccctggtagaacaagtgactcagacagagcctcccagaggcttctggccaggcagggagtgaccagcagcgcagccagcctcagctcctgcccacacagcccccttgtcaccggctcctcctgcccctgctccagcaccttggccaccagttctcggtgggccggtctggatctgccgatgccgggacctcgccaggccgctggttgcaggggaggctgagggggcgtccgcctgctgtctgcttctcaccagcatttccagtgaggcatgaaagtgatgcgtggcggatgtttccctctggcctcagctttcccccaaatcccagctcacactgagtgtcctgatggtggcacctcgggcagccgccaccctctgccctccaccctctgccctgacggcaggctctgcctgagggggagggtctctctgtacacacagtctcctcaccctggagggcctgctctgctctcaacggagctggaaccaggagttcgcgagtgctctgggtggctgctggcttttctccttgtctcacctcctcatccgcacacagcctctgccctcagcgctgctcacctcggtatgtaggcagccggcatcaggatggtctggggtgagacaggcagtgttcttccccttctctggccagggagggtggagaagcacccgggcacagccattgaggccttttcgtgcaactcattgcctttctgggcgtgaaggtggaggctggtcctccacctgcgtgttctccatctgggggactgtggtcccggaggagacctggagtccggctccccgctccgtccgaggaggagctgagcggcgtgagcagtgcccgccctggtcactctgccttgctttcctcctctctgtttctggttgtgcctccttccttccctcctgctctctttgccgtggactgcagccccctcgccagatgtgttcctcacatgagtcaacccgtccttggcctgcg

SEQ ID NO: 187158 - DNA, 172 bp, Homo sapiens
  chr18:77198658-77198830
  hypo
gagtctgcaaagaggtgagggcgggtggtctgggatcctgcctcagccgcgcgggtgagaggggcgggcgggtcaggcgaagactcagagtcaggaggccagactggccccagggagggctcctggccataccccaagctcaggacgcagggtggggcgggcccgctggtgc

SEQ ID NO: 187159 - DNA, 1043 bp, Homo sapiens; identical to SEQ ID NO: 95250
  chr18:77199643-77200686
  hypo

SEQ ID NO: 187160 - DNA, 30 bp, Homo sapiens
  chr18:77201070-77201100
  hypo
tgggccctgcggagccgagacgcaccatca

SEQ ID NO: 187161 - DNA, 37 bp, Homo sapiens
  chr18:77201347-77201384
  hypo
cacatggctgctgggcgggcagcgctcctgggcctct

SEQ ID NO: 187162 - DNA, 534 bp, Homo sapiens; identical to SEQ ID NO: 95252
  chr18:77201764-77202298
  hypo

SEQ ID NO: 187163 - DNA, 31 bp, Homo sapiens
  chr18:77203651-77203682
  hypo
tgcctcggttcctgccgggcacatggacgct

SEQ ID NO: 187164 - DNA, 1454 bp, Homo sapiens
  chr18:77204184-77205638
  hypo
cacatgtggtgtgtgtgtgtgcgtgtgtgtgtgcacgctctgggggggtgtgcacatttcccagtgtggctgtgcgtgtgtgtgtgcccacgtgtgttcacagaacaccaggctttgccccgactcctggctcaggcctgagtctccagccatggcgtccccgttcctcccgttccttctctgcactgcacactgggaaccaggacaagaggtgtgcggcgtcaggctgtgtccttcccccacccaccccgagcccacgctgctctggagggagaccccagcttcccccgcctaccccgagccctcgctgctctggagggagaccccaggcccctcaggccctttcccgcatctgaaggggccagggcagggcgtccggcagatgaagctgccccttaaagccaggtctgggccggtttacagggaagcactgctcacgtacaacctggcagaccacaccagcgccgcacacacaggcacccctgtgggcacccacgtgcccgaccccgcagaccacaccggcactgcacacacaggcacccccgtgggcacacacgtgcccgaccccacagaccacaccggcgctgcacacacaggcacccccgtggccacacacatgcctgcacacgcacacttctggtgcacacgcccacactcacggaggcttctgcacaccacacagccagcaggtgaggaagtggacgctgcgtggctgtctcttggtggcttcacctggaatgtcaccgtggaccccagagcccgaagccccggcaagcacagaaatcacaccggcagcctgtcccacttcgggcaggtgaggcctggctgagaaaagggggaaggagagggaggatgcgggggtgtgtcctggtcctccacccgtttcgggtttggggtgctcccttcgactactggctccatttttgatgtcttttacttttgtttcgatttttcctggtatcttgagtaaagtctccctggagcatcaaattggatttttcttacaagtaccgtgtgctgttgactcatctgctttggtgtgccgtgggtcacgtgggcctgggctgtgggtaaggtgggcctcgttcctgcaggaacacctggctctgcagcagtggctgccgtatcatcctggccaggcccctgtaccgagggtggagccacggggtctctgatgccttccttctcgtgctttggtggagaatgtggctggacgtcctcccatgacagatgcactctcctgcctggttccctggccccgggcccagccctgagagacgcaccacggccttcacctggaagtgtcacctctggctgctgttgtgggtgatgaggattccagggctgagaagaggaccctagacgctgttcacacagcgtggcaatctctcaaattaatccagcatggggggaatcggggttgaaaccggtttgtgagccggattttctgtccc

SEQ ID NO: 187165 - DNA, 158 bp, Homo sapiens
  chr18:77208089-77208247
  hypo
tcacccacacggcgccggccgagaagccatgagcggctctgcagggtggtgcggactatagacacctccatgcatggttgccctaggcagtgtctgccgccagcgtctgcctctggacactagctgctcagccaccaggacggcgttgagcgctcccc

SEQ ID NO: 187166 - DNA, 140 bp, Homo sapiens; identical to SEQ ID NO: 95255
  chr18:77208866-77209006
  hypo

SEQ ID NO: 187167 - DNA, 43 bp, Homo sapiens
  chr18:77209430-77209473
  hypo
aattttttagtaaggtgaggacgaaacatgtaacttccaaata

SEQ ID NO: 187168 - DNA, 928 bp, Homo sapiens; identical to SEQ ID NO: 95256
  chr18:77210975-77211903
  hypo

SEQ ID NO: 187169 - DNA, 452 bp, Homo sapiens
  chr18:77212144-77212596
  hypo
cctccatctgcagagagtggacgcttcgggggtcagttagcagcagggcaggagggagctcccctccggggccttcccctcccgccagcattcctggggtcggaggcagggatggggtgggtgccgcagacggcgggagctggggtggtctttaatgccacagccgtggtgtgtgtgaggctcttgtgccccaagggcacaggtcacccctgcctccaggtgttgcgctggcccagcctggaggctccggggctgaacttggaagggcagcaggggtgtcctcggagtgatgttcctcctggggccgtcacgcctgtggttctgtgctgcccacgggagactgtcctgcggggattgggctcacagagtggctcccagcccaggtcagttccatgcagacgccgggccccagcactctcatcccagaggggtggcctcgccggctccgagca

SEQ ID NO: 187170 - DNA, 459 bp, Homo sapiens; identical to SEQ ID NO: 95258
  chr18:77212956-77213415
  hypo

SEQ ID NO: 187171 - DNA, 46 bp, Homo sapiens; identical to SEQ ID NO: 95259
  chr18:77213651-77213697
  hypo

SEQ ID NO: 187172 - DNA, 30 bp, Homo sapiens; identical to SEQ ID NO: 95260
  chr18:77214945-77214975
  hypo

SEQ ID NO: 187173 - DNA, 176 bp, Homo sapiens; identical to SEQ ID NO: 95261
  chr18:77215330-77215506
  hypo

SEQ ID NO: 187174 - DNA, 30 bp, Homo sapiens; identical to SEQ ID NO: 95262
  chr18:77217333-77217363
  hypo

SEQ ID NO: 187175 - DNA, 30 bp, Homo sapiens; identical to SEQ ID NO: 95263
  chr18:77219225-77219255
  hypo

SEQ ID NO: 187176 - DNA, 30 bp, Homo sapiens; identical to SEQ ID NO: 31551
  chr18:77222007-77222037
  hypo

SEQ ID NO: 187177 - DNA, 30 bp, Homo sapiens
  chr18:77227657-77227687
  hypo
tcgccgtaaagcagcgtggcgtgttgcaca

SEQ ID NO: 187178 - DNA, 30 bp, Homo sapiens; identical to SEQ ID NO: 31552
  chr18:77231639-77231669
  hypo

SEQ ID NO: 187179 - DNA, 786 bp, Homo sapiens
  chr18:77235785-77236571
  hypo
ccacccccagcaagacgccaggcatcctagccacccgacgctcaggccgtgcgtgtcctcagagcgtgttttaaagcaggagggatttggggtggaagattgctcctgcagaaatcagagatgaggggagtaaattagggaaccagcgtcaggatccagacttctgtgaaagagccacagggctcagcatccgacgggcgcacctggggctgggcgagtctggctccagaaggggggtggggccgggagcctgagatgggatgagagggcgggaaggggcttgttgagaaatctaagggccacgggccaccaaaaacaaaccaggaggtgtgagtcagtggggaggctgggtgccaggaagcctgcgctctgggacatgcgtggggcaagaggggcgccctgagcttggcgacgccagccgcgcgcctgggagggatccgcctgtccacgtgcagccgcctccgggcggcgtcggccatgctgctgccccaccgtggctctgtggctccagccggaatggcaaagcctggctccacagctgcctgggagcgtgagtcacgcgccccacagaacacggcgggcagcgcgggcgaggattggcgaaagccgaccgatgtgttttggcttgtgtggtctgtgggagcgtcctttgtcatcagcctaattgggcaacagatcccacctcactgtgccctggagcagcacggggccaccacacagcctgaggccccacttgcgcttcccctcgctgccgtgctgtcctggccccgtcgctgccacctgaga

SEQ ID NO: 187180 - DNA, 30 bp, Homo sapiens
  chr18:77236892-77236922
  hypo
ggaaaccttggaacgcgcttcagcagaaac

SEQ ID NO: 187181 - DNA, 30 bp, Homo sapiens; identical to SEQ ID NO: 31554
  chr18:77240515-77240545
  hypo

SEQ ID NO: 187182 - DNA, 21 bp, Homo sapiens
  chr18:77246335-77246356
  hypo
accatactacagccagcagct

SEQ ID NO: 187183 - DNA, 842 bp, Homo sapiens
  chr18:77246388-77247230
  hypo
tggccggcttcccgccctgtccgcagagaagcaccctgatgccagcggcccctggcgtgagccccaagctccacgacctttctcccgctgcctacaccaagggcgttgccagcccgggccactgtcacctcggactcccgcagccggccggagaggcccccgccgtccaggacgtgcccaggccagtggccacgcaccccggctcgcccgggcagccacccccggccctgctgccacagcaggtgagtgcgcctccaagcagtagctgcccccctggtctcgaacactcgctctgccccagcagcccctctcctccactcccgcctgccacccaagagccgacctgcctgcagccctgcagcccagcgtgcccgcccgccacgggccgcccgcagcacctgccgtccacggtccgcagggacgagtctccgactgccgggccacggctgctgccagaggtgcatgaggacggtagtcctaatttggcccctattcctgtaacggtcaagcgagagcctgaagagttggaccagttgtacctggatgacggtgagtgcccgcagccatgcaggtgtgtgccccgcctggcgccatggcgtgagctcatggaggggccgtgtgcgtgctgcgtgtgtggcacgtgtggaagtgcaccgaggcaccgggcagggtgtggggtgcgtcctcctgatataaagtgcccgtgcggtgccacggcgtcagcgccacctggggcgctcgccgtgagatctgctccggtggtcgcagtgtggggcccttggcgggtcctgggctgcagatcctcctgcgagacctgtcccggggtctaaggctcacattgg

SEQ ID NO: 187184 - DNA, 30 bp, Homo sapiens; identical to SEQ ID NO: 130202
  chr18:77250669-77250699
  hypo

SEQ ID NO: 187185 - DNA, 507 bp, Homo sapiens
  chr18:77251268-77251775
  hypo
ataggaagcacagggcgccccaacaagggacgatcccagcacctggagaaggagcagagacgagagacagaaacaacacgaaccccaggtcaagtcggtgccgtgcgtgccaagtgtcctcagcgggtggaaagtgtcgctgtgtctttgatagtttacacaacagggagagagcgaaaagctggggttggaggaaacaggagagaagtaaggctgtgtggcggggacaagactcagacacacccctgactatctgtaaatgggccgatcggacacaaggccagggacctcctggccagccccgagccccgtgaggtgcctgtggcaggacgtgggtatggcaggtgacagaagccctgccgggtccactttccagcctccccggcttcccttctgcgttccgctggcctggccgccacctccagggacaacaagcctggcatggggtgcagatttagtctccagccctctgcgaaccaagcagtggtggatcgcagagctgcgtgc

SEQ ID NO: 187186 - DNA, 30 bp, Homo sapiens
  chr18:77253961-77253991
  hypo
aggcagctccccaacgccaagagcccgtcc

SEQ ID NO: 187187 - DNA, 447 bp, Homo sapiens; identical to SEQ ID NO: 31555
  chr18:77255659-77256106
  hypo

SEQ ID NO: 187188 - DNA, 30 bp, Homo sapiens; identical to SEQ ID NO: 95270
  chr18:77256407-77256437
  hypo

SEQ ID NO: 187189 - DNA, 109 bp, Homo sapiens
  chr18:77263493-77263602
  hypo
tgggcttaaaaccttcggtaaaccatgctgtgaacagaggtgccgtcatccgggctttgtcgctccatgggtggcgcacaggcagaggagattccgcgtcattcttagg

SEQ ID NO: 187190 - DNA, 61 bp, Homo sapiens; identical to SEQ ID NO: 95271
  chr18:77269733-77269794
  hypo

SEQ ID NO: 187191 - DNA, 590 bp, Homo sapiens
  chr18:77270851-77271441
  hypo
cggggcatcctctgccggggcatcttccgccggggcatcctccgccgggacatcctccaccgggggctcctccgccggggcatcctgctccggggcatcgttcgccggtcttgtcgctgcggtggaagtgtcgtgttcccagccaggctgggagtggtcgctggcgaggcctggcgtgggcccgcggtgtctgtcagggtgccctgggccagccccgctgattcgatttagagctaacgagagtccaccaacggcaattacaggaacctaatggccttcctgccgcaccgctccgtggcacccggctcgctgtgatgaattgctcattatgtgcagtgttggaatagcctccacaagattaataattggataatcaatacagaaattcaatcttggggtgtttttttcactccggggtcaatatgtcctgaagattacaaggcccgactctgcctcccccctccccgctgcttccgcgttgggagtttggccagcacctcgccacacgatgggtcatggtgcgttgtctccgtacctccgtgacttttctattctttgcaaacagcaggttctgccgggggtcagtgctg

SEQ ID NO: 187192 - DNA, 166 bp, Homo sapiens
  chr18:77271863-77272029
  hypo
ggagttggcaggattcggggcttctgggggaggccaggaacagagggcggcacgggcctggggagagcaggaagctgtgtgctggctctcaggagcccagtggatgggacgcagctgagacgtccgcagccatcccaggatgcgcaggtggcgggagcacgcgggg

SEQ ID NO: 187193 - DNA, 30 bp, Homo sapiens; identical to SEQ ID NO: 95273
  chr18:77272945-77272975
  hypo

SEQ ID NO: 187194 - DNA, 30 bp, Homo sapiens; identical to SEQ ID NO: 31557
  chr18:77273799-77273829
  hypo

SEQ ID NO: 187195 - DNA, 30 bp, Homo sapiens
  chr18:77275477-77275507
  hypo
ggctcggagggggctcggctcacacccctg

SEQ ID NO: 187196 - DNA, 250 bp, Homo sapiens; identical to SEQ ID NO: 95275
  chr18:77276518-77276768
  hypo

SEQ ID NO: 187197 - DNA, 30 bp, Homo sapiens
  chr18:77282635-77282665
  hypo
ccctcacctcagatacgccaagttccgggc

SEQ ID NO: 187198 - DNA, 30 bp, Homo sapiens
  chr18:77282951-77282981
  hypo
agggcccagcagagccggctgagctcagac

SEQ ID NO: 187199 - DNA, 203 bp, Homo sapiens
  chr18:77284565-77284768
  hypo
tcggcccacacgcaccgccagcccgcaggagtgaggtgcaggctgccgctggctccttaggcctcgacagctctcttgaggtcggccctcctcccctcccgagagctcagcagccgcagacccaggcagagagagcaaaggaggctgtggtggcccccgacgggaacctgggtggccgggggacacaccgaggaactttccgc

SEQ ID NO: 187200 - DNA, 30 bp, Homo sapiens; identical to SEQ ID NO: 31558
  chr18:77286037-77286067
  hypo

SEQ ID NO: 187201 - DNA, 465 bp, Homo sapiens
  chr18:77288113-77288578
  hypo
tttcctgggctgtcacgtacactcctgctgccttacacagtgcattttagaatcttccagtctgtcatctcagctcttttgtaacatgcttcccttgtctgcgcggttgaaaccgtaggcttgttcatagtcgcatgctcgcatctttgtttttaatctggcttcgaacatagcacaagtaacttgaatagcacatcaataggttactggacaaaagcagaaaaacctgttacaggatagcctgcatttgcatgtgtgtacatatctaggcatctatttatgtataaataataacagagccgacgtgtcctcgcccaggagggcttccctgtcagcaataaccggcatccgttttggaacctgcgtctggggctccagtcgctgctcttgctggcgtccatcgccgcctcggacggccgtgcattttctcgtctcacgcagttcgaggaggaccctagaaagcca

SEQ ID NO: 187202 - DNA, 31 bp, Homo sapiens; identical to SEQ ID NO: 95279
  chr18:77290968-77290999
  hypo

SEQ ID NO: 187203 - DNA, 190 bp, Homo sapiens
  chr18:77304065-77304255
  hypo
caggcttgcgaaggccgctggtgatggccactgctccgtgctgaggagcccaggctgatgctggaggagctttgggcccggtcccgctgctgccccaggagcccttcccaagacagcactggcttccaaatgatgctggacccgtctaatctctggctgttggcagccttcaccgcgggccacgttgtcc

SEQ ID NO: 187204 - DNA, 30 bp, Homo sapiens
  chr18:77307043-77307073
  hypo
gctctttaatcctcgcggcaagtgagacgg

SEQ ID NO: 187205 - DNA, 1165 bp, Homo sapiens
  chr18:77307589-77308754
  hypo
gtcagcactggcaaacggctctttcccagcgggcgcctccgcacccagcaaaccaggcccatccagaacggcagcacaggcgcctggctccagcggaggcggccctgagcagtgagccctgtgccccactccacaggagggctggccccagagcgcgggcggcccgctaggagccacacagccgacgcctcgggctgggcatggagcggggtctgtctgtctggtgtggctgcagctgtgtttggagcatgcaggagaagcccctccagatgcccacgagcccccaccactttggtgcccgtcctgccagccgtgctgcgggcgccctgggctcgctcttgtcaccccatcccccgaaggcctccagggccctctgttggctgctgacccagggccttctctagagcacctgactcgggcacacggaggctgctggaggagtgagagagtgagtggggggaggaattgcaaccaaattcagaatccgcccggccctgaggccgccccttgcctgccacccacccgggtgggggctttatttcgactcaggcacaggcgcacctgccggacccccggtgtctctgcgactccttctccgcactggcctgggcccgggctcccagccctccgctctgtctcgctggggcaaggcgtccctcactggccagttctgacattggtcccgggggagccgccttccacctgctggccctgctggccctgagtgtgactcagccgtgcccggcaggaccacgagacgtccgctgagcacgatgtctacctggcattcaaggtaagtcatcaagcgccccccggttaggctggacgtgtctgtgagggttccggatgagcctggcattgggatgagccaggccggctgcggtttgactcagtgagggaagaggcctggcttgggacaggaggaagctgcgttccagcctcaggggagcctccttcccctggccgcctccttccgcaccctcaacgcaacaaaaaggtgatttcagaattgtaattactaaagaaaacattaccaagaacgactctgcagcacccctcgttcacgtccccactcagcatctccacgcgggggccacgcgtccgtgtttgctgccggcagccatcagcatccgcaggggtcccccgtctccgcgcacagctcaca

SEQ ID NO: 187206 - DNA, 276 bp, Homo sapiens; identical to SEQ ID NO: 95281
  chr18:77309674-77309950
  hypo

SEQ ID NO: 187207 - DNA, 637 bp, Homo sapiens
  chr18:77312867-77313504
  hypo
gtgagcttgggcaacgcggcggcatgcggctgcagccactgggaacgagcctggctttggggacttgacttggccgtcaggcgtcgcgggagcccctgctgcgggctgagaagagcagccatcctggtcacacccctcggagcagcttctcaaggcttttggagggaggagctttcacagccttaatgccaccgtgggaaccgggagagagagtcccacggaaattcatggaaagctctgctgaagaccatttaggcttctgtctcctgaacttaaacctgggtaaggcgagtgtaaaggaaacgcctgcgtttggcggggctgggtttcagcagctcacacccagggagacacatttggcagccgaggccaccgccgtcctcaggcgtgggttccgtgactcagggaggacccgcccactgattcaccggcgcacctgccccgtcccgagaaacctggttctcctggggctgacccagcctaacccaggctccccagggagactcggaaagcacttccaagaggcttctgctcacccgggccctccacgtccacggctggatgtctcatcaacagtcacctgtcactgagtgccggataaagaaggcggtgaatgaactagcggtgggtgaatggc

SEQ ID NO: 187208 - DNA, 315 bp, Homo sapiens; identical to SEQ ID NO: 31562
  chr18:77313805-77314120
  hypo

SEQ ID NO: 187209 - DNA, 332 bp, Homo sapiens
  chr18:77314335-77314667
  hypo
cacagttgttgatcagtttcacgtgtctgtcccatttggcttgaaaaactaagtaaggggcgaacctgagccccaaagtcgtgcatagccgtatttacctctcagtccccggtaactggcaggtggatgtcacagtcttcactgtccccggtatctgtggatgtcaccgtcttcactttaagggtgactgggttagcctcagagggtcggcctgcagccttcccggcccagtgtctggcagagctttgccaagcggctcccagaaagttaccacccaagggcatctcacgcaatccttcgtgaaactcttcgatacccaggagtattaacat

SEQ ID NO: 187210 - DNA, 335 bp, Homo sapiens; identical to SEQ ID NO: 31563
  chr18:77315292-77315627
  hypo

SEQ ID NO: 187211 - DNA, 90 bp, Homo sapiens
  chr18:77315947-77316037
  hypo
ctagcggcgcctttcgggatggggccccgacgcatgtgtggggctctggagtggaggcgcagaggggctgagagccgaggctgggacgcc

SEQ ID NO: 187212 - DNA, 30 bp, Homo sapiens
  chr18:77317490-77317520
  hypo
caaaaccagggcacacgtgatgggcatgcc

SEQ ID NO: 187213 - DNA, 698 bp, Homo sapiens
  chr18:77317748-77318446
  hypo
cttgtctgtctgtcccgatctcactctccctgtctgtcccaatctcactctccctgtctgtctgtcccgatctcactctccctgtctgtcccgatctcactctccctgtctttctgtcccgatctcactctccctgtctgtcccgatctcactctccctgtctgtcccgatctcactctccctgtctgtctgtcccgatctcactctccctgtctgtctgtcccgatctcactctccctgtctgtcccaatctcactctccctgtctgtcccgatctcactctccctgtctttctgtcccgatctcactctccctgtctgtcccgatctcactctccctgtctgtcccgatctcactctccctgtctgtctgtcccgatctcactctccctgtctgtctgtcccgatctcactctccctgtctgtctgtcccgatctcactctccctgtctgtcccgatctcactctccctgtctgtcccgatcttggccgatccagacaagctgctcccttcagctgctcaggttcaacctctcaagactccggtgactcggtggccagcctcgtacttcccccgtccacctcctcaccactgtcctctgccaggggcccacaggccgccttgtccggcgagcaaggacttgctacctctcaggctcccggcccagccccaggcaccttccccgaccctggtctgca

SEQ ID NO: 187214 - DNA, 137 bp, Homo sapiens
  chr18:77319167-77319304
  hypo
taccccagcatctgccgtgtggacgggaagtgcacgctgtctgccatggggatggtgggtgtagcgatttgcagtgcgtttttctgggtgggcgggaaaagacctttcctgtctgctctgccgtggccgatggcatc

SEQ ID NO: 187215 - DNA, 30 bp, Homo sapiens; identical to SEQ ID NO: 95287
  chr18:77320263-77320293
  hypo

SEQ ID NO: 187216 - DNA, 30 bp, Homo sapiens
  chr18:77320524-77320554
  hypo
ggtgacacaggagagcgtcgctagagaggg

SEQ ID NO: 187217 - DNA, 62 bp, Homo sapiens; identical to SEQ ID NO: 95288
  chr18:77320766-77320828
  hypo

SEQ ID NO: 187218 - DNA, 255 bp, Homo sapiens; identical to SEQ ID NO: 31566
  chr18:77329762-77330017
  hypo

SEQ ID NO: 187219 - DNA, 30 bp, Homo sapiens; identical to SEQ ID NO: 31567
  chr18:77333358-77333388
  hypo

SEQ ID NO: 187220 - DNA, 30 bp, Homo sapiens
  chr18:77333975-77334005
  hypo
ggtttaccacccccgcgagggcctcatgcc

SEQ ID NO: 187221 - DNA, 142 bp, Homo sapiens
  chr18:77334278-77334420
  hypo
gcattgcgcattctgcgtgtgtcccaggaggaccctgtgcggtgactgttccacactttccacatttgcttctcctgcgagtcgcaatgggactgcgtgtgccgctggcccctggcattgcacattgcgggtttgtgccagg

SEQ ID NO: 187222 - DNA, 217 bp, Homo sapiens
  chr18:77336013-77336230
  hypo
tgttggggaatagctcgggggaagcgctttcagatgaactgcagggaacaggtgaagagtgtggacaccggagcatggggcggtgagaagacacaatacgaggcctgccgtccgaacgcggaccctgcagcccctgcggcgggaagccgtgaacacaaggctgagtttgcgcctctgatttgcgccacgtgatgggacttgccggggcctccctgcc

SEQ ID NO: 187223 - DNA, 437 bp, Homo sapiens
  chr18:77338964-77339401
  hypo
gtcccaagacagccgcgccgagtgtcctaacacagttgccacacggctccatgtcctgtgcacaggccaggggttcgagtgggcatcagcaatgctcacttcagagcccctccgccacgacgtggccatgtgcacacagctccgtggccagcgctggaaactgcgtctcctgcctccagctgcgttacttggagaagcaggaacctctccatcctcactttccatccgcacatccagggccgcccacgtgcacccacaccgtgcgctcactgtgtggcctgtcgagaacacagtgtcctctgcccctgatttcccaggagagtcgcacgtctgtgatggtggtctcccaggcacgcatggccatggagcacgggaacgtgtgcgcctgctgggagcacatgggaagactgcacgccgggtgctgaggcttcctgtga

SEQ ID NO: 187224 - DNA, 592 bp, Homo sapiens
  chr18:77340200-77340792
  hypo
gtgtgtacgtgagcgcgtgtggcggtaccagcacaggggtgagctgcggcctcacaggcttctcactgctgcagctggatgtgccactgtagacggtcggggcaggggcctcctgccctcaagctgtgtgtggcagccacgggtccccgtgcctgcagcctgagacaggcgcctggagtcgctgcctggggcaagtgagttctgctggaggaaatgatgtagatgctgcaagaaggcaacagcagagtcagaagttgaggagaagacagaggtaatagggaattgctcctcagcaacgacacatgagagtcgcgtgtgccgtgatcccaggcagctgcagctgcgtggatgccacatggggaacccggcttccagacccgccctcaagggccgagcgtctcacgcccagcttcattcctccccatcttgggggtgctgctcttgtgctgcccagggtcccccagtcgtgcaaagcctgtctttgttttgttagccaaagtcccaggacgggggctcacccgaaccatgtcaccctgtgatgaggacaggagggatggagccttcctcgatctgagctcgggctgcagccctg

SEQ ID NO: 187225 - DNA, 151 bp, Homo sapiens; identical to SEQ ID NO: 95293
  chr18:77347861-77348012
  hypo

SEQ ID NO: 187226 - DNA, 189 bp, Homo sapiens; identical to SEQ ID NO: 31570
  chr18:77356568-77356757
  hypo

SEQ ID NO: 187227 - DNA, 30 bp, Homo sapiens
  chr18:77357941-77357971
  hypo
tcatcgggactctgccgcaagtgaagacgt

SEQ ID NO: 187228 - DNA, 792 bp, Homo sapiens
  chr18:77358202-77358994
  hypo
ccagggtgaaagccacagcaccggccctggtttgggatgacaccgcggctgtgatctcggcagccacaggcttccccgtccgactcggccgagaagcctctcctgccacctctgagctctaggcttggactctggagtggttgctggagtcacttcccaccgtgccgggcaagggctgcaggagggcacagcgtgcgggacgctggcaactcacagctgcctcccagccacaccccccacctcctgcaggctccagggccctttgtctctgagaacgagagctgcatcttgtccagtgggtttcacaggtctcaggactgggaatggcgctgggcgcgtggacaggtgaagtccattgttcctgctgctgccggtgtgagccgcagcccacgcccaccaccaaggaggcagaacggcggtgtgaatggagaaccactcatttgccaaatcatttaaatcagacttttcacagctgagaatgccaccgcaaagcacaaatgactttgttccagagagaaaagggagagcagggcaccgaggcagaccacgggaacacgagcagcgccttccacgctgtccgggcagggcaccgaggcagatcagactgcagcacagtgtctggggagccctctcgaccagtaaggaaagtggcacttgaggctgagaggaagagagcgattccaggtgaaaggactatttttaaagactccccagctagccggtctgtttcttcattaattttccttaaaagctccacttgtgagacaggcaaatgctcgccacctgcccccg

SEQ ID NO: 187229 - DNA, 112 bp, Homo sapiens
  chr18:77364433-77364545
  hypo
ccgggcttgtggctgcgtcattctgccctctgccccctgggcacgcagctgactcccctgtatgggcccatctctccgaattcacatgaccgtccttcggtaaagacaccag

SEQ ID NO: 187230 - DNA, 225 bp, Homo sapiens; identical to SEQ ID NO: 95296
  chr18:77365606-77365831
  hypo

SEQ ID NO: 187231 - DNA, 90 bp, Homo sapiens; identical to SEQ ID NO: 95297
  chr18:77366224-77366314
  hypo

SEQ ID NO: 187232 - DNA, 30 bp, Homo sapiens
  chr18:77367810-77367840
  hypo
cccactgctggtgtgcgtgcacctcaggcc

SEQ ID NO: 187233 - DNA, 98 bp, Homo sapiens
  chr18:77368582-77368680
  hypo
aggcacaggtacacgcggtttccgggacctggccacgggccactctccaggactgactgcaaggaccttcacctccgaggagccgggagagacggaga

SEQ ID NO: 187234 - DNA, 31 bp, Homo sapiens; identical to SEQ ID NO: 31572
  chr18:77372905-77372936
  hypo

SEQ ID NO: 187235 - DNA, 30 bp, Homo sapiens
  chr18:77374899-77374929
  hypo
acaaccaactagccacggtcatcgggcatc

SEQ ID NO: 187236 - DNA, 66 bp, Homo sapiens
  chr18:77375216-77375282
  hypo
gctacgaagccacgccgggtgagaacccacccaaagcgtgtgatcgcctcacgtcacagcctggct

SEQ ID NO: 187237 - DNA, 160 bp, Homo sapiens; identical to SEQ ID NO: 95299
  chr18:77382548-77382708
  hypo

SEQ ID NO: 187238 - DNA, 30 bp, Homo sapiens
  chr18:77390140-77390170
  hypo
ctattgttcgttgttcgggaaacttcgccc

SEQ ID NO: 187239 - DNA, 104 bp, Homo sapiens
  chr18:77390501-77390605
  hypo
gcctaattacactcgcggcgtcagcgttctgggcaggccgttcacactgaaactcggtcggcactggcgctggggcggatcctggccatcgaccactccattct

SEQ ID NO: 187240 - DNA, 30 bp, Homo sapiens; identical to SEQ ID NO: 95300
  chr18:77395503-77395533
  hypo

SEQ ID NO: 187241 - DNA, 388 bp, Homo sapiens; identical to SEQ ID NO: 95301
  chr18:77410014-77410402
  hypo

SEQ ID NO: 187242 - DNA, 247 bp, Homo sapiens
  chr18:77438001-77438248
  hypo
tttcccttgtagtcacgagggtaggggctggagaaagcagcagagatagtcaaaaacccacagctacaaaaaatgcactcctaagagcaagtaatggcgagggctaaaaggcactgtgccccttctgggccattctaattaccacatttaaatggttttgagaaaagagaatttttatctgaggaacgcgagttcttttaattatcaggccgagagagacattcaaatgaggcgacaatcgcgccct

SEQ ID NO: 187243 - DNA, 30 bp, Homo sapiens
  chr18:77443616-77443646
  hypo
gctgcctgaggaatgcgcaggcgatctgac

SEQ ID NO: 187244 - DNA, 60 bp, Homo sapiens; identical to SEQ ID NO: 31573
  chr18:77456031-77456091
  hypo

SEQ ID NO: 187245 - DNA, 84 bp, Homo sapiens; identical to SEQ ID NO: 31574
  chr18:77457660-77457744
  hypo

SEQ ID NO: 187246 - DNA, 30 bp, Homo sapiens; identical to SEQ ID NO: 95304
  chr18:77458233-77458263
  hypo

SEQ ID NO: 187247 - DNA, 22 bp, Homo sapiens
  chr18:77459546-77459568
  hypo
gccaccgcgcccgcccaaggtt

SEQ ID NO: 187248 - DNA, 30 bp, Homo sapiens; identical to SEQ ID NO: 95306
  chr18:77459831-77459861
  hypo

SEQ ID NO: 187249 - DNA, 317 bp, Homo sapiens; identical to SEQ ID NO: 31575
  chr18:77463263-77463580
  hypo

SEQ ID NO: 187250 - DNA, 30 bp, Homo sapiens
  chr18:77464141-77464171
  hypo
ccgcactcactcactcgtaccgcgtgcatg

SEQ ID NO: 187251 - DNA, 30 bp, Homo sapiens; identical to SEQ ID NO: 95308
  chr18:77465512-77465542
  hypo

SEQ ID NO: 187252 - DNA, 739 bp, Homo sapiens
  chr18:77474486-77475225
  hypo
ttagtaaatcattctcgaggcactgaggtctcagagccatctccgcccgtgagagaccctgagggggtaacgcaggcccctggagtggagcccagcaatggcctggagaagcctgcacgggagctgaacggcagcgaggccgccaccccgcgggactcaccccgccccgggaagccagacgagagggacatctggccccctgcccaggcccccaccagcagccaagagctggcaggcgctcctgagccccagggatcctgtgcgcagggtggccgggtggcaccgggacagcggcctgcccagggtgccacgggcactgacctggactttgacttatccagcgacagcgagagcagcagtgagtccgagggcacgaagtcctcctcctccgcctctgatggcgaaagcgaggggaaaagaggccggcagaagccgaaggctgccccagagggagccggggcgctggcacagggcagttccctggagccggggcggcctgcagcaccgagtctccccggagaggccgagcctggcgcgcatgccccggacaaggagcctgagctgggtgggcaggaggagggcgagcgggatggcctctgcggcctgggcaacggctgtgccgacaggaaggaggcggagaccgagtcacagaacagcgagctgtcgggggtcactgcgggtgagtccctggaccagagcatggaggaggaggaggaggaggacacggatgaggatgacc

SEQ ID NO: 187253 - DNA, 82 bp, Homo sapiens
  chr18:77479161-77479243
  hypo
ctctagttcctccccggttttctgtttcatagattgtgttttgtcttttacgattctggagagcagcgtgtgcccctctcgg

SEQ ID NO: 187254 - DNA, 30 bp, Homo sapiens
  chr18:77482822-77482852
  hypo
cggcaggagttctgcggggccttcgtgctg

SEQ ID NO: 187255 - DNA, 261 bp, Homo sapiens
  chr18:77485493-77485754
  hypo
ttgaaggaattgctccgcttaccttctctattttttttttgtttgtttttcagcctccttatttcgtactttccttctgcttgctttgggattatttcttatgacttttgttttgacagtcaagtgtggtctagagaactcgagcggagtctccggtgcttgcccggattcctgcttccgtcctcacgggaggttccctcggggtcccttccctcccgacctgacctggagtgtccatcatgctctcggggcaggcctggg

SEQ ID NO: 187256 - DNA, 40 bp, Homo sapiens; identical to SEQ ID NO: 95310
  chr18:77493026-77493066
  hypo

SEQ ID NO: 187257 - DNA, 442 bp, Homo sapiens; identical to SEQ ID NO: 95311
  chr18:77493432-77493874
  hypo

SEQ ID NO: 187258 - DNA, 30 bp, Homo sapiens; identical to SEQ ID NO: 95312
  chr18:77495548-77495578
  hypo

SEQ ID NO: 187259 - DNA, 30 bp, Homo sapiens; identical to SEQ ID NO: 31577
  chr18:77495889-77495919
  hypo

SEQ ID NO: 187260 - DNA, 30 bp, Homo sapiens; identical to SEQ ID NO: 95314
  chr18:77496345-77496375
  hypo

SEQ ID NO: 187261 - DNA, 423 bp, Homo sapiens; identical to SEQ ID NO: 31578
  chr18:77497993-77498416
  hypo

SEQ ID NO: 187262 - DNA, 30 bp, Homo sapiens
  chr18:77500309-77500339
  hypo
tcaaaagggtggggcggtggggtcttttca

SEQ ID NO: 187263 - DNA, 213 bp, Homo sapiens
  chr18:77503022-77503235
  hypo
atttgccagtagccgcgccgaggaggggcctaggattaaatgacagcagatggtgactggaatttacagcaagagctgaagagacccaggagtgctgaacaagaaggttggtctcaccgtgctccgagtgtgcacctgttccctgtcctgctgtaaataattacaacgatgcattgttgggtttgtagcatgcatggatgtggtatcgtacag

SEQ ID NO: 187264 - DNA, 97 bp, Homo sapiens
  chr18:77503528-77503625
  hypo
aaaaaaaaaaaaaaaacagtgaagcacaaagtgaggagtctgagtgtgcacctgctctcactcctgctgtaaataattacaacgatgcattgttggg

SEQ ID NO: 187265 - DNA, 30 bp, Homo sapiens; identical to SEQ ID NO: 31579
  chr18:77507718-77507748
  hypo

SEQ ID NO: 187266 - DNA, 1085 bp, Homo sapiens
  chr18:77508724-77509809
  hypo
catctcacacaacagcgacagagtcatgatcagaggcctttagagtcatcattatcatgtctgtgtgtgagccgtgactgcctgggagccgtgtctgcctgggagccgtgactgcacatgagccgtgtctgtgtgtgagccgttctgtgtgtttgccgtgtctgtgtgtttgccgtgtctgtgtgtgagccgtgtctgtgtgtgagccgtgttggtgcatgtgcacagggctctccagcgggagctgaggtggtcccttccgtgggctcggttcaggtcctgtggcaccctgccaagttatgctggcgtttctgaaggtgtgtcctgctgtcaacagcactctgggtgtttttgtcggccttgtgaggggaacatatttctaaacctcaaacagagagtcacagctggcatttcccattctttgccatcctcttgctgccattagaactctgccacggatggcttcctcgcttgattttagaaagaaaagaattgttggaactggttcttgcacctctcgccctccccctcctctccctgcttgccccagggtcccgcctggctctcgtctgccccgtcttcactttcggtcggggcccctgcccctgcccctgctctgctcagtgcccctgatacgtccaacccagcgtcgctgtgagggagtcaaccacacctgccagcacccccgagtctggccccactaggaggggccagggctcccttgagcaaggcatcagcacacaggcagggagccgggcaccagactgtgagggtcgcgccccgtgcacacgagatccaggcccgccccctcctggacttggtgaccgtcccgagctcgacctgagagggcacttcggctctcctgttcacagtcatgactgccccctccccgaggtcagcgccatgcactgctctgggggcctgaaacaccgcctctgttcgcaagggtctcctgtcccgtccacctgccagtgggttgagctcttccaggggttcgggacacccctcacggcagcaccttcacgtttacgagaactgtctctgtcttgttttgtttcaagttctcaaaacggagtgaggtggag

SEQ ID NO: 187267 - DNA, 17 bp, Homo sapiens
  chr18:77510162-77510179
  hypo
tgcacagaaaaggtgcg

SEQ ID NO: 187268 - DNA, 80 bp, Homo sapiens; identical to SEQ ID NO: 95320
  chr18:77510421-77510501
  hypo

SEQ ID NO: 187269 - DNA, 246 bp, Homo sapiens
  chr18:77511470-77511716
  hypo
agttgggttctctgaacgagcttgtcgtgactgatcggctgtgtgtgccagcccacggggttctcttgtcttctgttggttccatctgatcagctgattttattccttttgtctcttataaatgaactgtgattcttctaataccagcaagaatggtttcaagttatttctgcgctatagtttgtgtatattagcctcgagtgcatgtgtgttacatgcgtgctgtgtgtgcgtgcaggtgtatca

SEQ ID NO: 187270 - DNA, 203 bp, Homo sapiens
  chr18:77512013-77512216
  hypo
agctgaggttccttggcgcagtgggacgtcccagcacggcaccaggagggagggtgtctggcaggacatcaggtggttggaatttcagggctctggggatctcctgggtgtgccccgatcaagtcggctcacgtcacagaaaccaggtgcacctgcagcggctcctaaggaaaacctagtggcactggctggttatgcagagg

SEQ ID NO: 187271 - DNA, 30 bp, Homo sapiens
  chr18:77515993-77516023
  hypo
caggttctccccgacgcggaagagcaaggg

SEQ ID NO: 187272 - DNA, 31 bp, Homo sapiens
  chr18:77532168-77532199
  hypo
gcagctcccacggcctcgtccatttctaaaa

SEQ ID NO: 187273 - DNA, 30 bp, Homo sapiens
  chr18:77534955-77534985
  hypo
gtcccgcaccgttcccgtcgcatgatctca

SEQ ID NO: 187274 - DNA, 283 bp, Homo sapiens
  chr18:77535503-77535786
  hypo
acgatgggcgggtcccgtcctgggtggggcagagcgggatggattctatcgcctgctcagaacgctgcacgatgtaaaactggtacttgccagggacaagaaggaccattcagctttgggacgtgaccaggaggtctcagagagaagcaaacagctgcgtccctgtgctgaggccgctggcgtgggcgcctgtcctggagcccggggtattggcagcgcccagggggagcccagcgacccattgtggctccacatcccacaggttcaccggagacaagccttt

SEQ ID NO: 187275 - DNA, 748 bp, Homo sapiens
  chr18:77542641-77543389
  hypo
gccgactctgcagcccggcgactgcttcccaggtgactgtttccagagtcaggtgttggccgtggtcaggttgacctgcctgtttgttttctataagctgtgtgtgttgtgcccgggtgtagatgccctgaggtttcacggccccccagcaagcagccccaggcccggcaccggatgggcccttcatacccattcactgtaacagacaagcagacggatgaggccatcgtggtccctctgaataaacgatgcttcacagaagtctcccctttcaaaacacgtacagcgaatgactcgggcttcagagccaccctggggtgccgtcggctggtgggtgatggagcggctctgcctggctcctctcggctctggcgcggcaggtcttcctgctttccaagcccgtgtccctggtgccagcacagaactgaactccgcccttgagtcgtgcgggacgagaccccgtgctgcgggcgcagtgccctctgtgggcggcgcgtggtggctgtcctccgtttcccacccggcgtctactgggccttgtccagtatcactgggagctgcaggctcggctagcaggtggctcccgtgccatccccgtgagctccgcctggccctgctgctcccgcccggaaagctcagacccataacccagcccacttggcagcagcgtgccgcctgatcggcaaggtttactccctttgaaaatctctgttgggtggccgggcgcggtggctcacgtctgtaatcc

SEQ ID NO: 187276 - DNA, 88 bp, Homo sapiens; identical to SEQ ID NO: 31583
  chr18:77543688-77543776
  hypo

SEQ ID NO: 187277 - DNA, 30 bp, Homo sapiens
  chr18:77544238-77544268
  hypo
gcgtcacaaggatggcgacactttcaaccc

SEQ ID NO: 187278 - DNA, 114 bp, Homo sapiens; identical to SEQ ID NO: 130204
  chr18:77547933-77548047
  hypo

SEQ ID NO: 187279 - DNA, 170 bp, Homo sapiens; identical to SEQ ID NO: 55243
  chr18:77548351-77548521
  hypo

SEQ ID NO: 187280 - DNA, 420 bp, Homo sapiens; identical to SEQ ID NO: 31586
  chr18:77549954-77550374
  hypo

SEQ ID NO: 187281 - DNA, 31 bp, Homo sapiens; identical to SEQ ID NO: 95328
  chr18:77555363-77555394
  hypo

SEQ ID NO: 187282 - DNA, 114 bp, Homo sapiens; identical to SEQ ID NO: 130207
  chr18:77557776-77557890
  hypo

SEQ ID NO: 187283 - DNA, 484 bp, Homo sapiens; identical to SEQ ID NO: 55246
  chr18:77557912-77558396
  hypo

SEQ ID NO: 187284 - DNA, 834 bp, Homo sapiens; identical to SEQ ID NO: 130209
  chr18:77558416-77559250
  hypo

SEQ ID NO: 187285 - DNA, 152 bp, Homo sapiens
  chr18:77561346-77561498
  hypo
tgcgtcctcctcccccgaggggatcctcacatctcttagtccagcaggtccaggtcctccatccctgctgggtttcctcagccggggcctgtggaggggccacacctgccccgcactgcccacccttcacccaggcccggcaaggaggggac

SEQ ID NO: 187286 - DNA, 30 bp, Homo sapiens
  chr18:77561844-77561874
  hypo
tctcacccgtgtccccgccctcgcatggag

SEQ ID NO: 187287 - DNA, 255 bp, Homo sapiens; identical to SEQ ID NO: 95333
  chr18:77562266-77562521
  hypo

SEQ ID NO: 187288 - DNA, 605 bp, Homo sapiens
  chr18:77608082-77608687
  hypo
ttgcagagcttctcccggtgaaggcagaatgtctgaaaccctagcgtgggctcagcagctgccaggggccagtgatgaacgccaacctcatctgtcctcgatccctgaggctaatggtgacgcatatgcttctaagtagggtttgccttttgcttggaaggaaatgttataattatttcaccctaacccgctgcattcgttgcttagagctgcgcagcctaaaacaccagaaatgtattctctcaaccccgggagtcccaagtacagagtaggggtccgcaggcctgtgctgtctctgaaccgctggggaggggcctgcgttgccgctcgggctcctgcagcaccggccatcgtcagccctccttggctgtgacctcggcctctgcatcccacggcctcagtgtcggcctctcccctcttatggggacatccgtccctggactcaggcccaccctaggggccttgtcttagccacacgcgaaaagaccctgtttccccatgaagtccgtctcacaggtcccggggctgagactcgcacacacttccggggacgcagtggaacccacagctctgcctttgggcagcagccgcgtgggggaaggagg

SEQ ID NO: 187289 - DNA, 743 bp, Homo sapiens; identical to SEQ ID NO: 31589
  chr18:77609430-77610173
  hypo

SEQ ID NO: 187290 - DNA, 40 bp, Homo sapiens
  chr18:77615732-77615772
  hypo
gccctcgtgctgtgacggccattcccgttcacctctgtcg

SEQ ID NO: 187291 - DNA, 149 bp, Homo sapiens
  chr18:77616283-77616432
  hypo
actggaggggtggggcgtcagagccacgatgctccgcagtaataacgcaggtgactctctgtcccttagggtgaaactggatgttcattttccaggtcgaagccgctggtctcagctgtgttttcaccggttccctgaaagagaatacc

SEQ ID NO: 187292 - DNA, 143 bp, Homo sapiens
  chr18:77627460-77627603
  hypo
ggaccgtgagcccggcgttgtgtcgtgtctgggggggggatcgtgagcccggcgtgtgtcgtgtctggggggggaccgtgagctcgtcgtgtgtcgtgtctgggagggaccgtgagctcagtgtgtgtcgtgtctgggggggg

SEQ ID NO: 187293 - DNA, 638 bp, Homo sapiens
  chr18:77627957-77628595
  hypo
tacaggtttggaagtcggctgctgcctgcagtctgggtgtctggcggccaggctgccttcccccgtcgtccccatgaggtccaggtcctgatcgtgcttccaaaaggtgctggagtgtttggctgtcctcggtcgaatatccaggagggaaaattcatttgtgtcacgttagagaataggagaagtttgggctgccccagctacagaagtcaccccaggaacaccagccctaacccttactgtggaccccaaaaccccagatcctctcagggacaaccctgggctccgtggcacccagcccttcacactcctggcacgcacccctaaattgcttgtccagttaagaagcagtcgccctccgcgtggggcctggtgacccgtgtccgagcgtccggttaagaagcagtcgccctccgcgtggggcctggtgacccgtgtccaagcgtccggttaagaagcagtcgccctctgcatggggcctggtgacccgtgtccgagcgttgcagctgctgctgactgaccgaaggtctttttcggaagcgattcagttgtgtgggtgaagagccaagaaaaggtggttctcactcctgtcctaagagaatatttcaaagcatgagaattggcgtgttggtgacgta

SEQ ID NO: 187294 - DNA, 426 bp, Homo sapiens
  chr18:77628923-77629349
  hypo
ttgagaactaggagtcggtgttactgacagaatgtgagctctctgatgggatgtgtgcgggaggctgagtccagccaccacacgggtcggcttccacagggtttcccgcacgcactgtgctgtcccaggtgcaggggtggggatgcaggagccgtgagcacccctacacacagccctgcagacactggggagaccccgagccagagtccagctgggacagcctcccgggtctcctggatacctcggagaatgagggaagcccagggtgctggttgctttcagtgcccgccccgcgctgagtctcctgcccctgggctgcgacctgcacaggggcagtagctccctgtggggagggctcggctcagggaccacggaaacgcctggtctgctgcacacggcgggtgcggaagaaataggaagcctcag

SEQ ID NO: 187295 - DNA, 31 bp, Homo sapiens; identical to SEQ ID NO: 95340
  chr18:77630315-77630346
  hypo

SEQ ID NO: 187296 - DNA, 30 bp, Homo sapiens
  chr18:77631226-77631256
  hypo
acaaatcgcacctcccgcctcctggcagcg

SEQ ID NO: 187297 - DNA, 182 bp, Homo sapiens
  chr18:77631594-77631776
  hypo
agcaagtcgagtgggcggtgcaggaccagccggtggccccccgcgtctgggaggctcccacaccaccagtctccacccaggggcagtagagggaggggaaggcggccccctatgacgccttggcagagcctctgcgtccgtctgcgtcccgttggcctggacgtctgcggtgcagaggggcc

SEQ ID NO: 187298 - DNA, 804 bp, Homo sapiens
  chr18:77635953-77636757
  hypo
cactgcaccgatgtccggcacgcagtccccaggcgggcacactgcccagcagcccagtggcaggagctcagagctgacttgcttcttgcccaggtctggggttggtgcagcgcccgcagctcacgggccacagcagcggaaggtctgcggcattttggaccttgctgttgccggggcagtgggtgttggcgccacatccaggacccatctcccgcctggtgccgctgccatcacagtgaagctggactgaaacccacagacaggtccagccctgccgggcaggcgtgatcaggctgacactgcggaaaagccccactaggcaggtatgattgagctggcgtctccgaagggccccagccaggcagggatgatcgggctggcgctgtggaaagttgcaagcacactgtgtgggcacttggtggggctgggctgggtgcagagcacctaatggagaggagtcacctgcggcgtggccactgctgtgggctgcagttcccgggaaacagcagtggaaaccagcggcccagggacaggacaggggctgcaggtgctgagccgttgttcgacccagttgaattctaactcgtgacttggaacgattctgtcccgggaaggatgccctcttctgcatccacaggcagtggtgccctctgcgagcagcttgctcacctgtgtctgtgacgctggtgccctgagggcagggccagccccctctctcggcacagctgggtgaatcatcaacgacacccttggcaccgtgagcacttgcacctgcagaccgcctggtctcgctcttgggcacca

SEQ ID NO: 187299 - DNA, 368 bp, Homo sapiens; identical to SEQ ID NO: 31593
  chr18:77638242-77638610
  hypo

SEQ ID NO: 187300 - DNA, 255 bp, Homo sapiens
  chr18:77642671-77642926
  hypo
ctcaaaggagggtgcgcggccggcaaggctcaggacctgcaggccatggagtggcgaggctgccatggagtggcgaggctgccgtggagcgcggaggccgggtacacctgcgcgtggagcgcggaggccgggtacacctgcgcgtggagcgcggaggccgggtacacctgcgcgtggagcgcggaggccgggtacacctgcgcgtggagcgcggaggccgggtacatctgcgcgtggcacgcggaggccgggtac

SEQ ID NO: 187301 - DNA, 231 bp, Homo sapiens
  chr18:77643801-77644032
  hypo
agcaggcatgttttcgtttttgctttggtgatagtggatgatgccgtttacagggcccgtcatggcggctgcagccccttctgccatttagcacagacttgcaccggcgtccccaccggcacgtccacgagggctccatgcagcccggcccactgacccccaactcgggtgtgcctgggtggggaccgtcccccgcccccgtctagccagtccccacgtcctgacgtttct

SEQ ID NO: 187302 - DNA, 477 bp, Homo sapiens
  chr18:77644464-77644941
  hypo
agtgggatggagccccggccactgggtccccgggggagagccaggctgtgatgtcccgatgcagtggaggagcagggctgggtctgggcctgggcctgggcgtggcagctccccaggcccacggggcaggaattctagattctgggattcctttcatcgttgctttttgtgttttctacctagagcggagaaatgtttgtggtttccaaagagaccggacacgcccaaggcccacagacacgtggcttcgtgatggggagccacgggggcaggggtccgcccggctctgtgttcctcgggggggctcatcctggggcccaggaactcgggagcggtttacccacaggttcctgtgcgtgggagcaaacttgcttttcccattcacagaaacacagtagcgtgcgcgggtcggtgatgcagccaagacaccatccctgaaactgtgataatgagagcgtcctgacaccagggctggga

SEQ ID NO: 187303 - DNA, 638 bp, Homo sapiens
  chr18:77664460-77665098
  hypo
ttgacttctctgtggccgcaagagctgccgcctggctggggctctgcaagcccaagaacagtgagaccagctcgaggctacaggggacagcagggcgagcagctgacgtcagggcccctggtgcgcggtggcaattctgggaggggccgggcctgggagggtgctgaggacgcagatctgtgcccccaggcacacagccaagtggagcagagcagctgcttttgggtctctgccggcctccctccctggtgatagatgcaaaccttcctttcctggagtgaacagggagcagccgccacccaccatcccagtccgaacacgcttcccccaccgctgtgttcatgccctggcttgcctagcagtgaacatgagtgctgctgcactttcccgtgtgaaatgtttaaatcagcggccgctgacccttccacagctcctgaagccagaggcagagcctgggtggggagcgctgcctggacagaaaggacaggacacagccctcccccaccctggggcgtccgtcccgctcataagccagggtgggcacctgggtgccgtagccgccctgtgtgagagtcttcaggcacagccatggccgggtgtgttcagggctggagctaggaacccgcaggagacagccg

SEQ ID NO: 187304 - DNA, 279 bp, Homo sapiens; identical to SEQ ID NO: 95347
  chr18:77675214-77675493
  hypo

SEQ ID NO: 187305 - DNA, 30 bp, Homo sapiens
  chr18:77676198-77676228
  hypo
tcccgtacccgcggcgctcttgtacctgcg

SEQ ID NO: 187306 - DNA, 31 bp, Homo sapiens; identical to SEQ ID NO: 31596
  chr18:77677978-77678009
  hypo

SEQ ID NO: 187307 - DNA, 30 bp, Homo sapiens
  chr18:77678399-77678429
  hypo
tccccagtgaggagcgggcccggggggggg

SEQ ID NO: 187308 - DNA, 30 bp, Homo sapiens
  chr18:77684998-77685028
  hypo
gtcaggagaagtcggcggacacgggggaca

SEQ ID NO: 187309 - DNA, 131 bp, Homo sapiens
  chr18:77685459-77685590
  hypo
gcattcaatgctaaacgaatgtttccaggcttggggggctcaccagaggcccaccctggcatgcactgagcagagaacagctgatcctcagaagcttccgtcgcacgggcgtggctgccctcaactcacag

SEQ ID NO: 187310 - DNA, 159 bp, Homo sapiens; identical to SEQ ID NO: 130210
  chr18:77710772-77710931
  hypo

SEQ ID NO: 187311 - DNA, 36 bp, Homo sapiens; identical to SEQ ID NO: 55250
  chr18:77712072-77712108
  hypo

SEQ ID NO: 187312 - DNA, 31 bp, Homo sapiens
  chr18:77713122-77713153
  hypo
ctgcccctgctcagccgcgccctagcctgag

SEQ ID NO: 187313 - DNA, 31 bp, Homo sapiens; identical to SEQ ID NO: 31598
  chr18:77713636-77713667
  hypo

SEQ ID NO: 187314 - DNA, 35 bp, Homo sapiens
  chr18:77718361-77718396
  hypo
ggattacaggtgtgagccaccgcgcccggccaacc

SEQ ID NO: 187315 - DNA, 30 bp, Homo sapiens
  chr18:77721555-77721585
  hypo
gagcctggccgatgccggctggagaggaga

SEQ ID NO: 187316 - DNA, 19 bp, Homo sapiens
  chr18:77728888-77728907
  hypo
aaaaatgattcagaagcca

SEQ ID NO: 187317 - DNA, 138 bp, Homo sapiens
  chr18:77729386-77729524
  hypo
gaaagaaaaaaaaacgatgcagaatagcgcccacgttgagcaggtcctcccacctgtgcccacgcggatgcttccccagggatcctctgaacctccaggtcagaaagctggtgagccgtgaattcaccctgcatttta

SEQ ID NO: 187318 - DNA, 56 bp, Homo sapiens
  chr18:77740911-77740967
  hypo
cggtcactctgacaacgcccatttctgaaactctagtttcccgcagcgtccacagt

SEQ ID NO: 187319 - DNA, 176 bp, Homo sapiens; identical to SEQ ID NO: 95355
  chr18:77753636-77753812
  hypo

SEQ ID NO: 187320 - DNA, 93 bp, Homo sapiens
  chr18:77772122-77772215
  hypo
tagtgtggggctggtttccccaataattttgatagaaatattaagcactgattttcttaagaaggggacaccgccaaaccaagataggccttt

SEQ ID NO: 187321 - DNA, 19 bp, Homo sapiens
  chr18:77773126-77773145
  hypo
ttttttttttttgagacgg

SEQ ID NO: 187322 - DNA, 136 bp, Homo sapiens; identical to SEQ ID NO: 55252
  chr18:77794467-77794603
  hypo

SEQ ID NO: 187323 - DNA, 166 bp, Homo sapiens
  chr18:77804216-77804382
  hypo
tcagttactggcagtcgcagactttggaccccgggatgaaagagacaactttgtacaaaatgatttcaggtgacgcatgtggacatatgttttgattccctggggtacattcctgggtgtggaatcaccattttccagagcagctgcccagcgccacatcccgagt

SEQ ID NO: 187324 - DNA, 382 bp, Homo sapiens
  chr18:77804874-77805256
  hypo
cagcagcgtcaacatcgcctggcacctgccagagtcgggtttaaccagcctgccaggtgcatccctgagctggaagcaaagctccacgctgtagcaggcctggcctgaccgtgtcagcaaggggcagtgtgggggcggcagggcagggagctgagcccagggtgtggaaactttccaaagtggagccttggaggatacaggggctgtgacgtggccttgactaggtgctgttcaccaagaatagactcttcatgaaggcgaatgagtggcaggtctgataggcctcacctgcgattctgccagttgaactggcccgaggcactggccatgcttagagaaaaaagttgcaaacgcttttttttttttttttgaggcagagtct

SEQ ID NO: 187325 - DNA, 94 bp, Homo sapiens; identical to SEQ ID NO: 95359
  chr18:77805634-77805728
  hypo

SEQ ID NO: 187326 - DNA, 701 bp, Homo sapiens
  chr18:77808867-77809568
  hypo
gatccaaccaggcgtcggctcagtgcctcctagaaagtggagtgtgggcacgtttgcaggggatccaaccaggcgtctgctcagtgcctcctagaaagtggagtgtgggcacgtttgtaggggatcccaccaggcatcagctcagtgcctcctagaaagaggagtgtgggcacgtttcagagaaaactggcttaggcctccctgtttctggcgtggccttccctgggagcgagttagggacacggaagctcacccgcttctgaatgggtccactcctggggatttccgcggccttccctgggagcgggttagggacacggaagctcacccccttctgaatgggtccactcctggggatttccgcggccttccctgggagcgggttagggacatggaagctcaccctcttctgaatgggtccactcctggggatttccacggcctttcctgggagcaggttagggacatggaagctcacgcccttctgaatgggtccactcccggggatttccatggccttccctggatgatccactcctggggattttccgcagctctccagatgacgtgcacgcacactaaacacccagaagttagggaggcactgatccagtgaagtcctcagatcaaccttgtgagctttttacaagtacctgtcactgttaaactgctgatgaaatgtgaaacgacttcacaggttt

SEQ ID NO: 187327 - DNA, 74 bp, Homo sapiens
  chr18:77828029-77828103
  hypo
cagctcagatgcacccgttggcaaatggacaggcctggagggcgcagctcagatgcacccgttggcaaatggac

SEQ ID NO: 187328 - DNA, 31 bp, Homo sapiens; identical to SEQ ID NO: 95361
  chr18:77835956-77835987
  hypo

SEQ ID NO: 187329 - DNA, 30 bp, Homo sapiens; identical to SEQ ID NO: 95362
  chr18:77866335-77866365
  hypo

SEQ ID NO: 187330 - DNA, 32 bp, Homo sapiens; identical to SEQ ID NO: 55253
  chr18:77867027-77867059
  hypo

SEQ ID NO: 187331 - DNA, 39 bp, Homo sapiens; identical to SEQ ID NO: 95364
  chr18:77913922-77913961
  hypo

SEQ ID NO: 187332 - DNA, 30 bp, Homo sapiens; identical to SEQ ID NO: 95365
  chr18:77921353-77921383
  hypo

SEQ ID NO: 187333 - DNA, 22 bp, Homo sapiens
  chr18:77931207-77931229
  hypo
ttggaaaggggcaaacgcggcc

SEQ ID NO: 187334 - DNA, 169 bp, Homo sapiens; identical to SEQ ID NO: 95367
  chr18:77939057-77939226
  hypo

SEQ ID NO: 187335 - DNA, 31 bp, Homo sapiens; identical to SEQ ID NO: 95368
  chr18:77939507-77939538
  hypo

SEQ ID NO: 187336 - DNA, 194 bp, Homo sapiens; identical to SEQ ID NO: 95369
  chr18:77942204-77942398
  hypo

SEQ ID NO: 187337 - DNA, 947 bp, Homo sapiens
  chr18:77943588-77944535
  hypo
ccacacatgcaccctcacacacgcatatacactcagacatgctcgcacaccctcacacatgcatataccctgacatgctcgcacaccctcacacacgcatataccctgacatgctcgcacaccctcacacacgcatgcacccacacaggcaccctctcgcatatactgtcacatatgcttgcacaccctcacacacgcacccacacatgcatacaccctcacgcgggcttgcacaccctcacgcacgcatgcacccacacatgcaccctcacacacgcatataccctcagacatgctcgcacaccctcacacacgcatataccctgacatgctcgcacaccctcacacgcatgcacccacacaggcaccctcacactcgcatatacagtcacatatgcttgcacaccctcacacgcacccacacatgcgtataccctcacgcgggcttgcacaccctcacgcacgcatgcacccacacatgcaccctcacacacgcatataccctcacatatgcttgcacaccctcacgcatgcatgcatcctcacacacatgcacccacacatgcatacaccctcacaaggctcacacaccgtcatgcacacatgcaccctcacatgcttgcacaccctcacatgtgcatgcaccctcacacatgctcgcacacccacacatgctcgcacaccctcacacatgcatgcaccctcacacacgcatatgccctcacatatgcttgcacacccacacacgcatacaccctcaaggctcgcacaccctcacatgcaccctcacacatgctcgcacaccctcacacatgcatgcatcctcacacacgcgcacaccctcacacacatgcacacacagcccttgcacacccccccaaaggatgcacacacacatccctgtgcacacgtgcactcatagctgctgctctcgatgggataactga

SEQ ID NO: 187338 - DNA, 89 bp, Homo sapiens
  chr18:77957215-77957304
  hypo
tgtagcatgtgtcagcgcatcatttttcatggctcgataacattccactgcatgactagacacacacgcacatgcgcacacttttttat

SEQ ID NO: 187339 - DNA, 30 bp, Homo sapiens; identical to SEQ ID NO: 55254
  chr18:77983402-77983432
  hypo

SEQ ID NO: 187340 - DNA, 186 bp, Homo sapiens
  chr18:77988258-77988444
  hypo
aggaacctgttggagcgtgggactcggcagtagtttgctatagaatgacttcttgggctgacacgttgggacggtttaaaatcgggccacacacctatgagtcagatgaggtggagcctggcgcctgcctaggtgctgtccacccaagatccagagtgatgatggtgcagccgttggcactcgcag

SEQ ID NO: 187341 - DNA, 30 bp, Homo sapiens; identical to SEQ ID NO: 55255
  chr18:78004029-78004059
  hypo

SEQ ID NO: 187342 - DNA, 63 bp, Homo sapiens; identical to SEQ ID NO: 95373
  chr19:292199-292262
  hypo

SEQ ID NO: 187343 - DNA, 168 bp, Homo sapiens; identical to SEQ ID NO: 95374
  chr19:327874-328042
  hypo

SEQ ID NO: 187344 - DNA, 35 bp, Homo sapiens; identical to SEQ ID NO: 95375
  chr19:369327-369362
  hypo

SEQ ID NO: 187345 - DNA, 30 bp, Homo sapiens
  chr19:370131-370161
  hypo
acagagaatgcaagacggcggccaggatgg

SEQ ID NO: 187346 - DNA, 270 bp, Homo sapiens
  chr19:370621-370891
  hypo
tgacaggcgtgagccaccgcgcccggcgtattcacatcagttttatcgtaacagtcctaaactggaagccacccaaatacccttcagtgggtgcctggatcggcaaattctggaattgaaccggcgacgacaaggaataaactaccgacgcacgcgagagtctcagatgcagggcggggggcggcagaagccgggtcaagcccgcaggctgcggggttcagactttcggaaaagcaaaaggtacagggcgtagagcgaggtcagtggttg

SEQ ID NO: 187347 - DNA, 161 bp, Homo sapiens
  chr19:379971-380132
  hypo
tagggtcacggcaggcggtttcgggcgctggcctgtgacgccgtcctgggcaggcgcgtgcatctgaatgctttttacctggtctctcgactgttgcgttgggtaactcccatccatatcaccagtttcacaccaggttccagggacgaggatgtggacac

SEQ ID NO: 187348 - DNA, 30 bp, Homo sapiens
  chr19:397627-397657
  hypo
ttgcaggtaggtgaacgcgctgacagagag

SEQ ID NO: 187349 - DNA, 430 bp, Homo sapiens
  chr19:401046-401476
  hypo
ggtttgtcacagtgccggggtgcaggtgccgtgggctggggaagagcacatgaggcagcgtcccggagaagccccgtggtcctgtccggggaagccgggaactgctcactcacagggcgcacggaccaccaggaaagggcacggcagcctaggcgcccagagctctgcgagggatccctcgtgggggcttgattgactgattgcttgccacggggttgccctcgaactccaagggtgtctgacgctgtgagacccaaggcgctcccaagtcccacggttggtcttgctggtgtgaccctccctaccccagaccaagacgctcccctcaggcagggcagaaatcacctcccaaagccaaggcaaagcccagacctcaccccgcacgagaggattcctcaccccacgggggaaggtgcgggtctcatccgtg

SEQ ID NO: 187350 - DNA, 160 bp, Homo sapiens
  chr19:401846-402006
  hypo
ttcagcgggtcctcccgcccacccacccacgatgcgcttaatcaacaggccctgccctgcgtgtgaccctggagagaggctctgggaccacgtcactgtacagtagggtaaactgaggctcaggcgccggcccgcgggaatggcccgccctcgtgggagg

SEQ ID NO: 187351 - DNA, 518 bp, Homo sapiens; identical to SEQ ID NO: 95376
  chr19:403366-403884
  hypo

SEQ ID NO: 187352 - DNA, 30 bp, Homo sapiens; identical to SEQ ID NO: 95377
  chr19:407006-407036
  hypo

SEQ ID NO: 187353 - DNA, 911 bp, Homo sapiens
  chr19:407243-408154
  hypo
tcgttgaagacggggcggcggctgttcttcacgatggtgctgcgctgcttctgcagcttgcccggcaccaggcacaggcccacgcagcagttgatgctgcgggcgtcgcacaggcggtcgtagaggccctcggcggccagcaggtgcacccgcaggcgggcctggccggcctcgtactcggccagcagccgcacgctgccccgagggcccacgtggaccgtgtgctccccacgcgcctggcccgactcggggccaggttccgggggtgcccggcgggtcaggcggcgccggctcccggggctggcgtccggggtgctgtcgtccgcagacagggagccgtggcggcccacggagtgccggagctggctcaccttggcctggctgtcctgggcgaaacctttgagcagagacacggagcgggacagcagaggggacccgaagggggaggactcggccgaggaccctgtgtcgctctccccgccactgaagtagcggccggggctcatgagggccccgccagcctccctggggcccccatcacccccgttggccttggcagctgcccggcggcgcccggcccctggggagcccacctgggccagagccccgtgctcactgtggaacagagactccttgcgcctcgtgtgggggctctcagccagcatggcgaagccgtaggacgtctgggccttgggcaccgagggcagggacatggcaccctgggcctgggggtcggcgtcagtggcctcctcggacagccagtcctcggcactctcgatctggatcacgtgccgggtggctgccttcagcaggctcttgctctcggctgccagcttggcaggcagccgggggctccgtggggtctggcggggggccgcagaggccaggttctgttccgacgtggaggggcc

SEQ ID NO: 187354 - DNA, 591 bp, Homo sapiens; identical to SEQ ID NO: 95379
  chr19:416970-417561
  hypo

SEQ ID NO: 187355 - DNA, 841 bp, Homo sapiens
  chr19:418225-419066
  hypo
gcccaccgtcctctccggcagtgcccacccctcctctgggaaggaggcctggacacccagcacgccgcaggggtccacaaagaccaggtgacgcccaccacagccgaccgcagtgtcacggtcatggctgcacgctgccaccctcgggcacatatccacccacgggcagtgacgcgtgtccacacacaacctgcacacaaaggctcacggcggccaaaaggcggaagcagccccagcgtccatcagcggatgaacacacaaaacgtggtcccctcacacagcgggacattatccagccgagaacaggagccaggctctggcccgggccacggcgcaatgcccctggaggacgtcacgctcagtgagagacgccagacacagaaggacacacagcgtggaatcccattgctatgaaatgtccaggacaggcccatccacagagacaggaggcggatgtgtggggttggagctggggaggggacagggagtgacggctggtggggacagggcttctttcggggctgacagaatgttctggaattcgacagagatggttgcacggctcggatgctgaacacccctgagtcgtgccctctagagggaaaggcacggcacgtgaaccgggtctcaattttcaaatcagaaaagaatctggcaaaggaggcaaggccagcgacccacggcggcagccacacacctggctcagggctcccgtgagaccacgccacgcaggtgcagctcactctcggcggccacgatgggctgcccgttctgcaggtggtggtcgatcaggtggctgatgctctcaaacagcacgtccttcgtccgtacctgcgggaca

SEQ ID NO: 187356 - DNA, 877 bp, Homo sapiens
  chr19:424488-425365
  hypo
gtcgtcccagcaggccgggattcccacagagaaaagacgaggcctcccctctcagactaaggagtcccatggggcgagggtctggcttcccctgttgactggagggcctcacagacggggccgcagcctcccaccacactgaccattctttcaaggaatgacgaacctcctcccttcagaccgggggttccgacagaggcaggtgggttacccccgagagagtggagcttctcacagagcgggggccagcggcattcccaaccagactgggggttcagcagggaggccccgggagatggggtcctgtaggaggggctgggcctcacccattacactgctcggccgcattcgctagagagaatgggcctcccctgtcagactggccccttttaaggcagagtccaggacacccccatcagacaaggcctccgacaggagacagactgggcttccccgtcccacccgtcgacttgaaggatctcacggggagaagggagcctcccccatcagaccagggaatcccgtagggagtgggggtggggttgtgcctcccccatcagacaacacggccacacgcgatgacggccgccccccaggctgccacatacgcatgtcaaacagatcctttttggggctgtcctccggctcgggggcgtccagaccctgggtgttgacatacaggtgctcctcgtggtccggggggccccgggcgtccgcctgcacgtagccgtcccccggtggagctggggagtgtaaagaggggcagggggtcagctgggagccaggcgaggggctcgcagggagcaaggcggggtcccacgaggagctcccccggccaccacctgtgctgctggctgcagggcggatgctgctctgg

SEQ ID NO: 187357 - DNA, 38 bp, Homo sapiens; identical to SEQ ID NO: 31609
  chr19:434175-434213
  hypo

SEQ ID NO: 187358 - DNA, 37 bp, Homo sapiens
  chr19:434752-434789
  hypo
tggagtccactagcccgcccagcggcggctccttccc

SEQ ID NO: 187359 - DNA, 279 bp, Homo sapiens
  chr19:435181-435460
  hypo
gaaccaggacatcaccggtcagggtggcaactctctgggatcaaagcgcccccgccctctggccccgatggcactggcaggaattgatcctgcaggtgctcctcagcaagcacggccccgagagccagaggggtgcaccccacctggcccacagtcgctgctgggataaattatgaagcagcctacggaaggcagaggcagctctggaggcaggcgaggagcccgtctcagcttcggagcgtgctgagcaacgtgcatcaagcacgctgtccccgtgca

SEQ ID NO: 187360 - DNA, 30 bp, Homo sapiens
  chr19:435958-435988
  hypo
atcctggggggcaggcggggatgcgtttac

SEQ ID NO: 187361 - DNA, 470 bp, Homo sapiens
  chr19:436222-436692
  hypo
cgaaagcttggcccacggtgctgatgatgctctgtgccaggccctcacagcactccaggatgtggcaggctgcgggcacgttggtcatgcagcctccgagccacacggccgtgccccccagccacaggacccccaccggcctccccgggggcctcacctctctggttgatggggtccttggcgacgtaggccacgtaatccgtcatgtcctgggggcggggaggggccagctggacctgcctgggccccccaccgggattcccagctgcccaccccagcaatgcagagagatggggcagtggatgtgggcacagggtacgttaggcgggctctggggaaggatgagagggtctcgcggccggaggggggcggcagggctgcaggtccacccccatccctggcctcaccgtgtctccgcctgacgcgaaggagatggacggcatgtggtggttggcgatgacctgtggcgg

SEQ ID NO: 187362 - DNA, 19 bp, Homo sapiens
  chr19:449659-449678
  hypo
ctaaggtaggagaatcgct

SEQ ID NO: 187363 - DNA, 19 bp, Homo sapiens
  chr19:449737-449756
  hypo
gcaacgagagcaaaaccgt

SEQ ID NO: 187364 - DNA, 35 bp, Homo sapiens
  chr19:449971-450006
  hypo
ttctttgacaccctgcgccacgctgaccagtgccg

SEQ ID NO: 187365 - DNA, 30 bp, Homo sapiens
  chr19:450298-450328
  hypo
cgcaagagagtggcgcgttttcgtgtgctt

SEQ ID NO: 187366 - DNA, 221 bp, Homo sapiens; identical to SEQ ID NO: 95384
  chr19:450885-451106
  hypo

SEQ ID NO: 187367 - DNA, 31 bp, Homo sapiens; identical to SEQ ID NO: 11868
  chr19:452244-452275
  hypo

SEQ ID NO: 187368 - DNA, 510 bp, Homo sapiens
  chr19:453562-454072
  hypo
gcccggccagaacccagatctttagggatgctgtcgagccatgggattcatccaccgtgtcaactggccacacctgacccctcgccttcaaggaaaagctgcatttggagctgaaccatctccagcaccctctcacaactccccgcacctcccagcttaagggacccgcgatgcaggaaggatgaagtgtcattttgccgaccgtgtcccagtttgcgtccatcccccaccgggcctgggctccacgcacctggagcagagccagacacgcacaggaaactctccctgaagtgctcacgaggtgaggtgcgtgagggcaccgcagagagcaggacggcctgactcacgggacttctgtgtatggacgagcccagcgccaaaatggtacgtgtgggagaacacggggtcggtgtccacagaccttggcacgaactctggcctctccaggagacaagctctgtgtctttctcaacagagacatcttgctcagatctacgccttcgggtgaag

SEQ ID NO: 187369 - DNA, 30 bp, Homo sapiens
  chr19:454927-454957
  hypo
ggcccgtggccgcatcgctcgtctctgccc

SEQ ID NO: 187370 - DNA, 356 bp, Homo sapiens
  chr19:455240-455596
  hypo
ggcgcccagcagctccgagtcaggtctgtggtgacagccctaaaggcatcgcgagtgccatgacccagggaagggctctcgggcagctctttgacctgctgtgcctcagctgcctcatctataaaatgggtggaagccgcagggttgtggggagaatggaacccagggctcctcggaactcagcaccgcgcaggactcggcgtgagcctcggcgccggaggtactgcatttgcaccgatgctgcccacggcgctcggacgcggggcccacgccgctgattatccggcgtccaacttctctcccacacaccgggatcgctgcaggattctggggggttctgcgatgccggctgagtc

SEQ ID NO: 187371 - DNA, 30 bp, Homo sapiens; identical to SEQ ID NO: 95388
  chr19:458880-458910
  hypo

SEQ ID NO: 187372 - DNA, 30 bp, Homo sapiens; identical to SEQ ID NO: 95389
  chr19:463899-463929
  hypo

SEQ ID NO: 187373 - DNA, 30 bp, Homo sapiens; identical to SEQ ID NO: 95390
  chr19:464345-464375
  hypo

SEQ ID NO: 187374 - DNA, 121 bp, Homo sapiens
  chr19:477566-477687
  hypo
acagagcgagactccacgtcaaaatcaaaaaaaagagaaaaaaagaacgcctcctccccatcccaaaaaagctggtctttatttttatttttatttgtgtatttatttatttttgacacgg

SEQ ID NO: 187375 - DNA, 34 bp, Homo sapiens
  chr19:477806-477840
  hypo
cacgcgccacgccacggcacgcaggccctgcacg

SEQ ID NO: 187376 - DNA, 35 bp, Homo sapiens
  chr19:484682-484717
  hypo
caggaccgcacctggcgaggcggaggagcgaggag

SEQ ID NO: 187377 - DNA, 276 bp, Homo sapiens
  chr19:485118-485394
  hypo
tgcaacctcaacccagcggaggaccctgctgacctgcttagttgtttatggagggtcattgccgtgctctaccacgtaacacacgtacacacacacacacaggtgcacgtttacaccacgtgggtgcgcacgatgaggcacacacaggcaggcgcgcacacacacgcgtgctcacataggaacacgaagaggcaggagccgggcgtgcccgagccccgtggcgccctgggcatcccaaacaccgcctgcccagaacaggtgcgcagtgagtgcctg

SEQ ID NO: 187378 - DNA, 117 bp, Homo sapiens; identical to SEQ ID NO: 95393
  chr19:487187-487304
  hypo

SEQ ID NO: 187379 - DNA, 333 bp, Homo sapiens; identical to SEQ ID NO: 31612
  chr19:491284-491617
  hypo

SEQ ID NO: 187380 - DNA, 42 bp, Homo sapiens; identical to SEQ ID NO: 130237
  chr19:507105-507147
  hypo

SEQ ID NO: 187381 - DNA, 30 bp, Homo sapiens
  chr19:508455-508485
  hypo
ctgcaggtgcctacgcgcggtgtcccctgg

SEQ ID NO: 187382 - DNA, 30 bp, Homo sapiens
  chr19:508936-508966
  hypo
caggtgggaggggagcgggcaagggcaggc

SEQ ID NO: 187383 - DNA, 30 bp, Homo sapiens
  chr19:513521-513551
  hypo
cacccaccgtgcaccggcccagcattactg

SEQ ID NO: 187384 - DNA, 20 bp, Homo sapiens
  chr19:516282-516302
  hypo
cctatttttaaacatcgtaa

SEQ ID NO: 187385 - DNA, 30 bp, Homo sapiens; identical to SEQ ID NO: 95396
  chr19:519594-519624
  hypo

SEQ ID NO: 187386 - DNA, 18 bp, Homo sapiens
  chr19:520792-520810
  hypo
gagcgagactccgtctca

SEQ ID NO: 187387 - DNA, 30 bp, Homo sapiens
  chr19:521188-521218
  hypo
gggcttccaggacttcggtctggccgggtt

SEQ ID NO: 187388 - DNA, 218 bp, Homo sapiens; identical to SEQ ID NO: 95397
  chr19:529760-529978
  hypo

SEQ ID NO: 187389 - DNA, 338 bp, Homo sapiens; identical to SEQ ID NO: 95398
  chr19:530217-530555
  hypo

SEQ ID NO: 187390 - DNA, 30 bp, Homo sapiens; identical to SEQ ID NO: 95399
  chr19:535973-536003
  hypo

SEQ ID NO: 187391 - DNA, 82 bp, Homo sapiens; identical to SEQ ID NO: 95400
  chr19:536229-536311
  hypo

SEQ ID NO: 187392 - DNA, 30 bp, Homo sapiens; identical to SEQ ID NO: 95401
  chr19:539140-539170
  hypo

SEQ ID NO: 187393 - DNA, 83 bp, Homo sapiens
  chr19:540963-541046
  hypo
ttcctttgctcctgcgctgaggaaggcttttgccccccagtggggcagcatgggccctccctgttgccggcatcgttattttc

SEQ ID NO: 187394 - DNA, 345 bp, Homo sapiens; identical to SEQ ID NO: 95403
  chr19:541696-542041
  hypo

SEQ ID NO: 187395 - DNA, 388 bp, Homo sapiens; identical to SEQ ID NO: 95404
  chr19:542335-542723
  hypo

SEQ ID NO: 187396 - DNA, 30 bp, Homo sapiens
  chr19:544192-544222
  hypo
aggggtgggcgcgggcgccgacatcctggg

SEQ ID NO: 187397 - DNA, 40 bp, Homo sapiens
  chr19:546048-546088
  hypo
ggattataggcgtgagccactgcaccggcccgcaagcggg

SEQ ID NO: 187398 - DNA, 31 bp, Homo sapiens
  chr19:548573-548604
  hypo
acaccctggacagccccggtctcaccttcca

SEQ ID NO: 187399 - DNA, 808 bp, Homo sapiens
  chr19:549178-549986
  hypo
ctgcaaggtgaggggcgcccgggtggggctgggggaatgaggctggcgggagggccggggccagggcagccgccgggcaggttcctggctctcccgttctctggggagtcctgtcaggggctggggggcggggaagcactggcaggggtcccgtttctcaggtgcagaaactgaggctcagacaggtttagcaacctgcgcaagaccacacagccgggaagcggcagagctgtgacttctgctccagccaagacggtccggcgggggaagaaggagcagggttcacagggccagcgggagatggggaggggacacgcgtgggccgggagcagcccctgtgtctccttgagcctggggataacaggcctggccctgctcccctcggcgggccctgctcccctcgtcccctcagcaggtgcagaggctgagctgcggtgtgtcgtccctgcagggtgactcgggcgggcccctggtgtgtggcaaaggccgggtgttggccagagtcctgtccttcagctccagggtctgcactgacatcttcaagcctcccgtggccaccgctgtggcgccttacgtgtcctggatcaggaaggtcaccggccgatcggcctgatgccctggggtgatggggaccccctcgctgtctccacaggacccttcccctccaggggtgcagtggggtgggtgaggacgggtgggagggacagggagggaccaataaatcataatgaagaaacgctcagagcccgcctgagtcccagcccacctctgtccatgctggctgtggggcttccgacaaacctgtttc

SEQ ID NO: 187400 - DNA, 30 bp, Homo sapiens; identical to SEQ ID NO: 95406
  chr19:557261-557291
  hypo

SEQ ID NO: 187401 - DNA, 121 bp, Homo sapiens; identical to SEQ ID NO: 95407
  chr19:557933-558054
  hypo

SEQ ID NO: 187402 - DNA, 46 bp, Homo sapiens
  chr19:559343-559389
  hypo
ctggcccctcggttacgcacatcaccctatttatttatttagagac

SEQ ID NO: 187403 - DNA, 301 bp, Homo sapiens
  chr19:559628-559929
  hypo
agtgctgggatgacaggcgtgagtcaccgcgcctcatcccctcctcagccccccagcacccacacgtcccctccctgtctctgtggatgggcctgtcctggacatttcatagacatgggatcacacagtgtgtgtccttctgtgtctggcgtctctcactgagtgcgacttcctcaaggtgcatccgcgccgtgggctgcgtccgagcctcgctcctgttcacggctgagtcgtgtcccattgcgtggatgggccatgctgtgtctgtccattcattctctgtttttgtttgtttgtttgt

SEQ ID NO: 187404 - DNA, 38 bp, Homo sapiens; identical to SEQ ID NO: 95408
  chr19:561122-561160
  hypo

SEQ ID NO: 187405 - DNA, 60 bp, Homo sapiens; identical to SEQ ID NO: 95409
  chr19:562308-562368
  hypo

SEQ ID NO: 187406 - DNA, 31 bp, Homo sapiens; identical to SEQ ID NO: 31618
  chr19:569949-569980
  hypo

SEQ ID NO: 187407 - DNA, 30 bp, Homo sapiens
  chr19:577923-577953
  hypo
gcgcccggctggaccgcgtccacatccacg

SEQ ID NO: 187408 - DNA, 30 bp, Homo sapiens; identical to SEQ ID NO: 95411
  chr19:578425-578455
  hypo

SEQ ID NO: 187409 - DNA, 30 bp, Homo sapiens; identical to SEQ ID NO: 95412
  chr19:579577-579607
  hypo

SEQ ID NO: 187410 - DNA, 862 bp, Homo sapiens
  chr19:581311-582173
  hypo
taggccctcatgaacggctccgagagcaggttcttcgtgagttcctcgcagggccggtcagagctacacattgagaacctgaacatggaggccgaccccggccagtaccggtgcaacggcaccagctccaagggctccgaccaggccatcatcacgctccgcgtgcgcagccacctggccgccctctggcccttcctgggcatcgtggctgaggtgctggtgctggtcaccatcatcttcatctacgagaagcgccggaagcccgaggacgtcctggatggtgagccgtctgccctcctgcccacatgccctgctctcggggtggcccagggccactcctggtccgtccctgccagccccaccgctgacccagagcttggaactgaggagccccaggcagggagttgatgggaccccgaaagaaagtgtgggatggagggtctagccccgggcagctgcggctcagtgggcagcgggaccccgggaggaggaggcggcacctccgccccacagcctcacccggcccttccctcccgctcacttggctgcaagccagtgtcctccgtggtgagccggcccttgctgctctgcatgatcaggctcgggaacctgaggtcagccatgctgtgctccggcagcccctgcctgcctcctcgcggagcccttctgccccttgggctgcgtgtgccggggcgaggcctgtgtggggcctgtgatggcagctcctggaaaacgctgtggggcaggggtgaggcccacgaggccatggggacagctcaccatggggagcacacctgcaggtggggagggctgcctttccccacagcactcagaagatgcacgtggccggggctgatgagct

SEQ ID NO: 187411 - DNA, 127 bp, Homo sapiens; identical to SEQ ID NO: 95415
  chr19:585309-585436
  hypo

SEQ ID NO: 187412 - DNA, 435 bp, Homo sapiens
  chr19:592197-592632
  hypo
gagggagctgtagaacgtgcccactcccctccgtcccctccagcatgaccttcgacagagatgggtgcaccgcagcgtgggggctggcaggtggaggcccacaccagccactccctcccctgggcagctccagcgaccccctggctgcagaggggcggtcggtggcctggggggcaggtgggcagatggctgatcccggggcttggggggaaggccggtggtaggagtgaagccctctcatccttccaccctccttgggcgtggtcgcctggaggcctgggcaggctgtggccccgctctgtgctctgaggcatagagggctcagaggcccctgtgtggaccaagtgcagccccaccccggcagatgagtgttgaagtggaactgagcaggcagggaatggggttagcggggcctgtcttcgggactaggggagt

SEQ ID NO: 187413 - DNA, 31 bp, Homo sapiens; identical to SEQ ID NO: 95416
  chr19:599191-599222
  hypo

SEQ ID NO: 187414 - DNA, 146 bp, Homo sapiens
  chr19:600908-601054
  hypo
acagaaaccgcaccccgcacatgccacttctcacccctccaacccccggcccccggcacccatgcatccccttcctgtctctggattggcctgtcctggacatttcgtagaaatgggctcacacggccgggcgcagtggctcaggc

SEQ ID NO: 187415 - DNA, 221 bp, Homo sapiens
  chr19:601331-601552
  hypo
ttctctcactgaacgtgacgtcctcaaggggcatctgcgccgtggcctgggtcagagcctcactccttttcgtggctgagtcgtgttccatggtggacgggtcgcgccgtgtttgtccctccgtttggtgatgggcacctgggctgcctctgcctttttgctactgtggatcgagctggtgtgaacacagcggagtggtcgtcgtccgcagtcgagctggt

SEQ ID NO: 187416 - DNA, 612 bp, Homo sapiens; identical to SEQ ID NO: 55271
  chr19:603407-604019
  hypo

SEQ ID NO: 187417 - DNA, 1322 bp, Homo sapiens
  chr19:617540-618862
  hypo
caggtagttggggtcagggagcgccttactcagagcagaaccgcttgaccaggaatctggacaggtcctgcaggatgggctcgctgtgcaagcggacaaactgctcccggcacacctgggcaggagtcagaggatccccaggggtgatcaggcaggctctgggcaccacccctacccaacgccccagtgtgggggccccacccatgggtggactgaggctcagactacgggggcacctggttcatgacggagacatcagctgcgtgagtccagtaacagtcgtgcacagagacgaaggtcaggcccttcctgtggcagagcggaggactcctgaagggaggggagctcacagggccacccagtgaccagcatcctggccctgcgctcagccccctccacttgaggtccagggaagcccaccctcctgcaggcctcgccccacccctcgccccgcccctccccaaacatcctgggttaggtatcagtacagggggaggaaatgttcccagaagcctcctcgccccacccctgccgccccccacgctgctgtgggagcctcagctccgagggcggctacgaggtcccctcctgccagggccaccaccccgcatcctgagcattcccagctcccgtggccggtagattctgctggaacgacctccacgtgctccagatctaaccacacatcgcggtgccaagaaatgcccagcaggaaggggcagcgcccatgctcggctctccctgtcgggccacaggaggggagctgccaggaccacctacattcggggcacacagcctcagggcctctacacaggccccacagacacagcagatccactctgcccagtccctgcccccagctagacccagccttgccagctgtgccctgctagccagaagacgcccctgggaggcgagcggcacccacgccgtccggagacgcccacctgtagcagtgcagggcggtgagcatcatgtgggaggagtccagcgagtggatgaagttgggcgggaagccgttcttctgcttacgtgtgttgggctttctgaggacggaacaggtgccggtgggggcggcccagggacacccctaactggccgctgtctccaccgtggctgctctccagacccccggccaggccccagcccgggccccccactcaccggctgatgtctccgttgtgggtgtaggtgatgctctgaattccacctcctatttgctaaaaaggggaaggggccggtgagtcccacccgaggcccagcacggtggtggtacattgaggtggtggtacactggggtagtggcacgctaggatggtggc

SEQ ID NO: 187418 - DNA, 621 bp, Homo sapiens; identical to SEQ ID NO: 95420
  chr19:619066-619687
  hypo

SEQ ID NO: 187419 - DNA, 30 bp, Homo sapiens
  chr19:622391-622421
  hypo
agggcgctgggcaccggggcccctgagcta

SEQ ID NO: 187420 - DNA, 64 bp, Homo sapiens; identical to SEQ ID NO: 31625
  chr19:623405-623469
  hypo

SEQ ID NO: 187421 - DNA, 276 bp, Homo sapiens; identical to SEQ ID NO: 95422
  chr19:623967-624243
  hypo

SEQ ID NO: 187422 - DNA, 309 bp, Homo sapiens
  chr19:629528-629837
  hypo
gctgcactcacctgccgcgcccagccaagcatcacggcgttgtacatgtccagcgtgagcagcttccgcttctgccgctggccgtggtggacgaccagcaggtggtgggcgaggggcagctggtcagtgagcaggcagcacttgaagaaggccaggagcctctgctgctgacctgagagctgggcctgcgagtgctgccccgacggggcctgctccacatcgaggctcagcttcccaggggcctcctgcagcagccgggccagctgctcctcccaggggctctcgggggcctggcgcgtgcagtcctcc

SEQ ID NO: 187423 - DNA, 30 bp, Homo sapiens
  chr19:630170-630200
  hypo
gtgaggggcagaaggcgaggacatgagagg

SEQ ID NO: 187424 - DNA, 161 bp, Homo sapiens
  chr19:634303-634464
  hypo
ggaatgaaataaacctcggagcctagagcctgccctggtctccgcgtgatcctgcctaggaggagcagggcgggagctttagaatggaacctggaaggtgtgcccacctgtgtcgttcagccggggcagcaggccagaggcgggagcgcctgctgtggggc

SEQ ID NO: 187425 - DNA, 104 bp, Homo sapiens
  chr19:635349-635453
  hypo
gcccagaacgaggactcgacctcactctggaagggcctggcagcctccttacagcacattccagacgctgctgccgacgcctgcgtgagcgcactgatgccacc

SEQ ID NO: 187426 - DNA, 327 bp, Homo sapiens
  chr19:638276-638603
  hypo
ataataataaaataaaatcactgaactgtacagtgtaagtgggtgaattgtgtggtatatgagtgatgtttccgaggtgtcattaaagaaactcagacgcctggggtggggccagtctcaccgctgtgggtcccatccccatcatttctcacaaggccctcagatcacccttccgcggtggggggcggacactctaagaagggaagacctgggctcctgctggcgagaaggcggtggacatttcttcagtgtctggtgccgcgccctctgcccagcgtgctccgtggagggtctcattgtcttcctccagacgtctctttactggcc

SEQ ID NO: 187427 - DNA, 30 bp, Homo sapiens
  chr19:638933-638963
  hypo
gctgtgtccccacagcggaggtcgccgccc

SEQ ID NO: 187428 - DNA, 510 bp, Homo sapiens; identical to SEQ ID NO: 55272
  chr19:639659-640169
  hypo

SEQ ID NO: 187429 - DNA, 323 bp, Homo sapiens; identical to SEQ ID NO: 95426
  chr19:640784-641107
  hypo

SEQ ID NO: 187430 - DNA, 298 bp, Homo sapiens; identical to SEQ ID NO: 95427
  chr19:647140-647438
  hypo

SEQ ID NO: 187431 - DNA, 53 bp, Homo sapiens; identical to SEQ ID NO: 31629
  chr19:647727-647780
  hypo

SEQ ID NO: 187432 - DNA, 30 bp, Homo sapiens; identical to SEQ ID NO: 95429
  chr19:648374-648404
  hypo

SEQ ID NO: 187433 - DNA, 30 bp, Homo sapiens; identical to SEQ ID NO: 31630
  chr19:649024-649054
  hypo

SEQ ID NO: 187434 - DNA, 131 bp, Homo sapiens
  chr19:651270-651401
  hypo
gagtggggccctgcgacggctcccccaggctctgttctgggcccaaggcctggacagcgtttgacgacacgcgtgtggacagcagtctccagagcacgtgggcctggcaggcacacggtgccccactctgt

SEQ ID NO: 187435 - DNA, 30 bp, Homo sapiens; identical to SEQ ID NO: 95432
  chr19:652001-652031
  hypo

SEQ ID NO: 187436 - DNA, 132 bp, Homo sapiens; identical to SEQ ID NO: 55277
  chr19:680399-680531
  hypo

SEQ ID NO: 187437 - DNA, 27 bp, Homo sapiens
  chr19:680552-680579
  hypo
cgaggctgctgccgcagtaggcggggg

SEQ ID NO: 187438 - DNA, 507 bp, Homo sapiens
  chr19:688901-689408
  hypo
cacagggactttaagcgtctcctccacacagggcaggggcccgagaggcacattcattccatttcagcataaactttgagcgcctgctgtgtgccataaatggccataaaggtgataaaaaatccctgcccgttaggttcagaggaagcgggaatgaggaagcgggtggtccaggggttagcaggtgacaagcaggtgacgacggggccggaagggtggtccaggggttagcaggtgacgacggtgctagaagggtggtccaggggttagcaggtgacgacggggctggaagggtggtccacaggttagcaggtgacgacggggtggtccaggggttagcaggagatgacggggccggaagggtggtccaggggttagcaggtgatgacggggctggaacagggttgcagggagggggtatgtggtccagggcggcctcctgggaaggtaacatttgagcaaagacttgacaggcgtgaggggaaaggctcgcggtgtctggggaac

SEQ ID NO: 187439 - DNA, 30 bp, Homo sapiens
  chr19:690388-690418
  hypo
tgggatggggaacggcgctggcttcccccg

SEQ ID NO: 187440 - DNA, 96 bp, Homo sapiens
  chr19:696839-696935
  hypo
cttcacctttcagtgggagcgttcttagtggcaaagttcaggtcgtaaattgcagctcacacagccgggtgatggcgttcacggcagtggctagca

SEQ ID NO: 187441 - DNA, 30 bp, Homo sapiens; identical to SEQ ID NO: 31632
  chr19:727133-727163
  hypo

SEQ ID NO: 187442 - DNA, 173 bp, Homo sapiens
  chr19:731145-731318
  hypo
tgccaaggagaacgcggcggccccgagcccagtccgggccccagccccgagtccagccaaggaggagcgcaagacagaggtggtgatgaattcacagcaggtaagggggtgactggggggagcggatccccaggcacccactcccgctggccccagagcgaggccccagccct

SEQ ID NO: 187443 - DNA, 19 bp, Homo sapiens
  chr19:734813-734832
  hypo
agagcgagaccctgtctgt

SEQ ID NO: 187444 - DNA, 759 bp, Homo sapiens
  chr19:736033-736792
  hypo
acacgcccctgaggacggttgacggctcccccatgatgaaggcaggtgggttggcccccaggctctgggccccagatccagccgctgtcagggaccaagtctcggtccggggggccgggtggggcgggggcgacaccgacctgctctccgcagcgtctgacggggccgtggttatgggggtggcagctggaccgaggccgaggctccgagcctggggtgggggccccctctgctttgttgccctggtcccacgccggcccacgcttccccgagaagacgggccccacgcatggcggctctaaccgacgcgacctcacggctttcattccaccctaatctcacggctccctcctggggcccgctgggggtggcgctcacgcctgaacatgctcgctgcaaatcttacctgctccagtcctcgggcagtaggactggctgccccgggagaaagtgggtgccccgtccctggaggcaaccaagccaggtccccagcaccgctgcgcttccgagaagcaggggaaggtgggggttgacgctgagtgccacacggtgctcaagtcaggctcgaacccctggtctgccgccttgaatttctccgcctgccagaggggtgggacctcagtacgccatcctggggcccggcacaggacaggagcccaataatgagaaatcgtcgcagtgggcaaaaccactgctatgtgagtgagctggaacagcacagaaagaaggcagagggccgggcgtggtggctcacacctg

SEQ ID NO: 187445 - DNA, 38 bp, Homo sapiens; identical to SEQ ID NO: 31635
  chr19:737031-737069
  hypo

SEQ ID NO: 187446 - DNA, 207 bp, Homo sapiens
  chr19:739214-739421
  hypo
attctgagtctaaatagatgacggcgtgtccaaccgttggctggaaggaggcgtcaagtcctgggagcttggatggtcggggcgggggctgtgggtctgcagactgagccccagtctccgccgtgaccccgggcaaggcaggatctctctgggattcacctgctcctctgagaaaccaggaatggtggggctcgagggctcacgttt

SEQ ID NO: 187447 - DNA, 42 bp, Homo sapiens
  chr19:741878-741920
  hypo
ctctgtcgcccggcccgcagtgcagcgatgccatcacagctc

SEQ ID NO: 187448 - DNA, 42 bp, Homo sapiens
  chr19:741979-742021
  hypo
gagaccacaggcatgagtcactgcacccggcctctttttctt

SEQ ID NO: 187449 - DNA, 30 bp, Homo sapiens; identical to SEQ ID NO: 95440
  chr19:746286-746316
  hypo

SEQ ID NO: 187450 - DNA, 278 bp, Homo sapiens; identical to SEQ ID NO: 95441
  chr19:746554-746832
  hypo

SEQ ID NO: 187451 - DNA, 30 bp, Homo sapiens
  chr19:747473-747503
  hypo
cacccgggaggggccggtaacccctgggct

SEQ ID NO: 187452 - DNA, 280 bp, Homo sapiens
  chr19:748209-748489
  hypo
cgagccgcgagccttcgctgaagtgcccttgctataaccccctctgcttctggtgtgtgacgaggcccccgatgttcttgattttcccagagaagcaaataaacagcgtgaacagccccagttcctggagttcttgcctttcaacctggcgaggaaggcgtggccaggccagggggtggggcctgccggcctttgagccattaaagggaggctgagcagggttgcggtgtgctggcttcacctgcctgcacccgctcaccctgagcgccttggggtggtg

SEQ ID NO: 187453 - DNA, 270 bp, Homo sapiens; identical to SEQ ID NO: 95443
  chr19:752075-752345
  hypo

SEQ ID NO: 187454 - DNA, 34 bp, Homo sapiens
  chr19:754569-754603
  hypo
tgagctgagatcacgctaccgcagtccagcctgt

SEQ ID NO: 187455 - DNA, 95 bp, Homo sapiens; identical to SEQ ID NO: 31638
  chr19:758090-758185
  hypo

SEQ ID NO: 187456 - DNA, 30 bp, Homo sapiens; identical to SEQ ID NO: 95445
  chr19:761750-761780
  hypo

SEQ ID NO: 187457 - DNA, 57 bp, Homo sapiens; identical to SEQ ID NO: 95446
  chr19:762947-763004
  hypo

SEQ ID NO: 187458 - DNA, 30 bp, Homo sapiens; identical to SEQ ID NO: 95447
  chr19:763639-763669
  hypo

SEQ ID NO: 187459 - DNA, 86 bp, Homo sapiens
  chr19:776816-776902
  hypo
gaccaaaccattccacgccgtggtctctacccagagaaaggaaaacacaggtccatacgcgtgttcgaggcggcatgattcataac

SEQ ID NO: 187460 - DNA, 31 bp, Homo sapiens; identical to SEQ ID NO: 95448
  chr19:784935-784966
  hypo

SEQ ID NO: 187461 - DNA, 360 bp, Homo sapiens
  chr19:804893-805253
  hypo
cctgctgcagtatgcggaccccgtgagcgcccagcacgccaagctggtgagtggggctcccgggacggcgcccgccctggccctggcccggcgacgtctcacggtccctctcccctcagtcgctggacgggcagaacatctacaacgcctgctgcacgctgcgcatcgacttttccaagctcaccagcctcaacgtcaagtacaacaatgacaagagccgtgactacacacgcccagacctgccttccggggacagccagccctcgctggaccagaccatggccgcggccttcggtaagaggctgcccgacgcggcgccagtgtgcagagtggtctattagggccgctcagtccggagcc

SEQ ID NO: 187462 - DNA, 63 bp, Homo sapiens; identical to SEQ ID NO: 95451
  chr19:807307-807370
  hypo

SEQ ID NO: 187463 - DNA, 30 bp, Homo sapiens; identical to SEQ ID NO: 95452
  chr19:808101-808131
  hypo

SEQ ID NO: 187464 - DNA, 30 bp, Homo sapiens
  chr19:808684-808714
  hypo
ccgcttcaagaagccgggctccaagaactt

SEQ ID NO: 187465 - DNA, 30 bp, Homo sapiens; identical to SEQ ID NO: 31639
  chr19:811985-812015
  hypo

SEQ ID NO: 187466 - DNA, 339 bp, Homo sapiens
  chr19:813010-813349
  hypo
cggcgaccggtactgcgaggagtcggagctggcgctggacgacgacgccgtctcggccgccttggggcccggcgcgcccggagccttggacatggcgatgacctgcagcagccgcggagggttggccactgccgccccgctcttctcggccatcatgagccacttggcgcgcaccccggcgccgcttttgggggacaggccggcccccgtctgcgcgccctcctccgggatgtgcaccagcggcggcggccccgcgcgcggtgggaggatgacccgaggccccagccccggccgcgcctgcacggtggggtagagcgagggcggggccgggccctcgtc

SEQ ID NO: 187467 - DNA, 758 bp, Homo sapiens; identical to SEQ ID NO: 130259
  chr19:813408-814166
  hypo

SEQ ID NO: 187468 - DNA, 474 bp, Homo sapiens; identical to SEQ ID NO: 55283
  chr19:814390-814864
  hypo

SEQ ID NO: 187469 - DNA, 30 bp, Homo sapiens; identical to SEQ ID NO: 95456
  chr19:815513-815543
  hypo

SEQ ID NO: 187470 - DNA, 30 bp, Homo sapiens; identical to SEQ ID NO: 95457
  chr19:868205-868235
  hypo

SEQ ID NO: 187471 - DNA, 486 bp, Homo sapiens
  chr19:868908-869394
  hypo
gcctccgcaggtggtcgatcttgggctggcctggggccctggcgggagaggggagaacgtgagggaggcctgggcaccacgaggccaggttccggcaggggcatctgtccacaggcgggggtggagggaatggccggcctcacaccatctgccaggtgggcccagatgtctgtgaacagtgaggtgggaggtgcgggaccacctgagacaggcccagtaaagggggcgggaccccccacacggaggagggttggtctcccaggtgcctggggagcttgaggcttagagacccagtaaaggggacggggcccacacagggacgagggtcggtccgccacgtgcccggggagcctgaggtgcagggaaggtgcttgtgacgctcccatttgaggctggacagaagcaggtacatggggacttccacaccacctctgcccagacacccggcctggaggtgccgggacctctgaacgacaagattctggt

SEQ ID NO: 187472 - DNA, 97 bp, Homo sapiens
  chr19:869626-869723
  hypo
gccagggcgccttcccggaggtcccggagccaagccgggggtgccttccctggaggtcctggagccgagccggggccttccccggagcagggctgct

SEQ ID NO: 187473 - DNA, 30 bp, Homo sapiens; identical to SEQ ID NO: 95460
  chr19:870164-870194
  hypo

SEQ ID NO: 187474 - DNA, 461 bp, Homo sapiens
  chr19:870961-871422
  hypo
tggattcgggggtcccggggcaggacacggaggaaggagtcctgtgtttggggaccaatgcagggacacacgcacctggcgaggccgtcgagctgcagggtggcagcactgccaggcagcgtgggcgcccggccaaactgcagacgaaggggctgcttgggctgcaggcggctaaccaggccgtcgctggctggcagccagtccaggctggggataagcagctggctgggcagcaggcagcattcatccaccagcgcctcgtccggctcgctcgctgggccctcatcgcgacctgcggagagaggtggcggaagtctcagcacccctgactggggcaccgcccggccacccgggacgtgctgggagcccctccagttcaggagcaccaggtcagggccccagctctgtctgcctggctgggtgaccccggggttctctcaccaggtcggggccccggctct

SEQ ID NO: 187475 - DNA, 181 bp, Homo sapiens; identical to SEQ ID NO: 31643
  chr19:874507-874688
  hypo

SEQ ID NO: 187476 - DNA, 121 bp, Homo sapiens; identical to SEQ ID NO: 31644
  chr19:874807-874928
  hypo

SEQ ID NO: 187477 - DNA, 30 bp, Homo sapiens; identical to SEQ ID NO: 95463
  chr19:875264-875294
  hypo

SEQ ID NO: 187478 - DNA, 93 bp, Homo sapiens; identical to SEQ ID NO: 95464
  chr19:882614-882707
  hypo

SEQ ID NO: 187479 - DNA, 2889 bp, Homo sapiens
  chr19:883422-886311
  hypo
cacgtggggcggtgcgtgaagagctgggcatggcggggaccaaagcctggcatggtgggcacgtggggcggtagggggagagatgggggagagatgggtgcggtggggactgtcccagtgacccccagctgccagggatgtgagacctgagaaaggctgtggcatgtgtgtgagacgtggctctcgggcgggtaacagctgggccagcaggtgaggacggctgcaggagacgaggaggagtgtcggagcccaggactgcccagtggcttggctgtgggcagatggtagacacagacgtgcccagcgggggcaccgggcagtgaaggtgcaggtctgtgcagccacacggggtggcgccaggtgctgctgcaggagccagcgcagcccaaactgcctggtgactcaccacgaggcccaggggaaggaatgaggcccaacaaggccctggggaccgggcgaaggaacgagccctgggagaaggaatggcagcagccctcttcacctgcctggtgactcactacaagccctgggggaaggaatggcagtggccctcttcacctttactgcctctgcggccacaatgggcagttgacataaccacctgcaggccccgggagccatcggggcctcttgacacgtgctcattagtggcttctgaggagcgcctgccccacctgccccacgtgcccccacgtctggccactccagggtccattagcgctaatcggcaaatgcctgtgctctcatctaccgggaaaacatctcccttctccagagcggaggccagcctaaaaaccaggcccgcagcctccgaggctctgaaaaccaagcggctgttctggtccccggtcatagcaggcgggcgtccctgcttcgctccagccccaggattttgtgccggaggtggggatgacgggcttggctccgtgggtgcggggggcccatcgggcggatagagatgggaatgggggccccagaagaggctgctggagaggtggggtggggtggggggcgtgttctcagcagcctcagctgacccgctgagccttggcttcctctccctgaaccaggttccggaggattccgtgcaccgcccctgcccggtctggcctgtcccctgctgcccgacggccccacccacagacccacgctccacagccgcccacacgcctgcagcccctcacggtgtccccgctggctgagcaacgacacctctcagcctcggcctcgcacagaatggtggcagccgccgcagcgggcgtggaaggatggaggagtctatacgcctaacacactcagaatgctggcaggcgcgcggtcacacccgagatcctagcactactggagatcgaggcgagacgatcgcttagggccggggttcaggaccaccctgggtgacacagcaagacctgcctccaaaataaaaaccaaccgcccccgagggcaggcccagggcctccgcagccggcgggagactcacccacgggggagatctgctggaagatgttgttcacggggagtccctccttgcgcagggaccagcactccacgatgctgctggtctggctggacgcgcacaaaagcacctgcgggggaggtgggggtgagggctgacccggcactgctgtggtggccacgccaccaccggagcctgagctgcgggaccctggggccacgcactgctgggcctgtctcttcagccacgcctgcccctcgggccctcctggattccagcccaggcctgtccccagagcccaacatccactcacaggaacgcaaatgtccccggatggtgccctcccacagggacagcaaagggacacagggaaccaagtcaggggcttcaaggagtttggggcgttactgattcctaattacaacaggaatccaggcgacctggtgtggtcggctcaacagtggcccccagaacatcccatcctcagccctaggaccggtggctgggccgcctctcacagagaagggacctgcgggtgggattcggttcgggacactgagacgggagagcacgttggggggggtccgggggccccagtgtcctcacagggtcctcaggagagaatgtgggaggttgagattcagagacaggaagaggctgcgctgtggccacgaagcgggaggaaggcgccccgaaccgagggattgggcgcctccagatgctgggaaaggcagaaaatgggttctcccctggagcccccgggagggaccggccctgcccacaccacggtttagcccgtggaggcccgcgcgggtctccacccccaggaccctgagaagcagtgcttcattccaagcctgccagcccacgtgatggcctgcgcccgttcacctgctccgacatgtcccgggccaggaacttgaggtgggtgatggcgggaaacttgtccttgcggttgaggtcggtggtgcagcgcatgaacagggagggcaggatctccgtgtcgatacggcacttctcgctcaccacgctcacgcacaccttgtagaactgcacgggcgacgcgctgctgccgtccgccgtggccaccacgatgttgccgccgccggtgaaggcgatgtcggccagggccacgcggccgcgcagccggcacaggctctcggtggacgtcagcacctgcccgctgggcttcagcagggacacggtgaccaggccgctgaccgtcaccgcgatccagccctccatgggcttgccgccgaacagcgtgagcgacggtgagaacttgactcgggagaacttctccccgaagctggaggcgcccgactgtggagaagggagggagggaggaggggccgctcaggctcatgggggctgccccatgacccccagaaacacgcgcacagaagaaccacgcagaagccaggagtgtgtgc

SEQ ID NO: 187480 - DNA, 154 bp, Homo sapiens
  chr19:891446-891600
  hypo
gggcacagccgggagacgcagcggagggtctgcgctggcccaggtgagtgatgatgggggcagcaagtggacactagctctctcccgaaggaagagcccgcagacaggcaagcggtggggcggctccctgtagccgaggcggggctgagtgaca

SEQ ID NO: 187481 - DNA, 30 bp, Homo sapiens
  chr19:894573-894603
  hypo
ctccaagagggccacgcagtgaccttacag

SEQ ID NO: 187482 - DNA, 30 bp, Homo sapiens; identical to SEQ ID NO: 95469
  chr19:897608-897638
  hypo

SEQ ID NO: 187483 - DNA, 509 bp, Homo sapiens
  chr19:898611-899120
  hypo
aaccaaccaaaacaaaaaaaaagagccacgtcccatgtgagctccgcgcctcagcagtcccctctgcctgggacccccccgtcctctactccccatcttgctgggacccctcctcttccgtgtcaggaccacagctccacacccaccaagctccaagccccgcacccccagccaaggccggatgttctgagcagaggcaggcatgggggctgcgtctcccacagagggaacagagggaggcatcgtccggttgccatggaaactgtcacctcggcaactccaggcggggcggcagagacaggtgtgagaggctcaggaccagatggggtgcctggggccggcggcgcctgcacagacgttcactacgggggtgagttctgagactgcgccccgttggaaaagtggagcgcaggggccagtagggggtctcgcctgaggtcccacgtgtggtatgtgggaggccttagagttaaatgcaaaccttccagacactgcgtccccccatctta

SEQ ID NO: 187484 - DNA, 533 bp, Homo sapiens; identical to SEQ ID NO: 95471
  chr19:899626-900159
  hypo

SEQ ID NO: 187485 - DNA, 422 bp, Homo sapiens
  chr19:900832-901254
  hypo
cctccggtcctccccacggccagggcccctcctccgcgccttgctcctgccctcatcctccaggtagcgaagaacccgctcctgctcctccccggagcggttcatgaaatcgttccagacctggaagagaggcagggaggcaggcttgccatgaaacactggggctgcgctgacatccccgggcaaatgggcacggtaaggccgccaagcacgtggacgcgctcctgcggtcacctctgtccactgaggggccgctgcttgtgtcgggccctgagctgagcgcagggaagcggggaaccggggtgggcccagctgtctcggggtgggggggattgaggtgaaacactcctgcaatcgttggagggttcccaaacgtgttgggcaggtgaatccaggagctcgaaggttccaggggtggggtg

SEQ ID NO: 187486 - DNA, 30 bp, Homo sapiens; identical to SEQ ID NO: 31650
  chr19:901790-901820
  hypo

SEQ ID NO: 187487 - DNA, 524 bp, Homo sapiens
  chr19:927134-927658
  hypo
ttgcaaggcccgcgccgagcgggtgacctctctccggaggcctggggggaggagggtgtggcccaggatccctccgccccccacccctgcctggtccaacgaccacccagcgccccgtcccagcctctcccttggggctgtcataaaatgggggtgggggtcgaggacaaagggctcttggggggaggggtctgaagggggtgggcgtagctagtttagggttatggcggcgatgggggggcacccagccctgacctaggggggaatctgggatccccacctgccccctccaccggccccaacgtggaggtctgtcctgctcccctcccccacccggcgacccggaagggtcattaaacccagcagggctcggagcgggctggtggggggagtggcttcctttggcctcttccttctgtgcccccaaagagggggggctttgcttggagctcttccgtggggggggccttgtcttgaagttgtcccaggtgggggaggggcgacagacccgaccagaccctgag

SEQ ID NO: 187488 - DNA, 507 bp, Homo sapiens; identical to SEQ ID NO: 31651
  chr19:932111-932618
  hypo

SEQ ID NO: 187489 - DNA, 588 bp, Homo sapiens; identical to SEQ ID NO: 95475
  chr19:938278-938866
  hypo

SEQ ID NO: 187490 - DNA, 276 bp, Homo sapiens; identical to SEQ ID NO: 95476
  chr19:939404-939680
  hypo

SEQ ID NO: 187491 - DNA, 778 bp, Homo sapiens; identical to SEQ ID NO: 11884
  chr19:941803-942581
  hypo

SEQ ID NO: 187492 - DNA, 229 bp, Homo sapiens; identical to SEQ ID NO: 130274
  chr19:942806-943035
  hypo

SEQ ID NO: 187493 - DNA, 198 bp, Homo sapiens
  chr19:944443-944641
  hypo
ccacggcctcagccccgttgcttcggtcgatgcccccaaaccttgacccatctcaggggcaccacgctcactgctacaaatgtgggtcttccgggcaagtgagcgtcccccacccaggacccccgaccccggccctgggagggcccgactgccagcctggctgaacctccttcattgtctggttttcgggggtggatt

SEQ ID NO: 187494 - DNA, 78 bp, Homo sapiens
  chr19:944820-944898
  hypo
ttgctgcgttgcccaggctgaactcctgagctcttaggggagccgggatgtccctgggtcctgcggtcgctctctgtc

SEQ ID NO: 187495 - DNA, 133 bp, Homo sapiens
  chr19:945356-945489
  hypo
gtagagaggggacggcgtgtggcatggcccctgctgcctgacccagcccacctccgtctgctccctagcggggaggtgtccagggcggccccagcccacctccgtctgctccctgcagcgggtgggatggtgg

SEQ ID NO: 187496 - DNA, 511 bp, Homo sapiens
  chr19:945736-946247
  hypo
ttgtggggacggcgtcgacatggccggggcaggcgtgttctggccccttgcactgcccggctcctgctgctggtgctgggctgcgtttctgttcagagaacctgggctgggagtgatgggaccgcagtctcccaccaggtgcctctttccaaatggacactcctgctgggcatgacacttctgaggctttctgggaccgtccaggtcccgtctgcagggaaccccaggacggagttaattgctgagtgcccagctctgggcaaagtgcttggaccctgcggttactccgagcccatttctcagcagggaaaaatgaggctcgcggaggcaggggcccggcgtccaggtgggagcatgagggcgtattgtgggtgggctggccggtctggggggcggggaccctgtacagaacgccccggccgcgtggagtggcaggttcgtcactgcctgggggaggagaacactgggtatttcatttttatttttttgttttttttacttttactttttc

SEQ ID NO: 187497 - DNA, 1014 bp, Homo sapiens; identical to SEQ ID NO: 95483
  chr19:955713-956727
  hypo

SEQ ID NO: 187498 - DNA, 320 bp, Homo sapiens
  chr19:957141-957461
  hypo
tccttgtaccccagacggagcctctttcccctctggaagacgttccggggcctggtgatcttcttcctccccagccaccaccctggcaggcagaggcggtcggtggctcatttcatagctggaggctgagactccaggctccaggtgcggggaagccagcaggagacaggaggaccgggatgggaagcagggcggggctctgggccaagtccccagcagcccccaggctctggtcccgcactcgccgctgtgtctcagtttcctcacctgcaaagcagagccagttctcggaacaaatgcgctcccgtccgaccctcagg

SEQ ID NO: 187499 - DNA, 86 bp, Homo sapiens; identical to SEQ ID NO: 95485
  chr19:959192-959278
  hypo

SEQ ID NO: 187500 - DNA, 326 bp, Homo sapiens
  chr19:959517-959843
  hypo
tcacccgcctcccaaggtgctgggattacaggtgtgagccgccaccctgaagagaagttggttttggacttctgggctccgggaccgcgggagaatagatttctgttgctttaagctgcaacgtgtggctgtaagggagttaaggatcgatttgagatgaggtggccctaaaaccagcaggctggtgtcctgagaagaggagagagagacggggagacggtcttgtggagacggaggcagagactggagcgctgcggccacaagccaggacgcaccttgatctggggttcccgggcccctggaccgggagaggacactgtcttgtc

SEQ ID NO: 187501 - DNA, 392 bp, Homo sapiens
  chr19:962809-963201
  hypo
cggcctgatgccgttacttttactttgcaaactctgaggcctaaactggtgtcccgagtggggccgggcggaggctctgggcaggtttccgggccgatcctgcagctgaaacccggcgcggctcctctcgcccaggctgtaaagtgggtttcaggtgggatcgggtctgaggcccgtcttcctccaacctgggatctcctccattcactgggggttttgcaacctgggaagggcctggaagtggcggagggtggtgggaggtgtttctggaaggtcagacaccgggggttccgggggtagcaggcctcgaccaggcagagggccggctgctcactcagggctgcacccgctctccagccagtcacatcccagaacctcgatgtccacgtccc

SEQ ID NO: 187502 - DNA, 273 bp, Homo sapiens; identical to SEQ ID NO: 95488
  chr19:966653-966926
  hypo

SEQ ID NO: 187503 - DNA, 258 bp, Homo sapiens
  chr19:968534-968792
  hypo
cctcgcctctcccgccgccgtgaactcaggaccctgagttgcgcctggtcccacctgcttgaacctaggtgtgcgggcgagcagggcacggccaggggctttgcaggacaaacagtcaagactgatggagaggataccatcgttcacccggtaccacgctcagcccagagggggtcgtccacagatacatattcagtgtgacgttggatggttcacattcctagttttttgttttaatgagacggagtcttgcacaga

SEQ ID NO: 187504 - DNA, 30 bp, Homo sapiens
  chr19:979368-979398
  hypo
ctgcccggcctcccgcgcaccatcctggcc

SEQ ID NO: 187505 - DNA, 30 bp, Homo sapiens; identical to SEQ ID NO: 95490
  chr19:991146-991176
  hypo

SEQ ID NO: 187506 - DNA, 82 bp, Homo sapiens; identical to SEQ ID NO: 31658
  chr19:994441-994523
  hypo

SEQ ID NO: 187507 - DNA, 31 bp, Homo sapiens; identical to SEQ ID NO: 31659
  chr19:995015-995046
  hypo

SEQ ID NO: 187508 - DNA, 664 bp, Homo sapiens; identical to SEQ ID NO: 130277
  chr19:1000336-1001000
  hypo

SEQ ID NO: 187509 - DNA, 574 bp, Homo sapiens
  chr19:1003208-1003782
  hypo
cgcctgggaagacgtcggcctggccctgtgccgcactcaggaccccggcggcctggtggccctctggacaagccgggctggccggcccccacagctggtcctggacctaagccggcgggacacgggagatgcaggactgcgggcacgcctggccccgatggcggcgccagtggggggtgaagcaccggtacccgcggcggtcctcctcggctgtgacatcgcccgtgcccgtcgggtgctggaggccgtacctcccggcccccactggctgttggggacaccactgccgcccaaggccctgcccaccgcggggctgccaccagggctgctggcgctgggcgaggtggcacgacccccgctggaggccgccatccatgacattgtgcaactggtggcccgggcgctgggcagtgcggcccaggtgcagccgaagcgagccctcctccccgccccggtcaactgcggggacctgcagccggccgggcccgagtccccggggcgcttcttggcacggtgagtggggaccctgcttcccttaggagggtgtccaggccactgagtctgcactgctcat

SEQ ID NO: 187510 - DNA, 1342 bp, Homo sapiens
  chr19:1004378-1005720
  hypo
tggggacaccaggagcgtccacgtttgtcctcatgatacggacaagagcgaccagtgggaatcgggcacgtgctgggcaggggtgagaggatggaggggtgtgaacttcgacacctgacaccccccccgccctgcccctaggttcctggccaacacgtccttccagggccgcacgggccccgtgtgggtgacaggcagctcccaggtacacatgtctcggcactttaaggtgtggagccttcgccgggacccacggggcgccccggcctgggccacggtgggcagctggcgggacggccagctggacttggaaccgggaggtgcctctgcacggcccccgcccccacagggtgcccaggtctggcccaagctgcgtgtggtaacgctgttggaacacccatttgtgtttgcccgtgatccagacgaagacgggcagtgcccagcggggcagctgtgcctggaccctggcaccaacgactcggccaccctggacgcactgttcgccgcgctggccaacggctcagcgccccgtgccctgcgcaagtgctgctacggctactgcattgacctgctggagcggctggcggaggacacgcccttcgacttcgagctgtacctcgtgggtgacggcaagtacggcgccctgcgggacggccgctggaccggcctggtcggggacctgctggccggccgggcccacatggcggtcaccagcttcagtatcaactccgcccgctcacaggtggtggacttcaccagccccttcttctccaccagcctgggcatcatggtgcgggcacgggacacggcctcacccatcggtgcctttatgtggcccctgcactggtccacgtggctgggcgtctttgcggccctgcacctcaccgcgctcttcctcaccgtgtacgagtggcgtagcccctacggcctcacgccacgtggccgcaaccgcagcaccgtcttctcctactcctcagccctcaacctgtgctacgccatcctcttcagacgcaccgtgtccagcaagacgcccaagtgccccacgggccgcctgctcatgaacctctgggccatcttctgcctgctggtgctgtccagctacacggccaacctggctgccgtcatggtcggggacaagaccttcgaggagctgtcggggatccacgaccccaaggtgggcggcctcggggggctgcgggtggccttggggggctagcggtggccccgggctgggctgtgtggggcaggggtggtcagctggacgtggaggacgtccactaggccaactctggtcccaagagacatttattcaattaatttatttatttaaagaaaaatagcc

SEQ ID NO: 187511 - DNA, 1099 bp, Homo sapiens
  chr19:1007202-1008301
  hypo
cgacagagctgcctccgcctggggtgggaagagcgagtgggggcagatcaggagtggggtcatggacatgttagagtggggctcccgtgggacccccaggggagaggcagaggaggtggtgggataggcgtccagcccagggcgaggtccaggtggagatggacttgccggcgtttagaacagagggtctccacccggggtgatcctgccccccgccccaggggaccctggacagtgtgtgtctagagacagctgtggtggtcacgcctggggtgtgctctgggcatggagtgggtggaggccaggaatgcagcctcggcgccctgcagtgcccaggacggccccaccccggagaacggcgcgcccctcaatggtcaggggtcctgaggggcaggcagaggcgctgacggggtcccccgcgcagctgcaccacccggcgcagggcttccgcttcggcaccgtgtgggagagcagcgccgaggcgtacatcaagaagagcttccccgacatgcacgcacacatgcggcgccacagcgcgcccaccacgccccgcggcgtcgccatgctcacgtgagcccgggcgcggggtgaggcgggggcggggcgtggggtgggcggggcgatggctgacccccgcccccggccccagcaggagcgacccccccaagctcaacgccttcatcatggacaagtcgctcctggactacgaggtctccatcgacgccgactgcaaactgctgaccgtgggaaagcccttcgccattgagggtgagaggcacctgggcgaggcggggcgccggggtctctggggacctcctgggggcagtggggagccacggagggttcgaggtgggaaggggcgaaatcccacgtgtgcgggcagagttcccctggggctgtcccacctggccccaccgcctggccccgcgcccccaggctatgggatcggactgccccagaactcgccgctcacctccaacctgtccgagttcatcagccgctacaagtcctccggcttcatcgacctgctccacgacaagtggtacaagatggtgccttgcggcaagcgggtctttgcggttacagaggtggggcaggg

SEQ ID NO: 187512 - DNA, 371 bp, Homo sapiens
  chr19:1009748-1010119
  hypo
gactggtttggccgccggcccactccatccccgagtgggactggaccacggccctggctgctgccactgatgttggcgcctgcaccccacgtccctatgcccgaggcgcaagctctgctctcccggggaccccaagcctggcgcacacgcggggagggcggggccatggagaaggcactgcagggagcaccaggcagagccgggctgaggccggccggcactagggcgcgaggccccaccccaagccggcctctcctccacacctccgccttgctcagagacctgcaccatgggaccccactccatcctcaggacggttcactgcagacctaccaagacccctccagaaccttccgcggaaccccaccccc

SEQ ID NO: 187513 - DNA, 174 bp, Homo sapiens; identical to SEQ ID NO: 95498
  chr19:1010991-1011165
  hypo

SEQ ID NO: 187514 - DNA, 30 bp, Homo sapiens; identical to SEQ ID NO: 95499
  chr19:1012083-1012113
  hypo

SEQ ID NO: 187515 - DNA, 361 bp, Homo sapiens
  chr19:1030007-1030368
  hypo
tttattctccctccagcgtttatctcccgctcccgctacacgacctgcccccatgcttatggccccctatacactttgccgtctgcctcagtgctgtctccgcggtcactagtggctggatagggacactcgaggtccccactggtgcacacccactgcccaggagcacacagcccattccccacggcggtgtctcagagcaccgaaggccaagaaagctggaatggccgggtgcagaaaggtggcagggaatcggtggcaaggagccaggtgcgtgactagaggcggtcagcctcgggggcagctccttcgggagttgctaagaagcaggatgggggccgggcgcggtggctcacacctg

SEQ ID NO: 187516 - DNA, 267 bp, Homo sapiens; identical to SEQ ID NO: 95501
  chr19:1032229-1032496
  hypo

SEQ ID NO: 187517 - DNA, 79 bp, Homo sapiens
  chr19:1033553-1033632
  hypo
aaggagaagaatcagacgaatgttgagtgtctagtgatcttcaaacccagaccgggagcgtgggtgggacagtggtgta

SEQ ID NO: 187518 - DNA, 36 bp, Homo sapiens; identical to SEQ ID NO: 95503
  chr19:1035213-1035249
  hypo

SEQ ID NO: 187519 - DNA, 30 bp, Homo sapiens
  chr19:1045081-1045111
  hypo
cgattctgggccggcgtcgtcttcttggga

SEQ ID NO: 187520 - DNA, 30 bp, Homo sapiens; identical to SEQ ID NO: 95504
  chr19:1046310-1046340
  hypo

SEQ ID NO: 187521 - DNA, 456 bp, Homo sapiens
  chr19:1047459-1047915
  hypo
gtcgcccgtggccttcggcttcggctgcgagagcctggctctgctggaggagcagggcgagggcgcgcagtggcacaacgtgggcacccggcctacggcagacgtcttcagcctggcccaggtctctggccttctgctgctggacgcggcgctctacggcctcgccacctggtacctggaagctgtgtgcccaggtgggccgtagggggcggggctccgggccgggtcgcacctgctttgcgggaggctgagctaggggtgtggcctccaggccgtttgggggtggggggtggcttattcccttggagagaaggcggggcttcttggcacacgcatgcaggtggctgcattggaggggcggggcctgaggcaggtgggcggggtttctgggccgcctcatacctggacgccctgattccaggtgtatggccagaagctggcacagtcgccgggcgc

SEQ ID NO: 187522 - DNA, 182 bp, Homo sapiens; identical to SEQ ID NO: 95506
  chr19:1048855-1049037
  hypo

SEQ ID NO: 187523 - DNA, 30 bp, Homo sapiens
  chr19:1049272-1049302
  hypo
gaagaggcaccgcccggcctgagtcctggc

SEQ ID NO: 187524 - DNA, 213 bp, Homo sapiens; identical to SEQ ID NO: 95507
  chr19:1050962-1051175
  hypo

SEQ ID NO: 187525 - DNA, 179 bp, Homo sapiens
  chr19:1051442-1051621
  hypo
accaggtgggatgcaacggaagctgtccgtggccattgcctttgtgggcggctcccaagttgttatcctggacgagcctacggctggcgtggatcctgcttcccgccgcggtatttgggagctgctgctcaaataccgagaaggtaagagctggggattctgctcgaggggccagaaaa

SEQ ID NO: 187526 - DNA, 262 bp, Homo sapiens
  chr19:1055084-1055346
  hypo
attgtctgcaggttctcggcaccagaagttcctgctgaagtggccaaggtcttggccagtggcaactggaccccagagtctccatccccagcctgccagtgtagccggcccggtgcccggcgcctgctgcccgactgcccggctgcagctggtggtccccctccgccccaggcagtgaccggctctggggaagtggttcagaacctgacaggccggaacctgtctgacttcctggtcaagacctacccgcgcctggtgcgcc

SEQ ID NO: 187527 - DNA, 163 bp, Homo sapiens; identical to SEQ ID NO: 130282
  chr19:1071619-1071782
  hypo

SEQ ID NO: 187528 - DNA, 30 bp, Homo sapiens
  chr19:1073155-1073185
  hypo
gaggcccgccgcccgcgggcccacgagtgc

SEQ ID NO: 187529 - DNA, 481 bp, Homo sapiens
  chr19:1077668-1078149
  hypo
gccaccgcgcccggccactcctcctgtttttccgctgccgattgttgtgcagggtcctctgcatgcccagctgggccatggggccttgctgagagagatgggggtggggaggaaaggaggagctggggagactgagtcccatccgaggatagggttggaactggcctcctggctcccacacccacagcaagaggcggagtccaacctgcgcaaggccaagcagggttacgtgcagcgctgcgaggaccacgacaaggctcgcttcctcgtggccaaggcggaggaggagcaggctggcagcgcgccgggagcaggcagcacggccaccaagaccctggacaagcggcggcggctggaggaggaggccaagaacaaggtgagggcgggtggaggcagggctggaggtccctggaggaggagatccaatgcttggtgtgacatttactacctccagacctttgtttttgtttttttgtttttt

SEQ ID NO: 187530 - DNA, 1050 bp, Homo sapiens; identical to SEQ ID NO: 95510
  chr19:1079727-1080777
  hypo

SEQ ID NO: 187531 - DNA, 420 bp, Homo sapiens
  chr19:1082937-1083357
  hypo
ggccggcaggacggctcggagagcgaggcagtggcggtggccctggcaggtcggctgcgggagctcctgcgggacctgccgcctgagaaccgggcctcgctgcagtacctgctgcgtcacctacgcaggtgagtcccggcatatggagtggagggcgcggggtcccgggagccgctcagcacctggcccctgcccaccccgcaggatcgtggaggtggagcaggacaacaagatgacccccgggaacctgggcatcgtgttcgggcccacgctgcttcggccacggcccaccgaggccaccgtgtccctctcctccctggtggattatccccatcaggcccgcgtcatcgagactctcatcgtccactacggcctggtcttcgaggaggagccggaggagacccccgggggccaggtgag

SEQ ID NO: 187532 - DNA, 68 bp, Homo sapiens
  chr19:1084543-1084611
  hypo
tgccttttgaggtgcctaccccgcactcagaaaccagtaacgtgaacgtggggctgatgccttgtgag

SEQ ID NO: 187533 - DNA, 44 bp, Homo sapiens; identical to SEQ ID NO: 95512
  chr19:1089504-1089548
  hypo

SEQ ID NO: 187534 - DNA, 245 bp, Homo sapiens
  chr19:1090867-1091112
  hypo
ccggccccacgcaggcgggattccgcggcgcgcgcccacctcgtgctccgtgatgttgatgagcagctcctgctgcagaaactgctccaggatgtacttgggggccatgtcgaccagggactggaagagagcggctctaaggcacggcccggaggggcccagacaaccccaaccccatttcctgcctcaagctacctggggcttactcgtgtgccccaacaacacacccacgtcgtgaatcagaa

SEQ ID NO: 187535 - DNA, 30 bp, Homo sapiens
  chr19:1093232-1093262
  hypo
gtccggttggcagacgtgctccgtcacccc

SEQ ID NO: 187536 - DNA, 313 bp, Homo sapiens
  chr19:1105540-1105853
  hypo
gcgggtgggtgggggtcggggtgggctccagcctggagagggcctgggagtgtgcagggggcccggactgagggggtgccagcccccgactcactcacacaccttggccgccacaggagccagggagtaacgaagagatcaaagagttcgccgcgggctacaacgtcaaattcgatatgttcagcaagatctgcgtgaacggggacgacgcccacccgctgtggaagtggatgaagatccaacccaagggcaagggcatcctgggaaagtgcgtgacctctggggacagtacggctgctggggtgggggtggg

SEQ ID NO: 187537 - DNA, 1523 bp, Homo sapiens; identical to SEQ ID NO: 95514
  chr19:1108137-1109660
  hypo

SEQ ID NO: 187538 - DNA, 185 bp, Homo sapiens
  chr19:1110421-1110606
  hypo
cctgtgcctgcatccgcccagtctcacccagtaccctcgctcacccaggatgcatggcgcttccacgagccccttgcccacctaggccctcgccgtgctcacccacaatgcacggtgttcccacgagccccgagcccacctgggatgcccggcgttcccacgagcccctcgcccacccgggatgc

SEQ ID NO: 187539 - DNA, 813 bp, Homo sapiens
  chr19:1111948-1112761
  hypo
acccctgcccctgccccgccccccaaccctgccttccctgcagtaccttgttctcaaagttgtacttgctgaggtcacgggactccgtggcgcggcggtctccgtgggtcagggccccctgccaggggtggggaggccatcagttggtcacctggggtctggcctctagcaccccacaaagctttggagagccttcctgggcctgtccctggttctcagccccacccccacctgctcaccagactctccaggcgcttggccacgatggaggcgaaccggcgctccccggccagctccgagatgaggaagacatactctggcgcggagacctggttggaccggtgggtgcggcctgggggcagagctgctctcagggcccggccaggcgggggcggggccgagaccatgttgggggcggggccaggcagcgctgggggcggggccggactcaccgaactgctggatggcgcggtcggcgctccacggcagctccaaggtcatgtgcacgcggcgccgctggttctggacacggcggtcggcttggagggagacacccgagctggaggcctccgagatgatggccacgagctagggggaaagaaggggccgggacacggttggtgcaaggcccgccccagcgttgccgccacctcctcacccactaggcccccgctccaggtcaccaggacgtcccggggcagcgagaggcctgcggggcgcggacaccacccgccacacggccactcgcgcccgcacctggcacacacacactccagaagtgcgcgggtccacagtccccggggacccttgggc

SEQ ID NO: 187540 - DNA, 30 bp, Homo sapiens
  chr19:1116051-1116081
  hypo
tttctcttggtggacggaaagtgcttctga

SEQ ID NO: 187541 - DNA, 312 bp, Homo sapiens; identical to SEQ ID NO: 95517
  chr19:1117274-1117586
  hypo

SEQ ID NO: 187542 - DNA, 30 bp, Homo sapiens
  chr19:1119569-1119599
  hypo
cccagatacccaagcggctcatgtagatca

SEQ ID NO: 187543 - DNA, 30 bp, Homo sapiens; identical to SEQ ID NO: 31675
  chr19:1122663-1122693
  hypo

SEQ ID NO: 187544 - DNA, 336 bp, Homo sapiens
  chr19:1128100-1128436
  hypo
caccatgtgacagagcgagagagtgagactccgtctcaaaaaagaaaaaaataaacaagcaatgggtgagaaacaccaaccctcagggccacgcaggacggcgtctgacttctgcagcacctgaagggcagcaatgctgcaggaactctgagcagctcgggtctggggtgagcctggtgccatgccctgtgccggaggcaggggcgggggcagccacgcccagaggtggggctcgccatggggatgacacacacacacgcgctgcccagtgaaggagatgtatgtacatcatttcatttttttttttttgagacggattcttacactgtcgcccgg

SEQ ID NO: 187545 - DNA, 287 bp, Homo sapiens
  chr19:1133595-1133882
  hypo
aacacgggtccgtgccgctggggcgaggggcccgcctgccaggcaccccgcccgccaatggaaaacaaccaatggggaagaaacccacggagccgctcaatccggcagccaatcacagccaccgctcaacctagcagccaatcacagccaccgctcaacccagtagccaatcacagccaccgctcaacccagcagccaatcacagccactcccagagacagctccacaccagctccacgcaaaaaacccacaaccacaagcgctgctgaggacgcggggcagtggcc

SEQ ID NO: 187546 - DNA, 30 bp, Homo sapiens; identical to SEQ ID NO: 95520
  chr19:1154261-1154291
  hypo

SEQ ID NO: 187547 - DNA, 637 bp, Homo sapiens; identical to SEQ ID NO: 95521
  chr19:1156122-1156759
  hypo

SEQ ID NO: 187548 - DNA, 396 bp, Homo sapiens; identical to SEQ ID NO: 95522
  chr19:1166849-1167245
  hypo

SEQ ID NO: 187549 - DNA, 51 bp, Homo sapiens; identical to SEQ ID NO: 95523
  chr19:1167627-1167678
  hypo

SEQ ID NO: 187550 - DNA, 749 bp, Homo sapiens
  chr19:1169514-1170263
  hypo
atgcagcattccctgcccctccgaagcagtgagtggttcaggggcagagctgggcctgggcgaggggcccccggggggtggggtgatgccatcactgttgccgtcctacgggttgagacaggacagctgcccatcaccccttgatgcaagctggctgcaggctgcctgaccagttcccggggacaccgtgctcaaccctgtggtgacaactggggattccgaaggacagggaggtcttactttctgttaaacacttttattttccctgagatacaatccacaccaggaggggcacctgtccggagcatatgactcaacggtttcaacgtattctaaggcagaccaccacagcttctaattccaaaacattccgctcccccaaaacacagccgtgtccccaacagcagtcactcccccgcctctacagcccctgcaaccacacgcccacttctcttctgtggactggcctgctctggacacgtgaccacacgtctaccccccatctgtggactgccctgctctgcacacgtcacatgaacggagtcacgtgccgtggccttttgcgtctggcgtctctccgcaagcacgtctccgcagagcatccatgccgggcgcacagacgacagatctaatctccgcctcctcacggggcccaggaggcccagggcgagagctgatggggcccacgcatccgaaatccccgtcttggccagaaccccaggtttgccttcgcccgcagggctgagccc

SEQ ID NO: 187551 - DNA, 37 bp, Homo sapiens; identical to SEQ ID NO: 95525
  chr19:1170704-1170741
  hypo

SEQ ID NO: 187552 - DNA, 900 bp, Homo sapiens
  chr19:1170964-1171864
  hypo
aaaatacacacacacaacatacgaggacaggcacacaggcacgggcaacacacaaaatacagacacacataaccgactcatgaacatgggtacacacaggcacacacacaacacaaacacgggtgcacaggcacacacaacacacaaacacggatgcacagacacgcacacaatgtgcacccataaaacacacgcgtatgaaacacacgagcaacacacacatgcacaggagcacacagccacaggcacgcacattcacacacacacaacgcacccacatccgtacaacacacacacagaacgcgcacacgtccgtacgacgcacacacagaatgcacgtgcgtacgtacaatgcacacaaagaatacacacatccatacaacacacaggcacacaacacacatgtgcatgcacatggcgcaacatacagatacacaaagacacgtgtacacacacatgcagagtccccagggcagcgctggcgtcatggggggctgcctccacaccgcctccaggagtgtttacagctgtggattacatgataccgcccccttcccagagctgatcccaccccccagcatgggggccccctgggagggggcctctgggagccggactggttctgtcgacacagtcgcctctttgttcggggcagagctcactctggcggtgttggcgtttccgcatgggccctgccggaggggcatccgtgactccgctggagccgggttgggccaagcccaagctggtcacacccctcacacccctggggttgggggaggccttaggcagcaagtgggtggggggtctaggggtggctggcgcaacctctctccacctcggtttccccgccaggtgagagggcagtgactgcccatggtcacgcggctggagaacatg

SEQ ID NO: 187553 - DNA, 226 bp, Homo sapiens
  chr19:1172304-1172530
  hypo
tccagatctcaaattcgccctttctcggcaagaactctgaaggtggcccggagcaggccactgtgagaagccatcaccccacgaccagggtcacccctgggaaaatctggggccgggcagccagatccctgaaggccagaggatgtctgggaagaaagggcgtggacggcacctgctgggcctgccacaaactctctgggtcccatgtccccgctgctcctcttcc

SEQ ID NO: 187554 - DNA, 366 bp, Homo sapiens; identical to SEQ ID NO: 130284
  chr19:1173035-1173401
  hypo

SEQ ID NO: 187555 - DNA, 34 bp, Homo sapiens; identical to SEQ ID NO: 130285
  chr19:1173616-1173650
  hypo

SEQ ID NO: 187556 - DNA, 268 bp, Homo sapiens; identical to SEQ ID NO: 95529
  chr19:1178809-1179077
  hypo

SEQ ID NO: 187557 - DNA, 104 bp, Homo sapiens; identical to SEQ ID NO: 31684
  chr19:1179314-1179418
  hypo

SEQ ID NO: 187558 - DNA, 96 bp, Homo sapiens
  chr19:1182346-1182442
  hypo
tagtcagactgaggccggaggaggctcaactgccccgaggatgaagaaaggagccaaacttggccgggtgcagtggctcacgcctgtcatcccagc

SEQ ID NO: 187559 - DNA, 29 bp, Homo sapiens
  chr19:1201095-1201124
  hypo
actcttgtgaataacgctgttttgaaaat

SEQ ID NO: 187560 - DNA, 969 bp, Homo sapiens; identical to SEQ ID NO: 130288
  chr19:1206690-1207659
  hypo

SEQ ID NO: 187561 - DNA, 17 bp, Homo sapiens
  chr19:1208912-1208929
  hypo
cccggccagcacgcttc

SEQ ID NO: 187562 - DNA, 17 bp, Homo sapiens
  chr19:1209270-1209287
  hypo
ctcccagcagtgagaaa

SEQ ID NO: 187563 - DNA, 107 bp, Homo sapiens
  chr19:1213488-1213595
  hypo
tcctgaacatttcacacgagtggtgtcacacaccgcgtggccttttgcgtccggcttgtctcacggagtgtgctgtcctcaaggggcatccgcgccgtggcctgggt

SEQ ID NO: 187564 - DNA, 125 bp, Homo sapiens
  chr19:1220617-1220742
  hypo
cagccagggctccccggctttccagccgcccgagattgccaacggcctggacaccttctccggcttcaaggtggacatctggtcggctggggtcaccctgtaagtgccccgcccccccgggcact

SEQ ID NO: 187565 - DNA, 310 bp, Homo sapiens; identical to SEQ ID NO: 95535
  chr19:1223560-1223870
  hypo

SEQ ID NO: 187566 - DNA, 30 bp, Homo sapiens
  chr19:1224972-1225002
  hypo
cctctgcgctctgccggggctgctgcatcg

SEQ ID NO: 187567 - DNA, 687 bp, Homo sapiens; identical to SEQ ID NO: 95536
  chr19:1226469-1227156
  hypo

SEQ ID NO: 187568 - DNA, 2322 bp, Homo sapiens
  chr19:1227510-1229832
  hypo
ttctccatcctcccaggggcccgcgggaggcggagaaccggtgcccaggctgacctcttccgtcttccttccaccctgcagcccgtgtccaggagccccgccaggtgcccgcgccaggccctcagtcttcctgccggttccgcccgccctcccggagaggtggccgccatgcttctgtgccgaccacgccccaggacctccggagcgccctgcagggccgggcagggggacagcagggaccgggcgcagccctcccccctcggccgcccggcagtgcacgcggcttgttgacttcgcagccccgggcggagccttcccgggcgggcgtgggaggagggaggcggcctccatgcactttatgtggagactactggccccgcccgtggcctcgtgctccgcagggcgcccagcgccgtccggcggccccgccgcagaccagctggcgggtgtggagaccaggctcctgaccccgccatgcatgcagcgccacctggaagccgcgcggccgctttggttttttgtttggttggttccattttctttttttctttttttttttaagaaaaaataaaaggtggatttgagctgtggctgtgaggggtgtttgggagctgctgggtggcaggggggctgtggggtcgggctcacgtcgcggccgcctttgcgctctcgggtcaccctgctttggcggcccggccggagggcaggaccctcacctctcccccaaggccactgcgctcttgggaccccagagaaaacccggagcaagcaggagtgtgcggtcaatatttatatcatccagaaaagaaaaacacgagaaacgccatcgcgggatggtgcagacgcggcggggactcggagggtgccgtgcgggcgaggccgcccaaatttggcaataaataaagcttgggaagcttggacctggccgtctgggttttgttcgcgtctcaacgtggatggggcggcagcggggcgggcgccgttgacatgcggagggcagtggggactcggggcgcgggagggccggggccggctccctcagggccggcggcagcagcggtggcggcgcggttattgctcggaggcggcgcgggctgccgccagcacacgccgcagtgaggtaaacggtctcggaggtcggcagtcacggtgttgagccgcctcccggcccagggcggcgaactcgtctgcgaccgttagcgccccgcggcccccgcccgggcgagctcgcgcacgcgcccggcacgcggcggctccatcgggcccagtgggctgcgcgaccctcgggtggcgggccctgcgactaagcggccgccccgtccgggactgagggcgagtgatcgttgtcctcaggagcccgaagctgagagccgttcacgccccttccttcccgcccagccggggtctccgcggcccgcgcctcacgacgcccagcacccggcaagcaccggaaagagcagtgcacacttcggcggcgcgagggcggccggggctctgcgcctgcgccctgaagcggcgagcgcgcctccgtcgcccggcgcgtgcgcgaagggcccgcggtccccgcgcattcgcgtcggggcgtcgcgcccccacgtctctcccgccgccgaggccccgtgcggcgccggagaagctgccagagagatgggcccaggacgcgggacttaggccgggctgtggtcgggggacgtgggggcggcggcgaccaacgcgggagtcgccacgacgggctcggcgaggcgcggcggaaagagtctctcgtcgaggccagccgccagcttgtccagcaccgacccggatggtaggacgcacaggcccgagccggggcaccccccgccgcccggctcctcctcgatgacggggatggcggggtcgtcgccggcgccgcccagggtgcgaccgtcgggcgggccgtccacgctgtcgccgcgccgcaagggcgcacgcgcgggtcgggccgcgccggcaggcggtgccggggttccggccagggccggggccgcgcgggcgccggggtcgctgtgctgccggccacgctgccactgtttgcgggcgtgcgggtgcgcgcgggcgcggtgtcgcgcggcagccggcgtgtcgtcgaagtgcgggtcgtggcgcaggaactcgtggaacagcgcgtccgtcttctcgtcgatgctgtagtcgcggcgcgggcggcggggccaggcgcgcgggctgcggggccgggcgggcgcggcaggtggctcggtgtcgtcgcctgcgccgcggccctcgatgctggcgtagccactgtccatctgcagcagccggcgcgcctcgccgtccttgggccgc

SEQ ID NO: 187569 - DNA, 46 bp, Homo sapiens; identical to SEQ ID NO: 95539
  chr19:1231261-1231307
  hypo

SEQ ID NO: 187570 - DNA, 978 bp, Homo sapiens; identical to SEQ ID NO: 95540
  chr19:1234515-1235493
  hypo

SEQ ID NO: 187571 - DNA, 123 bp, Homo sapiens
  chr19:1236402-1236525
  hypo
ctgtcctgcaaggtagcgccaggccctggagctcagcgctgggcagggcaagcactcggaggaatggggacgccaaggcggtgcagccggctcgagaaggactccagacgccctgtccgcccc

SEQ ID NO: 187572 - DNA, 30 bp, Homo sapiens
  chr19:1247415-1247445
  hypo
gccaccgcgcccgaccgcatcatctttttt

SEQ ID NO: 187573 - DNA, 31 bp, Homo sapiens; identical to SEQ ID NO: 130292
  chr19:1248272-1248303
  hypo

SEQ ID NO: 187574 - DNA, 825 bp, Homo sapiens
  chr19:1254898-1255723
  hypo
agcagatggactgctcccccacggccagcagcagtgccagtcctggtgccagcaccacgtctaccccaggggccagccctgccccccgctcccgaaaacccggcgccgtcatcgagagctttgtgaatcacgccccgggggtcttctcagggaccttctctggtaggtgtcacagcacatgtgtgagctcacgtgtgtcccgtgaccctgtgcatttggggtctacatccacccacaggcgactccacatattctgggcatacacaggctgtgtccgtctgctcacttcacatgtcccccaggaatcccccacacacacgcctggccctgcccggggggccgcgggtcaccaggcgcctgcatactggggacgtgtcccgctcccgccccgtggtccctcgtgcacatcagcccacatgtccacgccattgcctgagctcatgagctcacacccgtggacgcccgtcctggacatgcgggactgtgcccgtgccgggcactcacggccacctctgcccgcaggcacgctacaccccaactgccaagacagcagcgggcggccgcggcgtgacatcggcaccatcctgcagatcctgaacgacctcctgagcgccacccggcactaccagggcatgcccccttcgctggcccagctccgctgccacgcccagtgctccccggcctcaccggcccccgacctggcccccagaactacctcctgcgagaagctcacggctgccccctcagcctccctgctgcagggccagagccagatccgcatgtgcaagcccccgggtgagtggccaccctcgggggtcctacctt

SEQ ID NO: 187575 - DNA, 91 bp, Homo sapiens; identical to SEQ ID NO: 95544
  chr19:1256136-1256227
  hypo

SEQ ID NO: 187576 - DNA, 30 bp, Homo sapiens; identical to SEQ ID NO: 59735
  chr19:1256466-1256496
  hypo

SEQ ID NO: 187577 - DNA, 106 bp, Homo sapiens
  chr19:1274635-1274741
  hypo
tcctccttccaggaggcgcttcgccagtgaggtgcgggctcagggcctcgagtctctcctggagcacgggctgcggtgcgccggcagcttacggggcggccagtcc

SEQ ID NO: 187578 - DNA, 30 bp, Homo sapiens; identical to SEQ ID NO: 95547
  chr19:1277203-1277233
  hypo

SEQ ID NO: 187579 - DNA, 37 bp, Homo sapiens
  chr19:1277514-1277551
  hypo
tttgaggtggagtggcgcgatcccaactcactgcaac

SEQ ID NO: 187580 - DNA, 43 bp, Homo sapiens; identical to SEQ ID NO: 95548
  chr19:1280524-1280567
  hypo

SEQ ID NO: 187581 - DNA, 30 bp, Homo sapiens; identical to SEQ ID NO: 95549
  chr19:1280826-1280856
  hypo

SEQ ID NO: 187582 - DNA, 30 bp, Homo sapiens; identical to SEQ ID NO: 95550
  chr19:1281098-1281128
  hypo

SEQ ID NO: 187583 - DNA, 292 bp, Homo sapiens
  chr19:1288526-1288818
  hypo
agacggggacagccgcgatggggggcagacagcagcgtgggcaccaggggaccgtgtgctcgatggggcctgcaggcccgggcagtgccgcagcgtcgccggccgccccttccgcccattggcctggcacctgtgcccaggcgatgactgtgtggtctgtctccacatcacaccctctctgctgtgagaggcgatgcctgcacccaggggaccccgcacccacctccttgggccgctataaggtggggccccgttgggtggtctggctggccggccccgccactcccaccgg

SEQ ID NO: 187584 - DNA, 292 bp, Homo sapiens
  chr19:1289081-1289373
  hypo
gcctggagtcgcatccggctgcaggttacatgtgtctgtgtgtggcaggaggctgcgtgaatccacagggcacagctctggcgtgtttgcacatgtgtctgcgtgattgcatatgaggtgcatgtgtgtgcatgagtgtgtctgtgcgtggcacccgcgtttgcatgtgcgtgcccttgcacgggatgtctgcagtgtccgaggtccctgtgcgtgtctgcctgtggcatgcatgcgttttgtctgtgcgtggagtgcaggtgtgtgtgcgtgtctgcgtgtggggtgcatg

SEQ ID NO: 187585 - DNA, 30 bp, Homo sapiens
  chr19:1289662-1289692
  hypo
tcccggggttccccacggacccagtggccc

SEQ ID NO: 187586 - DNA, 30 bp, Homo sapiens; identical to SEQ ID NO: 95554
  chr19:1290537-1290567
  hypo

SEQ ID NO: 187587 - DNA, 30 bp, Homo sapiens
  chr19:1290955-1290985
  hypo
cgagagactcagcggcgtgtccccccagct

SEQ ID NO: 187588 - DNA, 30 bp, Homo sapiens
  chr19:1291193-1291223
  hypo
taccagggccacccacgcccacggtgacgg

SEQ ID NO: 187589 - DNA, 30 bp, Homo sapiens
  chr19:1291564-1291594
  hypo
cagcctgggcctccccgggagcttctccac

SEQ ID NO: 187590 - DNA, 31 bp, Homo sapiens; identical to SEQ ID NO: 95555
  chr19:1293374-1293405
  hypo

SEQ ID NO: 187591 - DNA, 52 bp, Homo sapiens
  chr19:1296938-1296990
  hypo
cctacgaaaggccaacggcaggtggggaacacagcagcgccagccggagtcc

SEQ ID NO: 187592 - DNA, 219 bp, Homo sapiens
  chr19:1297596-1297815
  hypo
ggacccacccctgttcgattgtccacacgtgtgcacaccccagcggccccggcttcaggcgtccttttcctcctctcttgatccttgcagacgcccccactgcactccaggatgcttctgggggcccgaaagcaggggcggtgatgctggaattttgggcgtaagaaccagttggaaataatctttcccagccaggcgtggcggtggctcacgcctgta

SEQ ID NO: 187593 - DNA, 181 bp, Homo sapiens
  chr19:1304764-1304945
  hypo
cccgccgggtgtgggcgctccttggggaacctggttacccccgaccccagccccagtgagaccccaatgccggctcctgccagccctggacggccattggtacgctggtcccgcgcagagtcttttccgcccagaggatcctgagggaagtcatctccctcctgccggccagttactgccg

SEQ ID NO: 187594 - DNA, 30 bp, Homo sapiens
  chr19:1307567-1307597
  hypo
cttccgccacaggcccgggttcagccgccg

SEQ ID NO: 187595 - DNA, 284 bp, Homo sapiens; identical to SEQ ID NO: 95559
  chr19:1308050-1308334
  hypo

SEQ ID NO: 187596 - DNA, 189 bp, Homo sapiens
  chr19:1310927-1311116
  hypo
gggcggagggggcggcgggcagttttcaattacggagcagctaatctcccagtgagggccgttctggggcccagtaaatctattatgaaaagcctctaaatgtatgtaaaaccggcctccgacaatccggggattaggccgccgggaggggaaaccgaggcgcaggccgcctggcggattagcgcagcg

SEQ ID NO: 187597 - DNA, 95 bp, Homo sapiens
  chr19:1311323-1311418
  hypo
cccacaaggtggactcggtgggtttgaaagatggggagctggggacccctggacccggcttaaggctccgtggcccggcccgcatctcctgccgc

SEQ ID NO: 187598 - DNA, 415 bp, Homo sapiens
  chr19:1312700-1313115
  hypo
ccgtgtcatcagcaacggccaaatgccgttcccagcactggatgggggtggagggcctgaggggtgtgggtgggggggagctccaggcgcccctgccccccgcccagccgtcagtcaggctggccgggcccccttcaagtcgtcacggcccagcagcggccacgggagggattattccggcctgtccagggtggactgaagtggaaccaaggctgacgagcggaacgcgcccccatggacccagcccgcccgcctttgtccgccgccagccccccacccgcctgccgtcacagaccccgcctcccgtgcctgagccccatttctctgggggccgggctgcctcgcgtggcccccgcctgactaaagccatgcagcttctcggccggctccatccgctggctgcctcagtttcccc

SEQ ID NO: 187599 - DNA, 51 bp, Homo sapiens
  chr19:1325875-1325926
  hypo
ggtggttcacaccagccgggcacggtggctcacacccgccgggcacagtgg

SEQ ID NO: 187600 - DNA, 31 bp, Homo sapiens; identical to SEQ ID NO: 95562
  chr19:1329362-1329393
  hypo

SEQ ID NO: 187601 - DNA, 601 bp, Homo sapiens
  chr19:1333756-1334357
  hypo
cccagatcagcagcgctttgcacgttgtgcctgttggcctcggtttccccggtaaaacttgtgatggttgcatgaagcccagatccatgaataaaacacgaggtctggagttagtgcttcctctcctacagcgaatgcataatcagcccacaactgcggcgacgaggcgtccgaggcggccgcaccccagcagcgatcggtgattcatggctcgatctgctaattgcctctcgggccggcttcgggctgatgcgtttgacaaggcgaggaggctgagacgtgcattaggcactcagccgcccccgccgcccatggagggcgcgactgctgctccctcttgggggtgatccgtcatttcatccacgggggagttggggacctggggggcaagagagaggctggatgcctgggccctgtttgtaaacagcgttgatttctgagctgagatgtggcgaccaggcccggagcagggctgtattcacagtcgtcgaggggtctgccggccgtggccctgctatggaaccttgggtggggctggggaacaggacctcctgcctcacctcagacagcccctcctgggccaggcaccgtggctcacacc

SEQ ID NO: 187602 - DNA, 106 bp, Homo sapiens
  chr19:1334647-1334753
  hypo
tcctgccaaggagaacgccagctgccggccgcagtcatttgtctgtcacttggatgcatgcagagcggggtctccggagggtggctggtgccggaacctgctgcca

SEQ ID NO: 187603 - DNA, 30 bp, Homo sapiens
  chr19:1339116-1339146
  hypo
agggcgtgggaagcacggggcagttgcggg

SEQ ID NO: 187604 - DNA, 271 bp, Homo sapiens
  chr19:1340765-1341036
  hypo
tgtctcaaaaacaaaaacaaggaaaacactccagcccccacaccagcacggggactgcagcgcccgcgagacttgggtcacggtgactcctggaggctttgcacgttaagccgccgcctgcccagggacactgtggtcaccttcccccgccggagccctgcgtacctctcctgtctgtgctttgagagaggagtttttttcccgttgcttctggaaccctgggttgtcctgcagaataggacaccctccttcattacgatagaggatgcag

SEQ ID NO: 187605 - DNA, 121 bp, Homo sapiens; identical to SEQ ID NO: 31697
  chr19:1357652-1357773
  hypo

SEQ ID NO: 187606 - DNA, 31 bp, Homo sapiens; identical to SEQ ID NO: 31698
  chr19:1359088-1359119
  hypo

SEQ ID NO: 187607 - DNA, 269 bp, Homo sapiens; identical to SEQ ID NO: 95566
  chr19:1360024-1360293
  hypo

SEQ ID NO: 187608 - DNA, 30 bp, Homo sapiens
  chr19:1362370-1362400
  hypo
gccggcagtcctaacggtgcgctcagaggc

SEQ ID NO: 187609 - DNA, 30 bp, Homo sapiens
  chr19:1368800-1368830
  hypo
ggaggtgtttgcaccgtcgatgcgttcaga

SEQ ID NO: 187610 - DNA, 731 bp, Homo sapiens
  chr19:1370777-1371508
  hypo
cgctcgcgggccgcccgggaccgggccaaccagaagctggtggagtacattgtgaaggccaagggcgcggagagccacctgcgggccatcctaaagagcaggaagccatctcgctggctgcagaccttcctgagctccagccagtacgtgacctgtgtggagacctacctggaggatgaggggcagctggacctggtggtgaagtacctgcagggcgtctaccaggaggtgggggccaaggtgctccagcgcaccaacggcgaccggatccggttcattctggacgtgcttctgcccgaggtgagccgcggaccggcgtgtcacgtgggcagggaggggcctgcgctgggattttgcaactccgcacgaggaggctgccacggtcctcgcccctgctccctggccgttcggcggccaacggagcgtggaggcctcctgtgtttacatcctgtcagtgctgggaaatgcgagtgcgtgcgcttgaccctgtgcggagacggagccgcttacttgacccctgtgcagagatggagctgcttagaagctgtcagcaccagggggtgcgaactccctccctactgcgggcgcacagatgcttcccagcctcggtgggtcagtcctgggaaacccactgcgagttggaaattcccaagtcagaatcgcatttagtacccagataaacccactgtaagttgaaaaactgtaagtggataatgcgcctcatactctga

SEQ ID NO: 187611 - DNA, 181 bp, Homo sapiens; identical to SEQ ID NO: 95568
  chr19:1373034-1373215
  hypo

SEQ ID NO: 187612 - DNA, 454 bp, Homo sapiens
  chr19:1386824-1387278
  hypo
caaaagcagtcacattctgaggtcctggggttagggcttcagatgcaggtcgggtggagggtcacagttcagccgtcaccagcaccaagcctgcctttctggattcttccttgtgagccaggattcctggcacctccaggtttcctcccgctgagtgccccgggcgtggcaaggccctgctctggccttagtcttcgcctcgggaaggctctcccaggagacttcgtgcaggcgcgttccctcctctgcgcttcctttgaggctggctcctctaggggtgcttttctgtgtagattgacgtgggcagcgccctccccgcttagcggactgcagattcctgcaggatggggcctgtgctcagctgcgtgggaaacgcccgagcagcagccagggcctggagcacccagcacacgcttgtcaggcacagctgaggccaggacgagcactgggtgcc

SEQ ID NO: 187613 - DNA, 359 bp, Homo sapiens; identical to SEQ ID NO: 95569
  chr19:1388330-1388689
  hypo

SEQ ID NO: 187614 - DNA, 30 bp, Homo sapiens; identical to SEQ ID NO: 95570
  chr19:1393363-1393393
  hypo

SEQ ID NO: 187615 - DNA, 332 bp, Homo sapiens
  chr19:1393937-1394269
  hypo
gactcttgcacctcacgtggtcccacgagggccatccccccgggcgttcaccttgacagtggtccacggtaggcaggcttggaggtggcgctcatgtgggacaggggacagagtcctgttcttggccaccctgtgctgcgtgcggcattagctcatgcgcagagagcccagccctgagtcccgagtctgggggtttgggcaagcgagaggcacatcctggtgcctctcaaaagtggaggaacaggctctgactttggattccgcttccctggaaagggcgttgatttgttcagcgttctgcacggttcaggtcaccccgggggcagtggaga

SEQ ID NO: 187616 - DNA, 144 bp, Homo sapiens; identical to SEQ ID NO: 130306
  chr19:1401652-1401796
  hypo

SEQ ID NO: 187617 - DNA, 181 bp, Homo sapiens
  chr19:1403845-1404026
  hypo
cactctcagtgaaataagccagtcgcaacaggacaaatcctatgtgagtccactcctaggaggtccctggagtcctccgatccacagagacagaacgtaggatggcggggggggggggtgccaggggctggggaggggacagggagtgagtatttcacggggcagagtttcagtttgggaa

SEQ ID NO: 187618 - DNA, 162 bp, Homo sapiens; identical to SEQ ID NO: 95573
  chr19:1416663-1416825
  hypo

SEQ ID NO: 187619 - DNA, 30 bp, Homo sapiens; identical to SEQ ID NO: 95574
  chr19:1419737-1419767
  hypo

SEQ ID NO: 187620 - DNA, 196 bp, Homo sapiens
  chr19:1423005-1423201
  hypo
tctgtgccccttttccgtggctgctgctgtctgtcccgcccgcccgcatggttttggttcatcagctgcttttggccggccacgtgagcagacctgcagcctgggtctgcccgccacgtccgtgccgcccccgcaccaccggcccaggtcagtcggggcagccccgagcgccaggtggcgccgcagcatgcccacc

SEQ ID NO: 187621 - DNA, 251 bp, Homo sapiens
  chr19:1423979-1424230
  hypo
ggagagacgctgcggcgctgcttagcgggtcctcccagagagtgtgtccccttcccttggcctttctgcatcttctgagacgggtctgtgtccccctccccgccacctcctccctcttcctctccactgactgaaggtcatggccatgtccctgtcagggaccccgcctgtgtctcgggcacacagtgtctgtgcgggtccctgcttggccctcccacgtctaccctcggcccgcccgctccagccgctgc

SEQ ID NO: 187622 - DNA, 328 bp, Homo sapiens; identical to SEQ ID NO: 95575
  chr19:1424659-1424987
  hypo

SEQ ID NO: 187623 - DNA, 414 bp, Homo sapiens
  chr19:1425395-1425809
  hypo
agatggcgcattccacgcgggcccccggcctgcagggttcactggcaatctccccacaggcgagagccagaatattcaagcacgggcctctgaccctcccctggggggcgctttgtctgccagtagcgatggaggccctcaccgttcccctgtctccgctgctgttttataagatgtgctccttgttccaaatctttgtgacacggagccccagcccggggtgtctggggcggaggcttgactcaggcctcagtcagcagagccgtcaccgggagtgcggacgtcaccgtctgtccactccgtgtgcagtcgagtggtggctcctggggagggaggcagctgccccaggggcccgcagcgccccacacacagcttagctgaaacccaaggtcgatccctcggcccgtccctaat

SEQ ID NO: 187624 - DNA, 30 bp, Homo sapiens
  chr19:1429246-1429276
  hypo
agagctgcagtgagcgtctgcacctcgcga

SEQ ID NO: 187625 - DNA, 152 bp, Homo sapiens
  chr19:1430407-1430559
  hypo
atgccaggtggtgggcggggtgatggggagtcttgtgttacacgtctggcctcagccacaggtggggtgccggctggtcagcaggtcacctgccaccaggcccttcacctgcagatgggctccatcgcctgtggcctcgctggttaggctaa

SEQ ID NO: 187626 - DNA, 216 bp, Homo sapiens; identical to SEQ ID NO: 95577
  chr19:1432574-1432790
  hypo

SEQ ID NO: 187627 - DNA, 30 bp, Homo sapiens; identical to SEQ ID NO: 95578
  chr19:1440278-1440308
  hypo

SEQ ID NO: 187628 - DNA, 30 bp, Homo sapiens; identical to SEQ ID NO: 130313
  chr19:1445773-1445803
  hypo

SEQ ID NO: 187629 - DNA, 786 bp, Homo sapiens; identical to SEQ ID NO: 130314
  chr19:1446333-1447119
  hypo

SEQ ID NO: 187630 - DNA, 210 bp, Homo sapiens; identical to SEQ ID NO: 55310
  chr19:1449907-1450117
  hypo

SEQ ID NO: 187631 - DNA, 254 bp, Homo sapiens; identical to SEQ ID NO: 130316
  chr19:1450129-1450383
  hypo

SEQ ID NO: 187632 - DNA, 328 bp, Homo sapiens; identical to SEQ ID NO: 95581
  chr19:1461032-1461360
  hypo

SEQ ID NO: 187633 - DNA, 27 bp, Homo sapiens
  chr19:1461839-1461866
  hypo
gattccgtctcaaaaaaaaaaaacaaa

SEQ ID NO: 187634 - DNA, 30 bp, Homo sapiens
  chr19:1476361-1476391
  hypo
ctgtgagcgccccccgtcccccgcacagcg

SEQ ID NO: 187635 - DNA, 30 bp, Homo sapiens; identical to SEQ ID NO: 95583
  chr19:1481711-1481741
  hypo

SEQ ID NO: 187636 - DNA, 1592 bp, Homo sapiens
  chr19:1481986-1483578
  hypo
tgctgctggtccagcgtggaggatgggggacaggaggtgcagtccctcggggagccgccgcggcaggtgtagcaggaggcatggcagctggagcagaccctcagcgcgggcgccgccgtgtgcccaggcccagcggtcaccagccttgtgtggttgaagaaccgcggggggcagtaggccaggcagagctgtcccaggatgtaggcggggccgtcacacgctgctcggggacacgcacgcaaaggcccgtcagcttgccacccgcagcctgttactcgccacccgcccgcctggggccacatgcacgctgcccacggtggccgccaccgcctcccagcagtgggccctgccccgccggcactcaccctggcacagcccctctgtgtcccgctgcacacacgcgctgctggtcacctgggggcctgtaggccgcgctgtcatgtcctcggccgtcccatagagcagcagcgtgtagcggtacaacgtccctggacaggggtcgcgggtgggcacaggaggaaaaggaggctctcggcagcctggtcctggtagtccccgggctccctccccttcagctcccacgcggggccctggactggttcacatctctcagggaattgcacacctactgtgcgcctgtcactggacaccgacatctcccgggtgactgcacacctactgtgcgcctgtcactgggcacctacatctcccgtgttaccgcacacctactgtgtgcctgtcattgcacaccatctcccgggtgactgcacgcctactgtgtgcatgttctcttggagaaggccactgggaaccccttttgcagtgcggtcaccaaggctagctccagagcccctggggggaggttggagagccaagccccgcccaccacagccccgccccgccctcacccgtgttgaaatagtagcccttgttctctaggcccagggtccacacgccctgtgggttctcatcccagaagtgggtggacatgaagacccagttgttgtagccttcagtgctgacgtccaagggtctgggacagaagggtgggtgggggtgggggtgtcaagagggatggctttgtgaagccggcagagccccatgaagtgtctgaccgcacgcgctggtggccgcgtgtcctctgggtgtgggtgagggtgtgactcggggtcccaccaactaggctgccgtgtgactcctatgggcctggcccctccccgtgaggacactccgggtagatggcagcgtttaccgacagggcatgaggccgccccctctcctctgcgggccgctcaccgtatggccacgagtgtggagcgcgtgcccatggggctggtgagcgagatctccaggtctccgcgccggctgtaggacagcgtcagctgcgcctgcacgtgctccagcgagcggatggagttgtggaggccggcgcaggccgatacgttttccctgatgtagatcagcggcaggatggggctgagggggtcgaggggtgaggaccctcctgcggcctgctggggggtgggtgggcggccagcaggcgaggtcggggctcagaggtcacggggtccagccctcgttttacagatggg

SEQ ID NO: 187637 - DNA, 30 bp, Homo sapiens; identical to SEQ ID NO: 95585
  chr19:1487004-1487034
  hypo

SEQ ID NO: 187638 - DNA, 30 bp, Homo sapiens; identical to SEQ ID NO: 95586
  chr19:1487321-1487351
  hypo

SEQ ID NO: 187639 - DNA, 30 bp, Homo sapiens; identical to SEQ ID NO: 95587
  chr19:1487590-1487620
  hypo

SEQ ID NO: 187640 - DNA, 610 bp, Homo sapiens; identical to SEQ ID NO: 130329
  chr19:1491115-1491725
  hypo

SEQ ID NO: 187641 - DNA, 625 bp, Homo sapiens
  chr19:1494953-1495578
  hypo
gttacaggtgtgagccaccgcgcccggctgcaaacacttcactgggcagctattccgcacccacccccactgcccagcgtcgagctcctgcctgcccttggggagctctcaaccccggtgggggacatggacacgttgaccagttacaggcacaaggctcagggcctagaggcacgatgggggatgtacaggcacatcaggggcagtggacatatcctggaggcggctcctgggaggaggtgacggttgcagtcttcgtcgactgaaaggcggcctgggtaccgtcgtgggggctcagcgggtccccagccctggcacaccaccgcctctctccggcaggagccgtcactctgctaagcctgtatctgctgttcggctacggagcgtctctgctgtgcaatctcatcggatttgtgtaccccgcatatgcctcgtgagtgcacggctggctgcccacgcggggggttctgggggctccctggcagcccctgaccctgctgcaccctccctgcagaatcaaagctatcgagagcccaagcaaggacgacgacactgtgtggctcacctactgggtggtgtacgccctgtttgggctggccgagttcttcagcgatctactcctgtc

SEQ ID NO: 187642 - DNA, 510 bp, Homo sapiens
  chr19:1496400-1496910
  hypo
aacgacctcagcgggcgagccctggacgcggcggccggaataaccaggaacggtgggtgctcgcaggcgcctggctgcctcaggccatctcccgggtctggacctgtctctctccaccttgcctccctttctgactttggccgccccctctcactgtccgcctctctctctcacgcttccgggaaccagtcttgcaggtcctggcccgtagccgggcaggcatcaccccggtggctgtggccgggccctccactcccctggaagctgaccgtacgtaaccgctgtggggagataggagctgtgtgtgtgtgtgtgtgcgcgcgcgcgcgcgtgtgtttgagcgtatgtttgctgtgtgcacatgtattattgtgtgtgcatgttttgtcatgtgcaagagggtgcgtgtgcatgggctcaagtgtatgtttggtgtgtgagtgagcaagggagtgagcatgttttctcacgtgtgcatatgtgtgtgtgtgcccacgtgtgcatgtgagt

SEQ ID NO: 187643 - DNA, 244 bp, Homo sapiens
  chr19:1506026-1506270
  hypo
cgccgggcagtcaggcgtatgcggctgtcctccgcagggctccagggccgggcgtagccggcgtggggcagcagcagctggtcctgtgtgccgtcggggctgacaagacgctggacagccatcaggtagtcccggtggggtgccagcatcgggcaggggcagtggcctggcgcccacacgtactcgcgtgcccgcagtggcgagcggttcttgtagacgagctggatgcgcacctcatagcggg

SEQ ID NO: 187644 - DNA, 49 bp, Homo sapiens; identical to SEQ ID NO: 95592
  chr19:1533725-1533774
  hypo

SEQ ID NO: 187645 - DNA, 184 bp, Homo sapiens; identical to SEQ ID NO: 130331
  chr19:1546216-1546400
  hypo

SEQ ID NO: 187646 - DNA, 88 bp, Homo sapiens
  chr19:1546765-1546853
  hypo
acagcctacccactgtgggctttggcaataaggcgctcaatcaattataataaacacctatggaattaattcccgtctgtgttcccca

SEQ ID NO: 187647 - DNA, 34 bp, Homo sapiens; identical to SEQ ID NO: 31710
  chr19:1555126-1555160
  hypo

SEQ ID NO: 187648 - DNA, 30 bp, Homo sapiens; identical to SEQ ID NO: 31711
  chr19:1555380-1555410
  hypo

SEQ ID NO: 187649 - DNA, 30 bp, Homo sapiens; identical to SEQ ID NO: 95596
  chr19:1556269-1556299
  hypo

SEQ ID NO: 187650 - DNA, 30 bp, Homo sapiens; identical to SEQ ID NO: 95597
  chr19:1556716-1556746
  hypo

SEQ ID NO: 187651 - DNA, 30 bp, Homo sapiens; identical to SEQ ID NO: 95598
  chr19:1558717-1558747
  hypo

SEQ ID NO: 187652 - DNA, 240 bp, Homo sapiens
  chr19:1565848-1566088
  hypo
gtctagaagctctcagcctgacgctgattcctgccagctccccatgtggccatagcctcgctcaaaggcccttgggtgccaggacaagcgcgttcacaaagaacacagccacagcctccaccacctggaggctcaggctcgtgcctttggtcacttggtccccaggcctcggcttggacgcctgtctccacaggctcccagacactccgcacagggcagctgtcccgttctaggccctgg

SEQ ID NO: 187653 - DNA, 235 bp, Homo sapiens; identical to SEQ ID NO: 130333
  chr19:1568332-1568567
  hypo

SEQ ID NO: 187654 - DNA, 1419 bp, Homo sapiens
  chr19:1577426-1578845
  hypo
ccgaggcaggggggccggctggcagtggagcattctggcagcgccgggcgaccaagtcccgactggcagcggctggagtttggttttcagaagcgaaggctggcgttggcacacagggaaggctgcccgatgacgtgcctcgactgtgttacatttactgaaggagagcggcctcctgggcatgccactcaggcacggtgaggctctgtggcaccaccagccgcatggcagggcagagagtggcgccgtcctgcatgccccccacagcagaccagagtcccgtcctcacgctgcacagtgggtgatgtgagtttcaaaactacgcctccagaccgagaaaccctcccagctgtcagcaagccgtggcgccgagctgccgggcacctgctggctgctctccagtctcaaggagctgggacagcgggcatggggaggagctggcctcgagcccaaaggtcgtagggagccaggcagggcccaggagcacccggcacttcccgaagccggactctgtagaggacgagcgtggagggtctttcgggtgggggcagccccagctgtgtgccccgaggccccgggaagtggggacgggccgaggagggagccaggagcacggccttcctcctgggtgtctccaaggctgggcttcgccgccgagcctggttcacgtggggccgaggaccgcgtctgcaggcggctccagcaggcagcacgggctctcggcagggcctctggaaaggacagggagggctggctttagcgactccacgggacggggacgcttgggctcttctagggagatgggaagctcttgggaggcacccgtcatcccaagcacatctgtgttcaccaggcagtccccactgccaggacccgactccagggagcccccgtggccccgcagcacctgccctagacgtgctccatctccgggtccgggtcgggctcctcctcctcctcctcctcgtcttcctcgtcgtcgtcctcagcgcaggccttgtccagcggcgcctccccgtcacgggccagctcctccacgtgcgccagcatgtcggccatcagcgcctcctccagccgcttccgcacctgctgcaccagctcttcctgcttcctggggacacatggaccttgcgttacaccaaggtgagcggccagcaggacatggacacaggatgaacgtggggacctcagctgggaggggaggcccgagggatccacaggcacccccccaggaccagccctggcccgtgccacccctcccttcacaatccacgcagagaatgaccggctgccgctggccatcgccagcgtccgccaccctcccagatggcccccctgccacctctactgggaccaagggaggggcctgacccttcagtccccagacttggccctgagcctccccggggctcagctgtg

SEQ ID NO: 187655 - DNA, 69 bp, Homo sapiens; identical to SEQ ID NO: 31713
  chr19:1579337-1579406
  hypo

SEQ ID NO: 187656 - DNA, 52 bp, Homo sapiens; identical to SEQ ID NO: 95603
  chr19:1579658-1579710
  hypo

SEQ ID NO: 187657 - DNA, 24 bp, Homo sapiens
  chr19:1582923-1582947
  hypo
cacatggggtggctcacgcctgta

SEQ ID NO: 187658 - DNA, 30 bp, Homo sapiens; identical to SEQ ID NO: 31715
  chr19:1584556-1584586
  hypo

SEQ ID NO: 187659 - DNA, 30 bp, Homo sapiens; identical to SEQ ID NO: 31716
  chr19:1584855-1584885
  hypo

SEQ ID NO: 187660 - DNA, 30 bp, Homo sapiens; identical to SEQ ID NO: 31717
  chr19:1585231-1585261
  hypo

SEQ ID NO: 187661 - DNA, 30 bp, Homo sapiens; identical to SEQ ID NO: 31718
  chr19:1585902-1585932
  hypo

SEQ ID NO: 187662 - DNA, 18 bp, Homo sapiens
  chr19:1594036-1594054
  hypo
tcttgctctgttgcccag

SEQ ID NO: 187663 - DNA, 166 bp, Homo sapiens
  chr19:1612193-1612359
  hypo
cggggagcctacctcgcacctgctgctccagccccaggatgacctgcacggcctgctgcaggatgagcagcttggtctgcgctttgtccgacttgaggtgcatctggcacatgcgccccagctcccggaaggcctcgttaatatcccgcacgcgcacccgctcccg

SEQ ID NO: 187664 - DNA, 171 bp, Homo sapiens; identical to SEQ ID NO: 31719
  chr19:1612623-1612794
  hypo

SEQ ID NO: 187665 - DNA, 263 bp, Homo sapiens; identical to SEQ ID NO: 95612
  chr19:1617229-1617492
  hypo

SEQ ID NO: 187666 - DNA, 30 bp, Homo sapiens; identical to SEQ ID NO: 31721
  chr19:1619263-1619293
  hypo

SEQ ID NO: 187667 - DNA, 30 bp, Homo sapiens; identical to SEQ ID NO: 95614
  chr19:1621840-1621870
  hypo

SEQ ID NO: 187668 - DNA, 30 bp, Homo sapiens
  chr19:1625401-1625431
  hypo
cgaccccccgtcaccgtccatccctcccac

SEQ ID NO: 187669 - DNA, 30 bp, Homo sapiens; identical to SEQ ID NO: 95615
  chr19:1632351-1632381
  hypo

SEQ ID NO: 187670 - DNA, 392 bp, Homo sapiens
  chr19:1638547-1638939
  hypo
aaaagtagcaatttattggtagcaaataccagcagggaagagaaatatacaggctcaattttcaccttctcacagaagggggcagatgcgatttcacttcggacgttgagagcgcgagaaacggcgtgtttaaacgtgttcttcacaacgcagaatactaaccgctattcaatcacggccttaaacgtgttattcaaaactagaaaagaaccactggcagagccgcaaagcggtacagagcttcagaaaacacacaccgggggaagcaatccggagttgggagcacacagatggaaaaacaaaataagacgatggaaggaaaagctgagaacgaagatggacgggtgcttaacgtctttaatctgaaaacacggtgccgaccaaagacagtt

SEQ ID NO: 187671 - DNA, 30 bp, Homo sapiens; identical to SEQ ID NO: 95616
  chr19:1646471-1646501
  hypo

SEQ ID NO: 187672 - DNA, 31 bp, Homo sapiens; identical to SEQ ID NO: 31722
  chr19:1648784-1648815
  hypo

SEQ ID NO: 187673 - DNA, 91 bp, Homo sapiens; identical to SEQ ID NO: 95618
  chr19:1665099-1665190
  hypo

SEQ ID NO: 187674 - DNA, 146 bp, Homo sapiens; identical to SEQ ID NO: 95619
  chr19:1673001-1673147
  hypo

SEQ ID NO: 187675 - DNA, 30 bp, Homo sapiens; identical to SEQ ID NO: 31723
  chr19:1698944-1698974
  hypo

SEQ ID NO: 187676 - DNA, 784 bp, Homo sapiens
  chr19:1729048-1729832
  hypo
gtgtgtgcgcctgtgcgtgttcgtgtgtgtttgtgtgtgtgcatgcgtgtgagagggtgcactcagcggctgtgcctttgtacacgtgtgaatgtgggtgtgagtgtgtaagtgctttgtgtgagcatgtggggggaaggacgcagaggcacgccagcgtctgactgtgtgtattgttaagagtgttgtggggtacacgtgtgtatgtgagctcgtgagggtgtgcaagggatacacgcgtgttgtgtgtatatgtgtatgtgcatgtgtgtgtgcaggtgtgtacatattagtatgtgcagatcagtgcatacctacgtgtgtgttcctgtgtgcagatgtgcggccatttgagggtggcagtgcgcctgtgtgagtaggtacctaggacagcgtgcctgtgcatttgtatgtgagtgtgtgtgctgtttttgcacgcatgcaccggtgtgagggtgtgtgtgtatcggtgcacatctatgagcatgtcagtgtgtgtgagtggcagaaggtacacgggtgtgtacgtgcgtgtgtatacctgttcgtgtacctggcagtgtgtgggcatgtgcgggtgtgagggtgtgtgtgccggtgcacaccagtgtctgcacctgcgaccaccccgaccccgtgcccagccccctgaccctctcctgctgttctcactgcggggaaacgggtccaaccccaccactgaccccagctcatctcaggcctcccgtccacagccacttcctcaggagccctcctggacccgccagcccgggtctgaccccgg

SEQ ID NO: 187677 - DNA, 1578 bp, Homo sapiens; identical to SEQ ID NO: 130342
  chr19:1748598-1750176
  hypo

SEQ ID NO: 187678 - DNA, 1381 bp, Homo sapiens; identical to SEQ ID NO: 130346
  chr19:1754224-1755605
  hypo

SEQ ID NO: 187679 - DNA, 30 bp, Homo sapiens; identical to SEQ ID NO: 130347
  chr19:1755988-1756018
  hypo

SEQ ID NO: 187680 - DNA, 49 bp, Homo sapiens; identical to SEQ ID NO: 31726
  chr19:1756823-1756872
  hypo

SEQ ID NO: 187681 - DNA, 30 bp, Homo sapiens
  chr19:1785031-1785061
  hypo
tggtccataaaggagcgccttccccaggac

SEQ ID NO: 187682 - DNA, 386 bp, Homo sapiens
  chr19:1785293-1785679
  hypo
gacctggacaggcagcggtggggtaaatccggggcctagcggggcttgcaccaggacaccagcccctggggtccaggaagggcacctggcaatgcccccaaagcaggggtccccaggggaggaggcctccataggccatgtccaaggccccggggaggtgaggaccttgcccacctccatggtgatggacagcaggcaagacagggccaccacgaccgcaaaggactggtggtcgctgaagctggcgggtcccgccgtgtcgcggctgatccacagtgtcatgaagaagttgaccagagaggtggtcacaccatgggcgatggcttggacgaagacccagtagttgaagagctcgtccttctgccccaccacgtacagctccggct

SEQ ID NO: 187683 - DNA, 30 bp, Homo sapiens; identical to SEQ ID NO: 95625
  chr19:1786217-1786247
  hypo

SEQ ID NO: 187684 - DNA, 101 bp, Homo sapiens; identical to SEQ ID NO: 31728
  chr19:1799798-1799899
  hypo

SEQ ID NO: 187685 - DNA, 570 bp, Homo sapiens; identical to SEQ ID NO: 95627
  chr19:1805819-1806389
  hypo

SEQ ID NO: 187686 - DNA, 637 bp, Homo sapiens
  chr19:1807803-1808440
  hypo
ggaccacccaggtaccgggaagtggctccacaggtcctgagaacatgctctgggctcctccttccccctcgcctctgaggtcagctgggagggcgggggccaggggagctgcgtggccgaggccgtttaggctggggaacagctatgcctcccgatgcccagccctgcccagcaggaaccagcggggcgtggagagggtgccgtcatcagacctggagggtgcatccatccacctttgtcattcaacatgtactgagcgcctcttgtgtgccaggccctgggcagggtagtagggactcagcgctgagggtcccagtctgtggggagtgggacgtgaacccacccatcacacagacaaacacatcgatgctgccaggtggctaggggggacttcctggaggaggcaacacgcctcacctgcaggatgatgatgatgaggaagaacaggttggacacgcggtggaactgctcgtacaggttcagcggcaggaacgagtagaagttgtacttggccgtgcggatgacattggtctggaacgagagccgcgggctgcctggcagaggggtgccatccaggccaggggatgggggtgcccgaggccagacctgcctcacttggcctcgcccagcatcctct

SEQ ID NO: 187687 - DNA, 142 bp, Homo sapiens; identical to SEQ ID NO: 95629
  chr19:1809733-1809875
  hypo

SEQ ID NO: 187688 - DNA, 155 bp, Homo sapiens; identical to SEQ ID NO: 95630
  chr19:1810561-1810716
  hypo

SEQ ID NO: 187689 - DNA, 65 bp, Homo sapiens
  chr19:1810964-1811029
  hypo
ctagaaggactctaccgccagccatgccagcctctggccatgccagcctccggccactgctcccc

SEQ ID NO: 187690 - DNA, 30 bp, Homo sapiens; identical to SEQ ID NO: 95632
  chr19:1815410-1815440
  hypo

SEQ ID NO: 187691 - DNA, 518 bp, Homo sapiens; identical to SEQ ID NO: 95633
  chr19:1815902-1816420
  hypo

SEQ ID NO: 187692 - DNA, 364 bp, Homo sapiens
  chr19:1818537-1818901
  hypo
ggcctgaagaggacacgaggtactcggtgccacagcggcagcaggtcctgcaggaagctgtgggtggggacccaggtggaagctgaggctcacgctggggcccgcatgcccggccttgcccacatcccgcacctgcccacctaggccgtcgcaggccagcgactcacagtccttgggcctcttctcctcagctgtgaagatgattgcgcccccgggccgctctgggtgcgggaaggggtagccgttctccttgagctggtcctgggtgagcaggtactccctgaggcggctgtacagggcagcccctgtggacaggcacagtggtcagcccctgcctgggatggcccacggggcggtagacacc

SEQ ID NO: 187693 - DNA, 30 bp, Homo sapiens; identical to SEQ ID NO: 31733
  chr19:1820149-1820179
  hypo

SEQ ID NO: 187694 - DNA, 176 bp, Homo sapiens; identical to SEQ ID NO: 95636
  chr19:1822371-1822547
  hypo

SEQ ID NO: 187695 - DNA, 802 bp, Homo sapiens
  chr19:1827066-1827868
  hypo
ggggaggccttgagccgcttgggcggcccctgcgcctccgggaagcccaggctggagtctgagtcggagtctgagtccgagctgaggctggggagggcagagggccacacgctcggcacccctggccctgcggcctcgtcctcactctcgtccccaaagaggtcggcgtggctcagggcccgcttcttcagcttgggggcgtcctgggaggcgccctcgtctagtgagcgggctttccgctccactagcttccccgacggggccttggtgctcttcctgtcgggcagctggagggggcggggtgggcctctgccggccgccggtcgggagtccccgcttgtggggctcggccgccgcgctggccggtcaggcctccctttccctgaggtggccacaggagtggccgaagatggcttcttcttggtcccttccggccgctctgccttgcgccgggggctgctggcctgcgggcccttcttgtccgcacggggcttctccacaggccgccctcggcccttgtccttggtcttgtccttcccctgggccccgtctttgcagctgggggcaggtggggccccggtttttttcttcttgggttttccctccttggggcagcccccatcctgtgaggactggacctgggctggggaggcgggcttggctgggggcggctggaggtcccccacgtcgcactgcacggccgtctccttggtctcccgcaggccgcccccctcggcctccaggccctctttggagggtggctgcccggtggccttgatctcagggtcggccctggctttgg

SEQ ID NO: 187696 - DNA, 30 bp, Homo sapiens; identical to SEQ ID NO: 95639
  chr19:1828373-1828403
  hypo

SEQ ID NO: 187697 - DNA, 170 bp, Homo sapiens; identical to SEQ ID NO: 130372
  chr19:1876314-1876484
  hypo

SEQ ID NO: 187698 - DNA, 156 bp, Homo sapiens; identical to SEQ ID NO: 130373
  chr19:1876538-1876694
  hypo

SEQ ID NO: 187699 - DNA, 30 bp, Homo sapiens; identical to SEQ ID NO: 130374
  chr19:1877065-1877095
  hypo

SEQ ID NO: 187700 - DNA, 30 bp, Homo sapiens; identical to SEQ ID NO: 95640
  chr19:1880121-1880151
  hypo

SEQ ID NO: 187701 - DNA, 58 bp, Homo sapiens; identical to SEQ ID NO: 31736
  chr19:1882111-1882169
  hypo

SEQ ID NO: 187702 - DNA, 17 bp, Homo sapiens
  chr19:1899115-1899132
  hypo
tccgtctcaaaacaaac

SEQ ID NO: 187703 - DNA, 206 bp, Homo sapiens
  chr19:1907660-1907866
  hypo
ctgcctggagctatgccggttcccagcccaggctggcggccgtgttctgctgggacctgggacctgggctgcctgccctcctgaggggtcccagtggtcggtcgcctgccttctgggtgggtgtggtagagggagggtcaggtggccccctgctgttggggggcagtcgctgtgggagtgagtcgtccccccgggccatagcaggt

SEQ ID NO: 187704 - DNA, 1602 bp, Homo sapiens; identical to SEQ ID NO: 95644
  chr19:1911824-1913426
  hypo

SEQ ID NO: 187705 - DNA, 1151 bp, Homo sapiens
  chr19:1913963-1915114
  hypo
caccactgctggccaggagcccgccaggcctgcagtgggggagtccgtgcctgggggtgggactgaggtgggctggagggtcccggatggggccagagccacagcgtggagtgaggaggtgggagccgcagaggcgtgcccagttgagtggtagaggcagcatttgggcctccttcatgctcaggtgctcagctccttcccctgaggggcaggaagtcagggaggagggagtgagaggtgggaggtggcaggcgggcggaggggaagatgtcctgtcccaagagccaggggtgccccaccccacggtgacatgttcctgaacgggttgtgagtggagggctcagttcctgggaactgcctcacctggactgtgggcgggaggcagctcctggccccgtgcccgccccctcgggcctgttcccctgccaggatctgggatggttcacaccccactggtctgtgatgcccagtgggcagcaggcatgcccctgctgggctggcccacctcccgatggcaggtccgcccccaggatcacggaagcagctagatccactcagtcgtgggtggatgtcaggccaggtggggctgctctggtgggtgagctcatggggttccctttcagaacggccagggtgccatgcggatgcgatggggtcttaggccctgcagcgttcaccttgtggcgcccaccccttgtgggctgaagccgggatttgggggacgcaggggcctaggacagcggggaaggggcatcctggctggggcggtgggtgggaggggctgcggccagccctgcccgttttgccagcatgggtggtgtgcactggagccgaggggagggggacctgtggggtaacacattgggtcgagtcaggcctgtggctcccgcttagcccactgctgtttccagagcacagggcacgatgaagggcttttcagccacggtgggtgggtggttagcgctctgcccagggcagctcagggttccctgactgtggttgtcttccttccaggcggctgcaggcttcagcctgcgctggttggtgaaacagagatgtcaggtgagtcctgcctgcctgggagcctccagcagcgtgggcgggagggagatgccagcagttcccacaggagccctcggtcctggccgttg

SEQ ID NO: 187706 - DNA, 30 bp, Homo sapiens; identical to SEQ ID NO: 95646
  chr19:1916916-1916946
  hypo

SEQ ID NO: 187707 - DNA, 30 bp, Homo sapiens
  chr19:1918118-1918148
  hypo
ttcgcagtttactgcgccaccctcggcgtc

SEQ ID NO: 187708 - DNA, 89 bp, Homo sapiens
  chr19:1918817-1918906
  hypo
cgttcctctctaggcgcgtctgggagaagccagggctgtggtaaccgtcgtgttttctgtccctccccagagccgacagctcctttaat

SEQ ID NO: 187709 - DNA, 30 bp, Homo sapiens; identical to SEQ ID NO: 95648
  chr19:1919152-1919182
  hypo

SEQ ID NO: 187710 - DNA, 93 bp, Homo sapiens
  chr19:1920121-1920214
  hypo
ttttaaataggctttttattttggaataatttgtaattctcagttgcagagagtgactgttctcgcccacgtccccgacgtgtctcccttgtc

SEQ ID NO: 187711 - DNA, 800 bp, Homo sapiens; identical to SEQ ID NO: 95650
  chr19:1920871-1921671
  hypo

SEQ ID NO: 187712 - DNA, 30 bp, Homo sapiens; identical to SEQ ID NO: 95651
  chr19:1954632-1954662
  hypo

SEQ ID NO: 187713 - DNA, 279 bp, Homo sapiens
  chr19:1955297-1955576
  hypo
ctgctgctgctgctgctgctgcgagggcctcaggcgcaggcggtgactctcggggccactcctgaggtgggggatgtgggctagcggccaccgtgggcggcaggtgtgcaagcagtgctcccgttttccactgggctgcccttcaccggctgtgggtcagcgccccccactgaggctcaggctgaggcgaggctccgcggggtgggcgtgtgccagggtgaggctccgcggggtgggcgtgtgcctgggcgaggctccgcgagtcgggggcagcgccca

SEQ ID NO: 187714 - DNA, 30 bp, Homo sapiens
  chr19:1958344-1958374
  hypo
tcagcagtgggggccgtggggttggtgcac

SEQ ID NO: 187715 - DNA, 749 bp, Homo sapiens
  chr19:1960884-1961633
  hypo
ctcaaaacaaaacaaaatgcaggcacggacgtttcagccccctcttcctgtggatgctgagagggtttccagaagaaggagaatgtccccgtgctggtggctcatccaggtgtgggccggtgtgcggcggggcgtgggcagaggagaggcttcgggctccggtttcctctcctgtggatgcgtcgcccccgcatggtggtcctctgcggaagtccccctgtccgtcccgttggcagccgcagtggaaagacggatggacgggctgtgacagggacagcccagtgtgaccccagccctggccgtcgcggttgtggcattctcgctgtcagggggctgttcccgtggctctcatggctgtggaggggcgtggagggggcggtccccatggccagaacctggccgtggcgggtggaggacttgaggccggctcagtggtcagcgctgctgcttgttcccctacacagaggcgttgggtggagctgcctcaggtatccctcctggctggggtgtgtgcgtcaccctgagtctccagcccatgctgaggagcctcgcaggcagggcccagcagcctatactccaggccattgctgtccgtttctccagaaggccctgctggtgggtggtcccaggagctgggcctcagtgggggatcccaggacagtggagcctgggaggggccccagtgttgaggcgtgaggtactgtctggaactagggggtgcccccaaagcggcacggcgcccagtccct

SEQ ID NO: 187716 - DNA, 30 bp, Homo sapiens
  chr19:1961974-1962004
  hypo
gcagtggagaaaactcgcatccaaaaataa

SEQ ID NO: 187717 - DNA, 903 bp, Homo sapiens
  chr19:1969651-1970554
  hypo
gcccgcccaccggccgcagtgatgttctagccacagaggagccaagacctcaggtttccagagacttgggatttgcacggcagcagagtcaccgtggagaggccagggtatcacaaacttatggattttgacaagaaaggagggaaaggggagacggaggagggccggagaatgtccaaggccggcgggggccggagcagccacggcatccggagctcggggaccagctcgggggtcctgatggtgggccccaacttccgcgtcggcaagaagatcggctgcggcaacttcggggagctccgcctaggtgaggccctgctcggtggtaggtggggtcgggaggctgctggcagggccgccccgagtcaccggagcctctggtggggccgcccggggtcactggagcctctggcggggccgccccatgtcactggcaggtgcgttgaatcatcagtccgtcgtggtgcgagtgccacttcccttcgaggaggttctgtggggagagtgggtttctggccctgtcaccttttcgggaaacagttctgttgggaggcaggtggcccagagcaggccaggccacgccgcaaggagcccgatgttaagttgtgaatgactttcatggcccatgtgcacgctgggcgaagccccggctttaacggcaggtgcctgcccggcactcagctcgtgggaggtcttggccagcccggagctggcgtcaggtggctggagtgactgttctgtggtgatgatactgctgtgtgccactcccagcttcaccatgtaaaaggccgcacctggcccacctggctccgtcccttctgctcacaccaacctctcccgggtcggggtctgattgcccgggcaggcgtgaggagcagggccgaggactgagcctctcattgg

SEQ ID NO: 187718 - DNA, 183 bp, Homo sapiens
  chr19:1970823-1971006
  hypo
caggatgggcaggtccgagaggccacggcagtggatcggcctcacgtgggcacccatggcaggcggtgcccatggcacccatggcaggcactcagcccgatgaggttgtcagatgagggaaacaggcccacgcagtggtcatgatgtggctgcatcttcaagagcggccgcccaggggcgcag

SEQ ID NO: 187719 - DNA, 30 bp, Homo sapiens; identical to SEQ ID NO: 95656
  chr19:1971266-1971296
  hypo

SEQ ID NO: 187720 - DNA, 30 bp, Homo sapiens
  chr19:1975502-1975532
  hypo
tcctccctgtgagccgcggcacagcaccag

SEQ ID NO: 187721 - DNA, 319 bp, Homo sapiens; identical to SEQ ID NO: 31745
  chr19:1977027-1977346
  hypo

SEQ ID NO: 187722 - DNA, 30 bp, Homo sapiens; identical to SEQ ID NO: 31746
  chr19:1977777-1977807
  hypo

SEQ ID NO: 187723 - DNA, 1129 bp, Homo sapiens; identical to SEQ ID NO: 55360
  chr19:1978008-1979137
  hypo

SEQ ID NO: 187724 - DNA, 284 bp, Homo sapiens
  chr19:1979735-1980019
  hypo
ctccctcacccacagccgacccccatcggcaccgtccacaccgacctgccctcccagcctcagctccgggacaaaacccagccgcacagcaaaaaccaggtgaggcccgggcgggaccgaccgccccagggaggggcatgggcggccagcgtgaccccctactgcccccaccaggcgttgaactccaccaacggggagctgaatgcggacgaccccacggccggccactccaacgccccgatcacagcgcctgcagaggtggaggtggccgatgaaaccaagta

SEQ ID NO: 187725 - DNA, 153 bp, Homo sapiens
  chr19:1980882-1981035
  hypo
ggtgggcgctgccaggcgggtgcttctcgacgcacttgctcccggaggctgcgccccggcgcctggaacccgaggtgggaggaccggttggtgtcaccctgctcggccctcagccctgccgcgtggggcgcgtgggcacggagcttcctgcct

SEQ ID NO: 187726 - DNA, 330 bp, Homo sapiens; identical to SEQ ID NO: 95661
  chr19:1985876-1986206
  hypo

SEQ ID NO: 187727 - DNA, 625 bp, Homo sapiens; identical to SEQ ID NO: 95662
  chr19:1992863-1993488
  hypo

SEQ ID NO: 187728 - DNA, 30 bp, Homo sapiens; identical to SEQ ID NO: 95663
  chr19:1997642-1997672
  hypo

SEQ ID NO: 187729 - DNA, 269 bp, Homo sapiens
  chr19:1999990-2000259
  hypo
gaaaaaagaaacagagtgggcggccgcatgaagcagggactggagcgatgcggccacaggccaaggacgtctggagtccccagaagctgggtggggcaggaggatcctcccttgagcctccagagggagcgccgccctcggacgccttgatccatggtcctgggctccgggactggcagaggatgaacccactgagtttgacccccccagtgtgtgggcattgggactgccgcccgcccgtctgccctcctggccgcgtcctcaagggc

SEQ ID NO: 187730 - DNA, 375 bp, Homo sapiens; identical to SEQ ID NO: 95665
  chr19:2000537-2000912
  hypo

SEQ ID NO: 187731 - DNA, 100 bp, Homo sapiens; identical to SEQ ID NO: 95666
  chr19:2005107-2005207
  hypo

SEQ ID NO: 187732 - DNA, 21 bp, Homo sapiens
  chr19:2009031-2009052
  hypo
ttccaagacagagtctcgctt

SEQ ID NO: 187733 - DNA, 37 bp, Homo sapiens; identical to SEQ ID NO: 95668
  chr19:2026536-2026573
  hypo

SEQ ID NO: 187734 - DNA, 91 bp, Homo sapiens; identical to SEQ ID NO: 95669
  chr19:2038524-2038615
  hypo

SEQ ID NO: 187735 - DNA, 31 bp, Homo sapiens; identical to SEQ ID NO: 95670
  chr19:2039356-2039387
  hypo

SEQ ID NO: 187736 - DNA, 176 bp, Homo sapiens
  chr19:2041005-2041181
  hypo
acccctcctgccgcccgtgcggctggtactcaccccctgaacccaggggtgctgcaggacttgggcggcactcagcctctgcttggcgtcacggaccagcagcttggagatgaggtctttggcagcgcaggagatgtgggcccagtccttgtcggggaactcgtacttgccctcct

SEQ ID NO: 187737 - DNA, 248 bp, Homo sapiens; identical to SEQ ID NO: 95671
  chr19:2046070-2046318
  hypo

SEQ ID NO: 187738 - DNA, 30 bp, Homo sapiens; identical to SEQ ID NO: 95672
  chr19:2076564-2076594
  hypo

SEQ ID NO: 187739 - DNA, 30 bp, Homo sapiens; identical to SEQ ID NO: 95673
  chr19:2078316-2078346
  hypo

SEQ ID NO: 187740 - DNA, 517 bp, Homo sapiens
  chr19:2079595-2080112
  hypo
agagggacccagccccgcccacaccttcgtctcagacgtgcagccccagaactgagaatgagtccctatcgtgtcagcattctccccatgttgctgtgcccaagtcactggtcactgggtcagggaccccacgattgggtgacccctcttcccttgatttcatccacaaagacccccttccaggtcgggtcacatggcgagatgccgggtgattccaggggcagctgtccaccccaaggcaccgtataaatgaggaagcctccaggagccggcccaagtctcatgcacgcctgagcggtgacttgtgagacacccacgggttgctctggggtggggacccggcgtcctcctactcccctgagaattctcaggggacagagacagagtccatcccgcacagggcggaggggcgacctggatcacacaccgcgcgtgtgccgggctcacgctcaccacgcagggcctgtcaccgccaacaccgttattgtcactgccaggacgccggcaccgtggcagg

SEQ ID NO: 187741 - DNA, 43 bp, Homo sapiens
  chr19:2080625-2080668
  hypo
ttggcctccaaagtgctgggattgcaagcgagcaccaccgcgc

SEQ ID NO: 187742 - DNA, 41 bp, Homo sapiens; identical to SEQ ID NO: 31757
  chr19:2088264-2088305
  hypo

SEQ ID NO: 187743 - DNA, 273 bp, Homo sapiens
  chr19:2097984-2098257
  hypo
gtgccggtggcagctcggggccctggaggctgaggggagccctggcggctcttgtacgtgtttcaggcatcttccagtacgagaccatctcctgcaacaactgcacagactcgcacgtcgcctgctttggctataactgcgagtagggctcaggcatcacacccacccgtgccagggccctactgtccctggggtcccaggctctccttggagggggctccccgccttccacctggctgtcatcgggtagggcggggccgtgggttcaggggc

SEQ ID NO: 187744 - DNA, 30 bp, Homo sapiens; identical to SEQ ID NO: 31758
  chr19:2099514-2099544
  hypo

SEQ ID NO: 187745 - DNA, 31 bp, Homo sapiens; identical to SEQ ID NO: 31759
  chr19:2111290-2111321
  hypo

SEQ ID NO: 187746 - DNA, 30 bp, Homo sapiens; identical to SEQ ID NO: 95677
  chr19:2111699-2111729
  hypo

SEQ ID NO: 187747 - DNA, 108 bp, Homo sapiens
  chr19:2113980-2114088
  hypo
cgccggggcacagggcgaggcggctggcactcgctgcctgactcagactcacagccatttcccctgagctcaccgctgtctcctgggagttcacggcaagggagggga

SEQ ID NO: 187748 - DNA, 115 bp, Homo sapiens
  chr19:2115181-2115296
  hypo
agacatcctaggaccgggacctccagcgaggctgacctcaggcatctcctctgtgacgatgtccacctgctgggcaggggcgatgtcctcgtcgctctccgtgggcagcgagctg

SEQ ID NO: 187749 - DNA, 30 bp, Homo sapiens; identical to SEQ ID NO: 95679
  chr19:2115596-2115626
  hypo

SEQ ID NO: 187750 - DNA, 265 bp, Homo sapiens; identical to SEQ ID NO: 95680
  chr19:2116557-2116822
  hypo

SEQ ID NO: 187751 - DNA, 50 bp, Homo sapiens; identical to SEQ ID NO: 31760
  chr19:2120003-2120053
  hypo

SEQ ID NO: 187752 - DNA, 48 bp, Homo sapiens; identical to SEQ ID NO: 95682
  chr19:2122385-2122433
  hypo

SEQ ID NO: 187753 - DNA, 30 bp, Homo sapiens; identical to SEQ ID NO: 95683
  chr19:2123910-2123940
  hypo

SEQ ID NO: 187754 - DNA, 32 bp, Homo sapiens; identical to SEQ ID NO: 95684
  chr19:2136919-2136951
  hypo

SEQ ID NO: 187755 - DNA, 334 bp, Homo sapiens; identical to SEQ ID NO: 95685
  chr19:2140168-2140502
  hypo

SEQ ID NO: 187756 - DNA, 201 bp, Homo sapiens
  chr19:2148549-2148750
  hypo
aactagacaacctcagcgctctggcgcttccagaaaaccgcgtgtcactgcagcatcctccgcatcatccagcaaggagggaggtgactgtcatccccatttacaagggaggagacagagcagggggctctagatgggccgccccatgaagtcagccagtcagcccaagcacctggactcggatctcccaaacctcatgcg

SEQ ID NO: 187757 - DNA, 29 bp, Homo sapiens
  chr19:2154921-2154950
  hypo
cattcccagcacttccggaggctgaggtg

SEQ ID NO: 187758 - DNA, 32 bp, Homo sapiens
  chr19:2160535-2160567
  hypo
aaaaaaaaaaagtgggcggagatacaggttgc

SEQ ID NO: 187759 - DNA, 756 bp, Homo sapiens; identical to SEQ ID NO: 130387
  chr19:2164917-2165673
  hypo

SEQ ID NO: 187760 - DNA, 444 bp, Homo sapiens; identical to SEQ ID NO: 55368
  chr19:2168902-2169346
  hypo

SEQ ID NO: 187761 - DNA, 316 bp, Homo sapiens
  chr19:2176354-2176670
  hypo
aatgaggcacaaggacgaaacaggcgtggggcagagggcacggctcgcgggagttgcagagcgagttcaccctgctactgcttctgcggggcactcatttttagaagtacacttacgtggcccccaaaataatgtcacgctgccaaggagagcaggcaagggcaggtgacaccgctgtcaatcagagcatttccagccctcacacctgtgagtcatctggctcccaggaacattctctgttccagtaaggcctgcgcctgtgagaagcgcttggctgaatcctaggaagggggacttgggccgacagccccctcca

SEQ ID NO: 187762 - DNA, 31 bp, Homo sapiens; identical to SEQ ID NO: 95691
  chr19:2177162-2177193
  hypo

SEQ ID NO: 187763 - DNA, 406 bp, Homo sapiens
  chr19:2182516-2182922
  hypo
ctgtctcaagaaacaaaacccaaacaagaaagagtgctccagggctgtggcttcccggggctgtgactgtgcaggttctgccagtgctgcccagacgtggtctctctgggttaggatctcggtgcagcaggggtggaagcccctctctgaccaggcgcttgctagtgtgtctggaggtgctcagcagcaggggagctgcacctgctccccatgggaaggggcctgcacagacttctggggtcagaggagaccccaggcccccggatctcaggcagtggcggtgagagtgcctctctggctgcatgctcgccttctgcagggctcggagctgactgtcttgtttgaaccttgtgtgttttctggggagcgcatctggagtctggagcttaagcgttgtagggagcag

SEQ ID NO: 187764 - DNA, 31 bp, Homo sapiens; identical to SEQ ID NO: 95693
  chr19:2188503-2188534
  hypo

SEQ ID NO: 187765 - DNA, 30 bp, Homo sapiens; identical to SEQ ID NO: 31768
  chr19:2191139-2191169
  hypo

SEQ ID NO: 187766 - DNA, 254 bp, Homo sapiens; identical to SEQ ID NO: 95695
  chr19:2191532-2191786
  hypo

SEQ ID NO: 187767 - DNA, 30 bp, Homo sapiens
  chr19:2193622-2193652
  hypo
ctagcacggcctcccgggtggcatctgagc

SEQ ID NO: 187768 - DNA, 31 bp, Homo sapiens; identical to SEQ ID NO: 31769
  chr19:2198383-2198414
  hypo

SEQ ID NO: 187769 - DNA, 30 bp, Homo sapiens; identical to SEQ ID NO: 31770
  chr19:2200489-2200519
  hypo

SEQ ID NO: 187770 - DNA, 118 bp, Homo sapiens
  chr19:2204157-2204275
  hypo
ctgtgtgtctgttagcgtgtctctgtgtgcgtgcctgtgcgtgcctgtgtctgcatgtctgtgcctgtgtgcatgcctgtgtgtgtgcgtgcccgtgtgcctccgtgtctatgtatgt

SEQ ID NO: 187771 - DNA, 30 bp, Homo sapiens
  chr19:2204890-2204920
  hypo
cctgggctggtgtggcgtccaggggaggag

SEQ ID NO: 187772 - DNA, 30 bp, Homo sapiens
  chr19:2210473-2210503
  hypo
gagggcaaggtggccggccccgccgacgcc

SEQ ID NO: 187773 - DNA, 30 bp, Homo sapiens; identical to SEQ ID NO: 95699
  chr19:2213358-2213388
  hypo

SEQ ID NO: 187774 - DNA, 555 bp, Homo sapiens; identical to SEQ ID NO: 95700
  chr19:2213810-2214365
  hypo

SEQ ID NO: 187775 - DNA, 30 bp, Homo sapiens
  chr19:2215333-2215363
  hypo
gaggagggtgtgcagcgggaaggtgctctc

SEQ ID NO: 187776 - DNA, 140 bp, Homo sapiens; identical to SEQ ID NO: 31772
  chr19:2215592-2215732
  hypo

SEQ ID NO: 187777 - DNA, 577 bp, Homo sapiens
  chr19:2216068-2216645
  hypo
cagcaaaaaccatcctcggccctccacatgactttatttgacgcccccagcttcccgaccccgcctctatgtggtcggcagctttggtttttccatcccacacaagcagcgggggtcctggccacccctccgggtgtccatctgtggcagtcttggttccctggagtggtcccccggtggggcgggcctgacaccatctctcctcctgcagatcagcattgtggagctagagaagagccagcggcagcaggagctcctgcagctcaagtcctgtgtgccgcctgacgacgccctgtccctgcacctgcgtgggaagggcgccctgggccgcgagctggagcctgacgccagccggctgcacctggagctggactgcaccaagttctcgctgcctcacttgagcagcatgagcccggagctctccatgaacggccaggctgctggctatgagctctgcggtgtgctgagccggccttcgtcgaagcagaacacgccccagtacctggcctcacccctggaccaggaggtggtgccctgtacccctagccacgtcggccggccgcgcctggagaagctg

SEQ ID NO: 187778 - DNA, 30 bp, Homo sapiens
  chr19:2216903-2216933
  hypo
ctgagtgccagcccacggccctcgagagtg

SEQ ID NO: 187779 - DNA, 30 bp, Homo sapiens
  chr19:2219405-2219435
  hypo
cagcccccgggcccccgaacacgctcatgt

SEQ ID NO: 187780 - DNA, 284 bp, Homo sapiens
  chr19:2219730-2220014
  hypo
cctcctcaccccacccgactgctggcatttgtgctgcttggagaacacagccgcttcccggtgagggcgggctgtgggttgcttgggttgtgcccagtaccccctccccacagctggaccccgggacccccgcctcctgacctccctgcctcaggcccgctgcccattcacacgcaggcaccgcgcactctcgctgcgccactcgcctggggccccgctcaagttcccccgctgccctcttcccacgcggtactggacggtgaccccggcggcctcccccagcc

SEQ ID NO: 187781 - DNA, 45 bp, Homo sapiens; identical to SEQ ID NO: 95704
  chr19:2222842-2222887
  hypo

SEQ ID NO: 187782 - DNA, 145 bp, Homo sapiens; identical to SEQ ID NO: 95705
  chr19:2224699-2224844
  hypo

SEQ ID NO: 187783 - DNA, 30 bp, Homo sapiens
  chr19:2225267-2225297
  hypo
gggccgagtgcttctcgttcaccacctccg

SEQ ID NO: 187784 - DNA, 30 bp, Homo sapiens; identical to SEQ ID NO: 95706
  chr19:2226536-2226566
  hypo

SEQ ID NO: 187785 - DNA, 30 bp, Homo sapiens; identical to SEQ ID NO: 95707
  chr19:2226866-2226896
  hypo

SEQ ID NO: 187786 - DNA, 193 bp, Homo sapiens; identical to SEQ ID NO: 95708
  chr19:2229559-2229752
  hypo

SEQ ID NO: 187787 - DNA, 133 bp, Homo sapiens; identical to SEQ ID NO: 95709
  chr19:2232596-2232729
  hypo

SEQ ID NO: 187788 - DNA, 1426 bp, Homo sapiens
  chr19:2243434-2244860
  hypo
ccccgggggcaagaccgggagcgggggcgtggcctcctcctccgagagcaaccgtgaccgcagggagcgcctccggcagctggccctggagaccatcgacatcaacaaggtgggccagccaccgtgcagctgcctgtggtgggtgctgggctttccagggcagccctggagagggtgccagaggctcttcttgggcctccgcccaggctgggcgatgcagccccgtgtccagacgctcccctgttgcccccgagcagccacagctcccatctgtccaccccagagagcagaccctctgtggctctgagtcccatgtggacatgttttgttctgtccacagccttctgttttgcattatttaattttctgggagtggggagagctgatgtcagtccagccagatgtggtgaagggcagcctttgattttagcttgtgcagaggcaggggtgagccgagtcccctcagcaccgtggacatcggggctggagcactctttgtgtaccctgacatgccccacgggcctggcctatggcaagggctctgttaccgtccccgtcttccagatgaggtcatgggtagagggggtgccacagccgcagatggtggagttagactttgaactccagcgtctgagacgagatgtgtgcgcccggctgccccagcttagggcctgcagatgggcgggtctttgggtcttcagtgtagcccatttgcttttcttgtgcctgtgtctgccttgtgcctactgctggcgtggtggcgtgggcagtggacggctccctgcctcgggagtgaccggcggtgctgtcctggctgtgcctccctctgactcagaaccaccaggaaggtggtgtcgggggctccctgggaacccccactgctcgaagcctggcccacagccccaggtggtgacacccgtgctcacgaaggcctcccgctggatcccccgttttcagaaatgcttgaccactgtcagcggtagccatgcctctacagaaggggggttctgcctccatgcctctacagaaaggggatcccgcctctgagggccttgacggcagcaggccgcgatcttctgtctaacgggcccctgttcttcccctccaggacccgtacttcatgaagaaccacctgggctcctatgaatgcaaactctgcctgacacttcacaacaatgaggtgcggcctctgcctggctccgggcggctcgcggcgggctgagtggctgacgtcagggggacctgcctgtgtctgtccgcccggcctcgagtcatgcgtgtttcctttccactccaggggagctacctggcacatacgcaggggaagaagcaccagaccaacctgtgagtacctcatgtccctttgatgcctggtgctccagcagccgttggctcaagtctctgtgagcctcgcgggccactgctc

SEQ ID NO: 187789 - DNA, 30 bp, Homo sapiens
  chr19:2246886-2246916
  hypo
taccctgagatcgccgagggcatcatgcca

SEQ ID NO: 187790 - DNA, 298 bp, Homo sapiens; identical to SEQ ID NO: 95711
  chr19:2247478-2247776
  hypo

SEQ ID NO: 187791 - DNA, 30 bp, Homo sapiens; identical to SEQ ID NO: 31778
  chr19:2248617-2248647
  hypo

SEQ ID NO: 187792 - DNA, 269 bp, Homo sapiens; identical to SEQ ID NO: 95713
  chr19:2255404-2255673
  hypo

SEQ ID NO: 187793 - DNA, 31 bp, Homo sapiens; identical to SEQ ID NO: 95714
  chr19:2266363-2266394
  hypo

SEQ ID NO: 187794 - DNA, 273 bp, Homo sapiens; identical to SEQ ID NO: 130400
  chr19:2273763-2274036
  hypo

SEQ ID NO: 187795 - DNA, 896 bp, Homo sapiens
  chr19:2275594-2276490
  hypo
ttggctatcatggagacgctgacctcagccccagccctgcctcctgggcaggcctggaccaggtgtgttcgccctgggttggggtcagtcccacagcagcgccagggcctggcccatcgaggactcggtggcctcggccaggtattcgcaacacagccagtcctcgaggctgggagcttccccacctgcggcccgctctgctaggcgcaggaccagcagcccgcggcgcacccgcagccagggcccgagcgctcggagccagggaccaagcggtgctccgcggccgcgcagctcaggcccgggcccccagagcagcgcctgcagcgcgccccgcgtccgggacgccgagggccgcaagcgggtcagctgtgctgccaggagctccaggcccgcggccaaaggcgtggtcgagggcgcagcaaggctgagcagcgctcggaggaggctgcccagctgcggcgcgtgggggcccggggatcccgggggtccagggggctgcagacagacgcggccaaagtcagtgaggagcaggcgtgggggccccgtcgtcgcacagccccgaggtgccaccagcagcaagttctccggccgcaactcgactagggccgcgccccacgcctccaggaacttcagggccgcgctcagctgcagcagcagcagggccacagcccacacgaactcctccggcggctgcgtgcaggcctccgccagccactgcgccaccgtgcgctctggaacctcggctgccagcgccactgcgcctctccagggcgccccgggcagtgtgccttcaggcaccaggccacacagcccctgcagattgaagtgtggagacagggaggcctgcagctccaggccccacgggtggggcacgtccgccccgggcttgggcacct

SEQ ID NO: 187796 - DNA, 206 bp, Homo sapiens
  chr19:2278465-2278671
  hypo
tttctttacagcagtgtgagaactgactcacagaaaggccaaatgaaacaagccctgggttatgtctaagatggggcactggggacacctcagagagggtggggctgtggggctcaccttggcgaccaggatgtgccaggcgtcctcgtgcgcgcgcaccacgcggtaatacagggcgtccccgctctctgcgcagggtgagctgt

SEQ ID NO: 187797 - DNA, 30 bp, Homo sapiens; identical to SEQ ID NO: 95717
  chr19:2286775-2286805
  hypo

SEQ ID NO: 187798 - DNA, 509 bp, Homo sapiens; identical to SEQ ID NO: 11919
  chr19:2289762-2290271
  hypo

SEQ ID NO: 187799 - DNA, 237 bp, Homo sapiens; identical to SEQ ID NO: 11920
  chr19:2290630-2290867
  hypo

SEQ ID NO: 187800 - DNA, 158 bp, Homo sapiens; identical to SEQ ID NO: 95720
  chr19:2321611-2321769
  hypo

SEQ ID NO: 187801 - DNA, 277 bp, Homo sapiens; identical to SEQ ID NO: 130406
  chr19:2328965-2329242
  hypo

SEQ ID NO: 187802 - DNA, 30 bp, Homo sapiens; identical to SEQ ID NO: 95722
  chr19:2329778-2329808
  hypo

SEQ ID NO: 187803 - DNA, 25 bp, Homo sapiens
  chr19:2330122-2330147
  hypo
tttgagacggagtctcgctctgtcg

SEQ ID NO: 187804 - DNA, 84 bp, Homo sapiens
  chr19:2330386-2330470
  hypo
gacaggcgtgagccaccgtgcccggccccgaggcaggtgttctgaatgatgagtaggagtttgccgggtcggcaggaggggaag

SEQ ID NO: 187805 - DNA, 345 bp, Homo sapiens
  chr19:2331160-2331505
  hypo
ggccctggctggacccggcccggctcctggaactcctcagtcttcccagaagggaggctctccccgcctggactcactggcctgtttcaaaggcccttgatgtggatgctttcacagtcacttggaagcggggtttctaagcctagtagtttctgaacctgtgtgcggttgcaaagcgtttgtgctgcaattgtgaaggatttggaggtcgaggcttgggctttgagcctgtccttgtagcctgagctttttctgctcctccaaatttcggtgggcctgtctagaactcagggccctcttagagctgtggcctttggaagaattgttccccgttcctttaactca

SEQ ID NO: 187806 - DNA, 176 bp, Homo sapiens
  chr19:2334600-2334776
  hypo
gtggcctgtgagtacggcatggtgcacgtggtctcccaggccgggggccccgaaggcaaagactactgcatcctctacaacccgcagtgggcccatcttccgcacgacctcagcaaggcagtgagtacccgctggccgggcgccgctgcggaggagaatgcgggggccccggggct

SEQ ID NO: 187807 - DNA, 30 bp, Homo sapiens; identical to SEQ ID NO: 95727
  chr19:2337303-2337333
  hypo

SEQ ID NO: 187808 - DNA, 259 bp, Homo sapiens; identical to SEQ ID NO: 31787
  chr19:2339494-2339753
  hypo

SEQ ID NO: 187809 - DNA, 30 bp, Homo sapiens
  chr19:2349964-2349994
  hypo
tctacacacactcacgcgctctcatttgct

SEQ ID NO: 187810 - DNA, 30 bp, Homo sapiens; identical to SEQ ID NO: 95729
  chr19:2351751-2351781
  hypo

SEQ ID NO: 187811 - DNA, 30 bp, Homo sapiens; identical to SEQ ID NO: 95730
  chr19:2354275-2354305
  hypo

SEQ ID NO: 187812 - DNA, 30 bp, Homo sapiens
  chr19:2354544-2354574
  hypo
tcacgggtctgttccggacagagggtggca

SEQ ID NO: 187813 - DNA, 492 bp, Homo sapiens
  chr19:2358666-2359158
  hypo
gggcgactggggaaacgtggacccaggagctggatcctccaggactgctctccctccagcaccaggcgtggctccccgggacttgcggcacttctcaaaagcaaatcaccaacaaagacgctctgccaaaggtaataaaatggggctggtctctaaaggcagttccaaaaaaaatttccgcaaagtctcttgagataagagaggagacagtggttctaacgaagtgcaccgtctccttcgacggcacggaggaacgtgaacaacctggtgacctaagcaggaggggcggccagcgtggcagcgggtggcgcgtcaaaactgaggccacccagtctgaccatgagggagaaaagcaccagacaaacccacttgaggcgtgtcctgcaaaacacctgacctgccttccccaggagcgggcagggtgtcagaaataggaatgtctgggaaactgcgacagcccagagagatccgaggaggcgtgacgcctaaatg

SEQ ID NO: 187814 - DNA, 111 bp, Homo sapiens
  chr19:2360641-2360752
  hypo
gtgtggacgcaggtgcggcgtgtagatgcggcaggggttgtgtggacgcaggtgtggtgtgtagatgcggcgggggttatgtggacgcaggtgtggcgtgtggatgcggcc

SEQ ID NO: 187815 - DNA, 177 bp, Homo sapiens; identical to SEQ ID NO: 95732
  chr19:2363008-2363185
  hypo

SEQ ID NO: 187816 - DNA, 21 bp, Homo sapiens
  chr19:2366566-2366587
  hypo
ggccaggggctgggtgcggtg

SEQ ID NO: 187817 - DNA, 30 bp, Homo sapiens
  chr19:2368542-2368572
  hypo
tgggatgtcacctgacgcgggtcttagctg

SEQ ID NO: 187818 - DNA, 50 bp, Homo sapiens
  chr19:2376998-2377048
  hypo
gaaactggagtggccacgggtgggcggctccctcacgctggcttctcctg

SEQ ID NO: 187819 - DNA, 30 bp, Homo sapiens
  chr19:2389755-2389785
  hypo
cagctcgctgtctgcgtgtctctgagccat

SEQ ID NO: 187820 - DNA, 86 bp, Homo sapiens
  chr19:2399105-2399191
  hypo
attgcagcgagggatccgggcaaggctgcgggagcacggcatctccctggctgcctatggcacaattgtgtcggctgagctcacag

SEQ ID NO: 187821 - DNA, 190 bp, Homo sapiens; identical to SEQ ID NO: 95735
  chr19:2408349-2408539
  hypo

SEQ ID NO: 187822 - DNA, 30 bp, Homo sapiens
  chr19:2413331-2413361
  hypo
atatatggaggcacccgcgtggcagccata

SEQ ID NO: 187823 - DNA, 330 bp, Homo sapiens
  chr19:2413708-2414038
  hypo
aggacccctggtctgcgaggagccctctggccggttctttctggctggcatcgtgagctggggaatcgggtgtgcggaagcccggcgtccaggggtctatgcccgagtcaccaggctacgtgactggatcctggaggccaccaccaaagccagcatgcctctggcccccaccatggctcctgcccctgccgcccccagcacagcctggcccaccagtcctgagagccctgtggtcagcacccccaccaaatcgatgcaggccctcagtaccgtgcctcttgactgggtcaccgttcctaagctacaaggtattttcggggcagaaaggta

SEQ ID NO: 187824 - DNA, 30 bp, Homo sapiens; identical to SEQ ID NO: 95736
  chr19:2433853-2433883
  hypo

SEQ ID NO: 187825 - DNA, 93 bp, Homo sapiens
  chr19:2434912-2435005
  hypo
tgtggggagacgggcgggtgagtgcgggcgcggggcggggcggggttcccaccggccgcccccgcccacccgcctgccggccacaccttggcc

SEQ ID NO: 187826 - DNA, 30 bp, Homo sapiens; identical to SEQ ID NO: 95738
  chr19:2437152-2437182
  hypo

SEQ ID NO: 187827 - DNA, 174 bp, Homo sapiens
  chr19:2441908-2442082
  hypo
ggagatcggggaatccgggaagctcctcagcaactcggtctaaaccacagggttccgcaggactgcagggcacacccagaaggcagggtgcgggctcccagggctcagacccgtttcctaagcgccaggtgctgagttagaatcttcagctgggtgcccggggttttgtggcag

SEQ ID NO: 187828 - DNA, 197 bp, Homo sapiens
  chr19:2449201-2449398
  hypo
gtgtttaaatgctcacatacttaccattgtgtaaccggtgcccacagcattccacagaggagcgggcggtgtgggtctgtggcctaggaggccacgcccaagcctgggtgtgtggtggcttccaccatccgggagtgtgggagtgcactctaccatgcccacacaaggggcacgtctcctaacgacacgctttccac

SEQ ID NO: 187829 - DNA, 711 bp, Homo sapiens; identical to SEQ ID NO: 130416
  chr19:2488410-2489121
  hypo

SEQ ID NO: 187830 - DNA, 29 bp, Homo sapiens
  chr19:2507679-2507708
  hypo
cagagtctcactttgtcgcccagtctgga

SEQ ID NO: 187831 - DNA, 29 bp, Homo sapiens
  chr19:2507947-2507976
  hypo
gcccggccgcatgtgggtttttcaatggc

SEQ ID NO: 187832 - DNA, 41 bp, Homo sapiens
  chr19:2509905-2509946
  hypo
agctgtcacgagccactgcgcccagccgccaaaacactttc

SEQ ID NO: 187833 - DNA, 242 bp, Homo sapiens; identical to SEQ ID NO: 95743
  chr19:2511248-2511490
  hypo

SEQ ID NO: 187834 - DNA, 39 bp, Homo sapiens; identical to SEQ ID NO: 95744
  chr19:2513206-2513245
  hypo

SEQ ID NO: 187835 - DNA, 639 bp, Homo sapiens
  chr19:2513267-2513906
  hypo
gcacgggttcttagacgcctgtctccactggggccggagggacaggactaggctagttttattctactacttgcttctaggccagccccgtggagggggtcggggcggccaggcctcctgcgatcagggctgcgtggggtccatctcaggtgtggccgcaggtgatgccggcaggccctggaagatgtggctgcacctgctcccgtccgtgccgcagaggaggacgcagtcatctttcagaagcctccccccgaccccatgacatcttcgatttccacttgccgctgggaggagtggcccatcctgcgtctaaggcatctcccggcctcagacagccgtcctgggttgcacgggggtggaaaagcaaaaagatcgggttcgagcgacagggtaacgttttgagcggacgttttgatctccgggacaacgtctcacctcccagagtccttcagagtcactccaagatcatggaacaattttgtacacacagcagcacagggtagccccacccgccctgccgcggctccccagcctgcattttctgtttgaaaaacgtctatggtggatgccagagggtaggacaacctggaagagccaaggatggtcaaagcctctcccagccacgcggatgcctcatgc

SEQ ID NO: 187836 - DNA, 30 bp, Homo sapiens
  chr19:2517953-2517983
  hypo
tgagcccgccggctgcggcctgtgatgact

SEQ ID NO: 187837 - DNA, 150 bp, Homo sapiens
  chr19:2518479-2518629
  hypo
cctactggttggatcccggccagcagcagcgtgatggggtctgggagggctcagagctgcgctggagggagactcaccggccgatcagaaccacctgtgccacctggccagcagggacgactctgtccgcctccccgctgggagcaaagc

SEQ ID NO: 187838 - DNA, 30 bp, Homo sapiens
  chr19:2524236-2524266
  hypo
cttttctgttttgggcgaaattccctgcga

SEQ ID NO: 187839 - DNA, 315 bp, Homo sapiens; identical to SEQ ID NO: 95747
  chr19:2524627-2524942
  hypo

SEQ ID NO: 187840 - DNA, 30 bp, Homo sapiens
  chr19:2539611-2539641
  hypo
attttagacacatacgatatccaatggggg

SEQ ID NO: 187841 - DNA, 337 bp, Homo sapiens
  chr19:2573859-2574196
  hypo
aaagtgggattggcatttccctcccgtggtcatatgcgaacgggtgaattaaattctttctggaagaggctggaaaggcactgcatgaatgggacataccgtgggtgccacggaccagctgctgcgaggtacggccggagttctgccgcctcggggaggcctgggtatcccgagaccagagatgctgccttctcaccttgggtgcctgggtctggcccagagcccgtcacacctgggctggtgcagtccaggtgaaacccgccctgccagccacccccaccatctcccggggtgtccctgctgggcctgcattctgacatcacgccttcaaactcaa

SEQ ID NO: 187842 - DNA, 30 bp, Homo sapiens
  chr19:2575458-2575488
  hypo
ggacacgcaggcacacgcaggcacatgcag

SEQ ID NO: 187843 - DNA, 30 bp, Homo sapiens; identical to SEQ ID NO: 95748
  chr19:2626268-2626298
  hypo

SEQ ID NO: 187844 - DNA, 30 bp, Homo sapiens; identical to SEQ ID NO: 95749
  chr19:2656756-2656786
  hypo

SEQ ID NO: 187845 - DNA, 155 bp, Homo sapiens
  chr19:2672825-2672980
  hypo
acaccaccagtgtggacgtcacgtgcccctgatgtgttctccccagagccctgaaccccagactattcaagagcaaacatcatggaaactcacgttgggggacattttacaaaactcctgacgagtcctcctcaaaaccactaggttggccgggt

SEQ ID NO: 187846 - DNA, 30 bp, Homo sapiens
  chr19:2673400-2673430
  hypo
gaaataaagaccgggcgccgtggctcacgc

SEQ ID NO: 187847 - DNA, 35 bp, Homo sapiens; identical to SEQ ID NO: 31797
  chr19:2682926-2682961
  hypo

SEQ ID NO: 187848 - DNA, 210 bp, Homo sapiens
  chr19:2683832-2684042
  hypo
ctgccgggaggtacccgtgcagaaacaagaaaggagctcctgcaggggctggctagggagctggtggacagcatcggccagaggagctcaaatccgccctcagccccagggggccgagctgcaaaagcgacgtcaaatggacaaaaatcccaccgggcacagaagtgcgaccagcaagtctatgggtttaaaaataaatgatggggccgg

SEQ ID NO: 187849 - DNA, 30 bp, Homo sapiens; identical to SEQ ID NO: 95752
  chr19:2696589-2696619
  hypo

SEQ ID NO: 187850 - DNA, 578 bp, Homo sapiens; identical to SEQ ID NO: 130421
  chr19:2702442-2703020
  hypo

SEQ ID NO: 187851 - DNA, 30 bp, Homo sapiens; identical to SEQ ID NO: 31799
  chr19:2716449-2716479
  hypo

SEQ ID NO: 187852 - DNA, 30 bp, Homo sapiens
  chr19:2733424-2733454
  hypo
atggtttcggccagcgggtagtcggtgctg

SEQ ID NO: 187853 - DNA, 77 bp, Homo sapiens
  chr19:2733947-2734024
  hypo
acataaagagctgcactggccttgcgtgttctgccgcggggcctcctctctgcttccctgaccgacatgcctgggcc

SEQ ID NO: 187854 - DNA, 30 bp, Homo sapiens
  chr19:2753002-2753032
  hypo
ccccttctaccgccccggctctgtggacac

SEQ ID NO: 187855 - DNA, 276 bp, Homo sapiens; identical to SEQ ID NO: 95755
  chr19:2753322-2753598
  hypo

SEQ ID NO: 187856 - DNA, 584 bp, Homo sapiens
  chr19:2754374-2754958
  hypo
gtgaaagtctcaaaaaaaaaaaaaaagcaaagcaaagcaacagacaatacgatcactctctgctgaggaccgaggcatctcaccccaccctggggtgaccctctacaccgggatgcagctggggacggaggcggagggaagggagacagcagagggtagaggctgactgtccgaaacctcccatgacccgtgacccgtgacccaagaagtgcggctccggcgtcgcggggattcactcacaagcagcccagctgatccacaaactccgcgtcgggggttttctcgaggtttggggttggagggtatcggtggcgccaaggtcaacacgaagacagacagaggtcacaacgcctatttattccccacacgtcacgccctgcaccccgggtgggcttggcacacacctcaccgccatgagcggctgcagggccgcggcggcccccgttcctactgctacctacgatacacggtactgcgcctacctcacagacggccaggagccagggagccccaggatgctccgactgacaaccctgctgctgggaccacggcgccgtgggctcgtctgccacccccaggcctca

SEQ ID NO: 187857 - DNA, 30 bp, Homo sapiens; identical to SEQ ID NO: 31802
  chr19:2757808-2757838
  hypo

SEQ ID NO: 187858 - DNA, 182 bp, Homo sapiens
  chr19:2761826-2762008
  hypo
tccccgcacagcgcgaccgcccggggacggcacagtctatcatcccgtgtttattccccgtacagcgcgaccgcccggggacggcacagtctatcatcccgtgttgatttcctgtattctgccgctttgacaccttggggccttgctggcctggcagagccgccccctcctggagtagccaa

SEQ ID NO: 187859 - DNA, 30 bp, Homo sapiens; identical to SEQ ID NO: 95758
  chr19:2765418-2765448
  hypo

SEQ ID NO: 187860 - DNA, 30 bp, Homo sapiens; identical to SEQ ID NO: 31803
  chr19:2774182-2774212
  hypo

SEQ ID NO: 187861 - DNA, 30 bp, Homo sapiens; identical to SEQ ID NO: 95760
  chr19:2780549-2780579
  hypo

SEQ ID NO: 187862 - DNA, 165 bp, Homo sapiens
  chr19:2789344-2789509
  hypo
catagtcgcccttcccgcagctgctctcgctgccaggagcccccgcctgccattcttgttttcaggctccatttacccgtttctcagagaggccctggtgtgagtggccgggccacatatgactcgcccgtagcacctgtgggtctggcacgaccacacgccagg

SEQ ID NO: 187863 - DNA, 30 bp, Homo sapiens
  chr19:2793331-2793361
  hypo
gccctggcacccacgcgtcccctcctgtct

SEQ ID NO: 187864 - DNA, 387 bp, Homo sapiens
  chr19:2795260-2795647
  hypo
catgtgcactttcatttcctttcctggccatcctagtgtgacccaaacaccccatccccacatggcgtgagctggcagggcctggcggcatggctgcgtgggctcctgctcccccggatgctcctcgcagtatgcagtggggcctttgctgttgatgtcacatgatcaggagagacccagagaccctcctgctgctgttcatcctcttaggcgaggacccctgggaatgtgctgatgtgtcccacagtctcaggatcatgcagccctagtgctttggtaaatccagatcagggtgacccatgatagccgtggattgttatttctttttatttaaatacagacagggtctcacaacgttgcccacgcttgtctcgaactcctgggccc

SEQ ID NO: 187865 - DNA, 600 bp, Homo sapiens; identical to SEQ ID NO: 31805
  chr19:2796367-2796967
  hypo

SEQ ID NO: 187866 - DNA, 31 bp, Homo sapiens; identical to SEQ ID NO: 95763
  chr19:2804071-2804102
  hypo

SEQ ID NO: 187867 - DNA, 31 bp, Homo sapiens; identical to SEQ ID NO: 31806
  chr19:2808307-2808338
  hypo

SEQ ID NO: 187868 - DNA, 30 bp, Homo sapiens; identical to SEQ ID NO: 95765
  chr19:2810288-2810318
  hypo

SEQ ID NO: 187869 - DNA, 188 bp, Homo sapiens; identical to SEQ ID NO: 31807
  chr19:2812072-2812260
  hypo

SEQ ID NO: 187870 - DNA, 30 bp, Homo sapiens
  chr19:2813911-2813941
  hypo
gggcaggccctgtgcgcacaggcagccggg

SEQ ID NO: 187871 - DNA, 30 bp, Homo sapiens; identical to SEQ ID NO: 95767
  chr19:2843123-2843153
  hypo

SEQ ID NO: 187872 - DNA, 88 bp, Homo sapiens; identical to SEQ ID NO: 95768
  chr19:2881139-2881227
  hypo

SEQ ID NO: 187873 - DNA, 31 bp, Homo sapiens; identical to SEQ ID NO: 95769
  chr19:2889959-2889990
  hypo

SEQ ID NO: 187874 - DNA, 181 bp, Homo sapiens; identical to SEQ ID NO: 95770
  chr19:2899802-2899983
  hypo

SEQ ID NO: 187875 - DNA, 38 bp, Homo sapiens; identical to SEQ ID NO: 95771
  chr19:2908410-2908448
  hypo

SEQ ID NO: 187876 - DNA, 98 bp, Homo sapiens
  chr19:2908687-2908785
  hypo
actgcgcccggccattggtttttacagtcacagaatcctgcaaccaagaccacagtcaacttgaggacatttccatcacctcacgaagaaacccccag

SEQ ID NO: 187877 - DNA, 31 bp, Homo sapiens
  chr19:2910864-2910895
  hypo
gacgggcgtgagccaccgggcccggcctggt

SEQ ID NO: 187878 - DNA, 31 bp, Homo sapiens; identical to SEQ ID NO: 95772
  chr19:2917297-2917328
  hypo

SEQ ID NO: 187879 - DNA, 147 bp, Homo sapiens; identical to SEQ ID NO: 31808
  chr19:2919930-2920077
  hypo

SEQ ID NO: 187880 - DNA, 34 bp, Homo sapiens; identical to SEQ ID NO: 95774
  chr19:2927483-2927517
  hypo

SEQ ID NO: 187881 - DNA, 89 bp, Homo sapiens; identical to SEQ ID NO: 95775
  chr19:2934501-2934590
  hypo

SEQ ID NO: 187882 - DNA, 20 bp, Homo sapiens
  chr19:2935614-2935634
  hypo
cactgcgcccagcccacggt

SEQ ID NO: 187883 - DNA, 38 bp, Homo sapiens; identical to SEQ ID NO: 95777
  chr19:2938053-2938091
  hypo

SEQ ID NO: 187884 - DNA, 78 bp, Homo sapiens; identical to SEQ ID NO: 95778
  chr19:2938993-2939071
  hypo

SEQ ID NO: 187885 - DNA, 70 bp, Homo sapiens; identical to SEQ ID NO: 95779
  chr19:2941877-2941947
  hypo

SEQ ID NO: 187886 - DNA, 836 bp, Homo sapiens; identical to SEQ ID NO: 11933
  chr19:2944613-2945449
  hypo

SEQ ID NO: 187887 - DNA, 633 bp, Homo sapiens; identical to SEQ ID NO: 55400
  chr19:2950417-2951050
  hypo

SEQ ID NO: 187888 - DNA, 209 bp, Homo sapiens
  chr19:2956971-2957180
  hypo
gtgctgggattacaggtgtgagccaccgcacccagcccaccactttgctgttctttggaaatgttcacagaaggcaaacaatgctgtttgctctgagttaagggggagaatatgcatatattaaatacgcatgtccatacacacacagagaaggataaagcaacagaaggcacaaaaatagcatgggggaagcgcggggaaagatgcgt

SEQ ID NO: 187889 - DNA, 142 bp, Homo sapiens; identical to SEQ ID NO: 130431
  chr19:2977371-2977513
  hypo

SEQ ID NO: 187890 - DNA, 93 bp, Homo sapiens; identical to SEQ ID NO: 95783
  chr19:2995960-2996053
  hypo

SEQ ID NO: 187891 - DNA, 62 bp, Homo sapiens; identical to SEQ ID NO: 31817
  chr19:2996847-2996909
  hypo

SEQ ID NO: 187892 - DNA, 225 bp, Homo sapiens; identical to SEQ ID NO: 95785
  chr19:2997565-2997790
  hypo

SEQ ID NO: 187893 - DNA, 30 bp, Homo sapiens; identical to SEQ ID NO: 31818
  chr19:3002423-3002453
  hypo

SEQ ID NO: 187894 - DNA, 93 bp, Homo sapiens
  chr19:3006698-3006791
  hypo
tgggcaccacgcccccgcacccgcacctgggagggcagggagacgcctttgtcctgcctggcaccctctgatgtgttttttattttttgtttt

SEQ ID NO: 187895 - DNA, 30 bp, Homo sapiens
  chr19:3011130-3011160
  hypo
aggcaggagtgctggcgggaaggtcattct

SEQ ID NO: 187896 - DNA, 144 bp, Homo sapiens; identical to SEQ ID NO: 95787
  chr19:3053350-3053494
  hypo

SEQ ID NO: 187897 - DNA, 115 bp, Homo sapiens; identical to SEQ ID NO: 95788
  chr19:3055114-3055229
  hypo

SEQ ID NO: 187898 - DNA, 673 bp, Homo sapiens
  chr19:3055431-3056104
  hypo
attccagagcagggtgaggcccgccccccacacgcctgcacccctggagtgtctctggcccggggattcttctgcacaggccggctctggtgttcagagccagggaggtccagagaggggaggcgtgtgccctggggcgcccagcacaccacccaagatggctgcagtggacaggggctgggcaagtgcggggccccctcacaacccctccccaaggccctggctcttacctcttgggagaggtagggcaggacctgggcacaaatcccgttcagccttttgacgatctcagcctggaacacacagatgaagccggcttcagtcctgggcgggtggcaggtgcaggctagccacaggaggcctgcgcggggcccggcccagccctgccacttgcggcttctaagaggggctaggtctggccagggtgggatgagcaaagccgtgttcgggcccgagggcagccagtcagtggcaaaggtggggctggacaccggctgtcgcctgcagcttagagtgaggtaagtgcaggatgaggccagactgcacattcctcgggggtcggccactcaggcccctggcaggtagtaagcgcttgtgcgaatgtagggagggctgggggccgtaggctgtggggaaggtctctgcccctccccaccaccgggagaaacactcc

SEQ ID NO: 187899 - DNA, 290 bp, Homo sapiens
  chr19:3056308-3056598
  hypo
cctgtttgtgcatctcgatgttcaagccgtaggacatctcgtagtactgtatgggggagagagagggggagcgggagatgggggtggggaaggatggggggacacggagacaaagagataggggagtggcagagacagacaaaggggggagacagcaagagacagctgagggcaggaaagaaaggagaggcaggtgggagggaaagaggagggagagacgcccacacccagcatcccagcccgccctggagaggggcagggggccgctggggctgcggatggagactggg

SEQ ID NO: 187900 - DNA, 88 bp, Homo sapiens; identical to SEQ ID NO: 11938
  chr19:3094303-3094391
  hypo

SEQ ID NO: 187901 - DNA, 174 bp, Homo sapiens; identical to SEQ ID NO: 11939
  chr19:3094776-3094950
  hypo

SEQ ID NO: 187902 - DNA, 30 bp, Homo sapiens; identical to SEQ ID NO: 95793
  chr19:3101484-3101514
  hypo

SEQ ID NO: 187903 - DNA, 31 bp, Homo sapiens; identical to SEQ ID NO: 95794
  chr19:3102679-3102710
  hypo

SEQ ID NO: 187904 - DNA, 815 bp, Homo sapiens; identical to SEQ ID NO: 95795
  chr19:3105563-3106378
  hypo

SEQ ID NO: 187905 - DNA, 30 bp, Homo sapiens; identical to SEQ ID NO: 31824
  chr19:3107775-3107805
  hypo

SEQ ID NO: 187906 - DNA, 31 bp, Homo sapiens; identical to SEQ ID NO: 95797
  chr19:3108247-3108278
  hypo

SEQ ID NO: 187907 - DNA, 112 bp, Homo sapiens; identical to SEQ ID NO: 95798
  chr19:3109615-3109727
  hypo

SEQ ID NO: 187908 - DNA, 341 bp, Homo sapiens; identical to SEQ ID NO: 95799
  chr19:3113300-3113641
  hypo

SEQ ID NO: 187909 - DNA, 31 bp, Homo sapiens; identical to SEQ ID NO: 31827
  chr19:3114233-3114264
  hypo

SEQ ID NO: 187910 - DNA, 348 bp, Homo sapiens; identical to SEQ ID NO: 95801
  chr19:3114745-3115093
  hypo

SEQ ID NO: 187911 - DNA, 30 bp, Homo sapiens; identical to SEQ ID NO: 95802
  chr19:3116701-3116731
  hypo

SEQ ID NO: 187912 - DNA, 81 bp, Homo sapiens; identical to SEQ ID NO: 95803
  chr19:3117183-3117264
  hypo

SEQ ID NO: 187913 - DNA, 213 bp, Homo sapiens; identical to SEQ ID NO: 95804
  chr19:3118889-3119102
  hypo

SEQ ID NO: 187914 - DNA, 30 bp, Homo sapiens; identical to SEQ ID NO: 31830
  chr19:3121225-3121255
  hypo

SEQ ID NO: 187915 - DNA, 141 bp, Homo sapiens
  chr19:3135019-3135160
  hypo
gccaccaggcccagcctaaaatttattttattatctgttctttaactagaaccttaggtaaggaggtctgggatctgtgtctcttggctaccgtgcctggcacacagttggcgctccatgaatgcacgcacaatgaaggga

SEQ ID NO: 187916 - DNA, 671 bp, Homo sapiens
  chr19:3148405-3149076
  hypo
tggggaaaccaaggcacagagcggcaaagccgctagcctagggtcactgagtgaggtcccggctgcaccggggtttgaacccaggaggcctggcgtggagttgggggtgtctgacgtggggttgggggtgtcgggggtgggagtcccgtggagggctgagcggttctgctgctccatccccaggcccaggcgagagcgggaagagcaccttcatcaagcagatgcggatcatccacggcgccggctactcggaggaggagcgcaagggcttccggcccctggtctaccagaacatcttcgtgtccatgcgggccatgatcgaggccatggagcggctgcagattccattcagcaggcccgagagcaaggtgagccgccagggcaggcaggggcccagggcaggcaggggcccagggcagggttccccagaccccggagcagggccaagttccccagacttcagggcagggcagggcagggcagggcaggcagggaagggtccccagaccctggggcaaggccatgtcctccagacatatgtgcatacatacaagtgcacacacaagtatacacgcataaatgcacacacgcacatgtatgcacacgcacagacatgcacacaaggacacacacgtacatgctcacaaagatacacacgcatgcccacatgc

SEQ ID NO: 187917 - DNA, 53 bp, Homo sapiens
  chr19:3151441-3151494
  hypo
ggggacaccactcctcgatgaggccattcctcatgtcacgccatccctcgggt

SEQ ID NO: 187918 - DNA, 118 bp, Homo sapiens
  chr19:3151728-3151846
  hypo
caccgaggagggctacgtccccacagctcaggacgtgctccgcagccgcatgcccaccactggcatcaacgagtactgcttctccgtgcagaaaaccaacctgcggtgagcgctccac

SEQ ID NO: 187919 - DNA, 211 bp, Homo sapiens; identical to SEQ ID NO: 95809
  chr19:3155757-3155968
  hypo

SEQ ID NO: 187920 - DNA, 30 bp, Homo sapiens
  chr19:3162648-3162678
  hypo
aaaagatggagtcaacgcacagaaaaatga

SEQ ID NO: 187921 - DNA, 30 bp, Homo sapiens
  chr19:3162888-3162918
  hypo
ggcgcacgatcccgacgcctcttcagccac

SEQ ID NO: 187922 - DNA, 40 bp, Homo sapiens
  chr19:3170963-3171003
  hypo
taaaatcccaacatgtcccggcaagcgctgcgttccattc

SEQ ID NO: 187923 - DNA, 31 bp, Homo sapiens; identical to SEQ ID NO: 31833
  chr19:3192318-3192349
  hypo

SEQ ID NO: 187924 - DNA, 30 bp, Homo sapiens; identical to SEQ ID NO: 95811
  chr19:3192586-3192616
  hypo

SEQ ID NO: 187925 - DNA, 566 bp, Homo sapiens
  chr19:3196027-3196593
  hypo
ggcatcctgtggtatcgaaatctgctggtcacgtccccacacccggctggttggctctgcccgagcccccaacctggggtgtcagtgctggggatgccccctggctggggccctggctgggccaaggctgatgcgccctctccctctccctagtactgctgcgcacggccactgccaacggcttccagatggtcaccagcggggtacagagcaaggccgtgagtgactggctgattgccagcgtggaggtgagtgccgcctgccccggagccagccccacgtccccaggggttcctgccatccgcctggctccccggctcggccgtactagaggggagccgctgatgggaaactggagtcggatcgcccccctgcctggctgaaaacctcctgtggctccgctggcagctgcaggaacccaaactcctcacatggccggggagtcgctctgtggagtgcccaggcccctgccagcccccggcccatctccttccttccatcatggacccccacacaccaagccgctgcctcccaccccagggcctttgcaccggctgcccctccca

SEQ ID NO: 187926 - DNA, 30 bp, Homo sapiens; identical to SEQ ID NO: 95813
  chr19:3198841-3198871
  hypo

SEQ ID NO: 187927 - DNA, 30 bp, Homo sapiens; identical to SEQ ID NO: 31835
  chr19:3201206-3201236
  hypo

SEQ ID NO: 187928 - DNA, 30 bp, Homo sapiens; identical to SEQ ID NO: 95815
  chr19:3208034-3208064
  hypo

SEQ ID NO: 187929 - DNA, 361 bp, Homo sapiens; identical to SEQ ID NO: 95816
  chr19:3214889-3215250
  hypo

SEQ ID NO: 187930 - DNA, 19 bp, Homo sapiens
  chr19:3218873-3218892
  hypo
aaagaccgggcgcggcggc

SEQ ID NO: 187931 - DNA, 216 bp, Homo sapiens
  chr19:3219524-3219740
  hypo
agtcgccgcgccctgccactcccacgcgctttacttcctcagtaacatccatggcacgggcatcctgcagtgaccgatgcccaccagactgcatccgctaacaagacagggagaccggcctgtggtacccagatgtgcccaagctcacagcctcactattctccgtgctcacagcctcgctattctccaggctcacagcctcgctattctccaggc

SEQ ID NO: 187932 - DNA, 412 bp, Homo sapiens
  chr19:3296494-3296906
  hypo
atcttctgaaccaacttgtttcgatattccagagtttgataattgtttcgagactctcctctagcgtgcctgtgttccgtgtgtccccgtgtgcaagcgtgtgccatgccaatctgcctcgagggggcctcacccgtgtccgcggcgcccgccgaggcccccgagggcctgcttgggagtgtgtgccggtgtgcagttgtacgtgtctttctggtccatgtttactggctgtaaataccatttttatactccacatcgcagacctgcgtgatttgtacaatgtactttatttctgctacgagtaatttcatgaagtttcaacttgcaaactgacttttgggacaaaccaacacacacacagaagagaaagcaaagaacttggaactttgggttgactcggtttgagttttgt

SEQ ID NO: 187933 - DNA, 35 bp, Homo sapiens
  chr19:3308017-3308052
  hypo
gtgagccaccgcgcccggcccggcagttccattct

SEQ ID NO: 187934 - DNA, 30 bp, Homo sapiens
  chr19:3321268-3321298
  hypo
atcctcccaacaagtcgatagggaaggaac

SEQ ID NO: 187935 - DNA, 101 bp, Homo sapiens; identical to SEQ ID NO: 31839
  chr19:3336854-3336955
  hypo

SEQ ID NO: 187936 - DNA, 694 bp, Homo sapiens; identical to SEQ ID NO: 130449
  chr19:3360717-3361411
  hypo

SEQ ID NO: 187937 - DNA, 482 bp, Homo sapiens; identical to SEQ ID NO: 130450
  chr19:3367270-3367752
  hypo

SEQ ID NO: 187938 - DNA, 91 bp, Homo sapiens
  chr19:3381002-3381093
  hypo
caacctcagttttacccgtctgtacaatgggttgtccatgagcctccacctggcccccttagcttgctccatctgcatgctggggttcaac

SEQ ID NO: 187939 - DNA, 750 bp, Homo sapiens
  chr19:3381392-3382142
  hypo
caaaaaaaaaaaaaaaaaaaatgatcctccacaaacttccgccttgatttgtgcctctcacatagtccaagtctgtttgctcatctgggcgatgggttcttgcaggtccctgataaacttctcctgggtcccccgggccttttgcgtgcctccggcggcgtgcacgggtccgcagcgaccccctgcccacctctgcccagcccctcccactctgcgggtctgttcagggcccctccgacctcagccttcggggccgggcagtgggtccgccctctgcgtccctggcgctcctgacctctcgcctctccggcctgcaggatgagttccacccgttcatcgaggccctgctgcctcacgtccgcgccttcgcctacacctggttcaacctgcaggcgcggaagcgcaagtacttcaagaagcacgagaagcggatgtcgaaggacgaggagcgtgcggtcaaggacgagctgctgggcgagaagcccgaggtcaagcagaagtgggcgtcgcggctgctggccaagctgcgcaaggacatccggcccgagtgccgcgaggacttcgtgctgagcatcaccggcaagaaggcgccgggctgcgtgctctccaaccccgaccagaagggcaagatgcggcgcatcgactgtctccggcaggcggacaaggtgtggcggctggacctggtcatggtcatcctgttcaagggcatcccgctggagagcaccgacggcgagcgcctggtcaaggctg

SEQ ID NO: 187940 - DNA, 54 bp, Homo sapiens; identical to SEQ ID NO: 95826
  chr19:3410577-3410631
  hypo

SEQ ID NO: 187941 - DNA, 121 bp, Homo sapiens; identical to SEQ ID NO: 95827
  chr19:3422334-3422455
  hypo

SEQ ID NO: 187942 - DNA, 147 bp, Homo sapiens; identical to SEQ ID NO: 95828
  chr19:3424686-3424833
  hypo

SEQ ID NO: 187943 - DNA, 91 bp, Homo sapiens; identical to SEQ ID NO: 95829
  chr19:3449009-3449100
  hypo

SEQ ID NO: 187944 - DNA, 30 bp, Homo sapiens; identical to SEQ ID NO: 95830
  chr19:3452665-3452695
  hypo

SEQ ID NO: 187945 - DNA, 33 bp, Homo sapiens; identical to SEQ ID NO: 95831
  chr19:3453420-3453453
  hypo

SEQ ID NO: 187946 - DNA, 138 bp, Homo sapiens; identical to SEQ ID NO: 95832
  chr19:3453940-3454078
  hypo

SEQ ID NO: 187947 - DNA, 196 bp, Homo sapiens; identical to SEQ ID NO: 95833
  chr19:3456282-3456478
  hypo

SEQ ID NO: 187948 - DNA, 30 bp, Homo sapiens; identical to SEQ ID NO: 95834
  chr19:3462638-3462668
  hypo

SEQ ID NO: 187949 - DNA, 30 bp, Homo sapiens; identical to SEQ ID NO: 31845
  chr19:3463226-3463256
  hypo

SEQ ID NO: 187950 - DNA, 30 bp, Homo sapiens; identical to SEQ ID NO: 95836
  chr19:3463773-3463803
  hypo

SEQ ID NO: 187951 - DNA, 140 bp, Homo sapiens; identical to SEQ ID NO: 31846
  chr19:3464750-3464890
  hypo

SEQ ID NO: 187952 - DNA, 35 bp, Homo sapiens; identical to SEQ ID NO: 95838
  chr19:3465694-3465729
  hypo

SEQ ID NO: 187953 - DNA, 1051 bp, Homo sapiens; identical to SEQ ID NO: 95839
  chr19:3490841-3491892
  hypo

SEQ ID NO: 187954 - DNA, 30 bp, Homo sapiens; identical to SEQ ID NO: 95840
  chr19:3492425-3492455
  hypo

SEQ ID NO: 187955 - DNA, 84 bp, Homo sapiens
  chr19:3494336-3494420
  hypo
aaatggaccccatcccggcccgtaccatgagacagggagacaagtatatccctacaactcgggatcacagctgacaagcagctc

SEQ ID NO: 187956 - DNA, 84 bp, Homo sapiens
  chr19:3494539-3494623
  hypo
gggcctgccggctggagactccagaatttggggccactggggctacacttaggtgggttcgggtacaggcgcaagtgcaggcgt

SEQ ID NO: 187957 - DNA, 105 bp, Homo sapiens
  chr19:3494899-3495004
  hypo
tcccagtggcacagacgcaccaactacctgcctcactggtctccttcgctgtctaggtccctcgctacaacagtccattttttttttttttttagagcttcgctc

SEQ ID NO: 187958 - DNA, 70 bp, Homo sapiens
  chr19:3509502-3509572
  hypo
ttcactgctttagagcgtgcagttccctggtttttatatgttcacaggctcgggccgccatcacctctgc

SEQ ID NO: 187959 - DNA, 30 bp, Homo sapiens
  chr19:3509841-3509871
  hypo
tccttattcagtggacgttggtgctgtttc

SEQ ID NO: 187960 - DNA, 30 bp, Homo sapiens; identical to SEQ ID NO: 95841
  chr19:3522572-3522602
  hypo

SEQ ID NO: 187961 - DNA, 93 bp, Homo sapiens
  chr19:3522931-3523024
  hypo
tctcctgcccttcccgctgcaggctaaccttgccgcgggccgagccctgcctcgccatggaccaggactatgagcggcgcctgcttcgccaga

SEQ ID NO: 187962 - DNA, 382 bp, Homo sapiens; identical to SEQ ID NO: 95843
  chr19:3531589-3531971
  hypo

SEQ ID NO: 187963 - DNA, 31 bp, Homo sapiens; identical to SEQ ID NO: 31850
  chr19:3532514-3532545
  hypo

SEQ ID NO: 187964 - DNA, 30 bp, Homo sapiens; identical to SEQ ID NO: 31851
  chr19:3535090-3535120
  hypo

SEQ ID NO: 187965 - DNA, 30 bp, Homo sapiens; identical to SEQ ID NO: 95846
  chr19:3546145-3546175
  hypo

SEQ ID NO: 187966 - DNA, 211 bp, Homo sapiens
  chr19:3548038-3548249
  hypo
agcagaagcagtcagtggtggcgggcccagcccccgcccctggctcgaggacttcaggcgacccacccggactccagctcacccggaacacgggcacgtcctggccccccagctggtcgctgatgctgatgtcttgggtgggctccacccgcgacgagccctgcaggtgcagcaggagccaggcggcgccgtagacggtgatgttggccac

SEQ ID NO: 187967 - DNA, 301 bp, Homo sapiens
  chr19:3562275-3562576
  hypo
taaggaaactgagtttcacaaagacgggcatgggcatgggactgtggcgggcatgggactaacaagaggcagatgtgggatttgaactcagctccacgtgacctctttatgtgctggctgcggaatgccacctgagtgtggaggaacaggtgcctcactgtccactgctttttcagcctcctttgtaggtcgagaatcaggcacaatcccgcctccctttggagaagatccagcggaggaggcagggtgtggttaaagcgccaacacatctctgcattcttgtccttttgctgttgtggtg

SEQ ID NO: 187968 - DNA, 241 bp, Homo sapiens
  chr19:3565325-3565566
  hypo
gactcagtctttgccaggaccctcctggcctcaggtcctgttcagtatctggtctaccattgccagaaggagcgcattctgtgagtcttgtgatttacgttttaacgttgatgctggtcagtccttgcgctgagagcaaaacggggaggagctgtaacgaagcgcggtgacctcctggcacggcagggcctggaactcggagctttttgttgttgtgttgtgttttgagacggagagtcgc

SEQ ID NO: 187969 - DNA, 43 bp, Homo sapiens
  chr19:3568765-3568808
  hypo
gtctttattaggaatacgcacatgtgtacgtgtgtaggcatgt

SEQ ID NO: 187970 - DNA, 156 bp, Homo sapiens; identical to SEQ ID NO: 31852
  chr19:3571350-3571506
  hypo

SEQ ID NO: 187971 - DNA, 58 bp, Homo sapiens; identical to SEQ ID NO: 55417
  chr19:3573236-3573294
  hypo

SEQ ID NO: 187972 - DNA, 497 bp, Homo sapiens
  chr19:3576060-3576557
  hypo
gtcccgtgggttgggcgggggaaagatacatagccagacaggagtgaagggggctcactcggtacagcgatgggggatgcccagacgcggggcactcaagtggggagctggagccggctgagcagcgctgacctagggtgcagggcgtggtccctggaggcctgggaggctgaccctgcccttcccctcccccgccagaagactcgagctctgggctcatgaacactctcctgaatggacacaaggtaagcgaccttcttcctctcaaagcacctgggggagaaaggtctggaggcttctagaaccctgagtcagagccagtgctcgcccagatgtgtgcaagcaggggcggtgccactgcaccgtgggatcgctgttgattgtactcccaccggggtgtcccaggagaccctcctaggcttggggcacacccagagagcgtggctgcctcctaccaccagtaaattgccaccttgtcccttcgtcttagggtgggg

SEQ ID NO: 187973 - DNA, 1003 bp, Homo sapiens
  chr19:3577495-3578498
  hypo
taccggccccaccgtcgctggcccctctccctcgccagcccccgaccagcctgagcactgacccagcctccccgctcgccacgccacgttcccattcaccccacctccccacgcccccgtcacccatccctccccacgccccgctgacgcctgagccccctccaccaccccagtcacgtcccacgcgaccccagccccccggtgtcatccccacctccccgacctcgttccctccgtccgtgactgtcctcagcggaccctggacgcccgccgctctagccccgcgtccccaccctgtccccgtcctcgccatcctcctgccccggcttaccttagcccaccctgcgccgctcctgcgctggcggtgtccggacctctgagcgcccgcgcgacccgccctgagtcaccccctaccgctgcccctggagcccccgccccgcgactccccggcaccctcgcctgaccttcccgcctgtcccccaggcacgggcgaaacgcccacgctgggcactctggacttctacatggcccggcttcacggagccatcgagcgcgaccccgcccagcacgagaagctcatcgtccgcatcaaggaaatcctggcccaggtcgccaggtgtgtgccgggcgaggcggggcggggccggggttcaaggcccggatgtgcccgccctggggttccccaggtccgcgagggctgctgggtgggactccgcagcttactagagatcacctcccggaggggcctacctgcggtcgcccctgatgcaccagtgctaggatggccatggagaaccccgggccggcgggacccactcgggggcaccagaacttccctaaagcttctcagggtggatcccagcgcccgggttagataggttcaacgcctgtcccccaaccctggcatctgttggagcagctgatgggccatggtctctggggttccccagggccggggtgggggccagagatgatgagggcctcatcccgggccctcctctct

SEQ ID NO: 187974 - DNA, 30 bp, Homo sapiens
  chr19:3578772-3578802
  hypo
cggaggacagccacgcgctacactggctct

SEQ ID NO: 187975 - DNA, 29 bp, Homo sapiens
  chr19:3580165-3580194
  hypo
ccgcacccggactatatgtccttttgtat

SEQ ID NO: 187976 - DNA, 338 bp, Homo sapiens; identical to SEQ ID NO: 130463
  chr19:3585427-3585765
  hypo

SEQ ID NO: 187977 - DNA, 31 bp, Homo sapiens; identical to SEQ ID NO: 95853
  chr19:3589345-3589376
  hypo

SEQ ID NO: 187978 - DNA, 26 bp, Homo sapiens
  chr19:3595359-3595385
  hypo
gagcaagactccgtctaaaaaaaaaa

SEQ ID NO: 187979 - DNA, 30 bp, Homo sapiens; identical to SEQ ID NO: 95855
  chr19:3599739-3599769
  hypo

SEQ ID NO: 187980 - DNA, 83 bp, Homo sapiens; identical to SEQ ID NO: 31856
  chr19:3600527-3600610
  hypo

SEQ ID NO: 187981 - DNA, 119 bp, Homo sapiens; identical to SEQ ID NO: 130464
  chr19:3606359-3606478
  hypo

SEQ ID NO: 187982 - DNA, 490 bp, Homo sapiens; identical to SEQ ID NO: 130465
  chr19:3606742-3607232
  hypo

SEQ ID NO: 187983 - DNA, 30 bp, Homo sapiens; identical to SEQ ID NO: 130466
  chr19:3607700-3607730
  hypo

SEQ ID NO: 187984 - DNA, 30 bp, Homo sapiens; identical to SEQ ID NO: 31857
  chr19:3613558-3613588
  hypo

SEQ ID NO: 187985 - DNA, 30 bp, Homo sapiens
  chr19:3614341-3614371
  hypo
aaacccatcccacccggacggcaccaaccc

SEQ ID NO: 187986 - DNA, 30 bp, Homo sapiens; identical to SEQ ID NO: 95858
  chr19:3623721-3623751
  hypo

SEQ ID NO: 187987 - DNA, 124 bp, Homo sapiens
  chr19:3624528-3624652
  hypo
gaggcagagcaagagcgagggcctagaggcaggcactgacctgccacattctaagaacaacaaggaggctgtatggctgagacagagtgtgggggagagggaggaggcgcgggcagggaggtgg

SEQ ID NO: 187988 - DNA, 160 bp, Homo sapiens
  chr19:3630282-3630442
  hypo
gtggctgtatggtttcagaggcgcccaccactctgggtttgagggacacagcaccctcgtctcggcgctttggattgtcacgcaccagaccacggggcggaggaatggagtggcatccctggggggagttaagacacacgaggtttgcagtttcattttg

SEQ ID NO: 187989 - DNA, 30 bp, Homo sapiens; identical to SEQ ID NO: 95859
  chr19:3633319-3633349
  hypo

SEQ ID NO: 187990 - DNA, 30 bp, Homo sapiens; identical to SEQ ID NO: 95860
  chr19:3636632-3636662
  hypo

SEQ ID NO: 187991 - DNA, 164 bp, Homo sapiens; identical to SEQ ID NO: 31858
  chr19:3638706-3638870
  hypo

SEQ ID NO: 187992 - DNA, 591 bp, Homo sapiens
  chr19:3642942-3643533
  hypo
gagatacagcaaacacgtgacacccagaaagagagtggcccgcctgctcagtctacctgccttgcctacccgcctgcctacctgccccctggcagccctgcccacctgtacatatgctcctccctcccacacattggatgctccgcccccgcgcacccacatgcagtgtatgtacatccaccgtacatacgatgctccacccacatgcacagcggatgccccgcccacatgcagtgaatgccccgcccccacgcacagcggatgccccgcccacatgcactgcggatgcctcgcccacctgtaccgcggctgctccgacgtctccgagggggaccgctcaggaatggagagggatgtggatgacagagtcgtggcaatggaggctgtagtggcttcttcgaaagaaggtggcgtgcagggcaggaggtcgggccggcctgaggggagaggactgtgggcaccttgcggagcctccgagcccccaaacacacagtcgattctccctgaggcttggctcaccctgggaacccacagcccagtgcccgcccgcctcccagacactcccacctccccacacggcagggaaggacg

SEQ ID NO: 187993 - DNA, 30 bp, Homo sapiens
  chr19:3644151-3644181
  hypo
agggatctggctggccgagaaggcagcggt

SEQ ID NO: 187994 - DNA, 161 bp, Homo sapiens; identical to SEQ ID NO: 95863
  chr19:3648544-3648705
  hypo

SEQ ID NO: 187995 - DNA, 232 bp, Homo sapiens
  chr19:3651843-3652075
  hypo
ctccccgcgcgcggcgccaccctggatggactccatggccgtggagtagagcgccttctggcccacaggccgcttctcatctgaggtgctctgggcgccctgcgcctgccgctcgcgctcgtgctggtcgatgttgtgcacgcccagcagcaggctgtagtccatgatcttgaaactttccaggacctggcgggatcgggcaggaacacgccacgccgtcagccgtctctat

SEQ ID NO: 187996 - DNA, 30 bp, Homo sapiens
  chr19:3669423-3669453
  hypo
tgggtgcggagtccgcggtgcagacggggg

SEQ ID NO: 187997 - DNA, 223 bp, Homo sapiens
  chr19:3669698-3669921
  hypo
tatcagccctgccagcgcccctcggcccccatgggcactgtgctgctctcggtgggtgcacgggagacccacgtgtgtcccatccagaggctgcaccccggtgaccgccctgccgtctgaaaacacgtccaccgcgggcactgaaggcaactgaatgcgacttggtggagcagcccatagctttgctctgctgccgggtcagaactgccggagacaagacgaa

SEQ ID NO: 187998 - DNA, 138 bp, Homo sapiens; identical to SEQ ID NO: 130469
  chr19:3670990-3671128
  hypo

SEQ ID NO: 187999 - DNA, 72 bp, Homo sapiens; identical to SEQ ID NO: 130471
  chr19:3671893-3671965
  hypo

SEQ ID NO: 188000 - DNA, 56 bp, Homo sapiens; identical to SEQ ID NO: 130472
  chr19:3672066-3672122
  hypo

SEQ ID NO: 188001 - DNA, 193 bp, Homo sapiens
  chr19:3676225-3676418
  hypo
ctgatggtccccaccgggaagtgatgagagatgtgaactcaggtacctgcccggccctgcagccccaagcccagcgagtcgccgtaaactgtcacccggtacatccgcggtccccggcacccaccactcccagcacaccctggtgagtggcccgcccgggcttggttctgagccctgcggtgtttgggttcgg

SEQ ID NO: 188002 - DNA, 35 bp, Homo sapiens; identical to SEQ ID NO: 95865
  chr19:3680258-3680293
  hypo

SEQ ID NO: 188003 - DNA, 45 bp, Homo sapiens; identical to SEQ ID NO: 31860
  chr19:3691223-3691268
  hypo

SEQ ID NO: 188004 - DNA, 88 bp, Homo sapiens; identical to SEQ ID NO: 95867
  chr19:3694858-3694946
  hypo

SEQ ID NO: 188005 - DNA, 30 bp, Homo sapiens; identical to SEQ ID NO: 95868
  chr19:3701675-3701705
  hypo

SEQ ID NO: 188006 - DNA, 396 bp, Homo sapiens
  chr19:3709473-3709869
  hypo
cagagaggggaggggtcggcagcaaaagtgtttttctgggtcatttgctcccaaatgggaagaccaagggagcttcctcgtgagccaagtgtccgattgcatctcaagtctctctccagaaccaagagggtcccccggggccgaggaggcatggatgatcgcatagtgggggacagagcggcccggcatttggggtcaccttgtggctgtgtggctgcagagctcccagggagcaggcttgcttgagattcgggagtccgtgggggtgggcgacatggatcccaccttgcctgggttttgagagcaaacccgtggactcagttagatctggcttccacacctcccttctctccgggcctctgtttcctgctctgtaaaatggggatattgagggcc

SEQ ID NO: 188007 - DNA, 161 bp, Homo sapiens; identical to SEQ ID NO: 95870
  chr19:3728586-3728747
  hypo

SEQ ID NO: 188008 - DNA, 213 bp, Homo sapiens; identical to SEQ ID NO: 95871
  chr19:3730409-3730622
  hypo

SEQ ID NO: 188009 - DNA, 31 bp, Homo sapiens; identical to SEQ ID NO: 95872
  chr19:3731830-3731861
  hypo

SEQ ID NO: 188010 - DNA, 96 bp, Homo sapiens; identical to SEQ ID NO: 31863
  chr19:3739004-3739100
  hypo

SEQ ID NO: 188011 - DNA, 399 bp, Homo sapiens; identical to SEQ ID NO: 95874
  chr19:3740454-3740853
  hypo

SEQ ID NO: 188012 - DNA, 328 bp, Homo sapiens; identical to SEQ ID NO: 31865
  chr19:3747811-3748139
  hypo

SEQ ID NO: 188013 - DNA, 30 bp, Homo sapiens; identical to SEQ ID NO: 95876
  chr19:3750798-3750828
  hypo

SEQ ID NO: 188014 - DNA, 30 bp, Homo sapiens; identical to SEQ ID NO: 31866
  chr19:3751531-3751561
  hypo

SEQ ID NO: 188015 - DNA, 30 bp, Homo sapiens
  chr19:3753791-3753821
  hypo
tcttgtagaggcggcggccgtggtcctggg

SEQ ID NO: 188016 - DNA, 43 bp, Homo sapiens; identical to SEQ ID NO: 31867
  chr19:3754227-3754270
  hypo

SEQ ID NO: 188017 - DNA, 308 bp, Homo sapiens; identical to SEQ ID NO: 31868
  chr19:3767180-3767488
  hypo

SEQ ID NO: 188018 - DNA, 402 bp, Homo sapiens
  chr19:3770612-3771014
  hypo
gcaggctcaggctggcggccaggccctgtccagagcctgtgcatgttccttggccagcagccgcagggacgcctcctccagggcgaagccatctgcgaaggtgggagcaaaggcatgaggcccgaaggacgcttgcagccccgggcccgggcccaggaggcgggggaggcctggcacggccggcggtccggggcccaaccagggctccaggggcagcgacatggccggggggcgggcgaacggcagcgctggggcctcggggagtctcggagctgccacggcacccgagcctgactccagccgctcctggcggcgccacttggcccggcggttctggaaccacacctggagggtgcgagagggaaggggggttgctgtgagctcagccgctccccgccaatc

SEQ ID NO: 188019 - DNA, 142 bp, Homo sapiens
  chr19:3771586-3771728
  hypo
ggtagtgagaggcctcgaacgcccgctccagctggtgcagctggtaggtggtgaaggtggtgcggttcctccggtgcttcttcttgggggcctcctcgcccggccccagacccccaccctcggttgccggcccctcgcccgg

SEQ ID NO: 188020 - DNA, 30 bp, Homo sapiens
  chr19:3773877-3773907
  hypo
ccaggcgtgagccaccgcgaccagtcgggt

SEQ ID NO: 188021 - DNA, 30 bp, Homo sapiens
  chr19:3774635-3774665
  hypo
gccccagagtagtcccggtcggatcccagg

SEQ ID NO: 188022 - DNA, 566 bp, Homo sapiens
  chr19:3777967-3778533
  hypo
agagtccttagaatccgtctttatcgggcgatcatccttcgcaggtctggggtgtccacgggccgcccagagccccctacgtgggccagcccctgctgtgggcaccaggaggatgacttgcccgcctggaccctccttgggcctggtcagtgcccccacgccgcactctccactctctcggtcctctggggccaagggccccaccgggtggggtcagggctcctggcttcggggcgaggtggagccgtcggcgtcctgccctgagacggaggctggggcacctgcactgcgtagctcccgggccagcttctcggccagtttgcggaagggtggccggcgggcgggctctgcctcccagcagctgctcatgaggacgtgcacggggcctggacagccctcggggggttccatgcggtaccccttctccacggcctccgacacctctttcagtgactgcggacagcaggcgtgggcaggggtcagggccacagcctctggacctgcccggaacccagtgcctccctgggacccccgctcaccattttagggtacggagcccgtccata

SEQ ID NO: 188023 - DNA, 496 bp, Homo sapiens
  chr19:3778990-3779486
  hypo
ccgtgtttgagagcctcgggcgccgtccacttgacgggcagccggcttgagtctagccccttccgctcggctttggccaggccaaagtcgctgaccttggccaccaggtcctctgagaccaggatgttgcgggcggccaggtcgcggtgcacaagcttcttgctctccaggtactccatgccctcggccacgtgcctgggggtagtagggggcagtgggggctcaggtgccaggatgcccacattcagggctcagaaagctcggggtgcctggggccacaagctcacaaagcctccctgccccgtgcctcagtttccccttgatggatcttggaatctgcgccccgacgaccccagtgccgcagcaccctgagagtcccacttacagagaaaactgcaggagctgagcggtgttcacgagggctcgaccccgggtccgcagaaagttcaccaggttgccctgttgggggtgggagatggccgcgggatgttggggc

SEQ ID NO: 188024 - DNA, 345 bp, Homo sapiens; identical to SEQ ID NO: 11944
  chr19:3785490-3785835
  hypo

SEQ ID NO: 188025 - DNA, 356 bp, Homo sapiens; identical to SEQ ID NO: 55426
  chr19:3785864-3786220
  hypo

SEQ ID NO: 188026 - DNA, 28 bp, Homo sapiens
  chr19:3786583-3786611
  hypo
gcgcggcggggaccgggggtgagggaga

SEQ ID NO: 188027 - DNA, 386 bp, Homo sapiens
  chr19:3792899-3793285
  hypo
ggcctccatggaagccgtccccggcctagccgtcctcggctggaatctgcagttagatcacactgccccagttagcaaacctttaaatttagcttcctccccccagccaggggactccgggattgaggggaggaacgctggctctttcgaggaagaacgctgcatcactcattctgcaaccagtcgctgtctgcccggccattctcgattccttgaacgaagggcctcttggggcgagctgctttgggcgtctttgctggaaaacccttgccccgtcttcctcgtccttaagacgcagccggacaggttgttttccagccacacttgcaggtttcatccgtggaaactgggtctgtgtcacatccggccttaaaagcttcccggct

SEQ ID NO: 188028 - DNA, 40 bp, Homo sapiens; identical to SEQ ID NO: 95888
  chr19:3807697-3807737
  hypo

SEQ ID NO: 188029 - DNA, 304 bp, Homo sapiens
  chr19:3816597-3816901
  hypo
gagcgcaaggggctgcggggagagggctggcagccagacgccagaagcagcgatgagcagggccctgaccttacctggagctgccggggcagctgctgggcgatcctccgcagcaggctgtgcgtgggcttctcggagcagagcagagcgaggcgcacgttcctgtccccacgcaggaggaggcctttcgccaggatgcctactcgcatgacgcctttcaggacccgagtctggggggcaacgctgctgtggggacaaagccacagacgtgcgccatcagcggagagacgcggggtaccccagc

SEQ ID NO: 188030 - DNA, 30 bp, Homo sapiens
  chr19:3820245-3820275
  hypo
cgcgtggggcggcacgtcctggggtggctc

SEQ ID NO: 188031 - DNA, 30 bp, Homo sapiens; identical to SEQ ID NO: 31877
  chr19:3821080-3821110
  hypo

SEQ ID NO: 188032 - DNA, 136 bp, Homo sapiens; identical to SEQ ID NO: 130484
  chr19:3821973-3822109
  hypo

SEQ ID NO: 188033 - DNA, 69 bp, Homo sapiens; identical to SEQ ID NO: 130485
  chr19:3822134-3822203
  hypo

SEQ ID NO: 188034 - DNA, 136 bp, Homo sapiens; identical to SEQ ID NO: 95892
  chr19:3823137-3823273
  hypo

SEQ ID NO: 188035 - DNA, 30 bp, Homo sapiens; identical to SEQ ID NO: 95893
  chr19:3823650-3823680
  hypo

SEQ ID NO: 188036 - DNA, 287 bp, Homo sapiens
  chr19:3827472-3827759
  hypo
tggtgcttggatccccggatgtgggccgcgtaggcgtccgccccggtgcaggacacggcgcacaggtcgcaatgcagctgcgcctgcaccccgcgcgggctcccgttgggctgcacgcctgtcttctgggccgcctccttctttctgtgcttctgccctcccagatgttcccggtaggtctgcggcaaggggtgagaggcagcctgggcgggggtttgcacactggccactgtcccctcccctgcaggcccccggcttagcgcgagggaactcggtggtaacagagg

SEQ ID NO: 188037 - DNA, 31 bp, Homo sapiens; identical to SEQ ID NO: 95894
  chr19:3830871-3830902
  hypo

SEQ ID NO: 188038 - DNA, 30 bp, Homo sapiens; identical to SEQ ID NO: 95895
  chr19:3838197-3838227
  hypo

SEQ ID NO: 188039 - DNA, 846 bp, Homo sapiens
  chr19:3855406-3856252
  hypo
aaagtgaaagcagtcccgggcgatccggcggcagattcattgagtcattggataaatacttcctgggtgctagtggggaccagctgctgtcatgggcgctgtcacagcagcggggaataaccagaccaaagtcccgtcctccaggagggtgctgcgcgatagtccagggagacacggggtcagcaaaataattcaacgcgatctgatggttctcatgccgccgggaaggacgcggcaagggggtgtgagcagggggttgcactttctcacgggctggtcatggcgggcctggtgggtgaggaggagggtgaagacacaaagttggggaaacagggcagcgcatttgagcagagggaattgcatgggaagggcctgagggtgaagtgcccggaacctggattggtccagaaggcagcgtgactagagcggaaggaatgaggggagatggggtcagagaataaagggtgtggaacagggggcagaggacaccatgatggatgtcacaggccatcgtaggggctccagcttgtcccctgagaccccacgggggtttccagcggaggagggacatgggctacgttgtgatggggcctctttggcgctgtgcgcggatggaaatgggggcgagagcagaaggaagcgtgaaggtccaaaatacagacgaggcaggctggtgcgcggtggaggcggtgcgcgtgcaggggcgtgcgctcaaggtcagaagaaggaaaggaggccagcctggcttcccattttgggatctgcacgaaggactgccggcggccctgcctgccgcggggaagccagcaggatgaaggggttttggagaagcgtgcaggcgcttgg

SEQ ID NO: 188040 - DNA, 32 bp, Homo sapiens
  chr19:3885950-3885982
  hypo
gcctggttccatctccgcgtcctcctctcccg

SEQ ID NO: 188041 - DNA, 602 bp, Homo sapiens; identical to SEQ ID NO: 31880
  chr19:3907668-3908270
  hypo

SEQ ID NO: 188042 - DNA, 27 bp, Homo sapiens
  chr19:3941641-3941668
  hypo
tttttgttgttgttgtttagacggagt

SEQ ID NO: 188043 - DNA, 30 bp, Homo sapiens
  chr19:3954199-3954229
  hypo
cctgaaagccgaattcgacaggccagattc

SEQ ID NO: 188044 - DNA, 30 bp, Homo sapiens
  chr19:3954523-3954553
  hypo
gctccttggccgcaccgctccaatctctgc

SEQ ID NO: 188045 - DNA, 30 bp, Homo sapiens; identical to SEQ ID NO: 95899
  chr19:3958329-3958359
  hypo

SEQ ID NO: 188046 - DNA, 30 bp, Homo sapiens; identical to SEQ ID NO: 95900
  chr19:3959043-3959073
  hypo

SEQ ID NO: 188047 - DNA, 881 bp, Homo sapiens
  chr19:3966071-3966952
  hypo
catctggccagtatccgcattttaaagaaaccaaggctgagaaaaggaaagcaactagcccaaggtcatgcagtcagtcagtggcgggaggattcaaaccttcaaaccaggtgctgcaggctccagagcccaggtgctctaacaggaagcagacagctgctgctgggtaccgggttcctgcgtgcctacctcccggctccacgctgtctcctgctaacagacccagctgtcccagggcagcctttgccgctcactctcagtctgtgggactcagtggcccaggaaaggggtggaaggggacacgactggacctgggcaagcagaaaaccacgccttccagcccaaagagaccggtccagtccacagggctctgaacgcctgctgggaagagaggatctctctctccctctgctgggcttggatccaggctcgcggcaggggccaccacgtagaaggctacctaagaagcctgcctaagaacagaccaggccaggagaggggagccaccaggcactgcgggtggcacataagccccgtcattcactctgccagggcgcctcctccatgctggagtggacttcggccccggggacacagggcaccatatgcaccagcacccagtcacacctgcggccgctgcacacctggacaacctggttctgtaaaccacgcctttccctgttttgctattgccaaccagatttcaggttctgccactgagtcctcctacagcaacagcagaccacagccgcccacctccagacagcccccggtctcactggccacagacttgctccttagaggcaaggccactggcaggctctcagttcctctacggaatgtgaaacgtgcctcatctccccagccgggaaagaaactcc

SEQ ID NO: 188048 - DNA, 30 bp, Homo sapiens; identical to SEQ ID NO: 95902
  chr19:3977636-3977666
  hypo

SEQ ID NO: 188049 - DNA, 150 bp, Homo sapiens
  chr19:3978024-3978174
  hypo
cctttatcgatgtcctcggccaggccgtcggggaagggccgcgccttcatgtacagccggttgtgcttgttgggggacttggagaggcagagcacgttcgactcttcactgaccgtctcgcggtacgagacgaccgggtcagatttctgc

SEQ ID NO: 188050 - DNA, 77 bp, Homo sapiens; identical to SEQ ID NO: 95904
  chr19:3979327-3979404
  hypo

SEQ ID NO: 188051 - DNA, 108 bp, Homo sapiens; identical to SEQ ID NO: 95905
  chr19:3979895-3980003
  hypo

SEQ ID NO: 188052 - DNA, 921 bp, Homo sapiens
  chr19:3982273-3983194
  hypo
tctactttcttggcccgctcggcaggccccaactggccctcccccttggcggcgaacttggccacatacatctcggcaaactgcttcagggtgaaggcccacccgtggaggccagacccaaagcccacggtaccgaggacaggatcgatctggaagtgtgagaaacgagaagcagccgtgagggcccctgcgcagagcctgaagctacgggctgggcgccttgggcatgggcctcagacgcaggctttcttcagtagacatctggtcaaagtgaagaaatgatcagtcatcacgaataggggggccagcccctccaccacccagggcagcgttccctgagctcgtctcttccagctgcccaaagatcaagggctgggtcaagtcggatgaaaacattccagcccccttctctgtcacccaacattcctggcaaaaacacacttccagtccccctcagctcaactccactccccaccggctcctgcagatcccgctgcggcaagcccaccacccagctagggagggccgtaccatgatgttgcccatggggccgctctcgccctcgccgtaggtggagatgatgacgttcacgttctccacgatgcgctggaaagtctggtagagctcctcgggctccagctgcagctccagcagggcgcggtccatcttgttcatcatcagcacaggcttgatgcgctcggcaatggcctgccgcagcactgtctccgtctgcacgcacacgcctggggacacgggggacagggcggcgctgtcatcctcaagcaaggatggcccccggttccaggccgtgcctcagggggacccactgcttacctgacacgcagtccaccaccaccaatgcgccatcggtgactcggagggcagcagtcacctccgaggagaagtcgacatgcccggggg

SEQ ID NO: 188053 - DNA, 41 bp, Homo sapiens
  chr19:3994549-3994590
  hypo
tgggagcgtgcaggccgggcgcggtggctcacgcctgtaat

SEQ ID NO: 188054 - DNA, 40 bp, Homo sapiens
  chr19:3994889-3994929
  hypo
tttcaggttaggctatacaagacatcgtggcaggtcccag

SEQ ID NO: 188055 - DNA, 34 bp, Homo sapiens
  chr19:3997223-3997257
  hypo
gattacaagcttgagctaccgcgcccagctcata

SEQ ID NO: 188056 - DNA, 30 bp, Homo sapiens
  chr19:3997821-3997851
  hypo
cgtgacccaccacgccgggacctttaatta

SEQ ID NO: 188057 - DNA, 30 bp, Homo sapiens
  chr19:4029129-4029159
  hypo
gatcgatcaggggccgcctgtcactctggg

SEQ ID NO: 188058 - DNA, 30 bp, Homo sapiens; identical to SEQ ID NO: 95907
  chr19:4031614-4031644
  hypo

SEQ ID NO: 188059 - DNA, 997 bp, Homo sapiens; identical to SEQ ID NO: 95908
  chr19:4032608-4033605
  hypo

SEQ ID NO: 188060 - DNA, 33 bp, Homo sapiens; identical to SEQ ID NO: 95909
  chr19:4033631-4033664
  hypo

SEQ ID NO: 188061 - DNA, 370 bp, Homo sapiens
  chr19:4037866-4038236
  hypo
ctgctgaccccggccgcacactcgactttcctggtgctcaccacgcagaggggcacgggccagcctcgggcgcagagggaggagtgacctttctttttctttttattgtcgttcgttttgtttttccacccttttgcctggctcctggcacctgtacctctggactctcctatcgggggattaaaaaaaaaagtaaaatgacaaaaaaagatacaaaaaagaaaaatgaaacaaaaaagtcaaactcttaaaaacaaggccggccacccacacagccgcctccccggctggagtccgagccgggaaggggtagtgggcgggagggaccaggacgccgccccgcgccctcccctccggatgccccgccgcc

SEQ ID NO: 188062 - DNA, 30 bp, Homo sapiens
  chr19:4038474-4038504
  hypo
gggggtacagtgggcggctggggagggttt

SEQ ID NO: 188063 - DNA, 909 bp, Homo sapiens
  chr19:4042779-4043688
  hypo
accccgcctggggcctcgggaaagcctggagccagtggtgcccagggcccagccctggattctgctgacaactcgcccggccggttctccctgctgcccctctggccttatcctgtgccagctgcctgcccgcgccaggggctatgggtcaccttccccgcaagaggggcctctggacctgggtactcctcggacactcacccccaccccggtgctctgggtcaccatccacacccagcctctctgccacgcgacagacggaccccagagagatgggcctggcttccaaggccgggcaggaagagcaggaagggtcggggacctggggcttctctccttgggacccaggatccggtcaccctgggcccaaaggtgtggtgtggacgaggtgctcaacccacccagtctcttcagggccaaaaggggaaaagggggaccccccccaagccccccatccccgctccccagcctcccccgaacaaaacacagagaacatcaaatgaggcgactgaggcggcagcggtcgtaacaggctgcgtttagtggttctttttttttttttatgtacaagaaaaatgaatttttttgttttttcatcttttgtgtttttgtttgttttttattacttttaaagcttctccctccccactcccaaaaagtgcatttttatcagttttttttttttttaaatctcccacactttataaagactctcaatacagtctctggaatgtctatctgtctgtgctctgtaccctgagggcgccgccccgccccccattcaccaggcctggcccctccaaagtccaaggcacctcgattctgggcctggggtggggtggggggcgggacctgggcatcggatcctggtccacagcctccaggcagccccggcgagggatgggggtc

SEQ ID NO: 188064 - DNA, 30 bp, Homo sapiens
  chr19:4044087-4044117
  hypo
ctcctgccacggccccggggtctgaatcgt

SEQ ID NO: 188065 - DNA, 126 bp, Homo sapiens; identical to SEQ ID NO: 95914
  chr19:4044503-4044629
  hypo

SEQ ID NO: 188066 - DNA, 133 bp, Homo sapiens; identical to SEQ ID NO: 95915
  chr19:4044932-4045065
  hypo

SEQ ID NO: 188067 - DNA, 189 bp, Homo sapiens
  chr19:4046237-4046426
  hypo
acaaacacctcggggcgtctcccaggtcccctgcgatggcttcctcctgaaccccccttctcgctttttggggaacagaagtggattctacgtttgtggtgggtttttttttttattattttgtacaaaaataaatcgacttttaggaatttcttctgctctcgctctctctctcgctctctctctcgc

SEQ ID NO: 188068 - DNA, 48 bp, Homo sapiens; identical to SEQ ID NO: 31886
  chr19:4047770-4047818
  hypo

SEQ ID NO: 188069 - DNA, 30 bp, Homo sapiens; identical to SEQ ID NO: 31887
  chr19:4048060-4048090
  hypo

SEQ ID NO: 188070 - DNA, 83 bp, Homo sapiens; identical to SEQ ID NO: 95918
  chr19:4050361-4050444
  hypo

SEQ ID NO: 188071 - DNA, 1665 bp, Homo sapiens; identical to SEQ ID NO: 11950
  chr19:4053793-4055458
  hypo

SEQ ID NO: 188072 - DNA, 237 bp, Homo sapiens
  chr19:4062302-4062539
  hypo
gaggggcgccttctgcgctttggggctctggactcggcgctcggggcccaagggccagagccgctcctcggagcagctgggggaggctgggccttgataatcgccccagagacccacggtacgtgacggcacccacagcgctggaaggcaggatctgtgtctgtgccccattttgcaaacggggaacgggatcagagagggggagcagcttggccagggtcgcgcagcagaactgga

SEQ ID NO: 188073 - DNA, 30 bp, Homo sapiens
  chr19:4062843-4062873
  hypo
gcattcccaatgagccgctgagcgaaccct

SEQ ID NO: 188074 - DNA, 98 bp, Homo sapiens; identical to SEQ ID NO: 55437
  chr19:4064871-4064969
  hypo

SEQ ID NO: 188075 - DNA, 40 bp, Homo sapiens; identical to SEQ ID NO: 95921
  chr19:4093666-4093706
  hypo

SEQ ID NO: 188076 - DNA, 600 bp, Homo sapiens
  chr19:4094511-4095111
  hypo
ggcaggaccgggaggcggtggaggagacaagacagggcagtcagctggtggccccggggcacccgcgtgtgggccgtggtcggagggggcctggatctctccgaccagagagagtggcacagagtggctgctctgttctgcctcctggcagaggacgagggatccacctctgcactttggtgccaggggcaggacaccccccagcgggagggtgagagggaaagagggtgggaaaccccgcctggtgggtcagaagcctggacgcaaccccagctaactgtctaataaaaccccaggcccggggcaacatcgccggagcgcacgccaagggcccggggcaactccggcaccaggagtgcggtgccgttccacggcgtcccgagctcacacacatggaccggccctgtgggcagcggggtgtccgcagctccttccccgtggtctgcggcacatgcctgtgaagcccacgccacaggtgctgctgggtgcttgggggcaggagaatggagtggggctggcgaccctcccagaacctgcgggcggatcccggggagcccacagtcagcacaccaggggtccggggaccagacagaggcttct

SEQ ID NO: 188077 - DNA, 30 bp, Homo sapiens
  chr19:4095544-4095574
  hypo
ccctgcaggcctggccgacaccacatgcca

SEQ ID NO: 188078 - DNA, 632 bp, Homo sapiens
  chr19:4096064-4096696
  hypo
gcccggccaaactgggtccacagttttaagcccaagcactggggagcctggcctgacacacgtccccggagcgggagtggccgtgtaagcggtgccagcagggcaggggcaggcctttcccgcgcaggggcaggggcgggaagaggcgggggagaggtcgggggatgtgctcactgggcatgggtgtggctgctaggtgcagggagagctgggtcaccagggccaccccacctggctccgtcatcatctcgccacccaaccccaggcctagcccagtctgcaggcagctcaaatgcccgtttctctgccccagctccaaagggccaccaaagacacagaaacccacagaaggcccagggaggtggcccggcctggtcacgtggccaacaggaccttggggtgcagtcctgtgcctccctgacagctgcaggcctggaaggaggccgcgtccctccttgtgccttgttttactcatctgggcggtggaaaccctcatactgtggctcactgggttgttatggggactgacggagcaggagccaccccgggacctacaggtccttctaggctctctgggcctccttccaagaggcaagggccattcctgtacctttctccgtggaagcggggtg

SEQ ID NO: 188079 - DNA, 30 bp, Homo sapiens; identical to SEQ ID NO: 95924
  chr19:4101197-4101227
  hypo

SEQ ID NO: 188080 - DNA, 30 bp, Homo sapiens
  chr19:4101499-4101529
  hypo
ggccgcagtgccgccgatgccactactgcc

SEQ ID NO: 188081 - DNA, 31 bp, Homo sapiens; identical to SEQ ID NO: 31892
  chr19:4111004-4111035
  hypo

SEQ ID NO: 188082 - DNA, 241 bp, Homo sapiens; identical to SEQ ID NO: 95926
  chr19:4116486-4116727
  hypo

SEQ ID NO: 188083 - DNA, 190 bp, Homo sapiens; identical to SEQ ID NO: 95927
  chr19:4116973-4117163
  hypo

SEQ ID NO: 188084 - DNA, 24 bp, Homo sapiens
  chr19:4129629-4129653
  hypo
gaatcatccttctggccgggcgcg

SEQ ID NO: 188085 - DNA, 31 bp, Homo sapiens
  chr19:4144137-4144168
  hypo
tccaggtgagagggtccgctgtgacccttgg

SEQ ID NO: 188086 - DNA, 144 bp, Homo sapiens
  chr19:4168248-4168392
  hypo
gcctcccaaagtgctgggattacaggcgagagctactgcccccggactccaagtggggactttctggcctgaaaccctcctccccatttcacttggcagtacgaggagcgagtgctgaaaaaaatccgccggaaaatccggaac

SEQ ID NO: 188087 - DNA, 378 bp, Homo sapiens; identical to SEQ ID NO: 95929
  chr19:4175002-4175380
  hypo

SEQ ID NO: 188088 - DNA, 141 bp, Homo sapiens; identical to SEQ ID NO: 130505
  chr19:4198020-4198161
  hypo

SEQ ID NO: 188089 - DNA, 30 bp, Homo sapiens; identical to SEQ ID NO: 130506
  chr19:4198462-4198492
  hypo

SEQ ID NO: 188090 - DNA, 30 bp, Homo sapiens; identical to SEQ ID NO: 95931
  chr19:4207436-4207466
  hypo

SEQ ID NO: 188091 - DNA, 30 bp, Homo sapiens; identical to SEQ ID NO: 95932
  chr19:4217744-4217774
  hypo

SEQ ID NO: 188092 - DNA, 30 bp, Homo sapiens; identical to SEQ ID NO: 95933
  chr19:4218047-4218077
  hypo

SEQ ID NO: 188093 - DNA, 26 bp, Homo sapiens
  chr19:4235005-4235031
  hypo
aagctgtcgcacacccgtttttgttg

SEQ ID NO: 188094 - DNA, 174 bp, Homo sapiens
  chr19:4236965-4237139
  hypo
agggctgtgcggccccgagccaggtactacgtccaagtggcggctcaggacctcacagactacggggaactgagtgactggagtctccccgccactgccacaatgagcctgggcaagtagcaagggcttcccgctgcctccagacagcacctgggtcctcgccaccctaagccc

SEQ ID NO: 188095 - DNA, 30 bp, Homo sapiens
  chr19:4237416-4237446
  hypo
tcactgggaagccgacgtgggagggtagct

SEQ ID NO: 188096 - DNA, 230 bp, Homo sapiens; identical to SEQ ID NO: 130511
  chr19:4278855-4279085
  hypo

SEQ ID NO: 188097 - DNA, 115 bp, Homo sapiens; identical to SEQ ID NO: 130512
  chr19:4279316-4279431
  hypo

SEQ ID NO: 188098 - DNA, 569 bp, Homo sapiens; identical to SEQ ID NO: 130513
  chr19:4279567-4280136
  hypo

SEQ ID NO: 188099 - DNA, 137 bp, Homo sapiens
  chr19:4290462-4290599
  hypo
catctgaagttcgcgcggacccgtgagaaccaggtggtgctgggccaacacagcgggcccttccccagcgtgcccgagctcgtcctccactacagttcacgcccactgccggtgcagggtgccgagcatctggctct

SEQ ID NO: 188100 - DNA, 103 bp, Homo sapiens
  chr19:4292186-4292289
  hypo
atctttttagcactcccaaatcgccacaaacaccagctttgctttttcttcacaagcctttattaggttcttgggggaaagtgggagcgagatccatcattac

SEQ ID NO: 188101 - DNA, 30 bp, Homo sapiens
  chr19:4292663-4292693
  hypo
ccctgaccatagagacggggtggccgggcc

SEQ ID NO: 188102 - DNA, 31 bp, Homo sapiens; identical to SEQ ID NO: 95937
  chr19:4295628-4295659
  hypo

SEQ ID NO: 188103 - DNA, 237 bp, Homo sapiens; identical to SEQ ID NO: 55447
  chr19:4304481-4304718
  hypo

SEQ ID NO: 188104 - DNA, 22 bp, Homo sapiens
  chr19:4311388-4311410
  hypo
gtctccatggccgggcgcggtg

SEQ ID NO: 188105 - DNA, 332 bp, Homo sapiens
  chr19:4311898-4312230
  hypo
tggtgtggcgcatgccggatgaggacagcaagattgaccactacgtgctggagtaccggcggaccaacttcgagggcccgccccgcctcaaggaggaccagccctggatggtcatcgagggcatccggcagacagagtacaccctgacaggtaagggcagtgtgtgccagctccgcccagctgtgaacagccacctcttccagcctcccgtctcgccatcagtcactgggggccttggggacgatccccaaagctcatggggtctggaagcagcctggggaggtggatcagaaatatgagacagtggccaggcgcggtggctcatgcctgta

SEQ ID NO: 188106 - DNA, 115 bp, Homo sapiens
  chr19:4322985-4323100
  hypo
acacgctgatcgacggcggggagcattactgggaggtgcgctacgagccggacagcaaggcgttcggcgtgggcgtggcctaccgcagcctgggccgcttcgagcaactgggcaa

SEQ ID NO: 188107 - DNA, 30 bp, Homo sapiens; identical to SEQ ID NO: 95940
  chr19:4358860-4358890
  hypo

SEQ ID NO: 188108 - DNA, 30 bp, Homo sapiens; identical to SEQ ID NO: 95941
  chr19:4360025-4360055
  hypo

SEQ ID NO: 188109 - DNA, 43 bp, Homo sapiens
  chr19:4360668-4360711
  hypo
tcccacagggtgaagtggcagcggctcagcaaggggagcctgg

SEQ ID NO: 188110 - DNA, 754 bp, Homo sapiens; identical to SEQ ID NO: 31895
  chr19:4361146-4361900
  hypo

SEQ ID NO: 188111 - DNA, 394 bp, Homo sapiens
  chr19:4371566-4371960
  hypo
aaagaagaaagccagcgtgggggagggcaagggagggctgctgtggcccagcctgcagggatgcgccacatttgcccgcagaggggtcggccccagggtcctcaggtctcactggcagtcatgctgtggtgcttggtaatttccaggttcacagcagagttcacgggtcctccctcggctggggagcgggtctctggctggtgtctgcctgcccgtcggcatcggtggtgctgtggtgctgcacgctgtgctacagagccatctccgcgtccctccctgcagtcctcctcagcggaatctgtgagcgcacagaccacaggggcctcgcccagtgccaggcacagagcggagaaatggcaggtgggcacggctggtcaaccgcagcgaatacctg

SEQ ID NO: 188112 - DNA, 30 bp, Homo sapiens; identical to SEQ ID NO: 95944
  chr19:4377883-4377913
  hypo

SEQ ID NO: 188113 - DNA, 30 bp, Homo sapiens
  chr19:4398645-4398675
  hypo
aggcatgagccaccgcgcccggccaaattt

SEQ ID NO: 188114 - DNA, 31 bp, Homo sapiens; identical to SEQ ID NO: 31897
  chr19:4409230-4409261
  hypo

SEQ ID NO: 188115 - DNA, 49 bp, Homo sapiens
  chr19:4419787-4419836
  hypo
ggaacctccgagtcccgcacaccgggttggggagcggagaaagtatcca

SEQ ID NO: 188116 - DNA, 62 bp, Homo sapiens; identical to SEQ ID NO: 31898
  chr19:4429585-4429647
  hypo

SEQ ID NO: 188117 - DNA, 149 bp, Homo sapiens; identical to SEQ ID NO: 11957
  chr19:4432844-4432993
  hypo

SEQ ID NO: 188118 - DNA, 186 bp, Homo sapiens; identical to SEQ ID NO: 95948
  chr19:4442912-4443098
  hypo

SEQ ID NO: 188119 - DNA, 30 bp, Homo sapiens; identical to SEQ ID NO: 95949
  chr19:4445070-4445100
  hypo

SEQ ID NO: 188120 - DNA, 30 bp, Homo sapiens; identical to SEQ ID NO: 95950
  chr19:4446016-4446046
  hypo

SEQ ID NO: 188121 - DNA, 416 bp, Homo sapiens; identical to SEQ ID NO: 95951
  chr19:4446321-4446737
  hypo

SEQ ID NO: 188122 - DNA, 30 bp, Homo sapiens; identical to SEQ ID NO: 31902
  chr19:4475259-4475289
  hypo

SEQ ID NO: 188123 - DNA, 238 bp, Homo sapiens; identical to SEQ ID NO: 95953
  chr19:4483096-4483334
  hypo

SEQ ID NO: 188124 - DNA, 30 bp, Homo sapiens
  chr19:4483562-4483592
  hypo
ccctcttgcccggccgcaacacccggtcac

SEQ ID NO: 188125 - DNA, 30 bp, Homo sapiens
  chr19:4494069-4494099
  hypo
ggggtcccctctggcggctcctccatcggc

SEQ ID NO: 188126 - DNA, 30 bp, Homo sapiens; identical to SEQ ID NO: 31904
  chr19:4502010-4502040
  hypo

SEQ ID NO: 188127 - DNA, 249 bp, Homo sapiens; identical to SEQ ID NO: 130527
  chr19:4523780-4524029
  hypo

SEQ ID NO: 188128 - DNA, 38 bp, Homo sapiens; identical to SEQ ID NO: 31905
  chr19:4544027-4544065
  hypo

SEQ ID NO: 188129 - DNA, 189 bp, Homo sapiens
  chr19:4547997-4548186
  hypo
ccttgcttcccgcccacggctggcctggggtggacactcacttcatacaccccgagtactgctggcagcgagccacaggcactcggaccacgcagcgggggaaggcagccagcaggccccccgaagctgcgtccagctccaagctcagcagccgctgccctgtctcgccaccgccgggccgtccacacc

SEQ ID NO: 188130 - DNA, 153 bp, Homo sapiens
  chr19:4550223-4550376
  hypo
gtcatccggcaaggcgctggaggcattgtactgcatcccgggggctgcgcagcacccgggcctgggggtgacaagggtgtggtcaggacgaacgtaaaggttctcataaaggggcctgattcaccagaggtacccattgctttgcccaacgac

SEQ ID NO: 188131 - DNA, 333 bp, Homo sapiens; identical to SEQ ID NO: 95958
  chr19:4550675-4551008
  hypo

SEQ ID NO: 188132 - DNA, 39 bp, Homo sapiens
  chr19:4554409-4554448
  hypo
tagttaaactccatcgcaatctcccggaagaagaagtag

SEQ ID NO: 188133 - DNA, 63 bp, Homo sapiens
  chr19:4554998-4555061
  hypo
ttggagtcatgtttcacggtgcgcagggtgggcctgtccccgaggctgcggtagatgacagca

SEQ ID NO: 188134 - DNA, 254 bp, Homo sapiens; identical to SEQ ID NO: 95961
  chr19:4555920-4556174
  hypo

SEQ ID NO: 188135 - DNA, 459 bp, Homo sapiens
  chr19:4556912-4557371
  hypo
aatgccagggctgattcgcaggggccgggaccgagccagggccaactcacctcctgtttgcccttcatccgacacacgtttatgtcgctggggttagatctccaggtcagcttctgcagacagagagagctggtgagggggtaacgggtcccagcagccctgagtgaccccgccgtgctgggccgaatccacccagctccccggcgcagtgccgcgtccccctggccctacccctccactcccacctgcaccccttcctcaccctctggtaccgcagctccgtggacgtggggggctccagctctacgcggtagaggttgtccctgggggaggggcatagttagtgagaactgggggctccgccaccctctcccgttccatccttcccactgccaatgtggtgtgcacacgggggcatgcagggccatgccaatgcctctgacacgagcaactctagcg

SEQ ID NO: 188136 - DNA, 208 bp, Homo sapiens
  chr19:4566460-4566668
  hypo
tctggggttacccgacgcctgtgcgcctccccctatccccaagaccatctgcttctctccgtgaaactcgaggagcctctgccagcagccgctcggcgcctgcctgctcagaagcggccccaacacctgccacgctgcggctgccggacacctggtcacagggagccacggggctggcgggtgcgccccgtggcgtgcggggttctcc

SEQ ID NO: 188137 - DNA, 19 bp, Homo sapiens
  chr19:4572585-4572604
  hypo
cctcccctccactcttgac

SEQ ID NO: 188138 - DNA, 36 bp, Homo sapiens
  chr19:4578034-4578070
  hypo
gggatcacaggcgtgagccaccgccactgtcttact

SEQ ID NO: 188139 - DNA, 453 bp, Homo sapiens; identical to SEQ ID NO: 130529
  chr19:4580775-4581228
  hypo

SEQ ID NO: 188140 - DNA, 79 bp, Homo sapiens; identical to SEQ ID NO: 95967
  chr19:4627182-4627261
  hypo

SEQ ID NO: 188141 - DNA, 139 bp, Homo sapiens; identical to SEQ ID NO: 95968
  chr19:4670739-4670878
  hypo

SEQ ID NO: 188142 - DNA, 110 bp, Homo sapiens; identical to SEQ ID NO: 95969
  chr19:4672874-4672984
  hypo

SEQ ID NO: 188143 - DNA, 159 bp, Homo sapiens; identical to SEQ ID NO: 95970
  chr19:4675503-4675662
  hypo

SEQ ID NO: 188144 - DNA, 642 bp, Homo sapiens; identical to SEQ ID NO: 31911
  chr19:4676078-4676720
  hypo

SEQ ID NO: 188145 - DNA, 208 bp, Homo sapiens; identical to SEQ ID NO: 95972
  chr19:4678844-4679052
  hypo

SEQ ID NO: 188146 - DNA, 223 bp, Homo sapiens; identical to SEQ ID NO: 95973
  chr19:4679433-4679656
  hypo

SEQ ID NO: 188147 - DNA, 30 bp, Homo sapiens; identical to SEQ ID NO: 31912
  chr19:4682712-4682742
  hypo

SEQ ID NO: 188148 - DNA, 75 bp, Homo sapiens; identical to SEQ ID NO: 31913
  chr19:4683996-4684071
  hypo

SEQ ID NO: 188149 - DNA, 30 bp, Homo sapiens
  chr19:4684876-4684906
  hypo
ggcaggggagatgccggtgggctggggacc

SEQ ID NO: 188150 - DNA, 30 bp, Homo sapiens; identical to SEQ ID NO: 31914
  chr19:4685800-4685830
  hypo

SEQ ID NO: 188151 - DNA, 142 bp, Homo sapiens; identical to SEQ ID NO: 95977
  chr19:4687367-4687509
  hypo

SEQ ID NO: 188152 - DNA, 30 bp, Homo sapiens; identical to SEQ ID NO: 95978
  chr19:4691005-4691035
  hypo

SEQ ID NO: 188153 - DNA, 31 bp, Homo sapiens; identical to SEQ ID NO: 31915
  chr19:4693048-4693079
  hypo

SEQ ID NO: 188154 - DNA, 122 bp, Homo sapiens; identical to SEQ ID NO: 95980
  chr19:4697633-4697755
  hypo

SEQ ID NO: 188155 - DNA, 285 bp, Homo sapiens; identical to SEQ ID NO: 95981
  chr19:4714198-4714483
  hypo

SEQ ID NO: 188156 - DNA, 30 bp, Homo sapiens
  chr19:4755672-4755702
  hypo
gatagcgacaggtggcgaagtgtgcatatg

SEQ ID NO: 188157 - DNA, 33 bp, Homo sapiens
  chr19:4755950-4755983
  hypo
aaaaaaagggccgggcgcggtggctcacgcctg

SEQ ID NO: 188158 - DNA, 301 bp, Homo sapiens
  chr19:4789385-4789686
  hypo
gcagaagtttatagcagctttatttgtaatcatctaaaactggaaagaaccatcacgtaatggataaaagaatggtggctcgttcttgccatggaatacagctccgtaataaaaggcaacgaactgctaatacacgtaacagcatagatgcatcttgaatgcattgtgctgaatgaaagctgcagaccccagaggccgcatactgcatttttccgtttctgtgctgttagtatgaaacgcagagaacagatcagcagttaccagtggctgcgggtggacaaaggcgttgatcaacagggca

SEQ ID NO: 188159 - DNA, 30 bp, Homo sapiens
  chr19:4789969-4789999
  hypo
gtgagacaccgcgcccggccggcatgagat

SEQ ID NO: 188160 - DNA, 31 bp, Homo sapiens
  chr19:4794012-4794043
  hypo
tacctgcagacagggtcggaggtgttagcga

SEQ ID NO: 188161 - DNA, 30 bp, Homo sapiens
  chr19:4794676-4794706
  hypo
cgagataaaagtccacggtgtcaaccccta

SEQ ID NO: 188162 - DNA, 479 bp, Homo sapiens
  chr19:4795047-4795526
  hypo
agtacagtcttaatgcgataaatccactagctaagacgtcgagtgccaagaccagccttccagccgaggtttggacaaagtctcaggttcccgtgactcagggtaaggtgctggggctgccagaggacctgccccagcaagatttttgtcaagagcgagactccatcagcccaggcagacgggagcaggttcttggccagcgtagacagcagcaaacagcagcagggaagccattctcactgcatcctccctgcagtagccacggccaggcccttaggaggagcagtgaccgggggtgtccagaaatatcctgtccctggatggaaactaggtctcgtttggatttttttttttttttgccgtgttaggaaattatttattaatttacaagacaggttttaactcagccgaggtgggaaatggtgtccctgtccctcccaaagcacagagcacagaaatgaggccgtttacatggcgag

SEQ ID NO: 188163 - DNA, 121 bp, Homo sapiens; identical to SEQ ID NO: 95984
  chr19:4798238-4798359
  hypo

SEQ ID NO: 188164 - DNA, 160 bp, Homo sapiens; identical to SEQ ID NO: 95985
  chr19:4798598-4798758
  hypo

SEQ ID NO: 188165 - DNA, 727 bp, Homo sapiens; identical to SEQ ID NO: 95986
  chr19:4816439-4817166
  hypo

SEQ ID NO: 188166 - DNA, 606 bp, Homo sapiens; identical to SEQ ID NO: 95987
  chr19:4817457-4818063
  hypo

SEQ ID NO: 188167 - DNA, 30 bp, Homo sapiens; identical to SEQ ID NO: 31919
  chr19:4818344-4818374
  hypo

SEQ ID NO: 188168 - DNA, 81 bp, Homo sapiens
  chr19:4835677-4835758
  hypo
atactgaatattcttcgatctgattttcctttttaattcgcataggccagagttcagcaaactgtttgttgtaaaggacca

SEQ ID NO: 188169 - DNA, 146 bp, Homo sapiens
  chr19:4851494-4851640
  hypo
attaaagaagaatatcaaataaacagtgcagggagtgcgaatatgtgaccgagatgactggagtgggatgtctggcctggcgggaacaccagcattgttgtcacagttcagtgagatctcaagtttagtcacgtatttatgcagga

SEQ ID NO: 188170 - DNA, 167 bp, Homo sapiens
  chr19:4851996-4852163
  hypo
ggtcccagagcagcccgctggccacacttacccagttcggcatccgtaaggggcaggtggttgtccgcccactcctccgacttccccagcaccgtgtcgaccccactcaacaccatctggcccaagcgggagcccatgaccgattggacgccgccggtcactacgga

SEQ ID NO: 188171 - DNA, 30 bp, Homo sapiens; identical to SEQ ID NO: 95991
  chr19:4885981-4886011
  hypo

SEQ ID NO: 188172 - DNA, 30 bp, Homo sapiens; identical to SEQ ID NO: 31922
  chr19:4902561-4902591
  hypo

SEQ ID NO: 188173 - DNA, 35 bp, Homo sapiens; identical to SEQ ID NO: 95993
  chr19:4902799-4902834
  hypo

SEQ ID NO: 188174 - DNA, 30 bp, Homo sapiens; identical to SEQ ID NO: 31923
  chr19:4903937-4903967
  hypo

SEQ ID NO: 188175 - DNA, 220 bp, Homo sapiens
  chr19:4914579-4914799
  hypo
acgcagggagctgatcgagggcagtgactttgggcagacggcccagcctaggcaacgggagaggcatctgcggcccccacccctcaatcttttttttttttttggctgcacatcaaaataacaatagctgtcttttgcggcacctttaacctgctcgggtacaacgctctgcactgtacataatcttttcagcatccctggcccgcgactcgccagctcc

SEQ ID NO: 188176 - DNA, 30 bp, Homo sapiens; identical to SEQ ID NO: 95995
  chr19:4919640-4919670
  hypo

SEQ ID NO: 188177 - DNA, 69 bp, Homo sapiens
  chr19:4930782-4930851
  hypo
aggtggtcagggtgacgcggaaggccccctcccgggacgagccctgcagctccacgtccaggccggcgc

SEQ ID NO: 188178 - DNA, 30 bp, Homo sapiens; identical to SEQ ID NO: 95997
  chr19:4933031-4933061
  hypo

SEQ ID NO: 188179 - DNA, 151 bp, Homo sapiens
  chr19:4934646-4934797
  hypo
cctcctttttgtggccgagtgatagtacgtgacgtgttgtctataaacacgagcatcttggcaacggcgttccaagtacaggtacagcaagcacgcagaggtcctgggctgggacatttatggtgcatctgtggcccggtagggaggtcag

SEQ ID NO: 188180 - DNA, 192 bp, Homo sapiens; identical to SEQ ID NO: 95998
  chr19:4941803-4941995
  hypo

SEQ ID NO: 188181 - DNA, 130 bp, Homo sapiens
  chr19:4944358-4944488
  hypo
tggcctgtgtgggccgcaccaaggaatgtaccatcgtcccgtccaaccactacggacccatcccggggatccccgtgggcaccatgtggcggttccgagtccaggtacctgcagcgtcccggggctccag

SEQ ID NO: 188182 - DNA, 30 bp, Homo sapiens
  chr19:4953218-4953248
  hypo
ggctccacagttaacgaagagctgaatgca

SEQ ID NO: 188183 - DNA, 30 bp, Homo sapiens; identical to SEQ ID NO: 96000
  chr19:4954612-4954642
  hypo

SEQ ID NO: 188184 - DNA, 30 bp, Homo sapiens
  chr19:4958039-4958069
  hypo
ccgggtctcagaccccgtgtttgttttcat

SEQ ID NO: 188185 - DNA, 206 bp, Homo sapiens
  chr19:4962294-4962500
  hypo
gagacccaggagatgacggtgacgggctgaggtcctaaccgcagcctgggaggtgctgggctgttcactttgcagcgtcaagttgcaggggtcagcaaacgacagccaatgggacccaagtcaggacactgcctgtctgtaaataaagttttattgacaccaccacacccatttctttatgtatatagtggcgtttacgctaccat

SEQ ID NO: 188186 - DNA, 82 bp, Homo sapiens
  chr19:4973465-4973547
  hypo
ctgggattacaggcatgagccactatgctcggccaagttgcacatacttttactaattcgcgttcaaatgagcttaaccact

SEQ ID NO: 188187 - DNA, 31 bp, Homo sapiens
  chr19:4985733-4985764
  hypo
tgctggaacccagacccgccttcactgcccc

SEQ ID NO: 188188 - DNA, 470 bp, Homo sapiens; identical to SEQ ID NO: 96003
  chr19:4986363-4986833
  hypo

SEQ ID NO: 188189 - DNA, 82 bp, Homo sapiens; identical to SEQ ID NO: 96004
  chr19:4988234-4988316
  hypo

SEQ ID NO: 188190 - DNA, 21 bp, Homo sapiens
  chr19:4989936-4989957
  hypo
tataggcgtgagccacggtgt

SEQ ID NO: 188191 - DNA, 283 bp, Homo sapiens; identical to SEQ ID NO: 96005
  chr19:4990571-4990854
  hypo

SEQ ID NO: 188192 - DNA, 43 bp, Homo sapiens; identical to SEQ ID NO: 31929
  chr19:4991093-4991136
  hypo

SEQ ID NO: 188193 - DNA, 222 bp, Homo sapiens
  chr19:5013967-5014189
  hypo
gcacaggggaagaggcgcagcccgtggcccggcagtccaggacctgctgttcccttcctacccggggcggggcctgtgggaagatatggaagtcgggtgaatgagccgtgcccagtgattttaaaaagcagattaaaataacatagaaaatgtcagagctcattgcgtgctctagggcatttgtgaaacttgcattatttatttttttgagacagggtctcg

SEQ ID NO: 188194 - DNA, 152 bp, Homo sapiens; identical to SEQ ID NO: 96007
  chr19:5022643-5022795
  hypo

SEQ ID NO: 188195 - DNA, 675 bp, Homo sapiens; identical to SEQ ID NO: 96008
  chr19:5023034-5023709
  hypo

SEQ ID NO: 188196 - DNA, 31 bp, Homo sapiens; identical to SEQ ID NO: 96009
  chr19:5030563-5030594
  hypo

SEQ ID NO: 188197 - DNA, 135 bp, Homo sapiens; identical to SEQ ID NO: 96010
  chr19:5031055-5031190
  hypo

SEQ ID NO: 188198 - DNA, 524 bp, Homo sapiens
  chr19:5035320-5035844
  hypo
tttctggcttgggatccaaggcgtcctgatgtcaggacgttgaggggaatcagcatctcagaccgccctgcgctcttccgaggtgcctttaaatgcccgccccgtcacttcttcctcatccctcacctcccaccgggctccatgccccggtgtttccggctctctctgccctccacgtggcggccttgggtgcagcctgggttcccgggtggcctgtcctcccccgcgctggcacctccgcttcgtccctccctccctctgcctccttggctgccgcctctttgagccctcatgtcgctgcttcaggtttctgcactccccccaggccagttcccccgagattcttggcaccggcgtcttaagccagtgtggggagtatggtttccctgccttgcgttctgcgtgttccttcccatgcctctgcagcggcagctcccatgctgcttctccttgcaccagtgcagagaatcctttctcaaacccgtggagggggctgggcagtagggggccgtccgggtcccatg

SEQ ID NO: 188199 - DNA, 448 bp, Homo sapiens
  chr19:5037561-5038009
  hypo
gtctccagaaagagccggcgctaagctggactgtcctttccttgggaccggcctcatcttggtttaactctaaattagtgtttctcttcgcttggcactgtggacttggggccgcatcgttctctggggtggcgccatcctgggcattgcagggtgctgagcagcttccctggcctccatctacctcatgccaggagcaccctcagtcgtgaaagccacagacatccccagacatggccaggtgtcccctgggggacaagaccccccctcagttgagagccacctgctcgctgcggctgctgctgctgttactgcttttgctaaagaaacctgtgcatgccggccacggaggcagcaccttcctgtcgttaacaggcacctggaggataagtgttttcattgccaagcaaaacagtttcttcactgatgtgatcgctgggtccttggg

SEQ ID NO: 188200 - DNA, 336 bp, Homo sapiens
  chr19:5038228-5038564
  hypo
gtggcagccccggagcggctgggagggcctgcacagaagggtgcctggcacccagaaggcccgtggtgcccaccggcagtctagaatctggtcttgtcggcccataggctcacccccaccagaggagggaacatgaggctggggacaaggccaggagcccagggtgaggcgtgtactccggatagccctggtccctcagctcctggatgtctccagaaagagccggcgctaacctggactgtcctttccttgggaccagccttgtctcggtttaactctaaattagtgaaggcaccgggttccggctgcagtgccgcctctgacaggtgctggtcc

SEQ ID NO: 188201 - DNA, 30 bp, Homo sapiens; identical to SEQ ID NO: 96015
  chr19:5047451-5047481
  hypo

SEQ ID NO: 188202 - DNA, 30 bp, Homo sapiens; identical to SEQ ID NO: 96016
  chr19:5047696-5047726
  hypo

SEQ ID NO: 188203 - DNA, 31 bp, Homo sapiens
  chr19:5047927-5047958
  hypo
cccattgagctgtgagcggccccaggtgtcc

SEQ ID NO: 188204 - DNA, 41 bp, Homo sapiens
  chr19:5049195-5049236
  hypo
gggactgacagggatgcgccaggagccgagggcctctcctg

SEQ ID NO: 188205 - DNA, 30 bp, Homo sapiens; identical to SEQ ID NO: 96017
  chr19:5051095-5051125
  hypo

SEQ ID NO: 188206 - DNA, 419 bp, Homo sapiens
  chr19:5058358-5058777
  hypo
agagcagtgccaggcccgggagcccttgggatggaggcagggagaatggggggctctgaggactgagggaggaggggagcccggtgaggggaggatgggtgaccagctcaggagcaggggcgggaagggggcatagaagcttcctaagcaggggagctactactcttggccatgttccaggaggatggagtggctgtaggagcaggctttcgggccagggcctgggtgtggtgggagccggggctggctctggaccctgcaggggctgccttagcctcacgctgtctgaccagcccctgcctcacgtcgtgtgctgagtcctgtctgcggcccctcgctcacccgctggcttggtctggcaggagcagatggccttcattttggagtcttttgttcaaagcgggcgcttcgggttggag

SEQ ID NO: 188207 - DNA, 30 bp, Homo sapiens
  chr19:5059049-5059079
  hypo
ccctcccactgcagccggcgaggctggccc

SEQ ID NO: 188208 - DNA, 269 bp, Homo sapiens
  chr19:5060970-5061239
  hypo
cctttaattgcaggcgtgacatggcttgcctcggcgagtctgctcctaattaaagtgggctggcggtgtatgaagttcgcacggatcctcagggtgctgacccagccccggttccggagggccagtgtgacgacacctcgtggcccaggagagcagggcgggccacccatggccaccgtgccaggaatggggtcttctggctggccctgcgagagccgagagctctgtctcctccgcctgctgctccgctttgtcgggcattcctgtgg

SEQ ID NO: 188209 - DNA, 545 bp, Homo sapiens
  chr19:5064004-5064549
  hypo
gcccaccctgtagccggcttgctctccttcccggcctgtgccagccacagggcagtgcgccagagccatcttgctgggtcacaggccggggccaccatagggctttgttgcgagggtggcggtcaccatggcttttccgttctgtttgcaacttggggtcccgggggcgccactggcgtttggatctgccgtggccctcctgggcttgcgtgggtggctcactctgccaggtggcctctgtccaacctgacacctggtctcgggtacttccagcgtgacgtgcacgggctctgcctccctcattctgtgtctgcgatgatagcgcattaaatggcgaaggcccgtctgcccaggcctgtgcagacactgtgaaattaactttctcaccctccagcacgcattgggctgtgccgacatctctgaagggctcttggtcggacctctgctcttggcacacattcctcggcggcgggggtggggggtagggaggagagcgttttcatccctggcacctaattgccgagagcttccgctggcaggagctg

SEQ ID NO: 188210 - DNA, 518 bp, Homo sapiens
  chr19:5068441-5068959
  hypo
tcctggggttggtcccctaagcgaacgcaagcgtgctttcagccctgtgtggacggagcgtggcgcctccagcctcactcagttctgtgtgtcctaagccgtgtcctggcactttctcttggaaactgaggtttttcttccgcctgtgtccttgggggtggccgggaggcaggtctgccagcatcaggtcttctggtccccgaggccgtcgctgggttgttccgagtggcgggaggtgcagctcgctgttgggcactggcggtggcggagcccagaagtctccgtggctgcccggcctcttgtccaagagtcctttgtgatttctgtgggggctgctcctctgaacgctgggcctgcgtcccgcagtctgtgctttctgataacgccagagccacgttccagtgtattaaacttttaacattcgccagattcaattaatcttatctttacaactcccaattacaggcagtaattaagtggagcagcattgtaggctggggatacggcattaatcatcg

SEQ ID NO: 188211 - DNA, 30 bp, Homo sapiens; identical to SEQ ID NO: 96023
  chr19:5070708-5070738
  hypo

SEQ ID NO: 188212 - DNA, 31 bp, Homo sapiens; identical to SEQ ID NO: 96024
  chr19:5070999-5071030
  hypo

SEQ ID NO: 188213 - DNA, 30 bp, Homo sapiens
  chr19:5071498-5071528
  hypo
gacatggtggccgcacggcgtttgcccttg

SEQ ID NO: 188214 - DNA, 30 bp, Homo sapiens
  chr19:5072864-5072894
  hypo
ccagtgtctagaggccgcccgcattccttg

SEQ ID NO: 188215 - DNA, 31 bp, Homo sapiens; identical to SEQ ID NO: 96025
  chr19:5073396-5073427
  hypo

SEQ ID NO: 188216 - DNA, 101 bp, Homo sapiens
  chr19:5079966-5080067
  hypo
gcccagagaaccccacgtcctgcacagtgagggccagcccttggggaccccatgtcctgcacggcgggggccaggccctggggccacgtgtgttccccccc

SEQ ID NO: 188217 - DNA, 658 bp, Homo sapiens
  chr19:5080388-5081046
  hypo
gagataagaaaacaaatggcccgatgaattcggcgtgaggggcttgagcagacgcgttacgaaggagctgcaggaacgaaagccatggttcagtgcccagcatcggtagaagtcagaggcagccagctgggagacaccgccagccccaggacggccacgtcagaacaccgccaccagatgccagtgaggagggcgcagctgcacgctgctcccagccggggtggatgcagggcggtgccatggccatggaaaaccgttcggcattttcttggaaacggaagcatgtaccctgtgccccagcgatgccactctgtgcatatttactcaggagaaatgaaaacatatgtctccagaaagattggtacataagtgttcttagcagttttcttcacgagagccccaaactggaaacagcccgcacgtccatcaacaggaggatagataaataaataaccatagatccacgcgcaaccgagtactgtttagaaatgaaaaggagcggtcgcctggtgcacaggacagtgggaacaaatctcagaaacgcacgccaggtggaagacaacaggcacgtgtccctgccgtacaacgccattcatgtgaaccactaggagggaacgaggtctgtggtgactgagagcgcgtgcgtggttcggtgggg

SEQ ID NO: 188218 - DNA, 158 bp, Homo sapiens; identical to SEQ ID NO: 96027
  chr19:5083117-5083275
  hypo

SEQ ID NO: 188219 - DNA, 149 bp, Homo sapiens
  chr19:5087014-5087163
  hypo
ttccagggccctgcgcgcacacacaggaggcagcctggggctctcccctcccgtcttctgcagagcagggctggcgcctgcctgagctcacaggtgggatggagcagcccaggccggcacttgtggcctaaacacggcctcattcactc

SEQ ID NO: 188220 - DNA, 97 bp, Homo sapiens
  chr19:5092020-5092117
  hypo
gcttagggggtgtcacagtcacgcagaagcgtggggagaatctgcagctaagaccaggcggagcggatcccgggccgggccagaatgagtgggtccc

SEQ ID NO: 188221 - DNA, 30 bp, Homo sapiens; identical to SEQ ID NO: 31937
  chr19:5094979-5095009
  hypo

SEQ ID NO: 188222 - DNA, 317 bp, Homo sapiens
  chr19:5102566-5102883
  hypo
aggggaggaatggggccggggccggggtggcatctggggccactcccggtctcttgctgttggcgttgggagggatctcgcaccacagcagggaatcgaggccccggctcccctcaggctctcccttcaccggcaatgggcggcgggcgacgggtgacgggtgacgggtgatgggtgcagcacccgccccgcccataggagagccctggtccactgtggcctgtggatgccgcccctgacgtcagcatctctctctggcctccctgggagcagtctcagagcagtgaagagctcttcacgtccggtgctgtggcgat

SEQ ID NO: 188223 - DNA, 30 bp, Homo sapiens; identical to SEQ ID NO: 31939
  chr19:5107646-5107676
  hypo

SEQ ID NO: 188224 - DNA, 80 bp, Homo sapiens
  chr19:5110733-5110813
  hypo
ggtgctggaccacacgcggcccacggcgctcaccagccccgagctgagctcctggagtgcatcccgggcctcgctgaagg

SEQ ID NO: 188225 - DNA, 30 bp, Homo sapiens; identical to SEQ ID NO: 31940
  chr19:5112695-5112725
  hypo

SEQ ID NO: 188226 - DNA, 30 bp, Homo sapiens; identical to SEQ ID NO: 96033
  chr19:5114187-5114217
  hypo

SEQ ID NO: 188227 - DNA, 30 bp, Homo sapiens; identical to SEQ ID NO: 96034
  chr19:5117544-5117574
  hypo

SEQ ID NO: 188228 - DNA, 30 bp, Homo sapiens; identical to SEQ ID NO: 96035
  chr19:5119316-5119346
  hypo

SEQ ID NO: 188229 - DNA, 30 bp, Homo sapiens
  chr19:5131957-5131987
  hypo
ggccggccgcccacccggtccccactgtcg

SEQ ID NO: 188230 - DNA, 332 bp, Homo sapiens
  chr19:5132560-5132892
  hypo
ggagggttctagaagcgcgtgggatcacagggcgggagctcccaggagtggaggaatcggcacggggacagaggaatgaccaggggcccccgcgggctggcttgggaaggggtcttgccttctacccaggtatccttccagaaggcatctctggggcctccgtggactcccccactccccacaccccactgtgaccctttggtgagaccggagcatttgcctgtgagaccatcacggccccagaaccccaggcattctggggttgtgagtgacagacgcagccagtggctctgttctcatccccagggcctcggggccgcttagggccttcc

SEQ ID NO: 188231 - DNA, 30 bp, Homo sapiens; identical to SEQ ID NO: 96036
  chr19:5134103-5134133
  hypo

SEQ ID NO: 188232 - DNA, 30 bp, Homo sapiens
  chr19:5135529-5135559
  hypo
cccctgatcgcctgcggcaagtgctgcctg

SEQ ID NO: 188233 - DNA, 30 bp, Homo sapiens; identical to SEQ ID NO: 31941
  chr19:5138078-5138108
  hypo

SEQ ID NO: 188234 - DNA, 204 bp, Homo sapiens; identical to SEQ ID NO: 96038
  chr19:5144145-5144349
  hypo

SEQ ID NO: 188235 - DNA, 30 bp, Homo sapiens
  chr19:5146126-5146156
  hypo
gtgcaggccgaccccgcccagtcaccactc

SEQ ID NO: 188236 - DNA, 30 bp, Homo sapiens; identical to SEQ ID NO: 96039
  chr19:5147840-5147870
  hypo

SEQ ID NO: 188237 - DNA, 30 bp, Homo sapiens; identical to SEQ ID NO: 31942
  chr19:5148115-5148145
  hypo

SEQ ID NO: 188238 - DNA, 383 bp, Homo sapiens
  chr19:5148668-5149051
  hypo
ggagcctccaaaacccgctgctgcccttggcaaagcggagcctccaaaacccgctgctgcccgtggcaaagcggagcctggccacgccgggggtggaaatcgctttccggggtgctggggctccgacactaggactccttcacccagactctcctcaccggacagacgctgggaaggggccttctcccggtggctttcctctacaaatgagatgggtaggacggggcagagggtggcacccatgtccttggttcccagcaggctcctccacacatccccgagagatgtgtgctgtcgtcccaggacacggcccagaggcaaccggccatctgagagtccacactgggcactcccagccctgcttctcccgccgcctgcgccgg

SEQ ID NO: 188239 - DNA, 30 bp, Homo sapiens; identical to SEQ ID NO: 96041
  chr19:5151566-5151596
  hypo

SEQ ID NO: 188240 - DNA, 37 bp, Homo sapiens
  chr19:5154720-5154757
  hypo
cagcagccagggctcggggggacgcggccaggccatc

SEQ ID NO: 188241 - DNA, 385 bp, Homo sapiens
  chr19:5155021-5155406
  hypo
cctgctgcgatttcccgacaaagactgtgtccctcttttctccatctcgaaagccttccctgtgtgcggggacagacacagcctgaaaccaaagcctctggggtgcccccccgcccgccctaggccctgtgaggtcagcgtccctgggcctccccaagctggcagaggggccgtggcaggagcaggtggtgcctgcagcgtcctttccattgttctccaaaacgctctaaaacgggaaggctatttgggacaggctgttgctgtctgccgagcagagtaaagatgagtggataggtccccaaaagtgtcaccgtgcggagccgatgaggtctgcactcgggccggggtgggtgccccgatgccgaggtctcgtatctcggggcag

SEQ ID NO: 188242 - DNA, 174 bp, Homo sapiens
  chr19:5210688-5210862
  hypo
cccggcccatctcccgcagcttggtcagcatcaccacgatcgtcgaattgttctcccacagcatgcgccagaagtcttccgtggtctccgccagcggcccctgtgtcgcgatgtaggccttctgctgcctgcaggcgttgggggtatgagcccagggccggcagggagacccgg

SEQ ID NO: 188243 - DNA, 176 bp, Homo sapiens; identical to SEQ ID NO: 96046
  chr19:5218521-5218697
  hypo

SEQ ID NO: 188244 - DNA, 30 bp, Homo sapiens; identical to SEQ ID NO: 96047
  chr19:5223007-5223037
  hypo

SEQ ID NO: 188245 - DNA, 74 bp, Homo sapiens
  chr19:5223284-5223358
  hypo
ccgacagggttgggcggcccagcactgcggggatacggggcaggtgtcagggtcccagcgccatccgccagccc

SEQ ID NO: 188246 - DNA, 365 bp, Homo sapiens; identical to SEQ ID NO: 96049
  chr19:5231253-5231618
  hypo

SEQ ID NO: 188247 - DNA, 30 bp, Homo sapiens
  chr19:5237231-5237261
  hypo
tctggggagacccacggctgagtggtctga

SEQ ID NO: 188248 - DNA, 989 bp, Homo sapiens
  chr19:5237604-5238593
  hypo
ggccgtggactgtccgttcagcccagagtggctggggcaggcgggggggcacgcggggtgggccgtttttgtgaacctgcttgagaccagcgtgtactcaccttcaggacacctcagccagtctctcaggtggctgcccaagccacaggccaccctcactgactccacctcacacagacgcgcccagacgccttggagccgccaggtgctcagctcggcttggtttgtggggagcaggaaggagggaagggggccggcgggggcaggggggttgtgtctccgaggcgccccacccccccgatcccagcggctcagatgccccggctggagttgatgttaacccttcgactgatccgagatgcccctgtgtacacacacccagggcgggccttgaaggtttgaccatcatgactgattctggaagaaagcctggggtggctacgccgtgactgactgggtgaagggagggaagagggggaagcagggggaggccacgacagagagaccacgccggtggaggccacaccagggaaggccacgctgggctgagcggagccagggaggcaggtgaggtggggagacggcagaaggggcctgtccagctccgagtttagagaagtcagggagagagggtggcggtgacccacagccaactgccaggtgaagggtgactcgctccaaacagggaggccgggccggcacagcagagaactccagagatttgagccccgagtggggacctgcatgcccccacgaaacctggcctcggctccgattccaccccctccccaccctcgggaactgggacctcgtcctggggtcttgagagccaaggctccctgcccgggggaggaagaccgacggggaaggtgggttcgtctctgtgtcctttgctctgagaatgatggggtgcgagccgtgaccacagcctcacggtaccctcaaaatgcctgggaaatgggcacaacgtggcccttcaatcagccccc

SEQ ID NO: 188249 - DNA, 30 bp, Homo sapiens; identical to SEQ ID NO: 31944
  chr19:5239036-5239066
  hypo

SEQ ID NO: 188250 - DNA, 30 bp, Homo sapiens; identical to SEQ ID NO: 31945
  chr19:5240209-5240239
  hypo

SEQ ID NO: 188251 - DNA, 30 bp, Homo sapiens; identical to SEQ ID NO: 96053
  chr19:5244254-5244284
  hypo

SEQ ID NO: 188252 - DNA, 420 bp, Homo sapiens; identical to SEQ ID NO: 31946
  chr19:5245670-5246090
  hypo

SEQ ID NO: 188253 - DNA, 70 bp, Homo sapiens
  chr19:5251284-5251354
  hypo
cctcccgcctctcccccccaccgccagctccctccgccactgaggtagcgtgcaaggcccggagggacct

SEQ ID NO: 188254 - DNA, 427 bp, Homo sapiens; identical to SEQ ID NO: 96055
  chr19:5269158-5269585
  hypo

SEQ ID NO: 188255 - DNA, 101 bp, Homo sapiens; identical to SEQ ID NO: 31947
  chr19:5274367-5274468
  hypo

SEQ ID NO: 188256 - DNA, 30 bp, Homo sapiens
  chr19:5284587-5284617
  hypo
ggggatgctgataatcgcattcacctcatc

SEQ ID NO: 188257 - DNA, 411 bp, Homo sapiens; identical to SEQ ID NO: 96057
  chr19:5307583-5307994
  hypo

SEQ ID NO: 188258 - DNA, 185 bp, Homo sapiens; identical to SEQ ID NO: 96058
  chr19:5312164-5312349
  hypo

SEQ ID NO: 188259 - DNA, 410 bp, Homo sapiens; identical to SEQ ID NO: 96059
  chr19:5334918-5335328
  hypo

SEQ ID NO: 188260 - DNA, 224 bp, Homo sapiens
  chr19:5455291-5455515
  hypo
gcttgcccgggtaccggcaaatcacagacctaggaatgatccattggccacaggcccaggcagctggcagctcctgggacagaatgtagcagggcgatgtcacagaagctgggggcatctagaaccctggtgactcctggtctccatgtcatctgccagaaaggccacctgcgccagcacctcctgagaccggccttcaaagacacgacgcatgccgctctgcc

SEQ ID NO: 188261 - DNA, 36 bp, Homo sapiens
  chr19:5577527-5577563
  hypo
gattacaggcatgagccaccgcgcccggccgaatat

SEQ ID NO: 188262 - DNA, 112 bp, Homo sapiens
  chr19:5582380-5582492
  hypo
ggggtgccctgacaaccggggaggctgaggagaagggacctcgggctgcagcctcagctccatggctcgctacctctgggcgggtctcagcctccctcgggctcagaacctt

SEQ ID NO: 188263 - DNA, 1058 bp, Homo sapiens; identical to SEQ ID NO: 96062
  chr19:5587165-5588223
  hypo

SEQ ID NO: 188264 - DNA, 30 bp, Homo sapiens; identical to SEQ ID NO: 31952
  chr19:5593917-5593947
  hypo

SEQ ID NO: 188265 - DNA, 740 bp, Homo sapiens; identical to SEQ ID NO: 11970
  chr19:5608065-5608805
  hypo

SEQ ID NO: 188266 - DNA, 36 bp, Homo sapiens; identical to SEQ ID NO: 31954
  chr19:5609544-5609580
  hypo

SEQ ID NO: 188267 - DNA, 30 bp, Homo sapiens
  chr19:5613460-5613490
  hypo
cagatggtaacttaccggagttactttgaa

SEQ ID NO: 188268 - DNA, 99 bp, Homo sapiens
  chr19:5630433-5630532
  hypo
ctagattttatgttacgctttaaaaggacttctttgcttttaaattattaaaaatatgactgtaaggccaggtgcggtggcacacgtccgtaatcccac

SEQ ID NO: 188269 - DNA, 42 bp, Homo sapiens; identical to SEQ ID NO: 96067
  chr19:5641155-5641197
  hypo

SEQ ID NO: 188270 - DNA, 30 bp, Homo sapiens
  chr19:5641680-5641710
  hypo
cttgcgagtgagtagcgtggtggatggacc

SEQ ID NO: 188271 - DNA, 30 bp, Homo sapiens; identical to SEQ ID NO: 96068
  chr19:5645595-5645625
  hypo

SEQ ID NO: 188272 - DNA, 276 bp, Homo sapiens; identical to SEQ ID NO: 96069
  chr19:5661521-5661797
  hypo

SEQ ID NO: 188273 - DNA, 104 bp, Homo sapiens
  chr19:5667769-5667873
  hypo
gtgccgtgggttccacgccgtgtgcgcaagttccctgtgtgaaagcacgtctgtcttccaggtggcgagagaagcatgtccggtcactccgggcctggccacat

SEQ ID NO: 188274 - DNA, 247 bp, Homo sapiens; identical to SEQ ID NO: 96070
  chr19:5668102-5668349
  hypo

SEQ ID NO: 188275 - DNA, 103 bp, Homo sapiens
  chr19:5676231-5676334
  hypo
cccagctaatcacctccatttctgctgcacccaccattccttgggatggcgagttagcactcactccaggccagggccgggcaaagtgcgctcaaggctggag

SEQ ID NO: 188276 - DNA, 30 bp, Homo sapiens
  chr19:5676917-5676947
  hypo
agaggcctcctggagcggacggacgccctc

SEQ ID NO: 188277 - DNA, 30 bp, Homo sapiens; identical to SEQ ID NO: 31956
  chr19:5677980-5678010
  hypo

SEQ ID NO: 188278 - DNA, 30 bp, Homo sapiens; identical to SEQ ID NO: 31957
  chr19:5683383-5683413
  hypo

SEQ ID NO: 188279 - DNA, 30 bp, Homo sapiens; identical to SEQ ID NO: 31958
  chr19:5684954-5684984
  hypo

SEQ ID NO: 188280 - DNA, 239 bp, Homo sapiens
  chr19:5694368-5694607
  hypo
ttggggtcttctcccgccaccacgctcacccattgcggtccaggccagccccatgaccacgccgggcggtgtcacgtcatacatgcgctccacggtgaacacgggcttccccacgaagtcctgcaggttctcgggcgtcacctccacggactcggcctcgccgctgacaatcttgtaggccgatttccgtaacacctgggcggtcagggcaacacaatgggcacgggaaggtggggtga

SEQ ID NO: 188281 - DNA, 30 bp, Homo sapiens; identical to SEQ ID NO: 96075
  chr19:5694820-5694850
  hypo

SEQ ID NO: 188282 - DNA, 367 bp, Homo sapiens
  chr19:5695869-5696236
  hypo
ccctgcgcccactcgcgccacctgcagctgctcgcaagcgtctggtgtgtctctcacggccccatctgctcctcggccgcaggtcccacctgtctctcccgggcccaggagctcccagaggcacggcctctgcaggctctggggggcgccccctgctctgggaaggggacagcagtggggaggggctgggcttacctccgcaatggccagcttctcctgggccacgtagcccgacacgttgatcatctccatacggtctcgcagcggctcggggatggtgtccgtgacgttggccgtgcagatgaacagcacctgggggcggcggcaaggtgctgggggactggccgcttaccctccccagcaagcc

SEQ ID NO: 188283 - DNA, 31 bp, Homo sapiens; identical to SEQ ID NO: 96077
  chr19:5698922-5698953
  hypo

SEQ ID NO: 188284 - DNA, 30 bp, Homo sapiens; identical to SEQ ID NO: 96078
  chr19:5699436-5699466
  hypo

SEQ ID NO: 188285 - DNA, 58 bp, Homo sapiens
  chr19:5703576-5703634
  hypo
cgaggaagggccaggcggccccacgagcagacaccgtcagggcgcactgccacccaac

SEQ ID NO: 188286 - DNA, 223 bp, Homo sapiens
  chr19:5711860-5712083
  hypo
ggggtgggctccatcgccagctccgccgggtgcctggcgctcagctcgtcctccgcctccttcttgccccgctttgacttcctgcggggcttgtgcttgttctccgcctccggctcctcgggctccacctccagctgtctgctgatatggactctgacacgggagcaaggcaggtgtgaatcagccgctgaggctgggagctggacccggctgaggcctccct

SEQ ID NO: 188287 - DNA, 30 bp, Homo sapiens
  chr19:5713891-5713921
  hypo
atggagccacatctccgagcagctagctcg

SEQ ID NO: 188288 - DNA, 45 bp, Homo sapiens
  chr19:5722396-5722441
  hypo
gctgggcttacaggcgtgtgccaccgcgcccggccaacaccctta

SEQ ID NO: 188289 - DNA, 30 bp, Homo sapiens
  chr19:5754737-5754767
  hypo
ctctgcatgtctgggcgtgatgaggctgtg

SEQ ID NO: 188290 - DNA, 241 bp, Homo sapiens
  chr19:5759560-5759801
  hypo
catgaaactccagctccaaaaaaaaaaaaaaaaaaagcaaaaataagccaagtgtagtggcgggcgcctataatcccagctactcagggagatatttgcacacctgtgctcacagcagcgtgattcacaacagtcaaaaggcaaaaatcaacccaccggtccatcaccagatgaaaggatgaacacagcgtggtccatccgcacatcgcaatatgactcagacttaagaaggaagggagtc

SEQ ID NO: 188291 - DNA, 30 bp, Homo sapiens
  chr19:5772816-5772846
  hypo
ccaggaggtcatcgacgccgagtatgtgtt

SEQ ID NO: 188292 - DNA, 38 bp, Homo sapiens
  chr19:5776293-5776331
  hypo
cttctacatttcgatcgtggatccgtactacaggtgag

SEQ ID NO: 188293 - DNA, 30 bp, Homo sapiens
  chr19:5782249-5782279
  hypo
ccagcacccggaggtcgttcttccgaggct

SEQ ID NO: 188294 - DNA, 30 bp, Homo sapiens; identical to SEQ ID NO: 96082
  chr19:5784169-5784199
  hypo

SEQ ID NO: 188295 - DNA, 95 bp, Homo sapiens
  chr19:5784777-5784872
  hypo
gttactcggggcagcgggttccagcctgcagcgcgcccactggttggggttctgggtgttgggggcaagcaggggcagacgttggcagacatggt

SEQ ID NO: 188296 - DNA, 41 bp, Homo sapiens; identical to SEQ ID NO: 31963
  chr19:5785226-5785267
  hypo

SEQ ID NO: 188297 - DNA, 199 bp, Homo sapiens; identical to SEQ ID NO: 96084
  chr19:5785479-5785678
  hypo

SEQ ID NO: 188298 - DNA, 1122 bp, Homo sapiens; identical to SEQ ID NO: 31965
  chr19:5789243-5790365
  hypo

SEQ ID NO: 188299 - DNA, 333 bp, Homo sapiens
  chr19:5792485-5792818
  hypo
aaacataatactcctcggaattttggagattggttccaagaccgcatataccaaaatccgcgtatactcgtcccccagttgcccaacagaatccctgtataggaaaaatccgccctttgtatccgcaggtttcccatcctgcctccgcatttggtaggggttaaagaacccgcggatacggatggccaactgtattttatttttcgaaggccacttataagtggatggatgcaattcaaacccgcgttgttcgcgggtcaactgtacataagtaaattaaaccgtaagtgagtaggtaataaagcagtaaggtggattgggaatgccaccctt

SEQ ID NO: 188300 - DNA, 30 bp, Homo sapiens
  chr19:5795296-5795326
  hypo
aggtgtgagtcaccgcgcctggccggggtg

SEQ ID NO: 188301 - DNA, 160 bp, Homo sapiens
  chr19:5797826-5797986
  hypo
tgggattacaggcatgagccaccgcgcgtggcctgggctctgcagctttctgaatggccccccatcagggccccggcaggactggggatgcctggccacatgcccgtctttcccactggacgatgagcccagagagggtgggaaacgggcttagcttagt

SEQ ID NO: 188302 - DNA, 202 bp, Homo sapiens; identical to SEQ ID NO: 55489
  chr19:5804851-5805053
  hypo

SEQ ID NO: 188303 - DNA, 47 bp, Homo sapiens
  chr19:5824982-5825029
  hypo
cctggttggcccccgcggcgcagcagggggggcggtgggaggagaga

SEQ ID NO: 188304 - DNA, 621 bp, Homo sapiens; identical to SEQ ID NO: 96088
  chr19:5825263-5825884
  hypo

SEQ ID NO: 188305 - DNA, 200 bp, Homo sapiens; identical to SEQ ID NO: 96089
  chr19:5826123-5826323
  hypo

SEQ ID NO: 188306 - DNA, 30 bp, Homo sapiens; identical to SEQ ID NO: 31969
  chr19:5831156-5831186
  hypo

SEQ ID NO: 188307 - DNA, 39 bp, Homo sapiens; identical to SEQ ID NO: 31970
  chr19:5834508-5834547
  hypo

SEQ ID NO: 188308 - DNA, 30 bp, Homo sapiens; identical to SEQ ID NO: 96092
  chr19:5843646-5843676
  hypo

SEQ ID NO: 188309 - DNA, 495 bp, Homo sapiens; identical to SEQ ID NO: 96093
  chr19:5844273-5844768
  hypo

SEQ ID NO: 188310 - DNA, 118 bp, Homo sapiens
  chr19:5846505-5846623
  hypo
tgcctgctttctctgttggaccgaactggtctaagccttgcagtgtcgagcggagctccctgtaggtcacctgagtgtgacgaaaagggatcccgacgccaagacctaagttcacacc

SEQ ID NO: 188311 - DNA, 76 bp, Homo sapiens; identical to SEQ ID NO: 96094
  chr19:5858549-5858625
  hypo

SEQ ID NO: 188312 - DNA, 31 bp, Homo sapiens; identical to SEQ ID NO: 96095
  chr19:5859463-5859494
  hypo

SEQ ID NO: 188313 - DNA, 391 bp, Homo sapiens
  chr19:5867191-5867582
  hypo
tagggcgtgaagatgtcggagtcgctgcggtaggacatggtgagattgaagtatccgtccagggcttccaggtgccggcagttgctgggggactccatgctgaaccagatccagcgctgcccctgcggcctggtggggggcgggaggttggcactggggttgtacatgatatcccagtggtgcacgatgaccgcgtctgcctgtgggtacacactggagtcggcagtgatgttgcagtcggccgcgccgggcaccatctctgagcagcggggcagagccacgggtgtgttaaaaggccacgtccacagcaggatcagtagggtggggtgggcaggggtcgccatgctgtcctggcagcgggacccattgggagccccggtgacaggttcca

SEQ ID NO: 188314 - DNA, 121 bp, Homo sapiens; identical to SEQ ID NO: 96097
  chr19:5878603-5878724
  hypo

SEQ ID NO: 188315 - DNA, 31 bp, Homo sapiens; identical to SEQ ID NO: 96098
  chr19:5885338-5885369
  hypo

SEQ ID NO: 188316 - DNA, 30 bp, Homo sapiens
  chr19:5889479-5889509
  hypo
tctgagtcttgcccccgggtctggagggct

SEQ ID NO: 188317 - DNA, 31 bp, Homo sapiens; identical to SEQ ID NO: 31972
  chr19:5895544-5895575
  hypo

SEQ ID NO: 188318 - DNA, 31 bp, Homo sapiens; identical to SEQ ID NO: 31973
  chr19:5895851-5895882
  hypo

SEQ ID NO: 188319 - DNA, 31 bp, Homo sapiens; identical to SEQ ID NO: 31974
  chr19:5896208-5896239
  hypo

SEQ ID NO: 188320 - DNA, 420 bp, Homo sapiens
  chr19:5896606-5897026
  hypo
gcaagggcctcgagacgggcacagcaggagcctcttgggcgctcactgccagtgtctggatggagagagatgccacgagtcggctgctcgctgtgcatggcagcctcctggccccagtcctggagctgttctcctgggcctccccaccctacatgtattcctgataaaggaacaccccactttctccggatggccagcactgtggacacgggctggggagtcagagagaagaggcagccgtcaaatgtgctctgagagctggggctgtgccaggagagggcccagccatgcccagcccagcgtgctcacctgcagtgaacgtgtattgtccaaccttagccactccttcaaggaaggtgcccggaggattgagtgtgactctgtaggcagcggcggtcaggcctgcgagacagaggaggg

SEQ ID NO: 188321 - DNA, 400 bp, Homo sapiens
  chr19:5897315-5897715
  hypo
gcaccggccggcagacggagactcatccacgtggtggacacaagaacaggcctgagacctcagttctgcggctgcttccagcctcacaccgccagctcagcggcgccccccacgggccctggcaccagggccccagctccaggttcccatcaatggctctattctcctgtggggcccggggctcctgggcctaatcccccttggcagtggctctgcttccctgcctggctgccaacgcctcctccttgccactctcgaccccctcctgctggcagctcgggcctgggctcgtcctgcacacctggctgtctggctgccgcccccgccacccagcctcgccactccggtcagcttttccatctctgccatttcccaggccgcctggcccctgacattggct

SEQ ID NO: 188322 - DNA, 661 bp, Homo sapiens
  chr19:5909793-5910454
  hypo
cccggccctagcctagcttttgtagcatgcaactgtctcctttttatacgccctaaagaatatatttttgaactccttgtttctgcgctgtccttcttagcccaggacattcagggtgctttgcttgttgtcaaaccagggaaaggagaaaactcctgtgcctttctgggccagcctgtcaccctggcctggtcggcagccattcccctacctcctcactcaggaactgtcacaccaggaaccggcgaggggcacagcctgtttcagaccagaaaggtcggaggccacccacggccttcaggatggcgcccgcctgcctgcctggcaacagtgacccctcagtgcagtaacaatgggcccattttctcctctggatgaacaaggaggggggttgtttgtacaaaggaaaggcaggctggggcctgtctgtgctcaagaataaaccggatgatttcctggcctgggggcaagagggaggccctctgtgttatttgtgcctcctggtagggtcctgctgggccaggtagaatctagggagtgtaggccaagcactctctacagcgattgcatctaatcttcgagtttccctgtagacacaggctttgtcctcattttacagctgtggaaagtgaggcccaggccgggcgcggtgtctcacgcc

SEQ ID NO: 188323 - DNA, 160 bp, Homo sapiens
  chr19:5914410-5914570
  hypo
accaagcatggacgccgtggatgccaccatggagaaactccgggcacagtgcctgtcccgcggggcctcgggcatccagggcctggccaggtgagctgtcccctctcaccttcctgaccccggcccctgagaccactgttccaaccgtgtcccctgcctc

SEQ ID NO: 188324 - DNA, 1526 bp, Homo sapiens
  chr19:5914781-5916307
  hypo
gccctgggcatggggcgacagaggatgctgagatgcggagacggggactcctccctaagagctgctgttaagaggcgcctgctggggcatacagccccagtgctctgcacagcgtcttgggggtttgggtgtgctacccaccacccccagtcaccacctcctgtcccagccccccatgtcccaggcccgggaggctgtcatcgcagctgcatttgccaagctggaccgcagtggggacggcgtcgtgacggtggacgacctccgcggggtgtacagtggccgtgcccaccccaaggtgcgcagtggggagtggaccgaggacgaggtgctgcgccgcttcctggacaacttcgactcctctgagaaggacgggcaggtgggtggctgcgcggggggccccctccccaggcagttcctcggccgtgccccctcacggccctctgttcccaggtcacactggcggaattccaggactactacagcggcgtgagtgcctccatgaacacggatgaggagttcgtggccatgatgaccagtgcctggcagctgtgagcagctccggctcagccctgctgccctggcctgtcactccccacccctgccggagacctcccttccctgggccccttctctcctgggcagccacaccacagagcggggaggggcaggtgggggaatggaggctgcaggactggctagaccaggtccctgccggtccaccaggcggaggtgggacaaaggtcctaacaggagtcactggctcaggaccccagggagaaacgctctccccacccacgccatgctgaccagagatcttgcagcccctgtggatgcccccgccgaggtcccccgatccccgcacccggactgctgctccctgcccctcccttgcgggtcccccaggaagccaggtgaccccaggtgggaggctgtgtgtggaggccatcctggaaggaagtttagacctgcccaggtgtggagcgaggggcacaggggcatcctaacctcagaaactgaaataaagcctttgaaaaaaaaatctgtaaaacatcaacccccaatcagaagatggcaaatggggaataaaaatagcaggtaacatgtccagcgggcccagtatctacattctggtgagcggcccgaggctgggagctctgggcgggggcagaccggcggggccttgcagcaggggtgggggtaaagtgcgggtggtggtggagagaacagggctgtggctggaccccagcactggtgacacgctgggtgggagcatgaggccccaggctgctggaggtcctcgcccggggaggtggaggccgttcctggtcaggggcttcctgaggcccctggggcatgcagaggccagggttttagttaaaagtttaatgtagttcccaaatacatttcatatgacaatcttacataaatgttccaaaacacatgggcgttatctcgttgtactcgtcactagctggctaaggcttaaagcagagacgtgtgactgggtctctcgggagggcctctgg

SEQ ID NO: 188325 - DNA, 30 bp, Homo sapiens; identical to SEQ ID NO: 31978
  chr19:5917299-5917329
  hypo

SEQ ID NO: 188326 - DNA, 226 bp, Homo sapiens; identical to SEQ ID NO: 31979
  chr19:5925830-5926056
  hypo

SEQ ID NO: 188327 - DNA, 151 bp, Homo sapiens; identical to SEQ ID NO: 31980
  chr19:5927749-5927900
  hypo

SEQ ID NO: 188328 - DNA, 327 bp, Homo sapiens; identical to SEQ ID NO: 31981
  chr19:5938100-5938427
  hypo

SEQ ID NO: 188329 - DNA, 30 bp, Homo sapiens
  chr19:5957027-5957057
  hypo
ggtggggagtgccgccgctgggcatcagtg

SEQ ID NO: 188330 - DNA, 159 bp, Homo sapiens
  chr19:5957315-5957474
  hypo
caggctgccagctcatcgccatgaatcaggcgaggtacttccaaccacactgcgacccagacaccctgaatccaagggagaagcagcctcatggacacgggataaatatataatgcaaacaaatgaacaattactctaaatgcacgtacgcccagctcg

SEQ ID NO: 188331 - DNA, 158 bp, Homo sapiens
  chr19:5957769-5957927
  hypo
ttccctccaagctcaacgtgaaagtgtaaaggcctctgcttaggtctccccgtctgtgggcagaagtggccttggcaatgcgacctggaaaagagactctcagtaaagagagaacaaattagagtaacgaagtgaagagagaacgtaccggcccctta

SEQ ID NO: 188332 - DNA, 138 bp, Homo sapiens; identical to SEQ ID NO: 96113
  chr19:5960698-5960836
  hypo

SEQ ID NO: 188333 - DNA, 163 bp, Homo sapiens; identical to SEQ ID NO: 96114
  chr19:5985338-5985501
  hypo

SEQ ID NO: 188334 - DNA, 957 bp, Homo sapiens
  chr19:5994752-5995709
  hypo
gaggcactaatttggtggagccggtgaaatccaggttcccagagtgaccaggcggcatcttttggaacctcgaggaggcgccggccggggctgctagatgccctgcagggagtggttggggtcactgcgctcccgctttaccaggggctcacccaggctgcgggcgtctgggcccgcctcgctgccacgctgctcatcgcccatgtcatctgcggagggaggggtagggtcagtgtccatcatcaggagggcacgagagggagagaaggaagtgcacgttccgagaactgctccggcacgccaggcagggcaccgaggatacatggcagcctgtggaccccacctcggcctctgctccaggctgacctgtcctccccacctgccgttacccagaggtgcccccagctcgggccaggcgaaagagcctctgccctgtgcctccctttcccagcgccgacgggcctggggcctgctccccacagggctggggcctctggggtcctcccacccgcatgggacagagacggggcccgggggtccctctggcctgcctgtcccactctcctgctgggcgtgggcgcaggagaccaggggctgcctagtctgggcctggtgctgaggtccctgggcagcggctacccagaggccagcggcagtctgagccccagccgagccagtctgcagtgtcacctgctgctcaggcatcacccactgtccggatgacagatcccagggccctcaccccccaaggggctgcccgcatttccacctgttcatcatgagatggggcagacaggccacggccaggagtaccaccctcctgggagggtcgtggtgggaaagccgcagacgcacctacctttgtcgagcagcgtcagcgacagagaggcgagatcgttgaactgaaagagaaacctggagtcaggggcgcctgcagaggggcggcagttgctgttt

SEQ ID NO: 188335 - DNA, 520 bp, Homo sapiens
  chr19:5995924-5996444
  hypo
tgggtgcggctgctccgggttttaaggtggcatggaagagccgtgggccaaattatctttgctccctgaagtctgtacacagcaggaaaaccactccttggctgccccaaagcccggcgttcacgccaatgtgcagagaacaggcggcttccacagtttctgtacacgttgcggggccctggccaccgactcttagagtgctgtggcttctgggtagtaagagtgcagggaccccgccattcatcaagcatcatctcgtttcttcctggaggccatcccacgcagcccagcaagtccactccaaggtgtggaccccgaagaactgaacacaggagtgcacacaaacacccgcccacacacgcccacgcagccccgttcacgacggccacagagagggagcgaccgtgcagcacggagggacgagcggtcagcacagcgcggccagccacgcaccggaacacaactcagccaggagaggaaccaggctttgacccgggccgcagcgcggatgtcatgttcc

SEQ ID NO: 188336 - DNA, 54 bp, Homo sapiens; identical to SEQ ID NO: 96118
  chr19:5996648-5996702
  hypo

SEQ ID NO: 188337 - DNA, 523 bp, Homo sapiens
  chr19:5997027-5997550
  hypo
ggcccggccaagccccggccgtcccacccaggagggtcctcacctctcccatcacagcgatcggcgtctctccggtggcctccgcgacgcggtgctccaccaggtagaacatgtactcgtcgtagagcaggcggatgaggtggaaggagccgaagctggcagcgctgcgcagggtcaggtcccggatcaccatggagctggggacaagcggacagaggctggggaccctcaggggagcatggaacccgggccccaggccagacttcatggcagcaacacaccccctgctctacgttccctggggaacccagaggctgagtgatcctaagacgtgcaggcctacgcgggggctgacgggctgccgagaccctgggcccacgtgacggacaggtggggccggcctgcgcgctcagttccagagaccacctggggaacaggagagggagatgggcagtcagccccaaagcgacaggctgcgggaaacaactgtggctggtgctagcgcaggcgctagatgggatct

SEQ ID NO: 188338 - DNA, 572 bp, Homo sapiens
  chr19:5998428-5999000
  hypo
aatgcccaactgccccggctcgaagtatactttcataaactctgttacgtctaatcggtatcgagcgataaaaagaagacacaggcttgagaaaggcaaagacagccgcactatgaagaccaccaaagctgtctatccttaagtgtcaagcatagctgcaaagcccccagccccctcctgttcctccgggcccacccaggttggcttccaagccccctttccccaaaggcctcccccacgcagatgaggtgctggcactctgcaaccagcttccccacagccccggtgtctggtgcgatgcttcagtccaaagtatttccagaacatcgcctgcggtcaccccggtatctctgggttcccaaatgggctcgcagctcccagagagtaggagcatcggccgaccaccaccaagggaggcccagccagagcttggggatgaccagccaaggcctcagtccacatgctaccattttctagtgggtgctacagaaataaatcccgtaaacctaatttttattttttatgactgcactgcacgtgcataagaatgaagtcagaccaggcgtggtggc

SEQ ID NO: 188339 - DNA, 451 bp, Homo sapiens
  chr19:5999239-5999690
  hypo
ctggtgacagagcgagactctgtctcaaaaaacaagcaaacaagagaatgaagtggaacagtgtctcggtctcccttgtgaagagcacccccaccttgcagacgtgaccccgatcccctccagctctgagctgtgctcttctctggctggcaggcacctcagtcctgcgctcactctgctcttctcaattcttccgcttgcaaccttccctctgtccatggagactggcatcggcatccctacgctgtctcttcccttgctcttcctccctcattatcccagtgtggctttattgtaatttctggctacactggtgtttctgttatgtggcagtggtgtgctaggtccatggcagagccgcatagtctattaggcgtgtggttcctctcattcattcactgagccagcatttaaacagaagtgaggtcccggcactcgggtagcgtgcctg

SEQ ID NO: 188340 - DNA, 516 bp, Homo sapiens; identical to SEQ ID NO: 31988
  chr19:6001732-6002248
  hypo

SEQ ID NO: 188341 - DNA, 655 bp, Homo sapiens
  chr19:6002449-6003104
  hypo
gtcaacgtggtgccacgatcctggaagctgggggcctttgtgaggaaaatgagcagaagtgttggccacagcgcctggacgccagagggccctgagagatgatggagtggagagagctgggggctgtgggtgggctttggcctgggacccgtgtcatgcaacagaaccgtggccaggctcggggcaggggccaggttgtgccacgggctccacttggtgggtttgctggttttgctggagggcgggaagcccgggccctggggacggtgtggaggaagtcacctgcacgttggcaaagtccacgcggttgaggtcgctgagcatctggttgatctgggacgtgttctgcagcaccgcccgggccgcctgcgccaggtggttgagggacgtgtagcgccgcagcgtctgggcgaaggcactgacgacgcccacctgtaagccagggctcgtggtgagcaggggttcgcagggagagcctgttccgctgcgctccttgcaggggtgtgtgggctcagggacaacacagggaggagggagcaggaaacagcaacctgggcagggaagagggaacctcctgctattcttaaggacccagtgtgtgagaatcagtgaagaggagacctcgccggcacatcacacacgtcgctaactgagg

SEQ ID NO: 188342 - DNA, 100 bp, Homo sapiens
  chr19:6003432-6003532
  hypo
aattccgaagagcaggcgggtgccctgcagctgcctcctctcacccaagagcccttcaggaaatgctcatgatggctgggtgaggtggctcacacctgta

SEQ ID NO: 188343 - DNA, 225 bp, Homo sapiens; identical to SEQ ID NO: 96126
  chr19:6003831-6004056
  hypo

SEQ ID NO: 188344 - DNA, 470 bp, Homo sapiens; identical to SEQ ID NO: 96127
  chr19:6004120-6004590
  hypo

SEQ ID NO: 188345 - DNA, 404 bp, Homo sapiens; identical to SEQ ID NO: 96128
  chr19:6005134-6005538
  hypo

SEQ ID NO: 188346 - DNA, 200 bp, Homo sapiens; identical to SEQ ID NO: 96129
  chr19:6005977-6006177
  hypo

SEQ ID NO: 188347 - DNA, 483 bp, Homo sapiens; identical to SEQ ID NO: 31994
  chr19:6006878-6007361
  hypo

SEQ ID NO: 188348 - DNA, 568 bp, Homo sapiens; identical to SEQ ID NO: 96131
  chr19:6007826-6008394
  hypo

SEQ ID NO: 188349 - DNA, 95 bp, Homo sapiens; identical to SEQ ID NO: 96132
  chr19:6010176-6010271
  hypo

SEQ ID NO: 188350 - DNA, 93 bp, Homo sapiens
  chr19:6012585-6012678
  hypo
gggtgatgctggctccgcggagggtcacgggtcatgagcaatgcaccgctgtgtgggggaggtgaatggtgggagaggcggtggggagcgggg

SEQ ID NO: 188351 - DNA, 47 bp, Homo sapiens; identical to SEQ ID NO: 31997
  chr19:6013008-6013055
  hypo

SEQ ID NO: 188352 - DNA, 30 bp, Homo sapiens
  chr19:6014875-6014905
  hypo
agacagccaggacaccggctttgagagcac

SEQ ID NO: 188353 - DNA, 279 bp, Homo sapiens
  chr19:6015900-6016179
  hypo
accggcttctaaagccgacaccgtgggctacacctggccacagccaaggctgccgccaattgaaagtaactgcaagcactccagaggtggctgcgaatcaggccacctggaaaggaggaggaagcctcgcattttcccaaaagctccatttcttgggaaaggaagaggaagaacaggtgggctggggatcgtctacccacctggtgcccagccgccgcgttctcagccccataaacacagaacggatcagtttcccgaaggaggcggcgttcactgggt

SEQ ID NO: 188354 - DNA, 399 bp, Homo sapiens; identical to SEQ ID NO: 31998
  chr19:6017219-6017618
  hypo

SEQ ID NO: 188355 - DNA, 77 bp, Homo sapiens; identical to SEQ ID NO: 31999
  chr19:6018260-6018337
  hypo

SEQ ID NO: 188356 - DNA, 30 bp, Homo sapiens
  chr19:6018742-6018772
  hypo
gcaaagcgtaagcctcgaagtgtgggtcca

SEQ ID NO: 188357 - DNA, 136 bp, Homo sapiens
  chr19:6019757-6019893
  hypo
cagtgtgggccctgaagcttttcttcccagtggcttcaccgtccggatttgtcatgtgtgctgattgatttatcgcctgttccccgcagactatgctctccctgagggtggagacggagccaggtttgcccatgtg

SEQ ID NO: 188358 - DNA, 30 bp, Homo sapiens; identical to SEQ ID NO: 96139
  chr19:6020134-6020164
  hypo

SEQ ID NO: 188359 - DNA, 142 bp, Homo sapiens
  chr19:6020513-6020655
  hypo
ctctgttcagggtctacgcctcaccagcaggctgggagccacttatgcaccgggccttcccatccctcggtgctggagcccacacctggcggcacgtcagactgcggcaagcatcacaggtcagttccgtgaaaccgaccac

SEQ ID NO: 188360 - DNA, 30 bp, Homo sapiens
  chr19:6021454-6021484
  hypo
gaaaggggatggggtcgccgccacggaggg

SEQ ID NO: 188361 - DNA, 391 bp, Homo sapiens
  chr19:6021708-6022099
  hypo
aggagtgggagagagcgggtcctgcagggccttgtgggccattttgacaacactcggttctacttggagggccaaggggagccctggaggcttccaagcagagcagtgtggcgatctgacctgggttttagcaggatcactctggtggctgctgtgagaaggggctggaggctgggtaggggtgggtgctgacggctggctaggaggtggccgaaagaatccacagggacagtggcggctcgggaagtagtcgaagtggaggaggtggggggtgccacctggttctggatctttcttgaaggtgaggttgaagagcatctgggggtgggcatgagaggagcaaggaggcgaggacgcagtggggttgggggccgagcgcctggaagattgg

SEQ ID NO: 188362 - DNA, 137 bp, Homo sapiens; identical to SEQ ID NO: 96141
  chr19:6024057-6024194
  hypo

SEQ ID NO: 188363 - DNA, 522 bp, Homo sapiens; identical to SEQ ID NO: 96142
  chr19:6024681-6025203
  hypo

SEQ ID NO: 188364 - DNA, 686 bp, Homo sapiens
  chr19:6026054-6026740
  hypo
caaagtgctgggattacaggtgtgagccaccgcacctggttgccttcatttgtcttaaaaatgtctatgcaggttacaagcagagcagggacaggttgccaggtcagacgcacacttacatggctgttgagtaaaccgcttttgtgtgatgtgattccttcgcttttttggaggttttcaatcgccatttcaagctaaagaaaatgtgtgcagaaacaaaacaaaacaaaatggaaaaaaaaaaaaaggaaatcagatggttagcatcagccaagatttgtttttattaatatccaaataatgattcgagctcctacaaaataaaaatgaggctccacgcaggcagggcgggggtgagttaaattgtgcatgaaagctgcggtagggagtgttgcttcgcacacgtaggtaagcccgagagcccgtccaacagaagcagcagaaatcatgttgtaaaaacttgctactgaactttaacctggcatatgtgtgtgcacgccgtagcattaatatgcagccactgcatccattccagtgtcagccaagccagcatcatagtcacctgctcctttccccacgccacatcgatggggaaccagaatgaaagcaaggagagatggcagccttgactccccagccaggctgtcctgtcgcaaatcccagggtctccccgctgctggaggctt

SEQ ID NO: 188365 - DNA, 581 bp, Homo sapiens
  chr19:6026958-6027539
  hypo
ggaggtggggagggaggtgggcggcaggtccacgcgatggaggaggcacacagctgtgcgtggccactaaggcattcgcacgcatttggtttgtcctagactcgcacacggaaaacagcgacgtaaaatctgctgcagcccaccctgacgaccagaggactgaagcgggaggagatgaacttgaagtatatgcttcctttcttaaggaggccaaagacttgacacttctgcaaagagcaggttgagtgtgtatttcagagagcaggcgagcggagctgagttcaagaatgagagggtaactgcttctcccacggcctccgaccacggtggttctgccttctctcattagctacccttgcttcaagccaaggaggacgtcagggtcacctttaagaagtgcagaaggtacactggaggaccaggggaaagtaggatggtgagacctctcccacccatcagcctcagggtgcaggcgatgagaaggcaatcgccacctctatgatagaaaaaacacacatgccacccccatgtcttggggccattctgatctgcagcttgggcagccacgtgagtactgccct

SEQ ID NO: 188366 - DNA, 150 bp, Homo sapiens; identical to SEQ ID NO: 96146
  chr19:6033076-6033226
  hypo

SEQ ID NO: 188367 - DNA, 165 bp, Homo sapiens
  chr19:6040233-6040398
  hypo
gtaggtgtaggctgttcgtctgttagaaagagagaagtcacgcatgggacgctgtcccatttaaatgccttgtctgagttcacagatatccagccaaacatcacgtaaaagctgcaacccagagaggccagacatatggagcaattcggacgtggcatatgacac

SEQ ID NO: 188368 - DNA, 30 bp, Homo sapiens
  chr19:6040975-6041005
  hypo
acatgcaagcacacacgcaaaagcacgtgc

SEQ ID NO: 188369 - DNA, 343 bp, Homo sapiens; identical to SEQ ID NO: 96148
  chr19:6044406-6044749
  hypo

SEQ ID NO: 188370 - DNA, 687 bp, Homo sapiens; identical to SEQ ID NO: 96149
  chr19:6044992-6045679
  hypo

SEQ ID NO: 188371 - DNA, 138 bp, Homo sapiens; identical to SEQ ID NO: 32007
  chr19:6046168-6046306
  hypo

SEQ ID NO: 188372 - DNA, 17 bp, Homo sapiens
  chr19:6046545-6046562
  hypo
ggcgacagagcgagact

SEQ ID NO: 188373 - DNA, 23 bp, Homo sapiens
  chr19:6052163-6052186
  hypo
ggtgtgagcgccacactcagcct

SEQ ID NO: 188374 - DNA, 22 bp, Homo sapiens
  chr19:6059281-6059303
  hypo
cgcctggccttgatttgactat

SEQ ID NO: 188375 - DNA, 182 bp, Homo sapiens
  chr19:6062925-6063107
  hypo
cgctccctggccagtcgcgcatattcaatatctgctcgtcctttccctccccttccagagaccaatgtcacctgtctgtccttttctggtgcctggcccttgctggggtcacccacatcccctcccgtgagctgctgtgtctcgtatccctcctgtcctgccgctctcgctcttgctcctag

SEQ ID NO: 188376 - DNA, 30 bp, Homo sapiens
  chr19:6063359-6063389
  hypo
cagcatggcacacagcggtccagactcgca

SEQ ID NO: 188377 - DNA, 154 bp, Homo sapiens; identical to SEQ ID NO: 32010
  chr19:6064107-6064261
  hypo

SEQ ID NO: 188378 - DNA, 30 bp, Homo sapiens
  chr19:6064586-6064616
  hypo
cctggtgacctgacccggcagcacgcccac

SEQ ID NO: 188379 - DNA, 37 bp, Homo sapiens; identical to SEQ ID NO: 96156
  chr19:6076060-6076097
  hypo

SEQ ID NO: 188380 - DNA, 97 bp, Homo sapiens; identical to SEQ ID NO: 96157
  chr19:6076336-6076433
  hypo

SEQ ID NO: 188381 - DNA, 30 bp, Homo sapiens
  chr19:6076665-6076695
  hypo
ataaatgttcattagcgtcatcgttgtaat

SEQ ID NO: 188382 - DNA, 21 bp, Homo sapiens
  chr19:6079071-6079092
  hypo
ccacggcgcccggccattact

SEQ ID NO: 188383 - DNA, 28 bp, Homo sapiens
  chr19:6081675-6081703
  hypo
atggagggctgggcgcggcggctcatgc

SEQ ID NO: 188384 - DNA, 33 bp, Homo sapiens
  chr19:6083194-6083227
  hypo
ggcatgagccactgtgcccggccttcatcatga

SEQ ID NO: 188385 - DNA, 31 bp, Homo sapiens; identical to SEQ ID NO: 96160
  chr19:6095199-6095230
  hypo

SEQ ID NO: 188386 - DNA, 26 bp, Homo sapiens
  chr19:6096746-6096772
  hypo
gcacctggcctcgtttcttataattt

SEQ ID NO: 188387 - DNA, 287 bp, Homo sapiens; identical to SEQ ID NO: 32012
  chr19:6105443-6105730
  hypo

SEQ ID NO: 188388 - DNA, 39 bp, Homo sapiens; identical to SEQ ID NO: 32013
  chr19:6107002-6107041
  hypo

SEQ ID NO: 188389 - DNA, 777 bp, Homo sapiens; identical to SEQ ID NO: 130583
  chr19:6110225-6111002
  hypo

SEQ ID NO: 188390 - DNA, 28 bp, Homo sapiens
  chr19:6146184-6146212
  hypo
aaaaaatcagatggagccaggcgcggtg

SEQ ID NO: 188391 - DNA, 30 bp, Homo sapiens; identical to SEQ ID NO: 96166
  chr19:6211911-6211941
  hypo

SEQ ID NO: 188392 - DNA, 31 bp, Homo sapiens; identical to SEQ ID NO: 32015
  chr19:6214703-6214734
  hypo

SEQ ID NO: 188393 - DNA, 268 bp, Homo sapiens; identical to SEQ ID NO: 96168
  chr19:6215001-6215269
  hypo

SEQ ID NO: 188394 - DNA, 30 bp, Homo sapiens
  chr19:6215541-6215571
  hypo
ctgctggcctggcgcgctgcacacggggaa

SEQ ID NO: 188395 - DNA, 30 bp, Homo sapiens; identical to SEQ ID NO: 32017
  chr19:6216390-6216420
  hypo

SEQ ID NO: 188396 - DNA, 30 bp, Homo sapiens; identical to SEQ ID NO: 32018
  chr19:6217626-6217656
  hypo

SEQ ID NO: 188397 - DNA, 214 bp, Homo sapiens
  chr19:6226062-6226276
  hypo
cctgcctgggtgctgcggttcttctcccgcatggctgacggtgagtctgtgaggcagctggagagccctgcctgtcctgcctgggatggctgggcccacacgcagggcctggcagacaagtgaggtgaggagaaaggagaggaccggtggagagatgtgtgggtggcaggcaccgggcagctgccccgagggcccgtgccgctcagcctccagg

SEQ ID NO: 188398 - DNA, 30 bp, Homo sapiens
  chr19:6230124-6230154
  hypo
ccgcatgggggtcccggccacacgactcct

SEQ ID NO: 188399 - DNA, 236 bp, Homo sapiens; identical to SEQ ID NO: 96171
  chr19:6230444-6230680
  hypo

SEQ ID NO: 188400 - DNA, 114 bp, Homo sapiens
  chr19:6236569-6236683
  hypo
gtagaggtcacgccccgaagcaccctgcggccagcaccctgggattgagattggctgctggaagcggccagtgagtcacgggcactgggaatgactaaacggcatgccctctac

SEQ ID NO: 188401 - DNA, 30 bp, Homo sapiens
  chr19:6241625-6241655
  hypo
gcgggcgcagggttgcgcagcacctcctct

SEQ ID NO: 188402 - DNA, 220 bp, Homo sapiens
  chr19:6241967-6242187
  hypo
accagaggggctgcccgcctcctgaactctgcaaggccctgggagcctgggagccagggagggagttgcttgcagaagcgttgctccgcttctgcgccagcaggtcaggggcaaggggagaagacaatgggggctcagagggggctccctgcctcccagcctccctgcctcaagacctgctctccccagtctcaaactgagcgcacgcaggggcagccca

SEQ ID NO: 188403 - DNA, 165 bp, Homo sapiens
  chr19:6249577-6249742
  hypo
agcatgcagaagcctcgaggccgcatgtgatgggagggaggccacccggatccccccttgaagagctggagcccccagctcagggaagttcccatcacacatccagtctgcccagcaagcgctttactgtcaatgcttaaaaataggcacttatccagaagatat

SEQ ID NO: 188404 - DNA, 225 bp, Homo sapiens
  chr19:6333454-6333679
  hypo
cacccacgcactcaccgtgttgtagaactcggccaccagctccgagtactggaagttgctctcacaccagtccacctcggagctctgataggcgaagatgctaggcatcttgtctcagtggccaccaccagccggctgcgcccggcagagagaaggcgagcttgggaaggctgggccctgatgaggcggggagaggacagcccggtgccccgcggcaggcagact

SEQ ID NO: 188405 - DNA, 142 bp, Homo sapiens; identical to SEQ ID NO: 96172
  chr19:6345240-6345382
  hypo

SEQ ID NO: 188406 - DNA, 28 bp, Homo sapiens
  chr19:6363608-6363636
  hypo
tttaaagagctgcttctagaccggacgc

SEQ ID NO: 188407 - DNA, 424 bp, Homo sapiens; identical to SEQ ID NO: 96174
  chr19:6374176-6374600
  hypo

SEQ ID NO: 188408 - DNA, 144 bp, Homo sapiens; identical to SEQ ID NO: 96175
  chr19:6414853-6414997
  hypo

SEQ ID NO: 188409 - DNA, 101 bp, Homo sapiens
  chr19:6417745-6417846
  hypo
tgaccttgcttgaactgtatccgcacgccagcatcattctggatcttcttgatcatctctccactccggccaatgaccacgccaacagaatgcctgggcac

SEQ ID NO: 188410 - DNA, 30 bp, Homo sapiens; identical to SEQ ID NO: 96176
  chr19:6421134-6421164
  hypo

SEQ ID NO: 188411 - DNA, 506 bp, Homo sapiens; identical to SEQ ID NO: 96177
  chr19:6425393-6425899
  hypo

SEQ ID NO: 188412 - DNA, 119 bp, Homo sapiens
  chr19:6433455-6433574
  hypo
cctgaccagaggtgccgggacactggtgtttcctaaactcacctgctgtgacgggagatgttcaaggttgttgtcatgcatgtggccaaacgcgtacccatacacgtgtgtacagccag

SEQ ID NO: 188413 - DNA, 22 bp, Homo sapiens
  chr19:6442559-6442581
  hypo
acccactttttgttttttagac

SEQ ID NO: 188414 - DNA, 31 bp, Homo sapiens; identical to SEQ ID NO: 55501
  chr19:6459633-6459664
  hypo

SEQ ID NO: 188415 - DNA, 121 bp, Homo sapiens
  chr19:6461711-6461832
  hypo
ccgcgcccggcctggcctaattattctttaatcatcacttgtcacccaagggtcctcaggagggggtcttgttattatcatcatcctttatccaaagatacagcattggccggtctcggtg

SEQ ID NO: 188416 - DNA, 30 bp, Homo sapiens; identical to SEQ ID NO: 96180
  chr19:6495178-6495208
  hypo

SEQ ID NO: 188417 - DNA, 142 bp, Homo sapiens
  chr19:6541534-6541676
  hypo
gatctcacttatatgcggaatctaaaatagtcaaacacatagaagcagagaatagagcggtgcttgccaggggctgtgggtggggaaaacgaaaggtgttggtcaaaggataccaacattcagttaagaaagatgaggccga

SEQ ID NO: 188418 - DNA, 974 bp, Homo sapiens; identical to SEQ ID NO: 55507
  chr19:6590244-6591218
  hypo

SEQ ID NO: 188419 - DNA, 324 bp, Homo sapiens
  chr19:6664835-6665159
  hypo
ccaccacgcccagcctctgcttcgtgagttttctttcccctgaggcaccctctgagttctccacgtgtcagacccatgtccaatgcaccacgctccttccttcacaccatgaaagccccgaagtaagaccgggtaccatcacgcagtcgaaccaggcgttcatccagcacacggacgaccaccttctccccagcctccaggtgtaccacaccacccaggaagctgctgtcccaccagacccgggagctgctggtggcccgtccgcagggtgactgctggctgaccaacagctccagctcctcggggtagcggggtgtgcgcttg

SEQ ID NO: 188420 - DNA, 31 bp, Homo sapiens; identical to SEQ ID NO: 32024
  chr19:6676636-6676667
  hypo

SEQ ID NO: 188421 - DNA, 30 bp, Homo sapiens; identical to SEQ ID NO: 96183
  chr19:6707492-6707522
  hypo

SEQ ID NO: 188422 - DNA, 30 bp, Homo sapiens; identical to SEQ ID NO: 32025
  chr19:6733676-6733706
  hypo

SEQ ID NO: 188423 - DNA, 30 bp, Homo sapiens; identical to SEQ ID NO: 32026
  chr19:6742892-6742922
  hypo

SEQ ID NO: 188424 - DNA, 379 bp, Homo sapiens
  chr19:6744346-6744725
  hypo
gaccccctaggcacgcgtccccctctgagatccccctggccctgtgtctcttccccaaccacagtgggctggagtctctcttcccgactctgtcttcccctccagactggcttggggctggggccagcgtggagcgcgatcatatttgcagagtgaatcactgtgcttctagtccctctgttagcacccctgagccacccttgtccctgtccttacagaagctccaagacatggatgaacgcagggccacccgcctgggtgccgggtatgggctcctgtcggaggccgagctggaggtggtgcccataatagccaagtgcttggagggcatgaaggtggctgcaaatgctgtggatcccaagaacgtgggtgcctggtc

SEQ ID NO: 188425 - DNA, 237 bp, Homo sapiens; identical to SEQ ID NO: 96186
  chr19:6750238-6750475
  hypo

SEQ ID NO: 188426 - DNA, 30 bp, Homo sapiens
  chr19:6751453-6751483
  hypo
ctgccgctcggctccggccattttgtttta

SEQ ID NO: 188427 - DNA, 271 bp, Homo sapiens
  chr19:6829820-6830091
  hypo
tctactcatctgtaagcgcaggggagactcctatgacctcaaggactttgtaaacctgcacagcttccaggttcgggatgactcttcaggagaccgagacaacaagaaggtggggctttgacgccggaactatggggtcctccacgcagtcggcagcttagccctctccacttgggcatgtgcctgtttgccagactacatctacatggaagtgtgtgttaatccactcaacaggtgttttttgtttgtttgttttgttctgttttttaag

SEQ ID NO: 188428 - DNA, 24 bp, Homo sapiens
  chr19:6998399-6998423
  hypo
gggcgcggtgactcacgcctgtaa

SEQ ID NO: 188429 - DNA, 30 bp, Homo sapiens; identical to SEQ ID NO: 11983
  chr19:7087694-7087724
  hypo

SEQ ID NO: 188430 - DNA, 121 bp, Homo sapiens; identical to SEQ ID NO: 32028
  chr19:7100508-7100629
  hypo

SEQ ID NO: 188431 - DNA, 39 bp, Homo sapiens
  chr19:7103099-7103138
  hypo
ggattacaggcgtgagccaccgagcgtggccgtaaccag

SEQ ID NO: 188432 - DNA, 30 bp, Homo sapiens; identical to SEQ ID NO: 32029
  chr19:7115751-7115781
  hypo

SEQ ID NO: 188433 - DNA, 166 bp, Homo sapiens; identical to SEQ ID NO: 96190
  chr19:7116308-7116474
  hypo

SEQ ID NO: 188434 - DNA, 181 bp, Homo sapiens
  chr19:7135547-7135728
  hypo
catggtggcggatggcgggcctgggtgacacaccatgactctgtctctgaaaaaaaaaatttttttaacgggagatactgaaaatgcaattaaatagctagaggtggctttgtttatgaaactagcaaaagaaaaaaaaaataccttccaccagctgggcacggtggttcacgcctataat

SEQ ID NO: 188435 - DNA, 18 bp, Homo sapiens
  chr19:7136087-7136105
  hypo
caccgacacttgttattg

SEQ ID NO: 188436 - DNA, 90 bp, Homo sapiens; identical to SEQ ID NO: 96192
  chr19:7141679-7141769
  hypo

SEQ ID NO: 188437 - DNA, 84 bp, Homo sapiens; identical to SEQ ID NO: 96193
  chr19:7157582-7157666
  hypo

SEQ ID NO: 188438 - DNA, 44 bp, Homo sapiens; identical to SEQ ID NO: 96194
  chr19:7158215-7158259
  hypo

SEQ ID NO: 188439 - DNA, 104 bp, Homo sapiens; identical to SEQ ID NO: 96195
  chr19:7169225-7169329
  hypo

SEQ ID NO: 188440 - DNA, 97 bp, Homo sapiens; identical to SEQ ID NO: 96196
  chr19:7194736-7194833
  hypo

SEQ ID NO: 188441 - DNA, 35 bp, Homo sapiens; identical to SEQ ID NO: 96197
  chr19:7196502-7196537
  hypo

SEQ ID NO: 188442 - DNA, 409 bp, Homo sapiens; identical to SEQ ID NO: 130612
  chr19:7197094-7197503
  hypo

SEQ ID NO: 188443 - DNA, 30 bp, Homo sapiens
  chr19:7204385-7204415
  hypo
cccctctataagttacgagagtcttcgtgt

SEQ ID NO: 188444 - DNA, 23 bp, Homo sapiens
  chr19:7204813-7204836
  hypo
gggcgcagtggctcacgcctgta

SEQ ID NO: 188445 - DNA, 82 bp, Homo sapiens
  chr19:7236594-7236676
  hypo
aggcaccatggctcacgcctctaatcccagcgctttataaattacttagtctcactcttatcctaagtgaagtaaatcagga

SEQ ID NO: 188446 - DNA, 43 bp, Homo sapiens
  chr19:7245760-7245803
  hypo
cccacttctttaaaaacaaaacgacaacaaaaacaaaactaaa

SEQ ID NO: 188447 - DNA, 43 bp, Homo sapiens
  chr19:7256900-7256943
  hypo
attcaagtgggccatcattcacgttacatgctctaccctacct

SEQ ID NO: 188448 - DNA, 85 bp, Homo sapiens
  chr19:7265366-7265451
  hypo
gttagctatttgggagagaaacgaaacgcccgttgagtcacacacacaaacagatctcaagtagtgaggatgaatttttttagat

SEQ ID NO: 188449 - DNA, 669 bp, Homo sapiens; identical to SEQ ID NO: 96198
  chr19:7267298-7267967
  hypo

SEQ ID NO: 188450 - DNA, 121 bp, Homo sapiens
  chr19:7274390-7274511
  hypo
ggtctgtggcctaagggttggggatccctggtctgcaggatttttttcccatgacgcctacgagatgtggtgtgtgctttaccctggcagcccatctcgaaacggaggctcatttttcttt

SEQ ID NO: 188451 - DNA, 1592 bp, Homo sapiens; identical to SEQ ID NO: 130614
  chr19:7293529-7295121
  hypo

SEQ ID NO: 188452 - DNA, 20 bp, Homo sapiens
  chr19:7452323-7452343
  hypo
caccgcgcccagcgctgttt

SEQ ID NO: 188453 - DNA, 1109 bp, Homo sapiens; identical to SEQ ID NO: 130615
  chr19:7459629-7460738
  hypo

SEQ ID NO: 188454 - DNA, 189 bp, Homo sapiens
  chr19:7484058-7484247
  hypo
taccccagatgtacccacactcggcctctgtaccccgatgtacccacactcggcctctgtaccccgatgtacccacactcggcctccgcaccccaggtgtgcccacactcggcccccgcacctgggtgtgcccacacttggcccccacacccgggtgtgcccacacttggcccccgcaccccagatgcg

SEQ ID NO: 188455 - DNA, 180 bp, Homo sapiens; identical to SEQ ID NO: 32036
  chr19:7484790-7484970
  hypo

SEQ ID NO: 188456 - DNA, 30 bp, Homo sapiens
  chr19:7486861-7486891
  hypo
ctggcctcctccatccgtgcccgtgtttac

SEQ ID NO: 188457 - DNA, 117 bp, Homo sapiens
  chr19:7487149-7487266
  hypo
acgccacgcatgccccgcccagcctgccttttaatcttcatctctggccacactcttctagcactgcctgtctgcccagctcccgcccatgcccccccgccccgcgcagccttctgt

SEQ ID NO: 188458 - DNA, 101 bp, Homo sapiens
  chr19:7489519-7489620
  hypo
ggtaagagtgctggtcgattttaatttaattttaaattttagttcactcttgtactattcattaagaaggctcaaatttagactgggcgcggtggctcacg

SEQ ID NO: 188459 - DNA, 40 bp, Homo sapiens; identical to SEQ ID NO: 96204
  chr19:7489859-7489899
  hypo

SEQ ID NO: 188460 - DNA, 274 bp, Homo sapiens
  chr19:7493739-7494013
  hypo
gctgtgtgctcgtgccgcaatgggctgagcacgtagatctgatgtgacaccagtgcctggagatgaacagcacctgacccttgctcccagggaggtcaaggtgcagcgaggctgtgcaataaagtcgggagtgtggtgagctgtaaaggaagcccgcaggcctaggccacgggcccgagggcaggggcacgccatgcagaaggactctgacccggccccacagctggccagataagagagacgccttgagtcgaggggccgggggctctgaggc

SEQ ID NO: 188461 - DNA, 30 bp, Homo sapiens; identical to SEQ ID NO: 96206
  chr19:7504652-7504682
  hypo

SEQ ID NO: 188462 - DNA, 30 bp, Homo sapiens; identical to SEQ ID NO: 96207
  chr19:7505329-7505359
  hypo

SEQ ID NO: 188463 - DNA, 30 bp, Homo sapiens; identical to SEQ ID NO: 96208
  chr19:7509058-7509088
  hypo

SEQ ID NO: 188464 - DNA, 43 bp, Homo sapiens
  chr19:7524839-7524882
  hypo
ggtggtcgaggcccgcgccacgagactccgggactttcaaggt

SEQ ID NO: 188465 - DNA, 202 bp, Homo sapiens
  chr19:7525504-7525706
  hypo
tccacataaatggagtcacaccgcgcggccttttgggtctggctcctctcgaggtgtggtattaaggttcgcccgcgctcagtgagcactttgtcaagaacaattcctggtgccctgtagcctgcggcaagctcccttcttccctttcactgtctgtatttttttttattttatcttcttttttttttttaaacagagcctc

SEQ ID NO: 188466 - DNA, 30 bp, Homo sapiens
  chr19:7527356-7527386
  hypo
ggagcagcactgaccgccccccggtgcctg

SEQ ID NO: 188467 - DNA, 221 bp, Homo sapiens; identical to SEQ ID NO: 96210
  chr19:7531951-7532172
  hypo

SEQ ID NO: 188468 - DNA, 30 bp, Homo sapiens
  chr19:7532653-7532683
  hypo
ttcgcgggtgcatgcgtgcaggagtgtaag

SEQ ID NO: 188469 - DNA, 30 bp, Homo sapiens; identical to SEQ ID NO: 32038
  chr19:7534774-7534804
  hypo

SEQ ID NO: 188470 - DNA, 317 bp, Homo sapiens; identical to SEQ ID NO: 32039
  chr19:7535297-7535614
  hypo

SEQ ID NO: 188471 - DNA, 25 bp, Homo sapiens
  chr19:7538928-7538953
  hypo
aaaaaagaaaaaagggctggacgca

SEQ ID NO: 188472 - DNA, 24 bp, Homo sapiens
  chr19:7539552-7539576
  hypo
cgcgcctggtctattttttcttca

SEQ ID NO: 188473 - DNA, 184 bp, Homo sapiens
  chr19:7543281-7543465
  hypo
gggaggatgccccggcggggagcaggagggttagctccacaacgctggccccggacatacagtctgggacaggtgctgcatctcggataaacggcctgccctctccctgcccccacagtcccacaccctcctggctgtgcctcatgctcccggggactcatctctaacacggccccgtcccacc

SEQ ID NO: 188474 - DNA, 243 bp, Homo sapiens; identical to SEQ ID NO: 130616
  chr19:7553841-7554084
  hypo

SEQ ID NO: 188475 - DNA, 19 bp, Homo sapiens
  chr19:7554712-7554731
  hypo
ctttagactcttgtctgga

SEQ ID NO: 188476 - DNA, 181 bp, Homo sapiens; identical to SEQ ID NO: 96218
  chr19:7555030-7555211
  hypo

SEQ ID NO: 188477 - DNA, 30 bp, Homo sapiens; identical to SEQ ID NO: 96219
  chr19:7584226-7584256
  hypo

SEQ ID NO: 188478 - DNA, 30 bp, Homo sapiens; identical to SEQ ID NO: 96220
  chr19:7584646-7584676
  hypo

SEQ ID NO: 188479 - DNA, 30 bp, Homo sapiens; identical to SEQ ID NO: 96221
  chr19:7595253-7595283
  hypo

SEQ ID NO: 188480 - DNA, 30 bp, Homo sapiens; identical to SEQ ID NO: 32042
  chr19:7604873-7604903
  hypo

SEQ ID NO: 188481 - DNA, 30 bp, Homo sapiens
  chr19:7614849-7614879
  hypo
gacaaggcggaggacgtgtgcctgttcgta

SEQ ID NO: 188482 - DNA, 30 bp, Homo sapiens
  chr19:7615176-7615206
  hypo
cctgcaggatcatgcgcgcacagcccagtg

SEQ ID NO: 188483 - DNA, 30 bp, Homo sapiens; identical to SEQ ID NO: 32043
  chr19:7615585-7615615
  hypo

SEQ ID NO: 188484 - DNA, 736 bp, Homo sapiens; identical to SEQ ID NO: 96224
  chr19:7619581-7620317
  hypo

SEQ ID NO: 188485 - DNA, 30 bp, Homo sapiens; identical to SEQ ID NO: 32044
  chr19:7620582-7620612
  hypo

SEQ ID NO: 188486 - DNA, 233 bp, Homo sapiens
  chr19:7621734-7621967
  hypo
caccgaccactaaccgccacccactaatgccccggagaccccaggtacgtccgtccttgggggaggggagcagggagactcgtcggacgccttacccccctcacgccatccccgcaggctgtgtgtggcgttacgtccgggccagcgcctcctactgcccctacctgcccccactgtgcgaccccaaggacgggcacctgctggtggacgggtgctacgttaacaacgtccca

SEQ ID NO: 188487 - DNA, 173 bp, Homo sapiens; identical to SEQ ID NO: 96226
  chr19:7626303-7626476
  hypo

SEQ ID NO: 188488 - DNA, 20 bp, Homo sapiens
  chr19:7627586-7627606
  hypo
gtttatcttttttatgagtg

SEQ ID NO: 188489 - DNA, 93 bp, Homo sapiens
  chr19:7646039-7646132
  hypo
acgtgcgcagatgttcgcgttaatgcatgcaattctgtgggtattactggttacctttgtaaatatttgagtatgtatttgtggatattatct

SEQ ID NO: 188490 - DNA, 160 bp, Homo sapiens
  chr19:7655855-7656015
  hypo
acactggcccctttgcgcacccacacccactcctgcacgggcacatccagacaggagggcccacgccccagctcccctccctcggcacacccacccccatgcctgctcacatgctccggaccatgagacccacgccccaaacacacgtgccatttcaaca

SEQ ID NO: 188491 - DNA, 130 bp, Homo sapiens; identical to SEQ ID NO: 11992
  chr19:7660555-7660685
  hypo

SEQ ID NO: 188492 - DNA, 278 bp, Homo sapiens; identical to SEQ ID NO: 55532
  chr19:7660714-7660992
  hypo

SEQ ID NO: 188493 - DNA, 1167 bp, Homo sapiens; identical to SEQ ID NO: 11994
  chr19:7676863-7678030
  hypo

SEQ ID NO: 188494 - DNA, 614 bp, Homo sapiens; identical to SEQ ID NO: 96232
  chr19:7680031-7680645
  hypo

SEQ ID NO: 188495 - DNA, 100 bp, Homo sapiens; identical to SEQ ID NO: 96233
  chr19:7681576-7681676
  hypo

SEQ ID NO: 188496 - DNA, 122 bp, Homo sapiens; identical to SEQ ID NO: 32049
  chr19:7682206-7682328
  hypo

SEQ ID NO: 188497 - DNA, 91 bp, Homo sapiens; identical to SEQ ID NO: 96235
  chr19:7682910-7683001
  hypo

SEQ ID NO: 188498 - DNA, 285 bp, Homo sapiens
  chr19:7685293-7685578
  hypo
ctcaaagtccttccacgtctgccagaacgcgccggtcgtctgcgtggggggcagggcaggggtgggtgtgtgtgcccgtgagctggctgactccgccgcagcccccaaccctgatacccgtccctccccacagccctacccgggggtcacagatctgggagcagaagctgtagatggcccgggcgcggtcaatctccccgagcttgcactccatgtctgcaaaccgcaggcacatctcacgcgcgtgctcgtccgacagcacctggacaccggggttggggaggc

SEQ ID NO: 188499 - DNA, 30 bp, Homo sapiens
  chr19:7685844-7685874
  hypo
tggcacgctcgtacacggccatggcatgcc

SEQ ID NO: 188500 - DNA, 30 bp, Homo sapiens; identical to SEQ ID NO: 32052
  chr19:7688286-7688316
  hypo

SEQ ID NO: 188501 - DNA, 30 bp, Homo sapiens
  chr19:7688679-7688709
  hypo
ttggcgcagcaagacgctgttgaggagcag

SEQ ID NO: 188502 - DNA, 30 bp, Homo sapiens
  chr19:7690720-7690750
  hypo
gggagaccccgccccgaacccagagccccg

SEQ ID NO: 188503 - DNA, 110 bp, Homo sapiens; identical to SEQ ID NO: 32053
  chr19:7701076-7701186
  hypo

SEQ ID NO: 188504 - DNA, 260 bp, Homo sapiens; identical to SEQ ID NO: 96239
  chr19:7711956-7712216
  hypo

SEQ ID NO: 188505 - DNA, 26 bp, Homo sapiens
  chr19:7727713-7727739
  hypo
atgagccaccgcgcctggcccattgc

SEQ ID NO: 188506 - DNA, 30 bp, Homo sapiens
  chr19:7744783-7744813
  hypo
acgtgacaatgaccccggggcaccagggtg

SEQ ID NO: 188507 - DNA, 62 bp, Homo sapiens
  chr19:7747698-7747760
  hypo
gccgctgaccctgccggagataaaggatacagagagcccctccccacgtgtgtcttgtgtct

SEQ ID NO: 188508 - DNA, 31 bp, Homo sapiens; identical to SEQ ID NO: 11996
  chr19:7762517-7762548
  hypo

SEQ ID NO: 188509 - DNA, 20 bp, Homo sapiens
  chr19:7765409-7765429
  hypo
ttatttattgaaatggagtc

SEQ ID NO: 188510 - DNA, 30 bp, Homo sapiens
  chr19:7798640-7798670
  hypo
ccaaggcagggggatcgcgagaccagcctg

SEQ ID NO: 188511 - DNA, 101 bp, Homo sapiens
  chr19:7838386-7838487
  hypo
gcgcagtagcctgccagcacttgcggggggccacgtgaacagtgtatttactgaagttgtgcacatgcttatttcaggtgtttttccgttaccaatctagt

SEQ ID NO: 188512 - DNA, 515 bp, Homo sapiens; identical to SEQ ID NO: 130640
  chr19:7852955-7853470
  hypo

SEQ ID NO: 188513 - DNA, 254 bp, Homo sapiens; identical to SEQ ID NO: 130641
  chr19:7853543-7853797
  hypo

SEQ ID NO: 188514 - DNA, 45 bp, Homo sapiens; identical to SEQ ID NO: 96246
  chr19:7862878-7862923
  hypo

SEQ ID NO: 188515 - DNA, 24 bp, Homo sapiens
  chr19:7898966-7898990
  hypo
tcacgcctgtaatcccggcacttt

SEQ ID NO: 188516 - DNA, 30 bp, Homo sapiens
  chr19:7912686-7912716
  hypo
agtgtccagctcctcggcctcctccaacct

SEQ ID NO: 188517 - DNA, 337 bp, Homo sapiens; identical to SEQ ID NO: 96248
  chr19:7914803-7915140
  hypo

SEQ ID NO: 188518 - DNA, 197 bp, Homo sapiens
  chr19:7917146-7917343
  hypo
cccctgccccctccccgcgtcctccagctggtgcttcagggaagaatgcacaaaggccacggttgtgtccgtgaacatgggcaggcattgtccacagctaccagagggggccagctgggccgggtgcaggagctgtgtcccccctgggcttaccttaaccctttgcacaggcccgaggcccccggcatacccatcct

SEQ ID NO: 188519 - DNA, 313 bp, Homo sapiens; identical to SEQ ID NO: 96249
  chr19:7920729-7921042
  hypo

SEQ ID NO: 188520 - DNA, 31 bp, Homo sapiens; identical to SEQ ID NO: 96250
  chr19:7946856-7946887
  hypo

SEQ ID NO: 188521 - DNA, 30 bp, Homo sapiens; identical to SEQ ID NO: 96251
  chr19:7964015-7964045
  hypo

SEQ ID NO: 188522 - DNA, 30 bp, Homo sapiens; identical to SEQ ID NO: 96252
  chr19:7965019-7965049
  hypo

SEQ ID NO: 188523 - DNA, 30 bp, Homo sapiens; identical to SEQ ID NO: 32058
  chr19:7966472-7966502
  hypo

SEQ ID NO: 188524 - DNA, 30 bp, Homo sapiens
  chr19:7968096-7968126
  hypo
ccttggccccgtcgccgagggcaggggtca

SEQ ID NO: 188525 - DNA, 30 bp, Homo sapiens; identical to SEQ ID NO: 32059
  chr19:7970451-7970481
  hypo

SEQ ID NO: 188526 - DNA, 373 bp, Homo sapiens; identical to SEQ ID NO: 32060
  chr19:7972035-7972408
  hypo

SEQ ID NO: 188527 - DNA, 30 bp, Homo sapiens; identical to SEQ ID NO: 96256
  chr19:7977479-7977509
  hypo

SEQ ID NO: 188528 - DNA, 17 bp, Homo sapiens
  chr19:7980157-7980174
  hypo
accgatgtcactctctt

SEQ ID NO: 188529 - DNA, 51 bp, Homo sapiens
  chr19:7989495-7989546
  hypo
ggcggatggggggcagcggtgggcaccggggcagggcgcgctgacctgtcc

SEQ ID NO: 188530 - DNA, 171 bp, Homo sapiens; identical to SEQ ID NO: 130652
  chr19:7990125-7990296
  hypo

SEQ ID NO: 188531 - DNA, 301 bp, Homo sapiens; identical to SEQ ID NO: 130653
  chr19:7990893-7991194
  hypo

SEQ ID NO: 188532 - DNA, 390 bp, Homo sapiens; identical to SEQ ID NO: 96261
  chr19:7991809-7992199
  hypo

SEQ ID NO: 188533 - DNA, 146 bp, Homo sapiens; identical to SEQ ID NO: 96262
  chr19:7992971-7993117
  hypo

SEQ ID NO: 188534 - DNA, 59 bp, Homo sapiens
  chr19:7993372-7993431
  hypo
tacttccatattcgccgcactctgaatcttggcctgagatcaaacgcctcttctaggat

SEQ ID NO: 188535 - DNA, 440 bp, Homo sapiens
  chr19:7993743-7994183
  hypo
agctccctggcaaagcgagtcagctgtggcgtaatggtcccaaggtaaaaacaaaacaaaaaaccaaaaaaaaaaaaaaaaaaaaaaaaatccacatcgaaactcataaatgcctgctggattagtcaccatgcaggggagtatttaaaaagaaaatctgacatcttctcctctgctttttccaagttgtttatgagctgggtgcagaatagaattagccaagaacgattctggatcgcttaatacgaagaagccaggggaaagaaacacacaggtcggggagcgaatagggtgagatgaggtggcctgaggagatgagagctgggagccccacagggatggactcgggcagggacagggaggctgccagggatggggcagacagctagaccagaccccaggtacgcggtgctgctggtggcccccgaaccccaagcttt

SEQ ID NO: 188536 - DNA, 30 bp, Homo sapiens
  chr19:7994429-7994459
  hypo
gggttccctctggcccggggccagcactgc

SEQ ID NO: 188537 - DNA, 30 bp, Homo sapiens
  chr19:7995872-7995902
  hypo
tctcggagggtgagacgtgaggattccccc

SEQ ID NO: 188538 - DNA, 30 bp, Homo sapiens
  chr19:7996171-7996201
  hypo
ttcctcagacacccccggctgccacctgtg

SEQ ID NO: 188539 - DNA, 30 bp, Homo sapiens; identical to SEQ ID NO: 32065
  chr19:7996730-7996760
  hypo

SEQ ID NO: 188540 - DNA, 134 bp, Homo sapiens; identical to SEQ ID NO: 96266
  chr19:7997638-7997772
  hypo

SEQ ID NO: 188541 - DNA, 487 bp, Homo sapiens; identical to SEQ ID NO: 96267
  chr19:7998973-7999460
  hypo

SEQ ID NO: 188542 - DNA, 98 bp, Homo sapiens; identical to SEQ ID NO: 32067
  chr19:8004777-8004875
  hypo

SEQ ID NO: 188543 - DNA, 30 bp, Homo sapiens; identical to SEQ ID NO: 96269
  chr19:8005986-8006016
  hypo

SEQ ID NO: 188544 - DNA, 31 bp, Homo sapiens
  chr19:8009800-8009831
  hypo
tcttagttgtggttgaaagtacggagtttgg

SEQ ID NO: 188545 - DNA, 30 bp, Homo sapiens
  chr19:8023561-8023591
  hypo
tcgggacaattgagtcgttggaactgtaag

SEQ ID NO: 188546 - DNA, 207 bp, Homo sapiens
  chr19:8028627-8028834
  hypo
ggcgtttcctggcacgttgacgccagagagcccgctcatgtgatcgacgcccatgggggagaacctggcagacagagagcaagcgtcaggccacggtcagcgcaggcggcctggggatggggcaaggcctggacgcatgctgaccatggccgctgggccccatcccgctctgcgcagccacgaggtgctcacggttgagacacctgc

SEQ ID NO: 188547 - DNA, 236 bp, Homo sapiens
  chr19:8052093-8052329
  hypo
taaagccttgggcagcggtgtgggctttaacccgaccagagatatacagcaagacagaagccgtgaatggggctgcagcctggtggctccggcatgacaggtcatccatgagggtagagggctgactccttctgatcccccgagggacatatggggccactgtggagagaccagacactggggcagggctgcccaggaaggcagcgggcaggaccaccgggcgctgcagtggcctc

SEQ ID NO: 188548 - DNA, 90 bp, Homo sapiens; identical to SEQ ID NO: 96271
  chr19:8052776-8052866
  hypo

SEQ ID NO: 188549 - DNA, 31 bp, Homo sapiens; identical to SEQ ID NO: 96272
  chr19:8053914-8053945
  hypo

SEQ ID NO: 188550 - DNA, 100 bp, Homo sapiens; identical to SEQ ID NO: 96273
  chr19:8057696-8057796
  hypo

SEQ ID NO: 188551 - DNA, 30 bp, Homo sapiens
  chr19:8078536-8078566
  hypo
gattaccgggattaccggcatgagccactg

SEQ ID NO: 188552 - DNA, 23 bp, Homo sapiens
  chr19:8078955-8078978
  hypo
gtttgtttttttgagacggagtc

SEQ ID NO: 188553 - DNA, 148 bp, Homo sapiens
  chr19:8082468-8082616
  hypo
cattaatccatgaggaagggtcggctaggcagagaagagaggtggggagttccagacagagggaccgacaggagtaacggcacaaatttgtcagggaggatcattcagggagcaggggtgccggttcggaggggagatcacagtgagg

SEQ ID NO: 188554 - DNA, 27 bp, Homo sapiens
  chr19:8092249-8092276
  hypo
ggcatgagccatcgcccagtctcactg

SEQ ID NO: 188555 - DNA, 454 bp, Homo sapiens; identical to SEQ ID NO: 55552
  chr19:8115154-8115608
  hypo

SEQ ID NO: 188556 - DNA, 176 bp, Homo sapiens; identical to SEQ ID NO: 96278
  chr19:8127042-8127218
  hypo

SEQ ID NO: 188557 - DNA, 192 bp, Homo sapiens; identical to SEQ ID NO: 32070
  chr19:8148276-8148468
  hypo

SEQ ID NO: 188558 - DNA, 30 bp, Homo sapiens
  chr19:8152000-8152030
  hypo
tgggggacagacgcacgcgaaggtaccgat

SEQ ID NO: 188559 - DNA, 31 bp, Homo sapiens; identical to SEQ ID NO: 96280
  chr19:8176033-8176064
  hypo

SEQ ID NO: 188560 - DNA, 31 bp, Homo sapiens; identical to SEQ ID NO: 96281
  chr19:8183831-8183862
  hypo

SEQ ID NO: 188561 - DNA, 30 bp, Homo sapiens
  chr19:8190763-8190793
  hypo
gcctggactcacccacgcacagccggcctg

SEQ ID NO: 188562 - DNA, 605 bp, Homo sapiens
  chr19:8191120-8191725
  hypo
gcgcctggttgtgtgcgggctctggagtagggggtgagctggacacgggcaggcagttaccatcgcaggtgacacccgtcatccgggcaaagccccgggcacaggcagggtctgcaactgggagaacaagagtgaagagaggagtcattttctcatgccagcccaaggggggacccgccccatggagggcttttcccatgggtgcctgggaggcctcaaggaggatactaccgatctcgcagcgttcgcaggggctcccccaggctgccccgagggtggcgcagcactcagaccgcaggctggctccctgaaggttcacctcacagcggctctcctggatcttcagccagcaggtgcccttggtgctgtctggggagaagaggcgggtcacctgtctcacctgccggccctacacctgcaccctgacccatagacgcccagcctctggaacgccgtcgggctccggggccgctcacctagacagaaggtaccagaggggtccagccggctgccagggccacatttgcaggtgtaggagccggccaggttccgacagacgccactcacacacgggctggacaggcattcgtcgacatctgtgggga

SEQ ID NO: 188563 - DNA, 100 bp, Homo sapiens; identical to SEQ ID NO: 96284
  chr19:8201334-8201434
  hypo

SEQ ID NO: 188564 - DNA, 38 bp, Homo sapiens; identical to SEQ ID NO: 96285
  chr19:8203389-8203427
  hypo

SEQ ID NO: 188565 - DNA, 241 bp, Homo sapiens
  chr19:8253592-8253833
  hypo
ctgggattacaggcgtgagccaccacgtctagtcgactgggtggtgatcttatcgcttctaagggaatatttggcaatgtctagcgatgttttgcgttgtcagaaccgaagggaggagtgttactgtcacgctgtgagtagaggcctgggatgccgctaaatacatacaatgtgtaggaacaaagattattcagctccaaatgtcaacagcagttgagaaaccttgctataccaaatggca

SEQ ID NO: 188566 - DNA, 707 bp, Homo sapiens; identical to SEQ ID NO: 130662
  chr19:8274270-8274977
  hypo

SEQ ID NO: 188567 - DNA, 30 bp, Homo sapiens; identical to SEQ ID NO: 96287
  chr19:8327050-8327080
  hypo

SEQ ID NO: 188568 - DNA, 22 bp, Homo sapiens
  chr19:8332839-8332861
  hypo
tcaaaaaaggccgggcgcggtg

SEQ ID NO: 188569 - DNA, 30 bp, Homo sapiens; identical to SEQ ID NO: 96289
  chr19:8370150-8370180
  hypo

SEQ ID NO: 188570 - DNA, 30 bp, Homo sapiens; identical to SEQ ID NO: 32072
  chr19:8382407-8382437
  hypo

SEQ ID NO: 188571 - DNA, 30 bp, Homo sapiens; identical to SEQ ID NO: 96291
  chr19:8438824-8438854
  hypo

SEQ ID NO: 188572 - DNA, 46 bp, Homo sapiens
  chr19:8440195-8440241
  hypo
agcactttgggaggccaacgagcggatcacccgaggtcgggtgatc

SEQ ID NO: 188573 - DNA, 30 bp, Homo sapiens; identical to SEQ ID NO: 32073
  chr19:8458778-8458808
  hypo

SEQ ID NO: 188574 - DNA, 77 bp, Homo sapiens
  chr19:8463147-8463224
  hypo
ctgggctcaggcccccgtccctgggtgctgttgcccacaaaccctcatctctgttctgtccacgctgcgctgactcc

SEQ ID NO: 188575 - DNA, 30 bp, Homo sapiens; identical to SEQ ID NO: 32074
  chr19:8464613-8464643
  hypo

SEQ ID NO: 188576 - DNA, 30 bp, Homo sapiens; identical to SEQ ID NO: 96294
  chr19:8465083-8465113
  hypo

SEQ ID NO: 188577 - DNA, 254 bp, Homo sapiens; identical to SEQ ID NO: 96295
  chr19:8468434-8468688
  hypo

SEQ ID NO: 188578 - DNA, 30 bp, Homo sapiens; identical to SEQ ID NO: 96296
  chr19:8468928-8468958
  hypo

SEQ ID NO: 188579 - DNA, 121 bp, Homo sapiens; identical to SEQ ID NO: 96297
  chr19:8472050-8472171
  hypo

SEQ ID NO: 188580 - DNA, 121 bp, Homo sapiens; identical to SEQ ID NO: 96298
  chr19:8474997-8475118
  hypo

SEQ ID NO: 188581 - DNA, 148 bp, Homo sapiens; identical to SEQ ID NO: 96299
  chr19:8475417-8475565
  hypo

SEQ ID NO: 188582 - DNA, 30 bp, Homo sapiens; identical to SEQ ID NO: 96300
  chr19:8491565-8491595
  hypo

SEQ ID NO: 188583 - DNA, 229 bp, Homo sapiens; identical to SEQ ID NO: 96301
  chr19:8495656-8495885
  hypo

SEQ ID NO: 188584 - DNA, 31 bp, Homo sapiens; identical to SEQ ID NO: 32076
  chr19:8501527-8501558
  hypo

SEQ ID NO: 188585 - DNA, 30 bp, Homo sapiens; identical to SEQ ID NO: 32077
  chr19:8503785-8503815
  hypo

SEQ ID NO: 188586 - DNA, 160 bp, Homo sapiens; identical to SEQ ID NO: 32078
  chr19:8526867-8527027
  hypo

SEQ ID NO: 188587 - DNA, 196 bp, Homo sapiens; identical to SEQ ID NO: 96305
  chr19:8528371-8528567
  hypo

SEQ ID NO: 188588 - DNA, 98 bp, Homo sapiens
  chr19:8535011-8535109
  hypo
tggctcttggtctcccggccatttcggaggcttgacttcaaagccttcagtgctttgggagagtaagtcaccgtggcgatctcttgctgctgttgcta

SEQ ID NO: 188589 - DNA, 39 bp, Homo sapiens; identical to SEQ ID NO: 32080
  chr19:8539869-8539908
  hypo

SEQ ID NO: 188590 - DNA, 30 bp, Homo sapiens
  chr19:8540947-8540977
  hypo
tggcaggtgtaatctcgcagtcaggattca

SEQ ID NO: 188591 - DNA, 30 bp, Homo sapiens
  chr19:8541392-8541422
  hypo
aatgtcggccaggcgcggtggctcacacct

SEQ ID NO: 188592 - DNA, 119 bp, Homo sapiens; identical to SEQ ID NO: 96308
  chr19:8546610-8546729
  hypo

SEQ ID NO: 188593 - DNA, 38 bp, Homo sapiens
  chr19:8547110-8547148
  hypo
gattacaggcatgagctactgcgcggccgggggacagg

SEQ ID NO: 188594 - DNA, 30 bp, Homo sapiens
  chr19:8547792-8547822
  hypo
ttcgcaggtgaccccgcacgctgggcctca

SEQ ID NO: 188595 - DNA, 21 bp, Homo sapiens
  chr19:8554222-8554243
  hypo
ttctgaggccaggcgcggtgg

SEQ ID NO: 188596 - DNA, 21 bp, Homo sapiens
  chr19:8554362-8554383
  hypo
agactccgtctcaaaaaaaaa

SEQ ID NO: 188597 - DNA, 165 bp, Homo sapiens; identical to SEQ ID NO: 96309
  chr19:8554604-8554769
  hypo

SEQ ID NO: 188598 - DNA, 294 bp, Homo sapiens
  chr19:8554977-8555271
  hypo
caggcagctctgtgactttcccgcgccgggatccagggctcctgggtgagcgggcgctgggctggctggctgtcctggccccacgcctaccggtcttaccgtcccagggggagtggttggttttccaggggatctgccgaggaagcgtgacttccatggacccctctccccagaagcccaatagtgagcagcgcccccggggaatcgccagggtccctccagccctcccagagtgtccacgtaccgcagaagtcgacatcatcgtacacctccgtctccctggcagagcacagt

SEQ ID NO: 188599 - DNA, 30 bp, Homo sapiens
  chr19:8555479-8555509
  hypo
ttgcctttggggtcccggcacagcatctcc

SEQ ID NO: 188600 - DNA, 30 bp, Homo sapiens
  chr19:8571708-8571738
  hypo
agggttttctcttctcgtggtaaccgtgcg

SEQ ID NO: 188601 - DNA, 189 bp, Homo sapiens
  chr19:8575551-8575740
  hypo
gcccacccccaaagcggcgggattcagagctgcgagaacactggaagctccccctctgacagcagcggcgacaccttgggtgcaagcggggccggatctgggtggggcagaggaggggggcgcctgagcctcagcgccttgggcccccgcccccctctccacccgcgcattcctcggccttacccgcgg

SEQ ID NO: 188602 - DNA, 1179 bp, Homo sapiens; identical to SEQ ID NO: 96312
  chr19:8576016-8577195
  hypo

SEQ ID NO: 188603 - DNA, 228 bp, Homo sapiens; identical to SEQ ID NO: 55562
  chr19:8579004-8579232
  hypo

SEQ ID NO: 188604 - DNA, 205 bp, Homo sapiens; identical to SEQ ID NO: 96314
  chr19:8587384-8587589
  hypo

SEQ ID NO: 188605 - DNA, 30 bp, Homo sapiens; identical to SEQ ID NO: 96315
  chr19:8595369-8595399
  hypo

SEQ ID NO: 188606 - DNA, 180 bp, Homo sapiens
  chr19:8604832-8605012
  hypo
tgatcttggagccggcggtgctggggcgccccttcttgtctccatccagcttctcggggaagagcatccggaggaaggccctgggtaggaaaggggagaggaggagttggaggtatggctagactttcgggtactcttcctccaggggtggggcagcctcaatgccgcaacgcaaaatat

SEQ ID NO: 188607 - DNA, 210 bp, Homo sapiens
  chr19:8606637-8606847
  hypo
ctagtccatagaaacaccatcctggccgcacagccactcccctcgagtttgtggcgagatggcagttctgggtaagatggagtggggcccggtcctccctccatccccttggggggttgtagccggaggtccccatgcctgggaccactcactgctcactggtctgcatcagctctatgaggtcggagaagagaacgtctcggttcctct

SEQ ID NO: 188608 - DNA, 30 bp, Homo sapiens
  chr19:8616598-8616628
  hypo
gactggagtagaggccggtgctcaccagag

SEQ ID NO: 188609 - DNA, 229 bp, Homo sapiens; identical to SEQ ID NO: 96317
  chr19:8618011-8618240
  hypo

SEQ ID NO: 188610 - DNA, 26 bp, Homo sapiens
  chr19:8628969-8628995
  hypo
agaagtgggtgctggccgggcatggc

SEQ ID NO: 188611 - DNA, 30 bp, Homo sapiens
  chr19:8933282-8933312
  hypo
atgtcaggaccccacgactcaccagcagtc

SEQ ID NO: 188612 - DNA, 86 bp, Homo sapiens; identical to SEQ ID NO: 96319
  chr19:8934835-8934921
  hypo

SEQ ID NO: 188613 - DNA, 30 bp, Homo sapiens; identical to SEQ ID NO: 96320
  chr19:8951555-8951585
  hypo

SEQ ID NO: 188614 - DNA, 31 bp, Homo sapiens; identical to SEQ ID NO: 96321
  chr19:9099750-9099781
  hypo

SEQ ID NO: 188615 - DNA, 29 bp, Homo sapiens
  chr19:9100231-9100260
  hypo
gaaagggcagctgaggctgggcgcggtgg

SEQ ID NO: 188616 - DNA, 356 bp, Homo sapiens
  chr19:9128986-9129342
  hypo
caccctcctccagttcccctccgcccgcccagccaacagagtgacctttcaaaaatgcaacaccggccatgccccgccccggtccgaattcttcagtgccttctcaccgccctcgggaccaagtccaaacgctgcagcctggcgttgaaggcccaccttgagccgggacccggcctgcattggactaacgtatgacttcgcttctcaccccgaagcctttgcctcggccgttccctgtgccggaattaccctccttccctttacctgattctgtgtcccctaattctctccaggcctcccctacctccctccccagacagaaagcagagctccccgccctgttcccaaagcacctt

SEQ ID NO: 188617 - DNA, 158 bp, Homo sapiens; identical to SEQ ID NO: 96324
  chr19:9130021-9130179
  hypo

SEQ ID NO: 188618 - DNA, 30 bp, Homo sapiens
  chr19:9175612-9175642
  hypo
aaaaacattagcgcccgtaatcccagctac

SEQ ID NO: 188619 - DNA, 224 bp, Homo sapiens
  chr19:9204273-9204497
  hypo
ggcttatgaccggttcgtggccatctgccacccattgcactacgccaagatcatgagcctacgcctctgtcgcctgctggtcggcgccctctgggcgttttcctgcttcatctcactcactcacatcctcctgatggcccgtctcgttttctgcggcagccatgaggtgcctcactacttctgcgacctcactcccatcctccgactttcgtgcacggacacct

SEQ ID NO: 188620 - DNA, 31 bp, Homo sapiens; identical to SEQ ID NO: 12009
  chr19:9267730-9267761
  hypo

SEQ ID NO: 188621 - DNA, 30 bp, Homo sapiens
  chr19:9270822-9270852
  hypo
tacgctcacttgttcgaagtctttggcatg

SEQ ID NO: 188622 - DNA, 87 bp, Homo sapiens
  chr19:9343353-9343440
  hypo
actggaagacccactcggcagcgcctcggagagagcttttctctttctctcatctatgaaacctccgctgttaaacccaatccttgt

SEQ ID NO: 188623 - DNA, 45 bp, Homo sapiens; identical to SEQ ID NO: 32087
  chr19:9371592-9371637
  hypo

SEQ ID NO: 188624 - DNA, 23 bp, Homo sapiens
  chr19:9374116-9374139
  hypo
gaaatgagatttatggcctggcg

SEQ ID NO: 188625 - DNA, 30 bp, Homo sapiens; identical to SEQ ID NO: 96328
  chr19:9416707-9416737
  hypo

SEQ ID NO: 188626 - DNA, 38 bp, Homo sapiens; identical to SEQ ID NO: 96329
  chr19:9459897-9459935
  hypo

SEQ ID NO: 188627 - DNA, 578 bp, Homo sapiens; identical to SEQ ID NO: 55571
  chr19:9648913-9649491
  hypo

SEQ ID NO: 188628 - DNA, 30 bp, Homo sapiens
  chr19:9783965-9783995
  hypo
tatctggtgtactctcgccatcactccatc

SEQ ID NO: 188629 - DNA, 92 bp, Homo sapiens; identical to SEQ ID NO: 96331
  chr19:9845536-9845628
  hypo

SEQ ID NO: 188630 - DNA, 30 bp, Homo sapiens
  chr19:9846383-9846413
  hypo
gaggactgacagcccgagcggcctcgcaga

SEQ ID NO: 188631 - DNA, 106 bp, Homo sapiens
  chr19:9894645-9894751
  hypo
tgggactgcaggcactagccatcgcgcctggccagataatggtgattttttttcctaaagaaaaaaagtccaggcccatgtagatttttttcgtattgaagggggc

SEQ ID NO: 188632 - DNA, 31 bp, Homo sapiens; identical to SEQ ID NO: 55574
  chr19:9896567-9896598
  hypo

SEQ ID NO: 188633 - DNA, 30 bp, Homo sapiens; identical to SEQ ID NO: 32089
  chr19:9908244-9908274
  hypo

SEQ ID NO: 188634 - DNA, 39 bp, Homo sapiens; identical to SEQ ID NO: 96334
  chr19:9921965-9922004
  hypo

SEQ ID NO: 188635 - DNA, 217 bp, Homo sapiens
  chr19:9937314-9937531
  hypo
cataaataaataaataaataaataaataaaattaaaaaaaaaacagtaaaaatcccacggccggggaaatcaggaccaaaccagtaaggagcagctctttaggcataagcacgcgcattaaagacaaaaagtatccttaacatgataaggataaccagctcattagcgctcatgcatatggacggcatatcatgaatggaggcggctctcaagcaca

SEQ ID NO: 188636 - DNA, 30 bp, Homo sapiens; identical to SEQ ID NO: 12013
  chr19:9942246-9942276
  hypo

SEQ ID NO: 188637 - DNA, 250 bp, Homo sapiens
  chr19:9960938-9961188
  hypo
gggacctgagcaactaaagcccggccccaggggacctcccctcccccaagcgctgagtttctaataaaggccaagcctcataaacaatcacctgtgcccgctcccatctggctggcttcgggagcaatcgctcattcgcctgctgcctgcctgccggagcatttgtcattaggaaggtttaatgggtttcctctcagctccagagggctggggagagccggctgcatggatacaccgccaggcagaatgt

SEQ ID NO: 188638 - DNA, 252 bp, Homo sapiens
  chr19:9961442-9961694
  hypo
gccgctgcccccacccgtgtgtatgtgtgtctgcgtttgcccaagaatgtgtggggccatgtgactggtcgtctctctgtcctgtgcattttgggagtcctccggttctgagagtcctccggttctgagtgtgaccacctgcccctccaggtacccccttcccttgtctgtctgtgcagtggccaaaacccaaatgagaatgtcgctgttaggtaaacatgcctccagagcccacttcggggccggtgattc

SEQ ID NO: 188639 - DNA, 227 bp, Homo sapiens
  chr19:9965156-9965383
  hypo
acctcgagggtgtgcgggtccagccggctgaccacgatgttgcccgcgttctggttggtggtgtacacagcccagagcccgctctcgtccaccatgaagtccatgtcggagaagccgccccaggagtaggggaaggtgttgttgtaaccggcgcccgggaggctcctctgcaccagcacagagcgcgagcggaagtggtatttgaccaccacgttgctctggtactt

SEQ ID NO: 188640 - DNA, 92 bp, Homo sapiens; identical to SEQ ID NO: 96339
  chr19:9967992-9968084
  hypo

SEQ ID NO: 188641 - DNA, 30 bp, Homo sapiens; identical to SEQ ID NO: 96340
  chr19:9968481-9968511
  hypo

SEQ ID NO: 188642 - DNA, 31 bp, Homo sapiens; identical to SEQ ID NO: 32093
  chr19:9981318-9981349
  hypo

SEQ ID NO: 188643 - DNA, 171 bp, Homo sapiens
  chr19:10016589-10016760
  hypo
ggcatggctttgccacgctcagacattccgcacacaagacacgctctcattcactccaacacgtcccttgggttcagacacaactgatggccatcagattccccttacacgatggggcgtgcttgccatgaagacacgctcaaacatgctatgacacgctctgacacacag

SEQ ID NO: 188644 - DNA, 30 bp, Homo sapiens
  chr19:10140529-10140559
  hypo
ttctagtcctacaaacggaattaatggaat

SEQ ID NO: 188645 - DNA, 301 bp, Homo sapiens
  chr19:10142025-10142326
  hypo
gtcagggagtttcgggtttgagctccaggagctccggcagtggcgataagagtccgacagtccgacttccagtgagggcccgcacagaccgggcatggcttggaaggaatgccgggctgcgggcattccttggcccatggccaggttttcaacccttgaagcaaggtcctggagcggggatttggacgtcttgaggttcttacacgtaggcggtgcagctggggtttgtcttagggcagaggcaagcctctgcagttctgaaatacgccgctgccaggcagcctcttccctgttattgaac

SEQ ID NO: 188646 - DNA, 30 bp, Homo sapiens
  chr19:10157938-10157968
  hypo
cagcccctcccccaacggagcctctgctta

SEQ ID NO: 188647 - DNA, 34 bp, Homo sapiens; identical to SEQ ID NO: 96342
  chr19:10171190-10171224
  hypo

SEQ ID NO: 188648 - DNA, 392 bp, Homo sapiens; identical to SEQ ID NO: 130708
  chr19:10197445-10197837
  hypo

SEQ ID NO: 188649 - DNA, 43 bp, Homo sapiens; identical to SEQ ID NO: 96344
  chr19:10204396-10204439
  hypo

SEQ ID NO: 188650 - DNA, 115 bp, Homo sapiens; identical to SEQ ID NO: 96345
  chr19:10220394-10220509
  hypo

SEQ ID NO: 188651 - DNA, 30 bp, Homo sapiens; identical to SEQ ID NO: 96346
  chr19:10221129-10221159
  hypo

SEQ ID NO: 188652 - DNA, 30 bp, Homo sapiens; identical to SEQ ID NO: 96347
  chr19:10226324-10226354
  hypo

SEQ ID NO: 188653 - DNA, 181 bp, Homo sapiens; identical to SEQ ID NO: 96348
  chr19:10231204-10231385
  hypo

SEQ ID NO: 188654 - DNA, 30 bp, Homo sapiens; identical to SEQ ID NO: 96349
  chr19:10231945-10231975
  hypo

SEQ ID NO: 188655 - DNA, 887 bp, Homo sapiens
  chr19:10246095-10246982
  hypo
ctagttcatttgaacctacagcgagtgagctgtcgccaccatgggttttagcctgctcctttagcgcgacggactgtccttctggctcaatctctgcctcaaaaacaaacagtaaggaaccagcatagggacgcagcctgactcggatgtctcagcactgtccctcctgtgggccgtcttcccactgagagtgatggggctacccggcagccagcaggcgtcctcccggaagtgactgcgctggccccagccccacctggtgacaggcacagaagcctccttcctgtccagacccagcgggcgccgccccactgacctgccggtgcttgtccaggatgttgccgaagagccggtaggtgtcagggaagccctgggagcgggcacactcccgcacgctcaccacacggtgctgctctgggtggagcacgcggccctgggggaaagaggcgcggtgggcgagggcagtagcacccaggccgggtcaccgtcggggacagggagggaaatggcactgtgacagcatacggccatggccttggcctatgagcttgtcccgtggacgtggaggggcaggaggcagaggccaggtgcctggggtcctggggtgctgtcccccacttggctaaacccacacttccacctagttaggccgccaagtacagggcctgacccaggccctcggatgccccctccccacctacctgcttgcccatgggctcggggttggtgacggttgtgctgaagaagccgtcccactcgagccttccatagaggccagcccagtggttgtgccggttcccggtgtggggcaggcaccaggggatgagggtgttgaactgcctggctgcggggtcgcaggctttgccggctggaagacaggacagtga

SEQ ID NO: 188656 - DNA, 30 bp, Homo sapiens; identical to SEQ ID NO: 96351
  chr19:10250633-10250663
  hypo

SEQ ID NO: 188657 - DNA, 263 bp, Homo sapiens; identical to SEQ ID NO: 130712
  chr19:10252655-10252918
  hypo

SEQ ID NO: 188658 - DNA, 211 bp, Homo sapiens; identical to SEQ ID NO: 55586
  chr19:10253328-10253539
  hypo

SEQ ID NO: 188659 - DNA, 91 bp, Homo sapiens; identical to SEQ ID NO: 96354
  chr19:10253814-10253905
  hypo

SEQ ID NO: 188660 - DNA, 30 bp, Homo sapiens; identical to SEQ ID NO: 96355
  chr19:10254519-10254549
  hypo

SEQ ID NO: 188661 - DNA, 31 bp, Homo sapiens; identical to SEQ ID NO: 32098
  chr19:10265327-10265358
  hypo

SEQ ID NO: 188662 - DNA, 30 bp, Homo sapiens
  chr19:10278989-10279019
  hypo
ggttcgctgcacttacggttctttggtttg

SEQ ID NO: 188663 - DNA, 31 bp, Homo sapiens; identical to SEQ ID NO: 96357
  chr19:10287834-10287865
  hypo

SEQ ID NO: 188664 - DNA, 33 bp, Homo sapiens; identical to SEQ ID NO: 96358
  chr19:10295208-10295241
  hypo

SEQ ID NO: 188665 - DNA, 32 bp, Homo sapiens; identical to SEQ ID NO: 96359
  chr19:10295300-10295332
  hypo

SEQ ID NO: 188666 - DNA, 146 bp, Homo sapiens
  chr19:10295673-10295819
  hypo
cctgattccccaccagcgccgctcacatatgagcacctgctgaatgccaggccctgctccaggcaaagagctaagtgattagatgtaggtgtcactaggcagggacttcctgacttgctgtgtggttaggaaagaccattctgtag

SEQ ID NO: 188667 - DNA, 115 bp, Homo sapiens; identical to SEQ ID NO: 96361
  chr19:10338377-10338492
  hypo

SEQ ID NO: 188668 - DNA, 147 bp, Homo sapiens; identical to SEQ ID NO: 96362
  chr19:10350516-10350663
  hypo

SEQ ID NO: 188669 - DNA, 185 bp, Homo sapiens; identical to SEQ ID NO: 130720
  chr19:10363158-10363343
  hypo

SEQ ID NO: 188670 - DNA, 433 bp, Homo sapiens; identical to SEQ ID NO: 96364
  chr19:10370251-10370684
  hypo

SEQ ID NO: 188671 - DNA, 28 bp, Homo sapiens
  chr19:10371565-10371593
  hypo
tcaaccagctgggcgcggtggctcacgc

SEQ ID NO: 188672 - DNA, 1015 bp, Homo sapiens; identical to SEQ ID NO: 130722
  chr19:10381048-10382063
  hypo

SEQ ID NO: 188673 - DNA, 43 bp, Homo sapiens
  chr19:10385883-10385926
  hypo
aaagtatttacaggctgggtgcggtggctcatgcctgtaatcc

SEQ ID NO: 188674 - DNA, 43 bp, Homo sapiens; identical to SEQ ID NO: 96366
  chr19:10394495-10394538
  hypo

SEQ ID NO: 188675 - DNA, 500 bp, Homo sapiens; identical to SEQ ID NO: 96367
  chr19:10395579-10396079
  hypo

SEQ ID NO: 188676 - DNA, 285 bp, Homo sapiens; identical to SEQ ID NO: 130725
  chr19:10399790-10400075
  hypo

SEQ ID NO: 188677 - DNA, 3175 bp, Homo sapiens; identical to SEQ ID NO: 130726
  chr19:10400293-10403468
  hypo

SEQ ID NO: 188678 - DNA, 30 bp, Homo sapiens
  chr19:10418836-10418866
  hypo
ggcctggccccagccggcccctacctgtac

SEQ ID NO: 188679 - DNA, 307 bp, Homo sapiens
  chr19:10420149-10420456
  hypo
ctcggcctccattgcgccccagcccagccccctccctaatttcacccggccctgtcccgctgggcccacccgatgaaacccacctgggaggggcgggacctgtgtggtgggagcgctcttggtagaggatgcgatgagccccagctgagagcgaccagcctcggcggcacctttcctctttctggcttttttcaggtcatccgcgcacccctgcgtggcaagggcggcctggaccccaccaaatccctccgcagctgccggggcggggccttccacgctagccctccccctcggaaatgggggctcc

SEQ ID NO: 188680 - DNA, 30 bp, Homo sapiens; identical to SEQ ID NO: 96371
  chr19:10429385-10429415
  hypo

SEQ ID NO: 188681 - DNA, 30 bp, Homo sapiens
  chr19:10432385-10432415
  hypo
actccagggcacggccgatcctgggcagac

SEQ ID NO: 188682 - DNA, 330 bp, Homo sapiens
  chr19:10432995-10433325
  hypo
actggtgcccagcagcggcgctcccagcccacacccagtttcaggctgtaaatgggcgtgtccaggtcccctgaccccaccccaggcaccaagtccaggggcgctctcagaatggagggaaagatggcgaaccatcatgagcaattgccagagggggatggggatgtgggtgggaaaggcaggggtttgggggagtcgccctcaccctggttctgcgcccccagggcacagccagaggtccccccaccccaccgatcgcaccagctgtgttgaaaagagcctgtaggggctgtagagcagtgggtgagggggatgcgtgtgttaccttct

SEQ ID NO: 188683 - DNA, 31 bp, Homo sapiens; identical to SEQ ID NO: 96372
  chr19:10433903-10433934
  hypo

SEQ ID NO: 188684 - DNA, 30 bp, Homo sapiens; identical to SEQ ID NO: 96373
  chr19:10439709-10439739
  hypo

SEQ ID NO: 188685 - DNA, 30 bp, Homo sapiens; identical to SEQ ID NO: 32103
  chr19:10463022-10463052
  hypo

SEQ ID NO: 188686 - DNA, 101 bp, Homo sapiens; identical to SEQ ID NO: 32104
  chr19:10464756-10464857
  hypo

SEQ ID NO: 188687 - DNA, 30 bp, Homo sapiens; identical to SEQ ID NO: 96376
  chr19:10465242-10465272
  hypo

SEQ ID NO: 188688 - DNA, 1963 bp, Homo sapiens; identical to SEQ ID NO: 130739
  chr19:10529635-10531598
  hypo

SEQ ID NO: 188689 - DNA, 341 bp, Homo sapiens; identical to SEQ ID NO: 130740
  chr19:10531608-10531949
  hypo

SEQ ID NO: 188690 - DNA, 30 bp, Homo sapiens; identical to SEQ ID NO: 96379
  chr19:10545681-10545711
  hypo

SEQ ID NO: 188691 - DNA, 66 bp, Homo sapiens
  chr19:10562153-10562219
  hypo
gctacgcatttgcagcgctggggtgttgggaatagattctgaagagtggcacgccagtgtgtactt

SEQ ID NO: 188692 - DNA, 146 bp, Homo sapiens; identical to SEQ ID NO: 130743
  chr19:10589793-10589939
  hypo

SEQ ID NO: 188693 - DNA, 30 bp, Homo sapiens; identical to SEQ ID NO: 96380
  chr19:10602572-10602602
  hypo

SEQ ID NO: 188694 - DNA, 36 bp, Homo sapiens
  chr19:10614243-10614279
  hypo
aacaacgcacagcgccggcctcgtggtccggcggcc

SEQ ID NO: 188695 - DNA, 329 bp, Homo sapiens; identical to SEQ ID NO: 130746
  chr19:10616197-10616526
  hypo

SEQ ID NO: 188696 - DNA, 701 bp, Homo sapiens; identical to SEQ ID NO: 55613
  chr19:10624965-10625666
  hypo

SEQ ID NO: 188697 - DNA, 30 bp, Homo sapiens
  chr19:10657666-10657696
  hypo
gtgtcctggttcgccgaccacccccgggcc

SEQ ID NO: 188698 - DNA, 327 bp, Homo sapiens
  chr19:10665637-10665964
  hypo
acccaggtctcagagcggggggcgctgcattcccaaagtcatgcaacaagaggttgacggagccaagactcaagcctgggcctgacaggctccccacccacgcttccccagccagcactgcttactcttctcggcagagtgacttgaagacctgccgctttttccatgagttctgggccttctggctgtacgcccgcttgtcccgcagctcctcctgctctgacctgcagacagatgcccctgtgttgggtgctctgggaagtgcccgaggctgcccgccctgccccctgcgcatgtggccccgccgcgccccgccccatcacctgt

SEQ ID NO: 188699 - DNA, 117 bp, Homo sapiens; identical to SEQ ID NO: 96384
  chr19:10685491-10685608
  hypo

SEQ ID NO: 188700 - DNA, 121 bp, Homo sapiens; identical to SEQ ID NO: 96385
  chr19:10687539-10687660
  hypo

SEQ ID NO: 188701 - DNA, 208 bp, Homo sapiens; identical to SEQ ID NO: 96386
  chr19:10687719-10687927
  hypo

SEQ ID NO: 188702 - DNA, 43 bp, Homo sapiens; identical to SEQ ID NO: 96387
  chr19:10689001-10689044
  hypo

SEQ ID NO: 188703 - DNA, 30 bp, Homo sapiens; identical to SEQ ID NO: 96388
  chr19:10690421-10690451
  hypo

SEQ ID NO: 188704 - DNA, 322 bp, Homo sapiens; identical to SEQ ID NO: 130752
  chr19:10691748-10692070
  hypo

SEQ ID NO: 188705 - DNA, 30 bp, Homo sapiens
  chr19:10694640-10694670
  hypo
gcagcggggccagggcgccttcctcctccc

SEQ ID NO: 188706 - DNA, 31 bp, Homo sapiens; identical to SEQ ID NO: 32113
  chr19:10709085-10709116
  hypo

SEQ ID NO: 188707 - DNA, 31 bp, Homo sapiens; identical to SEQ ID NO: 96391
  chr19:10726540-10726571
  hypo

SEQ ID NO: 188708 - DNA, 146 bp, Homo sapiens; identical to SEQ ID NO: 96392
  chr19:10732738-10732884
  hypo

SEQ ID NO: 188709 - DNA, 105 bp, Homo sapiens; identical to SEQ ID NO: 96393
  chr19:10742230-10742335
  hypo

SEQ ID NO: 188710 - DNA, 30 bp, Homo sapiens; identical to SEQ ID NO: 32114
  chr19:10745509-10745539
  hypo

SEQ ID NO: 188711 - DNA, 109 bp, Homo sapiens; identical to SEQ ID NO: 96395
  chr19:10747313-10747422
  hypo

SEQ ID NO: 188712 - DNA, 21 bp, Homo sapiens
  chr19:10761821-10761842
  hypo
tgagatggagtctcactctgt

SEQ ID NO: 188713 - DNA, 200 bp, Homo sapiens; identical to SEQ ID NO: 130754
  chr19:10762081-10762281
  hypo

SEQ ID NO: 188714 - DNA, 545 bp, Homo sapiens
  chr19:10792600-10793145
  hypo
attggcagagctctcgtggagacctgccatcgtgctgatccagagccaccttgctattctctctgtagaggagaaggcagagcccccccaggctatgaatgccctgatgcggttgaaccagctgaagccagggctgcagtacaagctggtgtcccagactgggcccgtccatgcccccatctttaccatgtctgtggaggttgatggcaattcattcgaggcctctgggccctccaaaaagacggccaagctgcacgtggccgttaaggtgagtgtggccagcatcactgtcttctaatagcagaaccatggtctttgttttgggccccttctgagccattgtctctcagggagggcatgtagattctaaaaatacacatggttagatggcgagtatttgccaagtcacgtggcaagaacgccttcccactgtggctggcaggcagaggggtccccaaacatgattggggcattagggcctcctgggagcaggagctgaaaggaaacagccctcctccagatggcttcccgggtgggtgcctgta

SEQ ID NO: 188715 - DNA, 30 bp, Homo sapiens; identical to SEQ ID NO: 32117
  chr19:10793760-10793790
  hypo

SEQ ID NO: 188716 - DNA, 37 bp, Homo sapiens; identical to SEQ ID NO: 32118
  chr19:10794361-10794398
  hypo

SEQ ID NO: 188717 - DNA, 30 bp, Homo sapiens; identical to SEQ ID NO: 96402
  chr19:10795742-10795772
  hypo

SEQ ID NO: 188718 - DNA, 84 bp, Homo sapiens
  chr19:10817620-10817704
  hypo
agtgctgggattacaggcgtagtcactgcgcccagtcagcagagccctgctgatggacgtttggtttcccggtcttgctgtggc

SEQ ID NO: 188719 - DNA, 318 bp, Homo sapiens; identical to SEQ ID NO: 96403
  chr19:10818161-10818479
  hypo

SEQ ID NO: 188720 - DNA, 148 bp, Homo sapiens
  chr19:10822777-10822925
  hypo
ggattgaagaccaggcgcatttcctcttctgtggccctcaccttaccctgtaccctcagagatgaccaagcgagacgtgcctggcttcgccatcgggggcctgagcgggggtgagagcaagtcgcagttctggcggatggtggcgctg

SEQ ID NO: 188721 - DNA, 667 bp, Homo sapiens
  chr19:10823267-10823934
  hypo
tgacatgttcgactgcgtcttccccacacggacagcggtgaggctctggcagaaggaggtcagggcgggagacgggtgggggactagggaggcaaggttaggggtggggggtggggagaatgaagccctgggtgacgcccctttccctgcccttcctctcccacagcgctttggctctgccctggtgcccactgggaacctgcagttgaggaagaaggtgtttgagaaggacttcggccccatagacccggagtgcacctgccccacgtgccaaaagtaggcaggatggcactgggagctggggcagggcatggaggggacagggcctggccgtgctgagctgtcccctgccgctctacaggcacagccgcgccttcctgcacgcactgctgcacagtgacaacacggccgcgctgcaccacctcacggtccacaacatcgcctaccaggtgagccagtgcccggggcaaggtgggcgggggtgtcctaggtgcgtatgccccacgctgacctcccctccccgcagctgcagctcatgagcgccgtccgcaccagcatcgtggagaagcgcttcccggacttcgtgcgggacttcatgggcgccatgtacggggatcccaccctctgtcccacctgggccactgacgctctggcctctgtgggaatc

SEQ ID NO: 188722 - DNA, 32 bp, Homo sapiens; identical to SEQ ID NO: 96405
  chr19:10824429-10824461
  hypo

SEQ ID NO: 188723 - DNA, 30 bp, Homo sapiens; identical to SEQ ID NO: 32121
  chr19:10824831-10824861
  hypo

SEQ ID NO: 188724 - DNA, 30 bp, Homo sapiens
  chr19:10843290-10843320
  hypo
acaattcaccctgtccggaagtgcacagag

SEQ ID NO: 188725 - DNA, 165 bp, Homo sapiens
  chr19:10848454-10848619
  hypo
ccggcctatttgtttgatttctctttctgtctccccccactagaaggggaatgccccatggtagggcggtgcccctggctgtagcgcagtcccttgcatggtgcctggcatgcgataggtaatcggggcacccatctccctctcgggatgcactcattgatgtac

SEQ ID NO: 188726 - DNA, 323 bp, Homo sapiens
  chr19:10859008-10859331
  hypo
gaaaccagcaggactcgcggctggacaaggcgggtgggtgagggccaggggagccccaggtctgcagcctcgtgaggggtttctcccctccctgccctttggggtgaccacagggatgcagtggcacctacctgcggacactgtgtgggccgagcactgtaaggcttgggcgtccttgctgggtgaccaatggctattgttggaaggatgaggcagggaccgaggtgggcagaggagactgggcatgggtccccacttctgctccaacagagcgacagagaagcccctgaggtgggtgcgggtgactgcgggtctgcctcatt

SEQ ID NO: 188727 - DNA, 30 bp, Homo sapiens; identical to SEQ ID NO: 96410
  chr19:10861306-10861336
  hypo

SEQ ID NO: 188728 - DNA, 225 bp, Homo sapiens; identical to SEQ ID NO: 96411
  chr19:10872392-10872617
  hypo

SEQ ID NO: 188729 - DNA, 30 bp, Homo sapiens
  chr19:10874237-10874267
  hypo
tctccagggaggcagcgtgagcacctggca

SEQ ID NO: 188730 - DNA, 401 bp, Homo sapiens
  chr19:10874560-10874961
  hypo
gagaggctggcatggcgccaggcaagaggcaatgggggcctggccctggtggtgcgggcagatgccaggcagtctagactgtcttccaggcaaggcattaagcagcataggcacccttgctgggggaggtgggtgggaggtaggacgccttactaagaggagaggaaaatgaacacattgcgggcatcagtgattgctggggccggcggggccttgtggggtatacaccagaccacgtggctcctagggattggcagctggctctctgtgaccaaactcagaaccaggctgccaccctttactggcccgggacttgttaaagtgacttccctctctgtgccttggtagcttcatctgtaaaatgggggtgatggtggcgctgccatcgtggccatggcacc

SEQ ID NO: 188731 - DNA, 156 bp, Homo sapiens; identical to SEQ ID NO: 32123
  chr19:10875503-10875659
  hypo

SEQ ID NO: 188732 - DNA, 156 bp, Homo sapiens; identical to SEQ ID NO: 32124
  chr19:10875958-10876114
  hypo

SEQ ID NO: 188733 - DNA, 30 bp, Homo sapiens
  chr19:10876656-10876686
  hypo
ctgatgggatttgatcgcagtcatatggga

SEQ ID NO: 188734 - DNA, 30 bp, Homo sapiens
  chr19:10876902-10876932
  hypo
cttaagtagtgccagcgggcacgtgaccag

SEQ ID NO: 188735 - DNA, 208 bp, Homo sapiens
  chr19:10881731-10881939
  hypo
gtgctggataataggcgtgagccactgtgcccagccatttcccccttatttttagcatcactacagtagctgtgatctctgagctttggggatatcccctccccaacattttactctgaaaattcgaacatctggaaacgtcaaggctttgtacagtggacacctgtgtactcggcagccaccttccgtgatgaacatgccttatatt

SEQ ID NO: 188736 - DNA, 30 bp, Homo sapiens
  chr19:10907607-10907637
  hypo
gtgtccccagcgctccgggttgccagggaa

SEQ ID NO: 188737 - DNA, 299 bp, Homo sapiens
  chr19:10907903-10908202
  hypo
cttccggggcaaatgcgggcgcaggctcccccatgcatggactaatcagatgactctcgtttcttctcttctctctgtctcctgtcctgcgtgtgtggcctgcactgtccctgggtgtctttctgcctcatcctgccctccgcatgacccaggacggggctcttcacccccgacatggcctttgaagccattgtgaaaaaacagattgtaaaactcaaagagccgagtttgaagtgtgttgatctcgtggtctcagagctggccacggtcataaaaaagtgtgccgagaaggtaacagg

SEQ ID NO: 188738 - DNA, 91 bp, Homo sapiens
  chr19:10927554-10927645
  hypo
gaaagccagagcccccgaccctcccgtggagccccacactggagtctggagcagcagtgggagaagggccgggcgccggccgtaatgagaa

SEQ ID NO: 188739 - DNA, 58 bp, Homo sapiens
  chr19:10928042-10928100
  hypo
acactcacctgccggcgagtttggggggcctgtctcgacgagccgctcacccaagccc

SEQ ID NO: 188740 - DNA, 30 bp, Homo sapiens; identical to SEQ ID NO: 96417
  chr19:10928486-10928516
  hypo

SEQ ID NO: 188741 - DNA, 130 bp, Homo sapiens
  chr19:10928841-10928971
  hypo
cccttgggtccgcagcggcatccctccctccatggccaccgggcccctctcctatgctctgctccctccatggccaccgggcccctctcctatgctctgctccctccatggccaccgggcccctcttcct

SEQ ID NO: 188742 - DNA, 31 bp, Homo sapiens; identical to SEQ ID NO: 12036
  chr19:10929999-10930030
  hypo

SEQ ID NO: 188743 - DNA, 31 bp, Homo sapiens; identical to SEQ ID NO: 32126
  chr19:10940832-10940863
  hypo

SEQ ID NO: 188744 - DNA, 75 bp, Homo sapiens; identical to SEQ ID NO: 32127
  chr19:10941837-10941912
  hypo

SEQ ID NO: 188745 - DNA, 30 bp, Homo sapiens; identical to SEQ ID NO: 96421
  chr19:10942228-10942258
  hypo

SEQ ID NO: 188746 - DNA, 30 bp, Homo sapiens; identical to SEQ ID NO: 32128
  chr19:10943182-10943212
  hypo

SEQ ID NO: 188747 - DNA, 31 bp, Homo sapiens; identical to SEQ ID NO: 32129
  chr19:10943884-10943915
  hypo

SEQ ID NO: 188748 - DNA, 118 bp, Homo sapiens
  chr19:10949224-10949342
  hypo
attctgaaacggcctcgttgtcttgagtaacacccggggtcgttgtctcacagccacgaagaacaaggaccaggacacacaaaagaatgaggttgagaacgaacgtttaataggcaac

SEQ ID NO: 188749 - DNA, 30 bp, Homo sapiens
  chr19:10980066-10980096
  hypo
tgtctccaggcattcgggggcctgaggtcc

SEQ ID NO: 188750 - DNA, 551 bp, Homo sapiens
  chr19:11001588-11002139
  hypo
tgtgctatgactgggcgggccattgcactccagcctgggtgacagagggagaccaaaactgagtcagtgttcccaagcagtgtgtgaagctgattctctgtcagccacgtgccagatgggttgggtcccaggggtggccacctgggggacagggccagacacttgttctgggcccaatatggccttgtgtccagaactctctcggtggctccttctctcgaccctttgccttgagccggagcactgtggggacacaggaaccaagactggtgttttgtgccaatgccacactactgtgtgcccgtgggtcttgggccgggcatgggtgggttcgtcctcatggctacacagtgaaccatgtgttattttatttttctagacactaaagctgaggtgtcgggaggtgatggtcccttgcttgcaggtggcagagctcaggttcaaacctggatcttactgcacctggctcgtttgggaggcctcccttgctggaatgcaggtcagggagccccgatgcccttgggctgactgccccacgtccatcacaccca

SEQ ID NO: 188751 - DNA, 401 bp, Homo sapiens
  chr19:11002340-11002741
  hypo
aacttgcgtagacgccggccctcccgcccccagccttcgccattgccttttgtctggctatctttcatgtacaagggagaaattcaagccactcaggagggtgtaacatgaaaagtcagtctctccttctctccgcactgcccgtgacctgtggtttctcaggcacatacaagcgcgcacgcataaatctctcctccaacctgctgggcttcaagttatgcacgttcacacaatggcaaaggagggtgcggattgaaaagtatgacttgcttcccggaggcagcactgaagtcactttattgtgtttccagacaagccccatgaatgcagtgtgcactgcccctcctccctctgtcccttccccgcccatctgtacacctgtggtgcgtaggttttacacc

SEQ ID NO: 188752 - DNA, 292 bp, Homo sapiens; identical to SEQ ID NO: 96425
  chr19:11002986-11003278
  hypo

SEQ ID NO: 188753 - DNA, 447 bp, Homo sapiens
  chr19:11004768-11005215
  hypo
ggtgtcgcctcctcccgagtctgcctggaatctgaattgggcctggtccgcatgcatcagcttccgtgctttccctcctctcagcgcttactgccagttcctgttgtccgtctcctcactgccctgctgggtgctgtctgcctcccactgtggactcccagcatgggagggccgggggtggctctctggttcaccgccaggtcctctgtgcctgcatgtggtccgggcagagcaggctgagcagagatgccagctgagtgggcttcagaaagcgtgtttttttttccgtgcctgtgggatgggagttggccacggggggtcggggtgtctccctctttttacctaactctcctcctttgatcgggaatattttcctctggaaggtgaagagcccatgttgtctttggcagcaggaggcgatttaatacaagacgtaccatttggaca

SEQ ID NO: 188754 - DNA, 198 bp, Homo sapiens; identical to SEQ ID NO: 32133
  chr19:11008195-11008393
  hypo

SEQ ID NO: 188755 - DNA, 46 bp, Homo sapiens; identical to SEQ ID NO: 32134
  chr19:11017076-11017122
  hypo

SEQ ID NO: 188756 - DNA, 264 bp, Homo sapiens
  chr19:11026625-11026889
  hypo
ggcctcaactgaggtccccagcggcgttggggtagcccggggcccaccaccctccctctgtccagagcaactttgctatgctttcccggctgcacacatgcacagacggcagggcctgagaggcagcgcctggccacatcccgggcactgcctgcttccccgtgagtctttggcaggtccctcacacctgccaggtctagtaataggacataaagatgagccaccagcctcccagtctcaggtggaattcgtgagctggtgcag

SEQ ID NO: 188757 - DNA, 683 bp, Homo sapiens
  chr19:11029953-11030636
  hypo
tggtttccagtgtgtcgctaccacggacaatctaattatacatgtaagtttgttgatgtgttcatgtatctggaggttaaactcctgtagtgccaaatcttttatgtggataaacacttgtcatttggagagctgtcacctgattgccctcggtggcgttgtgccggtcccctcctcacggcgtgtctgggaagagcaagctcgttttagctgcacagcctagaagccgtgggcagacctgggggaaggggcagggctctcccctcccatgctggccctggcgtcagatgccacgtcacacctgtggtctctcccaggacacatttgacatccggatcctgatggccaagtctgtcaagtacacggtgaacttcttagaagccaaagaaggagatttgcacaggtactggcacccacactccatcctcccaggcctggctcaggccgaaggtcagggccacccctggctcccgccggcatcctgccgtcccagggcagatggtgggcgggggccccaggcctctgcacctggcaccccctcttctctctcggcagcgcctgtctggcttccccagcagccactgccctttgccttccaggatagaaatcccattcaaattccacatgctgcattcagggctggtccacggcctggctttctggtttgacgttgctttcatcgg

SEQ ID NO: 188758 - DNA, 197 bp, Homo sapiens
  chr19:11031990-11032187
  hypo
tgggtggctgggggcggtgacgccgtctcccttccttctttcctccctctcgctgcgcagccaacacggggattgtcaatcacacccactcccggatgggctccataatgagcacggggattgtccaaggtaacgagggtggcgggggcagggcccgtgggggccgagctagcgtgtgagtcgccatcctctgtccg

SEQ ID NO: 188759 - DNA, 30 bp, Homo sapiens; identical to SEQ ID NO: 32137
  chr19:11034882-11034912
  hypo

SEQ ID NO: 188760 - DNA, 31 bp, Homo sapiens
  chr19:11044505-11044536
  hypo
atagaaatacatatataaagccgggcgtggt

SEQ ID NO: 188761 - DNA, 25 bp, Homo sapiens
  chr19:11063740-11063765
  hypo
actcagtcacccaggcaggagcgga

SEQ ID NO: 188762 - DNA, 25 bp, Homo sapiens
  chr19:11064064-11064089
  hypo
tgtgtgtgcgcgcgcgcgcgcgtgt

SEQ ID NO: 188763 - DNA, 181 bp, Homo sapiens
  chr19:11068307-11068488
  hypo
ccgcgcctggcccggcctgtttttctttacactattgcatattagtgtgattagcataaaagacaattagagaacagtcataccatccactccatgggcagcaaccctgcctcctccatgcattgctgcagggtattcctagctcaatgcttagcatttggagagagcataagaaatacta

SEQ ID NO: 188764 - DNA, 40 bp, Homo sapiens; identical to SEQ ID NO: 96434
  chr19:11077566-11077606
  hypo

SEQ ID NO: 188765 - DNA, 31 bp, Homo sapiens; identical to SEQ ID NO: 32138
  chr19:11083222-11083253
  hypo

SEQ ID NO: 188766 - DNA, 102 bp, Homo sapiens
  chr19:11084519-11084621
  hypo
acaggcgtgagccaccgcgcccggcctggaggttttcttatagaccaccgaggggaacattttgttttgtagttcacgcatagtaaacggggctggctctgc

SEQ ID NO: 188767 - DNA, 23 bp, Homo sapiens
  chr19:11087137-11087160
  hypo
cactgtggcttgggctaggtgcg

SEQ ID NO: 188768 - DNA, 30 bp, Homo sapiens
  chr19:11101961-11101991
  hypo
agatcgagcaggagcgcaagcgccggcaga

SEQ ID NO: 188769 - DNA, 37 bp, Homo sapiens; identical to SEQ ID NO: 32139
  chr19:11117136-11117173
  hypo

SEQ ID NO: 188770 - DNA, 22 bp, Homo sapiens
  chr19:11121908-11121930
  hypo
ttttttttttttgaaacggagc

SEQ ID NO: 188771 - DNA, 594 bp, Homo sapiens
  chr19:11128615-11129209
  hypo
cagggcaaaaggcagcagaagcgcaaggctgctgagcctctgctccccacgcttcttcaggaactctccccagccttcaccacagccatgcgtccttctgtctattggctgtgccgcctggttggctgtggcttccagcggggctggagatgggttcatggtggacacagcacctccctcgtggagctgcttgggggcaaaccacgagtagtccctgggactccagcttcgagccctgtctttacggaccaccccgtctagactttctgagtggcttccctcccccactgaaaactccctgccccagagttcctcccagagcccgtcccctttgggactcagctttattaccgcctccaccctctcctcagtctctaggctgtcggtctcaggtgactcacccctccccactgcattctgcctgcccccatgtcctccctcattccagccctggtcatcccacaggggaacagccacgagttgccgctccctcccatccctgtcctcccgcctgccacctgagccaggccccgcctcgcccctcactgtcctcgttctctctcacagtcaggaaccttccgtggctggagggtg

SEQ ID NO: 188772 - DNA, 427 bp, Homo sapiens
  chr19:11129444-11129871
  hypo
agcccttcacgtcctcgccagtctctcttcctccctccctccctcagctgccctaaacacagtttctctgcccactcggagggctgtggccatgttggcctcgcccctgacagccagtggctatgggtttgcacagtgagccattgatgagagaccggcacttgactctcatttccttgttccatcagaacgctgtccaactgggcgtacgagtttgacaagtgggccccctccgtggtgaaggtgtcttacaaggtaggtcacagccactgaggtttcctctcttgctacggaggtgcaggcggtggtgggcaggacgtccacacatacctctggacagtgaacctgagaatgctgggtctccagtcgcatggagtctccaggacagcctggaactccagtcacatggatccgggagtttggactg

SEQ ID NO: 188773 - DNA, 529 bp, Homo sapiens; identical to SEQ ID NO: 55625
  chr19:11144002-11144531
  hypo

SEQ ID NO: 188774 - DNA, 184 bp, Homo sapiens; identical to SEQ ID NO: 96443
  chr19:11145620-11145804
  hypo

SEQ ID NO: 188775 - DNA, 249 bp, Homo sapiens; identical to SEQ ID NO: 96444
  chr19:11151829-11152078
  hypo

SEQ ID NO: 188776 - DNA, 185 bp, Homo sapiens; identical to SEQ ID NO: 32144
  chr19:11152796-11152981
  hypo

SEQ ID NO: 188777 - DNA, 331 bp, Homo sapiens
  chr19:11154842-11155173
  hypo
agagaggatgagcctcgaccacccccacacacgcacacaccatgcacttggatccacgtgacatggactgtggatgtaagaacgtgaaaggtaaaacaaaattctagaagaaagcacgggagaaaatcttcatgagtaggcatcgatttcttccacgggagccaaaagccactaatcacaaacaattgagaaattagacctcactgaaattaataacatctgtttattaatggacacgctgatggagacagtgaaaactcctcatagatgaggaaaagacaacacaatttaaagctggacaagagccgggaacagacgcctccttacacag

SEQ ID NO: 188778 - DNA, 31 bp, Homo sapiens; identical to SEQ ID NO: 32145
  chr19:11159058-11159089
  hypo

SEQ ID NO: 188779 - DNA, 31 bp, Homo sapiens; identical to SEQ ID NO: 96447
  chr19:11159327-11159358
  hypo

SEQ ID NO: 188780 - DNA, 31 bp, Homo sapiens; identical to SEQ ID NO: 96448
  chr19:11160309-11160340
  hypo

SEQ ID NO: 188781 - DNA, 31 bp, Homo sapiens; identical to SEQ ID NO: 32146
  chr19:11161622-11161653
  hypo

SEQ ID NO: 188782 - DNA, 31 bp, Homo sapiens; identical to SEQ ID NO: 32147
  chr19:11161939-11161970
  hypo

SEQ ID NO: 188783 - DNA, 30 bp, Homo sapiens; identical to SEQ ID NO: 96451
  chr19:11168900-11168930
  hypo

SEQ ID NO: 188784 - DNA, 165 bp, Homo sapiens
  chr19:11172376-11172541
  hypo
ttatttaaagtttggcaggtccctggcaaggtgccctggcaggggtggccaacgcacactctctcctcctgtcccctctccaggaccgctcaggaagtggcagcgaagaagactgagccccgacattccagtctcgaccccgagcccctcgttccagagctgaga

SEQ ID NO: 188785 - DNA, 151 bp, Homo sapiens
  chr19:11172752-11172903
  hypo
cctgtttttcttttccgttgctggcagtactgttgcgccgcagtttggagtcactgtagttaagtgtggatgcatgtgcgtcaccgtccactcctcctactgtattttattggacaggtcagactcgccgggggcccggcgagggtatgtc

SEQ ID NO: 188786 - DNA, 438 bp, Homo sapiens; identical to SEQ ID NO: 130769
  chr19:11199836-11200274
  hypo

SEQ ID NO: 188787 - DNA, 461 bp, Homo sapiens; identical to SEQ ID NO: 130770
  chr19:11200841-11201302
  hypo

SEQ ID NO: 188788 - DNA, 22 bp, Homo sapiens
  chr19:11213285-11213307
  hypo
cggcctcagtgggtctttcctt

SEQ ID NO: 188789 - DNA, 30 bp, Homo sapiens
  chr19:11213662-11213692
  hypo
tcttcgggtttgtcacgcacagtcagggag

SEQ ID NO: 188790 - DNA, 271 bp, Homo sapiens
  chr19:11213901-11214172
  hypo
gaaatggactttgaagctgggcgtcttcttggctgtcttaatacaagtggcacatccaaatccaaaaccccgaaattcaaagtcttgagcacccgaaattctgaaacgtcttgagcactgacctttagaaggaaatgcttattggagcattttggatttcggatttttaccactgagtgtggagtcctaattaggaaaaaaaccaggctgaccgaaccaaaggaaagcaataaaagaaggcagatagggtcaggcacggtggctcacccct

SEQ ID NO: 188791 - DNA, 234 bp, Homo sapiens; identical to SEQ ID NO: 96458
  chr19:11215984-11216218
  hypo

SEQ ID NO: 188792 - DNA, 30 bp, Homo sapiens
  chr19:11242970-11243000
  hypo
cgtgatcgtgaatatcgagaactgccattg

SEQ ID NO: 188793 - DNA, 128 bp, Homo sapiens
  chr19:11252646-11252774
  hypo
agtctagtcctcaggagaagccgcccagggagcactagggcccgaggaagggttcaacctcgagactccatagcccctgggctcccgtccccagaaacaccagttacgagcagggggctggccatggt

SEQ ID NO: 188794 - DNA, 30 bp, Homo sapiens
  chr19:11277554-11277584
  hypo
gcatcaaggagccagcgagcagggaagagc

SEQ ID NO: 188795 - DNA, 30 bp, Homo sapiens; identical to SEQ ID NO: 96459
  chr19:11280640-11280670
  hypo

SEQ ID NO: 188796 - DNA, 103 bp, Homo sapiens
  chr19:11285243-11285346
  hypo
tagtccagcagccgcgcagacatggcccggaacgtgaccaggtgccgccgcaccagctcggggtgtgcgtcgctgcggcaggccaggcgcagccactcctgca

SEQ ID NO: 188797 - DNA, 31 bp, Homo sapiens; identical to SEQ ID NO: 96461
  chr19:11285561-11285592
  hypo

SEQ ID NO: 188798 - DNA, 154 bp, Homo sapiens
  chr19:11289072-11289226
  hypo
caacctcctctttccgtttcatgatagatcgcacgcctgccgggggcccgcctggaggggaggacagcggaggtgctgtgagagtccttcagggccagactccgaactggcgccatcccggtgccccgtccctcttggcggccacccaccactt

SEQ ID NO: 188799 - DNA, 1147 bp, Homo sapiens
  chr19:11303545-11304692
  hypo
tcttcaccatatggacgttgctggtagctgcagcgggcactgggcacattgtctccaccacctcctggctgcggaacacaggtgggctctcaggcctaccaggcattgccagggccctcagccctgtgccgtaaggctccaggctctgggcccgctgtgcgggggcgccagcggctgtgctggccaccacctccacctcccgtggcccttctaccacccggactgtatccacgcggaccgggctgtccggcggtggccaggcctggggctgggggtcagcctgccgggcctgagctgcctgcagctcctgcagcgccttcttgagctgggtctccagcacagcgaccttggcggcgagggcagcctccccatcaggcatgcccaagtcccgttctcgaacccaggtgcccacactccgggtctccagtgccactgggtcctctgggggatcggggaggtccaggcagagctcgctgcgaccccggcccgctgtggggtggcccaggaacttctggctcttaagttgtactgtgagctgccgcttttcctcctggagcaccgagagcttcacctggagcacagggatcagcttcacctgctcctccagctgccgcagcttccgcagggcacccgccatctgctcccgcacgtgggccaggtgcccggcactgggaggcaccggtgtggacagtcctgaactccgtggtgtcgggggtggcaaccccacgcccaccagggaggctgtcgagccggccgcactgggggtcagggagcccaggccggtgggtgtggccgcctggtcctcgagacggcgacgggcatccagcagcgtgcgctccacccgcggattgaagccaccgcgggtctccagagcaccatactgagggtagaagccacggccgcagtaggaataggctgagtggcggctgtccccactggcattggagcacagcgactcagtggacgtccaccaggagccagggccacggggcagcgagctcaggcgggggcggcgctgcactgccacgcgtcgcagcgtgtggcccttctcgatgtcatccacgtacttgaggaagtccaggtccaggcggtagccatagggggtctccacggagtagggtggatcggggtccttggcagggaaggc

SEQ ID NO: 188800 - DNA, 331 bp, Homo sapiens; identical to SEQ ID NO: 130774
  chr19:11308101-11308432
  hypo

SEQ ID NO: 188801 - DNA, 60 bp, Homo sapiens; identical to SEQ ID NO: 96465
  chr19:11319673-11319733
  hypo

SEQ ID NO: 188802 - DNA, 177 bp, Homo sapiens; identical to SEQ ID NO: 96466
  chr19:11327509-11327686
  hypo

SEQ ID NO: 188803 - DNA, 64 bp, Homo sapiens; identical to SEQ ID NO: 96467
  chr19:11333606-11333670
  hypo

SEQ ID NO: 188804 - DNA, 151 bp, Homo sapiens; identical to SEQ ID NO: 96468
  chr19:11339622-11339773
  hypo

SEQ ID NO: 188805 - DNA, 31 bp, Homo sapiens; identical to SEQ ID NO: 96469
  chr19:11361414-11361445
  hypo

SEQ ID NO: 188806 - DNA, 43 bp, Homo sapiens; identical to SEQ ID NO: 55632
  chr19:11373071-11373114
  hypo

SEQ ID NO: 188807 - DNA, 31 bp, Homo sapiens; identical to SEQ ID NO: 55633
  chr19:11399747-11399778
  hypo

SEQ ID NO: 188808 - DNA, 30 bp, Homo sapiens; identical to SEQ ID NO: 96472
  chr19:11453739-11453769
  hypo

SEQ ID NO: 188809 - DNA, 175 bp, Homo sapiens; identical to SEQ ID NO: 55634
  chr19:11465992-11466167
  hypo

SEQ ID NO: 188810 - DNA, 31 bp, Homo sapiens; identical to SEQ ID NO: 55635
  chr19:11466333-11466364
  hypo

SEQ ID NO: 188811 - DNA, 31 bp, Homo sapiens; identical to SEQ ID NO: 55636
  chr19:11466379-11466410
  hypo

SEQ ID NO: 188812 - DNA, 30 bp, Homo sapiens; identical to SEQ ID NO: 96476
  chr19:11468257-11468287
  hypo

SEQ ID NO: 188813 - DNA, 301 bp, Homo sapiens; identical to SEQ ID NO: 96477
  chr19:11473073-11473374
  hypo

SEQ ID NO: 188814 - DNA, 30 bp, Homo sapiens; identical to SEQ ID NO: 96478
  chr19:11474847-11474877
  hypo

SEQ ID NO: 188815 - DNA, 28 bp, Homo sapiens
  chr19:11490376-11490404
  hypo
attttttttttttttttgagacggagtt

SEQ ID NO: 188816 - DNA, 30 bp, Homo sapiens
  chr19:11505108-11505138
  hypo
gtcccctctttccgccgcagcatgaagtct

SEQ ID NO: 188817 - DNA, 135 bp, Homo sapiens
  chr19:11510382-11510517
  hypo
gatggataccccgggcgctcagtgtgcctcctgtatacactcctggccccacaatcctgtgtgtacacatgtgcatgcacacacacgtgcacacacacagagcctgggtgcccgcaggcccgcatgcacacacaa

SEQ ID NO: 188818 - DNA, 31 bp, Homo sapiens; identical to SEQ ID NO: 96480
  chr19:11515224-11515255
  hypo

SEQ ID NO: 188819 - DNA, 31 bp, Homo sapiens; identical to SEQ ID NO: 96481
  chr19:11527679-11527710
  hypo

SEQ ID NO: 188820 - DNA, 864 bp, Homo sapiens; identical to SEQ ID NO: 55639
  chr19:11529237-11530101
  hypo

SEQ ID NO: 188821 - DNA, 30 bp, Homo sapiens
  chr19:11537264-11537294
  hypo
ccttggcaatgtcccgggcattgagggcct

SEQ ID NO: 188822 - DNA, 41 bp, Homo sapiens; identical to SEQ ID NO: 96483
  chr19:11549271-11549312
  hypo

SEQ ID NO: 188823 - DNA, 185 bp, Homo sapiens; identical to SEQ ID NO: 32159
  chr19:11559277-11559462
  hypo

SEQ ID NO: 188824 - DNA, 402 bp, Homo sapiens; identical to SEQ ID NO: 96485
  chr19:11559904-11560306
  hypo

SEQ ID NO: 188825 - DNA, 156 bp, Homo sapiens; identical to SEQ ID NO: 96486
  chr19:11565668-11565824
  hypo

SEQ ID NO: 188826 - DNA, 30 bp, Homo sapiens
  chr19:11574115-11574145
  hypo
agtcctgactgaccgcgcaacaccgtcaca

SEQ ID NO: 188827 - DNA, 905 bp, Homo sapiens; identical to SEQ ID NO: 130790
  chr19:11590394-11591299
  hypo

SEQ ID NO: 188828 - DNA, 285 bp, Homo sapiens; identical to SEQ ID NO: 130791
  chr19:11591353-11591638
  hypo

SEQ ID NO: 188829 - DNA, 304 bp, Homo sapiens; identical to SEQ ID NO: 55647
  chr19:11591672-11591976
  hypo

SEQ ID NO: 188830 - DNA, 1073 bp, Homo sapiens; identical to SEQ ID NO: 55648
  chr19:11592583-11593656
  hypo

SEQ ID NO: 188831 - DNA, 214 bp, Homo sapiens
  chr19:11594588-11594802
  hypo
agttgtactgcacctccgcagtgtgcttcttcatgtgccagttgagcgacgcgcgctgccggcactggtagccacagatctcgcacctgccgggagcccgtggcgggacggggcggggtcagagtgggcggggcggggcggggccctacaaggccgagcgcaggtggaaccgggcccagacactgcgttggggcgaagccgcccctgggacctg

SEQ ID NO: 188832 - DNA, 529 bp, Homo sapiens
  chr19:11598118-11598647
  hypo
cgatgcctgctactgcggtggcgtccatggtgctaggctggctaccctcgggctctgtctgggtgtaggctgccacaccctccatcatggcacagggcacctcctcgcccagtccactgccggggacaccgctgcctgctgccatgttgaggtgaatgccctcggccgtgagagcgtcgtaaccagggcccgcaatgatgatcacctgtgagccgggcaccatgcctggcatggggcagctggccaccacctcacccagggcctcctggggcacgttctcaaagagggcgctggggcccgcacccacttgcacaggcaccggcacgcacaccactgtctccagggcttcaggcccattgcctgctgggttggagcacagcggggtaccctgctcggccaggctttccacgtggtggacgtcaaagggaatgtgcacgccctcctgagtgatgagcccgctgctgcccaccgggctggtgggcgtcgctgccgctgccgctgccgcagccttgaccggctggccctcagg

SEQ ID NO: 188833 - DNA, 371 bp, Homo sapiens; identical to SEQ ID NO: 32164
  chr19:11605728-11606099
  hypo

SEQ ID NO: 188834 - DNA, 31 bp, Homo sapiens; identical to SEQ ID NO: 96493
  chr19:11608299-11608330
  hypo

SEQ ID NO: 188835 - DNA, 30 bp, Homo sapiens; identical to SEQ ID NO: 96494
  chr19:11617829-11617859
  hypo

SEQ ID NO: 188836 - DNA, 30 bp, Homo sapiens; identical to SEQ ID NO: 32165
  chr19:11649107-11649137
  hypo

SEQ ID NO: 188837 - DNA, 119 bp, Homo sapiens; identical to SEQ ID NO: 32166
  chr19:11658622-11658741
  hypo

SEQ ID NO: 188838 - DNA, 30 bp, Homo sapiens; identical to SEQ ID NO: 96497
  chr19:11660467-11660497
  hypo

SEQ ID NO: 188839 - DNA, 447 bp, Homo sapiens
  chr19:11662233-11662680
  hypo
ctgagcctgccaacccgggactctaaaaggctgtgtccagggcctcaacctcctcacatttcagaggggaccctgttatccccgggaggagggagaggtccccaaccatcaggattccaaggaggagaggaggcagagaagcgaggagcgcggcacggagctgtcttctccccagggagggcaggagttgaggctggaacgtggagacctgcggaggcagacaccagaagacccgcgcacagacgcacgcagcccctggggcctcgtaaaccggattccaggcgcttttggcctggctaccgcaagtcctgctccccctgggccggcgcggggaagctatgctgaggaggatccgggcctggcccagggccctgcctcctcgggaaaacagcaccatattagcacttagcctgtgaggctggggtgggcgggcggcaggaagggcct

SEQ ID NO: 188840 - DNA, 30 bp, Homo sapiens; identical to SEQ ID NO: 32168
  chr19:11666079-11666109
  hypo

SEQ ID NO: 188841 - DNA, 30 bp, Homo sapiens; identical to SEQ ID NO: 32169
  chr19:11688231-11688261
  hypo

SEQ ID NO: 188842 - DNA, 97 bp, Homo sapiens
  chr19:11699966-11700063
  hypo
taactcccacctctttcctcaatgatttgaacgtttgatcatttgaatgtttgaatgtttgatcctcgtgatcaaacattcccgttactctctagac

SEQ ID NO: 188843 - DNA, 30 bp, Homo sapiens; identical to SEQ ID NO: 96501
  chr19:11773265-11773295
  hypo

SEQ ID NO: 188844 - DNA, 77 bp, Homo sapiens; identical to SEQ ID NO: 96502
  chr19:11788683-11788760
  hypo

SEQ ID NO: 188845 - DNA, 157 bp, Homo sapiens; identical to SEQ ID NO: 96503
  chr19:11794319-11794476
  hypo

SEQ ID NO: 188846 - DNA, 149 bp, Homo sapiens
  chr19:11820661-11820810
  hypo
aagaccatgcggccacggccgagcctgcctttccagcactgccatggcatgtcccactgctcctgaagtacaggaatggccactcatgggaactgaccgggagtgactgtgtgcgcagtcagcaacacactgaggctggagtgcttgta

SEQ ID NO: 188847 - DNA, 20 bp, Homo sapiens
  chr19:11850742-11850762
  hypo
cgttatggccgggcgcggtg

SEQ ID NO: 188848 - DNA, 101 bp, Homo sapiens; identical to SEQ ID NO: 96505
  chr19:11926328-11926429
  hypo

SEQ ID NO: 188849 - DNA, 101 bp, Homo sapiens; identical to SEQ ID NO: 96506
  chr19:11926728-11926829
  hypo

SEQ ID NO: 188850 - DNA, 31 bp, Homo sapiens; identical to SEQ ID NO: 12051
  chr19:11950106-11950137
  hypo

SEQ ID NO: 188851 - DNA, 835 bp, Homo sapiens; identical to SEQ ID NO: 130810
  chr19:11959363-11960198
  hypo

SEQ ID NO: 188852 - DNA, 90 bp, Homo sapiens; identical to SEQ ID NO: 96509
  chr19:11961500-11961590
  hypo

SEQ ID NO: 188853 - DNA, 897 bp, Homo sapiens; identical to SEQ ID NO: 130816
  chr19:12146020-12146917
  hypo

SEQ ID NO: 188854 - DNA, 43 bp, Homo sapiens; identical to SEQ ID NO: 96512
  chr19:12177041-12177084
  hypo

SEQ ID NO: 188855 - DNA, 38 bp, Homo sapiens; identical to SEQ ID NO: 96513
  chr19:12177362-12177400
  hypo

SEQ ID NO: 188856 - DNA, 681 bp, Homo sapiens; identical to SEQ ID NO: 55668
  chr19:12203012-12203693
  hypo

SEQ ID NO: 188857 - DNA, 46 bp, Homo sapiens; identical to SEQ ID NO: 12059
  chr19:12204538-12204584
  hypo

SEQ ID NO: 188858 - DNA, 361 bp, Homo sapiens
  chr19:12205464-12205825
  hypo
cgcccagtctatacctgccagtcttacacagaagagtttcactgccctaaaaatcctttgtgctttgtgtagccatcacactcccctccctctcttccactaaccccttaatccctggcacaaccgatgattttattgcctttagagttttgccttgtccagaatgtcatgtacttggaatcatgttgtaagtagccatttcggcctgtttgtttcacgtaaaaatacgcatttaaagtatctttgtgtctatgtggcttgataacagatttattatttctttattttacaaaattttaaagagatggggtctcactatgttgcccaatgtggttggcggatcacgaagtcagaagttcga

SEQ ID NO: 188859 - DNA, 24 bp, Homo sapiens
  chr19:12217685-12217709
  hypo
caccctgggcgacagagcgagact

SEQ ID NO: 188860 - DNA, 30 bp, Homo sapiens; identical to SEQ ID NO: 96517
  chr19:12230739-12230769
  hypo

SEQ ID NO: 188861 - DNA, 90 bp, Homo sapiens; identical to SEQ ID NO: 96518
  chr19:12260459-12260549
  hypo

SEQ ID NO: 188862 - DNA, 29 bp, Homo sapiens
  chr19:12263637-12263666
  hypo
gacggagcgagactccatcttaaaaaaaa

SEQ ID NO: 188863 - DNA, 923 bp, Homo sapiens; identical to SEQ ID NO: 55671
  chr19:12266888-12267811
  hypo

SEQ ID NO: 188864 - DNA, 31 bp, Homo sapiens; identical to SEQ ID NO: 32176
  chr19:12347792-12347823
  hypo

SEQ ID NO: 188865 - DNA, 44 bp, Homo sapiens; identical to SEQ ID NO: 96522
  chr19:12416131-12416175
  hypo

SEQ ID NO: 188866 - DNA, 112 bp, Homo sapiens; identical to SEQ ID NO: 32177
  chr19:12418637-12418749
  hypo

SEQ ID NO: 188867 - DNA, 146 bp, Homo sapiens; identical to SEQ ID NO: 96524
  chr19:12461695-12461841
  hypo

SEQ ID NO: 188868 - DNA, 24 bp, Homo sapiens
  chr19:12479317-12479341
  hypo
cccgcaacagactacaagattgac

SEQ ID NO: 188869 - DNA, 1143 bp, Homo sapiens; identical to SEQ ID NO: 130833
  chr19:12594999-12596142
  hypo

SEQ ID NO: 188870 - DNA, 31 bp, Homo sapiens; identical to SEQ ID NO: 96527
  chr19:12628508-12628539
  hypo

SEQ ID NO: 188871 - DNA, 20 bp, Homo sapiens
  chr19:12646814-12646834
  hypo
gactccgtctcaaaaaaaaa

SEQ ID NO: 188872 - DNA, 30 bp, Homo sapiens; identical to SEQ ID NO: 96528
  chr19:12666765-12666795
  hypo

SEQ ID NO: 188873 - DNA, 30 bp, Homo sapiens
  chr19:12688712-12688742
  hypo
acaaaggacagacccgacccctatcgtgcc

SEQ ID NO: 188874 - DNA, 252 bp, Homo sapiens
  chr19:12691090-12691342
  hypo
acatatctgcaatcccgcaggagagtgcaagttcctcccccatttgttaaatatttcattgccgcatgagtcacgtcttcaaagggaattaggacaactgaaggcttaatcacaccgtttacattccttgaatttctctccagcgtaagtactctcatacatccaaaaggaactaatacaactgacagcattaccacactttactttcttagggcttctgtctactatgagtcctttcgtgcacgtgcaaag

SEQ ID NO: 188875 - DNA, 41 bp, Homo sapiens
  chr19:12701914-12701955
  hypo
ctctggggccgggcacggtggctcatgcctgtaatcccaac

SEQ ID NO: 188876 - DNA, 133 bp, Homo sapiens; identical to SEQ ID NO: 130837
  chr19:12707773-12707906
  hypo

SEQ ID NO: 188877 - DNA, 121 bp, Homo sapiens
  chr19:12710769-12710890
  hypo
acctgctctttaacaaaaattgtaaagggtaataaaaaatctataaaaattgccaaacattggcgtaaatatgtctataaaattgggtaaatatgtctataaggttttattaagaattggg

SEQ ID NO: 188878 - DNA, 19 bp, Homo sapiens
  chr19:12726058-12726077
  hypo
ggctcgagcacttctcccg

SEQ ID NO: 188879 - DNA, 96 bp, Homo sapiens; identical to SEQ ID NO: 96530
  chr19:12729966-12730062
  hypo

SEQ ID NO: 188880 - DNA, 121 bp, Homo sapiens; identical to SEQ ID NO: 32180
  chr19:12746885-12747006
  hypo

SEQ ID NO: 188881 - DNA, 51 bp, Homo sapiens
  chr19:12747554-12747605
  hypo
acctcttgcccctgtgcggccccgccgaactggaaacgtttccagcaggtg

SEQ ID NO: 188882 - DNA, 71 bp, Homo sapiens
  chr19:12748931-12749002
  hypo
gaccccagtcacgtgcgaccgctcaaggcggtcctcagaagcggaggggacctccgcgggccagtaggcct

SEQ ID NO: 188883 - DNA, 100 bp, Homo sapiens
  chr19:12749481-12749581
  hypo
aaaaaaaaaaaaaaagaaaagaaaatataaacgccaacaaacaggtaattcccaatcaccggcaagaccccgccggattggaccccgaccctcagcagag

SEQ ID NO: 188884 - DNA, 30 bp, Homo sapiens; identical to SEQ ID NO: 96533
  chr19:12753314-12753344
  hypo

SEQ ID NO: 188885 - DNA, 79 bp, Homo sapiens; identical to SEQ ID NO: 96534
  chr19:12755552-12755631
  hypo

SEQ ID NO: 188886 - DNA, 187 bp, Homo sapiens
  chr19:12757980-12758167
  hypo
cattgcccccacctgccggccccaggtaagactccaccccttccctacccctgaccagggccccacctgtgtttgttgtccacttgagcctggaggctgcctcgcggagctggttggccaccagcgtggtctcctgcaggcgggtgatggtgaaggtggagaacaggtcctgcggggaaggggatgg

SEQ ID NO: 188887 - DNA, 31 bp, Homo sapiens; identical to SEQ ID NO: 96536
  chr19:12774321-12774352
  hypo

SEQ ID NO: 188888 - DNA, 31 bp, Homo sapiens; identical to SEQ ID NO: 32181
  chr19:12787009-12787040
  hypo

SEQ ID NO: 188889 - DNA, 198 bp, Homo sapiens; identical to SEQ ID NO: 96538
  chr19:12794667-12794865
  hypo

SEQ ID NO: 188890 - DNA, 34 bp, Homo sapiens; identical to SEQ ID NO: 96539
  chr19:12795862-12795896
  hypo

SEQ ID NO: 188891 - DNA, 281 bp, Homo sapiens; identical to SEQ ID NO: 55682
  chr19:12806991-12807272
  hypo

SEQ ID NO: 188892 - DNA, 52 bp, Homo sapiens; identical to SEQ ID NO: 32183
  chr19:12811289-12811341
  hypo

SEQ ID NO: 188893 - DNA, 205 bp, Homo sapiens; identical to SEQ ID NO: 96542
  chr19:12817327-12817532
  hypo

SEQ ID NO: 188894 - DNA, 31 bp, Homo sapiens; identical to SEQ ID NO: 130848
  chr19:12834644-12834675
  hypo

SEQ ID NO: 188895 - DNA, 20 bp, Homo sapiens
  chr19:12835314-12835334
  hypo
tgttttgtttttgagacgga

SEQ ID NO: 188896 - DNA, 191 bp, Homo sapiens
  chr19:12885519-12885710
  hypo
ccctggagccatgcctcgttgaaccaggaggggtctctgggggcgagaaggtgggatgagcagactgggggacacttttgggatcctccccttcagctccactcacatctggttcagcacataggctacggcaaggccgctgctcaggtcctgagggctggcacagggagacggaacgtggaacgtctgta

SEQ ID NO: 188897 - DNA, 639 bp, Homo sapiens; identical to SEQ ID NO: 55689
  chr19:12900113-12900752
  hypo

SEQ ID NO: 188898 - DNA, 35 bp, Homo sapiens; identical to SEQ ID NO: 96545
  chr19:12906629-12906664
  hypo

SEQ ID NO: 188899 - DNA, 30 bp, Homo sapiens; identical to SEQ ID NO: 96546
  chr19:12914979-12915009
  hypo

SEQ ID NO: 188900 - DNA, 30 bp, Homo sapiens; identical to SEQ ID NO: 55695
  chr19:12917469-12917499
  hypo

SEQ ID NO: 188901 - DNA, 30 bp, Homo sapiens; identical to SEQ ID NO: 130866
  chr19:12917534-12917564
  hypo

SEQ ID NO: 188902 - DNA, 30 bp, Homo sapiens; identical to SEQ ID NO: 96548
  chr19:12918079-12918109
  hypo

SEQ ID NO: 188903 - DNA, 30 bp, Homo sapiens; identical to SEQ ID NO: 32186
  chr19:12920976-12921006
  hypo

SEQ ID NO: 188904 - DNA, 102 bp, Homo sapiens; identical to SEQ ID NO: 96550
  chr19:12928673-12928775
  hypo

SEQ ID NO: 188905 - DNA, 150 bp, Homo sapiens; identical to SEQ ID NO: 96551
  chr19:12953397-12953547
  hypo

SEQ ID NO: 188906 - DNA, 437 bp, Homo sapiens
  chr19:12969189-12969626
  hypo
ggccaagaaaccgccgggggagaatgacttcgataccatcaagctcataagcaacggtgcctacgggtgagccacccggggctctggcggggggagggtggcggaggccgggtgtctcggaggtgacggccggtcctcgctctctccccctgcagcgctgtctacctggtgcggcaccgcgacacgcggcagcgctttgccatgaaaaagatcaacaagcagaacttgatcctccgcaaccagatccagcaggcctttgtggagcgcgatatcctcaccttcgccgagaacccgtttgtggtcggcatgttctgctcctttgagactcggcgccacctctgcatggtcatggaatatgtggaaggtgtggctgcctgcggggctgcagggaagatggggccgtgctcactggtcagggctgcggggtggcctgcctg

SEQ ID NO: 188907 - DNA, 317 bp, Homo sapiens
  chr19:12977262-12977579
  hypo
ggaggcggggctagacggtgccactgagaatggggcaaggaccttgcctgggagcggagcctaaattaaatacactaatgaggcaggggcgtggcctgacctgaagacttgtaaacccgtcttgaaccaggactgggctcctgtggggatgtgatatgaggaggaaccccgtaccctcagtcacagcccatacccgctccccagcccgctcagacaggtatcaccacgtgaactcctatgacgaggatgacacgacggaggaggagcccgtggaaatccgccagttctcttcctgctctccgcgcttcagcaaggtg

SEQ ID NO: 188908 - DNA, 30 bp, Homo sapiens; identical to SEQ ID NO: 96553
  chr19:12982061-12982091
  hypo

SEQ ID NO: 188909 - DNA, 131 bp, Homo sapiens
  chr19:12985183-12985314
  hypo
agggctgtggccaaggcggcgctgagcccggtgcaggaacacgagacaggccggcgcagcagctctggcgaggcgggcacacccctggtacccattgtcgtagagcctgcgcggcccggggctaaggctgt

SEQ ID NO: 188910 - DNA, 296 bp, Homo sapiens; identical to SEQ ID NO: 96555
  chr19:12985536-12985832
  hypo

SEQ ID NO: 188911 - DNA, 74 bp, Homo sapiens; identical to SEQ ID NO: 96556
  chr19:12986929-12987003
  hypo

SEQ ID NO: 188912 - DNA, 939 bp, Homo sapiens; identical to SEQ ID NO: 130876
  chr19:12995851-12996790
  hypo

SEQ ID NO: 188913 - DNA, 30 bp, Homo sapiens; identical to SEQ ID NO: 32187
  chr19:13000767-13000797
  hypo

SEQ ID NO: 188914 - DNA, 46 bp, Homo sapiens; identical to SEQ ID NO: 96559
  chr19:13007715-13007761
  hypo

SEQ ID NO: 188915 - DNA, 90 bp, Homo sapiens
  chr19:13010439-13010529
  hypo
tagaaagggaggtggcggatggagtgggaagtgagagacactgatttttaaatatcaaaatttcccttctgaagtcgttcagatgtgttc

SEQ ID NO: 188916 - DNA, 20 bp, Homo sapiens
  chr19:13016955-13016975
  hypo
cactgcgcccagcctgatgc

SEQ ID NO: 188917 - DNA, 76 bp, Homo sapiens; identical to SEQ ID NO: 96562
  chr19:13017982-13018058
  hypo

SEQ ID NO: 188918 - DNA, 147 bp, Homo sapiens
  chr19:13023065-13023212
  hypo
tacagcccctccatctgcagcaattggggacctaccacaatttccccaaacatgtcagcctttgcctggaatgactttcccttcctgcctccttcataatggaacatttggaacttttgcttctctaccccccgctatacctaggcc

SEQ ID NO: 188919 - DNA, 37 bp, Homo sapiens; identical to SEQ ID NO: 55704
  chr19:13029430-13029467
  hypo

SEQ ID NO: 188920 - DNA, 627 bp, Homo sapiens; identical to SEQ ID NO: 130881
  chr19:13029766-13030393
  hypo

SEQ ID NO: 188921 - DNA, 514 bp, Homo sapiens; identical to SEQ ID NO: 130883
  chr19:13049934-13050448
  hypo

SEQ ID NO: 188922 - DNA, 829 bp, Homo sapiens; identical to SEQ ID NO: 12078
  chr19:13050857-13051686
  hypo

SEQ ID NO: 188923 - DNA, 932 bp, Homo sapiens; identical to SEQ ID NO: 12079
  chr19:13054372-13055304
  hypo

SEQ ID NO: 188924 - DNA, 86 bp, Homo sapiens
  chr19:13071905-13071991
  hypo
tccccagtttccctttcgcccagtccctggcagtcactattccttttttttttttttttttgagacggatggagtctcgctccgtt

SEQ ID NO: 188925 - DNA, 30 bp, Homo sapiens; identical to SEQ ID NO: 96568
  chr19:13084197-13084227
  hypo

SEQ ID NO: 188926 - DNA, 31 bp, Homo sapiens; identical to SEQ ID NO: 96569
  chr19:13089222-13089253
  hypo

SEQ ID NO: 188927 - DNA, 132 bp, Homo sapiens; identical to SEQ ID NO: 55713
  chr19:13094455-13094587
  hypo

SEQ ID NO: 188928 - DNA, 30 bp, Homo sapiens; identical to SEQ ID NO: 32194
  chr19:13104659-13104689
  hypo

SEQ ID NO: 188929 - DNA, 1362 bp, Homo sapiens; identical to SEQ ID NO: 130890
  chr19:13106027-13107389
  hypo

SEQ ID NO: 188930 - DNA, 673 bp, Homo sapiens; identical to SEQ ID NO: 96574
  chr19:13108001-13108674
  hypo

SEQ ID NO: 188931 - DNA, 751 bp, Homo sapiens
  chr19:13109258-13110009
  hypo
ggcgagggggaagggcggggggaaaaatctccttctagaaaaagcatcgaaattcagggcggccgggtggggcggttcctggagctgctggagtccattgtagccacagtcctgagtctcaggcggagagaggggtggggggtggatggatggacccccatccccatcccaaccctgccaagaaacagagacacaaccaggatgtgaactcacgtacaccaccatcaccgccaagatggggatgtaagtgtcctgttcacaccgatgtccagacccacgaccatcgacgagcctacagacctacggacacaggaaaccgacgacttgtgttcacactgtcacacacacccattaacacacacgcacctcttgaaatgggacacgtatattggtgtaggcttagcgacacagcagtacctctttgacgcacgtatggacacaggaaactgtggacttgtgttcacaaccacccccagcgcacacataaacactcacaaacccctcgagatgatacagatagcgacgaaggcacatggagaccacgacacctcccagactcatggagccctgagcacatgcttggatacaggtagacacaaatgtgtgttcacccccacacatgctcacatggacccaaggacggacaggcggatggatggatacacatctttacacagagacataatgcagttggctcgctcaggtgtgtacacaaataacttttctttttctattttttttttttttgaga

SEQ ID NO: 188932 - DNA, 211 bp, Homo sapiens; identical to SEQ ID NO: 32201
  chr19:13110308-13110519
  hypo

SEQ ID NO: 188933 - DNA, 200 bp, Homo sapiens
  chr19:13110779-13110979
  hypo
gatgagctggggctccgtgagatgttttgatgctgggccgagctcagagccgagggctctgccgggaacagggtgctccagtctctctagggcctggaatgtcttgtgtagcctcaagagctcccagacggaggctgcgggagcggagtcaagggctaggctttgccgtcagacagaaatgggttcgagctccagctcta

SEQ ID NO: 188934 - DNA, 148 bp, Homo sapiens
  chr19:13111556-13111704
  hypo
gtgtctgcacctgggcgttgtcacctggacccgccatggagacaggacatatgtgcaggaccctatggtgggcacttggctggatcagggcacattgcgggtgggagcaatgctgggtgtttggccgtggcgccgtggctgtgggcaa

SEQ ID NO: 188935 - DNA, 375 bp, Homo sapiens
  chr19:13112074-13112449
  hypo
atgtctgtgtggcagcgtgtgtctgcccgggtccctctccatgcctctccatgtctcccagcgtccatcactgggtgctacctgcatgtgactccacggatcatcgcacgccctgtctcttgtgtatttggtagtgggggtcggggagcgtgccaccatgcgtgtcagtgtgccggatgtagtctctgtgtcacggtggcgctgcgcacgtcaacgggtattggtgtaccggtcaccatctttgtatctgcgctttgtatctggggtgacagtgtcccagcgacatgcgtcacatctacagcagtgtttttctgggtgtctgtgcgtcacggcaaagagtgtatccgtgtgtctcacacacgtgttggcctgtcc

SEQ ID NO: 188936 - DNA, 211 bp, Homo sapiens
  chr19:13114025-13114236
  hypo
tcaaacagacacaggcgtccccatacaaagaatcttgccctcactcacagacaccttgaggcacccggccacacccgaacacatcgatgcggcattacacactcagggacgtgcatgtgggtgcagacacacgggacacgcgcagtcacacgatcacatgccatgaagcacacagcacagacacaggctctgccaccgtcaaatgcagccc

SEQ ID NO: 188937 - DNA, 94 bp, Homo sapiens; identical to SEQ ID NO: 96581
  chr19:13115951-13116045
  hypo

SEQ ID NO: 188938 - DNA, 338 bp, Homo sapiens
  chr19:13117704-13118042
  hypo
ccgggcagagccgagcggctgctgctgccagtctccatttcgaagcttgaggtgggggtggggaagtgctgggcgcctccaggcccctgcttgtcccgtgccacctggggatcatcccccatgcctgttccctggaagggccgggctgcctcttccgctgcccctttgcagcctggagctcagcaaggatgcccgcctggcttccatcttcccggttcgctccctcccttcctccccctctcgcctgcttgcctgtaatggctcaccatttttggcatctcttccccctccccccccataggcgccaacctcacttccaaacccgccgccatcgttgg

SEQ ID NO: 188939 - DNA, 30 bp, Homo sapiens
  chr19:13118969-13118999
  hypo
gttgggaaaaacgtacggctccgatccttg

SEQ ID NO: 188940 - DNA, 37 bp, Homo sapiens
  chr19:13119307-13119344
  hypo
aggagcccatgctgacgttactcgcttgctccaatct

SEQ ID NO: 188941 - DNA, 282 bp, Homo sapiens
  chr19:13119762-13120044
  hypo
gagcctccccatcctcgctgtagccaggtcctcaccgaggtagatttgcgggggtctcccagtcccagtcccacacactgcctcatccccactcacagtcaacgcccgcaacaccccgccacccgcagtctgtcgcgcagtgacagcctgtcacaagcaccgccgcacaccggcacaatctgtcgtccacgcacagtctcacacacaacctgtcacacacgcacacacacacacagcggcacagtcgcacacacagccagcctcacgcgatcacaccaagcg

SEQ ID NO: 188942 - DNA, 30 bp, Homo sapiens; identical to SEQ ID NO: 96582
  chr19:13138801-13138831
  hypo

SEQ ID NO: 188943 - DNA, 30 bp, Homo sapiens
  chr19:13145720-13145750
  hypo
agcatttcccaactgcggaactgttgacat

SEQ ID NO: 188944 - DNA, 174 bp, Homo sapiens; identical to SEQ ID NO: 96583
  chr19:13150455-13150629
  hypo

SEQ ID NO: 188945 - DNA, 229 bp, Homo sapiens
  chr19:13151482-13151711
  hypo
tggtacatgtgcttgcggctctggtagctgggtttggttattaacaatgaattattaaaggaatgtgaatagggagggaggtttgtctttcacacactcgcgcacacacacagccacttctcgaagcagatcttaaagttgattctgctgccgctgctgtacctttgcttgcctcggatcttagaactgtttccagtagtttttgagtgaattccgagcactccacttt

SEQ ID NO: 188946 - DNA, 38 bp, Homo sapiens; identical to SEQ ID NO: 96584
  chr19:13154725-13154763
  hypo

SEQ ID NO: 188947 - DNA, 259 bp, Homo sapiens; identical to SEQ ID NO: 96585
  chr19:13156411-13156670
  hypo

SEQ ID NO: 188948 - DNA, 99 bp, Homo sapiens; identical to SEQ ID NO: 96586
  chr19:13160323-13160422
  hypo

SEQ ID NO: 188949 - DNA, 179 bp, Homo sapiens; identical to SEQ ID NO: 96587
  chr19:13177632-13177811
  hypo

SEQ ID NO: 188950 - DNA, 40 bp, Homo sapiens; identical to SEQ ID NO: 32205
  chr19:13179792-13179832
  hypo

SEQ ID NO: 188951 - DNA, 76 bp, Homo sapiens
  chr19:13181439-13181515
  hypo
gcctccggctgaggccgccagccgtaagatggctgccaaggtctaaaatggctgccagcagcgcccggagcagcgc

SEQ ID NO: 188952 - DNA, 30 bp, Homo sapiens
  chr19:13181727-13181757
  hypo
tccctgggctgggtacgcgcatgcgcatcc

SEQ ID NO: 188953 - DNA, 450 bp, Homo sapiens
  chr19:13186059-13186509
  hypo
cagctgagggttttgccgacttctctgatgtgggcagcttggaggaccgtggcatcacagattgggaaggggcttgaggaagaggagcaggttgaagctgatggcttgaggggccctagggctgatcttggggttgggcacgcagtgagtgcccagaaatgctgctgtcggccggcaccactccccacccagagggccatctatgcacagttctttagcctggactcttggtcactccctggagcctcagcccatccttggcccatgtgaccctttctttcttccccagcaccaccaagcgccccaagtccatcgatgacagtgagatggagagccctgttgatgacgtgttctatcccgggacaggccgttccccagcagctggcagcagccagtccagcgggtggcccaacgatgtggatgcaggtatgggtgcgggggatcctgacc

SEQ ID NO: 188954 - DNA, 144 bp, Homo sapiens
  chr19:13194582-13194726
  hypo
gatggagcccacgcccggcttctgggaggaggctagagacagcactgtgctacacaagaggctgatgcatagctgcagagagccagagggcccggctccgccactgatccagtgggtagggagtggcagcgcccagctgtgctt

SEQ ID NO: 188955 - DNA, 23 bp, Homo sapiens
  chr19:13195589-13195612
  hypo
aagtgaggagctggtcgggcgcg

SEQ ID NO: 188956 - DNA, 81 bp, Homo sapiens; identical to SEQ ID NO: 32206
  chr19:13196306-13196387
  hypo

SEQ ID NO: 188957 - DNA, 212 bp, Homo sapiens; identical to SEQ ID NO: 96593
  chr19:13197661-13197873
  hypo

SEQ ID NO: 188958 - DNA, 30 bp, Homo sapiens; identical to SEQ ID NO: 96594
  chr19:13198105-13198135
  hypo

SEQ ID NO: 188959 - DNA, 30 bp, Homo sapiens; identical to SEQ ID NO: 96595
  chr19:13198402-13198432
  hypo

SEQ ID NO: 188960 - DNA, 54 bp, Homo sapiens; identical to SEQ ID NO: 32207
  chr19:13199712-13199766
  hypo

SEQ ID NO: 188961 - DNA, 74 bp, Homo sapiens; identical to SEQ ID NO: 96597
  chr19:13201106-13201180
  hypo

SEQ ID NO: 188962 - DNA, 349 bp, Homo sapiens; identical to SEQ ID NO: 130894
  chr19:13213413-13213762
  hypo

SEQ ID NO: 188963 - DNA, 171 bp, Homo sapiens; identical to SEQ ID NO: 130895
  chr19:13213789-13213960
  hypo

SEQ ID NO: 188964 - DNA, 90 bp, Homo sapiens; identical to SEQ ID NO: 32210
  chr19:13218630-13218720
  hypo

SEQ ID NO: 188965 - DNA, 30 bp, Homo sapiens; identical to SEQ ID NO: 96601
  chr19:13226095-13226125
  hypo

SEQ ID NO: 188966 - DNA, 30 bp, Homo sapiens
  chr19:13248077-13248107
  hypo
tcaccaggcaccaacgtgtacatcacaagg

SEQ ID NO: 188967 - DNA, 108 bp, Homo sapiens; identical to SEQ ID NO: 96602
  chr19:13249108-13249216
  hypo

SEQ ID NO: 188968 - DNA, 113 bp, Homo sapiens; identical to SEQ ID NO: 96603
  chr19:13252909-13253022
  hypo

SEQ ID NO: 188969 - DNA, 120 bp, Homo sapiens; identical to SEQ ID NO: 130901
  chr19:13263754-13263874
  hypo

SEQ ID NO: 188970 - DNA, 818 bp, Homo sapiens; identical to SEQ ID NO: 130902
  chr19:13264168-13264986
  hypo

SEQ ID NO: 188971 - DNA, 1276 bp, Homo sapiens; identical to SEQ ID NO: 130903
  chr19:13265774-13267050
  hypo

SEQ ID NO: 188972 - DNA, 21 bp, Homo sapiens
  chr19:13271092-13271113
  hypo
ttgaattgggctgggcgaagt

SEQ ID NO: 188973 - DNA, 63 bp, Homo sapiens; identical to SEQ ID NO: 55728
  chr19:13274018-13274081
  hypo

SEQ ID NO: 188974 - DNA, 43 bp, Homo sapiens; identical to SEQ ID NO: 96608
  chr19:13287253-13287296
  hypo

SEQ ID NO: 188975 - DNA, 132 bp, Homo sapiens
  chr19:13309844-13309976
  hypo
cgtcatcacagtaaccgtgtacttcaggtaaacgctcagaaggaagccagttcccacaggactcacagtgggagacagagcggagcgtccagtgcttcctcggctagctgtatcccacgatgccgggtcatt

SEQ ID NO: 188976 - DNA, 56 bp, Homo sapiens; identical to SEQ ID NO: 32213
  chr19:13332534-13332590
  hypo

SEQ ID NO: 188977 - DNA, 30 bp, Homo sapiens
  chr19:13345581-13345611
  hypo
aaagaagggtgagggcgcgcccctgccaga

SEQ ID NO: 188978 - DNA, 206 bp, Homo sapiens; identical to SEQ ID NO: 96610
  chr19:13346306-13346512
  hypo

SEQ ID NO: 188979 - DNA, 70 bp, Homo sapiens
  chr19:13347070-13347140
  hypo
acatgtgcgggttccgagggcatgttacgctccgggccagaaatgcatctgtcacgggactcaccgggca

SEQ ID NO: 188980 - DNA, 30 bp, Homo sapiens; identical to SEQ ID NO: 96612
  chr19:13347764-13347794
  hypo

SEQ ID NO: 188981 - DNA, 159 bp, Homo sapiens; identical to SEQ ID NO: 96613
  chr19:13397500-13397659
  hypo

SEQ ID NO: 188982 - DNA, 24 bp, Homo sapiens
  chr19:13432142-13432166
  hypo
tccgggccagtctgcaatgttcta

SEQ ID NO: 188983 - DNA, 140 bp, Homo sapiens
  chr19:13458298-13458438
  hypo
acaaactacagcccgcgggccagccacctgtttttataggttaacgtttaattggcccacagccatgctcattcacttacgcgctttatctgtcgttactttcacgctacaggagcagattgagtcgttgcgatggagac

SEQ ID NO: 188984 - DNA, 106 bp, Homo sapiens; identical to SEQ ID NO: 96614
  chr19:13490330-13490436
  hypo

SEQ ID NO: 188985 - DNA, 39 bp, Homo sapiens; identical to SEQ ID NO: 96615
  chr19:13580550-13580589
  hypo

SEQ ID NO: 188986 - DNA, 30 bp, Homo sapiens
  chr19:13610649-13610679
  hypo
gcattctcggaaatgcgttactgcacggct

SEQ ID NO: 188987 - DNA, 30 bp, Homo sapiens
  chr19:13764711-13764741
  hypo
gtgagccaccacacccggcaggctaatgct

SEQ ID NO: 188988 - DNA, 31 bp, Homo sapiens; identical to SEQ ID NO: 96616
  chr19:13838455-13838486
  hypo

SEQ ID NO: 188989 - DNA, 31 bp, Homo sapiens; identical to SEQ ID NO: 96617
  chr19:13861042-13861073
  hypo

SEQ ID NO: 188990 - DNA, 160 bp, Homo sapiens; identical to SEQ ID NO: 96618
  chr19:13873456-13873616
  hypo

SEQ ID NO: 188991 - DNA, 30 bp, Homo sapiens; identical to SEQ ID NO: 96619
  chr19:13873839-13873869
  hypo

SEQ ID NO: 188992 - DNA, 232 bp, Homo sapiens
  chr19:13879629-13879861
  hypo
ctccccagctgtggtcgtgggagctgaccgcgtggttgccaacggcgacacagccaacaaggtgggcacctaccagctggccattgtcgccaagcaccatggcattcccttctacgtggctgcccccagctcttcatgtgacctccgtctggagaccggcaaggagatcattattgaagagcgaccgggccaggagctgaccgatgttaatggggtccggattgcagcacct

SEQ ID NO: 188993 - DNA, 22 bp, Homo sapiens
  chr19:13881105-13881127
  hypo
atagttcatgcactcagatgcc

SEQ ID NO: 188994 - DNA, 30 bp, Homo sapiens; identical to SEQ ID NO: 32218
  chr19:13889419-13889449
  hypo

SEQ ID NO: 188995 - DNA, 200 bp, Homo sapiens
  chr19:13919890-13920090
  hypo
agatgctgcgaatgcgggactccaacggggcgcgcatgctgattctcatgaccgagcagttcctgcaggacacgcgcctggccctgtggcggcagcagggcgcgggcatgacggacaagtgccggcagctctgggatgagctgggtgaggcccaaaccccggtgcgtggtggacaccgggacttcggctcccatgggggc

SEQ ID NO: 188996 - DNA, 256 bp, Homo sapiens; identical to SEQ ID NO: 96624
  chr19:13936527-13936783
  hypo

SEQ ID NO: 188997 - DNA, 30 bp, Homo sapiens; identical to SEQ ID NO: 96625
  chr19:13940700-13940730
  hypo

SEQ ID NO: 188998 - DNA, 137 bp, Homo sapiens; identical to SEQ ID NO: 96626
  chr19:13941060-13941197
  hypo

SEQ ID NO: 188999 - DNA, 30 bp, Homo sapiens; identical to SEQ ID NO: 96627
  chr19:13942596-13942626
  hypo

SEQ ID NO: 189000 - DNA, 163 bp, Homo sapiens; identical to SEQ ID NO: 96628
  chr19:13943490-13943653
  hypo

SEQ ID NO: 189001 - DNA, 435 bp, Homo sapiens; identical to SEQ ID NO: 130919
  chr19:13961290-13961725
  hypo

SEQ ID NO: 189002 - DNA, 83 bp, Homo sapiens; identical to SEQ ID NO: 96630
  chr19:13965915-13965998
  hypo

SEQ ID NO: 189003 - DNA, 39 bp, Homo sapiens
  chr19:13969422-13969461
  hypo
cactgcacccggctgccattacttcgaagaatagctgta

SEQ ID NO: 189004 - DNA, 222 bp, Homo sapiens; identical to SEQ ID NO: 130920
  chr19:13975796-13976018
  hypo

SEQ ID NO: 189005 - DNA, 98 bp, Homo sapiens
  chr19:13987349-13987447
  hypo
tccactaagacaaccgatgtgaaaactcttggagggagaccagagctgggggccggggggcatgatccttcccccctacccccgcaaccagcccatga

SEQ ID NO: 189006 - DNA, 30 bp, Homo sapiens; identical to SEQ ID NO: 96633
  chr19:13988423-13988453
  hypo

SEQ ID NO: 189007 - DNA, 31 bp, Homo sapiens; identical to SEQ ID NO: 96634
  chr19:13994001-13994032
  hypo

SEQ ID NO: 189008 - DNA, 31 bp, Homo sapiens; identical to SEQ ID NO: 32220
  chr19:13997267-13997298
  hypo

SEQ ID NO: 189009 - DNA, 293 bp, Homo sapiens; identical to SEQ ID NO: 96636
  chr19:14000114-14000407
  hypo

SEQ ID NO: 189010 - DNA, 210 bp, Homo sapiens; identical to SEQ ID NO: 96637
  chr19:14000961-14001171
  hypo

SEQ ID NO: 189011 - DNA, 20 bp, Homo sapiens
  chr19:14005981-14006001
  hypo
atgcccggctaaaacatcaa

SEQ ID NO: 189012 - DNA, 132 bp, Homo sapiens
  chr19:14029921-14030053
  hypo
taacacctgtggccctcgcagcaataccaagatgccatccgagcccacaaggctggccgagccgtggatgtcgctgaattgcccgtgcccccaggtaggccttgcccctgtaggcctcgccccagtaggccc

SEQ ID NO: 189013 - DNA, 30 bp, Homo sapiens; identical to SEQ ID NO: 96638
  chr19:14041290-14041320
  hypo

SEQ ID NO: 189014 - DNA, 30 bp, Homo sapiens; identical to SEQ ID NO: 32222
  chr19:14042825-14042855
  hypo

SEQ ID NO: 189015 - DNA, 593 bp, Homo sapiens
  chr19:14043631-14044224
  hypo
ccaggtgcctggcccgatgtcgccgacccggagccggttgtgcgccaggctgagctcccgcagttggtccaggccggccagaggctcgggctcgagcatccgcagctggttgcgttgcagctgcagggtgcgcaggccagtgggcaggcccatgggcagccgggttagctgattccctgccaggtcgaggctgcgcagggcacgcaaccggcggaaggcccggtggtgcacacgggcgctggccaggcggttataggccaggttaagctccgtcaggcccggtgtggcgaccaggtcacgggcacccagcgcggccacgtggttgtggggcagcaccagggcacgcaggcggcggggcagggctggaggcacgcggtccagcccattgccatagaggtgcagcgtgtgcaggccccgcagcggccgcagagccccggcgggcagccctgagctccccagctggttgtgctgcagcaacaaatagcgcagaccacgcgccccgtgcagccgagccgcctccacctgccggatgcggttgcggcccaggtgcaggatagccagggtccggggcaggccggcgggcactgtggtca

SEQ ID NO: 189016 - DNA, 30 bp, Homo sapiens
  chr19:14064573-14064603
  hypo
attcccttggattccgttggaaggcggtag

SEQ ID NO: 189017 - DNA, 30 bp, Homo sapiens; identical to SEQ ID NO: 96642
  chr19:14066697-14066727
  hypo

SEQ ID NO: 189018 - DNA, 89 bp, Homo sapiens; identical to SEQ ID NO: 96643
  chr19:14066987-14067076
  hypo

SEQ ID NO: 189019 - DNA, 30 bp, Homo sapiens
  chr19:14070168-14070198
  hypo
gagagacggcaccccgggacagcccccctg

SEQ ID NO: 189020 - DNA, 30 bp, Homo sapiens; identical to SEQ ID NO: 96644
  chr19:14071807-14071837
  hypo

SEQ ID NO: 189021 - DNA, 274 bp, Homo sapiens; identical to SEQ ID NO: 96645
  chr19:14072644-14072918
  hypo

SEQ ID NO: 189022 - DNA, 163 bp, Homo sapiens; identical to SEQ ID NO: 96646
  chr19:14073131-14073294
  hypo

SEQ ID NO: 189023 - DNA, 1344 bp, Homo sapiens; identical to SEQ ID NO: 12100
  chr19:14073500-14074844
  hypo

SEQ ID NO: 189024 - DNA, 277 bp, Homo sapiens
  chr19:14084905-14085182
  hypo
aaaagccccggcccccggaaccgtctagttggggagacaggcaagaagccacgtgcaaaggtaaatgagagatcataacagaaggtgatcaggcagtgagtgaagcaggaagggggtggggctagagaaggcgatgctgtgattggaagggactagagaaggcgacgctgtgattggagaagaccatcaggaatgcagatatgtttcccctgagccaagctacctatcccaggctggggaagcctctctccttcagatatcgcgtgacgggatgggc

SEQ ID NO: 189025 - DNA, 30 bp, Homo sapiens
  chr19:14085401-14085431
  hypo
caatagggaagaatgcgttgcatgtggcat

SEQ ID NO: 189026 - DNA, 30 bp, Homo sapiens
  chr19:14087368-14087398
  hypo
gggactgatgacatcgtggctgctgcatct

SEQ ID NO: 189027 - DNA, 234 bp, Homo sapiens; identical to SEQ ID NO: 130928
  chr19:14089417-14089651
  hypo

SEQ ID NO: 189028 - DNA, 56 bp, Homo sapiens; identical to SEQ ID NO: 130929
  chr19:14089812-14089868
  hypo

SEQ ID NO: 189029 - DNA, 30 bp, Homo sapiens; identical to SEQ ID NO: 32224
  chr19:14093009-14093039
  hypo

SEQ ID NO: 189030 - DNA, 31 bp, Homo sapiens; identical to SEQ ID NO: 96651
  chr19:14107952-14107983
  hypo

SEQ ID NO: 189031 - DNA, 885 bp, Homo sapiens
  chr19:14181142-14182027
  hypo
catcaatcttcccgcgtccgccgattcctcctccttggtcgccgcgtccttggctggcgtcagaaaaatggctacaaacttcctagcacatgagaagatctggtttgacaagttcaaatatgacgacgcagaaaggagattctatcagcagatgaacaggcctgtggcaggtgcctcccgccaggagaacggcgccagcgtgatcctccatgacattgtgagagccagagagaacatccagaaatccctggctggaagctcaggccccggggcctccagtggccccagcggagaccacagcgagctcgttgtccggatcgccagtctggaagtggagaaccagagcctgcgtggcgtggtacaggagctgcagcaggccatctccaagctggaggcccagctgaacgtgctggagaagagctcgcctggccaccgggccacggccccgcagacccagcacgtgtctcctatgcgccaagtggagtccccggccaagaagccagcctcaccagcagaggatgacgaggatgatgacatcgacctgtttggcagcgacaatgaggaggaggacaaggaggcggcacagctgcgggaggagcggctacggcagtacgcggagaaggccaagaagcctgcattagtggccaagtcctccatcctgctggatgtcaagccttgggacgatgagacggacatggcccagctggaggcctgtgtgcgctctatcgagctggacgggctggtctgggggacctccaagctgatgcccgtgggctacggtatccggaagctacagattcagtgtgtggtggaggacgacaaggtggggacttacttgctggaggaggagatcactaaatttgaggagcacgtgcagagtgtcga

SEQ ID NO: 189032 - DNA, 31 bp, Homo sapiens; identical to SEQ ID NO: 12103
  chr19:14205671-14205702
  hypo

SEQ ID NO: 189033 - DNA, 105 bp, Homo sapiens; identical to SEQ ID NO: 96655
  chr19:14209030-14209135
  hypo

SEQ ID NO: 189034 - DNA, 41 bp, Homo sapiens; identical to SEQ ID NO: 32228
  chr19:14225012-14225053
  hypo

SEQ ID NO: 189035 - DNA, 31 bp, Homo sapiens; identical to SEQ ID NO: 96657
  chr19:14262993-14263024
  hypo

SEQ ID NO: 189036 - DNA, 470 bp, Homo sapiens; identical to SEQ ID NO: 96658
  chr19:14263405-14263875
  hypo

SEQ ID NO: 189037 - DNA, 30 bp, Homo sapiens; identical to SEQ ID NO: 96659
  chr19:14272327-14272357
  hypo

SEQ ID NO: 189038 - DNA, 30 bp, Homo sapiens; identical to SEQ ID NO: 96660
  chr19:14273661-14273691
  hypo

SEQ ID NO: 189039 - DNA, 31 bp, Homo sapiens; identical to SEQ ID NO: 12105
  chr19:14306908-14306939
  hypo

SEQ ID NO: 189040 - DNA, 49 bp, Homo sapiens; identical to SEQ ID NO: 55751
  chr19:14316560-14316609
  hypo

SEQ ID NO: 189041 - DNA, 30 bp, Homo sapiens
  chr19:14324775-14324805
  hypo
atgctggccgacgggcgcggtggctcacgc

SEQ ID NO: 189042 - DNA, 34 bp, Homo sapiens; identical to SEQ ID NO: 96663
  chr19:14352485-14352519
  hypo

SEQ ID NO: 189043 - DNA, 31 bp, Homo sapiens; identical to SEQ ID NO: 32230
  chr19:14388271-14388302
  hypo

SEQ ID NO: 189044 - DNA, 44 bp, Homo sapiens; identical to SEQ ID NO: 96665
  chr19:14447096-14447140
  hypo

SEQ ID NO: 189045 - DNA, 143 bp, Homo sapiens; identical to SEQ ID NO: 96666
  chr19:14509046-14509189
  hypo

SEQ ID NO: 189046 - DNA, 30 bp, Homo sapiens; identical to SEQ ID NO: 32232
  chr19:14515259-14515289
  hypo

SEQ ID NO: 189047 - DNA, 30 bp, Homo sapiens; identical to SEQ ID NO: 32233
  chr19:14515594-14515624
  hypo

SEQ ID NO: 189048 - DNA, 444 bp, Homo sapiens; identical to SEQ ID NO: 130952
  chr19:14516820-14517264
  hypo

SEQ ID NO: 189049 - DNA, 31 bp, Homo sapiens; identical to SEQ ID NO: 32234
  chr19:14517833-14517864
  hypo

SEQ ID NO: 189050 - DNA, 30 bp, Homo sapiens; identical to SEQ ID NO: 96670
  chr19:14519974-14520004
  hypo

SEQ ID NO: 189051 - DNA, 30 bp, Homo sapiens
  chr19:14522290-14522320
  hypo
tggtccagtctggcccgagggactcacctt

SEQ ID NO: 189052 - DNA, 180 bp, Homo sapiens
  chr19:14522733-14522913
  hypo
atctcggcactcgggcggccccggtcttcccacccgtgccatcagacactggaccacaccacagccctccacagcaccttcatccttcaggatgtgctctgagataacgagggcacgggcgccaatatgaagcccaaagatgtgcacctggcctgactcgggagcaagacaccagaattc

SEQ ID NO: 189053 - DNA, 102 bp, Homo sapiens
  chr19:14532584-14532686
  hypo
aaaaaaaaaaaaaaagttgaagtcacctgtgcttcactccaactcctttcctcccagtacagaaacaatgccctaaagaaaaacagtcgtactgaacagtta

SEQ ID NO: 189054 - DNA, 374 bp, Homo sapiens; identical to SEQ ID NO: 96673
  chr19:14551928-14552302
  hypo

SEQ ID NO: 189055 - DNA, 14 bp, Homo sapiens
  chr19:14583047-14583061
  hypo
gcggagccccagcc

SEQ ID NO: 189056 - DNA, 362 bp, Homo sapiens; identical to SEQ ID NO: 130958
  chr19:14583153-14583515
  hypo

SEQ ID NO: 189057 - DNA, 30 bp, Homo sapiens; identical to SEQ ID NO: 96675
  chr19:14589133-14589163
  hypo

SEQ ID NO: 189058 - DNA, 246 bp, Homo sapiens
  chr19:14591230-14591476
  hypo
tggcctcgatcatgtcgcccacgctgatgaggtggatgtggtcgatcacgctgccctccttgatgcgctgcgggggcggggagtcatcagcccttggggctctgccctggtttccggggtcccatggcccaccctcactcccaggcctccggggtgccccgtctccccaggcaccttgatgaaggcgtagccagccccgttgtccgtgatggtgagcccgagtgcatcctccgacttgaacacctc

SEQ ID NO: 189059 - DNA, 30 bp, Homo sapiens; identical to SEQ ID NO: 96676
  chr19:14593751-14593781
  hypo

SEQ ID NO: 189060 - DNA, 30 bp, Homo sapiens; identical to SEQ ID NO: 96677
  chr19:14600119-14600149
  hypo

SEQ ID NO: 189061 - DNA, 144 bp, Homo sapiens; identical to SEQ ID NO: 130964
  chr19:14607037-14607181
  hypo

SEQ ID NO: 189062 - DNA, 291 bp, Homo sapiens; identical to SEQ ID NO: 96679
  chr19:14616945-14617236
  hypo

SEQ ID NO: 189063 - DNA, 82 bp, Homo sapiens; identical to SEQ ID NO: 96680
  chr19:14630484-14630566
  hypo

SEQ ID NO: 189064 - DNA, 108 bp, Homo sapiens; identical to SEQ ID NO: 96681
  chr19:14636953-14637061
  hypo

SEQ ID NO: 189065 - DNA, 35 bp, Homo sapiens
  chr19:14648831-14648866
  hypo
acaggcgtgagccactgcgccggcagtgtgagtgc

SEQ ID NO: 189066 - DNA, 30 bp, Homo sapiens
  chr19:14656965-14656995
  hypo
aaatcatgggggcggcgctgggggctactc

SEQ ID NO: 189067 - DNA, 153 bp, Homo sapiens
  chr19:14660735-14660888
  hypo
cacagtgagactctgtctcaaaaaaaaaaataaaaaaaataaactatacacctgcccccttcaactgccactccctgtcccctttcctttctttcttctttccatgtcgcacgtcacctttgaacatattacatatagcgatttatttcattg

SEQ ID NO: 189068 - DNA, 445 bp, Homo sapiens; identical to SEQ ID NO: 96683
  chr19:14663745-14664190
  hypo

SEQ ID NO: 189069 - DNA, 411 bp, Homo sapiens
  chr19:14664431-14664842
  hypo
gaagtgggaaggaaagggagccgagagggctgagccgctgagccggagtccagatgaatgtgccggagtctctgcatttgtgatgggggcgaggtgatgggggcgaggtggccggcgtggctctgggcatgatcgggccaggcctccgacctctatgctgggcattggctggacagggagctcaggcgatgagtgcagcagcgcttgtgcccggcgcggggatggtgagtgcctggctggccagctgcaggacctgtcaggccctttgtgtctttacctggggccctggttgcactgaccagggctcgcacccccagccaggcctcttgtgccccagactcgggagatgcttcctaccaggaagtgcagtcccctgcggggtccgagagagcctgccggagctttgagctc

SEQ ID NO: 189070 - DNA, 144 bp, Homo sapiens
  chr19:14676332-14676476
  hypo
gaaagcaggggcggcgggaggtggctggctgagtccaggacagccacatacacgggttgcgaggctgcccacgctcactctccgcccctgcccacaggtggggtcctggatcggtttcgccatcatgacgcagtgtctcccagg

SEQ ID NO: 189071 - DNA, 142 bp, Homo sapiens; identical to SEQ ID NO: 96686
  chr19:14815853-14815995
  hypo

SEQ ID NO: 189072 - DNA, 212 bp, Homo sapiens
  chr19:14863010-14863222
  hypo
ctgggattacaggcatgagccaccacgcccagccgggctattatattaaggaatcaaatgccgcatcattccatgagccagcgtgtcctgcgtcaaggaagggagccctctggaacaccgctgtcaataccttgtgtccggtttgatcaattgccacgaggaagaggaggtgggccaggaagaggcagagcgagagctgcagatgcagtgag

SEQ ID NO: 189073 - DNA, 198 bp, Homo sapiens; identical to SEQ ID NO: 12113
  chr19:14887409-14887607
  hypo

SEQ ID NO: 189074 - DNA, 30 bp, Homo sapiens
  chr19:14911735-14911765
  hypo
cctgtcctttcctctcggagacccttttct

SEQ ID NO: 189075 - DNA, 97 bp, Homo sapiens; identical to SEQ ID NO: 96689
  chr19:14912988-14913085
  hypo

SEQ ID NO: 189076 - DNA, 24 bp, Homo sapiens
  chr19:14958331-14958355
  hypo
tatttttttgagatggagtctcgc

SEQ ID NO: 189077 - DNA, 86 bp, Homo sapiens; identical to SEQ ID NO: 96690
  chr19:15033673-15033759
  hypo

SEQ ID NO: 189078 - DNA, 44 bp, Homo sapiens; identical to SEQ ID NO: 96691
  chr19:15044830-15044874
  hypo

SEQ ID NO: 189079 - DNA, 30 bp, Homo sapiens; identical to SEQ ID NO: 96692
  chr19:15052132-15052162
  hypo

SEQ ID NO: 189080 - DNA, 28 bp, Homo sapiens
  chr19:15056944-15056972
  hypo
tttgcttttttttttttgagacggactt

SEQ ID NO: 189081 - DNA, 28 bp, Homo sapiens
  chr19:15057211-15057239
  hypo
ctgggattataggcgtgagccaccaagc

SEQ ID NO: 189082 - DNA, 387 bp, Homo sapiens; identical to SEQ ID NO: 96695
  chr19:15073002-15073389
  hypo

SEQ ID NO: 189083 - DNA, 758 bp, Homo sapiens; identical to SEQ ID NO: 130971
  chr19:15089970-15090728
  hypo

SEQ ID NO: 189084 - DNA, 344 bp, Homo sapiens; identical to SEQ ID NO: 130972
  chr19:15090745-15091089
  hypo

SEQ ID NO: 189085 - DNA, 134 bp, Homo sapiens
  chr19:15209504-15209638
  hypo
tccggggtatttctccgccaactcaccatgactgccacagaagtgctgagctctgcccaaacctgaccggtccctccacctgcattttgtctttcaacgaatgggtctgtatgtgcctgcgggtggttaaccca

SEQ ID NO: 189086 - DNA, 30 bp, Homo sapiens; identical to SEQ ID NO: 96698
  chr19:15220998-15221028
  hypo

SEQ ID NO: 189087 - DNA, 31 bp, Homo sapiens; identical to SEQ ID NO: 96699
  chr19:15221469-15221500
  hypo

SEQ ID NO: 189088 - DNA, 160 bp, Homo sapiens; identical to SEQ ID NO: 96700
  chr19:15224769-15224929
  hypo

SEQ ID NO: 189089 - DNA, 30 bp, Homo sapiens; identical to SEQ ID NO: 96701
  chr19:15233783-15233813
  hypo

SEQ ID NO: 189090 - DNA, 354 bp, Homo sapiens; identical to SEQ ID NO: 130976
  chr19:15235614-15235968
  hypo

SEQ ID NO: 189091 - DNA, 30 bp, Homo sapiens
  chr19:15237791-15237821
  hypo
cttagccaggagaatcgcttgaacccggga

SEQ ID NO: 189092 - DNA, 418 bp, Homo sapiens; identical to SEQ ID NO: 32245
  chr19:15251999-15252417
  hypo

SEQ ID NO: 189093 - DNA, 42 bp, Homo sapiens; identical to SEQ ID NO: 96704
  chr19:15252899-15252941
  hypo

SEQ ID NO: 189094 - DNA, 485 bp, Homo sapiens
  chr19:15271803-15272288
  hypo
aggtaaggcgggggccgctcctgcggggagacgggggtccctgggttgagcagctggggtcccggcgccagtggcagcaggaacgaggggcctggaggggcaggtgggggcagccgggcccaatcgaggggcacagccacagggttcagcaggcccaggctgagtacacatcctccagggggctggcgccctagacccgcccggcctgggccaccaagctgtgccagagacactgcagtggcagtggcagctgcatagggcccctcaagggggaagccaccaggggaagcagggggcccaccgaaaggccgcggggagtccagcgagtccacgggcgacagcgtgaccgagctgtcagccagggggcccgggcaggccagcgtcagcttcttgccccgcccccggggcccctgcggccccagccccgccttcccggggggcctcctgctcttcttggaccccgactgtgccgctttgaggccagg

SEQ ID NO: 189095 - DNA, 30 bp, Homo sapiens
  chr19:15276273-15276303
  hypo
gagccatctgccatgcgggcatccaagtct

SEQ ID NO: 189096 - DNA, 72 bp, Homo sapiens; identical to SEQ ID NO: 96705
  chr19:15276697-15276769
  hypo

SEQ ID NO: 189097 - DNA, 78 bp, Homo sapiens
  chr19:15281185-15281263
  hypo
gtgaccagaggccacgtccttgtgcagtgagaagccctcagggaaccagagggtgctgtgctcgcgcttgcgccgggc

SEQ ID NO: 189098 - DNA, 233 bp, Homo sapiens; identical to SEQ ID NO: 96707
  chr19:15281502-15281735
  hypo

SEQ ID NO: 189099 - DNA, 168 bp, Homo sapiens; identical to SEQ ID NO: 96708
  chr19:15284955-15285123
  hypo

SEQ ID NO: 189100 - DNA, 602 bp, Homo sapiens; identical to SEQ ID NO: 130977
  chr19:15288254-15288856
  hypo

SEQ ID NO: 189101 - DNA, 30 bp, Homo sapiens; identical to SEQ ID NO: 96710
  chr19:15289891-15289921
  hypo

SEQ ID NO: 189102 - DNA, 294 bp, Homo sapiens; identical to SEQ ID NO: 32248
  chr19:15292358-15292652
  hypo

SEQ ID NO: 189103 - DNA, 30 bp, Homo sapiens; identical to SEQ ID NO: 96712
  chr19:15298063-15298093
  hypo

SEQ ID NO: 189104 - DNA, 31 bp, Homo sapiens; identical to SEQ ID NO: 96713
  chr19:15300298-15300329
  hypo

SEQ ID NO: 189105 - DNA, 392 bp, Homo sapiens
  chr19:15302330-15302722
  hypo
tctgactgcagctctcgcctgtccagccattgacacacacgcagctgtggccacccagcgtgttgaagcaggtacccccattgtggcaggcgttgggctgcagctgacactcatccacgtcctccgtgcagaactggcctgtggcacacagatgcagcagtccagccacctggcgcatgtccacccgaggcctgcctccccgctccctctggccgcagtgcccacctgtccactcaggagggcactggcagttataggtgttgacgccatccacgcatgtccccccattgagacatcggtgtcctggacagtcgtccacgttcacttcacaattctgaccctcaaaccctagcagggaagggggcaaggatggtcaccgccgggctggcctg

SEQ ID NO: 189106 - DNA, 31 bp, Homo sapiens; identical to SEQ ID NO: 96715
  chr19:15337909-15337940
  hypo

SEQ ID NO: 189107 - DNA, 706 bp, Homo sapiens; identical to SEQ ID NO: 12121
  chr19:15342706-15343412
  hypo

SEQ ID NO: 189108 - DNA, 82 bp, Homo sapiens
  chr19:15346125-15346207
  hypo
ttttacaccttccattaaatcaattatctcacaatttgatgttcccaggatctctcccaaccgactccgctaatctggacgc

SEQ ID NO: 189109 - DNA, 30 bp, Homo sapiens; identical to SEQ ID NO: 96717
  chr19:15348788-15348818
  hypo

SEQ ID NO: 189110 - DNA, 30 bp, Homo sapiens
  chr19:15350292-15350322
  hypo
gatcacaggcctcccgacatccacaggctt

SEQ ID NO: 189111 - DNA, 30 bp, Homo sapiens
  chr19:15351347-15351377
  hypo
ccactcagcctgcacgcccccacggaagag

SEQ ID NO: 189112 - DNA, 189 bp, Homo sapiens; identical to SEQ ID NO: 32250
  chr19:15352348-15352537
  hypo

SEQ ID NO: 189113 - DNA, 30 bp, Homo sapiens; identical to SEQ ID NO: 32251
  chr19:15352957-15352987
  hypo

SEQ ID NO: 189114 - DNA, 30 bp, Homo sapiens
  chr19:15359453-15359483
  hypo
aaggctcagagtcagcggtggctcgagcct

SEQ ID NO: 189115 - DNA, 172 bp, Homo sapiens
  chr19:15360255-15360427
  hypo
tgcctggctaaccctgggtagggacagacccaccgcccgcttagaaaggtcacagaggcagaatgcatggatgccttggaaaccgcccccagcctgctcagcttctagagagtggccctggttcccactagcaagctccacgtgtgccctgcctgagcgcacgccggcattt

SEQ ID NO: 189116 - DNA, 143 bp, Homo sapiens
  chr19:15364849-15364992
  hypo
caagttctgggagtgccgtctctgggctctagcatcctggacacaggaccgagctagtgccaggcacaggtgggaagagtttggtaagacacgtagaacacaagtcacctaacctgtttcggagtcttcgctgtcagaggagc

SEQ ID NO: 189117 - DNA, 397 bp, Homo sapiens; identical to SEQ ID NO: 32252
  chr19:15375240-15375637
  hypo

SEQ ID NO: 189118 - DNA, 113 bp, Homo sapiens
  chr19:15382513-15382626
  hypo
ttggtcaatggagagcgtggcgcctcttctgcctccatacctttcctgagccatttcaagacccagacacgtactgccctgttctgattatcttcccccgagtgcttgacacg

SEQ ID NO: 189119 - DNA, 30 bp, Homo sapiens
  chr19:15383146-15383176
  hypo
actatctttccccaccgtgtgctccgggtg

SEQ ID NO: 189120 - DNA, 129 bp, Homo sapiens; identical to SEQ ID NO: 96722
  chr19:15401108-15401237
  hypo

SEQ ID NO: 189121 - DNA, 142 bp, Homo sapiens; identical to SEQ ID NO: 96723
  chr19:15421597-15421739
  hypo

SEQ ID NO: 189122 - DNA, 106 bp, Homo sapiens; identical to SEQ ID NO: 96724
  chr19:15422153-15422259
  hypo

SEQ ID NO: 189123 - DNA, 30 bp, Homo sapiens
  chr19:15425019-15425049
  hypo
tcacaaaatggaggacgtgagggtgtggac

SEQ ID NO: 189124 - DNA, 241 bp, Homo sapiens
  chr19:15426969-15427210
  hypo
aaaaaaaaaaaaaaaaaaaaaagactgagaagctcaccataatcctgaaagagtatccagttcacaccataattttaacaagcctggggcacctggactaaagacacactccagtttacttacttccccccaaccatcccgcttctatattcccagacttgctctgagtagcaaaaggataaatggaagtgaaggcccggagcggtggatcacctgagatcaggagttcgagaccagcctg

SEQ ID NO: 189125 - DNA, 88 bp, Homo sapiens; identical to SEQ ID NO: 130984
  chr19:15479820-15479908
  hypo

SEQ ID NO: 189126 - DNA, 30 bp, Homo sapiens; identical to SEQ ID NO: 130985
  chr19:15479910-15479940
  hypo

SEQ ID NO: 189127 - DNA, 31 bp, Homo sapiens; identical to SEQ ID NO: 32254
  chr19:15484900-15484931
  hypo

SEQ ID NO: 189128 - DNA, 207 bp, Homo sapiens
  chr19:15487799-15488006
  hypo
aggtccagcactccacgccccgtagcctgcaagaagaccccgtgagttaaaattctatttgtcacaccagagaacgggtccttttgggggtactcctaaagggatctccttacagttcagtgccagccttagaagaaggaagactcccccccaccccaccaaaaaaaagccatcacacaactggctaatggcgtcatcgcattccac

SEQ ID NO: 189129 - DNA, 18 bp, Homo sapiens
  chr19:15493025-15493043
  hypo
tttttttttttaagacag

SEQ ID NO: 189130 - DNA, 23 bp, Homo sapiens
  chr19:15505812-15505835
  hypo
atattttgctatcacctctcccg

SEQ ID NO: 189131 - DNA, 121 bp, Homo sapiens; identical to SEQ ID NO: 32255
  chr19:15506074-15506195
  hypo

SEQ ID NO: 189132 - DNA, 251 bp, Homo sapiens
  chr19:15512029-15512280
  hypo
accaaagcgggagccgcccgggaaggcgcccccacctcgcatgccctggaacatgccgtactcggggatgatgttctgggagaagagggagggcagccgagaggcaccagacatgcactggccccgggcccccatggggtcttcccacatgcgcccatagcctgaggccattggccggccgctccgggcatcccgggcccagccctgtgccctgggaccgaaggtgtcgttgccacgcatgcggaactggt

SEQ ID NO: 189133 - DNA, 30 bp, Homo sapiens
  chr19:15516883-15516913
  hypo
agcagcatcaactccgtgaacaccacttta

SEQ ID NO: 189134 - DNA, 29 bp, Homo sapiens
  chr19:15523640-15523669
  hypo
ctgcgcccggccagaaatacatatttttg

SEQ ID NO: 189135 - DNA, 141 bp, Homo sapiens; identical to SEQ ID NO: 96733
  chr19:15531275-15531416
  hypo

SEQ ID NO: 189136 - DNA, 341 bp, Homo sapiens; identical to SEQ ID NO: 32256
  chr19:15538868-15539209
  hypo

SEQ ID NO: 189137 - DNA, 30 bp, Homo sapiens
  chr19:15539911-15539941
  hypo
gcttcaccggcaggcgcagagagctgcctc

SEQ ID NO: 189138 - DNA, 30 bp, Homo sapiens; identical to SEQ ID NO: 32257
  chr19:15547836-15547866
  hypo

SEQ ID NO: 189139 - DNA, 30 bp, Homo sapiens; identical to SEQ ID NO: 96736
  chr19:15550835-15550865
  hypo

SEQ ID NO: 189140 - DNA, 122 bp, Homo sapiens
  chr19:15551194-15551316
  hypo
ccaagtgcagccctgcgtcctggggggatccctgctcgtcctcatcttggagccagtcgaacctggggcggccctgggcatgtttctccaaaagccttggttccccccggtggtgtaagaac

SEQ ID NO: 189141 - DNA, 30 bp, Homo sapiens
  chr19:15551671-15551701
  hypo
ggtagggggagtccacgtggatccttccgg

SEQ ID NO: 189142 - DNA, 36 bp, Homo sapiens
  chr19:15630865-15630901
  hypo
aaagtctcagcccggcgtggtggctcaagcctgtaa

SEQ ID NO: 189143 - DNA, 37 bp, Homo sapiens; identical to SEQ ID NO: 130992
  chr19:15694859-15694896
  hypo

SEQ ID NO: 189144 - DNA, 512 bp, Homo sapiens; identical to SEQ ID NO: 12122
  chr19:15695277-15695789
  hypo

SEQ ID NO: 189145 - DNA, 30 bp, Homo sapiens; identical to SEQ ID NO: 32259
  chr19:15917817-15917847
  hypo

SEQ ID NO: 189146 - DNA, 30 bp, Homo sapiens; identical to SEQ ID NO: 96740
  chr19:15932929-15932959
  hypo

SEQ ID NO: 189147 - DNA, 78 bp, Homo sapiens; identical to SEQ ID NO: 96741
  chr19:15937636-15937714
  hypo

SEQ ID NO: 189148 - DNA, 30 bp, Homo sapiens
  chr19:16005562-16005592
  hypo
ctgctcagcctcgcccgtccaacgatggga

SEQ ID NO: 189149 - DNA, 30 bp, Homo sapiens
  chr19:16006306-16006336
  hypo
agatggtacctgaggcgttgatgacagacc

SEQ ID NO: 189150 - DNA, 188 bp, Homo sapiens; identical to SEQ ID NO: 32260
  chr19:16025605-16025793
  hypo

SEQ ID NO: 189151 - DNA, 30 bp, Homo sapiens
  chr19:16120577-16120607
  hypo
gtgtgtgcacacacacgcactcatgtttag

SEQ ID NO: 189152 - DNA, 54 bp, Homo sapiens; identical to SEQ ID NO: 96743
  chr19:16147949-16148003
  hypo

SEQ ID NO: 189153 - DNA, 30 bp, Homo sapiens
  chr19:16163072-16163102
  hypo
ccggctctctgtgctcgtgcgctttttcct

SEQ ID NO: 189154 - DNA, 30 bp, Homo sapiens
  chr19:16163423-16163453
  hypo
ctcactctgcacctacgagtgggtcagcca

SEQ ID NO: 189155 - DNA, 826 bp, Homo sapiens; identical to SEQ ID NO: 55780
  chr19:16186793-16187619
  hypo

SEQ ID NO: 189156 - DNA, 655 bp, Homo sapiens; identical to SEQ ID NO: 55781
  chr19:16187640-16188295
  hypo

SEQ ID NO: 189157 - DNA, 154 bp, Homo sapiens
  chr19:16198710-16198864
  hypo
cagaaaaacccatgttgcagctggtctaggggtctgggtggggcatcattgggggctgtctgcagtggatgggagaggacacggctggtggggatcgggctcagctgggcctttctgtctctgcaggtagctcgtaagctggtcatcctggagg

SEQ ID NO: 189158 - DNA, 30 bp, Homo sapiens
  chr19:16200339-16200369
  hypo
acgtggcagctacgtcgggaacaaaggaca

SEQ ID NO: 189159 - DNA, 44 bp, Homo sapiens; identical to SEQ ID NO: 96746
  chr19:16218035-16218079
  hypo

SEQ ID NO: 189160 - DNA, 39 bp, Homo sapiens; identical to SEQ ID NO: 96747
  chr19:16221418-16221457
  hypo

SEQ ID NO: 189161 - DNA, 214 bp, Homo sapiens; identical to SEQ ID NO: 131000
  chr19:16222493-16222707
  hypo

SEQ ID NO: 189162 - DNA, 232 bp, Homo sapiens
  chr19:16226301-16226533
  hypo
accagcctggctcggcgccactgcctcctcaggggcccattgattcctccagtgaaagggttggcatttgagaaagtgctttgtgaaccgctcaacaccgcgtagaccctgttgcgctttaatactttgatccagccatattttgccagtgtcttctgtgggccaggcagccattttggcaagagggctgcagaaaggacacaggtgagtcaaggtgcgtgcaggactgggg

SEQ ID NO: 189163 - DNA, 31 bp, Homo sapiens; identical to SEQ ID NO: 32264
  chr19:16228440-16228471
  hypo

SEQ ID NO: 189164 - DNA, 917 bp, Homo sapiens; identical to SEQ ID NO: 32265
  chr19:16232438-16233355
  hypo

SEQ ID NO: 189165 - DNA, 95 bp, Homo sapiens; identical to SEQ ID NO: 32266
  chr19:16235971-16236066
  hypo

SEQ ID NO: 189166 - DNA, 619 bp, Homo sapiens; identical to SEQ ID NO: 96752
  chr19:16238411-16239030
  hypo

SEQ ID NO: 189167 - DNA, 296 bp, Homo sapiens
  chr19:16240096-16240392
  hypo
acatgcgtaaagtcccgtcaatgctaaggtgctctgcggaagtgagagttgatgtcagagagtaagggtgggtgggaggcagagggagccggggaaggatgagctggggccggacaggccagatgaacccactgccagaggcgggcatcaaagggccaaatgggaggcccacgcctgggaagctgtctcaccacacccgctgtacacgggcggctgaggactcagggtcctgccatcccaaggactcacaatgtgcttattccacaggcatttttcactctcgccagagatatcaa

SEQ ID NO: 189168 - DNA, 30 bp, Homo sapiens
  chr19:16240649-16240679
  hypo
ctagcagggagcacacggccttttccattc

SEQ ID NO: 189169 - DNA, 240 bp, Homo sapiens; identical to SEQ ID NO: 96753
  chr19:16243046-16243286
  hypo

SEQ ID NO: 189170 - DNA, 271 bp, Homo sapiens
  chr19:16318742-16319013
  hypo
atgaatgtgtgcaagcgttcattcattcctcatccgtccgctcaatgatctgcctcccattcctccctccctccccaaccgccacaggtgttttccgagtacttcaaggagctggaggaggagagcatccgggacaactttgttatcatctacgagctgctggacgagctcatggacttcggctacccccagaccaccgacagcaagatcctgcaggagtgagtgggcaggggtggggcctggggccaggcctgggcggtgtcatgacatc

SEQ ID NO: 189171 - DNA, 30 bp, Homo sapiens
  chr19:16319485-16319515
  hypo
ggttacactccgaggcgtcagttccatcca

SEQ ID NO: 189172 - DNA, 171 bp, Homo sapiens; identical to SEQ ID NO: 32268
  chr19:16320830-16321001
  hypo

SEQ ID NO: 189173 - DNA, 163 bp, Homo sapiens; identical to SEQ ID NO: 96755
  chr19:16328980-16329143
  hypo

SEQ ID NO: 189174 - DNA, 470 bp, Homo sapiens; identical to SEQ ID NO: 96756
  chr19:16337581-16338051
  hypo

SEQ ID NO: 189175 - DNA, 53 bp, Homo sapiens; identical to SEQ ID NO: 32271
  chr19:16343121-16343174
  hypo

SEQ ID NO: 189176 - DNA, 30 bp, Homo sapiens
  chr19:16417995-16418025
  hypo
ccagactcacgcccgcgtcccccgccacgc

SEQ ID NO: 189177 - DNA, 43 bp, Homo sapiens; identical to SEQ ID NO: 96758
  chr19:16469772-16469815
  hypo

SEQ ID NO: 189178 - DNA, 378 bp, Homo sapiens
  chr19:16472525-16472903
  hypo
aaatcccagggaagctgcaagcggaagggagtggggtggcccggaggcggaggactcaacttacagaggtgaagtctgcaaagcccgaggcagaggccttagaaggtttagctgcagaggaggggacaaatgggtcttttccactaaacgggtccccaaacccctttttactttggaacgggtcgccgctgtcagccccgagtggctggaatggatcgggggcctcgggaaagtctgcggaaccaagctggcttacaggtgtacttttacctggaaagtttaggagaaaaaaaaaaggagaaagaaagaaatatgagttactcacccggacagagcagaatgctggtgggcacaagcccggggcgcttctctgagaaa

SEQ ID NO: 189179 - DNA, 285 bp, Homo sapiens
  chr19:16485429-16485714
  hypo
aagcagacccagcgccgggtttaggtacgtggggaggcgggggtggcggtttccatgaaacactgaaaatgaagctttgcacctgtgagctgttgagtgggatggctcctcctcagggcccagcaaatacggcactgctcggcaagtgtgtgcacccatatgagaatacgtgcacatgtgtgtaaatgtgtgtacacgtatgtaagcacagagtgtgcatgcccgggtgtgtatgagcacacacgcacgcatatgtgtgtgcacgtttgcatgcatgcattatgc

SEQ ID NO: 189180 - DNA, 30 bp, Homo sapiens; identical to SEQ ID NO: 96761
  chr19:16494484-16494514
  hypo

SEQ ID NO: 189181 - DNA, 31 bp, Homo sapiens; identical to SEQ ID NO: 32273
  chr19:16495005-16495036
  hypo

SEQ ID NO: 189182 - DNA, 264 bp, Homo sapiens
  chr19:16495385-16495649
  hypo
ccgtgtggtgagggccggacaccaacgggtccagtctggtaaccagcctcgctgctgtcctccttcaacagttcactcctcacctgtggatctgtctgcatttattcaaggaggccggccctcacttttcaacaccccttgagagttctgtcacatgggcgactctgaacactcgctggcccactttccctggacgcctcgcacctgcaggcctgctgcccatggccctctcgagacgcctgtgcccaacgccttctcaagttt

SEQ ID NO: 189183 - DNA, 140 bp, Homo sapiens
  chr19:16511196-16511336
  hypo
gataaagtcacactgcgtgagcttcacatggaatttagtaacctgagtagaactgtccaaacataggaagttccagatgtaccactgtggatacactattctcagggacctaaaacccccaacttcgacccacaagggag

SEQ ID NO: 189184 - DNA, 627 bp, Homo sapiens
  chr19:16511800-16512427
  hypo
agccgggttgtgagacggaaacacacacgccaagaacagccagggagcaaagcgaggagttctggcttctcgtaactcatgaaggatgaatgctcatcgtttaaatttagacgataaagctgatgatgacgggcccgggggcggctatggaaaccacctcattacgagtccacgagaaaagagagtatgggaggaaagagggaggcggtgcacccagcgggggccagacacaagagacagatgagctcgccagcagtgccttcccagcagcccaggggacgcgtgtgcttccccataaatccttgggactgaggacttggctgctgagaaaagaaacacatcaagcattgaacataaagaggcaagtgtggtgtttagagagcacgagcgctcactcttattccagggaggaagaggaatccatgacgtacagaggcccaggagcagaagggctccagggaggagccctgggagagagggtggcagcacggagagagctgctggaggcagcagagcaccaaggaaacatccagacatgcgcggcccggcccatccgctcccggaacagcaccaagacgaaatgggaaactacatgtccccaggttcgaggctgcaggggcagactct

SEQ ID NO: 189185 - DNA, 55 bp, Homo sapiens; identical to SEQ ID NO: 32275
  chr19:16513150-16513205
  hypo

SEQ ID NO: 189186 - DNA, 30 bp, Homo sapiens
  chr19:16516824-16516854
  hypo
gagtgaggtggtggtcgtgagaatggagag

SEQ ID NO: 189187 - DNA, 156 bp, Homo sapiens
  chr19:16528333-16528489
  hypo
tgtggagggaagggccgtttccaacatacctttgtaactgggcaatctcttgactgatgtcatcaagctccttcacgccagtaaactccccggagccgagagagcctgaactgtcctagaattgaattcagaggcgagatctctaattagcaacct

SEQ ID NO: 189188 - DNA, 36 bp, Homo sapiens; identical to SEQ ID NO: 32276
  chr19:16550466-16550502
  hypo

SEQ ID NO: 189189 - DNA, 133 bp, Homo sapiens
  chr19:16552744-16552877
  hypo
aagcgcagcttcactcgcccccaccctccctgtgtatgccggatcgacctgaaatgggagaccaagaggcaaaataacttttcagcaaatgcagcagcaggtgaagtggcacccgccacgctaactatccgct

SEQ ID NO: 189190 - DNA, 31 bp, Homo sapiens; identical to SEQ ID NO: 96767
  chr19:16590107-16590138
  hypo

SEQ ID NO: 189191 - DNA, 26 bp, Homo sapiens
  chr19:16608170-16608196
  hypo
tttttttttgagacagattctcgctc

SEQ ID NO: 189192 - DNA, 85 bp, Homo sapiens; identical to SEQ ID NO: 32278
  chr19:16608435-16608520
  hypo

SEQ ID NO: 189193 - DNA, 86 bp, Homo sapiens
  chr19:16620060-16620146
  hypo
gttaaatgccatccacgtgccacctaagcatgcgtcacaccatcaggattcctgcagccccgtggacatgccgtactgaagacgcc

SEQ ID NO: 189194 - DNA, 531 bp, Homo sapiens; identical to SEQ ID NO: 96771
  chr19:16620367-16620898
  hypo

SEQ ID NO: 189195 - DNA, 44 bp, Homo sapiens; identical to SEQ ID NO: 32280
  chr19:16631182-16631226
  hypo

SEQ ID NO: 189196 - DNA, 30 bp, Homo sapiens
  chr19:16635966-16635996
  hypo
agggccacaagcagcgccaccagcctgctc

SEQ ID NO: 189197 - DNA, 30 bp, Homo sapiens; identical to SEQ ID NO: 96773
  chr19:16636621-16636651
  hypo

SEQ ID NO: 189198 - DNA, 194 bp, Homo sapiens; identical to SEQ ID NO: 131008
  chr19:16638140-16638334
  hypo

SEQ ID NO: 189199 - DNA, 150 bp, Homo sapiens; identical to SEQ ID NO: 96775
  chr19:16638586-16638736
  hypo

SEQ ID NO: 189200 - DNA, 30 bp, Homo sapiens; identical to SEQ ID NO: 96776
  chr19:16640948-16640978
  hypo

SEQ ID NO: 189201 - DNA, 188 bp, Homo sapiens; identical to SEQ ID NO: 96777
  chr19:16643384-16643572
  hypo

SEQ ID NO: 189202 - DNA, 30 bp, Homo sapiens; identical to SEQ ID NO: 96778
  chr19:16646886-16646916
  hypo

SEQ ID NO: 189203 - DNA, 173 bp, Homo sapiens
  chr19:16661965-16662138
  hypo
ttcggtgaaggcacacggcaagttcttctgacaaataacaccctttgggattgactcttcacgttttacacagcaattgtctcagcttgggaccaaagtatttacaaagcaagcgaacaagagacgaagcaagagggacacttctgaggccggtggtgcggaaactcaccgcc

SEQ ID NO: 189204 - DNA, 25 bp, Homo sapiens
  chr19:16679842-16679867
  hypo
ttttttttttttgagacggagtctc

SEQ ID NO: 189205 - DNA, 84 bp, Homo sapiens; identical to SEQ ID NO: 32282
  chr19:16680106-16680190
  hypo

SEQ ID NO: 189206 - DNA, 391 bp, Homo sapiens; identical to SEQ ID NO: 96782
  chr19:16680656-16681047
  hypo

SEQ ID NO: 189207 - DNA, 318 bp, Homo sapiens
  chr19:16681298-16681616
  hypo
ggctgagacaacaagcgcccaacttccacttaagaatacgggataaagctgtctccggctaaagccatggctattcttgccccaagccaggaaataccctggcttggcatcttgaacagaatttggactgtgcccaaagcatcctccttatgcagccctgagtcctgtgtgccactttcgcttccgttcccagaccatcacaacttctggctgttttaatttctaagactttgctggattttgccaagatcgaactccttggatcgcgtctggcttctgatcccagaggtcccctgacagaaatctcttgtcaagaag

SEQ ID NO: 189208 - DNA, 31 bp, Homo sapiens; identical to SEQ ID NO: 96784
  chr19:16715769-16715800
  hypo

SEQ ID NO: 189209 - DNA, 118 bp, Homo sapiens; identical to SEQ ID NO: 96785
  chr19:16735188-16735306
  hypo

SEQ ID NO: 189210 - DNA, 221 bp, Homo sapiens; identical to SEQ ID NO: 96786
  chr19:16735747-16735968
  hypo

SEQ ID NO: 189211 - DNA, 30 bp, Homo sapiens; identical to SEQ ID NO: 96787
  chr19:16736432-16736462
  hypo

SEQ ID NO: 189212 - DNA, 130 bp, Homo sapiens; identical to SEQ ID NO: 32285
  chr19:16756121-16756251
  hypo

SEQ ID NO: 189213 - DNA, 166 bp, Homo sapiens
  chr19:16757896-16758062
  hypo
ccatgcacacctcggcgaacacttttccacccaccacgagcttggactttctgggaaggttgtcggttttctggtcaaaaacattcttgaagtcatcaggaatggaggaatggagactcggcatcccgggaaagtgagttcctggtttcatcgctgggattcaaga

SEQ ID NO: 189214 - DNA, 201 bp, Homo sapiens; identical to SEQ ID NO: 96790
  chr19:16763516-16763717
  hypo

SEQ ID NO: 189215 - DNA, 112 bp, Homo sapiens; identical to SEQ ID NO: 96791
  chr19:16763931-16764043
  hypo

SEQ ID NO: 189216 - DNA, 210 bp, Homo sapiens; identical to SEQ ID NO: 32286
  chr19:16766707-16766917
  hypo

SEQ ID NO: 189217 - DNA, 30 bp, Homo sapiens; identical to SEQ ID NO: 96793
  chr19:16767425-16767455
  hypo

SEQ ID NO: 189218 - DNA, 141 bp, Homo sapiens; identical to SEQ ID NO: 96794
  chr19:16781234-16781375
  hypo

SEQ ID NO: 189219 - DNA, 30 bp, Homo sapiens; identical to SEQ ID NO: 55792
  chr19:16830271-16830301
  hypo

SEQ ID NO: 189220 - DNA, 26 bp, Homo sapiens
  chr19:16834793-16834819
  hypo
atctcgcctgggctatgacaccattt

SEQ ID NO: 189221 - DNA, 98 bp, Homo sapiens; identical to SEQ ID NO: 96796
  chr19:16835421-16835519
  hypo

SEQ ID NO: 189222 - DNA, 30 bp, Homo sapiens; identical to SEQ ID NO: 96797
  chr19:16918653-16918683
  hypo

SEQ ID NO: 189223 - DNA, 30 bp, Homo sapiens; identical to SEQ ID NO: 96798
  chr19:16989069-16989099
  hypo

SEQ ID NO: 189224 - DNA, 30 bp, Homo sapiens; identical to SEQ ID NO: 32287
  chr19:16989666-16989696
  hypo

SEQ ID NO: 189225 - DNA, 552 bp, Homo sapiens
  chr19:17000716-17001268
  hypo
cctgccgcctggccacggccgcactctatggtcacatgtatggctcagtgctgctgctggccgccgtcagcctggatcgctacctggccctggtgcacccgctgcgggcccgcgccctgcgtggccggcgcctggcccttggactctgcatggctgcttggctcatggcggccgccctggcactgcccctgacactgcagcggcagaccttccggctggcgcgctccgatcgcgtgctctgccatgacgcgctgcccctggacgcacaggcctcccactggcaaccggccttcacctgcctggcgctgttgggctgtttcctgcccctgctggccatgctgctgtgctacggggccaccctgcacacgctggcggccagcggccggcgctacggccacgcgctgaggctgaccgcagtggtgctggcctccgccgtggccttcttcgtgcccagcaacctgctgctgctgctgcattactcggacccgagccccagcgcctggggcaacctctatggtgcctacgtgcccagcctggcgctgagcaccctca

SEQ ID NO: 189226 - DNA, 37 bp, Homo sapiens
  chr19:17009181-17009218
  hypo
cctgccctcaagtgatccgcctcggtcccatttttta

SEQ ID NO: 189227 - DNA, 18 bp, Homo sapiens
  chr19:17048895-17048913
  hypo
cagcctaaccttcttgct

SEQ ID NO: 189228 - DNA, 30 bp, Homo sapiens
  chr19:17049224-17049254
  hypo
ctgtaggtgtacgcccgggggactccttcc

SEQ ID NO: 189229 - DNA, 170 bp, Homo sapiens
  chr19:17091353-17091523
  hypo
gccgcccgcttgcttcgctgctgggtggtgtgggcaggctgctggcccgatagcacaatattgccccgtgcagccacctcgtagtacagggtaaagttgcagggacatgtggacttcacagaaaaataggcttcttccccaacctatggaagacacgcagcatggggggc

SEQ ID NO: 189230 - DNA, 257 bp, Homo sapiens; identical to SEQ ID NO: 131020
  chr19:17137101-17137358
  hypo

SEQ ID NO: 189231 - DNA, 77 bp, Homo sapiens; identical to SEQ ID NO: 131021
  chr19:17137591-17137668
  hypo

SEQ ID NO: 189232 - DNA, 468 bp, Homo sapiens
  chr19:17160622-17161090
  hypo
aatagctacagtgctacggtagtatataaagtgctcaagtatcctgaatgtaaccatgagtcatgacaagtccctccctgaacgagagagagagggcgggacttctgcctggctgcttgaagaaaaatcttcgcttgggctgatgaacgtggcctgagcgggggctgacgaggcacccgggttgtcgtcctcagacaggggcgtgttcttgggtgctcccccagattctctgcaggcactgtcttgattgaaataccaccggctggggggcgccatgccctgggtctcttcccagacttcctggtttgccaaggctgcctctttgcttgcctctgcggagagttccagcacctgggcaaagctcctgttgaggatgggagaaagaataacggctttcaccctctgaggtgaagcgcatgtgtgtggtgaacggagggctgccacacggggaggcggattttcacatgc

SEQ ID NO: 189233 - DNA, 31 bp, Homo sapiens; identical to SEQ ID NO: 32289
  chr19:17161932-17161963
  hypo

SEQ ID NO: 189234 - DNA, 393 bp, Homo sapiens; identical to SEQ ID NO: 96804
  chr19:17172562-17172955
  hypo

SEQ ID NO: 189235 - DNA, 30 bp, Homo sapiens
  chr19:17212538-17212568
  hypo
agaggcaggcagctcgggccgccgggagca

SEQ ID NO: 189236 - DNA, 138 bp, Homo sapiens; identical to SEQ ID NO: 96805
  chr19:17220149-17220287
  hypo

SEQ ID NO: 189237 - DNA, 343 bp, Homo sapiens; identical to SEQ ID NO: 32292
  chr19:17240192-17240535
  hypo

SEQ ID NO: 189238 - DNA, 121 bp, Homo sapiens; identical to SEQ ID NO: 96807
  chr19:17255381-17255502
  hypo

SEQ ID NO: 189239 - DNA, 304 bp, Homo sapiens; identical to SEQ ID NO: 96808
  chr19:17264699-17265003
  hypo

SEQ ID NO: 189240 - DNA, 30 bp, Homo sapiens; identical to SEQ ID NO: 96809
  chr19:17279594-17279624
  hypo

SEQ ID NO: 189241 - DNA, 161 bp, Homo sapiens; identical to SEQ ID NO: 96810
  chr19:17283463-17283624
  hypo

SEQ ID NO: 189242 - DNA, 30 bp, Homo sapiens
  chr19:17295563-17295593
  hypo
cactcgctgcggggacgctgttctgccctg

SEQ ID NO: 189243 - DNA, 30 bp, Homo sapiens
  chr19:17295851-17295881
  hypo
agcttcacccgacaccgagcacagcccgtc

SEQ ID NO: 189244 - DNA, 148 bp, Homo sapiens; identical to SEQ ID NO: 96811
  chr19:17303674-17303822
  hypo

SEQ ID NO: 189245 - DNA, 139 bp, Homo sapiens
  chr19:17311457-17311596
  hypo
acagcagcatcgccacgctgcaggtgagaagcgcaccaaggaaccaggaggcaaagggaagaagaaccgaaatgtcaagattgggaagatcacagtgtcagagaagtggcgggaatcggtgttccgccagatcaccaac

SEQ ID NO: 189246 - DNA, 223 bp, Homo sapiens
  chr19:17312744-17312967
  hypo
tccgttcccagaagacgcccattgagagcttgtttatcgaagccaccgagaagttcaggagcaacatcaaaacgatgtactctgtcccggtatgtggcggcccggccttcagcctttcccataccctgctcagacccgtcattcccatccgccccttgcccaggcctgcagggtgacgcctagcattcctacagaacgggaagatccacgtgggctacaagga

SEQ ID NO: 189247 - DNA, 30 bp, Homo sapiens
  chr19:17316994-17317024
  hypo
gccccaggcacagccgtcctgccagtgcgc

SEQ ID NO: 189248 - DNA, 30 bp, Homo sapiens; identical to SEQ ID NO: 96813
  chr19:17323275-17323305
  hypo

SEQ ID NO: 189249 - DNA, 31 bp, Homo sapiens; identical to SEQ ID NO: 32294
  chr19:17335975-17336006
  hypo

SEQ ID NO: 189250 - DNA, 30 bp, Homo sapiens; identical to SEQ ID NO: 32295
  chr19:17336185-17336215
  hypo

SEQ ID NO: 189251 - DNA, 30 bp, Homo sapiens; identical to SEQ ID NO: 96816
  chr19:17343130-17343160
  hypo

SEQ ID NO: 189252 - DNA, 612 bp, Homo sapiens; identical to SEQ ID NO: 131024
  chr19:17355713-17356325
  hypo

SEQ ID NO: 189253 - DNA, 266 bp, Homo sapiens; identical to SEQ ID NO: 131025
  chr19:17357469-17357735
  hypo

SEQ ID NO: 189254 - DNA, 174 bp, Homo sapiens
  chr19:17362462-17362636
  hypo
tgttccagctccctgcgcagagactgcagctgctcctgcaggtccagtgtcctgttgcgaaggagaagagagggggctcacagccccagccgatcctgtttcccaggtctcctcctacccacctgcccacagtattgtcatgtaaacacacctgtacaccggggtacaccttag

SEQ ID NO: 189255 - DNA, 27 bp, Homo sapiens
  chr19:17365791-17365818
  hypo
gagctgcattaaggacaggtgcggcga

SEQ ID NO: 189256 - DNA, 57 bp, Homo sapiens; identical to SEQ ID NO: 96819
  chr19:17369110-17369167
  hypo

SEQ ID NO: 189257 - DNA, 121 bp, Homo sapiens
  chr19:17376562-17376683
  hypo
gtgttgggattacaggcatgagccaccgaccccaccagccccagaaacatttaagagccacttgaagcctcagtttatttatttattttattttattagatggaatcttgttctgccacgc

SEQ ID NO: 189258 - DNA, 55 bp, Homo sapiens
  chr19:17376961-17377016
  hypo
gagggtcaaagaagccggccacattggccaggctctaattcgagaatagccggag

SEQ ID NO: 189259 - DNA, 30 bp, Homo sapiens; identical to SEQ ID NO: 55801
  chr19:17389688-17389718
  hypo

SEQ ID NO: 189260 - DNA, 528 bp, Homo sapiens; identical to SEQ ID NO: 131028
  chr19:17392398-17392926
  hypo

SEQ ID NO: 189261 - DNA, 93 bp, Homo sapiens
  chr19:17397244-17397337
  hypo
tggccacctgctcgtcgccggcgcttgggggtgcacctgctgcaccgtgccctccttgtcttcctggctgaaggcgagcgacagcttcatccc

SEQ ID NO: 189262 - DNA, 45 bp, Homo sapiens
  chr19:17397663-17397708
  hypo
tgcttctgtaagaggcgtttgaacctgggcaactccacctggaat

SEQ ID NO: 189263 - DNA, 96 bp, Homo sapiens
  chr19:17404191-17404287
  hypo
caccgcgcccggcctggaggaggattttgtcaacttcaactctaccaacattaggagctggatcattctttgctgggggggcgggggtgggcgggg

SEQ ID NO: 189264 - DNA, 190 bp, Homo sapiens
  chr19:17404631-17404821
  hypo
tgcagcgattattggcgtgaaccacctcgccgggctagtatccagggctattctaagtgctaaggatccccagaccctttctaatctgaactcgctaattagagtttctaatctaaagatcccctggtgccggtcttctagaattatataggtcaccggtctcatacaaatcctccgctgtgaggagagc

SEQ ID NO: 189265 - DNA, 651 bp, Homo sapiens; identical to SEQ ID NO: 96823
  chr19:17405066-17405717
  hypo

SEQ ID NO: 189266 - DNA, 30 bp, Homo sapiens
  chr19:17407412-17407442
  hypo
caacaaactatgtacggcctgtgggctagt

SEQ ID NO: 189267 - DNA, 508 bp, Homo sapiens; identical to SEQ ID NO: 96824
  chr19:17411812-17412320
  hypo

SEQ ID NO: 189268 - DNA, 141 bp, Homo sapiens; identical to SEQ ID NO: 96825
  chr19:17415103-17415244
  hypo

SEQ ID NO: 189269 - DNA, 798 bp, Homo sapiens
  chr19:17422759-17423557
  hypo
gacaggaaggctgcacgtaccctgccttcattcatttgtccaacgcagacatgttgatcctaaaggctgcccctgagggagctctgtgcaaagcattccccttgttgtcttatgactcagagtaaccctgggaggtggccctgttggaatgcgtctcttcacagggaggcccagaggctgggaagtccctcgtcccaggtcacacaaccagggacgggctaagccaggattgagagcagaatgcccggagtacctgcacctctcgccactcagccaccgggccctgtgtgagcccggccagggttcagtcagccctgtcctgtcctcttcccttggggaggtaccagtccagccagggaggtggacatgtaagcagatgacctcgccggggtgtgagggaggctctgggagaggctcccgaagtgtcgggggaacaaaggggccagggagggtgttggagctggtggggaggttagcaggtatttgccacatggaggcatgaggggcattcctagagggtgtgtgtggcagagggtgtgtatgatgggagtccagcaggggcaagctgggccagggctgcgaagggggacagggacccctcctcacccttcaggtctcagtgcctgcatccctgcgtctgggcagccctcctttatcccctaaatgggccagagctctgccttgcacctcacactgcgccctcgaggcaccctgtcctgcagccgcttcctgtgcactgtgcagctctttgccccacaccatctcaaggccaggcgcgtggccatggtggctcagtcc

SEQ ID NO: 189270 - DNA, 31 bp, Homo sapiens; identical to SEQ ID NO: 32302
  chr19:17430595-17430626
  hypo

SEQ ID NO: 189271 - DNA, 30 bp, Homo sapiens; identical to SEQ ID NO: 96829
  chr19:17435634-17435664
  hypo

SEQ ID NO: 189272 - DNA, 324 bp, Homo sapiens; identical to SEQ ID NO: 32303
  chr19:17435941-17436265
  hypo

SEQ ID NO: 189273 - DNA, 266 bp, Homo sapiens; identical to SEQ ID NO: 96831
  chr19:17438170-17438436
  hypo

SEQ ID NO: 189274 - DNA, 867 bp, Homo sapiens; identical to SEQ ID NO: 96832
  chr19:17443705-17444572
  hypo

SEQ ID NO: 189275 - DNA, 31 bp, Homo sapiens; identical to SEQ ID NO: 32305
  chr19:17447345-17447376
  hypo

SEQ ID NO: 189276 - DNA, 226 bp, Homo sapiens; identical to SEQ ID NO: 96834
  chr19:17449330-17449556
  hypo

SEQ ID NO: 189277 - DNA, 30 bp, Homo sapiens; identical to SEQ ID NO: 96835
  chr19:17462847-17462877
  hypo

SEQ ID NO: 189278 - DNA, 324 bp, Homo sapiens; identical to SEQ ID NO: 131035
  chr19:17501235-17501559
  hypo

SEQ ID NO: 189279 - DNA, 30 bp, Homo sapiens; identical to SEQ ID NO: 96837
  chr19:17534336-17534366
  hypo

SEQ ID NO: 189280 - DNA, 43 bp, Homo sapiens; identical to SEQ ID NO: 96838
  chr19:17536625-17536668
  hypo

SEQ ID NO: 189281 - DNA, 19 bp, Homo sapiens
  chr19:17584366-17584385
  hypo
tacattaataaaaaattaa

SEQ ID NO: 189282 - DNA, 373 bp, Homo sapiens; identical to SEQ ID NO: 96839
  chr19:17597311-17597684
  hypo

SEQ ID NO: 189283 - DNA, 30 bp, Homo sapiens; identical to SEQ ID NO: 96840
  chr19:17611383-17611413
  hypo

SEQ ID NO: 189284 - DNA, 30 bp, Homo sapiens; identical to SEQ ID NO: 96841
  chr19:17615526-17615556
  hypo

SEQ ID NO: 189285 - DNA, 30 bp, Homo sapiens; identical to SEQ ID NO: 96842
  chr19:17626393-17626423
  hypo

SEQ ID NO: 189286 - DNA, 30 bp, Homo sapiens; identical to SEQ ID NO: 96843
  chr19:17628138-17628168
  hypo

SEQ ID NO: 189287 - DNA, 63 bp, Homo sapiens; identical to SEQ ID NO: 96844
  chr19:17631821-17631884
  hypo

SEQ ID NO: 189288 - DNA, 31 bp, Homo sapiens
  chr19:17648069-17648100
  hypo
tatgactcatatttatcgagcaactgcccat

SEQ ID NO: 189289 - DNA, 393 bp, Homo sapiens; identical to SEQ ID NO: 131047
  chr19:17649951-17650344
  hypo

SEQ ID NO: 189290 - DNA, 259 bp, Homo sapiens; identical to SEQ ID NO: 96845
  chr19:17657446-17657705
  hypo

SEQ ID NO: 189291 - DNA, 586 bp, Homo sapiens; identical to SEQ ID NO: 96846
  chr19:17687843-17688429
  hypo

SEQ ID NO: 189292 - DNA, 433 bp, Homo sapiens
  chr19:17691242-17691675
  hypo
ctcagagaacgtctgcgtgatcctgctctccccagctccagatcctccatggctccctcacgccctttggaaaaactcactcttctcccccatgaccgccagacccctgggctcctgcattcactccatccagtcacagagctctgcaaacatgctgagcctgctcccatcccaggacctgacggggtaactagatccctggctttctgggcaagctccctccggagggcgggaggagagtgacaggcccgatcttgcaccccagctatgtgggccggaagcggatgcaggtggagcaccccgagaaggctgtgcctcgcgtgaggaacctggtggaggccgactattcctactggaccctggcctacgtgatctccctgcaaggcgcccgcaaactgctggctgctgagccgctctccaagatgctgcctgt

SEQ ID NO: 189293 - DNA, 31 bp, Homo sapiens; identical to SEQ ID NO: 32310
  chr19:17692025-17692056
  hypo

SEQ ID NO: 189294 - DNA, 30 bp, Homo sapiens; identical to SEQ ID NO: 32311
  chr19:17693867-17693897
  hypo

SEQ ID NO: 189295 - DNA, 1043 bp, Homo sapiens; identical to SEQ ID NO: 12144
  chr19:17716508-17717551
  hypo

SEQ ID NO: 189296 - DNA, 30 bp, Homo sapiens; identical to SEQ ID NO: 96851
  chr19:17728622-17728652
  hypo

SEQ ID NO: 189297 - DNA, 321 bp, Homo sapiens
  chr19:17757923-17758244
  hypo
atatgcgtgcacacacggagatgagatggaatgcacccgaccgagtgagtgcgcgctgcaaaggagagggaccaggccatgggacagggcatgagacaggtctcagagggtggagaaggaggggccctatggcggcccacgccccctcaccggtgatgctgatcttggcggaccacttggacgtgccgtccagcacgctctgcttgaccgccttcatctgctgcgtgtgcgccgtcttggtcaccgcgaagatctcctggatgagctcgaagatctcgggcttgttgcgctcccggatcttcatgcggtccttgagcacca

SEQ ID NO: 189298 - DNA, 475 bp, Homo sapiens; identical to SEQ ID NO: 96853
  chr19:17759136-17759611
  hypo

SEQ ID NO: 189299 - DNA, 203 bp, Homo sapiens; identical to SEQ ID NO: 131055
  chr19:17798530-17798733
  hypo

SEQ ID NO: 189300 - DNA, 645 bp, Homo sapiens; identical to SEQ ID NO: 131056
  chr19:17798754-17799399
  hypo

SEQ ID NO: 189301 - DNA, 30 bp, Homo sapiens; identical to SEQ ID NO: 32316
  chr19:17836626-17836656
  hypo

SEQ ID NO: 189302 - DNA, 1219 bp, Homo sapiens
  chr19:17837839-17839058
  hypo
caacctcaagaagacgaatgcccaggcggcacccaagccccgcaaagcgcccagcacgtcccactctggcttcccgccggtggcaaatggaccccgcagcccgcccagcctccgatgtggagaagccagcccccccagtgcagcctgcggctctccggcctcccagctggtggccacgcccagcctggagctggggccgatcccagccggggaggagaaggcactggagctgcctttggccgccagctcaatcccaaggccacgcacaccctcccctgagtcccaccggagccccgcagagggcagcgagcggctgtcgctgagcccactgcggggcggggaggccgggccagacgcctcacccacagtgaccacacccacggtgaccacgccctcactacccgcagaggtgggctccccgcactcgaccgaggtggacgagtccctgtcggtgtcctttgagcaggtgctgccgccatccgcccccaccagtgaggctgggctgagcctcccgctgcgtggcccccgggcgcggcgctcggcttccccacacgatgtggacctgtgcctggtgtcaccctgtgaatttgagcatcgcaaggcggtgccaatggcaccggcacctgcgtcccccggcagctcgaatgacagcagtgcccggtcacaggaacgggcaggtgggctgggggccgaggagacgccacccacatcggtcagcgagtccctgcccaccctgtctgactcggatcccgtgcccctggcccccggtgcggcagactcagacgaagacacagagggctttggagtccctcgccacgaccctttgcctgaccccctcaaggtccccccaccactgcctgacccatccagcatctgcatggtggaccccgagatgctgccccccaagacagcacggcaaacggagaacgtcagccgcacccggaagcccctggcccgccccaactcacgcgctgccgcccccaaagccactccagtggctgctgccaaaaccaaggggcttgctggtggggaccgtgccagccgaccactcagtgcccggagtgagcccagtgagaagggaggccgggcacccctgtccagaaagtcctcaacccccaagactgccactcgaggcccgtcgggtgagtactggagctggggccctgggctgggttagcagctgcttaggctggagagcatagctcgtccccctgttttt

SEQ ID NO: 189303 - DNA, 39 bp, Homo sapiens; identical to SEQ ID NO: 96860
  chr19:17848806-17848845
  hypo

SEQ ID NO: 189304 - DNA, 393 bp, Homo sapiens
  chr19:17881295-17881688
  hypo
cctgcccaagtcccgcgagaactacctgaaccgttgcatggaccaggagcggctgcggagggagagtaccagccagaaggagatggacaaggtgggctcacagtgggggggttctgaggaatttgccgcggggcggaggggctgcctgatcagagagtggaaacacatcccagagcgacggtcctggaacctgtgggtgatcacaccctgggtaccccgaggagttcacctgccaggtgatggggcctgggggaggccccctgagtatcgccctcccatccccgtttcctccctgtgctttgtaggcggagactaaaaccaagaaggcggcagagagcctgcggcgctcagtggaaaaatacaactcagcccgagctgactttgagcagaaga

SEQ ID NO: 189305 - DNA, 121 bp, Homo sapiens
  chr19:17882044-17882165
  hypo
agtggaaccctgtctcgaaaaaataaaataaattcaagcagattggaatctgaggattaggaatcagaacttttttcaagttacaagtgatagaagccttcattcaaaccgacaggtgtat

SEQ ID NO: 189306 - DNA, 30 bp, Homo sapiens
  chr19:17943332-17943362
  hypo
ccatagctgacaccacgatacttgacaatg

SEQ ID NO: 189307 - DNA, 31 bp, Homo sapiens; identical to SEQ ID NO: 96862
  chr19:17986849-17986880
  hypo

SEQ ID NO: 189308 - DNA, 112 bp, Homo sapiens
  chr19:17994698-17994810
  hypo
tgtgggtggccttgggcgccacgctgtacccacccagcgagcagaccatgagggtcctgccatcgtcggctgcccgctgcgtggctctctcagtcaacgcctctggcctcct

SEQ ID NO: 189309 - DNA, 79 bp, Homo sapiens
  chr19:18041147-18041226
  hypo
gccaccgcgcccggcctttaataatctttttacctagaaggcgggggaacctgctgggaattggcgaaaactagcagtc

SEQ ID NO: 189310 - DNA, 780 bp, Homo sapiens
  chr19:18052910-18053690
  hypo
agcctcagtgacccacggcagggaaacgtggacagtgctgcccgactcataagggcagagcccctgccctagcctgaaacgggtccaggcctcccacggctcttagaatccaacatgaacccctccctggcccccagaggctccgcatggcccagccgtctccctcccggcctcttccccctcccgcttcactcccactccagcctccaagctgttcctgttacaacaaatggctcctgcctcggcgcctttgcactggtagccctgctgctaaggacgctcctgttccccagctctcccccttggccggcgctcttcgcacctaggagcgtcacttcttcaagagccacccacccgccctgtccaaggttcccctgttggcctcacatcccccgcccagggcagcaccgggacctatcttgttcctggtatgtcccctgcacccagcacagagcctaaatcctcgttggctgagatgaaaactcgaaccccaggctagtgggtggcgcgggggtgtggggtcttctgcctgaccatgcacgccgcccccgcaggaggagaaggagaagcggcgcctcgaccagctggaacgtaagaaggagacgcagcgcctactggaggaggaggactccaagctcaagggcggcaaggcgccgcgggtggccacgtccagcaaggtcacccgggcccagatcgaggacacgctgcgccgagaccatcagctcagggaggccccggacacaggtcgggcggcatcccgctctggagctgcacttttgc

SEQ ID NO: 189311 - DNA, 869 bp, Homo sapiens
  chr19:18054173-18055042
  hypo
gcagtgctcaggtaacggggcggggcctggggctttcccaggggtggagctggtcatcgggggcggggctacctgggggcggggccgggcttttcggggcaaggctgcgcccaaggccccctgacgctcatgtccacccccagcgtggcggaggaggcggccgaccggcacccagaaagacgcatgcgggcagccttcacagcctttgaggaagcccagctgccgcggctcaaacaagagaaccccaacatgcggctgtcgcagctgaaacagctgctcaagaaggagtggctccgctctcctgacaaccccatgaaccagcgggccgtgcccttcaatgcccccaagtgagcccagaacttggggagccagttcacccacgggtggtccaggtcacgactctgcacgcccttaggccaggtcagctgcgagggtcacagagcgttccgggggccaaggcgccgggccccggggccatgctcttatcaccagccacccgtcctcccgccagagggtccctgccccgagtgacaccccatcccctcccatcccccggcgcgtgtgtgtagagcctcagggctgagtgcccaataaaggtggcggcaaggctgcggtgaggcacttgaagcctaagtgagtgggtggggagaggcgggcgaagaatggggagaaggaacagctttggggacctgctgtgaaccgcactgggatcatagctagaaaagacaagagcccccaacagcgcgctccttcctgctgccagctgtgcttcatcggctcctgccagcacccctccttggctgtgccacttgtccagtgaggcacctgctccactgtctcctgcacacgcttagagaggtggaggtgga

SEQ ID NO: 189312 - DNA, 85 bp, Homo sapiens
  chr19:18080376-18080461
  hypo
cagggcaccttaggacgcggctgccaggcgaggaggaacatggcagacacacggctgaatttggcccatgcgtcgggtggctgag

SEQ ID NO: 189313 - DNA, 644 bp, Homo sapiens; identical to SEQ ID NO: 32322
  chr19:18084482-18085126
  hypo

SEQ ID NO: 189314 - DNA, 30 bp, Homo sapiens
  chr19:18085852-18085882
  hypo
gcccaccgcctccagcgtccatctggctgt

SEQ ID NO: 189315 - DNA, 564 bp, Homo sapiens; identical to SEQ ID NO: 96867
  chr19:18092404-18092968
  hypo

SEQ ID NO: 189316 - DNA, 30 bp, Homo sapiens
  chr19:18094531-18094561
  hypo
tcctgggtggtcccgcggcaccccccacca

SEQ ID NO: 189317 - DNA, 30 bp, Homo sapiens
  chr19:18100599-18100629
  hypo
gaccaagcccgggttcggaaacaccagcgt

SEQ ID NO: 189318 - DNA, 397 bp, Homo sapiens
  chr19:18103591-18103988
  hypo
ctcaggagatggtgtcggcatagttttctgaatgaaacaccgcctccggtggtggtgagaggacaggtgtgcccctgaggggctggcacagaaccctcagaggctgggcacctccccagagcaacggcagcccctcggccatctgggaaccccgcgcggggccctagggtggcatccccgggaggtgggcagggttgggtacatgccgaacaactgtgctgaggttaaaattgccttgtgatttttctcctgctctgcccggtcctgccagggctcagaagtaagtgttctcccaggggcttggtggggctgggaaatcgggggtgcatggtggtcacagacagggggtacacccggggcatgccaaccccagcctcagaggcgggcagggttcaca

SEQ ID NO: 189319 - DNA, 30 bp, Homo sapiens
  chr19:18104333-18104363
  hypo
acgaccaggctaacacgcttaccgacctag

SEQ ID NO: 189320 - DNA, 512 bp, Homo sapiens; identical to SEQ ID NO: 131073
  chr19:18117801-18118313
  hypo

SEQ ID NO: 189321 - DNA, 385 bp, Homo sapiens; identical to SEQ ID NO: 12156
  chr19:18118522-18118907
  hypo

SEQ ID NO: 189322 - DNA, 177 bp, Homo sapiens; identical to SEQ ID NO: 12157
  chr19:18118965-18119142
  hypo

SEQ ID NO: 189323 - DNA, 31 bp, Homo sapiens; identical to SEQ ID NO: 55837
  chr19:18119199-18119230
  hypo

SEQ ID NO: 189324 - DNA, 48 bp, Homo sapiens; identical to SEQ ID NO: 96872
  chr19:18120712-18120760
  hypo

SEQ ID NO: 189325 - DNA, 190 bp, Homo sapiens; identical to SEQ ID NO: 96873
  chr19:18121350-18121540
  hypo

SEQ ID NO: 189326 - DNA, 317 bp, Homo sapiens; identical to SEQ ID NO: 96874
  chr19:18123644-18123961
  hypo

SEQ ID NO: 189327 - DNA, 145 bp, Homo sapiens
  chr19:18126516-18126661
  hypo
ttagccattcatccgcggatggacatctgggttgtttccacggcttggctatagtgaatcttgctgctaagaacacgtgtgttcaaggattactttgaaaacccacggagctgttaggtggccctagtggcgtggggctgttatt

SEQ ID NO: 189328 - DNA, 84 bp, Homo sapiens
  chr19:18159859-18159943
  hypo
attggccgccatggccgtacctgtaccgtgggtgtatccaagaagaaataagtctgtaggccttatctgttaataaatagttta

SEQ ID NO: 189329 - DNA, 86 bp, Homo sapiens; identical to SEQ ID NO: 96875
  chr19:18207918-18208004
  hypo

SEQ ID NO: 189330 - DNA, 30 bp, Homo sapiens
  chr19:18230723-18230753
  hypo
gcgagattctcccgccgctgagctgcgttg

SEQ ID NO: 189331 - DNA, 250 bp, Homo sapiens
  chr19:18241243-18241493
  hypo
ctgtagtgcctgctggggcctcgatctccggtcccagcaagcctggccctctgtccccagggccgtctacctggtgcggcaccgtgacacacggcagcgctttgccatcaagaagatcaacaaacagaacttgatcctgcgtaaccagatccagcaggtctttgtggagcgtgacattctcacctttgccgagaacccctttgtggtcagcatgttctgctcctttgagacccggcgccacctatgtatg

SEQ ID NO: 189332 - DNA, 220 bp, Homo sapiens; identical to SEQ ID NO: 96877
  chr19:18242604-18242824
  hypo

SEQ ID NO: 189333 - DNA, 30 bp, Homo sapiens
  chr19:18255283-18255313
  hypo
gctgctctcagccacgcccgcctacggagc

SEQ ID NO: 189334 - DNA, 111 bp, Homo sapiens; identical to SEQ ID NO: 96878
  chr19:18255884-18255995
  hypo

SEQ ID NO: 189335 - DNA, 30 bp, Homo sapiens; identical to SEQ ID NO: 96879
  chr19:18256639-18256669
  hypo

SEQ ID NO: 189336 - DNA, 202 bp, Homo sapiens; identical to SEQ ID NO: 131078
  chr19:18271897-18272099
  hypo

SEQ ID NO: 189337 - DNA, 408 bp, Homo sapiens
  chr19:18272535-18272943
  hypo
tgctcgtcgcagctccggtactggtctctcgctcgcctttgtgtgagaatctatggagcacttactgcatacagctatgagggagctggcctcgcacatgtgcctgtatcatctcctcctccgccctgcacatactgtctcgtatatacccccaggcgtgcaagcgcacgcacaatcctgtgcacatgcgtgggcggacaggccctacccagccctcaccacactccccttccccctaaggagtgagcccagccctgacttcccggcgctgctggtggagaagctgcttcaggaacacttggaagagcaggaggttgcgcccccaggtgagtcccctgtattgctgtcatttcttcccgttgggggccgtaaatactgatccctgagtgctgccggcatcagcaggct

SEQ ID NO: 189338 - DNA, 65 bp, Homo sapiens; identical to SEQ ID NO: 96882
  chr19:18273253-18273318
  hypo

SEQ ID NO: 189339 - DNA, 30 bp, Homo sapiens; identical to SEQ ID NO: 96883
  chr19:18276869-18276899
  hypo

SEQ ID NO: 189340 - DNA, 146 bp, Homo sapiens
  chr19:18277901-18278047
  hypo
aaccctgaggtctctgcgccaccccacccctcccacaggatcctgctgaactccgagcggctcaagtcccgcattgccgagatccatgagagccgcacgaagctggagcagcagctgcgggcccaggcctcggacaacagagagat

SEQ ID NO: 189341 - DNA, 27 bp, Homo sapiens
  chr19:18290113-18290140
  hypo
gaaaagtgaaaaagaataccccggctg

SEQ ID NO: 189342 - DNA, 30 bp, Homo sapiens; identical to SEQ ID NO: 32331
  chr19:18307033-18307063
  hypo

SEQ ID NO: 189343 - DNA, 135 bp, Homo sapiens
  chr19:18331074-18331209
  hypo
cggagcggctggtttcggacaggtgggtcaactcccggttcaggatccgcttgaactggggcggagagaaggtgaagaccgtgatgatggggcaccgtgggccgaggcaggtgagctcagcgatctgccccacct

SEQ ID NO: 189344 - DNA, 507 bp, Homo sapiens; identical to SEQ ID NO: 55843
  chr19:18343302-18343809
  hypo

SEQ ID NO: 189345 - DNA, 337 bp, Homo sapiens; identical to SEQ ID NO: 55844
  chr19:18343879-18344216
  hypo

SEQ ID NO: 189346 - DNA, 628 bp, Homo sapiens
  chr19:18368468-18369096
  hypo
cctggaaccagcttcggtcagacatgaccccggcccggctgcccagctccacccacgtgacggggtggagcatctgccagtgccgggcttggtcccggcgggtgctgtagccgcgccaggcagactggatggtcgtggtggctctgcagaggtgtgccaggttccgccgcacacggtagccgcgccaagtagcttggatgaccatggccccccggtgccacagccggatcctgcgacgcgccaggtagccacggacgcccgcctggatagtgatcactgcgaggatgcggatctcctctgcagcctgcatggacaccattggctccccggaccgcctgggaggcaccaccgccttgttgcgccaggtgtcccaggacgcagcacccctggctggctcccatgcgcggttccacgattggccaccaaccacaccagcgtccgcggggccctggagtatagtggagttcagggatgccttgtgactaacggcaggattctgggggctataggagtcctgccgtctccacggtgactcctggttaaaaaggggtggcagggaaccacttggggaagactcatagcctagagacaccctccgaactcccggggccagcggaggaatgaccga

SEQ ID NO: 189347 - DNA, 30 bp, Homo sapiens; identical to SEQ ID NO: 96890
  chr19:18371391-18371421
  hypo

SEQ ID NO: 189348 - DNA, 158 bp, Homo sapiens
  chr19:18416994-18417152
  hypo
aatgcaaaatctatacgatggcaagtaactctgaagactcaagaaaaagagttcctcacggacgggaccttttattccaatcacctctcaaaataggtctccgaacgaggaccctgaagagaaggctatgcagggggacgggccgctgcctggctcag

SEQ ID NO: 189349 - DNA, 331 bp, Homo sapiens; identical to SEQ ID NO: 131094
  chr19:18420496-18420827
  hypo

SEQ ID NO: 189350 - DNA, 30 bp, Homo sapiens
  chr19:18421269-18421299
  hypo
agggtggctcaagggcggctcccagcgatg

SEQ ID NO: 189351 - DNA, 102 bp, Homo sapiens
  chr19:18435013-18435115
  hypo
tttttcttgtaaaggacactcctttctcttattaagtccaccataaatttcaggataatgtcatctcaagatccttaattacatctgcgaagaccctgttct

SEQ ID NO: 189352 - DNA, 77 bp, Homo sapiens; identical to SEQ ID NO: 96892
  chr19:18441764-18441841
  hypo

SEQ ID NO: 189353 - DNA, 220 bp, Homo sapiens
  chr19:18459065-18459285
  hypo
tgggtgaggaggacccgggtcacagaacttggtaacatcacgggacaattgctgccacagtgagtctagacagacctgctaaggatattaccagggaacaaagagggtctttgtcgtggggtcaggggaatcggtcagacgaggctgcgcggcggggtcctgtcaggtagatggggtgtagacaatggggcgtctgcccgagccccgtcctttcacggtg

SEQ ID NO: 189354 - DNA, 30 bp, Homo sapiens; identical to SEQ ID NO: 32335
  chr19:18492959-18492989
  hypo

SEQ ID NO: 189355 - DNA, 80 bp, Homo sapiens; identical to SEQ ID NO: 32336
  chr19:18496194-18496274
  hypo

SEQ ID NO: 189356 - DNA, 30 bp, Homo sapiens; identical to SEQ ID NO: 96895
  chr19:18509343-18509373
  hypo

SEQ ID NO: 189357 - DNA, 252 bp, Homo sapiens
  chr19:18546488-18546740
  hypo
ggagtgcagcaggagtttgcccgggtccctgccacccctcgccgggcaaccccgcgcccgcgcccgcgccccacgcacgcagtggtcaggctcttcgccgggcgtatagagcactgggttgctctgcaccatgtcgtccaccacgttgctcttggacacctccttagagcggaactgcaatggcgccgataggttctccccatcgttgttgcccaggtggttgtaactcacgatggacatggtctgtgggta

SEQ ID NO: 189358 - DNA, 92 bp, Homo sapiens; identical to SEQ ID NO: 96896
  chr19:18546999-18547091
  hypo

SEQ ID NO: 189359 - DNA, 572 bp, Homo sapiens; identical to SEQ ID NO: 55850
  chr19:18548567-18549139
  hypo

SEQ ID NO: 189360 - DNA, 30 bp, Homo sapiens; identical to SEQ ID NO: 32338
  chr19:18553980-18554010
  hypo

SEQ ID NO: 189361 - DNA, 30 bp, Homo sapiens; identical to SEQ ID NO: 32339
  chr19:18555395-18555425
  hypo

SEQ ID NO: 189362 - DNA, 50 bp, Homo sapiens
  chr19:18556528-18556578
  hypo
gtcaggtcaccagttccgaaaggtggcaggtggggcggctacgtccaagg

SEQ ID NO: 189363 - DNA, 68 bp, Homo sapiens; identical to SEQ ID NO: 32340
  chr19:18557167-18557235
  hypo

SEQ ID NO: 189364 - DNA, 30 bp, Homo sapiens; identical to SEQ ID NO: 32341
  chr19:18561249-18561279
  hypo

SEQ ID NO: 189365 - DNA, 30 bp, Homo sapiens; identical to SEQ ID NO: 96902
  chr19:18568991-18569021
  hypo

SEQ ID NO: 189366 - DNA, 30 bp, Homo sapiens; identical to SEQ ID NO: 55851
  chr19:18571125-18571155
  hypo

SEQ ID NO: 189367 - DNA, 30 bp, Homo sapiens; identical to SEQ ID NO: 96904
  chr19:18572363-18572393
  hypo

SEQ ID NO: 189368 - DNA, 143 bp, Homo sapiens; identical to SEQ ID NO: 96905
  chr19:18591738-18591881
  hypo

SEQ ID NO: 189369 - DNA, 30 bp, Homo sapiens
  chr19:18597442-18597472
  hypo
gatgattcacagctccgcaccggactcggc

SEQ ID NO: 189370 - DNA, 30 bp, Homo sapiens
  chr19:18598593-18598623
  hypo
ttaccttcggaacaacgggatcttctatta

SEQ ID NO: 189371 - DNA, 114 bp, Homo sapiens; identical to SEQ ID NO: 32342
  chr19:18600783-18600897
  hypo

SEQ ID NO: 189372 - DNA, 408 bp, Homo sapiens
  chr19:18637198-18637606
  hypo
agaattgtgagctcgcgtacacatacaaaattccttccgcagtgctcacttccaattcacagcccatggcaagtcgggtaaggccctcctgagtcactgctcaaggccaggtatatgggaggtgttagtaaatgctttggtatgaaagacaaagccatccccgtcgttctccaaaggtaccacacatggtccagctggcataccttgcacagctatgccatccacaagggatacccttcaccacccattaaaggcatcccatgccttcaacacaactgcagcgtcacacgtgctggatgctccagctcaccacccacaaccagctcagacctttgaggatgaagtggccgagtgaataaccacattcaatttcacactcctagtctggccattcggggcctctctcct

SEQ ID NO: 189373 - DNA, 30 bp, Homo sapiens; identical to SEQ ID NO: 96907
  chr19:18642643-18642673
  hypo

SEQ ID NO: 189374 - DNA, 82 bp, Homo sapiens; identical to SEQ ID NO: 32343
  chr19:18675983-18676065
  hypo

SEQ ID NO: 189375 - DNA, 30 bp, Homo sapiens; identical to SEQ ID NO: 96909
  chr19:18686867-18686897
  hypo

SEQ ID NO: 189376 - DNA, 88 bp, Homo sapiens; identical to SEQ ID NO: 96910
  chr19:18688220-18688308
  hypo

SEQ ID NO: 189377 - DNA, 447 bp, Homo sapiens; identical to SEQ ID NO: 96911
  chr19:18688367-18688814
  hypo

SEQ ID NO: 189378 - DNA, 57 bp, Homo sapiens; identical to SEQ ID NO: 96912
  chr19:18707294-18707351
  hypo

SEQ ID NO: 189379 - DNA, 842 bp, Homo sapiens; identical to SEQ ID NO: 131122
  chr19:18721515-18722357
  hypo

SEQ ID NO: 189380 - DNA, 102 bp, Homo sapiens; identical to SEQ ID NO: 55862
  chr19:18722386-18722488
  hypo

SEQ ID NO: 189381 - DNA, 456 bp, Homo sapiens; identical to SEQ ID NO: 55863
  chr19:18722521-18722977
  hypo

SEQ ID NO: 189382 - DNA, 564 bp, Homo sapiens; identical to SEQ ID NO: 131126
  chr19:18723427-18723991
  hypo

SEQ ID NO: 189383 - DNA, 37 bp, Homo sapiens
  chr19:18757683-18757720
  hypo
cgagagagtagagcacgtccagcgtgagctggagagg

SEQ ID NO: 189384 - DNA, 236 bp, Homo sapiens; identical to SEQ ID NO: 32346
  chr19:18757926-18758162
  hypo

SEQ ID NO: 189385 - DNA, 76 bp, Homo sapiens; identical to SEQ ID NO: 32347
  chr19:18771032-18771108
  hypo

SEQ ID NO: 189386 - DNA, 30 bp, Homo sapiens; identical to SEQ ID NO: 96920
  chr19:18772939-18772969
  hypo

SEQ ID NO: 189387 - DNA, 30 bp, Homo sapiens; identical to SEQ ID NO: 32348
  chr19:18782359-18782389
  hypo

SEQ ID NO: 189388 - DNA, 66 bp, Homo sapiens
  chr19:18783006-18783072
  hypo
acttctggggcctctcagcaagtgagggccaagggggcctctggggagccgtgtgaggtgggaatc

SEQ ID NO: 189389 - DNA, 33 bp, Homo sapiens; identical to SEQ ID NO: 96923
  chr19:18783151-18783184
  hypo

SEQ ID NO: 189390 - DNA, 140 bp, Homo sapiens
  chr19:18783216-18783356
  hypo
tggatctcagcggcctggcgcctaacacagagcctggcaccgacggagcatagctcgaatgtttgctgcacaaaggagaggtgctggggcgggaaggtgagggcagccttcttcacactagtggccgtgggcaccttctg

SEQ ID NO: 189391 - DNA, 149 bp, Homo sapiens
  chr19:18798370-18798519
  hypo
cctgcagccatggcgcgctgcctcccatactgtagacagcaggggtttggccacacctgcagccaggtgaggcatgatcgggtcggcacctgctcctctcctttgaattccaaaggacagcatgtcactcatgcgtgtctgttcacagt

SEQ ID NO: 189392 - DNA, 212 bp, Homo sapiens
  chr19:18807983-18808195
  hypo
tttgccaactggaaacgaagcatggccggggcctcctccttggggttcttgcacggagggattcagaagcacttggcaccggggggagcagcctcatcggtgtccagccagggccacacagtcagcctcagcccccacctcgcttccttctgggcgagcttagacctgggaggcctctttttttttggagtgccgtggtgcgatctcagctc

SEQ ID NO: 189393 - DNA, 30 bp, Homo sapiens
  chr19:18808938-18808968
  hypo
caggcgctcagctggcgcagcatgtactca

SEQ ID NO: 189394 - DNA, 197 bp, Homo sapiens
  chr19:18809608-18809805
  hypo
tgttcagcaggcacacggtgtgtattcagcaggtgcacagtgtgtatttggttgctgagcaagtgcacactgtgtactcagtaggcgcagtgtgtgctctgcgggcactcagcaggtgcacagtgtgtatttagcaggcgctcagcaggtgcataatgtgtatttagcaggtactcagcaggcgtaccgtgtgtgct

SEQ ID NO: 189395 - DNA, 30 bp, Homo sapiens; identical to SEQ ID NO: 96926
  chr19:18826922-18826952
  hypo

SEQ ID NO: 189396 - DNA, 227 bp, Homo sapiens; identical to SEQ ID NO: 96927
  chr19:18830680-18830907
  hypo

SEQ ID NO: 189397 - DNA, 31 bp, Homo sapiens; identical to SEQ ID NO: 96928
  chr19:18835064-18835095
  hypo

SEQ ID NO: 189398 - DNA, 306 bp, Homo sapiens
  chr19:18836820-18837126
  hypo
tcccgactcatgtaccgcgccctcgatcttctctggagttgaggccgggccctggaacaggctccagctccttgttctcccagctggtgatgcaggaacatctttgcgcataaatctgcgttctggatgatttccctcaggagagcttcccagaagtgggattaccaggttagagggcaggaacgttgctcaggcactcggcggacgctgccaaatggctcagccggcgctcccagccacctgcctctcagagccccatgcatttccagcaccgctgacgtgtgccggcctcgcttcacccctcgg

SEQ ID NO: 189399 - DNA, 733 bp, Homo sapiens; identical to SEQ ID NO: 32351
  chr19:18856003-18856736
  hypo

SEQ ID NO: 189400 - DNA, 30 bp, Homo sapiens
  chr19:18857190-18857220
  hypo
tgtgtgagacccggacgcatccaagggagg

SEQ ID NO: 189401 - DNA, 295 bp, Homo sapiens
  chr19:18867538-18867833
  hypo
agaaaaggaagatggcgacagtcaccttgcagagggagacacaccccgatagtggagtggggtggtgggtgaatttttaatactgctcagaaatccattaatgtctccataatgttggtggaatgcttttcaaagtattcttgagaacgtgatcgccggtgtgctttgcagaaatccggtaatgaagcgaatgtttactctcagaatgaaggaggctctggccaagcagaaacccattcagccggcgttctccacagaggcttaacacccgccggtcgcacgccacccctcgggc

SEQ ID NO: 189402 - DNA, 30 bp, Homo sapiens; identical to SEQ ID NO: 96932
  chr19:18868266-18868296
  hypo

SEQ ID NO: 189403 - DNA, 164 bp, Homo sapiens; identical to SEQ ID NO: 96933
  chr19:18870912-18871076
  hypo

SEQ ID NO: 189404 - DNA, 30 bp, Homo sapiens; identical to SEQ ID NO: 96934
  chr19:18872047-18872077
  hypo

SEQ ID NO: 189405 - DNA, 375 bp, Homo sapiens
  chr19:18872659-18873034
  hypo
agagggaacagggccccagcccgagcgcattgaggctgcattctgactcccacacctgggccctgggccctgggcccgcggggctctgccactggacagagggcaccagagaaggcccagaaaacacagccgattcggaggagccctcttcattgtctccagatagacagggccaggcaggcggcatccacacgcacctgcgcagaaccagaaagctgaaggtcagcgctggggctgcaggtacccctgccccgcatagaagccaccatctcccagcccctgcttttcccctcacatctcttcacggccaccagagcacatggcccccttcccgctggagggtccttggcaggtccccagcgcccgcccgggagc

SEQ ID NO: 189406 - DNA, 458 bp, Homo sapiens
  chr19:18874214-18874672
  hypo
gtattcaggacggtcaccctgtacaggtttgtagcctgggaacaagggccctaccgtctggccgaggtgtgcagaggctctgccatccaggtttgtgtaagttgccctgtgatcctcatgcacagccatgaaatcgccggacaacgcgttttttcagaagtcacccccattgttaagtgatgcttgactgtacttagaatcaacattgaaaaaccaggggaatgcccgtagaacaccagatttctggctgctcttgaagaatcagacagcccagtggccatggccgatgtcttgcacctcgagacgggccacagtgctctggtttgcctcaggccccacccgcccctgtcgtcccacatccataccctcacacgctcctgacgtttgcccctactttgtaccgagcccgacctctgcttctgacctgggcactgagcatctctcggcctgctggacgc

SEQ ID NO: 189407 - DNA, 352 bp, Homo sapiens
  chr19:18879379-18879731
  hypo
agccccagcccccgccgcctcctccacccgcgtcccagcagccaccacccccgccacccccacaggcgcccgtccgcctgccccctggtggccccctgttgcccagcgccagcctgactcgtgggccacagccgcccccgcttgcagtcacggtaccgtcctctctcccccagtcccccccagagaaccctggccagccatcgatggggatcgacatcgcctcggtaagcccagggtggggtccctcggggcctgactgggggtcttgtagaggacagcccgggggctgcagaacagtcgggttacctgctgcatgggccaggggtcagaaccccagcgaacgctgcctggg

SEQ ID NO: 189408 - DNA, 173 bp, Homo sapiens; identical to SEQ ID NO: 131128
  chr19:18880024-18880197
  hypo

SEQ ID NO: 189409 - DNA, 30 bp, Homo sapiens; identical to SEQ ID NO: 32354
  chr19:18882238-18882268
  hypo

SEQ ID NO: 189410 - DNA, 519 bp, Homo sapiens
  chr19:18883484-18884003
  hypo
ccatcagccaagggccgtctgggaccactgcctgtagccccgtgttctggaggcaagttggtgggcagcagtggtctcggggaggcatgggggtcagcctggtgtctgcgcatgcttggtctgcccgcactggctctctgagctctcgggctctggcagcgtgtctggtctcgtcgtgtggtactgttggggatggggctggaggggctggagaagcggcaggtgaggcctgtcccaggtgggcagcccaggtggggctggttcctgagtgaggtccctcttgcatgtgagacaggacgggacaggaattaggagtcgagccagtttctctcaggagagagtcactggaatggttggtgaatttttgggccccaagccaaagcgggttagtctgctgggcagcgagcaggtggcggtgttgtcaagcccatgtctgtgtgtctggtgtccgtcgtgcgctgatgcaggaggcaggcggctcatggaggtatagggacatcagtacggggctctcagggg

SEQ ID NO: 189411 - DNA, 30 bp, Homo sapiens; identical to SEQ ID NO: 96941
  chr19:18885843-18885873
  hypo

SEQ ID NO: 189412 - DNA, 30 bp, Homo sapiens
  chr19:18895059-18895089
  hypo
ccaacccacgtttcgcgggtccttccacag

SEQ ID NO: 189413 - DNA, 83 bp, Homo sapiens
  chr19:18895720-18895803
  hypo
aggctcggccacagcacggaaggggttcgcctgccaatacgtttgctccatctgcttccacatgaccacgtagaagctggagc

SEQ ID NO: 189414 - DNA, 912 bp, Homo sapiens; identical to SEQ ID NO: 131131
  chr19:18900003-18900915
  hypo

SEQ ID NO: 189415 - DNA, 1069 bp, Homo sapiens; identical to SEQ ID NO: 131132
  chr19:18901140-18902209
  hypo

SEQ ID NO: 189416 - DNA, 43 bp, Homo sapiens; identical to SEQ ID NO: 96944
  chr19:18957752-18957795
  hypo

SEQ ID NO: 189417 - DNA, 30 bp, Homo sapiens
  chr19:18963012-18963042
  hypo
ctgcggtacgaggacgcctaccagtaccag

SEQ ID NO: 189418 - DNA, 30 bp, Homo sapiens
  chr19:18963250-18963280
  hypo
ccgggcctggcagcccggtggtctgagccc

SEQ ID NO: 189419 - DNA, 194 bp, Homo sapiens
  chr19:18963589-18963783
  hypo
ggcctgtgtgtgttccggggactcctaatggcttctctttcagatgtgcccttggtggcatttggggctgcaggtgccactcacggcgcctgctctcacggcagaggcttgctgtagggcccgcctcatggggcctcgggcatgtggaggccaggcccgggcctgtgctggaggctaaccggggctcttgtttt

SEQ ID NO: 189420 - DNA, 152 bp, Homo sapiens; identical to SEQ ID NO: 96946
  chr19:18963996-18964148
  hypo

SEQ ID NO: 189421 - DNA, 31 bp, Homo sapiens; identical to SEQ ID NO: 32357
  chr19:18964686-18964717
  hypo

SEQ ID NO: 189422 - DNA, 30 bp, Homo sapiens; identical to SEQ ID NO: 32358
  chr19:18965878-18965908
  hypo

SEQ ID NO: 189423 - DNA, 30 bp, Homo sapiens; identical to SEQ ID NO: 32359
  chr19:18967261-18967291
  hypo

SEQ ID NO: 189424 - DNA, 30 bp, Homo sapiens; identical to SEQ ID NO: 96950
  chr19:18968204-18968234
  hypo

SEQ ID NO: 189425 - DNA, 329 bp, Homo sapiens
  chr19:18988691-18989020
  hypo
cagtcaataccagctcgagccaaaagtcttgagtcgtctttgattcttttatttctgtttcatctacacccaaggcgaatctgatgggttctcccttccaaacagggtggggggtctgacgctcctctgcctggctacagccccggatgtgttaaatgtctgcatctcgcacctcccgttccaaaaaacgtcacggagctctgagccactgcttccctgaaaccatcgttcccacgtcaccgatggcccccaccggccaaatcagagggcctggctggtcggcaccttccagggccttccacaacctcctgccccggctcctgctcaaa

SEQ ID NO: 189426 - DNA, 550 bp, Homo sapiens; identical to SEQ ID NO: 96952
  chr19:18989665-18990215
  hypo

SEQ ID NO: 189427 - DNA, 434 bp, Homo sapiens
  chr19:18994721-18995155
  hypo
cctgcctctggtctgtcccctcgtcggacccctgagcactctgaccttggaaccctgagcactccgacctgatgtgatcccctccacggcctcctctgtgccccgccgcaacatcagcctccgcactctgtgtgggctgtgcctcggccccctgccacccgatcctgtccttaccggaaggcgtaggaggagacgatgaggatgagagtgaccacgtggtggagcagcatgaccaccgagtccttgcgccaggtgtccatgtatagcgtagcgtagatggagtggccatagaagcttccctggagcaggtaggcggctgcaatgtcccgtggcactgccatgcccggcgtccagtctggggagagccaaatctcacagtcagggccctgcgaagcctctagacgatcgcctccatgacccggtgacaccctcca

SEQ ID NO: 189428 - DNA, 154 bp, Homo sapiens; identical to SEQ ID NO: 96954
  chr19:18996625-18996779
  hypo

SEQ ID NO: 189429 - DNA, 31 bp, Homo sapiens; identical to SEQ ID NO: 96955
  chr19:18997500-18997531
  hypo

SEQ ID NO: 189430 - DNA, 31 bp, Homo sapiens
  chr19:19004328-19004359
  hypo
ctctcgggcatcttggcggcatctctgggct

SEQ ID NO: 189431 - DNA, 30 bp, Homo sapiens; identical to SEQ ID NO: 96956
  chr19:19011207-19011237
  hypo

SEQ ID NO: 189432 - DNA, 30 bp, Homo sapiens
  chr19:19014405-19014435
  hypo
tggggcctaaagactcgtggccgcctcctg

SEQ ID NO: 189433 - DNA, 31 bp, Homo sapiens; identical to SEQ ID NO: 32360
  chr19:19017312-19017343
  hypo

SEQ ID NO: 189434 - DNA, 30 bp, Homo sapiens; identical to SEQ ID NO: 96958
  chr19:19038979-19039009
  hypo

SEQ ID NO: 189435 - DNA, 221 bp, Homo sapiens; identical to SEQ ID NO: 96959
  chr19:19040158-19040379
  hypo

SEQ ID NO: 189436 - DNA, 187 bp, Homo sapiens
  chr19:19042698-19042885
  hypo
cccagggcagatgggaactgccgaggcgcggtctccacagttgcccgggccaggtgggggtctctcggagggaggggtgccctcacccgctgccgcagccgctcggcctctgcacgctgagcctccagctgctgcctccactgggctgcggcggcgttggcctctcgcagggcgcctgccagcttgt

SEQ ID NO: 189437 - DNA, 35 bp, Homo sapiens
  chr19:19087048-19087083
  hypo
gagcatggtggctcacgcatgtaatcccagcactt

SEQ ID NO: 189438 - DNA, 65 bp, Homo sapiens
  chr19:19100286-19100351
  hypo
aggaaaacgtcctcgcgtgctgcttgaacatgcatgcgcgcacatctgtacgtgggcatgcatgc

SEQ ID NO: 189439 - DNA, 137 bp, Homo sapiens; identical to SEQ ID NO: 96960
  chr19:19104042-19104179
  hypo

SEQ ID NO: 189440 - DNA, 267 bp, Homo sapiens; identical to SEQ ID NO: 96961
  chr19:19109238-19109505
  hypo

SEQ ID NO: 189441 - DNA, 282 bp, Homo sapiens; identical to SEQ ID NO: 32363
  chr19:19114949-19115231
  hypo

SEQ ID NO: 189442 - DNA, 31 bp, Homo sapiens; identical to SEQ ID NO: 32364
  chr19:19121157-19121188
  hypo

SEQ ID NO: 189443 - DNA, 273 bp, Homo sapiens
  chr19:19135283-19135556
  hypo
atattggccaatgtgcgttttctactaaaatcctgatatgtttccaattggctaaagaacttctgtgtaaaaaaatctcgaataaaagacattaccaaagaaacacgaaaaacaacaaatagaaactttggctgatttccttaccatcactcagactacttggagccttggcctgaatttcaggtttcgtaggaggaatcattttctcctcctctcgcatcggctctggttcggctttcttaacctggaggggacatccgctgctgactagcc

SEQ ID NO: 189444 - DNA, 199 bp, Homo sapiens
  chr19:19136746-19136945
  hypo
ttccagtcctgagaacggaaatgccccaatttccggtggccaatgacctggtcccgagaatcagagtgagaaaattccagatcccggccacattctttgcgaaagtagctgtcatcactgatggaagggttgcttgatctgaaggaaggccctggaaatacgtcacttctcaggccttctcttccggcatctctagagt

SEQ ID NO: 189445 - DNA, 99 bp, Homo sapiens
  chr19:19147971-19148070
  hypo
cgacagagcgagactctgtctcaaaaaaaaaagaaaagggcattgaagtggagggcatgggaactgggttctgcaggctggctgcgagccagtccttct

SEQ ID NO: 189446 - DNA, 241 bp, Homo sapiens; identical to SEQ ID NO: 32365
  chr19:19156741-19156982
  hypo

SEQ ID NO: 189447 - DNA, 136 bp, Homo sapiens
  chr19:19165033-19165169
  hypo
ctgccaggaggtcgtcgacctcgggggcctgagcattctggtgtccctgctagccgactgcaatgaccaccagatgagggaccagagcggcgttcaggtatgaagtccccctggcccattgcgtgctgtccttctg

SEQ ID NO: 189448 - DNA, 30 bp, Homo sapiens
  chr19:19165554-19165584
  hypo
cccccaggggtgccacggtcctgcgccccc

SEQ ID NO: 189449 - DNA, 31 bp, Homo sapiens; identical to SEQ ID NO: 96965
  chr19:19214216-19214247
  hypo

SEQ ID NO: 189450 - DNA, 140 bp, Homo sapiens
  chr19:19218715-19218855
  hypo
tttcatgtcttcatccgcatctcgagagaagaggggctgaagactctctaccatggatttatgcccaccgtgctgggggtcattccctacgctggcctgagcttcttcacctatgagacgctcaagagcttgcacagagg

SEQ ID NO: 189451 - DNA, 45 bp, Homo sapiens; identical to SEQ ID NO: 96967
  chr19:19226767-19226812
  hypo

SEQ ID NO: 189452 - DNA, 217 bp, Homo sapiens; identical to SEQ ID NO: 96968
  chr19:19230752-19230969
  hypo

SEQ ID NO: 189453 - DNA, 276 bp, Homo sapiens
  chr19:19231765-19232041
  hypo
gttccctctggcctaggtcatcggggcgtccataccctctgctggatttcacgggcttcgatgcggccagcctcccttcgcagctgctccacccgggccttggccaggcacaggtaggcctgcaggtggggccgggtcaccgccagccgcagcaggcacagcaccaccagcaaccagaggcgcccagagtcgaaggcagaatcggacagcctgtgcggagagggccgggggcaagggactaagaaggtcgcccccgaccccccaggatcttcccca

SEQ ID NO: 189454 - DNA, 30 bp, Homo sapiens
  chr19:19334885-19334915
  hypo
gcccaggaggcctgccgtctcagctcagcc

SEQ ID NO: 189455 - DNA, 95 bp, Homo sapiens
  chr19:19335195-19335290
  hypo
cccacaggaactctacgatgtgtattgctttgcccgggagctggggggtaagtctgggactggcaggacccggcccctccgcctctctttgagta

SEQ ID NO: 189456 - DNA, 30 bp, Homo sapiens; identical to SEQ ID NO: 96971
  chr19:19369312-19369342
  hypo

SEQ ID NO: 189457 - DNA, 30 bp, Homo sapiens; identical to SEQ ID NO: 131150
  chr19:19383976-19384006
  hypo

SEQ ID NO: 189458 - DNA, 329 bp, Homo sapiens; identical to SEQ ID NO: 96972
  chr19:19389260-19389589
  hypo

SEQ ID NO: 189459 - DNA, 467 bp, Homo sapiens; identical to SEQ ID NO: 96973
  chr19:19391470-19391937
  hypo

SEQ ID NO: 189460 - DNA, 195 bp, Homo sapiens; identical to SEQ ID NO: 32367
  chr19:19416789-19416984
  hypo

SEQ ID NO: 189461 - DNA, 30 bp, Homo sapiens; identical to SEQ ID NO: 96975
  chr19:19445759-19445789
  hypo

SEQ ID NO: 189462 - DNA, 691 bp, Homo sapiens; identical to SEQ ID NO: 32368
  chr19:19446447-19447138
  hypo

SEQ ID NO: 189463 - DNA, 91 bp, Homo sapiens; identical to SEQ ID NO: 96977
  chr19:19447257-19447348
  hypo

SEQ ID NO: 189464 - DNA, 222 bp, Homo sapiens; identical to SEQ ID NO: 96978
  chr19:19447905-19448127
  hypo

SEQ ID NO: 189465 - DNA, 30 bp, Homo sapiens; identical to SEQ ID NO: 96979
  chr19:19466946-19466976
  hypo

SEQ ID NO: 189466 - DNA, 181 bp, Homo sapiens; identical to SEQ ID NO: 32369
  chr19:19494667-19494848
  hypo

SEQ ID NO: 189467 - DNA, 168 bp, Homo sapiens; identical to SEQ ID NO: 96981
  chr19:19540204-19540372
  hypo

SEQ ID NO: 189468 - DNA, 293 bp, Homo sapiens
  chr19:19576163-19576456
  hypo
gaagcatgccgaacacggagtcagaaacgagcgcttgaacgggacccaacagaggacgatgtggagagcaagaaaataaaaatggagagaggattgttggcttcagatttaaacactgacggagacatgagggtgacacctgagccgggagcaggtccaacccaaggattgctgagggcaacagaggccacggccatggccatgggcagaggcgaagggctggtgggcgatgggcccgtggacatgcgcacctcacacaggtgagtgggaggagccagcgggaggggctggaa

SEQ ID NO: 189469 - DNA, 30 bp, Homo sapiens; identical to SEQ ID NO: 32371
  chr19:19576874-19576904
  hypo

SEQ ID NO: 189470 - DNA, 514 bp, Homo sapiens; identical to SEQ ID NO: 96984
  chr19:19604055-19604569
  hypo

SEQ ID NO: 189471 - DNA, 30 bp, Homo sapiens
  chr19:19605043-19605073
  hypo
tgtgaggagagggaccggcccggtggcccc

SEQ ID NO: 189472 - DNA, 31 bp, Homo sapiens; identical to SEQ ID NO: 32372
  chr19:19605784-19605815
  hypo

SEQ ID NO: 189473 - DNA, 30 bp, Homo sapiens
  chr19:19606567-19606597
  hypo
ttcagctcggatgcccggcagtgtcatacc

SEQ ID NO: 189474 - DNA, 195 bp, Homo sapiens
  chr19:19611819-19612014
  hypo
cggacagactgtggcgactgagactccagcatcctgggctgggggcggccagggccctgactgtcgtcctggccctctgacgtgagccatgtgctgtctgcttgcagcaggcaggatgtcggccgccactgtgctgtcccgggagccctacatgtgtgcacagtgcaagacggacttcacgtgccgctggcggga

SEQ ID NO: 189475 - DNA, 133 bp, Homo sapiens; identical to SEQ ID NO: 96987
  chr19:19612752-19612885
  hypo

SEQ ID NO: 189476 - DNA, 30 bp, Homo sapiens; identical to SEQ ID NO: 32373
  chr19:19613150-19613180
  hypo

SEQ ID NO: 189477 - DNA, 30 bp, Homo sapiens; identical to SEQ ID NO: 96989
  chr19:19616200-19616230
  hypo

SEQ ID NO: 189478 - DNA, 732 bp, Homo sapiens
  chr19:19616881-19617613
  hypo
gccctggagggtgggcggctcatggtgccacagcccctggcagggacggccggcccgcccccgtgactgactgacagatgcagggatggccgaggcagccctcgctccagctgaacgcctccattgctgcttgttctggagacccccgcccccgcaccttccagacttagcagaagaacaaactgaagaacagacccagccagagaagcagggattccagaagctgcccattaagggagaaggagaggatccggtcggcagcagccctgagcagaaagctggaggggggactgtcgcggggtttttctgttgtggtttattttattaaattttttccttttttctattcatttcgatggacgcaatcttaagccaccctggccttgctcctgggaggtgagcgtgcacaggtgtgtgcaggtcaggaggtgccgtccaggtgtgcggcgagccgctgcgcacagatgtcaggatttccgtttgggtctagtttagaacctgtccttaaacctaggggttgctgtcaggatttgctttcagactttttttttttttgtaattccctttagagtctacaaaaatgtttttaaaaggatcaggtctgcttttagtttcatttttgtttctttcccgtcccactctttaaaaactggttccgtgaggaaaggcagaagccgttccgtgtctcttgcaggctgggccggcttcatgccagtgcgagggcgtcccgtg

SEQ ID NO: 189479 - DNA, 151 bp, Homo sapiens
  chr19:19623133-19623284
  hypo
attataggcgtgagctgccacgccctgcccagagtccctccttgaacacctcccaactctacctggcatttagcacaacttacaattattttatttccatgtcattcttttattttacttgacttttcaattgtctcgttttcggcaggga

SEQ ID NO: 189480 - DNA, 99 bp, Homo sapiens
  chr19:19624552-19624651
  hypo
ctgttttcgaactcctgacctcaagatatctgcccgcttcggactcgcagtgttggggttacaggcgtgagccaccgcgcctggcccttggctctgcct

SEQ ID NO: 189481 - DNA, 596 bp, Homo sapiens
  chr19:19625550-19626146
  hypo
agcacgccgcgtttctggcgccggggcaggccggcgatgtccgagtcgtcgaagggcatgcacccggtgaccatgacgtagagcacgacgcccatgctccacacatcgtacttcttggggtcgtaggggatgcccaggagcacctcgggtgacgcgtaggcggctgagccgcagtaggtggtgctcaggtctgggtagccatgggcctggcggccgaagccgaagtcggtgagcttgacgcggcgctcgtccgggctcagcagcacgttttcgcacttgaggtcgcggtgcaccaggtgatgatcgtgcaggtagcgcacggcgccggcgatctgcgcaaagaggtcgcgcgcctgaactccggggatgcgcccgttgcgctgcacggcttgcagcaggtcggtggcggccgcttccatcacgatgtacagtttcccgttgcacacctcgatgaactcgaagacgtgcacgatgtgcgggtgtcgcacgccccgcaggatggacagctctcgcggcaggaacttgttgacgaagtccgggggcgctcgccgccggtccaccaccttgatggccacggtacccttgtacttcttgga

SEQ ID NO: 189482 - DNA, 30 bp, Homo sapiens
  chr19:19636631-19636661
  hypo
ccgcagggcagcacgcggaactgtggccca

SEQ ID NO: 189483 - DNA, 316 bp, Homo sapiens; identical to SEQ ID NO: 96992
  chr19:19636871-19637187
  hypo

SEQ ID NO: 189484 - DNA, 30 bp, Homo sapiens; identical to SEQ ID NO: 96993
  chr19:19656763-19656793
  hypo

SEQ ID NO: 189485 - DNA, 66 bp, Homo sapiens; identical to SEQ ID NO: 96994
  chr19:19674353-19674419
  hypo

SEQ ID NO: 189486 - DNA, 129 bp, Homo sapiens
  chr19:19680292-19680421
  hypo
cttctttggcttcttcgctggggtaagggttgttcagatgggagtaaaaatactcattcagcacttccgtcgcctgcttgctgaaattccgccgcttgcgcctgcaaaaacagccgccttcgtaggcat

SEQ ID NO: 189487 - DNA, 39 bp, Homo sapiens
  chr19:19710042-19710081
  hypo
tgggattacaggcatgagccaccacgctcggccagaaag

SEQ ID NO: 189488 - DNA, 178 bp, Homo sapiens
  chr19:19719310-19719488
  hypo
aagtctggaacaaaccgcgtgctcactccttacctggcaaggagttcaaggccatgcttggtcggacagcagctgaggcaggcagtcacccccgagtctcccttccaaggtcacgcccaccactcatgcccgatgggaccacaatgcatgccttcatgctccacgcctgccttgcatg

SEQ ID NO: 189489 - DNA, 31 bp, Homo sapiens; identical to SEQ ID NO: 96995
  chr19:19723143-19723174
  hypo

SEQ ID NO: 189490 - DNA, 418 bp, Homo sapiens; identical to SEQ ID NO: 12177
  chr19:19729111-19729529
  hypo

SEQ ID NO: 189491 - DNA, 162 bp, Homo sapiens; identical to SEQ ID NO: 12178
  chr19:19729585-19729747
  hypo

SEQ ID NO: 189492 - DNA, 51 bp, Homo sapiens; identical to SEQ ID NO: 96998
  chr19:19735077-19735128
  hypo

SEQ ID NO: 189493 - DNA, 431 bp, Homo sapiens
  chr19:19737449-19737880
  hypo
acgtagaagaaaatgcgggtgtacacagccaccatgagcaggaagacaagcaggctcgacagagcccagacggccaaataggagcggctgagcaggggtgccatgcgtgagcagcggtccagggcacagaggcagtgccaggagtgggcaggcagcagccccaggcccagggcagccacccacacgcccacaatgagcatgaccacgcggccacggggcaggcggctgtgcagctgcacggccatcacactgcggtgccgctccacggcgatggccagcagtgtggccaccgacgcagtgaggcttgtgtccagcaagccctgccgcaggaaccagccctcaagtgaaagtcgggctgtgcggggaccagtgtggaacatgaggaagaggtaggccacgcccgcgaagaggtcagccgcggccagattgcc

SEQ ID NO: 189494 - DNA, 1104 bp, Homo sapiens; identical to SEQ ID NO: 131164
  chr19:19738571-19739675
  hypo

SEQ ID NO: 189495 - DNA, 30 bp, Homo sapiens
  chr19:19747530-19747560
  hypo
gtgagtccagggaccgagactcgctgccgc

SEQ ID NO: 189496 - DNA, 30 bp, Homo sapiens; identical to SEQ ID NO: 32381
  chr19:19749053-19749083
  hypo

SEQ ID NO: 189497 - DNA, 30 bp, Homo sapiens; identical to SEQ ID NO: 97002
  chr19:19764724-19764754
  hypo

SEQ ID NO: 189498 - DNA, 55 bp, Homo sapiens; identical to SEQ ID NO: 97003
  chr19:19766966-19767021
  hypo

SEQ ID NO: 189499 - DNA, 174 bp, Homo sapiens
  chr19:19769451-19769625
  hypo
ctccggctcccagccacgtgtcagcatttgcagttttggtgaagatgaagggagagggtgtgcaccgcacattggccattgtactcagtacaaaagggcagacatggtcacggtcttccatcaccattctgaagcgctgagatgcgtagactcgaaacagtgaggactgaaatg

SEQ ID NO: 189500 - DNA, 30 bp, Homo sapiens; identical to SEQ ID NO: 97005
  chr19:19770845-19770875
  hypo

SEQ ID NO: 189501 - DNA, 121 bp, Homo sapiens
  chr19:19775582-19775703
  hypo
tctccaaaaaaaaaaaaaaaaaaaaaaagaaattaccactttaacataaaaaatgaaaaactggtgtttacttgaaattatatacttctaggccgggcgcggtggctcacccctgtaattc

SEQ ID NO: 189502 - DNA, 30 bp, Homo sapiens; identical to SEQ ID NO: 32382
  chr19:19778579-19778609
  hypo

SEQ ID NO: 189503 - DNA, 85 bp, Homo sapiens
  chr19:19819259-19819344
  hypo
gcccggccttagtgtgaacttttaaatgcatttaccaacaagaatccacagtgtgggtttggatgggaaacggagctggacatga

SEQ ID NO: 189504 - DNA, 226 bp, Homo sapiens
  chr19:19822260-19822486
  hypo
gtgtgagacctttcatgaattcgaacagaacttgaaaatctgaaggctttcccacattgtttacatcgatagggtttctctcccgtgtgagttctctcatgcattcgaaatttactggaagaaatgaaggcttttccacattgtttacattgatacggtttctctccagtgtgagtcctttcatgcaatcgaatttgactggaacgaaggaaggccttaccacatt

SEQ ID NO: 189505 - DNA, 25 bp, Homo sapiens
  chr19:19842586-19842611
  hypo
taccacttagccgggcgcggtggct

SEQ ID NO: 189506 - DNA, 25 bp, Homo sapiens
  chr19:19842850-19842875
  hypo
ggcgacagagcgagactccgtcaca

SEQ ID NO: 189507 - DNA, 818 bp, Homo sapiens; identical to SEQ ID NO: 55893
  chr19:19843294-19844112
  hypo

SEQ ID NO: 189508 - DNA, 784 bp, Homo sapiens
  chr19:19861400-19862184
  hypo
cagcaccgatggccacgcaggggacatggcacacctcacccggttgttgtaccatttcaggtcagagaaccccggcaagaacttgctgcaggaacacgaggtgctgagcctgtgcgggagcaggacatcaagggctgctcaagagcgtccatggctacagtgactgtggcctcttcccagcctcatctgtgccgtgcaggtgatctatgactccaagctgggactggcaggtgatggtggccccagcatctcagccacgctgccaacatgctgtcaggaggcttcgaggccatgcccggtatgctgcccacctccttgagaccccttcctgacactttccagccggtgctacagccgcagcacgtgccaccactgaatacctttcagcagccggtgcaggcttcagacggcaggcgtgcccgacagccgtggcctcagcagctctttcgtggcaaccaggacagtcagggcagtgatgaagtgatgatgcctaggacgacaagtgggatggcagctccgtgatggtggatgagcctagtggcggttcacacctggtcctcagtggctccctgagcccccgtggtggcaacagcttggccaccatgaggcgcagtctcaaccgcttccccacctgtcaagtcaggcagggaggccttgtgcttggcgaggcgttgggctctgtgaaggacggggacaagctgtgcgtggctctgtggctctatggcctcaagtggcaggagaacccctactccttccagtgcactaccagcgacaccgctcagta

SEQ ID NO: 189509 - DNA, 140 bp, Homo sapiens; identical to SEQ ID NO: 97010
  chr19:19974477-19974617
  hypo

SEQ ID NO: 189510 - DNA, 77 bp, Homo sapiens
  chr19:20013811-20013888
  hypo
tgctgggattacaggcgtgagccaccgcgcccggcctttgggaggatcttactgacgatgaagttgttattgttttg

SEQ ID NO: 189511 - DNA, 38 bp, Homo sapiens
  chr19:20095093-20095131
  hypo
tgtgctgggcatagtggctcacgcctgtaatcccagca

SEQ ID NO: 189512 - DNA, 87 bp, Homo sapiens
  chr19:20103784-20103871
  hypo
cgcattcatgtttaccgttatggtggaaattttggcctgctgttcttcctgctgattaagtagtctgtcaagagaaagcagagactc

SEQ ID NO: 189513 - DNA, 31 bp, Homo sapiens
  chr19:20113162-20113193
  hypo
aggcaattcttttagccgatctttgtccttc

SEQ ID NO: 189514 - DNA, 42 bp, Homo sapiens; identical to SEQ ID NO: 97011
  chr19:20115866-20115908
  hypo

SEQ ID NO: 189515 - DNA, 26 bp, Homo sapiens
  chr19:20153115-20153141
  hypo
gccacgtgtctgcctttaaaagaaaa

SEQ ID NO: 189516 - DNA, 976 bp, Homo sapiens; identical to SEQ ID NO: 131180
  chr19:20162580-20163556
  hypo

SEQ ID NO: 189517 - DNA, 20 bp, Homo sapiens
  chr19:20186937-20186957
  hypo
tttgtaatgagttgtttggc

SEQ ID NO: 189518 - DNA, 121 bp, Homo sapiens
  chr19:20187136-20187257
  hypo
cttggtgaccattgtttgtgtccacgttcaattagcacaaatttattatttaactttgactccacaccagactatggaggattcaccaccagaccggaaagcaacaggatgggctccagag

SEQ ID NO: 189519 - DNA, 30 bp, Homo sapiens
  chr19:21232475-21232505
  hypo
tttcttgttacatttcgtgcaacatttctt

SEQ ID NO: 189520 - DNA, 91 bp, Homo sapiens
  chr19:21235803-21235894
  hypo
gtcacctattggcaagggctttaggtgtttcttttacgagttgtcttgttgcattttgttgcagcccaaaatgcatcgcgactgttcagga

SEQ ID NO: 189521 - DNA, 29 bp, Homo sapiens
  chr19:21237756-21237785
  hypo
ggcgtgagccaccgcgcccggccgtcatt

SEQ ID NO: 189522 - DNA, 25 bp, Homo sapiens
  chr19:21252955-21252980
  hypo
agtgaaactccgtttcaaaaaaaaa

SEQ ID NO: 189523 - DNA, 33 bp, Homo sapiens
  chr19:21254338-21254371
  hypo
acaaaattagccgggcgtggtggcacatgcctg

SEQ ID NO: 189524 - DNA, 121 bp, Homo sapiens; identical to SEQ ID NO: 32386
  chr19:21261375-21261496
  hypo

SEQ ID NO: 189525 - DNA, 20 bp, Homo sapiens
  chr19:21263418-21263438
  hypo
gcaggcgtgagccaccgtgc

SEQ ID NO: 189526 - DNA, 18 bp, Homo sapiens
  chr19:21266127-21266145
  hypo
caccgcgcccagccagat

SEQ ID NO: 189527 - DNA, 90 bp, Homo sapiens; identical to SEQ ID NO: 97018
  chr19:21305620-21305710
  hypo

SEQ ID NO: 189528 - DNA, 30 bp, Homo sapiens; identical to SEQ ID NO: 32387
  chr19:21386946-21386976
  hypo

SEQ ID NO: 189529 - DNA, 19 bp, Homo sapiens
  chr19:21513268-21513287
  hypo
tttttatttttttagacgg

SEQ ID NO: 189530 - DNA, 258 bp, Homo sapiens; identical to SEQ ID NO: 97021
  chr19:21513406-21513664
  hypo

SEQ ID NO: 189531 - DNA, 350 bp, Homo sapiens; identical to SEQ ID NO: 97022
  chr19:21623089-21623439
  hypo

SEQ ID NO: 189532 - DNA, 93 bp, Homo sapiens; identical to SEQ ID NO: 97023
  chr19:21627222-21627315
  hypo

SEQ ID NO: 189533 - DNA, 36 bp, Homo sapiens; identical to SEQ ID NO: 97024
  chr19:21642232-21642268
  hypo

SEQ ID NO: 189534 - DNA, 28 bp, Homo sapiens
  chr19:21644229-21644257
  hypo
ccaccgcgaccagctgaattaatataaa

SEQ ID NO: 189535 - DNA, 106 bp, Homo sapiens; identical to SEQ ID NO: 97026
  chr19:21645409-21645515
  hypo

SEQ ID NO: 189536 - DNA, 19 bp, Homo sapiens
  chr19:21647161-21647180
  hypo
caaaaagaaataagaaaaa

SEQ ID NO: 189537 - DNA, 181 bp, Homo sapiens
  chr19:21648185-21648366
  hypo
gacagagcgagacttccatctcaaaataaataaataaataataatcatcatcatcttagaatgctcaatgaacaaaaataaaacacaaatagacaactaaatgagatttagaaataatgagcgaaatatcaaagatataaaaacttttttaaatttttaattaatttattttttttagatg

SEQ ID NO: 189538 - DNA, 97 bp, Homo sapiens
  chr19:21654950-21655047
  hypo
aaaccaagtctcaccgagttgcaggagccacttttctttttttttttttttaatctatttttatttttttgagacagagttttacttttgtcgcccg

SEQ ID NO: 189539 - DNA, 31 bp, Homo sapiens; identical to SEQ ID NO: 55917
  chr19:21664417-21664448
  hypo

SEQ ID NO: 189540 - DNA, 28 bp, Homo sapiens
  chr19:21665141-21665169
  hypo
acataagaaataaaaaaaaatcggctgg

SEQ ID NO: 189541 - DNA, 30 bp, Homo sapiens; identical to SEQ ID NO: 97031
  chr19:21676650-21676680
  hypo

SEQ ID NO: 189542 - DNA, 29 bp, Homo sapiens
  chr19:21676799-21676828
  hypo
ccatggtcgctggcctagggagtgtgact

SEQ ID NO: 189543 - DNA, 41 bp, Homo sapiens; identical to SEQ ID NO: 97033
  chr19:21717589-21717630
  hypo

SEQ ID NO: 189544 - DNA, 29 bp, Homo sapiens
  chr19:21758572-21758601
  hypo
gttaagaagatttgctttggccgggcgcg

SEQ ID NO: 189545 - DNA, 140 bp, Homo sapiens; identical to SEQ ID NO: 97035
  chr19:21760987-21761127
  hypo

SEQ ID NO: 189546 - DNA, 30 bp, Homo sapiens; identical to SEQ ID NO: 97036
  chr19:21766527-21766557
  hypo

SEQ ID NO: 189547 - DNA, 91 bp, Homo sapiens; identical to SEQ ID NO: 97037
  chr19:21767645-21767736
  hypo

SEQ ID NO: 189548 - DNA, 34 bp, Homo sapiens; identical to SEQ ID NO: 32395
  chr19:21792702-21792736
  hypo

SEQ ID NO: 189549 - DNA, 181 bp, Homo sapiens
  chr19:21798901-21799082
  hypo
ggattacaggcgtgagccaccgcgcccggcctaaaacccttttctttatgcccctcaggtggacctcaaatcatggctgggtgctttccatttcaccaatcactgtttgctcaaataaacttgttaacgttttaacattgactccctttaatttttaacaggagagactgagcatggtggc

SEQ ID NO: 189550 - DNA, 43 bp, Homo sapiens; identical to SEQ ID NO: 97040
  chr19:21799321-21799364
  hypo

SEQ ID NO: 189551 - DNA, 27 bp, Homo sapiens
  chr19:21799850-21799877
  hypo
tttttatttgagatggagtttcgctct

SEQ ID NO: 189552 - DNA, 30 bp, Homo sapiens
  chr19:22013290-22013320
  hypo
tctatgtaaacaaaccggaaaatctagaat

SEQ ID NO: 189553 - DNA, 21 bp, Homo sapiens
  chr19:22017541-22017562
  hypo
gagaggaaggatggaagcaag

SEQ ID NO: 189554 - DNA, 17 bp, Homo sapiens
  chr19:22030490-22030507
  hypo
tccgtctccgaaaaaaa

SEQ ID NO: 189555 - DNA, 19 bp, Homo sapiens
  chr19:22032002-22032021
  hypo
taatttggctgggcacggt

SEQ ID NO: 189556 - DNA, 20 bp, Homo sapiens
  chr19:22035723-22035743
  hypo
cggcgtggtggctcacgcct

SEQ ID NO: 189557 - DNA, 19 bp, Homo sapiens
  chr19:22035982-22036001
  hypo
agagcgagactccgtctca

SEQ ID NO: 189558 - DNA, 44 bp, Homo sapiens; identical to SEQ ID NO: 97042
  chr19:22239549-22239593
  hypo

SEQ ID NO: 189559 - DNA, 32 bp, Homo sapiens; identical to SEQ ID NO: 32396
  chr19:22606208-22606240
  hypo

SEQ ID NO: 189560 - DNA, 17 bp, Homo sapiens
  chr19:22623788-22623805
  hypo
ctttctttctttttttt

SEQ ID NO: 189561 - DNA, 28 bp, Homo sapiens
  chr19:22636973-22637001
  hypo
gtgtagggattaccgtcgtgagccacca

SEQ ID NO: 189562 - DNA, 43 bp, Homo sapiens; identical to SEQ ID NO: 97046
  chr19:22768072-22768115
  hypo

SEQ ID NO: 189563 - DNA, 238 bp, Homo sapiens; identical to SEQ ID NO: 97047
  chr19:22799547-22799785
  hypo

SEQ ID NO: 189564 - DNA, 181 bp, Homo sapiens; identical to SEQ ID NO: 97048
  chr19:22815033-22815214
  hypo

SEQ ID NO: 189565 - DNA, 101 bp, Homo sapiens; identical to SEQ ID NO: 32398
  chr19:22815453-22815554
  hypo

SEQ ID NO: 189566 - DNA, 37 bp, Homo sapiens; identical to SEQ ID NO: 97050
  chr19:22824861-22824898
  hypo

SEQ ID NO: 189567 - DNA, 33 bp, Homo sapiens
  chr19:22825457-22825490
  hypo
tgggagtacaggcgtaagcgaccgcgcacggcc

SEQ ID NO: 189568 - DNA, 28 bp, Homo sapiens
  chr19:22880323-22880351
  hypo
cccccccgccaaaaaaaaagaaatgaat

SEQ ID NO: 189569 - DNA, 28 bp, Homo sapiens
  chr19:22966070-22966098
  hypo
aaactccgtttcaaaaaaagaaagaaaa

SEQ ID NO: 189570 - DNA, 31 bp, Homo sapiens; identical to SEQ ID NO: 97054
  chr19:23083159-23083190
  hypo

SEQ ID NO: 189571 - DNA, 90 bp, Homo sapiens
  chr19:23083834-23083924
  hypo
gaagcacagaacactcggtcgccattcacctcactgctttcaggagagaatgctcaaggtctcttgctgactttttttttttaacggagt

SEQ ID NO: 189572 - DNA, 689 bp, Homo sapiens; identical to SEQ ID NO: 97055
  chr19:23084163-23084852
  hypo

SEQ ID NO: 189573 - DNA, 18 bp, Homo sapiens
  chr19:23252729-23252747
  hypo
aaataaataaaaataaaa

SEQ ID NO: 189574 - DNA, 30 bp, Homo sapiens; identical to SEQ ID NO: 97057
  chr19:23256399-23256429
  hypo

SEQ ID NO: 189575 - DNA, 293 bp, Homo sapiens; identical to SEQ ID NO: 12209
  chr19:23258305-23258598
  hypo

SEQ ID NO: 189576 - DNA, 121 bp, Homo sapiens
  chr19:23271954-23272075
  hypo
gagccaccgcgcctggctgattatgtggtttttgtctttagttctgttatatgatgcatcgtatttcttttttcctatttatttttttctgtctcccaggctggagtgtagtggtgtgatc

SEQ ID NO: 189577 - DNA, 40 bp, Homo sapiens; identical to SEQ ID NO: 97060
  chr19:23297429-23297469
  hypo

SEQ ID NO: 189578 - DNA, 43 bp, Homo sapiens; identical to SEQ ID NO: 97061
  chr19:23378284-23378327
  hypo

SEQ ID NO: 189579 - DNA, 181 bp, Homo sapiens
  chr19:23435642-23435823
  hypo
cgagactgtgagactccatctcaaaaaaaaaaaaaaaaaaaaagtttgtgacttatgtataatctttaataaggcgactttaaaattattggtaaagtagtatcagcaatgtcttaaatattgttagcattttgttaacttttttgagatgtagtctcactctgccgctcaggctggagtg

SEQ ID NO: 189580 - DNA, 38 bp, Homo sapiens; identical to SEQ ID NO: 97062
  chr19:23453187-23453225
  hypo

SEQ ID NO: 189581 - DNA, 31 bp, Homo sapiens; identical to SEQ ID NO: 32405
  chr19:23690008-23690039
  hypo

SEQ ID NO: 189582 - DNA, 31 bp, Homo sapiens; identical to SEQ ID NO: 97064
  chr19:23694934-23694965
  hypo

SEQ ID NO: 189583 - DNA, 30 bp, Homo sapiens; identical to SEQ ID NO: 97065
  chr19:23793798-23793828
  hypo

SEQ ID NO: 189584 - DNA, 40 bp, Homo sapiens
  chr19:23917852-23917892
  hypo
aagtgctggaattacaagcgggccaccaggcctggctgac

SEQ ID NO: 189585 - DNA, 297 bp, Homo sapiens
  chr19:24140473-24140770
  hypo
ccctggtattatagacgtcggtgctgtcctcctgaaaatgggtagggactgtcccttaccggtattccccgaagattggtgagtcatcctactccatgcataacttcaaggcaatcacgtcggagtcaccacttgatcatgtccgagtcaccacttgatcacgtccgagtcaccacttgcagcttgttctgcagtgaatgccgagaaataaatattcagacaattacagctgaacggggaagggagcagctcctccaatggagtgttgctttaagattcatccgccaagtatttatt

SEQ ID NO: 189586 - DNA, 47 bp, Homo sapiens; identical to SEQ ID NO: 97066
  chr19:24178251-24178298
  hypo

SEQ ID NO: 189587 - DNA, 121 bp, Homo sapiens
  chr19:24269009-24269130
  hypo
acaaaaaataaaaaataaaaaaaagtataagagatcataaaatatgtataaaaatctagaatggtcaaaaagacaaatttgatggactttatttttgttattttattttattttttgagac

SEQ ID NO: 189588 - DNA, 23 bp, Homo sapiens
  chr19:24269549-24269572
  hypo
attacaggcgtgagccaccgcgc

SEQ ID NO: 189589 - DNA, 147 bp, Homo sapiens; identical to SEQ ID NO: 32406
  chr19:24270270-24270417
  hypo

SEQ ID NO: 189590 - DNA, 31 bp, Homo sapiens; identical to SEQ ID NO: 97068
  chr19:24273700-24273731
  hypo

SEQ ID NO: 189591 - DNA, 120 bp, Homo sapiens; identical to SEQ ID NO: 97069
  chr19:28296829-28296949
  hypo

SEQ ID NO: 189592 - DNA, 494 bp, Homo sapiens; identical to SEQ ID NO: 97070
  chr19:28341877-28342371
  hypo

SEQ ID NO: 189593 - DNA, 43 bp, Homo sapiens; identical to SEQ ID NO: 97071
  chr19:28663019-28663062
  hypo

SEQ ID NO: 189594 - DNA, 26 bp, Homo sapiens
  chr19:28668504-28668530
  hypo
atggccaaagaggaacagctccggtc

SEQ ID NO: 189595 - DNA, 38 bp, Homo sapiens; identical to SEQ ID NO: 97073
  chr19:29208560-29208598
  hypo

SEQ ID NO: 189596 - DNA, 30 bp, Homo sapiens
  chr19:29619453-29619483
  hypo
tgatatgaggacacacggggaagatggcca

SEQ ID NO: 189597 - DNA, 30 bp, Homo sapiens
  chr19:29619808-29619838
  hypo
gatgacatgagggcacgtggcggaggacgt

SEQ ID NO: 189598 - DNA, 30 bp, Homo sapiens
  chr19:29620225-29620255
  hypo
gggggaggacagccacgtgaagacgatttg

SEQ ID NO: 189599 - DNA, 36 bp, Homo sapiens; identical to SEQ ID NO: 32408
  chr19:29930744-29930780
  hypo

SEQ ID NO: 189600 - DNA, 121 bp, Homo sapiens; identical to SEQ ID NO: 32409
  chr19:29930899-29931020
  hypo

SEQ ID NO: 189601 - DNA, 238 bp, Homo sapiens; identical to SEQ ID NO: 97076
  chr19:29993078-29993316
  hypo

SEQ ID NO: 189602 - DNA, 202 bp, Homo sapiens; identical to SEQ ID NO: 12228
  chr19:30015760-30015962
  hypo

SEQ ID NO: 189603 - DNA, 904 bp, Homo sapiens; identical to SEQ ID NO: 12229
  chr19:30016024-30016928
  hypo

SEQ ID NO: 189604 - DNA, 58 bp, Homo sapiens; identical to SEQ ID NO: 12230
  chr19:30017451-30017509
  hypo

SEQ ID NO: 189605 - DNA, 144 bp, Homo sapiens; identical to SEQ ID NO: 12231
  chr19:30017577-30017721
  hypo

SEQ ID NO: 189606 - DNA, 982 bp, Homo sapiens; identical to SEQ ID NO: 131242
  chr19:30017765-30018747
  hypo

SEQ ID NO: 189607 - DNA, 530 bp, Homo sapiens; identical to SEQ ID NO: 12233
  chr19:30019080-30019610
  hypo

SEQ ID NO: 189608 - DNA, 270 bp, Homo sapiens; identical to SEQ ID NO: 12234
  chr19:30019660-30019930
  hypo

SEQ ID NO: 189609 - DNA, 357 bp, Homo sapiens; identical to SEQ ID NO: 55963
  chr19:30019993-30020350
  hypo

SEQ ID NO: 189610 - DNA, 103 bp, Homo sapiens; identical to SEQ ID NO: 131247
  chr19:30021252-30021355
  hypo

SEQ ID NO: 189611 - DNA, 30 bp, Homo sapiens
  chr19:30056282-30056312
  hypo
tctaacgtgacgactcgcagcgttcacatc

SEQ ID NO: 189612 - DNA, 80 bp, Homo sapiens; identical to SEQ ID NO: 32418
  chr19:30102074-30102154
  hypo

SEQ ID NO: 189613 - DNA, 306 bp, Homo sapiens
  chr19:30129853-30130159
  hypo
cagacagcccagatgcgagtgtcagctctgccacttgggaaagtccttaaaactcttctcatctgcgaagagatcaaccatgagattggtcatagaactaacttcaccgggatgttgtaaggcttgagtgcactgtctatggaagcacttagcacactgcctagcacatcgcaaatgcccggtaagtgactggtattgctacttgagtggaaaaaacacaaactatttttcctctgctctcccccacgataatcaacacagaagactgaccaaatatgagggggttttccccgcacacccagaaag

SEQ ID NO: 189614 - DNA, 29 bp, Homo sapiens
  chr19:30131584-30131613
  hypo
tctttcttttttttttaagaacggagtct

SEQ ID NO: 189615 - DNA, 205 bp, Homo sapiens
  chr19:30155052-30155257
  hypo
ctcctatgcgctgcccgttctcagcactcggtatgcaggggtgaaccagaagaaagtcctgtctgaacacgagaagaaattactgtctagcccgtggggctcacagcctgggtgggaggcaagccaccagcatgacttgtttatgagcattccacagaagccacagcctggtaggcagccctgaatcccacgagcggcctcagga

SEQ ID NO: 189616 - DNA, 269 bp, Homo sapiens; identical to SEQ ID NO: 131253
  chr19:30165118-30165387
  hypo

SEQ ID NO: 189617 - DNA, 30 bp, Homo sapiens
  chr19:30173452-30173482
  hypo
ctaacaagaccgtttcgtgggggccggggg

SEQ ID NO: 189618 - DNA, 341 bp, Homo sapiens; identical to SEQ ID NO: 32419
  chr19:30185995-30186336
  hypo

SEQ ID NO: 189619 - DNA, 30 bp, Homo sapiens
  chr19:30214207-30214237
  hypo
ggccctgcaaagaaccgaggctccgcagtc

SEQ ID NO: 189620 - DNA, 302 bp, Homo sapiens; identical to SEQ ID NO: 131255
  chr19:30215211-30215513
  hypo

SEQ ID NO: 189621 - DNA, 30 bp, Homo sapiens
  chr19:30222345-30222375
  hypo
agagttccctgggaacggtaacccccgtac

SEQ ID NO: 189622 - DNA, 30 bp, Homo sapiens
  chr19:30222592-30222622
  hypo
atctccctcttggaccgctgagactcaggc

SEQ ID NO: 189623 - DNA, 41 bp, Homo sapiens
  chr19:30252251-30252292
  hypo
ccggcacctgctcaccgtcatcacacggggacttagtctta

SEQ ID NO: 189624 - DNA, 30 bp, Homo sapiens; identical to SEQ ID NO: 55973
  chr19:30296837-30296867
  hypo

SEQ ID NO: 189625 - DNA, 38 bp, Homo sapiens
  chr19:30298273-30298311
  hypo
gctcacgttccctggcgctgggccgcagacactctgtg

SEQ ID NO: 189626 - DNA, 197 bp, Homo sapiens; identical to SEQ ID NO: 97092
  chr19:30314898-30315095
  hypo

SEQ ID NO: 189627 - DNA, 90 bp, Homo sapiens
  chr19:30324368-30324458
  hypo
ttcttttcctgggcagcccctttgaaagtgtcatctacactcactgtcactccctcttggaccctctccagttggcgtcgccacaccaca

SEQ ID NO: 189628 - DNA, 30 bp, Homo sapiens
  chr19:30324674-30324704
  hypo
attcatcccggccaccgccgcccccttgac

SEQ ID NO: 189629 - DNA, 30 bp, Homo sapiens
  chr19:30413267-30413297
  hypo
aggagtgcttgagcccggaagttcagggcc

SEQ ID NO: 189630 - DNA, 241 bp, Homo sapiens
  chr19:30495017-30495258
  hypo
ggtccaatttgctgccgtgagaaaaggtctaattgttgcagaaatttaatgatctagagcgacatcagggctgtgagattttatgaactgtttacaccgtaattttcattttgttaatgcagtcttttttttgtaacccattcatggctagagcataagtgattgtgttttatttaaaatagcattgcatagcatgagagccgtatcggagaacatgtgccactctcgagaagcccttcat

SEQ ID NO: 189631 - DNA, 91 bp, Homo sapiens
  chr19:30502048-30502139
  hypo
aaagaagaagccaaacgtaaacgaaagaacagcactggcagtggccactctgcccaggagctgccgaccatcaggacgcctgcagacattt

SEQ ID NO: 189632 - DNA, 30 bp, Homo sapiens
  chr19:30534472-30534502
  hypo
ttctggcagcctttccggggtctggtcttc

SEQ ID NO: 189633 - DNA, 17 bp, Homo sapiens
  chr19:30534903-30534920
  hypo
ttatttttatttttttg

SEQ ID NO: 189634 - DNA, 163 bp, Homo sapiens; identical to SEQ ID NO: 97095
  chr19:30535944-30536107
  hypo

SEQ ID NO: 189635 - DNA, 30 bp, Homo sapiens
  chr19:30552331-30552361
  hypo
tatttctgtgtcttccgaacatgctaagca

SEQ ID NO: 189636 - DNA, 130 bp, Homo sapiens
  chr19:30561932-30562062
  hypo
tcctggcctagcagagcgttttattattatgggaaacagcagaagtgggttggaggggggtccatcatctcctgcaaccagataaaatagaaacaactaaataaagcacccttgccgctcaagggaaaaa

SEQ ID NO: 189637 - DNA, 546 bp, Homo sapiens
  chr19:30562446-30562992
  hypo
tgcccgcaccgcctccgcgtcctcccgggctccccgtggaggggcaccaatttgtcctcgcctgcgcctgctcgggccagatggtgggtatttccaggccacaaagtcctctgacctttgaacagttgccgccgaatttcaataatgaaagggccttttttgaatatgtacaaatgagacgttatatttccatacattttatttccagcctcatctgcgaatctaatattgacccggagttatctgtgatggggaagttattaattctgacagatataagggagaagctaatattcgccttttacaaacacctaatattaatctcaggcgctgtaaacgagtcccgcacgccggcatgggggagatgacaccagctcggaatttgataatgaaaaacggggaagtttaatttcagggaatggataaaaatgtttgcccgctgagaggtgagcagcgccaaaagctctgggagggcgggattcccggaggacagggtggaggtctgggaggtgacctccatccgaaggtctgcgatttggggcatgg

SEQ ID NO: 189638 - DNA, 43 bp, Homo sapiens; identical to SEQ ID NO: 97096
  chr19:30583763-30583806
  hypo

SEQ ID NO: 189639 - DNA, 293 bp, Homo sapiens
  chr19:30602304-30602597
  hypo
ggggcattttaaagccggtttcatcatcagaaaatgtaaataaaagccaaggtaatatttccggtttgaacagaggcacacaaaacacagaaacttcatgggttaggcggctggctcgggggagggagagctcttgttcagcggggtctacccagaaccacgccgaaatgaggtggagtggagcttccctttatcaccgcgcatctgaccctgagcgtgagagtcctcatgcccaggacggtcccctgctgctcaccgtccccgcgggtgcacagtgtcgaggccagcctggc

SEQ ID NO: 189640 - DNA, 30 bp, Homo sapiens
  chr19:30614325-30614355
  hypo
tcgactgtcgactgccgcccttcatgggac

SEQ ID NO: 189641 - DNA, 133 bp, Homo sapiens; identical to SEQ ID NO: 97097
  chr19:30635828-30635961
  hypo

SEQ ID NO: 189642 - DNA, 115 bp, Homo sapiens; identical to SEQ ID NO: 32423
  chr19:30637462-30637577
  hypo

SEQ ID NO: 189643 - DNA, 609 bp, Homo sapiens; identical to SEQ ID NO: 55977
  chr19:30716160-30716769
  hypo

SEQ ID NO: 189644 - DNA, 3088 bp, Homo sapiens; identical to SEQ ID NO: 55978
  chr19:30716952-30720040
  hypo

SEQ ID NO: 189645 - DNA, 31 bp, Homo sapiens; identical to SEQ ID NO: 55979
  chr19:30730220-30730251
  hypo

SEQ ID NO: 189646 - DNA, 30 bp, Homo sapiens
  chr19:30852933-30852963
  hypo
ggtcctactgtactgcgggtgtctgtctgt

SEQ ID NO: 189647 - DNA, 914 bp, Homo sapiens; identical to SEQ ID NO: 32426
  chr19:30935127-30936041
  hypo

SEQ ID NO: 189648 - DNA, 338 bp, Homo sapiens; identical to SEQ ID NO: 32427
  chr19:30936340-30936678
  hypo

SEQ ID NO: 189649 - DNA, 30 bp, Homo sapiens
  chr19:30963284-30963314
  hypo
atcactaacgatgcccggtatctcactgcg

SEQ ID NO: 189650 - DNA, 22 bp, Homo sapiens
  chr19:31017826-31017848
  hypo
tccctttttctttttttgagac

SEQ ID NO: 189651 - DNA, 43 bp, Homo sapiens; identical to SEQ ID NO: 97105
  chr19:31126106-31126149
  hypo

SEQ ID NO: 189652 - DNA, 96 bp, Homo sapiens
  chr19:31197038-31197134
  hypo
ccatgtagcataggattcatacgtgaaattattactcagtaatgtgacaatcgaaagtacaatagacagttggctgggcgcggtggctcacgcctg

SEQ ID NO: 189653 - DNA, 308 bp, Homo sapiens; identical to SEQ ID NO: 131268
  chr19:31210544-31210852
  hypo

SEQ ID NO: 189654 - DNA, 30 bp, Homo sapiens
  chr19:31213779-31213809
  hypo
gcacgacaaattaaacgctttgtagggcca

SEQ ID NO: 189655 - DNA, 261 bp, Homo sapiens; identical to SEQ ID NO: 32428
  chr19:31217749-31218010
  hypo

SEQ ID NO: 189656 - DNA, 52 bp, Homo sapiens; identical to SEQ ID NO: 97108
  chr19:31275151-31275203
  hypo

SEQ ID NO: 189657 - DNA, 30 bp, Homo sapiens
  chr19:31337233-31337263
  hypo
tacagaaacttcactcgcttgcttgcctgc

SEQ ID NO: 189658 - DNA, 43 bp, Homo sapiens
  chr19:31388753-31388796
  hypo
ctccccagacttgagtcaaatcgctcttttgtgaattttgtgg

SEQ ID NO: 189659 - DNA, 30 bp, Homo sapiens
  chr19:31404928-31404958
  hypo
tggctgacgtgaacccgtcacagcctggaa

SEQ ID NO: 189660 - DNA, 30 bp, Homo sapiens
  chr19:31463698-31463728
  hypo
gcacatggaccaaaacgtccaaataaacac

SEQ ID NO: 189661 - DNA, 57 bp, Homo sapiens; identical to SEQ ID NO: 97109
  chr19:31493090-31493147
  hypo

SEQ ID NO: 189662 - DNA, 200 bp, Homo sapiens
  chr19:31640395-31640595
  hypo
ttcggcgtgtggaggcgggaggggcacagccaggtgcgagggaaggctggcatctggcgcccactgcctgcccacccgcccgcccgcccgcccaagtaggtctgggcttccctgcctttaataaccatccccaccgcagaggaacggaagctagaaacacaccggctttggcatttcaggcgagtcgagggtggattatc

SEQ ID NO: 189663 - DNA, 1184 bp, Homo sapiens; identical to SEQ ID NO: 97110
  chr19:31767643-31768827
  hypo

SEQ ID NO: 189664 - DNA, 802 bp, Homo sapiens; identical to SEQ ID NO: 97111
  chr19:31769866-31770668
  hypo

SEQ ID NO: 189665 - DNA, 99 bp, Homo sapiens
  chr19:31790089-31790188
  hypo
gactccatctcaaaaaaaagtgtgacacacaaccgcatggcgactctctctgaccggaaaggacagtaggctggagtccggccacgccaccttggcaag

SEQ ID NO: 189666 - DNA, 108 bp, Homo sapiens; identical to SEQ ID NO: 97112
  chr19:31792446-31792554
  hypo

SEQ ID NO: 189667 - DNA, 240 bp, Homo sapiens; identical to SEQ ID NO: 97113
  chr19:31794097-31794337
  hypo

SEQ ID NO: 189668 - DNA, 129 bp, Homo sapiens; identical to SEQ ID NO: 97114
  chr19:31827454-31827583
  hypo

SEQ ID NO: 189669 - DNA, 72 bp, Homo sapiens; identical to SEQ ID NO: 131269
  chr19:31839493-31839565
  hypo

SEQ ID NO: 189670 - DNA, 90 bp, Homo sapiens; identical to SEQ ID NO: 12245
  chr19:31839837-31839927
  hypo

SEQ ID NO: 189671 - DNA, 2539 bp, Homo sapiens; identical to SEQ ID NO: 131271
  chr19:31839941-31842480
  hypo

SEQ ID NO: 189672 - DNA, 25 bp, Homo sapiens
  chr19:31987294-31987319
  hypo
cagagttttgctcttattgcccgca

SEQ ID NO: 189673 - DNA, 30 bp, Homo sapiens
  chr19:32025981-32026011
  hypo
gcttatgaagggttccggagagttcagacg

SEQ ID NO: 189674 - DNA, 43 bp, Homo sapiens; identical to SEQ ID NO: 97121
  chr19:32063824-32063867
  hypo

SEQ ID NO: 189675 - DNA, 43 bp, Homo sapiens; identical to SEQ ID NO: 97122
  chr19:32064207-32064250
  hypo

SEQ ID NO: 189676 - DNA, 30 bp, Homo sapiens
  chr19:32066765-32066795
  hypo
agtgccttgctgtgccgaaccaggaaacac

SEQ ID NO: 189677 - DNA, 43 bp, Homo sapiens; identical to SEQ ID NO: 97123
  chr19:32078977-32079020
  hypo

SEQ ID NO: 189678 - DNA, 370 bp, Homo sapiens
  chr19:32083442-32083812
  hypo
caagggaatggtgacagcttgcgcttgccggggagtcctgctgccttccgaggtgtgaagggaaggcatgcactgtgcatatgctgtaccatacagttttgcctacaactgcttgtagcttcattgtagctgtgaatgctccgttcctctccttttcacccctgaagattcgcgaacatgcaggattgagctgtgcgaggcatagcattccccacatggtagacgaaggcggatgtgggtctgatggctctactgccgtccacccgggaggatggacgtgtgttccgggatatcagagcttgcggctgaccagcccacatgtccatgcagccctcccgctggctgtgtcgacattttgggtgtcactgaa

SEQ ID NO: 189679 - DNA, 43 bp, Homo sapiens
  chr19:32087788-32087831
  hypo
gacattcccatgctggcttcacgtgtgttgccatttcatgtcc

SEQ ID NO: 189680 - DNA, 190 bp, Homo sapiens; identical to SEQ ID NO: 97125
  chr19:32088783-32088973
  hypo

SEQ ID NO: 189681 - DNA, 122 bp, Homo sapiens
  chr19:32198251-32198373
  hypo
agcttctctgcccatcgagctggctggcacttcgaattaccctcaagagtccatgggcatcacgtcacatttgcgtgcccaatatcatacgtgacgagtcgtgccaccgccagggcctttaa

SEQ ID NO: 189682 - DNA, 30 bp, Homo sapiens; identical to SEQ ID NO: 32437
  chr19:32323971-32324001
  hypo

SEQ ID NO: 189683 - DNA, 30 bp, Homo sapiens
  chr19:32364373-32364403
  hypo
atggccccgggcatgcgcttctcttcttcc

SEQ ID NO: 189684 - DNA, 30 bp, Homo sapiens
  chr19:32364750-32364780
  hypo
ccagagaatccatgacggggaaaactcatg

SEQ ID NO: 189685 - DNA, 149 bp, Homo sapiens; identical to SEQ ID NO: 97127
  chr19:32366588-32366737
  hypo

SEQ ID NO: 189686 - DNA, 206 bp, Homo sapiens
  chr19:32374295-32374501
  hypo
ccccttacctatgaccagcagcgatgttttttcagtgattccgcaagagtcaaaaacccaacaaagcgcatcgccggcgctgtaaagggagcatgctgccggtgtctgtgaccactgtatgcaaagcttggcattagtcacagccgggccggctgtgacaggcctgaagtgagggagattaatgcgaggctgggacactttattat

SEQ ID NO: 189687 - DNA, 82 bp, Homo sapiens; identical to SEQ ID NO: 97129
  chr19:32380866-32380948
  hypo

SEQ ID NO: 189688 - DNA, 138 bp, Homo sapiens
  chr19:32438835-32438973
  hypo
ttggtgtgccagccgcgctgcacattgacccaaggcagagctcgtggagaaatgatgtcctcttaagcagactcctggagagatggtccgcatttctcctgacaaattagaagcgccgtgaatgcaaccattcctcag

SEQ ID NO: 189689 - DNA, 30 bp, Homo sapiens
  chr19:32471438-32471468
  hypo
tacctgctactcctccgaccccgccatcag

SEQ ID NO: 189690 - DNA, 30 bp, Homo sapiens
  chr19:32501072-32501102
  hypo
aaaatagttggggaccgctgtcctaaatgg

SEQ ID NO: 189691 - DNA, 30 bp, Homo sapiens
  chr19:32516399-32516429
  hypo
gtgcattcaggcatgcgggtccatccatgc

SEQ ID NO: 189692 - DNA, 30 bp, Homo sapiens
  chr19:32516939-32516969
  hypo
aagaaagccaggattcgagcctgcgagctc

SEQ ID NO: 189693 - DNA, 250 bp, Homo sapiens
  chr19:32521092-32521342
  hypo
gtccagtgcagtccccgacccagacccaggcctcccgagaagccggtgaggtgaagtcattggagggagcctcatccctgatgggtgggcacagggcctgtctgacttgcccactcatatcactcagaaatctgaggaggtggtgcttgaggggcagtagaatgaggctccaagaagtcactctcatctctgtgggccacgccagagttcaagactggatcttcgctccaatggccgagggatctctgga

SEQ ID NO: 189694 - DNA, 119 bp, Homo sapiens; identical to SEQ ID NO: 97130
  chr19:32537989-32538108
  hypo

SEQ ID NO: 189695 - DNA, 75 bp, Homo sapiens; identical to SEQ ID NO: 32438
  chr19:32672522-32672597
  hypo

SEQ ID NO: 189696 - DNA, 30 bp, Homo sapiens
  chr19:32687798-32687828
  hypo
gctagtggggctgcacggagggctgtgccc

SEQ ID NO: 189697 - DNA, 346 bp, Homo sapiens; identical to SEQ ID NO: 97132
  chr19:32718519-32718865
  hypo

SEQ ID NO: 189698 - DNA, 30 bp, Homo sapiens; identical to SEQ ID NO: 97133
  chr19:32834787-32834817
  hypo

SEQ ID NO: 189699 - DNA, 138 bp, Homo sapiens; identical to SEQ ID NO: 32439
  chr19:32835110-32835248
  hypo

SEQ ID NO: 189700 - DNA, 291 bp, Homo sapiens; identical to SEQ ID NO: 97135
  chr19:32845481-32845772
  hypo

SEQ ID NO: 189701 - DNA, 67 bp, Homo sapiens
  chr19:32849469-32849536
  hypo
tatgtcagcagataccgcaggagctcaaatagagccgcaagcaaagccctttcgtatggtgttactc

SEQ ID NO: 189702 - DNA, 30 bp, Homo sapiens; identical to SEQ ID NO: 32441
  chr19:32850267-32850297
  hypo

SEQ ID NO: 189703 - DNA, 193 bp, Homo sapiens; identical to SEQ ID NO: 97138
  chr19:32850566-32850759
  hypo

SEQ ID NO: 189704 - DNA, 30 bp, Homo sapiens; identical to SEQ ID NO: 97139
  chr19:32853027-32853057
  hypo

SEQ ID NO: 189705 - DNA, 30 bp, Homo sapiens
  chr19:32853960-32853990
  hypo
actgtgtgctttaagcggagctggtagcgt

SEQ ID NO: 189706 - DNA, 30 bp, Homo sapiens
  chr19:32879145-32879175
  hypo
ctcctgacagctttacggtgttgatgttgg

SEQ ID NO: 189707 - DNA, 577 bp, Homo sapiens
  chr19:32898171-32898748
  hypo
ccccccacccattactcccaccgacgctccctgggatagcagctgccctgattggcacacccccgcagtcatcaccactgaggcgtattcctgaagctgccagtgtgaattgttttatagaacactggtgttaaaattcaggtacctgagacaaaacaatattttaattcttcaaaatccggttgtcaacacatttactatggagtatctcccacgtggccacttctgtgggaggtactgaagacctactaccgcctatggaagtagaaaataatatacaactgtgtagttacgtgacgcattgcgtggtaactgctatggctcagggagggagaagatcagccggaactggaatgtcccaagatgttctggaagaaaagcagtggctcgtttgtgttgcttacctgtattcctgactcctggcagggcctgctgtagagcacatgcttcatgaataaatatgattgagttgaataaatatttgaattgtgttttgagtgtagctttgaaggccagcaacgatttagatggcaagatcgagggcaggctgggcacaatggctcattcatgtaatcct

SEQ ID NO: 189708 - DNA, 30 bp, Homo sapiens; identical to SEQ ID NO: 97141
  chr19:32975185-32975215
  hypo

SEQ ID NO: 189709 - DNA, 29 bp, Homo sapiens
  chr19:32999071-32999100
  hypo
gagacttcgtctcaaaaaaaaaaaaaagt

SEQ ID NO: 189710 - DNA, 20 bp, Homo sapiens
  chr19:33054775-33054795
  hypo
gagggtgggggattacagta

SEQ ID NO: 189711 - DNA, 29 bp, Homo sapiens
  chr19:33084514-33084543
  hypo
ttaagcacgtgtaccagcatgactctacc

SEQ ID NO: 189712 - DNA, 46 bp, Homo sapiens; identical to SEQ ID NO: 97143
  chr19:33143456-33143502
  hypo

SEQ ID NO: 189713 - DNA, 175 bp, Homo sapiens; identical to SEQ ID NO: 12251
  chr19:33166793-33166968
  hypo

SEQ ID NO: 189714 - DNA, 499 bp, Homo sapiens; identical to SEQ ID NO: 12252
  chr19:33166988-33167487
  hypo

SEQ ID NO: 189715 - DNA, 518 bp, Homo sapiens; identical to SEQ ID NO: 131279
  chr19:33167496-33168014
  hypo

SEQ ID NO: 189716 - DNA, 97 bp, Homo sapiens; identical to SEQ ID NO: 97147
  chr19:33209599-33209696
  hypo

SEQ ID NO: 189717 - DNA, 214 bp, Homo sapiens
  chr19:33211876-33212090
  hypo
ccaagcgacactggcgtccccagggccccgctctccgtactccacggggcccttaggctcggcgcctggacagggtcgggtggcccgggcagccccagcccatgggtccgggcttccctcatgcccccagtctctgttgccctatccgctcaccgcgtgggctctgcgtgggcgttgttctagtcctcggggaagggacgcccgcctggaccct

SEQ ID NO: 189718 - DNA, 190 bp, Homo sapiens
  chr19:33304761-33304951
  hypo
tgaataactgctgcatagaaacggtgacttatttggggatttgttagggagaggtgtttttcatgttattgggtcatgaattgggttgtgggtttagtttttgttcaggggaatattttacattgtaaccccagcgcacacgtgcattgtgtatgcgaggcacacgcacgcacacacatgcagccgaaca

SEQ ID NO: 189719 - DNA, 31 bp, Homo sapiens; identical to SEQ ID NO: 97150
  chr19:33334782-33334813
  hypo

SEQ ID NO: 189720 - DNA, 508 bp, Homo sapiens
  chr19:33355050-33355558
  hypo
gcccacatagaagggcgcacacacatactcggagaagctgaggcagatgatggcgaaggacgtgggcttaatgacgatcaggctggcccaggagaagaggtaggcggggatgggcccgtaggcctccatcaggtagggatactctccccctgacttggtgatcattgtgccaagctccgcaaagcacagggcacctggaacacagagaggaagggcccacaggccccttgtgaggcactgccccggccccagggagccttcctcccaccggaggctgcgctcgtatggaggggcccaccgtggtccgccctcgctggacggccctgagctccagcgttggacattcagtccagcctgatttacacctgtttgccatacatgtgccaagagggatactggcagggtgagggctggcacaggtagcagctgcctggcgtgcccctgcatgcttccggggctgcaacaggctcccaagtctctttacccagcgtcgcgaggaccccgcaag

SEQ ID NO: 189721 - DNA, 31 bp, Homo sapiens; identical to SEQ ID NO: 32447
  chr19:33357609-33357640
  hypo

SEQ ID NO: 189722 - DNA, 151 bp, Homo sapiens; identical to SEQ ID NO: 97154
  chr19:33365574-33365725
  hypo

SEQ ID NO: 189723 - DNA, 146 bp, Homo sapiens; identical to SEQ ID NO: 97155
  chr19:33367849-33367995
  hypo

SEQ ID NO: 189724 - DNA, 211 bp, Homo sapiens; identical to SEQ ID NO: 32448
  chr19:33415225-33415436
  hypo

SEQ ID NO: 189725 - DNA, 30 bp, Homo sapiens
  chr19:33461986-33462016
  hypo
gacctaggggaagggcgagagtggaagcag

SEQ ID NO: 189726 - DNA, 97 bp, Homo sapiens
  chr19:33467958-33468055
  hypo
aaaaaaaaaaaaaaaagaaaaaggattttctccagcagcaaccagtgaaagatgaggcgaggcttgaatggagcccgtgggtcgtcctgccttagcg

SEQ ID NO: 189727 - DNA, 31 bp, Homo sapiens; identical to SEQ ID NO: 97157
  chr19:33488746-33488777
  hypo

SEQ ID NO: 189728 - DNA, 31 bp, Homo sapiens; identical to SEQ ID NO: 97158
  chr19:33515046-33515077
  hypo

SEQ ID NO: 189729 - DNA, 30 bp, Homo sapiens; identical to SEQ ID NO: 55999
  chr19:33532284-33532314
  hypo

SEQ ID NO: 189730 - DNA, 121 bp, Homo sapiens
  chr19:33539242-33539363
  hypo
tgagccatggcatccagccctggaatggattttaaaattaatatcgtttaaagcattaaacggtttccaattttgtctttcttcagatttaagattaaaatatctttggccgggcatagta

SEQ ID NO: 189731 - DNA, 112 bp, Homo sapiens
  chr19:33540576-33540688
  hypo
agcaagtactgagtgaacccccgtgtcatcaccagctttacaggcaactcctggggtcggcccgcttatgtggaccctggtacagcatctcggatcccatggttctgcagca

SEQ ID NO: 189732 - DNA, 139 bp, Homo sapiens
  chr19:33549076-33549215
  hypo
aagccaagaggctgattccttttcaagcatggccggagccatcccaacaaagcaccaattcccagcactgctcagcactccaggaaacgagacctgctgggaactgctgccaaagaaactgtatcgagtcagggtctgg

SEQ ID NO: 189733 - DNA, 585 bp, Homo sapiens; identical to SEQ ID NO: 56001
  chr19:33555490-33556075
  hypo

SEQ ID NO: 189734 - DNA, 181 bp, Homo sapiens
  chr19:33556898-33557079
  hypo
atctgcccacctcggcctgcctcccaaagtgctgggattacagcttttgttttgttttgttttgttttgtttttaaatagatgcggggtctcaccatgatatcaaggctggcctcgaactcccgaccttaagtgatcctcactcgtctcgctctgtcgcccaggctgaagtgcaatggcgc

SEQ ID NO: 189735 - DNA, 38 bp, Homo sapiens
  chr19:33557318-33557356
  hypo
ggagcacggttcttaaccacctccgttttctaggctgc

SEQ ID NO: 189736 - DNA, 99 bp, Homo sapiens
  chr19:33557644-33557743
  hypo
ccccagcaaagggaccgccctcagcggtcgcgatagatgccacaggtggaacagaatgcaatgtgctgcaaaaccagcccagcgttaacatatctttaa

SEQ ID NO: 189737 - DNA, 30 bp, Homo sapiens; identical to SEQ ID NO: 56003
  chr19:33575048-33575078
  hypo

SEQ ID NO: 189738 - DNA, 30 bp, Homo sapiens
  chr19:33576270-33576300
  hypo
gcataccaccatgcccggctaattttaaac

SEQ ID NO: 189739 - DNA, 95 bp, Homo sapiens; identical to SEQ ID NO: 32450
  chr19:33585138-33585233
  hypo

SEQ ID NO: 189740 - DNA, 30 bp, Homo sapiens
  chr19:33591747-33591777
  hypo
ttggcgtaaccagtacgtgcaggaaaacct

SEQ ID NO: 189741 - DNA, 30 bp, Homo sapiens
  chr19:33592114-33592144
  hypo
ttcttctaaaaatcacgtcaatatgcttgt

SEQ ID NO: 189742 - DNA, 30 bp, Homo sapiens
  chr19:33619553-33619583
  hypo
cctcaggcgtgagccgctgcgcaggcctgc

SEQ ID NO: 189743 - DNA, 30 bp, Homo sapiens
  chr19:33641897-33641927
  hypo
aacctgctgtgctcccggttcaaagcctgg

SEQ ID NO: 189744 - DNA, 30 bp, Homo sapiens; identical to SEQ ID NO: 97165
  chr19:33672363-33672393
  hypo

SEQ ID NO: 189745 - DNA, 30 bp, Homo sapiens; identical to SEQ ID NO: 97166
  chr19:33682962-33682992
  hypo

SEQ ID NO: 189746 - DNA, 30 bp, Homo sapiens; identical to SEQ ID NO: 97167
  chr19:33693397-33693427
  hypo

SEQ ID NO: 189747 - DNA, 120 bp, Homo sapiens; identical to SEQ ID NO: 97168
  chr19:33693686-33693806
  hypo

SEQ ID NO: 189748 - DNA, 31 bp, Homo sapiens; identical to SEQ ID NO: 97169
  chr19:33694485-33694516
  hypo

SEQ ID NO: 189749 - DNA, 95 bp, Homo sapiens
  chr19:33696619-33696714
  hypo
gcgagcgcggggaccgcctgctgcagacgctgtcctaccgcagcaaccaccggcccgtgagcctggaggccgcccagggccgcctcactgtggcc

SEQ ID NO: 189750 - DNA, 38 bp, Homo sapiens; identical to SEQ ID NO: 97171
  chr19:33697259-33697297
  hypo

SEQ ID NO: 189751 - DNA, 218 bp, Homo sapiens; identical to SEQ ID NO: 97172
  chr19:33697589-33697807
  hypo

SEQ ID NO: 189752 - DNA, 95 bp, Homo sapiens; identical to SEQ ID NO: 32452
  chr19:33698373-33698468
  hypo

SEQ ID NO: 189753 - DNA, 384 bp, Homo sapiens
  chr19:33701376-33701760
  hypo
atgggcctgtggagtgcaggccgcctccagcgcagcagcagcaggcccaggatggtgacgccgtagcagaggtagttgatgaaggacacatagttgatgagcgtgtacgtgtcgcccacgagcatgatgacggctgtggccccgcactgggagaggacctggggctgacggctggcccctagcctgcctcctgacgcccctgcaggatgagccctggccccacccccaacccccaccctggaatggctcacccctgccattacccggaaggtcctgcattgccgggtagccctgcctccacgccctgcctggcccaggtcccccaacttacacagacgaggagggcggggatgggggtgcagtgtctgacgtggatcatggcca

SEQ ID NO: 189754 - DNA, 166 bp, Homo sapiens
  chr19:33702313-33702479
  hypo
actcaccacagccaccgcattggaggagagcagctcctggggggacatggccgtgaagtaggcaatgttggtgaacgtgtacacgaaggtcaccagtgggatggagatgaagatggcgcgaggtaggttcctggtgacaggcagtggagtgcgtcagcgtcagctc

SEQ ID NO: 189755 - DNA, 131 bp, Homo sapiens
  chr19:33703395-33703526
  hypo
gcccttaccccgactcggccctaccttggaagatctggagaaggcccacgccgatgatgagggacaaggccagcagcttcccgcctgtgaacatgtcctggatgcgcgtggcccagcgcacactggagctg

SEQ ID NO: 189756 - DNA, 30 bp, Homo sapiens
  chr19:33708554-33708584
  hypo
ctcagagcgggagcccgcctcctccacctg

SEQ ID NO: 189757 - DNA, 30 bp, Homo sapiens
  chr19:33708827-33708857
  hypo
ggggagagagagaagcgcctctctcatcta

SEQ ID NO: 189758 - DNA, 153 bp, Homo sapiens; identical to SEQ ID NO: 97175
  chr19:33710895-33711048
  hypo

SEQ ID NO: 189759 - DNA, 311 bp, Homo sapiens; identical to SEQ ID NO: 56006
  chr19:33717597-33717908
  hypo

SEQ ID NO: 189760 - DNA, 340 bp, Homo sapiens
  chr19:33726761-33727101
  hypo
gcctttctcacagctcggtggagccgccctgccaggcccatcttggccggtgggtcggggctccgcaggccccgtgggctcagcctccccacctgcctggtgggcagggaggccttgagcctgggaaaggcgcgggcggccactgctggaggggagcgggcaccgtggggctgcgcgctgcggcgggctccccccacaggctccaagacacgtcaaaaccgggtacaaaaaattggggcaatctacgtgtttacttctaacaaatgaatgcttgtaacgtaaaaacaagactttgcacaccaccggggctgttcggatccgagaacgcatgggttcacgg

SEQ ID NO: 189761 - DNA, 657 bp, Homo sapiens
  chr19:33772441-33773098
  hypo
cagttgcaggtggggcgtggaggccagctctgtgggcgctgggtccttcccctgcggccacaccgtgtgccaggaacgagagaccccctggctgtgcgttccaccctggccctccatctgagccctgggctactggggaggcagcaggagcccgggcagacggctcatctgagctcggccttctgtcagctgacaggggtcacgtgctgtctgggcttgcctggggcctgagaaatggggatgcggacagccattgtcagggctgttggggaaattcaaggaatggaagagtcagagggagttgggaggccatgtctcggtgtgtgcgggggcatcgaaagccctgctggatttgggggatcaaaggaccgccacgcatcacttgtggggtctcgggatgatgggggtcaggcctgctctttgctggggaggccagtggctagcaaggtctggggctcagtgaataaggccacgcttgcagccgcccttgtcccagtgcttggagagccaccaggcagactttatctgcatccctggaagtgacctgaagagactgccgggcactagaggggtccatgtgggacccggaacccaaaggatcaggttcaccaaagcctggacttccctggagggcccctgacccgtctcagcggccgt

SEQ ID NO: 189762 - DNA, 30 bp, Homo sapiens
  chr19:33775349-33775379
  hypo
tttcctcattgtgcccggctctgttcctga

SEQ ID NO: 189763 - DNA, 3867 bp, Homo sapiens; identical to SEQ ID NO: 12259
  chr19:33790838-33794705
  hypo

SEQ ID NO: 189764 - DNA, 30 bp, Homo sapiens
  chr19:33857301-33857331
  hypo
ccatattctacgcttcgaaaggaagtcact

SEQ ID NO: 189765 - DNA, 52 bp, Homo sapiens
  chr19:33869569-33869621
  hypo
ttagaacatggaacccgcaggggtgatagcatgagagcgctggagacagggt

SEQ ID NO: 189766 - DNA, 30 bp, Homo sapiens; identical to SEQ ID NO: 97180
  chr19:33878886-33878916
  hypo

SEQ ID NO: 189767 - DNA, 82 bp, Homo sapiens; identical to SEQ ID NO: 32455
  chr19:33882201-33882283
  hypo

SEQ ID NO: 189768 - DNA, 170 bp, Homo sapiens
  chr19:33907909-33908079
  hypo
cccgtggagcgctcccgggcacacggcccagctcctgccctcagaagtttatcacctaacatgaagacgagtcacagtcctataaaaatgctgcagctgcccagacagcggtagaagggctgcctggcagcaagtgtcggccaagctatgtgcctcgagcatgggtgggg

SEQ ID NO: 189769 - DNA, 53 bp, Homo sapiens
  chr19:33917858-33917911
  hypo
agggcccctccaccgcgtgcggctgtgttttatggcagcgaaccggctgttag

SEQ ID NO: 189770 - DNA, 179 bp, Homo sapiens; identical to SEQ ID NO: 32456
  chr19:33926620-33926799
  hypo

SEQ ID NO: 189771 - DNA, 30 bp, Homo sapiens
  chr19:33928052-33928082
  hypo
ccaaccaccgggctccggccctcggaaaag

SEQ ID NO: 189772 - DNA, 184 bp, Homo sapiens; identical to SEQ ID NO: 97184
  chr19:33939088-33939272
  hypo

SEQ ID NO: 189773 - DNA, 33 bp, Homo sapiens
  chr19:33953393-33953426
  hypo
ccacggctgggcagccgccggaagctccccggg

SEQ ID NO: 189774 - DNA, 119 bp, Homo sapiens
  chr19:33953631-33953750
  hypo
ggcagaaacaaagtccgagagtagaatggtggggcactaaaccaccctgaaaagtcatcgaaaaccattacatcaaacactctgccaagagccagggaggcgggcgcagtcagaagaaa

SEQ ID NO: 189775 - DNA, 320 bp, Homo sapiens
  chr19:33996088-33996408
  hypo
tcaccatccatttcccgcggcccggcctgccttcagctacaaacaatgctgcctcgccgactctcactctgctctccacagaaggcagcggcatttgctctgcggtggaagccggcagccatctgaggatgttagctggtcagagacaaaagcagacctcgccacagtgacgcaggtgcctatgcccaaagaccactcccggagcaagcttcctcacaggggccacagagggaacagcgctgcccgggaggctggagaccaggtccagtgaccaggcctgcccagggtcagtgcctcaaaccacccgggcagcagccgaa

SEQ ID NO: 189776 - DNA, 117 bp, Homo sapiens
  chr19:33997988-33998105
  hypo
accctcccaccatacccgcatccatctctcacacaagatgtgggtatggccctgggaaggctgagcgcccctccctgcatacccagagccggggacggaatgcgttacaaaggttcc

SEQ ID NO: 189777 - DNA, 451 bp, Homo sapiens
  chr19:34000695-34001146
  hypo
gttaagtacagtgtccgccctggcaccactgagcaggcagaacagctcctcggcggtggggagtacctggaacagcaggcaccatggagggtggaggagggtgcccagcagcccgagcctctgctctatctcacaggtgagccgggagggcaggacctgcgctgcgtccagaggaaggcagcaaataacacacccagcatatcagcgatgggcctcagagaggcggttccccgatccaaacccaacccaccaccctcaggcacgcacagggccatgccacacctgtcgatgccatgcaggagtgacggcctcgcagggccaaaccctcaggcattttcacagacggagaagctagaatttcaggattaacaaactgcacttctaaacaaacaaggcccccagttgacagggctctgatgagtggaggaacaccagggttcttggtctcgag

SEQ ID NO: 189778 - DNA, 30 bp, Homo sapiens
  chr19:34002404-34002434
  hypo
aggcaagacgccccccggattctgacgccc

SEQ ID NO: 189779 - DNA, 31 bp, Homo sapiens; identical to SEQ ID NO: 97187
  chr19:34039505-34039536
  hypo

SEQ ID NO: 189780 - DNA, 403 bp, Homo sapiens; identical to SEQ ID NO: 131293
  chr19:34112326-34112729
  hypo

SEQ ID NO: 189781 - DNA, 157 bp, Homo sapiens; identical to SEQ ID NO: 12261
  chr19:34113145-34113302
  hypo

SEQ ID NO: 189782 - DNA, 683 bp, Homo sapiens; identical to SEQ ID NO: 12262
  chr19:34113366-34114049
  hypo

SEQ ID NO: 189783 - DNA, 87 bp, Homo sapiens; identical to SEQ ID NO: 12263
  chr19:34114286-34114373
  hypo

SEQ ID NO: 189784 - DNA, 25 bp, Homo sapiens
  chr19:34127407-34127432
  hypo
agtgttacaggaaaggggtcccgat

SEQ ID NO: 189785 - DNA, 64 bp, Homo sapiens; identical to SEQ ID NO: 97193
  chr19:34158694-34158758
  hypo

SEQ ID NO: 189786 - DNA, 30 bp, Homo sapiens
  chr19:34159762-34159792
  hypo
ctgtggttcccatcacgggtcaaaaacaag

SEQ ID NO: 189787 - DNA, 30 bp, Homo sapiens
  chr19:34177330-34177360
  hypo
atgtcggtactggctcgaatggagacagac

SEQ ID NO: 189788 - DNA, 289 bp, Homo sapiens; identical to SEQ ID NO: 32462
  chr19:34177590-34177879
  hypo

SEQ ID NO: 189789 - DNA, 30 bp, Homo sapiens
  chr19:34190962-34190992
  hypo
agagtccggtcctcgcgcagctgggcgtct

SEQ ID NO: 189790 - DNA, 30 bp, Homo sapiens; identical to SEQ ID NO: 97195
  chr19:34208371-34208401
  hypo

SEQ ID NO: 189791 - DNA, 858 bp, Homo sapiens; identical to SEQ ID NO: 131298
  chr19:34262993-34263851
  hypo

SEQ ID NO: 189792 - DNA, 218 bp, Homo sapiens; identical to SEQ ID NO: 131299
  chr19:34269015-34269233
  hypo

SEQ ID NO: 189793 - DNA, 22 bp, Homo sapiens
  chr19:34270569-34270591
  hypo
tattttttgtaccctgcccctc

SEQ ID NO: 189794 - DNA, 139 bp, Homo sapiens; identical to SEQ ID NO: 97198
  chr19:34272609-34272748
  hypo

SEQ ID NO: 189795 - DNA, 30 bp, Homo sapiens; identical to SEQ ID NO: 131300
  chr19:34286223-34286253
  hypo

SEQ ID NO: 189796 - DNA, 998 bp, Homo sapiens; identical to SEQ ID NO: 131301
  chr19:34286492-34287490
  hypo

SEQ ID NO: 189797 - DNA, 975 bp, Homo sapiens; identical to SEQ ID NO: 131302
  chr19:34287807-34288782
  hypo

SEQ ID NO: 189798 - DNA, 23 bp, Homo sapiens
  chr19:34295837-34295860
  hypo
tttctttcttttaagcgacagcg

SEQ ID NO: 189799 - DNA, 30 bp, Homo sapiens
  chr19:34298148-34298178
  hypo
gtgtttaaggatgggcgcgtgccagcgtta

SEQ ID NO: 189800 - DNA, 170 bp, Homo sapiens
  chr19:34302227-34302397
  hypo
aggagcaggagcagcggcgccgcagccgggcctgtgactgcctggtggtgcgcgtcacgcccgacttgggcgagcggatcgcactcagcggcgagaaggccctcatcgaggaggtcttccccgagaccggagacgtcatgtgcaactccgtcaacgccggctggaaccag

SEQ ID NO: 189801 - DNA, 512 bp, Homo sapiens
  chr19:34303756-34304268
  hypo
ctcctcccagttcagcgagtatgtgctttgccgggaggagcggcggccgcagcccacccccactgctgttcgaatcaagcaggaacccctggactaggccctgcttcagtgcccacctgggcccccccagggacctggaaacagtgctggggagttctgcctgtgtatacttggccgtgggcatgagaccgagggtgaggctggagggtccaaagctggcccagcgagcaccagggtcccaggtgtcatggcaacagaacgtgggatgctggaggcatgcctgcagaaggactgttgatgcgacccaaagatacagcggtgggatctctgctgccagctctcccagcccctcagcttcgcagcctggcgcagcatcctctgaggccccggggcctgttggggcggggttggaagagccgtctgcagctacttcagaggagctgtttatccctctccacgcggggcagactctggcgggtctcctagcgtccgagagatggcttattttctac

SEQ ID NO: 189802 - DNA, 30 bp, Homo sapiens
  chr19:34316618-34316648
  hypo
cgtccagcctgaacacgtgctgttttatta

SEQ ID NO: 189803 - DNA, 29 bp, Homo sapiens
  chr19:34316997-34317026
  hypo
aggcaggaggctgggcgggatggctcacg

SEQ ID NO: 189804 - DNA, 30 bp, Homo sapiens
  chr19:34356339-34356369
  hypo
acagcacttgacctgcgtggcgactctgta

SEQ ID NO: 189805 - DNA, 89 bp, Homo sapiens; identical to SEQ ID NO: 32465
  chr19:34421530-34421619
  hypo

SEQ ID NO: 189806 - DNA, 33 bp, Homo sapiens
  chr19:34537936-34537969
  hypo
attctcggccgggcgcggtgactcaaagcctgt

SEQ ID NO: 189807 - DNA, 32 bp, Homo sapiens; identical to SEQ ID NO: 97204
  chr19:34538208-34538240
  hypo

SEQ ID NO: 189808 - DNA, 35 bp, Homo sapiens; identical to SEQ ID NO: 97205
  chr19:34538664-34538699
  hypo

SEQ ID NO: 189809 - DNA, 35 bp, Homo sapiens; identical to SEQ ID NO: 97206
  chr19:34538938-34538973
  hypo

SEQ ID NO: 189810 - DNA, 35 bp, Homo sapiens; identical to SEQ ID NO: 97207
  chr19:34603233-34603268
  hypo

SEQ ID NO: 189811 - DNA, 31 bp, Homo sapiens; identical to SEQ ID NO: 32466
  chr19:34625925-34625956
  hypo

SEQ ID NO: 189812 - DNA, 38 bp, Homo sapiens; identical to SEQ ID NO: 97209
  chr19:34630391-34630429
  hypo

SEQ ID NO: 189813 - DNA, 30 bp, Homo sapiens
  chr19:34791779-34791809
  hypo
cataaagcctgagatcgccaagatgctaat

SEQ ID NO: 189814 - DNA, 30 bp, Homo sapiens; identical to SEQ ID NO: 97210
  chr19:34803406-34803436
  hypo

SEQ ID NO: 189815 - DNA, 191 bp, Homo sapiens; identical to SEQ ID NO: 97211
  chr19:34846159-34846350
  hypo

SEQ ID NO: 189816 - DNA, 30 bp, Homo sapiens; identical to SEQ ID NO: 97212
  chr19:34893000-34893030
  hypo

SEQ ID NO: 189817 - DNA, 90 bp, Homo sapiens; identical to SEQ ID NO: 32467
  chr19:34949545-34949635
  hypo

SEQ ID NO: 189818 - DNA, 94 bp, Homo sapiens; identical to SEQ ID NO: 32468
  chr19:34963040-34963134
  hypo

SEQ ID NO: 189819 - DNA, 50 bp, Homo sapiens; identical to SEQ ID NO: 97215
  chr19:34988797-34988847
  hypo

SEQ ID NO: 189820 - DNA, 43 bp, Homo sapiens; identical to SEQ ID NO: 97216
  chr19:34989428-34989471
  hypo

SEQ ID NO: 189821 - DNA, 310 bp, Homo sapiens; identical to SEQ ID NO: 97217
  chr19:35050088-35050398
  hypo

SEQ ID NO: 189822 - DNA, 30 bp, Homo sapiens; identical to SEQ ID NO: 131315
  chr19:35066265-35066295
  hypo

SEQ ID NO: 189823 - DNA, 30 bp, Homo sapiens; identical to SEQ ID NO: 131316
  chr19:35066605-35066635
  hypo

SEQ ID NO: 189824 - DNA, 62 bp, Homo sapiens; identical to SEQ ID NO: 97218
  chr19:35082485-35082547
  hypo

SEQ ID NO: 189825 - DNA, 30 bp, Homo sapiens; identical to SEQ ID NO: 97219
  chr19:35087274-35087304
  hypo

SEQ ID NO: 189826 - DNA, 30 bp, Homo sapiens
  chr19:35089152-35089182
  hypo
cagcagagcagtgtgcggcacactgggctg

SEQ ID NO: 189827 - DNA, 219 bp, Homo sapiens; identical to SEQ ID NO: 12274
  chr19:35168867-35169086
  hypo

SEQ ID NO: 189828 - DNA, 104 bp, Homo sapiens; identical to SEQ ID NO: 56029
  chr19:35169516-35169620
  hypo

SEQ ID NO: 189829 - DNA, 39 bp, Homo sapiens
  chr19:35178754-35178793
  hypo
caaggccgtgtggcccgtatggcccgagaggtgctgagg

SEQ ID NO: 189830 - DNA, 208 bp, Homo sapiens
  chr19:35298168-35298376
  hypo
taagatttgaaagtaggagtccggcgggtgagggcccaagggacgcaccaccaacttgaagccaccgtgatgcgagcctgtgggtgaatggctccagaaactgcggtgactaggatggggacagccacatggcagcctccagcccagcactgacacgagatcacaatgggtggcaccctagcctagcgtcagagcctcagtcttacct

SEQ ID NO: 189831 - DNA, 30 bp, Homo sapiens
  chr19:35315978-35316008
  hypo
tcgagaacggcctaccgcaacatagccaga

SEQ ID NO: 189832 - DNA, 30 bp, Homo sapiens
  chr19:35316274-35316304
  hypo
tgacagcgctgggttcgcccttccccacca

SEQ ID NO: 189833 - DNA, 30 bp, Homo sapiens
  chr19:35316614-35316644
  hypo
aagaagcagctccagcgagaatcatgggag

SEQ ID NO: 189834 - DNA, 91 bp, Homo sapiens; identical to SEQ ID NO: 97223
  chr19:35323412-35323503
  hypo

SEQ ID NO: 189835 - DNA, 46 bp, Homo sapiens; identical to SEQ ID NO: 97224
  chr19:35324045-35324091
  hypo

SEQ ID NO: 189836 - DNA, 81 bp, Homo sapiens; identical to SEQ ID NO: 97225
  chr19:35367987-35368068
  hypo

SEQ ID NO: 189837 - DNA, 29 bp, Homo sapiens
  chr19:35394770-35394799
  hypo
gacagagcgagactccctctcaaaaataa

SEQ ID NO: 189838 - DNA, 121 bp, Homo sapiens
  chr19:35416318-35416439
  hypo
gctccgcagcaccggctctccttggactgccccagccaaactccgcgtccttctggtgggtggcctgcccgcgtgccagcgtctgtcatgtcttcttccgccaacatgttcctctggatgt

SEQ ID NO: 189839 - DNA, 559 bp, Homo sapiens; identical to SEQ ID NO: 131330
  chr19:35454463-35455022
  hypo

SEQ ID NO: 189840 - DNA, 35 bp, Homo sapiens; identical to SEQ ID NO: 97227
  chr19:35497191-35497226
  hypo

SEQ ID NO: 189841 - DNA, 140 bp, Homo sapiens; identical to SEQ ID NO: 97228
  chr19:35497759-35497899
  hypo

SEQ ID NO: 189842 - DNA, 36 bp, Homo sapiens; identical to SEQ ID NO: 97229
  chr19:35512755-35512791
  hypo

SEQ ID NO: 189843 - DNA, 89 bp, Homo sapiens; identical to SEQ ID NO: 97230
  chr19:35523453-35523542
  hypo

SEQ ID NO: 189844 - DNA, 30 bp, Homo sapiens
  chr19:35524526-35524556
  hypo
tcacctacaaccactcgggcgactacgagt

SEQ ID NO: 189845 - DNA, 30 bp, Homo sapiens
  chr19:35525079-35525109
  hypo
tggtggcgagggtggcggttcttactgttc

SEQ ID NO: 189846 - DNA, 22 bp, Homo sapiens
  chr19:35527937-35527959
  hypo
cgtatgagccaccacactgacc

SEQ ID NO: 189847 - DNA, 30 bp, Homo sapiens; identical to SEQ ID NO: 97232
  chr19:35550797-35550827
  hypo

SEQ ID NO: 189848 - DNA, 463 bp, Homo sapiens
  chr19:35551107-35551570
  hypo
gcccttggggaggccacgtcccctcaagctccccaggatggggccatgtactttcagaccccctagggcagggccaagcctgggctctggggacctgggctccagtcccctgtcgccgccccctgctgacccttgtcccacagactgtggccgcaggaagctgcccgtggaccgcatcgtgggaggccgggacaccagcttgggccggtggccgtggcaagtcagccttcgctatgatggagcacacctctgtgggggatccctgctctccggggactgggtgctgacagccgcccactgcttcccggagtgagtgccccccaatggcgctgatgatggggaggcagaggagcggagagacagtggggaggagggcggattgtgcccaggcaggtggccaccctccacccctttccctggtaggcggaaccgggtcctgtcccgatggcgagtgtttgccggt

SEQ ID NO: 189849 - DNA, 31 bp, Homo sapiens; identical to SEQ ID NO: 97234
  chr19:35566027-35566058
  hypo

SEQ ID NO: 189850 - DNA, 30 bp, Homo sapiens; identical to SEQ ID NO: 97235
  chr19:35571066-35571096
  hypo

SEQ ID NO: 189851 - DNA, 19 bp, Homo sapiens
  chr19:35582529-35582548
  hypo
gactctgtctcaaaaaata

SEQ ID NO: 189852 - DNA, 31 bp, Homo sapiens; identical to SEQ ID NO: 97237
  chr19:35587924-35587955
  hypo

SEQ ID NO: 189853 - DNA, 17 bp, Homo sapiens
  chr19:35589422-35589439
  hypo
aaaaaaaaaaaattaat

SEQ ID NO: 189854 - DNA, 112 bp, Homo sapiens
  chr19:35589856-35589968
  hypo
caactctgcgccctgcgctgcgcgttgcctgcccgcgtggcgagccagcctgggatgcagttacgtgctccttccctttcaccgcccccagctccaacgatggcctccccac

SEQ ID NO: 189855 - DNA, 31 bp, Homo sapiens; identical to SEQ ID NO: 97240
  chr19:35590624-35590655
  hypo

SEQ ID NO: 189856 - DNA, 33 bp, Homo sapiens; identical to SEQ ID NO: 97241
  chr19:35591099-35591132
  hypo

SEQ ID NO: 189857 - DNA, 251 bp, Homo sapiens
  chr19:35597195-35597446
  hypo
tcctagctcttgtgccgagcctgccctgcccgacagctgcctgacaccatgccaggatggctgccagtgtgacccaggctttgtgctcagtggcatggactgcgtgcccccaatccagtgcagctgctccatggggggcaggtaccaccacccggctggggaggccttctggactggggagcgctgtgagcaattctgccactgccaggcctccacccacgccgtgtgctgctccccgtcctcctgtgggc

SEQ ID NO: 189858 - DNA, 36 bp, Homo sapiens; identical to SEQ ID NO: 97242
  chr19:35599308-35599344
  hypo

SEQ ID NO: 189859 - DNA, 98 bp, Homo sapiens
  chr19:35599788-35599886
  hypo
aggtcagagaggtgacggggaccagatggtgggggacttatggggctagtgaggacttcgcttttgcctggagcgaggtgcgccgaggacagggctct

SEQ ID NO: 189860 - DNA, 30 bp, Homo sapiens
  chr19:35607193-35607223
  hypo
ataaacgcaggactccgcctggcagcccga

SEQ ID NO: 189861 - DNA, 145 bp, Homo sapiens
  chr19:35608830-35608975
  hypo
agcatttttgctgttcgtgaaatgaggacatagtggacgacgtcggggattgctggggggttaagtgagtgagaacacggcaaggtcagtgtgcactccagggcaaggtggaggaagtgccagctctcgctatcaaaattataac

SEQ ID NO: 189862 - DNA, 88 bp, Homo sapiens; identical to SEQ ID NO: 97244
  chr19:35613702-35613790
  hypo

SEQ ID NO: 189863 - DNA, 552 bp, Homo sapiens
  chr19:35615954-35616506
  hypo
gggcttaaggcctagacgtgtggctgatgaacgtggcccacggtcagcagctcacaggcgggccatcaccccaagtagggccaggagccagccaaggggccgtccaggggccccagccatgcccagagtcccgttggtggtctcaggcactgaggtcgatctcgtgatgctggtagatctgtgtggggcccttaaagcaagcagcaaagaggaagcgtctgccggccatagtgatgtgggcaaaggcacggggggccaccagggccggaggccccagctcctgcagtggctccaggagccccttgtcaggctcaaggcggaggacctggctgaaggcgaagtcgctgcctaggatggccagctggtccctggcgatgagcagtggctggaagacgtgggcaccgcgcgagggaagttgctgcagcagacgaaacatggagccgtcccagcgcatgacctgtgggggtgtggccagtgagggcctggggtcccgggggtctctgggggccgtggaacagcttggaagcagaagcctgtcggtcccaaaactcc

SEQ ID NO: 189864 - DNA, 423 bp, Homo sapiens; identical to SEQ ID NO: 97246
  chr19:35617131-35617554
  hypo

SEQ ID NO: 189865 - DNA, 116 bp, Homo sapiens; identical to SEQ ID NO: 97247
  chr19:35619188-35619304
  hypo

SEQ ID NO: 189866 - DNA, 62 bp, Homo sapiens; identical to SEQ ID NO: 97248
  chr19:35621940-35622002
  hypo

SEQ ID NO: 189867 - DNA, 30 bp, Homo sapiens; identical to SEQ ID NO: 97249
  chr19:35625481-35625511
  hypo

SEQ ID NO: 189868 - DNA, 30 bp, Homo sapiens; identical to SEQ ID NO: 97250
  chr19:35649040-35649070
  hypo

SEQ ID NO: 189869 - DNA, 42 bp, Homo sapiens; identical to SEQ ID NO: 97251
  chr19:35677473-35677515
  hypo

SEQ ID NO: 189870 - DNA, 262 bp, Homo sapiens; identical to SEQ ID NO: 56039
  chr19:35738723-35738985
  hypo

SEQ ID NO: 189871 - DNA, 30 bp, Homo sapiens; identical to SEQ ID NO: 97253
  chr19:35781374-35781404
  hypo

SEQ ID NO: 189872 - DNA, 30 bp, Homo sapiens
  chr19:35783995-35784025
  hypo
atgtctgcccgggcacgtgctcatcctcat

SEQ ID NO: 189873 - DNA, 138 bp, Homo sapiens
  chr19:35793375-35793513
  hypo
cgggacaatggtggccgtagagggggagacggtctctatcttgtgctccacacagagcaacccggaccctattctcaccatcttcaaggagaagcagatcctgtccacggtcatctacgagagcgagctgcagctgga

SEQ ID NO: 189874 - DNA, 31 bp, Homo sapiens; identical to SEQ ID NO: 97254
  chr19:35795098-35795129
  hypo

SEQ ID NO: 189875 - DNA, 202 bp, Homo sapiens
  chr19:35797930-35798132
  hypo
ccggcagggtgtcggcgttccgccgacatccaggtcgaacactttgtcaccagagcaccagtggggctgtcttgagtggaagtgctttgaaaaagttttatgtctgtcggttcaggttcgctgttattaatgtactccgtggcgtgttagctggttaacgctatagcaagcatattgcagctctgcccgaacaggacttttt

SEQ ID NO: 189876 - DNA, 31 bp, Homo sapiens; identical to SEQ ID NO: 97256
  chr19:35804027-35804058
  hypo

SEQ ID NO: 189877 - DNA, 30 bp, Homo sapiens
  chr19:35829034-35829064
  hypo
cctcacccctccactcgcctctgccccctc

SEQ ID NO: 189878 - DNA, 37 bp, Homo sapiens
  chr19:35835484-35835521
  hypo
gtcacaggctctgggcgtgccacgtctgtgggaaaag

SEQ ID NO: 189879 - DNA, 59 bp, Homo sapiens
  chr19:35835739-35835798
  hypo
gagaccatcggcaggcgagtggctgtgggactcgggtcctgcctcgccatcctcatcct

SEQ ID NO: 189880 - DNA, 185 bp, Homo sapiens; identical to SEQ ID NO: 32480
  chr19:35842416-35842601
  hypo

SEQ ID NO: 189881 - DNA, 415 bp, Homo sapiens; identical to SEQ ID NO: 97260
  chr19:35843038-35843453
  hypo

SEQ ID NO: 189882 - DNA, 26 bp, Homo sapiens
  chr19:35888382-35888408
  hypo
aaaaatttgttttctcggctgggcgt

SEQ ID NO: 189883 - DNA, 31 bp, Homo sapiens; identical to SEQ ID NO: 32481
  chr19:35889405-35889436
  hypo

SEQ ID NO: 189884 - DNA, 30 bp, Homo sapiens
  chr19:35904700-35904730
  hypo
aggcattgtgttaagcgaggaatggaagtt

SEQ ID NO: 189885 - DNA, 439 bp, Homo sapiens
  chr19:35940915-35941354
  hypo
ggcgggcatcagcatcgagcgctacctgggagtggctttccccgtgcagtacaagctctcccgccggcctctgtatggagtgattgcagctctggtggcctgggttatgtcctttggtcactgcaccatcgtgatcatcgttcaatacttgaacacgactgagcaggtcagaagtggcaatgaaattacctgctacgagaacttcaccgataaccagttggacgtggtgctgcccgtgcggctggagctgtgcctggtgctcttcttcatccccatggcagtcaccatcttctgctactggcgttttgtgtggatcatgctctcccagccccttgtgggggcccagaggcggcgccgagccgtggggctggctgtggtgacgctgctcaatttcctggtgtgcttcggaccttacaacgtgtcccacctggtggggtat

SEQ ID NO: 189886 - DNA, 30 bp, Homo sapiens
  chr19:35982985-35983015
  hypo
tgcaatgcacggtggcggtggccctgggtg

SEQ ID NO: 189887 - DNA, 97 bp, Homo sapiens
  chr19:35983447-35983544
  hypo
ctacgatttgacaggcgggtgaggggacccagtgccagttttggcctgggtgatctagagcatcggtcaatccaacgctgtcttctgttttgctcta

SEQ ID NO: 189888 - DNA, 30 bp, Homo sapiens
  chr19:35984929-35984959
  hypo
gctttggatgaatcacggagggttaatgga

SEQ ID NO: 189889 - DNA, 81 bp, Homo sapiens
  chr19:35991455-35991536
  hypo
tttctgcagtgatgacgcgtccgcaccctgaaaggaagaaggggccacagttcgtgcctccgcagtcgtgcgggcattgcc

SEQ ID NO: 189890 - DNA, 30 bp, Homo sapiens
  chr19:36037575-36037605
  hypo
gttcatgaaggccagcgtggatgtggcaga

SEQ ID NO: 189891 - DNA, 186 bp, Homo sapiens
  chr19:36041160-36041346
  hypo
gggccctcaggcagccgtccagcctggactggagtcctaagaacagaaacaccctccagaagcggtcagctgtactccctgtcagagccccaccgccaccacaggtggcggctttcccgaggccagcccagaggactgcccaggcgctgctgctccaggaggtgcgaaccttgggaatgggggagg

SEQ ID NO: 189892 - DNA, 513 bp, Homo sapiens
  chr19:36042034-36042547
  hypo
caggccattaggaattggggacgtgatggaaatcaggatactgtgggtcaaagtaggtcagatgtcagcagcagcagggaggtgttctacacactgaacactggagtggcccgggcctctcagcaccacccctttagtgaaatgtggagggggccgtggggggagttattggccagttagaaaggtttttttggcatgtcaccatctggcactggcacccgctggcatttgccggctgttctaaaccacagtcaggatctgatgggagttgggaccaggggttggagggcaggaagagggccagccagggacacctgaagaagccttgctggaaggcagagagacggcgcgtcttgcggatgaggacatcggcgatctggcacacctcaatgctgatgaagaacacggtgtagcaggtgtactgctggtacaggcgctgcccgaatgtctgcaggccaggggcaaacggaaacagcctgagtccagcctgagtcccggcggagagcctctgca

SEQ ID NO: 189893 - DNA, 818 bp, Homo sapiens; identical to SEQ ID NO: 131348
  chr19:36048549-36049367
  hypo

SEQ ID NO: 189894 - DNA, 135 bp, Homo sapiens; identical to SEQ ID NO: 131349
  chr19:36049396-36049531
  hypo

SEQ ID NO: 189895 - DNA, 35 bp, Homo sapiens; identical to SEQ ID NO: 97267
  chr19:36115284-36115319
  hypo

SEQ ID NO: 189896 - DNA, 136 bp, Homo sapiens; identical to SEQ ID NO: 12281
  chr19:36123861-36123997
  hypo

SEQ ID NO: 189897 - DNA, 30 bp, Homo sapiens; identical to SEQ ID NO: 97269
  chr19:36125016-36125046
  hypo

SEQ ID NO: 189898 - DNA, 30 bp, Homo sapiens
  chr19:36128247-36128277
  hypo
atgaatggtgggtgcggcctcccctgggaa

SEQ ID NO: 189899 - DNA, 30 bp, Homo sapiens; identical to SEQ ID NO: 32486
  chr19:36128478-36128508
  hypo

SEQ ID NO: 189900 - DNA, 18 bp, Homo sapiens
  chr19:36132081-36132099
  hypo
aggcgtgaatcaccgcgc

SEQ ID NO: 189901 - DNA, 194 bp, Homo sapiens; identical to SEQ ID NO: 97271
  chr19:36156234-36156428
  hypo

SEQ ID NO: 189902 - DNA, 77 bp, Homo sapiens
  chr19:36157073-36157150
  hypo
tttggatcttgctcctattcccaggaaggcccatgtcctagcaagagagacaccaggtggtgcgcacgcccctccac

SEQ ID NO: 189903 - DNA, 230 bp, Homo sapiens
  chr19:36157518-36157748
  hypo
agtgactgccccaccggagcccgggtgtcctcttgtgcaaaatgcctccccaccagggctgtgggtacatcagtaccagcctgggccccgcagagagctggagcaacccctcgaagccagggtgtggctcagagatggggggtccggctggccctttacgctcctggcctcatccctgctcatgtgtcccaggatgatggcgtctgcggcagcagcggaggccgagaagg

SEQ ID NO: 189904 - DNA, 121 bp, Homo sapiens; identical to SEQ ID NO: 97273
  chr19:36167373-36167494
  hypo

SEQ ID NO: 189905 - DNA, 79 bp, Homo sapiens; identical to SEQ ID NO: 97274
  chr19:36172745-36172824
  hypo

SEQ ID NO: 189906 - DNA, 89 bp, Homo sapiens; identical to SEQ ID NO: 97275
  chr19:36199996-36200085
  hypo

SEQ ID NO: 189907 - DNA, 132 bp, Homo sapiens; identical to SEQ ID NO: 97276
  chr19:36210796-36210928
  hypo

SEQ ID NO: 189908 - DNA, 30 bp, Homo sapiens
  chr19:36214007-36214037
  hypo
tggcccacacaccccggcgctcactgccct

SEQ ID NO: 189909 - DNA, 110 bp, Homo sapiens
  chr19:36220087-36220197
  hypo
agaacgagtggacacacgtcaactgtgccatctggtcggcggaagtcttcgaggagaacgacggctccctcaagaatgtgcatgctgctgtggcccgagggaggcagatg

SEQ ID NO: 189910 - DNA, 552 bp, Homo sapiens
  chr19:36221472-36222024
  hypo
tgatctctcggactgcgagggacggctcttccccattggctaccagtgagcggtcggggtgatccatggggccaggggactccatagctggatcccatttcccaagcatcctaaccgtcttatcccacatgccaggtgctcccgtctgtactggagcacagtggatgctcggaggcgctgctggtatcggtgccgaattctggagtatcggccatgggggccgagggaagagccagctcacctggaggctgcagaggagaaccagaccattgtgcacagccccgccccttcctcaggtgtggctttggctctgtcttcttcctgaataccgctctccctaaacaaacctacagatctctgttccccgctcccttttggaaagtccaggaggcttgcttttgcttcagttgctgtaatgtaacggcagctcgcttactgccatgccttgtgtgccaggggctgtgcccggcttttcatgggaagtgaggtggggagagcggcacgctgcctacttgaggtggggtactggcttttggacgactgcagggagta

SEQ ID NO: 189911 - DNA, 256 bp, Homo sapiens; identical to SEQ ID NO: 97278
  chr19:36222350-36222606
  hypo

SEQ ID NO: 189912 - DNA, 140 bp, Homo sapiens
  chr19:36229126-36229266
  hypo
gaagcgagcctgtccgcggggacagagcacctgatctccccacctcatccctgcagggcatcgggtgctatatgttccgcatggatgactttgatgtagtggacgccacgatgcatggcaatgccgcccgcttcatcaac

SEQ ID NO: 189913 - DNA, 30 bp, Homo sapiens
  chr19:36245310-36245340
  hypo
atcggaaccagcttcgttactcagaaagca

SEQ ID NO: 189914 - DNA, 34 bp, Homo sapiens; identical to SEQ ID NO: 97280
  chr19:36260604-36260638
  hypo

SEQ ID NO: 189915 - DNA, 78 bp, Homo sapiens; identical to SEQ ID NO: 97281
  chr19:36262373-36262451
  hypo

SEQ ID NO: 189916 - DNA, 30 bp, Homo sapiens
  chr19:36268440-36268470
  hypo
ggtgtgtggagcgcccggggctctggaccc

SEQ ID NO: 189917 - DNA, 30 bp, Homo sapiens
  chr19:36268752-36268782
  hypo
gcggctggctgactgcgcccatttccacta

SEQ ID NO: 189918 - DNA, 30 bp, Homo sapiens; identical to SEQ ID NO: 97282
  chr19:36269372-36269402
  hypo

SEQ ID NO: 189919 - DNA, 41 bp, Homo sapiens
  chr19:36275618-36275659
  hypo
ccagagccgctgccctcgctggctgccgggagctgcctcct

SEQ ID NO: 189920 - DNA, 30 bp, Homo sapiens
  chr19:36281924-36281954
  hypo
cgcagccagcgctggcgtaggaggcgcctg

SEQ ID NO: 189921 - DNA, 30 bp, Homo sapiens; identical to SEQ ID NO: 32489
  chr19:36297655-36297685
  hypo

SEQ ID NO: 189922 - DNA, 28 bp, Homo sapiens
  chr19:36308811-36308839
  hypo
agactccgtctcaagaaaaaaaaaaaaa

SEQ ID NO: 189923 - DNA, 868 bp, Homo sapiens; identical to SEQ ID NO: 131364
  chr19:36336290-36337158
  hypo

SEQ ID NO: 189924 - DNA, 431 bp, Homo sapiens; identical to SEQ ID NO: 131365
  chr19:36347683-36348114
  hypo

SEQ ID NO: 189925 - DNA, 31 bp, Homo sapiens; identical to SEQ ID NO: 97289
  chr19:36362341-36362372
  hypo

SEQ ID NO: 189926 - DNA, 80 bp, Homo sapiens; identical to SEQ ID NO: 32491
  chr19:36388610-36388690
  hypo

SEQ ID NO: 189927 - DNA, 216 bp, Homo sapiens; identical to SEQ ID NO: 97291
  chr19:36435528-36435744
  hypo

SEQ ID NO: 189928 - DNA, 250 bp, Homo sapiens; identical to SEQ ID NO: 131379
  chr19:36478130-36478380
  hypo

SEQ ID NO: 189929 - DNA, 30 bp, Homo sapiens; identical to SEQ ID NO: 131380
  chr19:36478594-36478624
  hypo

SEQ ID NO: 189930 - DNA, 83 bp, Homo sapiens; identical to SEQ ID NO: 97292
  chr19:36500939-36501022
  hypo

SEQ ID NO: 189931 - DNA, 321 bp, Homo sapiens; identical to SEQ ID NO: 97293
  chr19:36510003-36510324
  hypo

SEQ ID NO: 189932 - DNA, 31 bp, Homo sapiens; identical to SEQ ID NO: 97294
  chr19:36525680-36525711
  hypo

SEQ ID NO: 189933 - DNA, 30 bp, Homo sapiens; identical to SEQ ID NO: 32493
  chr19:36531714-36531744
  hypo

SEQ ID NO: 189934 - DNA, 31 bp, Homo sapiens; identical to SEQ ID NO: 12288
  chr19:36544541-36544572
  hypo

SEQ ID NO: 189935 - DNA, 37 bp, Homo sapiens; identical to SEQ ID NO: 97297
  chr19:36562068-36562105
  hypo

SEQ ID NO: 189936 - DNA, 637 bp, Homo sapiens; identical to SEQ ID NO: 97298
  chr19:36592528-36593165
  hypo

SEQ ID NO: 189937 - DNA, 30 bp, Homo sapiens
  chr19:36595971-36596001
  hypo
ttaggtattttaagcgaataaactgacagc

SEQ ID NO: 189938 - DNA, 30 bp, Homo sapiens; identical to SEQ ID NO: 97299
  chr19:36602530-36602560
  hypo

SEQ ID NO: 189939 - DNA, 350 bp, Homo sapiens
  chr19:36604428-36604778
  hypo
aaggtgcatggacagccggccagctacgcttaccgtgagcgccgcgagaagctgcacgtgtgcgaggactgcggcttcaccagctcccggcccgacacctacgcacagcaccgcgccctgcaccgcgcagcctgatacggtgtgccagcgtcctccccacgaggcaaataaacacagaaaactcacgcatggaatctggtgtttattacactcgggggagagaggaggtcactcggtccagcggtggccgcagtgtggggctgtgcacacgtagtaaaggcgcatggcgtcctggcagaaatgatgcatggttaggaaggatttggacccagcagcgccttaccccaaaa

SEQ ID NO: 189940 - DNA, 30 bp, Homo sapiens
  chr19:36608247-36608277
  hypo
ttgttttgttttgttcgagacagagttttg

SEQ ID NO: 189941 - DNA, 30 bp, Homo sapiens; identical to SEQ ID NO: 97301
  chr19:36612356-36612386
  hypo

SEQ ID NO: 189942 - DNA, 30 bp, Homo sapiens; identical to SEQ ID NO: 97302
  chr19:36612616-36612646
  hypo

SEQ ID NO: 189943 - DNA, 81 bp, Homo sapiens; identical to SEQ ID NO: 32496
  chr19:36632701-36632782
  hypo

SEQ ID NO: 189944 - DNA, 30 bp, Homo sapiens; identical to SEQ ID NO: 97304
  chr19:36640798-36640828
  hypo

SEQ ID NO: 189945 - DNA, 355 bp, Homo sapiens; identical to SEQ ID NO: 97305
  chr19:36641048-36641403
  hypo

SEQ ID NO: 189946 - DNA, 36 bp, Homo sapiens; identical to SEQ ID NO: 97306
  chr19:36645414-36645450
  hypo

SEQ ID NO: 189947 - DNA, 28 bp, Homo sapiens
  chr19:36656271-36656299
  hypo
agaaaagatatctttcttggccgggcgc

SEQ ID NO: 189948 - DNA, 30 bp, Homo sapiens; identical to SEQ ID NO: 32498
  chr19:36673714-36673744
  hypo

SEQ ID NO: 189949 - DNA, 33 bp, Homo sapiens; identical to SEQ ID NO: 97309
  chr19:36707254-36707287
  hypo

SEQ ID NO: 189950 - DNA, 32 bp, Homo sapiens
  chr19:36707526-36707558
  hypo
tccagcctggacaagagcgagattccgtctca

SEQ ID NO: 189951 - DNA, 176 bp, Homo sapiens; identical to SEQ ID NO: 97311
  chr19:36746787-36746963
  hypo

SEQ ID NO: 189952 - DNA, 45 bp, Homo sapiens
  chr19:36750230-36750275
  hypo
attcctgcacaggccctgtctcgcaggttttcaggtgtgcttggc

SEQ ID NO: 189953 - DNA, 187 bp, Homo sapiens; identical to SEQ ID NO: 97312
  chr19:36853753-36853940
  hypo

SEQ ID NO: 189954 - DNA, 31 bp, Homo sapiens; identical to SEQ ID NO: 97313
  chr19:36858741-36858772
  hypo

SEQ ID NO: 189955 - DNA, 33 bp, Homo sapiens; identical to SEQ ID NO: 32499
  chr19:36870582-36870615
  hypo

SEQ ID NO: 189956 - DNA, 31 bp, Homo sapiens; identical to SEQ ID NO: 97315
  chr19:36871043-36871074
  hypo

SEQ ID NO: 189957 - DNA, 26 bp, Homo sapiens
  chr19:36901690-36901716
  hypo
ccgcacccacccggcctgttttatat

SEQ ID NO: 189958 - DNA, 270 bp, Homo sapiens; identical to SEQ ID NO: 12295
  chr19:36909078-36909348
  hypo

SEQ ID NO: 189959 - DNA, 319 bp, Homo sapiens; identical to SEQ ID NO: 12296
  chr19:36909623-36909942
  hypo

SEQ ID NO: 189960 - DNA, 22 bp, Homo sapiens
  chr19:36920630-36920652
  hypo
cgtctcaaaaaaaaaaaaaaaa

SEQ ID NO: 189961 - DNA, 94 bp, Homo sapiens; identical to SEQ ID NO: 97319
  chr19:36928985-36929079
  hypo

SEQ ID NO: 189962 - DNA, 29 bp, Homo sapiens
  chr19:36931792-36931821
  hypo
aagactccgtctcaaaacaacaacaacaa

SEQ ID NO: 189963 - DNA, 27 bp, Homo sapiens
  chr19:36952281-36952308
  hypo
aaaactcttggctggacgcagtggctt

SEQ ID NO: 189964 - DNA, 31 bp, Homo sapiens; identical to SEQ ID NO: 97322
  chr19:36957676-36957707
  hypo

SEQ ID NO: 189965 - DNA, 31 bp, Homo sapiens; identical to SEQ ID NO: 32504
  chr19:36970716-36970747
  hypo

SEQ ID NO: 189966 - DNA, 28 bp, Homo sapiens
  chr19:36971640-36971668
  hypo
aagcttcggggccaggcgtggtggctta

SEQ ID NO: 189967 - DNA, 17 bp, Homo sapiens
  chr19:37020551-37020568
  hypo
ggagtctcgcactgtcg

SEQ ID NO: 189968 - DNA, 30 bp, Homo sapiens
  chr19:37067327-37067357
  hypo
ttggatattttggccgggcgcggtggctca

SEQ ID NO: 189969 - DNA, 23 bp, Homo sapiens
  chr19:37093228-37093251
  hypo
tgagccaccgcgcctggccacct

SEQ ID NO: 189970 - DNA, 29 bp, Homo sapiens
  chr19:37093854-37093883
  hypo
cgtgatgcggccaaacctcatgcaagaac

SEQ ID NO: 189971 - DNA, 78 bp, Homo sapiens; identical to SEQ ID NO: 97327
  chr19:37103347-37103425
  hypo

SEQ ID NO: 189972 - DNA, 147 bp, Homo sapiens
  chr19:37114161-37114308
  hypo
ataacagtgtgtaaacgtatactgagaagattttagagaaaatcgtcaataaaatgttgacctccaaaaacatgagttttagttgggaaagcaatactgtattatcaaattgaggactttacatagaatgatcgtgttaaaatctta

SEQ ID NO: 189973 - DNA, 20 bp, Homo sapiens
  chr19:37124247-37124267
  hypo
gacttttcaaaaccctagat

SEQ ID NO: 189974 - DNA, 31 bp, Homo sapiens; identical to SEQ ID NO: 97329
  chr19:37128452-37128483
  hypo

SEQ ID NO: 189975 - DNA, 380 bp, Homo sapiens; identical to SEQ ID NO: 32505
  chr19:37159073-37159453
  hypo

SEQ ID NO: 189976 - DNA, 31 bp, Homo sapiens; identical to SEQ ID NO: 97331
  chr19:37173450-37173481
  hypo

SEQ ID NO: 189977 - DNA, 37 bp, Homo sapiens; identical to SEQ ID NO: 32506
  chr19:37179404-37179441
  hypo

SEQ ID NO: 189978 - DNA, 163 bp, Homo sapiens; identical to SEQ ID NO: 56083
  chr19:37262837-37263000
  hypo

SEQ ID NO: 189979 - DNA, 1113 bp, Homo sapiens; identical to SEQ ID NO: 56084
  chr19:37263315-37264428
  hypo

SEQ ID NO: 189980 - DNA, 156 bp, Homo sapiens; identical to SEQ ID NO: 56085
  chr19:37266862-37267018
  hypo

SEQ ID NO: 189981 - DNA, 31 bp, Homo sapiens; identical to SEQ ID NO: 97336
  chr19:37270682-37270713
  hypo

SEQ ID NO: 189982 - DNA, 39 bp, Homo sapiens; identical to SEQ ID NO: 97337
  chr19:37272528-37272567
  hypo

SEQ ID NO: 189983 - DNA, 30 bp, Homo sapiens; identical to SEQ ID NO: 56090
  chr19:37289216-37289246
  hypo

SEQ ID NO: 189984 - DNA, 100 bp, Homo sapiens; identical to SEQ ID NO: 97339
  chr19:37293600-37293700
  hypo

SEQ ID NO: 189985 - DNA, 622 bp, Homo sapiens; identical to SEQ ID NO: 97340
  chr19:37501126-37501748
  hypo

SEQ ID NO: 189986 - DNA, 121 bp, Homo sapiens; identical to SEQ ID NO: 97341
  chr19:37503358-37503479
  hypo

SEQ ID NO: 189987 - DNA, 505 bp, Homo sapiens; identical to SEQ ID NO: 32508
  chr19:37504005-37504510
  hypo

SEQ ID NO: 189988 - DNA, 328 bp, Homo sapiens; identical to SEQ ID NO: 32509
  chr19:37505283-37505611
  hypo

SEQ ID NO: 189989 - DNA, 30 bp, Homo sapiens; identical to SEQ ID NO: 97344
  chr19:37528223-37528253
  hypo

SEQ ID NO: 189990 - DNA, 683 bp, Homo sapiens; identical to SEQ ID NO: 97345
  chr19:37546261-37546944
  hypo

SEQ ID NO: 189991 - DNA, 341 bp, Homo sapiens
  chr19:37547633-37547974
  hypo
ctgaggaggaatccaaagacccgagcaggcgccctgaagctcctcctccaccggtaggagttggctcaaggaggtcctgaggacaggactccgggagtgcggccctggggtgcctacagccctctctcccacgtcgccgcctaccggaccggggatccagccaccgccagggttgcagccaaaggcccctgcctctgcgctgccgccattgcttaaaggggcttcagcctgacttccagcagcggagcgcgagtcggcctagccaatgcgcatgcgcgaagcgccagccaattctcccatcacagtgagtcccacggttgcctgagtaaccactccctgag

SEQ ID NO: 189992 - DNA, 161 bp, Homo sapiens
  chr19:37548033-37548194
  hypo
gcctgacctctccacgggggcgacaggaaggtctccggatgccaggagtctccaaggactgaccagggtgacaaaaccacaggcagagtccaggggaagcagtgcggcatccaagcctcaggcctgcccggacggggatcgggtgagcctccccaaaactt

SEQ ID NO: 189993 - DNA, 217 bp, Homo sapiens; identical to SEQ ID NO: 97346
  chr19:37550816-37551033
  hypo

SEQ ID NO: 189994 - DNA, 37 bp, Homo sapiens; identical to SEQ ID NO: 97347
  chr19:37551264-37551301
  hypo

SEQ ID NO: 189995 - DNA, 215 bp, Homo sapiens
  chr19:37551900-37552115
  hypo
tcaaattgtggcttggactcacgcacaggccccctcctggttcccaggtgttctatgattttcgttggcatcgatggaaaggtcacctgtgccccccttcctccggaacatgcctggacaccattgtttgtttcgccatcgccccgtatgccctctgtgacacacattcacagcatctgctcttgaatacaccagtgccacgtgtggtcacactg

SEQ ID NO: 189996 - DNA, 755 bp, Homo sapiens; identical to SEQ ID NO: 131430
  chr19:37568996-37569751
  hypo

SEQ ID NO: 189997 - DNA, 41 bp, Homo sapiens
  chr19:37633552-37633593
  hypo
gattataggcatgagccaccgcacccagcccattttaattt

SEQ ID NO: 189998 - DNA, 98 bp, Homo sapiens; identical to SEQ ID NO: 97349
  chr19:37666950-37667048
  hypo

SEQ ID NO: 189999 - DNA, 37 bp, Homo sapiens; identical to SEQ ID NO: 97350
  chr19:37674959-37674996
  hypo

SEQ ID NO: 190000 - DNA, 37 bp, Homo sapiens; identical to SEQ ID NO: 97351
  chr19:37682219-37682256
  hypo

SEQ ID NO: 190001 - DNA, 31 bp, Homo sapiens; identical to SEQ ID NO: 97352
  chr19:37693190-37693221
  hypo

SEQ ID NO: 190002 - DNA, 31 bp, Homo sapiens; identical to SEQ ID NO: 32510
  chr19:37699579-37699610
  hypo

SEQ ID NO: 190003 - DNA, 86 bp, Homo sapiens; identical to SEQ ID NO: 97354
  chr19:37702064-37702150
  hypo

SEQ ID NO: 190004 - DNA, 44 bp, Homo sapiens; identical to SEQ ID NO: 32511
  chr19:37702590-37702634
  hypo

SEQ ID NO: 190005 - DNA, 31 bp, Homo sapiens; identical to SEQ ID NO: 97356
  chr19:37725643-37725674
  hypo

SEQ ID NO: 190006 - DNA, 24 bp, Homo sapiens
  chr19:37735566-37735590
  hypo
cactgcggccggtctttttatttt

SEQ ID NO: 190007 - DNA, 43 bp, Homo sapiens
  chr19:37741707-37741750
  hypo
aagcttatgaattgtttctttcgggaatcttgcatttaatatt

SEQ ID NO: 190008 - DNA, 20 bp, Homo sapiens
  chr19:37818354-37818374
  hypo
tttcattaaactaatacgga

SEQ ID NO: 190009 - DNA, 18 bp, Homo sapiens
  chr19:37829030-37829048
  hypo
tctcttttctttgaggcg

SEQ ID NO: 190010 - DNA, 38 bp, Homo sapiens; identical to SEQ ID NO: 97360
  chr19:37831816-37831854
  hypo

SEQ ID NO: 190011 - DNA, 242 bp, Homo sapiens
  chr19:37853602-37853844
  hypo
gtgcagggaatgtgggcgaggctttacgtggaagtcaaacctgatcacacatcagaggacacactcaggggagaaaccttatgtgtgcaaggattgtggacgaggctttacttggaagtcgaacctctttacacatcagcggacacactcagggctcaagccttatgtgtgcaaggaatgtgggcagagctttagcctgaagtcaaacctcattacccaccagagggcgcacactggggaga

SEQ ID NO: 190012 - DNA, 31 bp, Homo sapiens; identical to SEQ ID NO: 97362
  chr19:37854102-37854133
  hypo

SEQ ID NO: 190013 - DNA, 896 bp, Homo sapiens; identical to SEQ ID NO: 12318
  chr19:37959873-37960769
  hypo

SEQ ID NO: 190014 - DNA, 44 bp, Homo sapiens; identical to SEQ ID NO: 97364
  chr19:37995766-37995810
  hypo

SEQ ID NO: 190015 - DNA, 27 bp, Homo sapiens
  chr19:38009872-38009899
  hypo
aaaaattctgatagggctgggcgcggt

SEQ ID NO: 190016 - DNA, 26 bp, Homo sapiens
  chr19:38030890-38030916
  hypo
aaagaaaacttctgctgggtgcggtg

SEQ ID NO: 190017 - DNA, 30 bp, Homo sapiens; identical to SEQ ID NO: 32514
  chr19:38040325-38040355
  hypo

SEQ ID NO: 190018 - DNA, 142 bp, Homo sapiens; identical to SEQ ID NO: 97368
  chr19:38069704-38069846
  hypo

SEQ ID NO: 190019 - DNA, 18 bp, Homo sapiens
  chr19:38124062-38124080
  hypo
ctccgtctcaaaaaaaaa

SEQ ID NO: 190020 - DNA, 24 bp, Homo sapiens
  chr19:38141042-38141066
  hypo
caggcttttgctctgtcgctcagg

SEQ ID NO: 190021 - DNA, 33 bp, Homo sapiens; identical to SEQ ID NO: 97371
  chr19:38172705-38172738
  hypo

SEQ ID NO: 190022 - DNA, 28 bp, Homo sapiens
  chr19:38180496-38180524
  hypo
ggcttttccctagcacacccccgccttt

SEQ ID NO: 190023 - DNA, 28 bp, Homo sapiens
  chr19:38180763-38180791
  hypo
gtgagccgagatcatgccactgcactcc

SEQ ID NO: 190024 - DNA, 260 bp, Homo sapiens; identical to SEQ ID NO: 12321
  chr19:38182699-38182959
  hypo

SEQ ID NO: 190025 - DNA, 370 bp, Homo sapiens; identical to SEQ ID NO: 56111
  chr19:38183111-38183481
  hypo

SEQ ID NO: 190026 - DNA, 36 bp, Homo sapiens; identical to SEQ ID NO: 97376
  chr19:38185143-38185179
  hypo

SEQ ID NO: 190027 - DNA, 509 bp, Homo sapiens
  chr19:38187526-38188035
  hypo
gcagctggaggagcacggactgccctgccggcaggcaggtgatgttccgagagcatgagagctggtatgcaatgtcttctgcagcttccagcttgcacagctcgctctggccgtcccctgcagtggccagtgagttggcgatcagctcagctgccttggagtcaccctcagcagagatgatggccgccttttccaccacaaatctggcgctctctgcttcctggggggccacctgtctgttaactccttcaagaaggtcagatgtgtcaaagacacgtcgtccagaatgagcccaaaggtggctgctcactccataaggttgttgctcacctggctggagaccagctccctctgggtgattagttctccagcatcaaagcgagccaccagtgacttgaggatctccgtggtaatgaacggcagcacacactcatcgtagtcctctccaatgctggtgaagatgcgaggaagctggctagtgatgggccggaagaggatgcacagtgtga

SEQ ID NO: 190028 - DNA, 30 bp, Homo sapiens
  chr19:38204687-38204717
  hypo
ttaaaaaggaaataacgatagaagtacaca

SEQ ID NO: 190029 - DNA, 27 bp, Homo sapiens
  chr19:38204927-38204954
  hypo
acgtatgcacccagtcgggcgcagtgg

SEQ ID NO: 190030 - DNA, 71 bp, Homo sapiens; identical to SEQ ID NO: 12323
  chr19:38210086-38210157
  hypo

SEQ ID NO: 190031 - DNA, 620 bp, Homo sapiens; identical to SEQ ID NO: 131447
  chr19:38210326-38210946
  hypo

SEQ ID NO: 190032 - DNA, 30 bp, Homo sapiens
  chr19:38211288-38211318
  hypo
aaatatttaatagtccgaatttcctgtttc

SEQ ID NO: 190033 - DNA, 383 bp, Homo sapiens
  chr19:38221767-38222150
  hypo
atatgagcatgtagatcacaacgaatgatcacactgacactacagacacaatgaatgatcacgctgacactaaagacacaacaaatgatcacgctgacactacagacacaatgatgacgctgacactacagacacaatgaatgatcacgctgacactacagacacaacgaatgatcacgctgacactacagacacaacgaatgatcacgctgacactaaagacacaacaaatgatcacgctgacactacagacacaatgttcacgctgacactacagacacaacgaatgatcacgctgacactacagacacaacgaatgatcacgctgacactacagaactttggctgacaatgcataatgcgtgatgctccttagtttggaa

SEQ ID NO: 190034 - DNA, 22 bp, Homo sapiens
  chr19:38222906-38222928
  hypo
ctgtgcccggcaaaaattaact

SEQ ID NO: 190035 - DNA, 83 bp, Homo sapiens; identical to SEQ ID NO: 97381
  chr19:38273673-38273756
  hypo

SEQ ID NO: 190036 - DNA, 93 bp, Homo sapiens; identical to SEQ ID NO: 32519
  chr19:38287059-38287152
  hypo

SEQ ID NO: 190037 - DNA, 96 bp, Homo sapiens
  chr19:38299438-38299534
  hypo
cttttgtgtgtgtgttttaagcggaaacctacactctcaaaagcagaacgttcactttttaaaaccatctcggctgggcgcggtggctcacgcctg

SEQ ID NO: 190038 - DNA, 103 bp, Homo sapiens; identical to SEQ ID NO: 32520
  chr19:38309038-38309141
  hypo

SEQ ID NO: 190039 - DNA, 277 bp, Homo sapiens; identical to SEQ ID NO: 97384
  chr19:38345147-38345424
  hypo

SEQ ID NO: 190040 - DNA, 115 bp, Homo sapiens; identical to SEQ ID NO: 32521
  chr19:38347217-38347332
  hypo

SEQ ID NO: 190041 - DNA, 35 bp, Homo sapiens
  chr19:38348719-38348754
  hypo
gtgttagccatcgcgcccagcctactttctgatct

SEQ ID NO: 190042 - DNA, 31 bp, Homo sapiens; identical to SEQ ID NO: 97386
  chr19:38364519-38364550
  hypo

SEQ ID NO: 190043 - DNA, 98 bp, Homo sapiens; identical to SEQ ID NO: 97387
  chr19:38383007-38383105
  hypo

SEQ ID NO: 190044 - DNA, 58 bp, Homo sapiens; identical to SEQ ID NO: 56118
  chr19:38398220-38398278
  hypo

SEQ ID NO: 190045 - DNA, 31 bp, Homo sapiens; identical to SEQ ID NO: 56119
  chr19:38417473-38417504
  hypo

SEQ ID NO: 190046 - DNA, 30 bp, Homo sapiens
  chr19:38436152-38436182
  hypo
aggtgtgagccaccgcgcccagccagctat

SEQ ID NO: 190047 - DNA, 195 bp, Homo sapiens; identical to SEQ ID NO: 32522
  chr19:38446270-38446465
  hypo

SEQ ID NO: 190048 - DNA, 80 bp, Homo sapiens
  chr19:38472267-38472347
  hypo
agtattgtcagatgacgcagtgccagtggtagcagcgtcgccatcatttcagcagcagtgcccttcgttagctgtaccac

SEQ ID NO: 190049 - DNA, 79 bp, Homo sapiens; identical to SEQ ID NO: 97392
  chr19:38480527-38480606
  hypo

SEQ ID NO: 190050 - DNA, 340 bp, Homo sapiens; identical to SEQ ID NO: 97393
  chr19:38481032-38481372
  hypo

SEQ ID NO: 190051 - DNA, 30 bp, Homo sapiens
  chr19:38484392-38484422
  hypo
gatgttgtcttgccacggggacaggtttcc

SEQ ID NO: 190052 - DNA, 197 bp, Homo sapiens; identical to SEQ ID NO: 97394
  chr19:38500326-38500523
  hypo

SEQ ID NO: 190053 - DNA, 30 bp, Homo sapiens; identical to SEQ ID NO: 97395
  chr19:38553592-38553622
  hypo

SEQ ID NO: 190054 - DNA, 30 bp, Homo sapiens
  chr19:38554346-38554376
  hypo
ccacgggagcaggcccgcaggctgggtcat

SEQ ID NO: 190055 - DNA, 432 bp, Homo sapiens; identical to SEQ ID NO: 97396
  chr19:38564441-38564873
  hypo

SEQ ID NO: 190056 - DNA, 43 bp, Homo sapiens; identical to SEQ ID NO: 97397
  chr19:38568580-38568623
  hypo

SEQ ID NO: 190057 - DNA, 43 bp, Homo sapiens; identical to SEQ ID NO: 32527
  chr19:38572015-38572058
  hypo

SEQ ID NO: 190058 - DNA, 143 bp, Homo sapiens; identical to SEQ ID NO: 97399
  chr19:38572719-38572862
  hypo

SEQ ID NO: 190059 - DNA, 141 bp, Homo sapiens
  chr19:38582274-38582415
  hypo
ctgtgttctggccgccgcactcggctgcctctgggttttgactaagtcagcttagactgcacactggacccactcatgagttaggagctcaaccaactcagtgctagcgtttgtgtttttgttcgtaatgaaaatacaata

SEQ ID NO: 190060 - DNA, 31 bp, Homo sapiens; identical to SEQ ID NO: 97400
  chr19:38613383-38613414
  hypo

SEQ ID NO: 190061 - DNA, 31 bp, Homo sapiens; identical to SEQ ID NO: 97401
  chr19:38621444-38621475
  hypo

SEQ ID NO: 190062 - DNA, 52 bp, Homo sapiens; identical to SEQ ID NO: 32529
  chr19:38625642-38625694
  hypo

SEQ ID NO: 190063 - DNA, 222 bp, Homo sapiens
  chr19:38625952-38626174
  hypo
actccagtcatgccccgggtgtctccggttcccagcccttttctcctgccaccttcctaccctgcccggagccacagcccagccacacctgcttagatctctgcaggggcaagtcaaggccagataaccccacaggcaagtgccctggtggctacgctcctcgaggaaggacatgcacccctctccacacactcccacgggtgcacacgataagccagcttg

SEQ ID NO: 190064 - DNA, 128 bp, Homo sapiens; identical to SEQ ID NO: 97403
  chr19:38626518-38626646
  hypo

SEQ ID NO: 190065 - DNA, 199 bp, Homo sapiens; identical to SEQ ID NO: 97404
  chr19:38636780-38636979
  hypo

SEQ ID NO: 190066 - DNA, 93 bp, Homo sapiens
  chr19:38639130-38639223
  hypo
tggaatctgggcaagcaggaacggaggtgatggctgctggggtggcagccaacaaggctacatcatctgaccgtcattttgcccaggcatcct

SEQ ID NO: 190067 - DNA, 181 bp, Homo sapiens; identical to SEQ ID NO: 97406
  chr19:38679124-38679305
  hypo

SEQ ID NO: 190068 - DNA, 32 bp, Homo sapiens; identical to SEQ ID NO: 32533
  chr19:38679544-38679576
  hypo

SEQ ID NO: 190069 - DNA, 248 bp, Homo sapiens
  chr19:38684214-38684462
  hypo
cgagagcctgtgcagcgggcgccgggagcccagcttcgccagccccgctggcctagagccagggctgcccagcgacgtgctcttcaccagcacctgcgccttcccgtccagcacgctgcctgcacgccgccagcaccagcacccccacccgcccgtcggccccggtgccacccctgccgccggcagcggctttcccgagaagaaatgtgagcctgggccccctgggactggcgcggtagttaccccaa

SEQ ID NO: 190070 - DNA, 49 bp, Homo sapiens; identical to SEQ ID NO: 32534
  chr19:38689955-38690004
  hypo

SEQ ID NO: 190071 - DNA, 92 bp, Homo sapiens; identical to SEQ ID NO: 32535
  chr19:38691719-38691811
  hypo

SEQ ID NO: 190072 - DNA, 30 bp, Homo sapiens; identical to SEQ ID NO: 97410
  chr19:38697928-38697958
  hypo

SEQ ID NO: 190073 - DNA, 276 bp, Homo sapiens; identical to SEQ ID NO: 97411
  chr19:38704116-38704392
  hypo

SEQ ID NO: 190074 - DNA, 431 bp, Homo sapiens; identical to SEQ ID NO: 97412
  chr19:38706578-38707009
  hypo

SEQ ID NO: 190075 - DNA, 441 bp, Homo sapiens
  chr19:38711295-38711736
  hypo
aaagaaacaattagccctccagatacacctagaccctggggaagacacagccagatgagatgcttggacacatagcggggagataccgacatactcagggagaatcactcagctagatacacacaaacacacacaggagacagacaggaagagacacagccaggtgggcactgccacgctcctgggtacacacagaccctcggactcaggaagagaaactgaccccgaggatcccgatattcctaaacacattcaagggtaagtccagatcctctgatggactggcacacacgtgcagaaatacacctgatacgccagacaccatcaggaagattctcccagacactccgaggcacccacacacccacagaaagagacggccgcaccgcctaacacacccagacacactcgggaggagccggacaccctgacagaccagac

SEQ ID NO: 190076 - DNA, 814 bp, Homo sapiens; identical to SEQ ID NO: 131460
  chr19:38719833-38720647
  hypo

SEQ ID NO: 190077 - DNA, 30 bp, Homo sapiens; identical to SEQ ID NO: 97416
  chr19:38745366-38745396
  hypo

SEQ ID NO: 190078 - DNA, 43 bp, Homo sapiens; identical to SEQ ID NO: 97417
  chr19:38747774-38747817
  hypo

SEQ ID NO: 190079 - DNA, 658 bp, Homo sapiens; identical to SEQ ID NO: 12330
  chr19:38754870-38755528
  hypo

SEQ ID NO: 190080 - DNA, 37 bp, Homo sapiens
  chr19:38756646-38756683
  hypo
tttagctcaggtggtcgggggacgtctccgtgaggag

SEQ ID NO: 190081 - DNA, 88 bp, Homo sapiens; identical to SEQ ID NO: 97419
  chr19:38764529-38764617
  hypo

SEQ ID NO: 190082 - DNA, 30 bp, Homo sapiens; identical to SEQ ID NO: 97420
  chr19:38771382-38771412
  hypo

SEQ ID NO: 190083 - DNA, 212 bp, Homo sapiens
  chr19:38774185-38774397
  hypo
ggatccatgtacaggtctgtgcgtgtcctttgttgccaggattgccctgccaagctaaccgggttgtgcttcgcgtttcagacttctgcctggtgtcgaaggtggtgggcagatgccgggcctccatgcctaggtggtggtacaatgtcactgacggatcctgccagctgtttgtgtatgggggctgtgacggaaacagcaataattacctg

SEQ ID NO: 190084 - DNA, 31 bp, Homo sapiens; identical to SEQ ID NO: 97421
  chr19:38779795-38779826
  hypo

SEQ ID NO: 190085 - DNA, 184 bp, Homo sapiens; identical to SEQ ID NO: 97422
  chr19:38780286-38780470
  hypo

SEQ ID NO: 190086 - DNA, 76 bp, Homo sapiens
  chr19:38781555-38781631
  hypo
tcacgggtgacaggacggaggaccacgggccagggtgtttcccaacacagtctggtctgagcgggaggccaggcct

SEQ ID NO: 190087 - DNA, 342 bp, Homo sapiens
  chr19:38781915-38782257
  hypo
aaaagcatctgagctgaccagcgagactgcagtggggcagacactattaaatttgctggcacagctctgagtaccccctcgcttccaccctgacttcatcccgcagtagctctcagccctcccagcccctgcagggccacgtctttctctattgccggtcagcgtgtgtgtgcacaaagcccctaaggtttcatgtgtacacaccggtgctaagtgttttttacacccttgtgcatctctcggcctggggctcctgtgcaggttgccctgagagttgggtttttagttcaaaaagaaggaacacagatgactactctgctggcgacacggccactctgctgg

SEQ ID NO: 190088 - DNA, 267 bp, Homo sapiens
  chr19:38782476-38782743
  hypo
cagtggtggttctggcggggctgttcgtgatggtgttgatcctcttcctgggagcctccatggtctacctgatccgggtggcacggaggaaccaggagcgtgccctgcgcaccgtctggagctccggagatgacaaggagcagctggtgaagaacacatatgtcctgtgaccgccctgtcgccaagaggactggggaagggaggggagactatgtgtgagctttttttaaatagagggattgactcggatttgagtgatcattaggg

SEQ ID NO: 190089 - DNA, 236 bp, Homo sapiens
  chr19:38784872-38785108
  hypo
aggcctcagcccctccgctcctggcagctcaactccatccgggcctctggactctttccagggcgactggtgggcctcaccacagcagacactcttcaggctgctgccgccgtggcccttgaagctcagctgtgtcatgtgttcaattcttggggcattttacggcctgacaaaggccctctttttgttggaaaggccacccaacagtgggtcagtggcctcggcattcagtggcc

SEQ ID NO: 190090 - DNA, 75 bp, Homo sapiens
  chr19:38786543-38786618
  hypo
cagtggccacttggtcgagtgtcctttttgccaagtctccctacttggcacatcagacaacgtgagggaaatcat

SEQ ID NO: 190091 - DNA, 21 bp, Homo sapiens
  chr19:38787238-38787259
  hypo
gacagagtgggactctgtctc

SEQ ID NO: 190092 - DNA, 30 bp, Homo sapiens
  chr19:38800264-38800294
  hypo
gggatcctccgcttcgaggctgcaagggaa

SEQ ID NO: 190093 - DNA, 46 bp, Homo sapiens; identical to SEQ ID NO: 97426
  chr19:38817273-38817319
  hypo

SEQ ID NO: 190094 - DNA, 30 bp, Homo sapiens; identical to SEQ ID NO: 97427
  chr19:38818115-38818145
  hypo

SEQ ID NO: 190095 - DNA, 333 bp, Homo sapiens
  chr19:38828044-38828377
  hypo
cgagagtggtgtgagcgacagcttctttgagcaagagcccgtggacacagtgagcagcttgtttcacatgctggtggactcacccatcgacccgagcgaggtgaggggaccagggtcaagtgaaccagagggattttgaacccgcactccactcatttctggacgtgtggcctaacctctctttgcagaaatacctgggcttcccttactacctgaagatcaactactcctgcgaggaaaaggtgagtgggtgcagcacggataggctcattctatgagccttggttttcccacctctaacatttttatttatttatttattttatttttttg

SEQ ID NO: 190096 - DNA, 153 bp, Homo sapiens; identical to SEQ ID NO: 97429
  chr19:38838187-38838340
  hypo

SEQ ID NO: 190097 - DNA, 80 bp, Homo sapiens
  chr19:38841907-38841987
  hypo
agggcaatgtagcaagactcccgtctacacagttatttatttattttaattagctgggaggccgggtgcggtggcttacg

SEQ ID NO: 190098 - DNA, 139 bp, Homo sapiens
  chr19:38851299-38851438
  hypo
gctatgcggggacatcggggcaccccaggagggctgaccccagctcacctggccctgccttccccctgcagctggtgtaccttatgaacaaccagaagggccagctggtcaagaggctcgtgcccgtggagcagcttct

SEQ ID NO: 190099 - DNA, 434 bp, Homo sapiens; identical to SEQ ID NO: 56131
  chr19:38852094-38852528
  hypo

SEQ ID NO: 190100 - DNA, 740 bp, Homo sapiens; identical to SEQ ID NO: 56132
  chr19:38852765-38853505
  hypo

SEQ ID NO: 190101 - DNA, 93 bp, Homo sapiens; identical to SEQ ID NO: 97433
  chr19:38855367-38855460
  hypo

SEQ ID NO: 190102 - DNA, 31 bp, Homo sapiens; identical to SEQ ID NO: 97434
  chr19:38858044-38858075
  hypo

SEQ ID NO: 190103 - DNA, 30 bp, Homo sapiens; identical to SEQ ID NO: 97435
  chr19:38864241-38864271
  hypo

SEQ ID NO: 190104 - DNA, 121 bp, Homo sapiens; identical to SEQ ID NO: 97436
  chr19:38868584-38868705
  hypo

SEQ ID NO: 190105 - DNA, 426 bp, Homo sapiens; identical to SEQ ID NO: 97437
  chr19:38873746-38874172
  hypo

SEQ ID NO: 190106 - DNA, 30 bp, Homo sapiens; identical to SEQ ID NO: 97438
  chr19:38875028-38875058
  hypo

SEQ ID NO: 190107 - DNA, 454 bp, Homo sapiens; identical to SEQ ID NO: 97439
  chr19:38875945-38876399
  hypo

SEQ ID NO: 190108 - DNA, 34 bp, Homo sapiens; identical to SEQ ID NO: 97440
  chr19:38900083-38900117
  hypo

SEQ ID NO: 190109 - DNA, 30 bp, Homo sapiens
  chr19:38901562-38901592
  hypo
tgggtccaggcatggcgaagctggcaccca

SEQ ID NO: 190110 - DNA, 133 bp, Homo sapiens
  chr19:38901796-38901929
  hypo
cggggggtcctgcatcgcccttggcccctggcctcttcttacattctaccttcacctggtctctgcagtgtttgtggcaacacagcccgcactctgggggaaggcagcggcaggggtccgatctgtgtcatcc

SEQ ID NO: 190111 - DNA, 30 bp, Homo sapiens
  chr19:38903313-38903343
  hypo
agccactgcagctgtcgcagaaggtaggct

SEQ ID NO: 190112 - DNA, 30 bp, Homo sapiens; identical to SEQ ID NO: 97441
  chr19:38904845-38904875
  hypo

SEQ ID NO: 190113 - DNA, 180 bp, Homo sapiens
  chr19:38905548-38905728
  hypo
accagctcctgcagccgcaggtagaggttgttcagcttgggtaggtgcaggcggccgtcaggcaacctgtcgggctgtgcctcatgcagggacaccaggtccttgaggtgcacgcccagtacaggcagccggaaacccgcgcagccagcccaggtgcggcggtagcgggcgtagttgttg

SEQ ID NO: 190114 - DNA, 43 bp, Homo sapiens; identical to SEQ ID NO: 97443
  chr19:38921074-38921117
  hypo

SEQ ID NO: 190115 - DNA, 30 bp, Homo sapiens
  chr19:38933788-38933818
  hypo
gcacacgggctgcagcgcagcatgatgggg

SEQ ID NO: 190116 - DNA, 171 bp, Homo sapiens
  chr19:38934251-38934422
  hypo
cggcatgcacacagccgcatggtgagtgcaacctcggtgggcgtgggcaggggccagggcatgtggggcctgctagaaggaggctgacctccctctacaaccctagtatctgagctgcctcaccacctcccgctccatgactgacaagctggccttcgatgtgggactgca

SEQ ID NO: 190117 - DNA, 30 bp, Homo sapiens
  chr19:38937204-38937234
  hypo
ggtctgggctgtggacgagagggcctgggg

SEQ ID NO: 190118 - DNA, 30 bp, Homo sapiens
  chr19:38949871-38949901
  hypo
ccgtccatctccttccgcatcaacggctgc

SEQ ID NO: 190119 - DNA, 39 bp, Homo sapiens
  chr19:38951825-38951864
  hypo
tttgggaagccgaagtgggggcctcgcgcttgagcccga

SEQ ID NO: 190120 - DNA, 30 bp, Homo sapiens; identical to SEQ ID NO: 97444
  chr19:38953126-38953156
  hypo

SEQ ID NO: 190121 - DNA, 425 bp, Homo sapiens; identical to SEQ ID NO: 97445
  chr19:38956606-38957031
  hypo

SEQ ID NO: 190122 - DNA, 351 bp, Homo sapiens
  chr19:38964029-38964380
  hypo
acggcactgtggacacgcccccctgcctgcgcctgacccaccgcacctggggctcccagaacagcctggtggagatgcttttcctgcggctgagcctcccagtccagttccaccagcacttccgctgcactgcaggggccaccccgctggcacctcctggcctgcagccccccgccgaggacgaggcccgggcggcggaacccgaccctgactacgaaaacctgcgccgctcagctgggggctggagcgaggcagagaacggcaaagaagggactgcgaaggagggcgcccccgggggcaccccgcaggcggggggagaggcgcagcccgccagggcggagaatgagaagg

SEQ ID NO: 190123 - DNA, 306 bp, Homo sapiens
  chr19:38973963-38974269
  hypo
gcgagcgcaagaacccggccccgcagtgcccaccgcggctggagatgcagatgctgatgccagtgtcctggagccgcatgcccaaccacttcctgcaggtggagacgaggcgtgccggcgagcggctgggctgggccgtgcagtgccaggagccgctgaccatgatggcgctgcacatccccgaggagaaccggtcagggccagcccagctatgcaggggtgggcaggtgttgcaagccctctggggtctgggtcccactcagtgcccctcctcaacacaaccccgggattccagactacacccca

SEQ ID NO: 190124 - DNA, 617 bp, Homo sapiens; identical to SEQ ID NO: 12334
  chr19:38976231-38976848
  hypo

SEQ ID NO: 190125 - DNA, 165 bp, Homo sapiens
  chr19:38985043-38985208
  hypo
cttcgtgcagagccccgagctggtgcgggccatgttcagcctcctgcaccggcagtacgacgggctgggtgagctgctgcgtgccctgccgcgggcgtacaccatctcaccgtcctccgtggaagacaccatgagcctgctcgagtgcctcggccagatccgctc

SEQ ID NO: 190126 - DNA, 30 bp, Homo sapiens; identical to SEQ ID NO: 97449
  chr19:38990372-38990402
  hypo

SEQ ID NO: 190127 - DNA, 43 bp, Homo sapiens
  chr19:38991672-38991715
  hypo
agagggacaggagatgggtcacggtagagcagcagcagctgct

SEQ ID NO: 190128 - DNA, 87 bp, Homo sapiens; identical to SEQ ID NO: 97450
  chr19:38993196-38993283
  hypo

SEQ ID NO: 190129 - DNA, 30 bp, Homo sapiens
  chr19:38997187-38997217
  hypo
tgagggcgcccatgccgcccccacgctacc

SEQ ID NO: 190130 - DNA, 94 bp, Homo sapiens
  chr19:38998406-38998500
  hypo
ggcttcctgcagcagctgctgcgctggatggacatttctcaggagttcattgcccacctgggtacggagaaataccccccgcttatgcccgccc

SEQ ID NO: 190131 - DNA, 19 bp, Homo sapiens
  chr19:38999135-38999154
  hypo
ccaccgcacccggcttgcc

SEQ ID NO: 190132 - DNA, 30 bp, Homo sapiens; identical to SEQ ID NO: 32544
  chr19:39010003-39010033
  hypo

SEQ ID NO: 190133 - DNA, 284 bp, Homo sapiens
  chr19:39015894-39016178
  hypo
tgtggatgatggccgcgggttggggctgaggcatgggattggggcttgggctggtgctgagccctgtgtccccacagtccggtggctcggaccaggaacgcaccaagaagaagcgccggggggaccggtactctgtgcagacgtcactgatcgtggccacactgaagaagatgctgcccatcggcctgaatatgtgtgcgcccaccgaccaagacctcatcacgctggccaagacccgttacgccctggtgcctgcccagccccgtcctcggaaccttccagga

SEQ ID NO: 190134 - DNA, 158 bp, Homo sapiens; identical to SEQ ID NO: 32545
  chr19:39026969-39027127
  hypo

SEQ ID NO: 190135 - DNA, 596 bp, Homo sapiens; identical to SEQ ID NO: 32546
  chr19:39051722-39052318
  hypo

SEQ ID NO: 190136 - DNA, 30 bp, Homo sapiens
  chr19:39053147-39053177
  hypo
ggaggtttgcgcacccgtcacctccttcat

SEQ ID NO: 190137 - DNA, 454 bp, Homo sapiens
  chr19:39087547-39088001
  hypo
ctcgggagattggggcggggcctcgacggaggtggggcttcatggagctcttgatagaagcgcaaagggtgcaaggccttagccacccactcctcagagttcccagcaccctcccaagccccttacccggacaagcaggaatttgttcatgggctggtaccactgaagcaggacaacggacgtctccaatgcaccgcacaggaacgggcccccagagctcgcaccctccgctgtggcatgggcaaggatgagtcaagatcaatgccctctatcctcctcgccacccacactaccacccatcttctgggttctggacacattgccttaactctgtaaccttctcaggtggatgcagttcaagcccctcctctggcctggccccgcccactctctgcacacccgtgaagctctctctcacccacacagcacgcccggcagcctttggtgtcctgga

SEQ ID NO: 190138 - DNA, 126 bp, Homo sapiens
  chr19:39092088-39092214
  hypo
gagggatgtgtccaggcggccgtgctgtggatccggagggggcagccattgaacaactttacgagaagggcacatccctgggcaggtcgccgcggggccaggcagcagatccggcaaagagagcag

SEQ ID NO: 190139 - DNA, 104 bp, Homo sapiens; identical to SEQ ID NO: 97457
  chr19:39094629-39094733
  hypo

SEQ ID NO: 190140 - DNA, 95 bp, Homo sapiens
  chr19:39097472-39097567
  hypo
ctctccctgtgctggcgccacacacaggctgtcgcacgtgatgggtgaagtgagtgcgcgcacctggatggagcctgactcggcctgtgggctgg

SEQ ID NO: 190141 - DNA, 233 bp, Homo sapiens; identical to SEQ ID NO: 97458
  chr19:39125642-39125875
  hypo

SEQ ID NO: 190142 - DNA, 32 bp, Homo sapiens; identical to SEQ ID NO: 97459
  chr19:39128242-39128274
  hypo

SEQ ID NO: 190143 - DNA, 27 bp, Homo sapiens
  chr19:39135434-39135461
  hypo
cagggcgagactccacctccaataaaa

SEQ ID NO: 190144 - DNA, 80 bp, Homo sapiens; identical to SEQ ID NO: 32550
  chr19:39144876-39144956
  hypo

SEQ ID NO: 190145 - DNA, 41 bp, Homo sapiens; identical to SEQ ID NO: 97462
  chr19:39149968-39150009
  hypo

SEQ ID NO: 190146 - DNA, 517 bp, Homo sapiens
  chr19:39151296-39151813
  hypo
aagtgctgggattacaggcgcgagccaccatgcccgacccatggactcacttgtataatcttgtgaagcaggtgttgttacccttacatgcagaaatggatccatgggcctttaagccacttgcccctgtgacagtgccaggatttgaatgtagaagttgaggctttcaagtttatgctgttatttctacactacactgaagtctagtgattgggaatggctttgcgagcgggtggtgaggggaggagtgtgcagtgcaggtacttcagatggagaggaaggtctcaaagaggtggcatttcagctgttccttaacggatgagaaagagagaaccaagagagcaccagaggaacgcgcttccaacagagaaaaccaagcaagggggcccccgaggagcagaaaggcccgagtggtcagagcggagcccgtggaagagatgggcacagccagattgcttagagctgtgttgttagaagtgctgatgagtctacattcaacttgcgcctgcaaactcag

SEQ ID NO: 190147 - DNA, 35 bp, Homo sapiens; identical to SEQ ID NO: 32551
  chr19:39159903-39159938
  hypo

SEQ ID NO: 190148 - DNA, 30 bp, Homo sapiens; identical to SEQ ID NO: 32552
  chr19:39182246-39182276
  hypo

SEQ ID NO: 190149 - DNA, 9 bp, Homo sapiens
  chr19:39182575-39182584
  hypo
gcagcaaca

SEQ ID NO: 190150 - DNA, 30 bp, Homo sapiens
  chr19:39187178-39187208
  hypo
ttttaatgtcccattcgaactccagctcct

SEQ ID NO: 190151 - DNA, 155 bp, Homo sapiens; identical to SEQ ID NO: 97467
  chr19:39189492-39189647
  hypo

SEQ ID NO: 190152 - DNA, 197 bp, Homo sapiens
  chr19:39190981-39191178
  hypo
agctctgccacttaccgcctggatggtcttgtgatgggtcattaaccaccccgagcctcagtttcctcacatctgcctcccggggtcactgtaaggatcagaaacaatgtgtgtatcggccatgtacggtgtgtgtcggcgagtgctccgtggcagctgcggttctcctgaggtcagagctgcggccctgcaggtgt

SEQ ID NO: 190153 - DNA, 166 bp, Homo sapiens
  chr19:39201701-39201867
  hypo
tagtctgtctccagcccaggccggttagaaaaggaatgcaccctattcggactccacaaaaccccgcaaggcatgtccacgcaggcctggggctggcttccagtccagagcaagtgctcttcctcctgcatgagcctcaggccggcccggccgccctccctgcgtc

SEQ ID NO: 190154 - DNA, 30 bp, Homo sapiens
  chr19:39210289-39210319
  hypo
ccggattcactcattcgttcaacagacagc

SEQ ID NO: 190155 - DNA, 129 bp, Homo sapiens; identical to SEQ ID NO: 97469
  chr19:39210536-39210665
  hypo

SEQ ID NO: 190156 - DNA, 87 bp, Homo sapiens; identical to SEQ ID NO: 97470
  chr19:39211067-39211154
  hypo

SEQ ID NO: 190157 - DNA, 300 bp, Homo sapiens; identical to SEQ ID NO: 97471
  chr19:39211596-39211896
  hypo

SEQ ID NO: 190158 - DNA, 213 bp, Homo sapiens
  chr19:39212193-39212406
  hypo
gaagcaccgggactacgagacggccacactatcggacatcaaagccctcattcgcaagcacgaggccttcgagagcgacctggctgcgcaccaggaccgcgtggagcagatcgccgccattgcccaggagctcaagtacgtgcgggctcaggacactatcatcacctggctctcaccacagcctgcccagactggtggcggcagcacgccgag

SEQ ID NO: 190159 - DNA, 30 bp, Homo sapiens; identical to SEQ ID NO: 97472
  chr19:39214617-39214647
  hypo

SEQ ID NO: 190160 - DNA, 306 bp, Homo sapiens; identical to SEQ ID NO: 97473
  chr19:39221968-39222274
  hypo

SEQ ID NO: 190161 - DNA, 33 bp, Homo sapiens; identical to SEQ ID NO: 32555
  chr19:39238368-39238401
  hypo

SEQ ID NO: 190162 - DNA, 30 bp, Homo sapiens
  chr19:39248763-39248793
  hypo
ggtgacatacacagtcgggtgctgcatcac

SEQ ID NO: 190163 - DNA, 144 bp, Homo sapiens
  chr19:39259867-39260011
  hypo
tctcatacacctggcctcaagcgatgctccgacatcagccttccaaagtgctgggattacaggcctgaggcatcgcgcccagctccaaatctccattctcggtgaaccatttgagaaaaaatcgcaaacatgttgcatctccaa

SEQ ID NO: 190164 - DNA, 138 bp, Homo sapiens
  chr19:39270477-39270615
  hypo
gcattcttatggtagttttatacccaagcccactgaagaccgtaggagggagaggtaaagttttctttcccctgcaaaggacattcgagttgtttccactgtttggctgttatgaataatgaacgcttctacgaacat

SEQ ID NO: 190165 - DNA, 30 bp, Homo sapiens
  chr19:39271548-39271578
  hypo
ttggttgcagtgagccgagatcctgcgctc

SEQ ID NO: 190166 - DNA, 288 bp, Homo sapiens; identical to SEQ ID NO: 97476
  chr19:39277438-39277726
  hypo

SEQ ID NO: 190167 - DNA, 179 bp, Homo sapiens; identical to SEQ ID NO: 32557
  chr19:39279302-39279481
  hypo

SEQ ID NO: 190168 - DNA, 105 bp, Homo sapiens; identical to SEQ ID NO: 32558
  chr19:39289870-39289975
  hypo

SEQ ID NO: 190169 - DNA, 78 bp, Homo sapiens; identical to SEQ ID NO: 97479
  chr19:39302317-39302395
  hypo

SEQ ID NO: 190170 - DNA, 150 bp, Homo sapiens
  chr19:39305779-39305929
  hypo
gtgccaggcagggcacgaacgccaccctcaaccccagggcaggcagggagaccaggaagccttgcaacccagagggaccccagcgacttttgctcactccctccgccccggaattccttgtgcccctcgcctgcccgctgccagtctgaa

SEQ ID NO: 190171 - DNA, 433 bp, Homo sapiens; identical to SEQ ID NO: 32560
  chr19:39306226-39306659
  hypo

SEQ ID NO: 190172 - DNA, 29 bp, Homo sapiens
  chr19:39309628-39309657
  hypo
gtgtgtgtgtgtgtgtgtgtgcgggcacg

SEQ ID NO: 190173 - DNA, 37 bp, Homo sapiens; identical to SEQ ID NO: 97483
  chr19:39310979-39311016
  hypo

SEQ ID NO: 190174 - DNA, 234 bp, Homo sapiens; identical to SEQ ID NO: 97484
  chr19:39327430-39327664
  hypo

SEQ ID NO: 190175 - DNA, 30 bp, Homo sapiens
  chr19:39329011-39329041
  hypo
gcctgcgcagctccacggcacacacctcaa

SEQ ID NO: 190176 - DNA, 146 bp, Homo sapiens; identical to SEQ ID NO: 97485
  chr19:39329500-39329646
  hypo

SEQ ID NO: 190177 - DNA, 32 bp, Homo sapiens
  chr19:39330089-39330121
  hypo
ctatgtgaacctgggcgcgttatttaagcccc

SEQ ID NO: 190178 - DNA, 34 bp, Homo sapiens
  chr19:39330891-39330925
  hypo
gtagcgacttgggccccgacggtgaccccccact

SEQ ID NO: 190179 - DNA, 30 bp, Homo sapiens
  chr19:39332561-39332591
  hypo
gtagcgctccgtgtgcgtgtctcctggtat

SEQ ID NO: 190180 - DNA, 434 bp, Homo sapiens
  chr19:39332928-39333362
  hypo
catggaatctacttccgtctatgaaacgttctccgaaaagagcatcgctcgctggctggctgggacagctctgttctctgtgtttcctacttctgtgtacattctcgggttcaagtttgcttggattttgaccttttttttaatgtttaataaaaaaagcagtgtctgctgccatgttgcgtctctttctctctttgtctctgtatgcctctgtctctgtgcttgtagctgttccttggagcgcggtgtggtgttcttgatgtagtgagctcaagtctgcggctgtttctggggacgtggtggaggctgcatgttctgttctctccaggaagagctagtggttttctaccctgtgtgttggtgagcaatgtgcagaggcagagccgctgaagtatggttcctgaggggtggcgaagcaccgccctcactccagg

SEQ ID NO: 190181 - DNA, 21 bp, Homo sapiens
  chr19:39364460-39364481
  hypo
ggtccagctgatagttcttag

SEQ ID NO: 190182 - DNA, 27 bp, Homo sapiens
  chr19:39376507-39376534
  hypo
tgtgagccactgcgcccggccactgtt

SEQ ID NO: 190183 - DNA, 31 bp, Homo sapiens; identical to SEQ ID NO: 56144
  chr19:39379455-39379486
  hypo

SEQ ID NO: 190184 - DNA, 30 bp, Homo sapiens
  chr19:39401286-39401316
  hypo
gcgcctctctcctccgcctctctcggcccc

SEQ ID NO: 190185 - DNA, 784 bp, Homo sapiens; identical to SEQ ID NO: 97488
  chr19:39406261-39407045
  hypo

SEQ ID NO: 190186 - DNA, 91 bp, Homo sapiens; identical to SEQ ID NO: 97489
  chr19:39408600-39408691
  hypo

SEQ ID NO: 190187 - DNA, 177 bp, Homo sapiens; identical to SEQ ID NO: 97490
  chr19:39415992-39416169
  hypo

SEQ ID NO: 190188 - DNA, 411 bp, Homo sapiens; identical to SEQ ID NO: 97491
  chr19:39435416-39435827
  hypo

SEQ ID NO: 190189 - DNA, 20 bp, Homo sapiens
  chr19:39437921-39437941
  hypo
atagaacaaagtgccaggaa

SEQ ID NO: 190190 - DNA, 148 bp, Homo sapiens; identical to SEQ ID NO: 97493
  chr19:39439159-39439307
  hypo

SEQ ID NO: 190191 - DNA, 19 bp, Homo sapiens
  chr19:39525039-39525058
  hypo
ttaaatataaaacctccag

SEQ ID NO: 190192 - DNA, 63 bp, Homo sapiens
  chr19:39544159-39544222
  hypo
atcaggaaccagaaggcagcacggcccccacagggctggcacgggcagcctcactgtggcctg

SEQ ID NO: 190193 - DNA, 99 bp, Homo sapiens; identical to SEQ ID NO: 97495
  chr19:39553664-39553763
  hypo

SEQ ID NO: 190194 - DNA, 43 bp, Homo sapiens
  chr19:39568093-39568136
  hypo
ctgtccccaggtgcatgctaccgttctttctggaagggagctg

SEQ ID NO: 190195 - DNA, 697 bp, Homo sapiens; identical to SEQ ID NO: 131491
  chr19:39574107-39574804
  hypo

SEQ ID NO: 190196 - DNA, 221 bp, Homo sapiens; identical to SEQ ID NO: 131492
  chr19:39574877-39575098
  hypo

SEQ ID NO: 190197 - DNA, 91 bp, Homo sapiens; identical to SEQ ID NO: 97498
  chr19:39595964-39596055
  hypo

SEQ ID NO: 190198 - DNA, 246 bp, Homo sapiens; identical to SEQ ID NO: 32566
  chr19:39597517-39597763
  hypo

SEQ ID NO: 190199 - DNA, 158 bp, Homo sapiens; identical to SEQ ID NO: 97500
  chr19:39642873-39643031
  hypo

SEQ ID NO: 190200 - DNA, 30 bp, Homo sapiens; identical to SEQ ID NO: 97501
  chr19:39643268-39643298
  hypo

SEQ ID NO: 190201 - DNA, 221 bp, Homo sapiens
  chr19:39644534-39644755
  hypo
cttttgaggccatcatatgcttgcttttctctctgtttgccacctctgtatgcagcctgaagcagtttccttttgcctggctttgaaccttaaagtccgaggatggagtattgttcgatgtttttgcctcttctgtgtggcgtcttctttgatgctcatccacatgtagctgtagtcattcattcattcattctccctatcatgtgcggtgccatggagcc

SEQ ID NO: 190202 - DNA, 186 bp, Homo sapiens
  chr19:39645706-39645892
  hypo
gggaaggacccaggtgcgtctgtctgctgtgtgccggggcgcttgctcactgttgtccctggattcaccatggcctgggtgcccatcctgggtccgggcacccagcagccttggtccctaccgcctaccagactggagtccctggtagagcccctctagggtgtcaactcccgtgggcaggaagtt

SEQ ID NO: 190203 - DNA, 584 bp, Homo sapiens
  chr19:39646158-39646742
  hypo
gccctccggaggcctcgaggggaacagacagtgttcacaggagaaacagttacacctgcgagctctgcctcgggccagcctttgcactggaggtgggatttgaaggggagggaggggtgctgtggagcatctttttcttctgttcctgaacgggggttctgatcacatcagcctcatgcttggagcagctggttaagggcacagacaccgggacagacatccagcctgggagtcccagcgcctgacctcccctcgggcatcaagtcactccgcctctccgcgcctcagtttcctccatgatgaaaggggcctgctgaaggacctgtctcatttagggcagcagtgaggcaaagccccggagcccatgcctgtgccaagagcagggcctggcccagaatatggccttgtcacgttgagctgccttttttcagcagggttagtttcatcctggtgaggcggcgccagcatggcgttccaccttcttggcctcctctccctcctccctttcctgccatccacacctcccggccctattctcacacctcaggatggcgatatgggggcttcaccgtggtctcccctga

SEQ ID NO: 190204 - DNA, 226 bp, Homo sapiens; identical to SEQ ID NO: 97505
  chr19:39650785-39651011
  hypo

SEQ ID NO: 190205 - DNA, 60 bp, Homo sapiens; identical to SEQ ID NO: 32568
  chr19:39653249-39653309
  hypo

SEQ ID NO: 190206 - DNA, 30 bp, Homo sapiens
  chr19:39658512-39658542
  hypo
acttgctgtgccacgcgctgtgccaggcgc

SEQ ID NO: 190207 - DNA, 30 bp, Homo sapiens; identical to SEQ ID NO: 97507
  chr19:39662331-39662361
  hypo

SEQ ID NO: 190208 - DNA, 275 bp, Homo sapiens
  chr19:39663616-39663891
  hypo
gtttgagaacatgtcggtgacacgctccaactccctgcggagagacagcccgccgccgcccgcccgtgcccgccaggaaaatgggatgccagaggagccggccaccacggccagagggggcccagggaaggcaggcagccgaggccggttcgccggtcacagcgaggcgggtggcggcagtggtgacaggcgacgggcggggccagagaagaggcccaagtcttccagggagggctcagggggtccccaggagtcctcccgggacaaacgccccc

SEQ ID NO: 190209 - DNA, 271 bp, Homo sapiens; identical to SEQ ID NO: 32570
  chr19:39664415-39664686
  hypo

SEQ ID NO: 190210 - DNA, 30 bp, Homo sapiens; identical to SEQ ID NO: 97510
  chr19:39669993-39670023
  hypo

SEQ ID NO: 190211 - DNA, 86 bp, Homo sapiens; identical to SEQ ID NO: 97511
  chr19:39670669-39670755
  hypo

SEQ ID NO: 190212 - DNA, 18 bp, Homo sapiens
  chr19:39671781-39671799
  hypo
ctatgttgcctaggctgg

SEQ ID NO: 190213 - DNA, 197 bp, Homo sapiens; identical to SEQ ID NO: 97513
  chr19:39671858-39672055
  hypo

SEQ ID NO: 190214 - DNA, 638 bp, Homo sapiens; identical to SEQ ID NO: 97514
  chr19:39672254-39672892
  hypo

SEQ ID NO: 190215 - DNA, 273 bp, Homo sapiens; identical to SEQ ID NO: 97515
  chr19:39690955-39691228
  hypo

SEQ ID NO: 190216 - DNA, 26 bp, Homo sapiens
  chr19:39709596-39709622
  hypo
ttctgagacagagtcttgctccgtca

SEQ ID NO: 190217 - DNA, 427 bp, Homo sapiens; identical to SEQ ID NO: 56151
  chr19:39754805-39755232
  hypo

SEQ ID NO: 190218 - DNA, 400 bp, Homo sapiens; identical to SEQ ID NO: 131499
  chr19:39755264-39755664
  hypo

SEQ ID NO: 190219 - DNA, 924 bp, Homo sapiens; identical to SEQ ID NO: 97518
  chr19:39804540-39805464
  hypo

SEQ ID NO: 190220 - DNA, 30 bp, Homo sapiens; identical to SEQ ID NO: 97519
  chr19:39805835-39805865
  hypo

SEQ ID NO: 190221 - DNA, 91 bp, Homo sapiens
  chr19:39816483-39816574
  hypo
gaccttaggtgatcctctgggattacaggcgtgagccaccgtgcctggcccaacatgtgttctcaaatgcgtcttgggagaggactgggga

SEQ ID NO: 190222 - DNA, 162 bp, Homo sapiens; identical to SEQ ID NO: 32577
  chr19:39816930-39817092
  hypo

SEQ ID NO: 190223 - DNA, 248 bp, Homo sapiens
  chr19:39818150-39818398
  hypo
cagccacctctctaccgggaacctgaaaaggggtggggggagggagttcccacgtccctgaaaccggggacagagaggggaacaattagaaacatggaagagaagcagagagacagaaagggtgtgattcatctctgtgaagacctgcccatctcggaattctcagagcccggtacattgtgggtacttaatcaatgtccctcagagacagacgcagaaagcctgagaaagttcgatgtcaagagatg

SEQ ID NO: 190224 - DNA, 30 bp, Homo sapiens
  chr19:39861536-39861566
  hypo
gtgttcaaagtcacacgtagaacaagtggt

SEQ ID NO: 190225 - DNA, 27 bp, Homo sapiens
  chr19:39895590-39895617
  hypo
gactccgtctcaaaaaaaaaaaaggaa

SEQ ID NO: 190226 - DNA, 25 bp, Homo sapiens
  chr19:39896098-39896123
  hypo
ctgccttgggcgcccaaagtgctag

SEQ ID NO: 190227 - DNA, 301 bp, Homo sapiens; identical to SEQ ID NO: 97522
  chr19:39913956-39914257
  hypo

SEQ ID NO: 190228 - DNA, 175 bp, Homo sapiens; identical to SEQ ID NO: 97523
  chr19:39924223-39924398
  hypo

SEQ ID NO: 190229 - DNA, 23 bp, Homo sapiens
  chr19:39928206-39928229
  hypo
gcgtgagccaccgcgcccagccc

SEQ ID NO: 190230 - DNA, 41 bp, Homo sapiens; identical to SEQ ID NO: 32578
  chr19:39934200-39934241
  hypo

SEQ ID NO: 190231 - DNA, 54 bp, Homo sapiens; identical to SEQ ID NO: 32579
  chr19:39964613-39964667
  hypo

SEQ ID NO: 190232 - DNA, 121 bp, Homo sapiens; identical to SEQ ID NO: 131514
  chr19:39992815-39992936
  hypo

SEQ ID NO: 190233 - DNA, 185 bp, Homo sapiens; identical to SEQ ID NO: 12349
  chr19:39993471-39993656
  hypo

SEQ ID NO: 190234 - DNA, 109 bp, Homo sapiens; identical to SEQ ID NO: 56166
  chr19:39997623-39997732
  hypo

SEQ ID NO: 190235 - DNA, 410 bp, Homo sapiens; identical to SEQ ID NO: 56167
  chr19:39997748-39998158
  hypo

SEQ ID NO: 190236 - DNA, 580 bp, Homo sapiens; identical to SEQ ID NO: 131519
  chr19:40005580-40006160
  hypo

SEQ ID NO: 190237 - DNA, 261 bp, Homo sapiens; identical to SEQ ID NO: 56168
  chr19:40006186-40006447
  hypo

SEQ ID NO: 190238 - DNA, 142 bp, Homo sapiens; identical to SEQ ID NO: 56169
  chr19:40006498-40006640
  hypo

SEQ ID NO: 190239 - DNA, 166 bp, Homo sapiens; identical to SEQ ID NO: 32582
  chr19:40015703-40015869
  hypo

SEQ ID NO: 190240 - DNA, 35 bp, Homo sapiens
  chr19:40016258-40016293
  hypo
aagcagcagggcgggcgcggtggctcacgcctgta

SEQ ID NO: 190241 - DNA, 35 bp, Homo sapiens; identical to SEQ ID NO: 97533
  chr19:40016712-40016747
  hypo

SEQ ID NO: 190242 - DNA, 121 bp, Homo sapiens; identical to SEQ ID NO: 32583
  chr19:40019819-40019940
  hypo

SEQ ID NO: 190243 - DNA, 421 bp, Homo sapiens; identical to SEQ ID NO: 97535
  chr19:40020179-40020600
  hypo

SEQ ID NO: 190244 - DNA, 32 bp, Homo sapiens; identical to SEQ ID NO: 97536
  chr19:40026201-40026233
  hypo

SEQ ID NO: 190245 - DNA, 29 bp, Homo sapiens
  chr19:40038268-40038297
  hypo
actgttaagaattattgaaagcgtggaaa

SEQ ID NO: 190246 - DNA, 149 bp, Homo sapiens
  chr19:40038356-40038505
  hypo
ctaggattacaggcgtgaaccactgcgcctctctggaatttgaccgtttatgctaaggcatgttgaggcagattttagcctcaggtcttccaggccaatggacccctcgcttctaaaagagttccagcgttgggttctgatcatgtccc

SEQ ID NO: 190247 - DNA, 31 bp, Homo sapiens; identical to SEQ ID NO: 97538
  chr19:40099332-40099363
  hypo

SEQ ID NO: 190248 - DNA, 30 bp, Homo sapiens
  chr19:40218264-40218294
  hypo
actcctgtccccatgcgatcctcccaactc

SEQ ID NO: 190249 - DNA, 106 bp, Homo sapiens; identical to SEQ ID NO: 97539
  chr19:40269169-40269275
  hypo

SEQ ID NO: 190250 - DNA, 176 bp, Homo sapiens; identical to SEQ ID NO: 32585
  chr19:40316372-40316548
  hypo

SEQ ID NO: 190251 - DNA, 30 bp, Homo sapiens; identical to SEQ ID NO: 32586
  chr19:40317479-40317509
  hypo

SEQ ID NO: 190252 - DNA, 137 bp, Homo sapiens
  chr19:40318906-40319043
  hypo
ccgtgctcccaggaccgggccgccccctaccctctggccaagctggcaggagctgccgaagtccacaatcttgatggcgctgcgcttggggttgcacagcaagatgttttcgggcttgaggtcgcagtgaatgatgc

SEQ ID NO: 190253 - DNA, 30 bp, Homo sapiens; identical to SEQ ID NO: 97542
  chr19:40321071-40321101
  hypo

SEQ ID NO: 190254 - DNA, 77 bp, Homo sapiens; identical to SEQ ID NO: 32587
  chr19:40322484-40322561
  hypo

SEQ ID NO: 190255 - DNA, 30 bp, Homo sapiens; identical to SEQ ID NO: 32588
  chr19:40325390-40325420
  hypo

SEQ ID NO: 190256 - DNA, 152 bp, Homo sapiens
  chr19:40329689-40329841
  hypo
agagacatgggagaccgtggtgcccgaggcagccccgaggtagagaaccttagcccccggtttgatgtggatctggtccacaccacccaggattgctgctgctagcttggagcggaaggggttccaggctcggtactcaattttgtcatctc

SEQ ID NO: 190257 - DNA, 30 bp, Homo sapiens
  chr19:40338058-40338088
  hypo
agtgggggcagagagcggcgtcaggggtca

SEQ ID NO: 190258 - DNA, 30 bp, Homo sapiens
  chr19:40338442-40338472
  hypo
cttttcagaaccggtcggggcagtggctca

SEQ ID NO: 190259 - DNA, 96 bp, Homo sapiens; identical to SEQ ID NO: 97546
  chr19:40343349-40343445
  hypo

SEQ ID NO: 190260 - DNA, 17 bp, Homo sapiens
  chr19:40352796-40352813
  hypo
ataaaaaataattcccc

SEQ ID NO: 190261 - DNA, 484 bp, Homo sapiens
  chr19:40362758-40363242
  hypo
gctgcctgacaggccgccgtgtaggctgccaggctgcggcacaggaaggctttgtcacccttttgcgcgcacaggtcgtatacgcattggcggaagtactcagagggactcagcaccgcctggcaggtcgcgaaggggccctgggggttccggagctgcccgcaggcctcgttgctctcatagggtgcagtctcctctgccaagcacactgggcagccttggggcccgcagccctcgccacagcccttggaggagccgggcgcccgccatgcagccccgaaggtctccacactggacgctgctgagccattgggcaggacaaagtcgtcactccagttgccattgaagttcccacagaggccacagagccgtccacggaaggggctggggatggacatgaggaggtgggcatcgccatcaaagagaagccgcagccccttggtcgtctgcagaaccatgtttcggccctcggcggtcacccgca

SEQ ID NO: 190262 - DNA, 30 bp, Homo sapiens; identical to SEQ ID NO: 97549
  chr19:40364136-40364166
  hypo

SEQ ID NO: 190263 - DNA, 30 bp, Homo sapiens; identical to SEQ ID NO: 97550
  chr19:40365794-40365824
  hypo

SEQ ID NO: 190264 - DNA, 42 bp, Homo sapiens; identical to SEQ ID NO: 97551
  chr19:40386022-40386064
  hypo

SEQ ID NO: 190265 - DNA, 104 bp, Homo sapiens
  chr19:40405621-40405725
  hypo
acattagagcaaaggcgcgcctgggcctgccttatactgagggcctctgacagccaccctgagaaacttacctctgagggtccgcacagcctagattcccctta

SEQ ID NO: 190266 - DNA, 30 bp, Homo sapiens
  chr19:40405930-40405960
  hypo
agctcaggatgcctccggagggctggcaca

SEQ ID NO: 190267 - DNA, 120 bp, Homo sapiens; identical to SEQ ID NO: 97553
  chr19:40408774-40408894
  hypo

SEQ ID NO: 190268 - DNA, 30 bp, Homo sapiens; identical to SEQ ID NO: 32590
  chr19:40411955-40411985
  hypo

SEQ ID NO: 190269 - DNA, 24 bp, Homo sapiens
  chr19:40412849-40412873
  hypo
gccgggattgcaggaatgagccac

SEQ ID NO: 190270 - DNA, 30 bp, Homo sapiens
  chr19:40419694-40419724
  hypo
cctggcagcaggcagcggtcatagacacag

SEQ ID NO: 190271 - DNA, 30 bp, Homo sapiens
  chr19:40420021-40420051
  hypo
accttggcagtcactcgtgcattccagtca

SEQ ID NO: 190272 - DNA, 30 bp, Homo sapiens; identical to SEQ ID NO: 56172
  chr19:40424134-40424164
  hypo

SEQ ID NO: 190273 - DNA, 30 bp, Homo sapiens
  chr19:40430418-40430448
  hypo
cagggtgtcgtcctcgctgcacagctccac

SEQ ID NO: 190274 - DNA, 66 bp, Homo sapiens; identical to SEQ ID NO: 97557
  chr19:40441596-40441662
  hypo

SEQ ID NO: 190275 - DNA, 71 bp, Homo sapiens; identical to SEQ ID NO: 97558
  chr19:40449595-40449666
  hypo

SEQ ID NO: 190276 - DNA, 121 bp, Homo sapiens; identical to SEQ ID NO: 32592
  chr19:40474757-40474878
  hypo

SEQ ID NO: 190277 - DNA, 87 bp, Homo sapiens; identical to SEQ ID NO: 97560
  chr19:40660159-40660246
  hypo

SEQ ID NO: 190278 - DNA, 78 bp, Homo sapiens; identical to SEQ ID NO: 97561
  chr19:40660697-40660775
  hypo

SEQ ID NO: 190279 - DNA, 43 bp, Homo sapiens; identical to SEQ ID NO: 97562
  chr19:40706864-40706907
  hypo

SEQ ID NO: 190280 - DNA, 30 bp, Homo sapiens; identical to SEQ ID NO: 32594
  chr19:40708309-40708339
  hypo

SEQ ID NO: 190281 - DNA, 31 bp, Homo sapiens; identical to SEQ ID NO: 97564
  chr19:40710378-40710409
  hypo

SEQ ID NO: 190282 - DNA, 176 bp, Homo sapiens; identical to SEQ ID NO: 97565
  chr19:40711780-40711956
  hypo

SEQ ID NO: 190283 - DNA, 30 bp, Homo sapiens; identical to SEQ ID NO: 97566
  chr19:40719820-40719850
  hypo

SEQ ID NO: 190284 - DNA, 43 bp, Homo sapiens; identical to SEQ ID NO: 97567
  chr19:40720418-40720461
  hypo

SEQ ID NO: 190285 - DNA, 35 bp, Homo sapiens; identical to SEQ ID NO: 97568
  chr19:40727175-40727210
  hypo

SEQ ID NO: 190286 - DNA, 136 bp, Homo sapiens
  chr19:40738248-40738384
  hypo
gagtgtctttattgcttgtaccgtacaaatatgaagacgaggagaaaggccagtagggacggagaactgtcagataacaacatcgcacacagaggaaaaagaccctcacccacccgaaccaaccccacccctcccc

SEQ ID NO: 190287 - DNA, 151 bp, Homo sapiens; identical to SEQ ID NO: 97569
  chr19:40739500-40739651
  hypo

SEQ ID NO: 190288 - DNA, 126 bp, Homo sapiens; identical to SEQ ID NO: 97570
  chr19:40741216-40741342
  hypo

SEQ ID NO: 190289 - DNA, 368 bp, Homo sapiens; identical to SEQ ID NO: 97571
  chr19:40741639-40742007
  hypo

SEQ ID NO: 190290 - DNA, 138 bp, Homo sapiens; identical to SEQ ID NO: 97572
  chr19:40743495-40743633
  hypo

SEQ ID NO: 190291 - DNA, 234 bp, Homo sapiens; identical to SEQ ID NO: 97573
  chr19:40744254-40744488
  hypo

SEQ ID NO: 190292 - DNA, 166 bp, Homo sapiens; identical to SEQ ID NO: 97574
  chr19:40744733-40744899
  hypo

SEQ ID NO: 190293 - DNA, 162 bp, Homo sapiens; identical to SEQ ID NO: 32598
  chr19:40745939-40746101
  hypo

SEQ ID NO: 190294 - DNA, 261 bp, Homo sapiens; identical to SEQ ID NO: 97576
  chr19:40748511-40748772
  hypo

SEQ ID NO: 190295 - DNA, 21 bp, Homo sapiens
  chr19:40749071-40749092
  hypo
caagagcgatcaccaatttcc

SEQ ID NO: 190296 - DNA, 106 bp, Homo sapiens
  chr19:40752790-40752896
  hypo
ggcctggggctaagaggttggcgggctgtcggcgcagagcaccgcgcgcagggcggggtggaagggagggtgccgaagacactcgcaggggcgggcctaccccacc

SEQ ID NO: 190297 - DNA, 336 bp, Homo sapiens
  chr19:40753396-40753732
  hypo
tgtccctgagcctcagtgaagcgctgaaagctacacgagactcaggagggtaaagcagggaccctctctagggaaggctcatgggacacccagccagggagcccacgggaaaagcaaaggaagaactctcctcgtaagccatgatctgcacccgcttttcagagaggggcccccacccctgccactcaacagcagtcccaagaacaccttccacttgcagaggctggtaccactgtgcgttatggtggaggactcctgtcgccctcccagcaaccctgtgtagtaggtactgccattcacttcatgctaaaatgacaagaccgaagcacagagagg

SEQ ID NO: 190298 - DNA, 27 bp, Homo sapiens
  chr19:40756120-40756147
  hypo
acatcaaggccaggcacggtggctcac

SEQ ID NO: 190299 - DNA, 73 bp, Homo sapiens; identical to SEQ ID NO: 97581
  chr19:40757958-40758031
  hypo

SEQ ID NO: 190300 - DNA, 197 bp, Homo sapiens
  chr19:40771904-40772101
  hypo
gaaagcaacctactgcgtatgcacggtctggggcctagaagccagtcctgggggcttgaccgaggccctgatccctaccccaagaccttcacttctgtcctcagggaccagcaaccaacagactgagggacgccgaggccactgcttcgtctcaggttcccagaacggaggggaggagggcgcgaggcagcgccagc

SEQ ID NO: 190301 - DNA, 230 bp, Homo sapiens; identical to SEQ ID NO: 97582
  chr19:40773000-40773230
  hypo

SEQ ID NO: 190302 - DNA, 208 bp, Homo sapiens; identical to SEQ ID NO: 97583
  chr19:40778364-40778572
  hypo

SEQ ID NO: 190303 - DNA, 170 bp, Homo sapiens; identical to SEQ ID NO: 32602
  chr19:40828671-40828841
  hypo

SEQ ID NO: 190304 - DNA, 446 bp, Homo sapiens; identical to SEQ ID NO: 97585
  chr19:40829073-40829519
  hypo

SEQ ID NO: 190305 - DNA, 243 bp, Homo sapiens; identical to SEQ ID NO: 97586
  chr19:40829748-40829991
  hypo

SEQ ID NO: 190306 - DNA, 31 bp, Homo sapiens; identical to SEQ ID NO: 97587
  chr19:40834858-40834889
  hypo

SEQ ID NO: 190307 - DNA, 27 bp, Homo sapiens
  chr19:40852718-40852745
  hypo
caccacgcccagccaaggacccattct

SEQ ID NO: 190308 - DNA, 110 bp, Homo sapiens; identical to SEQ ID NO: 32606
  chr19:40873916-40874026
  hypo

SEQ ID NO: 190309 - DNA, 30 bp, Homo sapiens; identical to SEQ ID NO: 32607
  chr19:40885226-40885256
  hypo

SEQ ID NO: 190310 - DNA, 30 bp, Homo sapiens; identical to SEQ ID NO: 97591
  chr19:40886883-40886913
  hypo

SEQ ID NO: 190311 - DNA, 84 bp, Homo sapiens; identical to SEQ ID NO: 97592
  chr19:40889833-40889917
  hypo

SEQ ID NO: 190312 - DNA, 208 bp, Homo sapiens
  chr19:40895454-40895662
  hypo
gcagggtgactgtacggatgtggcgggcggggaggggcgcgaagttgttctccttctggaactcgaaaaggttttgctccagcagctcaaagaccaggtagaacttgagggcgtcatggaagaactcaaggaagcggatgacgtgggcctcttcagggtctaggcctcgcatgcagtgcagcagcttcagctcgttcttgatgatgcg

SEQ ID NO: 190313 - DNA, 44 bp, Homo sapiens; identical to SEQ ID NO: 97594
  chr19:40900556-40900600
  hypo

SEQ ID NO: 190314 - DNA, 52 bp, Homo sapiens; identical to SEQ ID NO: 32608
  chr19:40900950-40901002
  hypo

SEQ ID NO: 190315 - DNA, 786 bp, Homo sapiens
  chr19:40901948-40902734
  hypo
cttcggaagatgcacgtcgggaaccttcggcacttgcatttccggcagccgaatctctgacactttcggcagctgcacctcggggaggtgcacatcgggcacagccatctcaggcaccttggggagttttatctctgggagcttcatgtcagggactttcatttcacagactttgggcagctgcacctctgggaggtgcacatcgggcacggccatttcaggcaccttggggagtttcatctctgagacttttggcagctgcacctcggggagtcgaacctctggcacagccatctcaggcattttagggagtttcatctctgggactttcgggagctgcacttccgggaggtgcacatcgggcacagccatctcgggcaccttcgggagtttcacctcagggagtttcatctcagggagcttcatctctgggacttttggaagctgcacttctgggaggtgcacatcgggcacggccatctcgggcaccttcgggagttgcacttcagggagtttcatctcaggaagtttcatctcaggcacctttggaagcttcatctcagggactttcatctctggcactttcggcagctgcacctctggaagccgcacctctggcacagccacctctgacacctctgggagtttcatctctgacactttcggcagctgtacctctggaagccgcacctccggcacagccatctctggcacctttgggagtttcatctccgacactttcagcagctgtacctctggaagccgcacctccggcacagccatctc

SEQ ID NO: 190316 - DNA, 30 bp, Homo sapiens; identical to SEQ ID NO: 97597
  chr19:40903627-40903657
  hypo

SEQ ID NO: 190317 - DNA, 30 bp, Homo sapiens; identical to SEQ ID NO: 97598
  chr19:40920599-40920629
  hypo

SEQ ID NO: 190318 - DNA, 114 bp, Homo sapiens; identical to SEQ ID NO: 32609
  chr19:40928721-40928835
  hypo

SEQ ID NO: 190319 - DNA, 151 bp, Homo sapiens; identical to SEQ ID NO: 131546
  chr19:40939938-40940089
  hypo

SEQ ID NO: 190320 - DNA, 30 bp, Homo sapiens
  chr19:40947499-40947529
  hypo
ggctccttttctaccgcagatgtgtcaatg

SEQ ID NO: 190321 - DNA, 25 bp, Homo sapiens
  chr19:40951174-40951199
  hypo
taatattattttttgccgggcgcag

SEQ ID NO: 190322 - DNA, 264 bp, Homo sapiens
  chr19:40951498-40951762
  hypo
gttggttttgaactcctggcctcaagcaatcttctcgcctctggatatttaaacttgtttcctcatcctcaaaatataccctcaattcccaggctgcttctcagaacacatttcaaaggtttcctcctctccgaagccctccctggcagtccaggttgggttaggatccattctaggattccatggcctcctgtgccgccatcccagtcctggactgtcagttactatatggactgaggaacgccccgccgagggcaggtacca

SEQ ID NO: 190323 - DNA, 171 bp, Homo sapiens
  chr19:40952303-40952474
  hypo
ggggtcccactccgtcgtggatgctggagtgcagtggcgcaccttggctcactgcagcctcagcctccctcctgaagcactagtgtaactctgtccccgggttacagccgtatgcttctttctgatgcctcccctccacccctcaccaactgtccacgcaggctcccaggc

SEQ ID NO: 190324 - DNA, 30 bp, Homo sapiens; identical to SEQ ID NO: 32613
  chr19:40953819-40953849
  hypo

SEQ ID NO: 190325 - DNA, 32 bp, Homo sapiens; identical to SEQ ID NO: 97605
  chr19:40955775-40955807
  hypo

SEQ ID NO: 190326 - DNA, 170 bp, Homo sapiens; identical to SEQ ID NO: 131552
  chr19:40972621-40972791
  hypo

SEQ ID NO: 190327 - DNA, 154 bp, Homo sapiens; identical to SEQ ID NO: 131553
  chr19:40973005-40973159
  hypo

SEQ ID NO: 190328 - DNA, 30 bp, Homo sapiens; identical to SEQ ID NO: 97606
  chr19:40975446-40975476
  hypo

SEQ ID NO: 190329 - DNA, 45 bp, Homo sapiens; identical to SEQ ID NO: 32614
  chr19:40995691-40995736
  hypo

SEQ ID NO: 190330 - DNA, 67 bp, Homo sapiens
  chr19:41008063-41008130
  hypo
gatcatagaacgctacgaggagctggcggctgagctgctggcctggatccaccgcaccgtgggcctc

SEQ ID NO: 190331 - DNA, 30 bp, Homo sapiens
  chr19:41008351-41008381
  hypo
cgtgcctgcaaccgtcgcctctttgtgcct

SEQ ID NO: 190332 - DNA, 629 bp, Homo sapiens; identical to SEQ ID NO: 12363
  chr19:41025293-41025922
  hypo

SEQ ID NO: 190333 - DNA, 30 bp, Homo sapiens
  chr19:41066214-41066244
  hypo
acagccgacgccctgcgcttccacagccaa

SEQ ID NO: 190334 - DNA, 30 bp, Homo sapiens; identical to SEQ ID NO: 97609
  chr19:41084370-41084400
  hypo

SEQ ID NO: 190335 - DNA, 248 bp, Homo sapiens; identical to SEQ ID NO: 97610
  chr19:41133574-41133822
  hypo

SEQ ID NO: 190336 - DNA, 30 bp, Homo sapiens; identical to SEQ ID NO: 97611
  chr19:41135578-41135608
  hypo

SEQ ID NO: 190337 - DNA, 390 bp, Homo sapiens
  chr19:41168075-41168465
  hypo
gcagggcggggacgccgacccattatagacagtgacagcctagagccatcacggcgggatggtggggaggggacaggcagaggggtgggaggccaggatgggggaagcccgggcagagaggttgggctggaatggggggcacaggcagaggggtcggggcggggactggtgaggtgcaggcagagggcaaaggggtcgaggtccagatgggagatgtacaggcagacggatccgggccagggcggggaggtacaggcccagttgaggagcataaggaaccataggagcccaaaggaggcgcccgaccagtcagggaggacttcccagaggggtgaatggctgagccagggcctgaagtataatgttcatgaatgcgacagcaattttttt

SEQ ID NO: 190338 - DNA, 30 bp, Homo sapiens
  chr19:41172713-41172743
  hypo
cggacccctccccagcgggcaccgacatga

SEQ ID NO: 190339 - DNA, 31 bp, Homo sapiens; identical to SEQ ID NO: 97612
  chr19:41174214-41174245
  hypo

SEQ ID NO: 190340 - DNA, 30 bp, Homo sapiens
  chr19:41189580-41189610
  hypo
atggctaaaccagaacgtccttatcggtag

SEQ ID NO: 190341 - DNA, 390 bp, Homo sapiens; identical to SEQ ID NO: 56208
  chr19:41190145-41190535
  hypo

SEQ ID NO: 190342 - DNA, 31 bp, Homo sapiens; identical to SEQ ID NO: 97614
  chr19:41201589-41201620
  hypo

SEQ ID NO: 190343 - DNA, 567 bp, Homo sapiens
  chr19:41281361-41281928
  hypo
agtttccttgtactacgggagagagggaggggaggaaattggagaccccagcacccccttgctcactctcttgctcacagtccacgatggcccggtccctggtgtgccttggtgtcatcatcttgctgtctgccttctccggacctggtgtcaggggtggtcctatgcccaagctggctgaccggaagctgtgtgcggaccaggagtgcagccgtaagaatggggaggggagaattgggggcttgggcgttagcctgtgtggagggtgctgcattcccttctattccttccctagaccctatctccatggctgtggcccttcaggactacatggcccccgactgccgattcctgaccattcaccggggccaagtggtgtatgtcttctccaagctgaagggccgtgggcggctcttctggggaggcagcgtgagtcttgggagagtgaaagagggaagggtacagagctggggtagactcattatccccatgaagggaagatttgaggggggtgaactgaaatagacattgtggggggatattgttacttactttattttatttgct

SEQ ID NO: 190344 - DNA, 231 bp, Homo sapiens; identical to SEQ ID NO: 97616
  chr19:41292577-41292808
  hypo

SEQ ID NO: 190345 - DNA, 22 bp, Homo sapiens
  chr19:41294369-41294391
  hypo
gacagagcgagactcttaaaaa

SEQ ID NO: 190346 - DNA, 34 bp, Homo sapiens; identical to SEQ ID NO: 131593
  chr19:41304118-41304152
  hypo

SEQ ID NO: 190347 - DNA, 31 bp, Homo sapiens; identical to SEQ ID NO: 97619
  chr19:41328143-41328174
  hypo

SEQ ID NO: 190348 - DNA, 30 bp, Homo sapiens
  chr19:41384572-41384602
  hypo
tgaacgggtctgtgtcgtctgcccgcccca

SEQ ID NO: 190349 - DNA, 62 bp, Homo sapiens
  chr19:41602156-41602218
  hypo
tgccacaaacctctacgaaggggaaaagcgttcatgcccattttacacgtgacaaagctgcg

SEQ ID NO: 190350 - DNA, 30 bp, Homo sapiens
  chr19:41602428-41602458
  hypo
gcacactttcctactcggcacgctttgaac

SEQ ID NO: 190351 - DNA, 42 bp, Homo sapiens; identical to SEQ ID NO: 32619
  chr19:41616325-41616367
  hypo

SEQ ID NO: 190352 - DNA, 30 bp, Homo sapiens; identical to SEQ ID NO: 32620
  chr19:41630531-41630561
  hypo

SEQ ID NO: 190353 - DNA, 175 bp, Homo sapiens
  chr19:41643140-41643315
  hypo
atggccctacaccaacgcagtgctgctggagatccagcgcttcatcagcgtggtgccgcgcaccctcaccctcgacacccacctgcacagccactgtctggccaaaggtgcccactgagtctggagatcctgtgtggggccccgatgcatgagcgtattccgagatcagccagaa

SEQ ID NO: 190354 - DNA, 99 bp, Homo sapiens; identical to SEQ ID NO: 32621
  chr19:41665354-41665453
  hypo

SEQ ID NO: 190355 - DNA, 261 bp, Homo sapiens
  chr19:41673619-41673880
  hypo
tctgtgctgacaatacgtagctacgtaggaccaagcatccagcagaacgcacagtccgagacactctaggttgtggtagtaactgctgtaaaataactcctttattattgcacgtcagaataggcaagagagtgtaacacagaaaacatcagctactcttcagggtggtgactgctccttagtctaggtatgtacacctggaagggtccgtgaacattttccatgggagagatggatacagagataagttaaaggaaattg

SEQ ID NO: 190356 - DNA, 343 bp, Homo sapiens; identical to SEQ ID NO: 32622
  chr19:41675690-41676033
  hypo

SEQ ID NO: 190357 - DNA, 351 bp, Homo sapiens
  chr19:41680149-41680500
  hypo
ctgagccaccgtacccggctgaaatttgtaatcaacccataatcatctattacttatgtaactgaattcctatgaaaagcataataaagtggagatcataaaggtgccgacttcgggctgttgtaagatttcggtgccacacctagcacagaaaaagcatggagagcagaagggcagtgaacgccagctggcacacgttggctacgtgcaagtattcgcctaaacgctgcgcaggtattcatcatatgatccccataaacctctgagggctgcactcacatgtcatccccgatctgctgatgagaagttcagttataggcccaaggtcacatatcccgagccagcgtaaaa

SEQ ID NO: 190358 - DNA, 30 bp, Homo sapiens
  chr19:41715996-41716026
  hypo
cagatggggtttcatcgtgttggccaggtg

SEQ ID NO: 190359 - DNA, 30 bp, Homo sapiens
  chr19:41722313-41722343
  hypo
aagaaaaaaagagatcgggctgggtgcagt

SEQ ID NO: 190360 - DNA, 30 bp, Homo sapiens; identical to SEQ ID NO: 97624
  chr19:41787123-41787153
  hypo

SEQ ID NO: 190361 - DNA, 30 bp, Homo sapiens; identical to SEQ ID NO: 97625
  chr19:41798357-41798387
  hypo

SEQ ID NO: 190362 - DNA, 447 bp, Homo sapiens
  chr19:41809772-41810219
  hypo
tgcgcctggccatgccggctcacagtagtcaccaagacaacccagttccctggggttgccatttgggaatgatggcgcctttcatctggatttctccaacacaggtttcaaccgcagcggaggtggtggctatagccagaaccgctggggtaacaacaaccgggataacaacaactccaacaacagaggcagctacaaccgggctccccagcaacagccgccaccacagcagcctccgccaccacagccaccaccccagcagccaccgccaccacccagctacagccctgctcggaaccccccaggggccagcacctacaataagaacagcaacatccctggctcaagcgccaataccagcacccccaccgtcagcagctacagccctccacaggtgagagaatgagtgtgtgtttgtatgtagtgatcgcacgtgtgcttttgaac

SEQ ID NO: 190363 - DNA, 30 bp, Homo sapiens; identical to SEQ ID NO: 97626
  chr19:41816099-41816129
  hypo

SEQ ID NO: 190364 - DNA, 123 bp, Homo sapiens; identical to SEQ ID NO: 97627
  chr19:41854192-41854315
  hypo

SEQ ID NO: 190365 - DNA, 459 bp, Homo sapiens; identical to SEQ ID NO: 131606
  chr19:41859851-41860310
  hypo

SEQ ID NO: 190366 - DNA, 31 bp, Homo sapiens; identical to SEQ ID NO: 32624
  chr19:41872642-41872673
  hypo

SEQ ID NO: 190367 - DNA, 19 bp, Homo sapiens
  chr19:41881146-41881165
  hypo
agcatgcaagtgagcccgt

SEQ ID NO: 190368 - DNA, 121 bp, Homo sapiens; identical to SEQ ID NO: 32625
  chr19:41881464-41881585
  hypo

SEQ ID NO: 190369 - DNA, 184 bp, Homo sapiens; identical to SEQ ID NO: 97633
  chr19:41919911-41920095
  hypo

SEQ ID NO: 190370 - DNA, 242 bp, Homo sapiens
  chr19:41921079-41921321
  hypo
cacatgctctaggagggcaaacgccctgtggtgtttgtctaaggtctagtgtcatccgtgcggaaaaagatttccagacaccaggcagcaagctgggcccccgccagctgtgctgagcactgcacctgtttttgctgaagggttctcttgtgagggcaccaggcaggaccgagcaagcctcatgggaatcatgggagccgctgagctctccacatgggagagctggccgcctctgcaagaat

SEQ ID NO: 190371 - DNA, 91 bp, Homo sapiens; identical to SEQ ID NO: 97635
  chr19:41932288-41932379
  hypo

SEQ ID NO: 190372 - DNA, 136 bp, Homo sapiens; identical to SEQ ID NO: 97636
  chr19:41932387-41932523
  hypo

SEQ ID NO: 190373 - DNA, 31 bp, Homo sapiens; identical to SEQ ID NO: 97637
  chr19:41946358-41946389
  hypo

SEQ ID NO: 190374 - DNA, 471 bp, Homo sapiens; identical to SEQ ID NO: 12387
  chr19:42028282-42028753
  hypo

SEQ ID NO: 190375 - DNA, 30 bp, Homo sapiens
  chr19:42029883-42029913
  hypo
agactacaccccctgcgatattgggtgtaa

SEQ ID NO: 190376 - DNA, 22 bp, Homo sapiens
  chr19:42234040-42234062
  hypo
tttaaaaaagtctgtgtgggcc

SEQ ID NO: 190377 - DNA, 27 bp, Homo sapiens
  chr19:42282955-42282982
  hypo
taagagtcaaggggctgggtgcggtgg

SEQ ID NO: 190378 - DNA, 469 bp, Homo sapiens
  chr19:42348887-42349356
  hypo
aggcagcggtggcgcgaggctcaactcgaagcgctattggtgggactgatagtcttgtgcgccaagaagctggcagaagggaaggggcgggacatcagttcaggatctcaaaccgcattggtcgtctgcctcggctgagagaggcgatgcttgaagttcattggtctttgtgagacagggtaagaaaagcagcgcgagcttggcggttcctctggccactttctcacagtgtctttgggcgtcttcttgactgaatctgactccattggaggctgtggtaaccgtgaactagctgcacgaacacggtccctcctgcctttccgtcctcctccctcttagccggactccctaacccaggcatcccctctcctccccctcgcgcccctcccgccctcgcgccccctctccccttccctgcctcgcgggccccttggcgcgttcccggttccccactcgctccctggggcac

SEQ ID NO: 190379 - DNA, 135 bp, Homo sapiens
  chr19:42373111-42373246
  hypo
cggcacctgtacctccggggtggcgctggggttggctccatgaccaagatctatgggggacgtcagagaaacggcgtcatgcccagccacttcagccgaggctccaagagtgtggcccgccgggtcctccaagcc

SEQ ID NO: 190380 - DNA, 30 bp, Homo sapiens
  chr19:42373801-42373831
  hypo
tctggacagaatcgccggacaggtaaggcc

SEQ ID NO: 190381 - DNA, 162 bp, Homo sapiens
  chr19:42383168-42383330
  hypo
cgtcacctggtggcgcgtcctccatggcaactacacgtggccccctgagttcttgggcccgggcgaggaccccaatggtacgctgatcatccagaatgtgaacaagagccatgggggcatatacgtgtgccgggtccaggagggcaacgagtcataccagca

SEQ ID NO: 190382 - DNA, 242 bp, Homo sapiens; identical to SEQ ID NO: 32628
  chr19:42398489-42398731
  hypo

SEQ ID NO: 190383 - DNA, 309 bp, Homo sapiens; identical to SEQ ID NO: 97643
  chr19:42400291-42400600
  hypo

SEQ ID NO: 190384 - DNA, 30 bp, Homo sapiens; identical to SEQ ID NO: 32630
  chr19:42407456-42407486
  hypo

SEQ ID NO: 190385 - DNA, 30 bp, Homo sapiens
  chr19:42407885-42407915
  hypo
gacttgtcccaccttcggcagagcagcgac

SEQ ID NO: 190386 - DNA, 353 bp, Homo sapiens; identical to SEQ ID NO: 32631
  chr19:42408202-42408555
  hypo

SEQ ID NO: 190387 - DNA, 305 bp, Homo sapiens; identical to SEQ ID NO: 97646
  chr19:42408827-42409132
  hypo

SEQ ID NO: 190388 - DNA, 96 bp, Homo sapiens
  chr19:42409332-42409428
  hypo
tgctctcatcactgagactgccggatccctgaaagtccctgcccctgcctctcgccctaagccccggcccagcccgagcaggtgaggggggccatg

SEQ ID NO: 190389 - DNA, 30 bp, Homo sapiens; identical to SEQ ID NO: 97647
  chr19:42412448-42412478
  hypo

SEQ ID NO: 190390 - DNA, 596 bp, Homo sapiens
  chr19:42424086-42424682
  hypo
catgatacgcccagacgtgacgaactcacagacatgacacgcccacagacgtgacacacccagacatgacgaactcacagacatgacgcgctcacagacatgatacgctcacagacatgacacacccagatgtgacacactcacagacatgacacgctcacagacatacactcacagacatgacacgctcacacatgcgctcacagacatgacacgcccagacatgatgcactcagacatgacacgctcacagacatgcgctcacagacatgacatgcccagacgtgacactcagacgtgacgtgctcagacgtgaggcacagacatgacatgctcacagacatgataacgctcacagacatgcgctcacagacatgacatgcccagacgtgacacactcagacgtgatgcactcagacgtgacgcacagacatgacatgttcacagacatgacatgcccagatgtgacacactcacagacatgacacactcacagacatgacacgctcacagacatgacacgcccagacatgatgaactcacagacgtgacacacagacatgacgcactcagacatgacacgctcacagacatga

SEQ ID NO: 190391 - DNA, 546 bp, Homo sapiens; identical to SEQ ID NO: 97649
  chr19:42460852-42461398
  hypo

SEQ ID NO: 190392 - DNA, 30 bp, Homo sapiens; identical to SEQ ID NO: 32634
  chr19:42509931-42509961
  hypo

SEQ ID NO: 190393 - DNA, 30 bp, Homo sapiens
  chr19:42519841-42519871
  hypo
gacacaggaccgacccgggagaataggctc

SEQ ID NO: 190394 - DNA, 30 bp, Homo sapiens
  chr19:42546962-42546992
  hypo
cggatcctggagcccggaccaggcaggtag

SEQ ID NO: 190395 - DNA, 30 bp, Homo sapiens; identical to SEQ ID NO: 97651
  chr19:42578890-42578920
  hypo

SEQ ID NO: 190396 - DNA, 30 bp, Homo sapiens
  chr19:42585442-42585472
  hypo
tggctgactctgcccgacttcctctttggc

SEQ ID NO: 190397 - DNA, 56 bp, Homo sapiens
  chr19:42638976-42639032
  hypo
ctcgccggatcgatacgtttgactcccgacaagacaataatcgcttgtacgcggcc

SEQ ID NO: 190398 - DNA, 57 bp, Homo sapiens; identical to SEQ ID NO: 97652
  chr19:42657374-42657431
  hypo

SEQ ID NO: 190399 - DNA, 186 bp, Homo sapiens; identical to SEQ ID NO: 97653
  chr19:42700690-42700876
  hypo

SEQ ID NO: 190400 - DNA, 89 bp, Homo sapiens
  chr19:42712731-42712820
  hypo
cactgccagtgcctggcgcatggaataaaatccaaactgtcatccctgccgtggcccgcgaggccaagctgctccggccccagcctggc

SEQ ID NO: 190401 - DNA, 453 bp, Homo sapiens
  chr19:42722445-42722898
  hypo
atctcacgttcaggacggatacctccttccaagcggcaacagaaccctccattccgactgtgtacatctcgatggcgtccatcacgacccccatcacagtcagatgtctccacccagagccaaaacggcccctccgtaaccccttccaatctctgccctccagggtcgcccagatacccgctccctaacttgcaacaactagagagggtctgtcagggagtctaggctgtggtgtatgcgtgtccccttaccgcggggccttgggtgtgacggtcgccacgccccccacttaggtgactcaaggtcaggacctgcatgtacttgagacaagtcccctccctggacctcttcccacccccgcaattaactcctcttgggagtcgggagatctgggtcctgcctagcactggcccagtactggctctgcctgagctgtagcagtgaattcaaaag

SEQ ID NO: 190402 - DNA, 32 bp, Homo sapiens; identical to SEQ ID NO: 32636
  chr19:42723737-42723769
  hypo

SEQ ID NO: 190403 - DNA, 30 bp, Homo sapiens
  chr19:42728845-42728875
  hypo
gccggagctggtgccgggtgctgaggggcc

SEQ ID NO: 190404 - DNA, 47 bp, Homo sapiens; identical to SEQ ID NO: 97656
  chr19:42729403-42729450
  hypo

SEQ ID NO: 190405 - DNA, 30 bp, Homo sapiens; identical to SEQ ID NO: 97657
  chr19:42738763-42738793
  hypo

SEQ ID NO: 190406 - DNA, 31 bp, Homo sapiens; identical to SEQ ID NO: 97658
  chr19:42739032-42739063
  hypo

SEQ ID NO: 190407 - DNA, 112 bp, Homo sapiens; identical to SEQ ID NO: 131634
  chr19:42749160-42749272
  hypo

SEQ ID NO: 190408 - DNA, 26 bp, Homo sapiens
  chr19:42771609-42771635
  hypo
gtttcggggaaaaaaataataataat

SEQ ID NO: 190409 - DNA, 30 bp, Homo sapiens; identical to SEQ ID NO: 97660
  chr19:42776864-42776894
  hypo

SEQ ID NO: 190410 - DNA, 376 bp, Homo sapiens; identical to SEQ ID NO: 32637
  chr19:42791225-42791601
  hypo

SEQ ID NO: 190411 - DNA, 95 bp, Homo sapiens
  chr19:42796466-42796561
  hypo
gtcagcgggcgggcacgcgctgcccctgggtaccagccctgcgtccagccaggctggaacagtcacctcgtacgggcccacgagctctgtagctc

SEQ ID NO: 190412 - DNA, 31 bp, Homo sapiens; identical to SEQ ID NO: 97663
  chr19:42809712-42809743
  hypo

SEQ ID NO: 190413 - DNA, 183 bp, Homo sapiens; identical to SEQ ID NO: 97664
  chr19:42813634-42813817
  hypo

SEQ ID NO: 190414 - DNA, 20 bp, Homo sapiens
  chr19:42815749-42815769
  hypo
ccctgcgaaccctctatttt

SEQ ID NO: 190415 - DNA, 144 bp, Homo sapiens
  chr19:42856438-42856582
  hypo
gtggccctccctgcccgctgggcatacgcccgctgtcctgacgtggatgagtgtcgcctgggcctggcccggtgccacccgcgggcgacctgcctgaacacgcccctcagctacgagtgtcactgccagcggggctaccagggt

SEQ ID NO: 190416 - DNA, 237 bp, Homo sapiens; identical to SEQ ID NO: 97666
  chr19:42873731-42873968
  hypo

SEQ ID NO: 190417 - DNA, 30 bp, Homo sapiens
  chr19:42879711-42879741
  hypo
ctaccgcctcatctcggtggagcaggagtg

SEQ ID NO: 190418 - DNA, 30 bp, Homo sapiens; identical to SEQ ID NO: 97667
  chr19:42880142-42880172
  hypo

SEQ ID NO: 190419 - DNA, 30 bp, Homo sapiens; identical to SEQ ID NO: 32639
  chr19:42893088-42893118
  hypo

SEQ ID NO: 190420 - DNA, 316 bp, Homo sapiens; identical to SEQ ID NO: 97669
  chr19:42906775-42907091
  hypo

SEQ ID NO: 190421 - DNA, 30 bp, Homo sapiens; identical to SEQ ID NO: 32641
  chr19:42909504-42909534
  hypo

SEQ ID NO: 190422 - DNA, 71 bp, Homo sapiens
  chr19:42914486-42914557
  hypo
catcccttatgcagcgtgacatactcccggaggaagtcggcggtgagcccctcgtcgccctcaaagaagag

SEQ ID NO: 190423 - DNA, 1097 bp, Homo sapiens; identical to SEQ ID NO: 131650
  chr19:42927303-42928400
  hypo

SEQ ID NO: 190424 - DNA, 85 bp, Homo sapiens; identical to SEQ ID NO: 97673
  chr19:43181319-43181404
  hypo

SEQ ID NO: 190425 - DNA, 30 bp, Homo sapiens
  chr19:43202263-43202293
  hypo
taaacaagcacagtgcggcggccgcccagg

SEQ ID NO: 190426 - DNA, 31 bp, Homo sapiens; identical to SEQ ID NO: 56255
  chr19:43866888-43866919
  hypo

SEQ ID NO: 190427 - DNA, 30 bp, Homo sapiens
  chr19:43867332-43867362
  hypo
ctatacgcaattcgtcgctgacccaaacgt

SEQ ID NO: 190428 - DNA, 151 bp, Homo sapiens
  chr19:43918867-43919018
  hypo
cgccactcaccttccgagcatgcgcaccctccgagattgccaggaattgacttctctgtggccaatgaggtgccgcgttcctccaggctcatccaatgaacttatccgatgcttttgcatccaccaatggggtttcgagtgctgtgtggcc

SEQ ID NO: 190429 - DNA, 328 bp, Homo sapiens
  chr19:43919346-43919674
  hypo
gggctctcagaatcccgggttctgatgaggctggggctggggctgggggccgagattctgggtccctgagagaatgtaagggacccctgagactgagggagaagcggccttcagggccacactcctgatcctgaagttggagggcactgggtggccgggcctgagaattaaaaccatgaaaaactggggcgtgataaacctgtgaactcgctccagctcacaagccggttagggacagaacgactttagaagtcgtggtcatatacaccataaaccccactgtgaggccgggcatcagggctcactcctggaatcccagcactatggg

SEQ ID NO: 190430 - DNA, 244 bp, Homo sapiens; identical to SEQ ID NO: 131654
  chr19:43967266-43967510
  hypo

SEQ ID NO: 190431 - DNA, 442 bp, Homo sapiens; identical to SEQ ID NO: 56256
  chr19:43967733-43968175
  hypo

SEQ ID NO: 190432 - DNA, 37 bp, Homo sapiens; identical to SEQ ID NO: 97677
  chr19:43975085-43975122
  hypo

SEQ ID NO: 190433 - DNA, 237 bp, Homo sapiens
  chr19:43979356-43979593
  hypo
ggccggcgatcccgtcgggggcaaggcacctgcaacccagaacgcagcagctcaggccagctgaactgccgcgcctgcggaattcccgggagagttccaaagcggtgcgtccaagttttccggcagtgggcggggcctaggaacgcccccgcgccccgcgccggcggagcctcgaagggacttccccccaagagggcggggccactcagggggcgtggttttcgtcagcggcggtca

SEQ ID NO: 190434 - DNA, 128 bp, Homo sapiens; identical to SEQ ID NO: 97678
  chr19:44005793-44005921
  hypo

SEQ ID NO: 190435 - DNA, 30 bp, Homo sapiens; identical to SEQ ID NO: 97679
  chr19:44022620-44022650
  hypo

SEQ ID NO: 190436 - DNA, 21 bp, Homo sapiens
  chr19:44023448-44023469
  hypo
ccaccgcgcccggcctgtgct

SEQ ID NO: 190437 - DNA, 22 bp, Homo sapiens
  chr19:44033883-44033905
  hypo
cgtctcaaaaaaaaaaaaaatt

SEQ ID NO: 190438 - DNA, 30 bp, Homo sapiens
  chr19:44080861-44080891
  hypo
ggagacaaggcaccccgcacccgcaggacc

SEQ ID NO: 190439 - DNA, 30 bp, Homo sapiens; identical to SEQ ID NO: 97682
  chr19:44096446-44096476
  hypo

SEQ ID NO: 190440 - DNA, 123 bp, Homo sapiens; identical to SEQ ID NO: 97683
  chr19:44096723-44096846
  hypo

SEQ ID NO: 190441 - DNA, 94 bp, Homo sapiens
  chr19:44128765-44128859
  hypo
cttttgactcaagtttcttcctccactaagaaacagagtccaagaaacaggtccaagtcccttcccaccttgtctaaaacgctccaagtattta

SEQ ID NO: 190442 - DNA, 779 bp, Homo sapiens; identical to SEQ ID NO: 131666
  chr19:44143629-44144408
  hypo

SEQ ID NO: 190443 - DNA, 30 bp, Homo sapiens
  chr19:44189625-44189655
  hypo
agtcgtgagccaccgcgccaggccctaatt

SEQ ID NO: 190444 - DNA, 91 bp, Homo sapiens; identical to SEQ ID NO: 97686
  chr19:44207877-44207968
  hypo

SEQ ID NO: 190445 - DNA, 764 bp, Homo sapiens
  chr19:44222770-44223534
  hypo
aaggaaaggctggaggccctgcgcacagcctttgagtcgggtgacctcccccaggccgcctctcacctccaggagctgctggcctccacggaaagcatccgcctggaggtgggcgtcacgggcgagtcgggcgcgggcaagtcctccctcatcaatgccctgcgtggcctggaggccgaggaccctggcgcggctctcacgggcgtcatggagaccacgatgcaaccgtcgccctatccacacccacagttccctgacgtgaccctctgggacctgccaggagccggctctccaggctgcccggctgacaagtacctaaagcaggtagacttcagccgctatgacttcttcctgctggtctccccccgccgctgcggggccgtcgagacccgcctggccgctgagatcctgtgccagggcaagaagttctactttgtgcgcaccaaggtggacgaggacctggcggccacgcgcacccagcggccgtcgggcttcagagaggccgctgtcctgcaggagatccgagaccactgtgccgagcggctgcgggaggccggcgtggctgaccctcgcatcttcctggtgtccaacctctcgccggcccgctacgactttcccacgctggtgtccacctgggagcacgacctgccctcccaccggcgccacgctggcctgctgtcgctccccgacatctcgctggaggccttgcagaagaagaaggccatgcttcaagagcaagtcctcaagaccgccctggtgttggg

SEQ ID NO: 190446 - DNA, 168 bp, Homo sapiens; identical to SEQ ID NO: 97688
  chr19:44243553-44243721
  hypo

SEQ ID NO: 190447 - DNA, 267 bp, Homo sapiens; identical to SEQ ID NO: 97689
  chr19:44273508-44273775
  hypo

SEQ ID NO: 190448 - DNA, 30 bp, Homo sapiens; identical to SEQ ID NO: 56267
  chr19:44286497-44286527
  hypo

SEQ ID NO: 190449 - DNA, 40 bp, Homo sapiens
  chr19:44502273-44502313
  hypo
gttcctgattggtcccgggccaaggtcccagaccaagctg

SEQ ID NO: 190450 - DNA, 30 bp, Homo sapiens; identical to SEQ ID NO: 12408
  chr19:44511186-44511216
  hypo

SEQ ID NO: 190451 - DNA, 30 bp, Homo sapiens; identical to SEQ ID NO: 97692
  chr19:44530308-44530338
  hypo

SEQ ID NO: 190452 - DNA, 35 bp, Homo sapiens; identical to SEQ ID NO: 97693
  chr19:44530713-44530748
  hypo

SEQ ID NO: 190453 - DNA, 35 bp, Homo sapiens; identical to SEQ ID NO: 97694
  chr19:44530807-44530842
  hypo

SEQ ID NO: 190454 - DNA, 45 bp, Homo sapiens; identical to SEQ ID NO: 32646
  chr19:44564103-44564148
  hypo

SEQ ID NO: 190455 - DNA, 38 bp, Homo sapiens; identical to SEQ ID NO: 32647
  chr19:44575623-44575661
  hypo

SEQ ID NO: 190456 - DNA, 30 bp, Homo sapiens
  chr19:44577612-44577642
  hypo
gaaattggagaaatacgagtagtacaagtt

SEQ ID NO: 190457 - DNA, 57 bp, Homo sapiens; identical to SEQ ID NO: 32648
  chr19:44578498-44578555
  hypo

SEQ ID NO: 190458 - DNA, 29 bp, Homo sapiens
  chr19:44655369-44655398
  hypo
tggtaaggacattgctcgctctgtcgccc

SEQ ID NO: 190459 - DNA, 323 bp, Homo sapiens
  chr19:44932983-44933306
  hypo
atctgtaaggtttctcgcctgtgtggactctctggtgaatgagaagccctgagctgtaactgaagcctttgccacactcagcacatttatagggtttctctccagtgtggaccctctgatggataaggaggtcggagctgtagatgaaacccttcccacacacgtcacacacgtagggcctctctcccgtgtggaccctctggtggctgtgaaggtctgaattccgccggaagcccttcccacactcactgcatttatagggtttctctcctgtgtggaccctctgatggatgtggaggtcggagctccggccaaagctcttc

SEQ ID NO: 190460 - DNA, 32 bp, Homo sapiens; identical to SEQ ID NO: 97699
  chr19:44988474-44988506
  hypo

SEQ ID NO: 190461 - DNA, 797 bp, Homo sapiens; identical to SEQ ID NO: 131696
  chr19:45004124-45004921
  hypo

SEQ ID NO: 190462 - DNA, 94 bp, Homo sapiens; identical to SEQ ID NO: 32650
  chr19:45108542-45108636
  hypo

SEQ ID NO: 190463 - DNA, 31 bp, Homo sapiens; identical to SEQ ID NO: 97702
  chr19:45141558-45141589
  hypo

SEQ ID NO: 190464 - DNA, 151 bp, Homo sapiens; identical to SEQ ID NO: 32651
  chr19:45149596-45149747
  hypo

SEQ ID NO: 190465 - DNA, 504 bp, Homo sapiens; identical to SEQ ID NO: 97704
  chr19:45150350-45150854
  hypo

SEQ ID NO: 190466 - DNA, 30 bp, Homo sapiens; identical to SEQ ID NO: 97705
  chr19:45153470-45153500
  hypo

SEQ ID NO: 190467 - DNA, 36 bp, Homo sapiens; identical to SEQ ID NO: 97706
  chr19:45162025-45162061
  hypo

SEQ ID NO: 190468 - DNA, 207 bp, Homo sapiens; identical to SEQ ID NO: 97707
  chr19:45164647-45164854
  hypo

SEQ ID NO: 190469 - DNA, 30 bp, Homo sapiens
  chr19:45169169-45169199
  hypo
ctcattcaccagcgccgcccaccgctcaac

SEQ ID NO: 190470 - DNA, 148 bp, Homo sapiens; identical to SEQ ID NO: 32654
  chr19:45186850-45186998
  hypo

SEQ ID NO: 190471 - DNA, 105 bp, Homo sapiens; identical to SEQ ID NO: 97709
  chr19:45193692-45193797
  hypo

SEQ ID NO: 190472 - DNA, 31 bp, Homo sapiens; identical to SEQ ID NO: 97710
  chr19:45202941-45202972
  hypo

SEQ ID NO: 190473 - DNA, 205 bp, Homo sapiens
  chr19:45206657-45206862
  hypo
tggagcctgcccagccgagcgaaggggacaacgtcacgctggtcgtccatgggctttcgggggaactgctcgcctacagctggtatgcggggcccacactcagcgtgtcatacctggtggccagctacatcgtgagcacaggcgatgagactcctggcccggcccacacggggcgggaggctgtgcgccccgatggcagcctgga

SEQ ID NO: 190474 - DNA, 262 bp, Homo sapiens; identical to SEQ ID NO: 56294
  chr19:45207312-45207574
  hypo

SEQ ID NO: 190475 - DNA, 123 bp, Homo sapiens; identical to SEQ ID NO: 97712
  chr19:45211219-45211342
  hypo

SEQ ID NO: 190476 - DNA, 91 bp, Homo sapiens; identical to SEQ ID NO: 97713
  chr19:45268258-45268349
  hypo

SEQ ID NO: 190477 - DNA, 204 bp, Homo sapiens
  chr19:45279713-45279917
  hypo
gcctaggatggggcgcggccagaatgccttgcttaggggcgaggcccacagcgccccgatggctgcccagcgagcaactgagcaaccaggctgatgttacaggttctacaggttgggtgaaagccacgcccggccacccctacacaaatgagttgctccccgcccccacagtcttgaacgccatcctcccgcctggcttcttcg

SEQ ID NO: 190478 - DNA, 82 bp, Homo sapiens; identical to SEQ ID NO: 97715
  chr19:45280160-45280242
  hypo

SEQ ID NO: 190479 - DNA, 199 bp, Homo sapiens; identical to SEQ ID NO: 56299
  chr19:45312125-45312324
  hypo

SEQ ID NO: 190480 - DNA, 378 bp, Homo sapiens; identical to SEQ ID NO: 97717
  chr19:45314499-45314877
  hypo

SEQ ID NO: 190481 - DNA, 17 bp, Homo sapiens
  chr19:45315116-45315133
  hypo
ggcgacagagcaagact

SEQ ID NO: 190482 - DNA, 322 bp, Homo sapiens
  chr19:45315414-45315736
  hypo
cacagaccgaccgctcgggagctcgcccccgcctagcctcggctgagatgcagggctctgagctccaggtcacaatgcacgacacccggggccgcagtcccccataccagctggactcccaggggcgcctggtgctggctgaggcccaggtgggcgacgagcgagactacgtgtgcgtggtgagggcaggggcggcaggcactgctgaggccactgcgcggctcaacgtgtttggtaagtgtcctcgggcatcccccgaagggaggcaggcagggaggggcgcagggcaggggctcctgacgtgaacgtctttttcacagca

SEQ ID NO: 190483 - DNA, 30 bp, Homo sapiens; identical to SEQ ID NO: 97719
  chr19:45316667-45316697
  hypo

SEQ ID NO: 190484 - DNA, 31 bp, Homo sapiens; identical to SEQ ID NO: 97720
  chr19:45317398-45317429
  hypo

SEQ ID NO: 190485 - DNA, 30 bp, Homo sapiens
  chr19:45321785-45321815
  hypo
ccccctggagctcagcgaggggaaggtgct

SEQ ID NO: 190486 - DNA, 30 bp, Homo sapiens
  chr19:45322035-45322065
  hypo
cagttctatcaccttcgattccaatggcac

SEQ ID NO: 190487 - DNA, 305 bp, Homo sapiens
  chr19:45322432-45322737
  hypo
gccaattggggggcagcgtaagggaccttcctctccaccctgagccccctctcactcatccaagtatcacaccctcctttccacttcctgggagactggacgtcgttcacctctgcccttgaccccaccccttgaccccaccagccggggcctgatcggagcctccatagcccgcagagccaatccccggacggcagggttgggtgagcagctctctgaccctgaaagtgaccagcgccctgagccgcgatggcatctcctgtgaagcctccaacccccacgggaacaagcgccatgtcttccac

SEQ ID NO: 190488 - DNA, 39 bp, Homo sapiens; identical to SEQ ID NO: 97722
  chr19:45328103-45328142
  hypo

SEQ ID NO: 190489 - DNA, 369 bp, Homo sapiens; identical to SEQ ID NO: 56300
  chr19:45347905-45348274
  hypo

SEQ ID NO: 190490 - DNA, 265 bp, Homo sapiens; identical to SEQ ID NO: 131707
  chr19:45348807-45349072
  hypo

SEQ ID NO: 190491 - DNA, 1014 bp, Homo sapiens; identical to SEQ ID NO: 131708
  chr19:45349504-45350518
  hypo

SEQ ID NO: 190492 - DNA, 296 bp, Homo sapiens
  chr19:45368652-45368948
  hypo
cgcccagatgcacctgcgaaccaccagaatgtggccgccttccaccctaagatgggtcccagcttccccagcccgaagcctggcagcgagcggctgtccttcgtctctgccaagcagagcactgggcaagacacagaggcagagctccaggacgccacgctggccctccacgggctcacggtggaggacgagggcaactacacttgcgagtttgccaccttccccaaggggtccgtccgagggatgacctggctcagagtcataggtgagcagggtaagggcgggaggcaaggagg

SEQ ID NO: 190493 - DNA, 273 bp, Homo sapiens
  chr19:45377061-45377334
  hypo
gtacctcctgccaacccgccccgtttctttagcattcctgtctatctgctaacttgtccacccgctctgggattctcctccttgctgatccagtccccccatttcccccagaccctcctgaagtgtccatctccggctatgatgacaactggtacctcggccgtactgatgccaccctgagctgtgacgtccgcagcaacccagagcccacgggctatgactggagcacgtgagtcacgtggtctcagaaccctgggtctgagggaggcgggg

SEQ ID NO: 190494 - DNA, 452 bp, Homo sapiens
  chr19:45377393-45377845
  hypo
ctgagggaggaggggctgggcctaaattcctaagtcctccaggatgaagggagcttgcattttggcaatttggggtctccgggagtacttaggtccctggagcttggctcctggtgggtgtatctttagggatgaggcctgtgctcccctctcgaccttggtatccctctcacctgaccccacacccctccaggacctcaggcaccttcccgacctccgcagtggcccagggctcccagctggtcatccacgcagtggacagtctgttcaataccaccttcgtctgcacagtcaccaatgccgtgggcatgggccgcgctgagcaggtcatctttgtccgaggtgagtgggtcttgggggccgtgtgtggagacctgggtccgctcccctggagttctgcccttcaggacttggggctgcactgggggaggctgcgccgccgacctgggagg

SEQ ID NO: 190495 - DNA, 45 bp, Homo sapiens; identical to SEQ ID NO: 97729
  chr19:45382929-45382974
  hypo

SEQ ID NO: 190496 - DNA, 24 bp, Homo sapiens
  chr19:45384656-45384680
  hypo
aaggcaggccgagcacggcataat

SEQ ID NO: 190497 - DNA, 18 bp, Homo sapiens
  chr19:45384932-45384950
  hypo
gaccgtctcaaaaaaaac

SEQ ID NO: 190498 - DNA, 30 bp, Homo sapiens; identical to SEQ ID NO: 97732
  chr19:45385432-45385462
  hypo

SEQ ID NO: 190499 - DNA, 41 bp, Homo sapiens
  chr19:45385980-45386021
  hypo
cagggtggctctgaccgctccgctctgcaaagactcctcgg

SEQ ID NO: 190500 - DNA, 28 bp, Homo sapiens
  chr19:45386809-45386837
  hypo
gcatgagccactgcgcccagccaatgcc

SEQ ID NO: 190501 - DNA, 73 bp, Homo sapiens; identical to SEQ ID NO: 32664
  chr19:45390078-45390151
  hypo

SEQ ID NO: 190502 - DNA, 30 bp, Homo sapiens; identical to SEQ ID NO: 32665
  chr19:45412584-45412614
  hypo

SEQ ID NO: 190503 - DNA, 354 bp, Homo sapiens
  chr19:45465022-45465376
  hypo
cacagaggtgctctgcgagtgttttcctcctaaaagaagaggaccgcaccttcccaggtgttttcactgattcattctccagttattgataagcacccactctttgcccagcctgtgcctggccttcatgcatgatggtgtctaagacagcccccgtgtccattctccctccttaccctggcctctgtcccccacaggtgaccagcaatggcagcatcgggagggacccgccagcggagacccagcctcagaacccaccggcccagccggcacccaatgcctggcaggtcatcaaaggtgtgctgtttaggtgagcagacgggacttgggtttgttcaccgaaaacattcaaat

SEQ ID NO: 190504 - DNA, 30 bp, Homo sapiens
  chr19:45493413-45493443
  hypo
ggtgctgggtgctgacgtcctatgggaggg

SEQ ID NO: 190505 - DNA, 66 bp, Homo sapiens
  chr19:45493680-45493746
  hypo
cctggagggcctgtccgtgcgctccgtcttcttcggcgttttccagtcattcgtggtcctcctcta

SEQ ID NO: 190506 - DNA, 30 bp, Homo sapiens; identical to SEQ ID NO: 32667
  chr19:45496281-45496311
  hypo

SEQ ID NO: 190507 - DNA, 262 bp, Homo sapiens; identical to SEQ ID NO: 97738
  chr19:45515278-45515540
  hypo

SEQ ID NO: 190508 - DNA, 30 bp, Homo sapiens; identical to SEQ ID NO: 97739
  chr19:45536649-45536679
  hypo

SEQ ID NO: 190509 - DNA, 30 bp, Homo sapiens; identical to SEQ ID NO: 97740
  chr19:45540751-45540781
  hypo

SEQ ID NO: 190510 - DNA, 30 bp, Homo sapiens; identical to SEQ ID NO: 97741
  chr19:45541177-45541207
  hypo

SEQ ID NO: 190511 - DNA, 102 bp, Homo sapiens; identical to SEQ ID NO: 32668
  chr19:45546674-45546776
  hypo

SEQ ID NO: 190512 - DNA, 30 bp, Homo sapiens
  chr19:45553356-45553386
  hypo
aggaatggcgtgaggcgagggcctgtgtgc

SEQ ID NO: 190513 - DNA, 29 bp, Homo sapiens
  chr19:45554926-45554955
  hypo
agaagtgagcttgctgcaggccgggcgcg

SEQ ID NO: 190514 - DNA, 240 bp, Homo sapiens; identical to SEQ ID NO: 97744
  chr19:45567165-45567405
  hypo

SEQ ID NO: 190515 - DNA, 213 bp, Homo sapiens; identical to SEQ ID NO: 32669
  chr19:45567706-45567919
  hypo

SEQ ID NO: 190516 - DNA, 40 bp, Homo sapiens; identical to SEQ ID NO: 32670
  chr19:45569128-45569168
  hypo

SEQ ID NO: 190517 - DNA, 427 bp, Homo sapiens
  chr19:45570288-45570715
  hypo
ccagagctcacctcccgggaagttagcaagcgggtgtctagtgagggagaggtgacgtgggccaggcagggctcatgatggcaggactgcccttaggctgagtgtatctagagcgccatctctgtagccggagggaggccggaatgccgctctgggacattttggagggagagtagcaggagaggagagtcgagcctgtcaccctgggccttgcaggaaggaggactgtggatccggacccagggtggggtgcggttggggtccctggagcctcacagtcctcctcccgccctgctgcatccccaggagccgctcccactcaggggaccgctacaggcggggcggccggggcctcaggcaccacagcagtagccgcagccgcagcagctggtccctcagcccgtcccgcagtcgcagcctgactcgc

SEQ ID NO: 190518 - DNA, 93 bp, Homo sapiens
  chr19:45572263-45572356
  hypo
aaaaaagagagtggggctcttaagggaacccctcagccaccctgttctttctctctacagtcaaggcggataagaaggcggcacaagaaaaga

SEQ ID NO: 190519 - DNA, 30 bp, Homo sapiens
  chr19:45572698-45572728
  hypo
cctgcctcccgccaccgcgacctcctccca

SEQ ID NO: 190520 - DNA, 30 bp, Homo sapiens
  chr19:45574058-45574088
  hypo
aggcgctcaaggtcccgatcccgaagcccc

SEQ ID NO: 190521 - DNA, 1124 bp, Homo sapiens; identical to SEQ ID NO: 32671
  chr19:45574504-45575628
  hypo

SEQ ID NO: 190522 - DNA, 55 bp, Homo sapiens
  chr19:45601007-45601062
  hypo
tggtggtctctctcccgcgctggaatgggagagcagaggccgaagtccatcctct

SEQ ID NO: 190523 - DNA, 30 bp, Homo sapiens; identical to SEQ ID NO: 32672
  chr19:45601444-45601474
  hypo

SEQ ID NO: 190524 - DNA, 30 bp, Homo sapiens
  chr19:45602869-45602899
  hypo
tacatgcagttgggccgcctgattctttgt

SEQ ID NO: 190525 - DNA, 292 bp, Homo sapiens
  chr19:45603141-45603433
  hypo
tttagcacccattctgactcccggaagagcacgcgaagctggcccccagctggcactcggtaaccagccttcagtgcgtcagcgggagtgcgtgtgcacttgtttctgggagcgagtactggggctctgcgaaccttcacaggcatccgactccaagaggattaagaaccgtggggccaaatgccctgtgttggacggactgcagctggagcagtcactgagcacggaggccagaaacctgtttttacaaaagctccccaggtggttctgacaacctcgcttggctgtctgt

SEQ ID NO: 190526 - DNA, 529 bp, Homo sapiens; identical to SEQ ID NO: 97750
  chr19:45603729-45604258
  hypo

SEQ ID NO: 190527 - DNA, 30 bp, Homo sapiens; identical to SEQ ID NO: 97751
  chr19:45616604-45616634
  hypo

SEQ ID NO: 190528 - DNA, 540 bp, Homo sapiens
  chr19:45626601-45627141
  hypo
accaggaagaaacctacgagcgcatccttgctgagggcaggacccgctctccacatcctggaaacccaacagagaaagacagtctctctggcagcctccctgtcttgaagttcgagaaggctgcatttctaggctcccacaacctgtctgtccggtttgaagccggggcctgagggcttcagggtactgatgcaggacagacagctctggttcaaacctccctctgtccgctcccacaggtgtggcctcagaagaccattccctctgtagcgtggtagaggctggaaattctactctgcaggattatgatgcggattaaatgcagtaatcgagtgtttggcagagtgcctggtagggaaggggttcagtaaagagctgctcgcaccattctgtgcagggaatgctttagggcatgttttagaattttagaacgtgtttcactacatgagtagcttcttgcagctttgaggccctggcatccctctcccctgcctgcaggcttccttgttcactgggccaagtccccgcagtaatcttcct

SEQ ID NO: 190529 - DNA, 260 bp, Homo sapiens
  chr19:45627565-45627825
  hypo
ggtgctgggaagcaccgggcccttcgggggacgggaagaatttgggtgtggccagagcacagtgccccatgagtggagaggtccagattgtctatttttcttttcttttttttcccccaatgatcctagaaattctcccaagagaggtccagattttttgacaaggctgaagggcggcccctgagacctgactctacctgtctgcctggcctttcctcagtccagtgcgtgcacggccccctcctcgctctcacgcatca

SEQ ID NO: 190530 - DNA, 199 bp, Homo sapiens
  chr19:45629664-45629863
  hypo
gtcactgctctgtgctgttggcgacggagcagggattggaacccaggcgcctggcttcgaggcccgcatgctgtggggaaatggggctctgccatgttggtggttatttattgtcgtgaacaagagctcaggcctggtttccaggtgtgactttattgcaccctcgccctacctccccggcttgagaattctggaaaat

SEQ ID NO: 190531 - DNA, 146 bp, Homo sapiens
  chr19:45631783-45631929
  hypo
gagtcagtgtgtttgcgagagctggaatcgaagcctcttaaaatggcagatgatttggacttcgagacaagagatgcaggggcctcggcctccttcccaatgcagtgctcagcattatgtaacactggcttcgtggtgctcaaagg

SEQ ID NO: 190532 - DNA, 1120 bp, Homo sapiens; identical to SEQ ID NO: 131717
  chr19:45647691-45648811
  hypo

SEQ ID NO: 190533 - DNA, 30 bp, Homo sapiens; identical to SEQ ID NO: 131718
  chr19:45655013-45655043
  hypo

SEQ ID NO: 190534 - DNA, 57 bp, Homo sapiens; identical to SEQ ID NO: 56309
  chr19:45655080-45655137
  hypo

SEQ ID NO: 190535 - DNA, 158 bp, Homo sapiens
  chr19:45660339-45660497
  hypo
ctccacctctgctgccgccaccccggcaaggctgccgcacctctcgcctggatttttgcaatctcctgctccctcggccacctgcttccgtcctcctcccatagcccattctcctggagatcctgtcagctcacatccatcctcggctcctgcctcct

SEQ ID NO: 190536 - DNA, 137 bp, Homo sapiens; identical to SEQ ID NO: 97758
  chr19:45678711-45678848
  hypo

SEQ ID NO: 190537 - DNA, 36 bp, Homo sapiens
  chr19:45694663-45694699
  hypo
ccactgtgcccggccggctttatttagtttctgtgg

SEQ ID NO: 190538 - DNA, 120 bp, Homo sapiens; identical to SEQ ID NO: 97759
  chr19:45737163-45737283
  hypo

SEQ ID NO: 190539 - DNA, 94 bp, Homo sapiens
  chr19:45753566-45753660
  hypo
agcgctgtgtggcctccgagaggctcttgtcctctctggtctcagcctgcccgcatggggagtggctgtgccctgcaggcgaatacctgcacag

SEQ ID NO: 190540 - DNA, 167 bp, Homo sapiens
  chr19:45767998-45768165
  hypo
caagtgctggtgagccgcccaccctctccgccctgcccctgtgccacctccccctgccgctgcacctgaccctgaccccgctcggcctctgccctgcaggagaagtgtttgactacctcgtgtcgcatggccgcatgaaggagaaggaagctcgagccaagttccga

SEQ ID NO: 190541 - DNA, 101 bp, Homo sapiens
  chr19:45768392-45768493
  hypo
ggcatgaaggcgccccggtgggcaggtgttgcatgtgtagggcatgtgggtgtgcccagcgcgtaggtgtgtgggtgatgggggcacgaaggtgccagggt

SEQ ID NO: 190542 - DNA, 135 bp, Homo sapiens; identical to SEQ ID NO: 97760
  chr19:45769020-45769155
  hypo

SEQ ID NO: 190543 - DNA, 110 bp, Homo sapiens; identical to SEQ ID NO: 97761
  chr19:45805726-45805836
  hypo

SEQ ID NO: 190544 - DNA, 245 bp, Homo sapiens
  chr19:45810101-45810346
  hypo
tgcacctgttctacttcggacgagcccagccgatcagcgttggacacgtcaaatactgagcccacggcagctgtgtccacgccacctgtgggagcaagggacaggggcgtgaagaggcagcgaaggtgcagaggggctgggacgtggcccccgtgccaaatgcaacagccgcatgtagtgagtgcctactgtgtaacaggttacctgcacacaggtaatgcctgttcattcgtgagctcacgagt

SEQ ID NO: 190545 - DNA, 30 bp, Homo sapiens
  chr19:45810745-45810775
  hypo
gggtgaggatctcctcgaacttggggtgct

SEQ ID NO: 190546 - DNA, 32 bp, Homo sapiens
  chr19:45813961-45813993
  hypo
ctgatcctcagcctctcgagtagctgggacca

SEQ ID NO: 190547 - DNA, 225 bp, Homo sapiens
  chr19:45851244-45851469
  hypo
gatccctgcccgccttcggaccctgcataacctcgtgatccagtacgcggggcagggccgctatgaggtggcggtgcctctgtgccgccaggccttggaggacctggagcgcagctcgggccactgccaccctgacgtggccaccatgctcaacatcctggcgctggtgtaccggtgagcactgcggccagccatggctgggggcaggaacggcagggacccatt

SEQ ID NO: 190548 - DNA, 30 bp, Homo sapiens
  chr19:45852774-45852804
  hypo
agcggcactatgcccgggccctgagcatct

SEQ ID NO: 190549 - DNA, 30 bp, Homo sapiens; identical to SEQ ID NO: 97764
  chr19:45854735-45854765
  hypo

SEQ ID NO: 190550 - DNA, 119 bp, Homo sapiens; identical to SEQ ID NO: 97765
  chr19:45856037-45856156
  hypo

SEQ ID NO: 190551 - DNA, 87 bp, Homo sapiens; identical to SEQ ID NO: 97766
  chr19:45866859-45866946
  hypo

SEQ ID NO: 190552 - DNA, 187 bp, Homo sapiens; identical to SEQ ID NO: 97767
  chr19:45867289-45867476
  hypo

SEQ ID NO: 190553 - DNA, 208 bp, Homo sapiens; identical to SEQ ID NO: 97768
  chr19:45895250-45895458
  hypo

SEQ ID NO: 190554 - DNA, 126 bp, Homo sapiens; identical to SEQ ID NO: 97769
  chr19:45903692-45903818
  hypo

SEQ ID NO: 190555 - DNA, 47 bp, Homo sapiens; identical to SEQ ID NO: 56323
  chr19:45908809-45908856
  hypo

SEQ ID NO: 190556 - DNA, 231 bp, Homo sapiens; identical to SEQ ID NO: 131741
  chr19:45947820-45948051
  hypo

SEQ ID NO: 190557 - DNA, 83 bp, Homo sapiens; identical to SEQ ID NO: 97771
  chr19:45949939-45950022
  hypo

SEQ ID NO: 190558 - DNA, 263 bp, Homo sapiens; identical to SEQ ID NO: 12433
  chr19:45959072-45959335
  hypo

SEQ ID NO: 190559 - DNA, 27 bp, Homo sapiens
  chr19:45983200-45983227
  hypo
agtggcggccgggcgcggtagctcacg

SEQ ID NO: 190560 - DNA, 803 bp, Homo sapiens
  chr19:45997473-45998276
  hypo
cactgtccccttactggctctcgctccagtggcccccactgcttttcttcctcttccagcaatggctcttcgggcccagagttcgaatctcgcgatcgggatggggacggagtaccggcctggggtgtcccagagcccggactgagctggggagtcaagacctcgggcgatgagggctgagcaagtcggagtcgtaggtccagttctgatacggtagagagaggaggccgtgagctttcttcttggaggtgccccaaggagaaaccacccacccctcttggctttggtcccagcacctcggacatctcaccttccccagcttctcctgtctccaatctgttgggttcttggggttcttcgtcttccagcggggtggagctgctggtggaagagtcctccccggatcccgttccccgggccacccagcccagatggtccaaccgaagcctcaggtcttccagagggcgctcggatggaggcgcggtgtcaggatcaccccgtcgtccaggctccggggattggctcaggctggggatgctctccaagctgtcgcccaggctgggctgagggtgctggtctcgtggttccgagactgagcggccctgggggcgggggcggcgggcagttgaatccctgcggcccccggagcccactacaccatcaaaggcgatgtaggagaaggtcagctcccggggggtgccccagtcctgcgacgtggtctcctcctcgtcctcctctgagaattcccgggctgtgtgcagctctcgaaaatcagagtcgtcgttccctcctgcagtgggtga

SEQ ID NO: 190561 - DNA, 632 bp, Homo sapiens; identical to SEQ ID NO: 12435
  chr19:46001720-46002352
  hypo

SEQ ID NO: 190562 - DNA, 275 bp, Homo sapiens; identical to SEQ ID NO: 12436
  chr19:46002431-46002706
  hypo

SEQ ID NO: 190563 - DNA, 91 bp, Homo sapiens; identical to SEQ ID NO: 97778
  chr19:46021492-46021583
  hypo

SEQ ID NO: 190564 - DNA, 308 bp, Homo sapiens
  chr19:46056762-46057070
  hypo
agcaagctcctatttcttggacgcaggcactgcgtgggaagcggaccggccgggattgcagagctgggcgcgcacctcttgcagctctgtgcgcagttcctccagggcgccctgtggcggcgccgcctgcacctgcgcctgcagcgcttccagcgccagcgccaggtggcccacctcgtcccgcagcgcgttccaggcagcacgctgctcctcctccttgtggcgctgctgcgcctggtggcgccagtactccagcactaggcagccgccgcccacgatgaagatggtggcttcgcccagcagctctg

SEQ ID NO: 190565 - DNA, 30 bp, Homo sapiens
  chr19:46094854-46094884
  hypo
gcaggacccggggccgtggatccagttgtc

SEQ ID NO: 190566 - DNA, 45 bp, Homo sapiens
  chr19:46136076-46136121
  hypo
ttcggggcgaaggggcggggttagggtgggcgaaggacttacaga

SEQ ID NO: 190567 - DNA, 30 bp, Homo sapiens; identical to SEQ ID NO: 97781
  chr19:46198615-46198645
  hypo

SEQ ID NO: 190568 - DNA, 42 bp, Homo sapiens; identical to SEQ ID NO: 97782
  chr19:46208925-46208967
  hypo

SEQ ID NO: 190569 - DNA, 162 bp, Homo sapiens
  chr19:46211660-46211822
  hypo
agagcgaaactgcatctcaaaacaaacaaacaaaaatatttgtggggcttctagatgacagttccttccacaggtggacttgtgtttgtttctgccagacatgtcagctagaagtaccctgtatcacacaggacgtgaacctggctgcgaacctgtgccgag

SEQ ID NO: 190570 - DNA, 30 bp, Homo sapiens; identical to SEQ ID NO: 97783
  chr19:46215622-46215652
  hypo

SEQ ID NO: 190571 - DNA, 155 bp, Homo sapiens
  chr19:46234862-46235017
  hypo
gcgcccggcccgtcccctcctttcttacctcctgatttacaaatgagaaaattaagccttaggaggaaggaaagtcccatacattaggagttagtccacatcatagaatagcagctccacatcgctcgagcccaggagttcgaggcagtgagcta

SEQ ID NO: 190572 - DNA, 30 bp, Homo sapiens; identical to SEQ ID NO: 97785
  chr19:46236414-46236444
  hypo

SEQ ID NO: 190573 - DNA, 226 bp, Homo sapiens; identical to SEQ ID NO: 97786
  chr19:46236679-46236905
  hypo

SEQ ID NO: 190574 - DNA, 349 bp, Homo sapiens; identical to SEQ ID NO: 56345
  chr19:46271266-46271615
  hypo

SEQ ID NO: 190575 - DNA, 34 bp, Homo sapiens; identical to SEQ ID NO: 56347
  chr19:46273812-46273846
  hypo

SEQ ID NO: 190576 - DNA, 243 bp, Homo sapiens
  chr19:46286503-46286746
  hypo
cactccctgcggctccgagagccaagaggaatctgagctcttctttccagggtggacggttctccagagtggaagtcggggcctccaaccggcctggggtgcctgggccttgagagggccaggcctgagaaactaggaggcaaggaccgaggagtcccagctgggcagggcctgggaaacgtggtcctgggcagttctgataatttaaaaaacaccgaggactttgatgaggggccctggctg

SEQ ID NO: 190577 - DNA, 108 bp, Homo sapiens
  chr19:46286876-46286984
  hypo
ctgggctgggagcaggcctgcactcctcctctggggaaagcggactgcctagaaccacagagtacacacacaggtcctctacatcatctcctccgaaggggacagacc

SEQ ID NO: 190578 - DNA, 30 bp, Homo sapiens; identical to SEQ ID NO: 97789
  chr19:46289727-46289757
  hypo

SEQ ID NO: 190579 - DNA, 60 bp, Homo sapiens; identical to SEQ ID NO: 32687
  chr19:46307535-46307595
  hypo

SEQ ID NO: 190580 - DNA, 60 bp, Homo sapiens; identical to SEQ ID NO: 32688
  chr19:46308096-46308156
  hypo

SEQ ID NO: 190581 - DNA, 30 bp, Homo sapiens; identical to SEQ ID NO: 32689
  chr19:46315868-46315898
  hypo

SEQ ID NO: 190582 - DNA, 431 bp, Homo sapiens; identical to SEQ ID NO: 97793
  chr19:46321115-46321546
  hypo

SEQ ID NO: 190583 - DNA, 317 bp, Homo sapiens
  chr19:46326463-46326780
  hypo
gtacccaggtgtcggcggcttccatgacttctgaccacaggcaaggtgccttctgccctctgctatgtgcctctggctcaactgctgctgaagcaacgtgctgccctgcccctcccagtcccacatgtcccaggtagcagggacaaacaggcctccagctccataccttctccagcccattgagcaccgggatgaggaagcggacgtctggcagtcgcttgtggtagagatcccggacccgcttcaccagctctggggagggtgggactgcatggaagcagcaggaggcaccaagttggaggcggaggggagcgtgg

SEQ ID NO: 190584 - DNA, 58 bp, Homo sapiens
  chr19:46327182-46327240
  hypo
gggtcaggtgttgcccggcagggtggcttgcggggcatgctggcgcccagggtgagac

SEQ ID NO: 190585 - DNA, 539 bp, Homo sapiens
  chr19:46330379-46330918
  hypo
tggctgaggccacaccggctcccctgctgggctgggcaatgccctcaggccccggcacaggactgggctgcacgaggagcctgtgctggccaccacgggtggactaagagcgagagtgggactgcccttcccaggagggcaagcgcacgtgtgtgtgtgtacacactacaggcagactcaggcacggtaaccctggtttctaggcagcttgatgccactgaaaatgaaaataaaacagacagaaatagccaaaaaaccactgaaagaagggaatgggcccagagaaacttgcaagggagtgtggaagacgtgggctggttactcaggatagaggcggcctctgcaagctgcaggctgagggcagccaggaagtggaggaggggatcaccttgtccttctcatgggagctgaggtcgaggaggacatgcaggtactggaactggcgggacgggcgcttgaagatcaggtctcgaagtgtggacatgcccagataggtgcgactctgcagcaaaaggaaagggacccgagctcagcccacc

SEQ ID NO: 190586 - DNA, 154 bp, Homo sapiens; identical to SEQ ID NO: 97795
  chr19:46338326-46338480
  hypo

SEQ ID NO: 190587 - DNA, 106 bp, Homo sapiens; identical to SEQ ID NO: 97796
  chr19:46345642-46345748
  hypo

SEQ ID NO: 190588 - DNA, 150 bp, Homo sapiens; identical to SEQ ID NO: 32692
  chr19:46356446-46356596
  hypo

SEQ ID NO: 190589 - DNA, 182 bp, Homo sapiens
  chr19:46404483-46404665
  hypo
aaaaggcttgcaacagcgcaggcacacagcctactctgaagacactcacctgcacgtcggtcctcccggcggtcttccgacaacacgtagcgctgagggcaggcgcttgggggcggcggctgtgaagagggggccgcagggggctcctccgccccagcacctgcccccggcgccgccacacc

SEQ ID NO: 190590 - DNA, 346 bp, Homo sapiens; identical to SEQ ID NO: 131785
  chr19:46404949-46405295
  hypo

SEQ ID NO: 190591 - DNA, 30 bp, Homo sapiens
  chr19:46416769-46416799
  hypo
ggggaaaggacccatcggtgatttggggat

SEQ ID NO: 190592 - DNA, 27 bp, Homo sapiens
  chr19:46486946-46486973
  hypo
agccaccgtgcccggcgctgtatgtgt

SEQ ID NO: 190593 - DNA, 856 bp, Homo sapiens; identical to SEQ ID NO: 56358
  chr19:46519146-46520002
  hypo

SEQ ID NO: 190594 - DNA, 30 bp, Homo sapiens; identical to SEQ ID NO: 97800
  chr19:46521554-46521584
  hypo

SEQ ID NO: 190595 - DNA, 158 bp, Homo sapiens
  chr19:46811928-46812086
  hypo
ggaggaaggtggaggcccccacggagcggtgcttctccttgcgcatgaagagtacactcaccagccgcgggcgcaccctcaacctcaaggcggccacctggaaggtgcgtggggccgggccagaggagggcggggacgctggggctgggtgtgagccc

SEQ ID NO: 190596 - DNA, 33 bp, Homo sapiens; identical to SEQ ID NO: 97801
  chr19:46835961-46835994
  hypo

SEQ ID NO: 190597 - DNA, 39 bp, Homo sapiens; identical to SEQ ID NO: 97802
  chr19:46851844-46851883
  hypo

SEQ ID NO: 190598 - DNA, 148 bp, Homo sapiens; identical to SEQ ID NO: 97803
  chr19:46875775-46875923
  hypo

SEQ ID NO: 190599 - DNA, 398 bp, Homo sapiens; identical to SEQ ID NO: 97804
  chr19:46885286-46885684
  hypo

SEQ ID NO: 190600 - DNA, 29 bp, Homo sapiens
  chr19:46903169-46903198
  hypo
ggccgggcgtggtggcgggcgcctgtagt

SEQ ID NO: 190601 - DNA, 30 bp, Homo sapiens; identical to SEQ ID NO: 97805
  chr19:46918350-46918380
  hypo

SEQ ID NO: 190602 - DNA, 454 bp, Homo sapiens; identical to SEQ ID NO: 131802
  chr19:46931908-46932362
  hypo

SEQ ID NO: 190603 - DNA, 30 bp, Homo sapiens
  chr19:46977859-46977889
  hypo
gggcgcggtggctcacgtctgtaatcccac

SEQ ID NO: 190604 - DNA, 30 bp, Homo sapiens
  chr19:47031965-47031995
  hypo
ctccccacggccctgcgtgatctgctccct

SEQ ID NO: 190605 - DNA, 30 bp, Homo sapiens
  chr19:47032555-47032585
  hypo
agcccacgccttctgcggcctccccgtcgg

SEQ ID NO: 190606 - DNA, 31 bp, Homo sapiens; identical to SEQ ID NO: 32696
  chr19:47111850-47111881
  hypo

SEQ ID NO: 190607 - DNA, 476 bp, Homo sapiens
  chr19:47113153-47113629
  hypo
gttcctgaagcgctctcgagctgttctgtaaatacctggtgctaacatcccatgccgctccctcctcacgatgcacccaccgccctgagggcccgtcctaggaatggatgtggggatggtcgctttgtaatgtgctggttctctttttttttctttcccctctatggcccttaagactttcattttgttcagaaccatgctgggctagctaaagggtggggagagggaagatgggccccaccacgctctcaagagaacgcacctgcaataaaacagtcttgtcggccagctgcccaggggacggcagctacagcagcctctgcgtcctggtccgccagcacctcccgcttctccgtggtgacttggcgccgcttcctcacatctgtgctccgtgccctcttccctgcctcttccctcgcccacctgcctgcccccatactcccccagcggagagcatgatccgtgcccttgcttct

SEQ ID NO: 190608 - DNA, 285 bp, Homo sapiens
  chr19:47116866-47117151
  hypo
gcgtgagccaccgcgcccggccgtgccaaactttatagacatcatttcacttagttcatacccaggctggatggactgattaaaacgcagcacccgctcaaggtgtgcggaccctgcccaggcttgccggcaggagtcactagagaaatctggcagtagaggagtggaggccgggcaggtgaagcctcttgcaccacacttactggaagcagctgagcggggtctcaaagcccagcgcactcggatcccaacgcccacgccttctcccaccgcatcccggtaccc

SEQ ID NO: 190609 - DNA, 30 bp, Homo sapiens
  chr19:47126768-47126798
  hypo
caggtggtccacctcgtcctctccggtgcg

SEQ ID NO: 190610 - DNA, 242 bp, Homo sapiens
  chr19:47127005-47127247
  hypo
gcccaggcccagcaggggcagcgcgcagaagaggacgcagaaggcgtagatggctggcagcgccaggcgggcgcagcggggcccgtccagctgcgcgtagaggtaggggtggctcagcgccaggcagcgctccacggccatggcaaagaggatgagcatggacgccaggccgaagaaggtcatggcgaaggcgaaggcatcgcacagggcggggccgcctcgggccaggcccagcagggagc

SEQ ID NO: 190611 - DNA, 30 bp, Homo sapiens; identical to SEQ ID NO: 97810
  chr19:47177727-47177757
  hypo

SEQ ID NO: 190612 - DNA, 30 bp, Homo sapiens; identical to SEQ ID NO: 97811
  chr19:47181761-47181791
  hypo

SEQ ID NO: 190613 - DNA, 30 bp, Homo sapiens; identical to SEQ ID NO: 97812
  chr19:47197204-47197234
  hypo

SEQ ID NO: 190614 - DNA, 255 bp, Homo sapiens; identical to SEQ ID NO: 32698
  chr19:47200355-47200610
  hypo

SEQ ID NO: 190615 - DNA, 475 bp, Homo sapiens; identical to SEQ ID NO: 97814
  chr19:47223626-47224101
  hypo

SEQ ID NO: 190616 - DNA, 752 bp, Homo sapiens; identical to SEQ ID NO: 131825
  chr19:47258851-47259603
  hypo

SEQ ID NO: 190617 - DNA, 43 bp, Homo sapiens
  chr19:47261177-47261220
  hypo
aaaaagaaccgacttctgaatcgcagctccactcatgactaat

SEQ ID NO: 190618 - DNA, 39 bp, Homo sapiens; identical to SEQ ID NO: 97816
  chr19:47270416-47270455
  hypo

SEQ ID NO: 190619 - DNA, 45 bp, Homo sapiens; identical to SEQ ID NO: 97817
  chr19:47273988-47274033
  hypo

SEQ ID NO: 190620 - DNA, 43 bp, Homo sapiens
  chr19:47284560-47284603
  hypo
agaggactcccaagtccgggcgcggtggctcacgcctgtaatc

SEQ ID NO: 190621 - DNA, 51 bp, Homo sapiens; identical to SEQ ID NO: 97819
  chr19:47305319-47305370
  hypo

SEQ ID NO: 190622 - DNA, 100 bp, Homo sapiens; identical to SEQ ID NO: 97820
  chr19:47334736-47334836
  hypo

SEQ ID NO: 190623 - DNA, 181 bp, Homo sapiens
  chr19:47335873-47336054
  hypo
tgggagacagagcaagactctctctctcaaaaaaaaaaattcttgtgcattttcgttgtttttctgtttacaactacaaggtaaatgtcattcattcaggtgttttgtaacatctttgttgacatatatttacataccattcaattcacttatttaaaatgtatacttcggccaagcgcgg

SEQ ID NO: 190624 - DNA, 31 bp, Homo sapiens; identical to SEQ ID NO: 32701
  chr19:47350196-47350227
  hypo

SEQ ID NO: 190625 - DNA, 271 bp, Homo sapiens; identical to SEQ ID NO: 131831
  chr19:47359760-47360031
  hypo

SEQ ID NO: 190626 - DNA, 117 bp, Homo sapiens; identical to SEQ ID NO: 56384
  chr19:47363285-47363402
  hypo

SEQ ID NO: 190627 - DNA, 194 bp, Homo sapiens; identical to SEQ ID NO: 97823
  chr19:47368882-47369076
  hypo

SEQ ID NO: 190628 - DNA, 31 bp, Homo sapiens; identical to SEQ ID NO: 32703
  chr19:47384471-47384502
  hypo

SEQ ID NO: 190629 - DNA, 50 bp, Homo sapiens
  chr19:47406252-47406302
  hypo
tgtacccttgaggagcggtaatagccagaagggatcgtggtgttagagat

SEQ ID NO: 190630 - DNA, 30 bp, Homo sapiens; identical to SEQ ID NO: 32704
  chr19:47425476-47425506
  hypo

SEQ ID NO: 190631 - DNA, 170 bp, Homo sapiens
  chr19:47429561-47429731
  hypo
atagtgggagccttccgcactcagctgaatgaaattgaaaatctacgattgcacttcagtagggtccatgaatagtggctttgtctgtaaagagttgttgttgcacatggtctctgtctcccagtgccatgcgtttgcaaagacgagatcaggatcggcagggtcttatt

SEQ ID NO: 190632 - DNA, 30 bp, Homo sapiens
  chr19:47460810-47460840
  hypo
agtgagctgcgatcacgctactgcattcca

SEQ ID NO: 190633 - DNA, 187 bp, Homo sapiens; identical to SEQ ID NO: 97826
  chr19:47482457-47482644
  hypo

SEQ ID NO: 190634 - DNA, 39 bp, Homo sapiens
  chr19:47498023-47498062
  hypo
agtacccaggcaggagcgggtccccgtaaatatctgctc

SEQ ID NO: 190635 - DNA, 30 bp, Homo sapiens; identical to SEQ ID NO: 97828
  chr19:47499887-47499917
  hypo

SEQ ID NO: 190636 - DNA, 39 bp, Homo sapiens; identical to SEQ ID NO: 97829
  chr19:47500120-47500159
  hypo

SEQ ID NO: 190637 - DNA, 106 bp, Homo sapiens
  chr19:47501402-47501508
  hypo
agtccgcacccctcccggattcatcagcagaatggcacacatatgtctccggccgagacggtctggcaccatcatctatcccaaaggagcccgagcccccgggccc

SEQ ID NO: 190638 - DNA, 392 bp, Homo sapiens
  chr19:47501970-47502362
  hypo
taggcaaagtgtgggcgttgggggaaaagggggtgcgtagttcctttggtgaagtgcataagaattcccccactgtttccatcagcccctccaacggggatgtgtggacggtccctgtgtctctaggaaaaggacagagccttggtctcatgaccgactgactccctccctcgaaggcctgttggcgtgggtgggtggcagcggccgcccgtctccatctggtcaggaagcaagcaggctttctgcgtagggatgcctgtctccaggggcaaccggatgagcaaagaatggtgttctttatggcggagtgtctccagattgttctgtcttgggtggtgggggccaggaagccccaggcacacagtgccgcccttcagcgggggcctgggaca

SEQ ID NO: 190639 - DNA, 364 bp, Homo sapiens; identical to SEQ ID NO: 131836
  chr19:47522919-47523283
  hypo

SEQ ID NO: 190640 - DNA, 353 bp, Homo sapiens; identical to SEQ ID NO: 131837
  chr19:47523635-47523988
  hypo

SEQ ID NO: 190641 - DNA, 171 bp, Homo sapiens
  chr19:47540627-47540798
  hypo
tgcattagatcctaagcgcaggcccacaatgcaagaagtgttatctccattttacatcagaaaactgaggcacggcgcggagaggttaagttaattgcccccaggtcacacagctataagtgattgagttggattctagcccaggtctgtctgttccggggtcagcacgcc

SEQ ID NO: 190642 - DNA, 30 bp, Homo sapiens; identical to SEQ ID NO: 97833
  chr19:47548967-47548997
  hypo

SEQ ID NO: 190643 - DNA, 30 bp, Homo sapiens; identical to SEQ ID NO: 97834
  chr19:47549449-47549479
  hypo

SEQ ID NO: 190644 - DNA, 30 bp, Homo sapiens
  chr19:47561173-47561203
  hypo
tgctagcagaattcacggaactgggcggag

SEQ ID NO: 190645 - DNA, 42 bp, Homo sapiens
  chr19:47579553-47579595
  hypo
ctcaacacatgcacgcgtgcgcgcgcgcgcacacacacacac

SEQ ID NO: 190646 - DNA, 18 bp, Homo sapiens
  chr19:47592631-47592649
  hypo
tgttgttggtcaggctgg

SEQ ID NO: 190647 - DNA, 78 bp, Homo sapiens; identical to SEQ ID NO: 97836
  chr19:47592708-47592786
  hypo

SEQ ID NO: 190648 - DNA, 348 bp, Homo sapiens; identical to SEQ ID NO: 97837
  chr19:47593032-47593380
  hypo

SEQ ID NO: 190649 - DNA, 85 bp, Homo sapiens; identical to SEQ ID NO: 97838
  chr19:47633341-47633426
  hypo

SEQ ID NO: 190650 - DNA, 203 bp, Homo sapiens; identical to SEQ ID NO: 97839
  chr19:47646677-47646880
  hypo

SEQ ID NO: 190651 - DNA, 30 bp, Homo sapiens
  chr19:47655927-47655957
  hypo
attttggctgcagaacgtgacggtctcata

SEQ ID NO: 190652 - DNA, 30 bp, Homo sapiens
  chr19:47673996-47674026
  hypo
ctagtgaaatccccgcgttggccttccaaa

SEQ ID NO: 190653 - DNA, 142 bp, Homo sapiens; identical to SEQ ID NO: 131845
  chr19:47675971-47676113
  hypo

SEQ ID NO: 190654 - DNA, 30 bp, Homo sapiens; identical to SEQ ID NO: 97841
  chr19:47724567-47724597
  hypo

SEQ ID NO: 190655 - DNA, 693 bp, Homo sapiens; identical to SEQ ID NO: 131848
  chr19:47729850-47730543
  hypo

SEQ ID NO: 190656 - DNA, 283 bp, Homo sapiens; identical to SEQ ID NO: 56397
  chr19:47730759-47731042
  hypo

SEQ ID NO: 190657 - DNA, 294 bp, Homo sapiens; identical to SEQ ID NO: 12474
  chr19:47731297-47731591
  hypo

SEQ ID NO: 190658 - DNA, 31 bp, Homo sapiens; identical to SEQ ID NO: 56400
  chr19:47738880-47738911
  hypo

SEQ ID NO: 190659 - DNA, 551 bp, Homo sapiens; identical to SEQ ID NO: 131854
  chr19:47742712-47743263
  hypo

SEQ ID NO: 190660 - DNA, 17 bp, Homo sapiens
  chr19:47756241-47756258
  hypo
acagtcggcagggcgcg

SEQ ID NO: 190661 - DNA, 30 bp, Homo sapiens; identical to SEQ ID NO: 131857
  chr19:47757264-47757294
  hypo

SEQ ID NO: 190662 - DNA, 30 bp, Homo sapiens; identical to SEQ ID NO: 32711
  chr19:47763928-47763958
  hypo

SEQ ID NO: 190663 - DNA, 31 bp, Homo sapiens; identical to SEQ ID NO: 32712
  chr19:47777369-47777400
  hypo

SEQ ID NO: 190664 - DNA, 31 bp, Homo sapiens; identical to SEQ ID NO: 12476
  chr19:47778088-47778119
  hypo

SEQ ID NO: 190665 - DNA, 43 bp, Homo sapiens; identical to SEQ ID NO: 97851
  chr19:47779444-47779487
  hypo

SEQ ID NO: 190666 - DNA, 53 bp, Homo sapiens; identical to SEQ ID NO: 97852
  chr19:47817583-47817636
  hypo

SEQ ID NO: 190667 - DNA, 30 bp, Homo sapiens; identical to SEQ ID NO: 32714
  chr19:47843872-47843902
  hypo

SEQ ID NO: 190668 - DNA, 31 bp, Homo sapiens; identical to SEQ ID NO: 97854
  chr19:47844143-47844174
  hypo

SEQ ID NO: 190669 - DNA, 138 bp, Homo sapiens; identical to SEQ ID NO: 32715
  chr19:47868800-47868938
  hypo

SEQ ID NO: 190670 - DNA, 30 bp, Homo sapiens
  chr19:47880410-47880440
  hypo
tggagaccaacaagccgtacctggtgaact

SEQ ID NO: 190671 - DNA, 226 bp, Homo sapiens
  chr19:47881069-47881295
  hypo
aggagggtgctgccccggtggaggctgaggccgaactcagatcatggatgcccttgcatgggcaccggcagcagagccatgggccccatggcagccactgccctgcccctagtgctcctcgagcgtctttgtgatcctaggcctggcctcggagtcctcacgcagccctgtgggtctccctttatagaggggactgaagctcaggcaggggcggggatacgtcacc

SEQ ID NO: 190672 - DNA, 75 bp, Homo sapiens; identical to SEQ ID NO: 97857
  chr19:47881714-47881789
  hypo

SEQ ID NO: 190673 - DNA, 25 bp, Homo sapiens
  chr19:47910558-47910583
  hypo
gcccgggctctcgccccgggccggc

SEQ ID NO: 190674 - DNA, 58 bp, Homo sapiens; identical to SEQ ID NO: 56409
  chr19:47910679-47910737
  hypo

SEQ ID NO: 190675 - DNA, 30 bp, Homo sapiens; identical to SEQ ID NO: 131872
  chr19:47950483-47950513
  hypo

SEQ ID NO: 190676 - DNA, 499 bp, Homo sapiens; identical to SEQ ID NO: 56415
  chr19:47950994-47951493
  hypo

SEQ ID NO: 190677 - DNA, 30 bp, Homo sapiens; identical to SEQ ID NO: 97861
  chr19:47969281-47969311
  hypo

SEQ ID NO: 190678 - DNA, 225 bp, Homo sapiens
  chr19:47976134-47976359
  hypo
acaggtgagagccaccgcacaggtgagagccaccgcacctggcatgttctaatgttttttataaatttaggtaaatgctattatgagcttcacttacagacagggaaaccaaggcatgaggtggtaaatatggctccagattctacacccttaactgctgcaccgcacaattccccaggctgaggacgggtcaggtcaagaagagacttgcaggctgggtgcggt

SEQ ID NO: 190679 - DNA, 31 bp, Homo sapiens; identical to SEQ ID NO: 97863
  chr19:47980239-47980270
  hypo

SEQ ID NO: 190680 - DNA, 194 bp, Homo sapiens
  chr19:47989042-47989236
  hypo
tggagggcagtctgggaatgccgtcagtgctgctgtattcccagggcctggcatgcagcaggtgcttagtgaatattcgctgagggagtggcacgtgggtctagtgccacttcagcagtgcgtttccttcaggcgtcttcccgccctagtaacctataagccacatgttgagcggatgaatgaaaaaatgaagt

SEQ ID NO: 190681 - DNA, 103 bp, Homo sapiens; identical to SEQ ID NO: 32718
  chr19:47995718-47995821
  hypo

SEQ ID NO: 190682 - DNA, 732 bp, Homo sapiens; identical to SEQ ID NO: 97866
  chr19:48003382-48004114
  hypo

SEQ ID NO: 190683 - DNA, 239 bp, Homo sapiens; identical to SEQ ID NO: 97867
  chr19:48012649-48012888
  hypo

SEQ ID NO: 190684 - DNA, 45 bp, Homo sapiens; identical to SEQ ID NO: 97868
  chr19:48052286-48052331
  hypo

SEQ ID NO: 190685 - DNA, 31 bp, Homo sapiens; identical to SEQ ID NO: 97869
  chr19:48058859-48058890
  hypo

SEQ ID NO: 190686 - DNA, 31 bp, Homo sapiens; identical to SEQ ID NO: 97870
  chr19:48073242-48073273
  hypo

SEQ ID NO: 190687 - DNA, 277 bp, Homo sapiens; identical to SEQ ID NO: 131880
  chr19:48076346-48076623
  hypo

SEQ ID NO: 190688 - DNA, 89 bp, Homo sapiens
  chr19:48077257-48077346
  hypo
agccatctggggcccctgctccgtgctgagctgtgttgggaagggcggtaggccctggtgccgactggccaaggaccatcttttttttc

SEQ ID NO: 190689 - DNA, 95 bp, Homo sapiens; identical to SEQ ID NO: 97872
  chr19:48082924-48083019
  hypo

SEQ ID NO: 190690 - DNA, 31 bp, Homo sapiens; identical to SEQ ID NO: 97873
  chr19:48120570-48120601
  hypo

SEQ ID NO: 190691 - DNA, 339 bp, Homo sapiens
  chr19:48137146-48137485
  hypo
attgctgggtgtctcagaacccgccgaggggcgttctgtgcgttcaccctgtccccctccaaagcctgaaaaacccctcatttcagaacacgtctcactccagaggtttccactaaaagatcgtggagccatgtgaatgtaaattccgtttccccctcttcatacatcccaggctgcatactgcacacaccgtttggcatctcccagccttgtgttttattgtatttaccactcagctctccagtccttgccagacgagtgagaatgagcagtggcgtcaggccttgacgggctctgcagggtgggcgggaggagtgggcagtgcggcttctggaaccc

SEQ ID NO: 190692 - DNA, 40 bp, Homo sapiens; identical to SEQ ID NO: 32722
  chr19:48145666-48145706
  hypo

SEQ ID NO: 190693 - DNA, 505 bp, Homo sapiens
  chr19:48150906-48151411
  hypo
tagaatcctccttcccgggtgaggattggaagccatgatcgcctgcctctgttgctggttttagtctttaacccttgctctgtggacttgagaaatgtgcttttccatggtgcctgtgaccaagatgtccgcatcgttagtgaagaccctgctatgtccttgaccacactgcacggggatcctgtccacgatggggggtgtcctgttgggcttgagtgtctagatatggagaccgtagttcgcggggggagtggggggccgtttggcatatttgccctggcatttggggttgtttattgggggtgggagtgctcctggcatttcctgggcgggaactactggtgtagacctactggattaacttgctcctgggtcggtgtgcgggatagggggagggtgcatcagtctttgtggagcgtctgccttctctccgtctccctgttttcctgttaccgtctccccgtccctctctctgtctctctgaactgctcgttccctccttgcc

SEQ ID NO: 190694 - DNA, 31 bp, Homo sapiens; identical to SEQ ID NO: 97877
  chr19:48154747-48154778
  hypo

SEQ ID NO: 190695 - DNA, 211 bp, Homo sapiens
  chr19:48161875-48162086
  hypo
gagacttcgtctcaaaaaaaaaaaaaaaaaaaaaagcagcagcagcttctagaacagtggttcgcagagtgtggtctgtgccagcagcatcagcatcacctgggaactcattagaaatgcagagtctcaggccgcaccgggacctgccgattcccagattctcaaatctgtattaggaaccagtggtctacaaacccgtgcgcacgtcttg

SEQ ID NO: 190696 - DNA, 44 bp, Homo sapiens; identical to SEQ ID NO: 97879
  chr19:48166307-48166351
  hypo

SEQ ID NO: 190697 - DNA, 30 bp, Homo sapiens; identical to SEQ ID NO: 97880
  chr19:48185440-48185470
  hypo

SEQ ID NO: 190698 - DNA, 400 bp, Homo sapiens
  chr19:48202211-48202611
  hypo
ttcctcgcagtggacgaggagtttgagacggtctccacgcagctgctgaaacgcacccaggccatgctcaataaatatcggctcctgctcctggaggagtcccgggtagggtcagagtcgccttcctcgcctctgggctcctcctcgctgggacactgcccctttccctcacccgctctgggcaaggtggagcctcccgcccctcctagccccgggagggaggttgggagggaggcgggagctcccatcacaaggacagtttggaccttgcacgcatcgtccccgtcgctcgcgccccttcccccttcttgctggttcactcgcacgtcgtcttttcccccaccccagagggtgagcccctcagcggagatggtaatgatcgaccgaatgttcattcagg

SEQ ID NO: 190699 - DNA, 272 bp, Homo sapiens; identical to SEQ ID NO: 56423
  chr19:48229019-48229291
  hypo

SEQ ID NO: 190700 - DNA, 88 bp, Homo sapiens
  chr19:48244446-48244534
  hypo
gacggcaagctgagcggctccaaggccaagacctggatggtggggaccaagctccccaactcagtgctggggcgcatctggaagctca

SEQ ID NO: 190701 - DNA, 46 bp, Homo sapiens
  chr19:48251492-48251538
  hypo
taataggaataagaggacttgctttagtgagcgggtaacacacgtc

SEQ ID NO: 190702 - DNA, 40 bp, Homo sapiens; identical to SEQ ID NO: 97884
  chr19:48259083-48259123
  hypo

SEQ ID NO: 190703 - DNA, 30 bp, Homo sapiens
  chr19:48267276-48267306
  hypo
ccacgccctgcctggcggatttttattttc

SEQ ID NO: 190704 - DNA, 25 bp, Homo sapiens
  chr19:48293279-48293304
  hypo
gccacacaggcgtgagccacactgc

SEQ ID NO: 190705 - DNA, 43 bp, Homo sapiens; identical to SEQ ID NO: 97885
  chr19:48305537-48305580
  hypo

SEQ ID NO: 190706 - DNA, 31 bp, Homo sapiens; identical to SEQ ID NO: 97886
  chr19:48326572-48326603
  hypo

SEQ ID NO: 190707 - DNA, 142 bp, Homo sapiens; identical to SEQ ID NO: 97887
  chr19:48375655-48375797
  hypo

SEQ ID NO: 190708 - DNA, 39 bp, Homo sapiens; identical to SEQ ID NO: 32724
  chr19:48393223-48393262
  hypo

SEQ ID NO: 190709 - DNA, 45 bp, Homo sapiens; identical to SEQ ID NO: 97889
  chr19:48479210-48479255
  hypo

SEQ ID NO: 190710 - DNA, 22 bp, Homo sapiens
  chr19:48586354-48586376
  hypo
agccaccgcgcctggccctggc

SEQ ID NO: 190711 - DNA, 194 bp, Homo sapiens; identical to SEQ ID NO: 97891
  chr19:48640704-48640898
  hypo

SEQ ID NO: 190712 - DNA, 40 bp, Homo sapiens
  chr19:48668227-48668267
  hypo
cagacactggccgggcgccgtggctcacgcctgaaatccc

SEQ ID NO: 190713 - DNA, 30 bp, Homo sapiens
  chr19:48668813-48668843
  hypo
ttcgctgcatgttggcgtcagaattctccc

SEQ ID NO: 190714 - DNA, 182 bp, Homo sapiens; identical to SEQ ID NO: 97892
  chr19:48675138-48675320
  hypo

SEQ ID NO: 190715 - DNA, 31 bp, Homo sapiens; identical to SEQ ID NO: 32726
  chr19:48681748-48681779
  hypo

SEQ ID NO: 190716 - DNA, 331 bp, Homo sapiens; identical to SEQ ID NO: 97894
  chr19:48685674-48686005
  hypo

SEQ ID NO: 190717 - DNA, 30 bp, Homo sapiens; identical to SEQ ID NO: 97895
  chr19:48686762-48686792
  hypo

SEQ ID NO: 190718 - DNA, 43 bp, Homo sapiens
  chr19:48704699-48704742
  hypo
ctggccccagctagtcacacccgtgatgcccatctcttttttt

SEQ ID NO: 190719 - DNA, 29 bp, Homo sapiens
  chr19:48790423-48790452
  hypo
tcacactgcagagactccttacggaaata

SEQ ID NO: 190720 - DNA, 229 bp, Homo sapiens
  chr19:48798923-48799152
  hypo
gactgcgcttcccggcgaccctttgaagttcggcgtaacctgctgacccgctctggctgagtgtgagctaagaggacaggtgtcatatcaggtccaagcctcgagagtcactgcctgctgtgccatcctctcttcttcccgtgccaaaggactggcagcactccagtgatggctgtgccatgggcccggggtacacgagtgatatggagcggagcgctcagctggccca

SEQ ID NO: 190721 - DNA, 130 bp, Homo sapiens
  chr19:48800640-48800770
  hypo
ggtgggcaccaggacggtactggagccggccctctgggtgctggccaggtccacgctcagggtgccgtccagcttcgcggcggcggcggccaggtccttctggcgctgcgcctccgcctgctcctggagc

SEQ ID NO: 190722 - DNA, 31 bp, Homo sapiens; identical to SEQ ID NO: 97899
  chr19:48801739-48801770
  hypo

SEQ ID NO: 190723 - DNA, 31 bp, Homo sapiens; identical to SEQ ID NO: 97900
  chr19:48806355-48806386
  hypo

SEQ ID NO: 190724 - DNA, 30 bp, Homo sapiens
  chr19:48807307-48807337
  hypo
cgctgcaggacctgcgcctccatctcgctc

SEQ ID NO: 190725 - DNA, 159 bp, Homo sapiens; identical to SEQ ID NO: 12487
  chr19:48823577-48823736
  hypo

SEQ ID NO: 190726 - DNA, 30 bp, Homo sapiens; identical to SEQ ID NO: 97902
  chr19:48840512-48840542
  hypo

SEQ ID NO: 190727 - DNA, 157 bp, Homo sapiens
  chr19:48844371-48844528
  hypo
cagcaggtgaatgatcgcgtacgacagatgcttcacaccagtctacactcctggggccggtgccaaccctgggaagaatcagtaaaaggcagctcccctctgggctgactcagcctcgagacaggacacgcattttggcaagcggagcacaagttgg

SEQ ID NO: 190728 - DNA, 54 bp, Homo sapiens
  chr19:48846608-48846662
  hypo
cacgcctggagcccacgctggacttcaggggcatctgcccgactcgctggccca

SEQ ID NO: 190729 - DNA, 376 bp, Homo sapiens; identical to SEQ ID NO: 97904
  chr19:48857795-48858171
  hypo

SEQ ID NO: 190730 - DNA, 30 bp, Homo sapiens; identical to SEQ ID NO: 97905
  chr19:48858660-48858690
  hypo

SEQ ID NO: 190731 - DNA, 145 bp, Homo sapiens; identical to SEQ ID NO: 32732
  chr19:48889257-48889402
  hypo

SEQ ID NO: 190732 - DNA, 644 bp, Homo sapiens; identical to SEQ ID NO: 131906
  chr19:48901492-48902136
  hypo

SEQ ID NO: 190733 - DNA, 24 bp, Homo sapiens
  chr19:48902532-48902556
  hypo
aggaatgggcctgggcgcggtggc

SEQ ID NO: 190734 - DNA, 83 bp, Homo sapiens
  chr19:48902795-48902878
  hypo
gcctgggcgacacagtgagactctgtccaaaagaaaaagaaaaggaatggagttcagaaagaaaggggcgaagtctagtggag

SEQ ID NO: 190735 - DNA, 288 bp, Homo sapiens; identical to SEQ ID NO: 32734
  chr19:48908062-48908350
  hypo

SEQ ID NO: 190736 - DNA, 181 bp, Homo sapiens
  chr19:48925876-48926057
  hypo
aaaagaattaaactagttagtccactcagaacatttatttatttatttagaacagtgcccggtgcactataggtgtttgctgatattatcattatcattagacctgaactcactggaatcaatgcttagattgtgtttcttatctttttacatccctttcccaaatcatagggatgaagtt

SEQ ID NO: 190737 - DNA, 94 bp, Homo sapiens
  chr19:48926476-48926570
  hypo
acaatacaaaaaaagttgagttcaggccccaaagtgcagcccacgaatacaacaaggctgagcacagtaactctctccccgtcctgcatttact

SEQ ID NO: 190738 - DNA, 30 bp, Homo sapiens; identical to SEQ ID NO: 97910
  chr19:48945115-48945145
  hypo

SEQ ID NO: 190739 - DNA, 35 bp, Homo sapiens; identical to SEQ ID NO: 32735
  chr19:48953830-48953865
  hypo

SEQ ID NO: 190740 - DNA, 21 bp, Homo sapiens
  chr19:48955644-48955665
  hypo
gcacccagcccatgccctcct

SEQ ID NO: 190741 - DNA, 30 bp, Homo sapiens; identical to SEQ ID NO: 97913
  chr19:48956874-48956904
  hypo

SEQ ID NO: 190742 - DNA, 30 bp, Homo sapiens; identical to SEQ ID NO: 32736
  chr19:48957853-48957883
  hypo

SEQ ID NO: 190743 - DNA, 30 bp, Homo sapiens; identical to SEQ ID NO: 32737
  chr19:48958879-48958909
  hypo

SEQ ID NO: 190744 - DNA, 125 bp, Homo sapiens; identical to SEQ ID NO: 97916
  chr19:48964896-48965021
  hypo

SEQ ID NO: 190745 - DNA, 30 bp, Homo sapiens; identical to SEQ ID NO: 32738
  chr19:48965278-48965308
  hypo

SEQ ID NO: 190746 - DNA, 154 bp, Homo sapiens
  chr19:48979073-48979227
  hypo
ctactggcctggagccgtgcctggtaacagtaggtgccacctgcgtgttagatgtggtttataatggagacacggtgcacagctgctccagagagacacatctgggcagttacagtccagcacagcagtggaggcttcccgcggcagcaggaga

SEQ ID NO: 190747 - DNA, 45 bp, Homo sapiens
  chr19:48989604-48989649
  hypo
cgcgcccggccttttggaacattcttcctacgtgactcaggcccc

SEQ ID NO: 190748 - DNA, 184 bp, Homo sapiens; identical to SEQ ID NO: 131917
  chr19:48994397-48994581
  hypo

SEQ ID NO: 190749 - DNA, 31 bp, Homo sapiens; identical to SEQ ID NO: 12492
  chr19:48996514-48996545
  hypo

SEQ ID NO: 190750 - DNA, 123 bp, Homo sapiens; identical to SEQ ID NO: 97920
  chr19:49012369-49012492
  hypo

SEQ ID NO: 190751 - DNA, 205 bp, Homo sapiens; identical to SEQ ID NO: 131920
  chr19:49014627-49014832
  hypo

SEQ ID NO: 190752 - DNA, 146 bp, Homo sapiens; identical to SEQ ID NO: 97921
  chr19:49043365-49043511
  hypo

SEQ ID NO: 190753 - DNA, 30 bp, Homo sapiens; identical to SEQ ID NO: 97922
  chr19:49064840-49064870
  hypo

SEQ ID NO: 190754 - DNA, 41 bp, Homo sapiens; identical to SEQ ID NO: 97923
  chr19:49068458-49068499
  hypo

SEQ ID NO: 190755 - DNA, 175 bp, Homo sapiens
  chr19:49076589-49076764
  hypo
tccactcaaatcgagcgatatcagcacgccaggccctggacgtgttttgtgggaacaaacaggcctgtttgtctacgtcccaggcgtagagaagttcgtcccggggccagatttgttttacaaggtggacagcaggcacagggtacctgttttaggaatgcgagaatgcagccac

SEQ ID NO: 190756 - DNA, 270 bp, Homo sapiens
  chr19:49102441-49102711
  hypo
ttcgatcgtgcctaccgcaagcagatgcgggggatgccgaccttcccctgggatgaagacccggaggaggacggcagcccagatcctgagcccagccctgagcctgagcccaagcccagccttgagcccaacaccagcctggagcgtgagcccagacccaactccagccccagccccagccccggccaggcctctgagaccccgcacccacgaccctcataataaacacgtcgattctgtccaggttccttgatgcgctgtggcagggca

SEQ ID NO: 190757 - DNA, 97 bp, Homo sapiens; identical to SEQ ID NO: 97924
  chr19:49117306-49117403
  hypo

SEQ ID NO: 190758 - DNA, 30 bp, Homo sapiens; identical to SEQ ID NO: 97925
  chr19:49129547-49129577
  hypo

SEQ ID NO: 190759 - DNA, 79 bp, Homo sapiens; identical to SEQ ID NO: 97926
  chr19:49130356-49130435
  hypo

SEQ ID NO: 190760 - DNA, 30 bp, Homo sapiens; identical to SEQ ID NO: 32741
  chr19:49131201-49131231
  hypo

SEQ ID NO: 190761 - DNA, 390 bp, Homo sapiens
  chr19:49132562-49132952
  hypo
ccacttcccacccctgatgcccgggtaggggcctccacctgcggcccgcccgaccacctgctgcctccgctgggcaccccgctgcccccagactgggtgacgctggagggggactttgtgctcatgttggccatctcgcccagccacctaggcgctgacctggtggcagctccgcatgcgcgcttcgacgacggcctggtgcacctgtgctgggtgcgtagcggcatctcgcgggctgcgctgctgcgccttttcttggccatggagcgtggtagccacttcagcctgggctgtccgcagctgggctacgccgcggcccgtgccttccgcctagagccgctcacaccacgcggcgtgctcacagtggacggggagcaggtggagtatggg

SEQ ID NO: 190762 - DNA, 106 bp, Homo sapiens; identical to SEQ ID NO: 97929
  chr19:49143015-49143121
  hypo

SEQ ID NO: 190763 - DNA, 30 bp, Homo sapiens
  chr19:49146194-49146224
  hypo
ggtattggccaggcgcggtggatcacagct

SEQ ID NO: 190764 - DNA, 31 bp, Homo sapiens; identical to SEQ ID NO: 97930
  chr19:49166052-49166083
  hypo

SEQ ID NO: 190765 - DNA, 31 bp, Homo sapiens; identical to SEQ ID NO: 97931
  chr19:49173463-49173494
  hypo

SEQ ID NO: 190766 - DNA, 113 bp, Homo sapiens; identical to SEQ ID NO: 97932
  chr19:49173706-49173819
  hypo

SEQ ID NO: 190767 - DNA, 30 bp, Homo sapiens; identical to SEQ ID NO: 32744
  chr19:49174376-49174406
  hypo

SEQ ID NO: 190768 - DNA, 30 bp, Homo sapiens; identical to SEQ ID NO: 97934
  chr19:49177489-49177519
  hypo

SEQ ID NO: 190769 - DNA, 317 bp, Homo sapiens
  chr19:49179992-49180309
  hypo
aaacacgacggcgagcgaggctgggaaatggggccttcccgtactgctggtggaaacggaaactggggcagccacctggcagctcccaaaacgattcaacgtagagttcaccctgtgacccagcacacaggttcgtggcagcactatttgcaacagccgaaaactggaaacaactccagtgcctatcacctgatgagtgaatacattgtggtctacctggacaatgggactttcagtcttgaaaggagtgaggcaattatctgggcgtggtggctgtacctgtagtcctacctgtagtcccagctactcgggaggct

SEQ ID NO: 190770 - DNA, 137 bp, Homo sapiens; identical to SEQ ID NO: 97936
  chr19:49180428-49180565
  hypo

SEQ ID NO: 190771 - DNA, 559 bp, Homo sapiens; identical to SEQ ID NO: 97937
  chr19:49183431-49183990
  hypo

SEQ ID NO: 190772 - DNA, 30 bp, Homo sapiens
  chr19:49206762-49206792
  hypo
ggcctgcaggtgaacgggagccggccgggc

SEQ ID NO: 190773 - DNA, 46 bp, Homo sapiens; identical to SEQ ID NO: 97938
  chr19:49207343-49207389
  hypo

SEQ ID NO: 190774 - DNA, 30 bp, Homo sapiens; identical to SEQ ID NO: 97939
  chr19:49218604-49218634
  hypo

SEQ ID NO: 190775 - DNA, 274 bp, Homo sapiens
  chr19:49218941-49219215
  hypo
gaagaggaaaggggccgtgcccgagggcaaggccggggccagaggagggtctgaggctgagatccacgggtccggatccgagactggagagacggtgaaggaccctgagaggcctgcaggcagcaagccaggccgggaggagcaaggctgtgtggaaagcggggctccagggtgccggagggcaggccagggagcaagacttgattgctgggagatgggcgcctgaactggatctgagggcggaggtgtgggggggctccggttgctacattct

SEQ ID NO: 190776 - DNA, 139 bp, Homo sapiens
  chr19:49221484-49221623
  hypo
tctctggacatatgcgcctttttgtatactccttgctctttgattgctggtgtctttgtacccatccaaccacataggcacgctcacgtgcacactcaagtaccctttgccttctcaggaactgatctgtagttcgaaa

SEQ ID NO: 190777 - DNA, 128 bp, Homo sapiens; identical to SEQ ID NO: 97942
  chr19:49227954-49228082
  hypo

SEQ ID NO: 190778 - DNA, 226 bp, Homo sapiens
  chr19:49232013-49232239
  hypo
gtctcaaaaacaaaagcaaacaaacaaacaaacaaaacccaaaaccccaaatccttcccgaggcgtcatgggaacagtagtatccagcccagctatgaaaagggttgaaggtagggaagggaggctggagaagggacttggggcgctggtggggctggacggcgattggggggcgctcacccagacggcctccttgatgagccgggccaggcggcccagcagtcgt

SEQ ID NO: 190779 - DNA, 30 bp, Homo sapiens
  chr19:49232645-49232675
  hypo
tgtgcgtgactggggcgccccgggacgggc

SEQ ID NO: 190780 - DNA, 30 bp, Homo sapiens; identical to SEQ ID NO: 97944
  chr19:49233251-49233281
  hypo

SEQ ID NO: 190781 - DNA, 99 bp, Homo sapiens; identical to SEQ ID NO: 97945
  chr19:49237046-49237145
  hypo

SEQ ID NO: 190782 - DNA, 19 bp, Homo sapiens
  chr19:49241202-49241221
  hypo
tgtttgtttgttttttcga

SEQ ID NO: 190783 - DNA, 14 bp, Homo sapiens
  chr19:49242359-49242373
  hypo
cgcaggtgctccgc

SEQ ID NO: 190784 - DNA, 414 bp, Homo sapiens; identical to SEQ ID NO: 131934
  chr19:49242393-49242807
  hypo

SEQ ID NO: 190785 - DNA, 33 bp, Homo sapiens; identical to SEQ ID NO: 131935
  chr19:49242911-49242944
  hypo

SEQ ID NO: 190786 - DNA, 30 bp, Homo sapiens
  chr19:49245883-49245913
  hypo
catgaggcactgcgccgggcctccttcacg

SEQ ID NO: 190787 - DNA, 77 bp, Homo sapiens; identical to SEQ ID NO: 97948
  chr19:49246878-49246955
  hypo

SEQ ID NO: 190788 - DNA, 30 bp, Homo sapiens; identical to SEQ ID NO: 97949
  chr19:49253916-49253946
  hypo

SEQ ID NO: 190789 - DNA, 30 bp, Homo sapiens; identical to SEQ ID NO: 97950
  chr19:49266108-49266138
  hypo

SEQ ID NO: 190790 - DNA, 17 bp, Homo sapiens
  chr19:49266803-49266820
  hypo
ggcgacacagcgagact

SEQ ID NO: 190791 - DNA, 137 bp, Homo sapiens; identical to SEQ ID NO: 97952
  chr19:49274075-49274212
  hypo

SEQ ID NO: 190792 - DNA, 27 bp, Homo sapiens
  chr19:49278471-49278498
  hypo
actccatctcaacgaacaaatatatac

SEQ ID NO: 190793 - DNA, 91 bp, Homo sapiens
  chr19:49280158-49280249
  hypo
tagcaatgtgaaacactgggacggacccacactaaaatatcagtggtttgaacaattgtttttttttttttttttttgagacggagtctca

SEQ ID NO: 190794 - DNA, 89 bp, Homo sapiens; identical to SEQ ID NO: 32752
  chr19:49281056-49281145
  hypo

SEQ ID NO: 190795 - DNA, 25 bp, Homo sapiens
  chr19:49285388-49285413
  hypo
ttttttgagacagctctctgtcgcc

SEQ ID NO: 190796 - DNA, 79 bp, Homo sapiens; identical to SEQ ID NO: 97957
  chr19:49287698-49287777
  hypo

SEQ ID NO: 190797 - DNA, 22 bp, Homo sapiens
  chr19:49292498-49292520
  hypo
gccacggcgcctagtcctgttt

SEQ ID NO: 190798 - DNA, 100 bp, Homo sapiens
  chr19:49305613-49305713
  hypo
ttgacctacagttcccgaaattgagcctctagatacatttgcacttaaacaagtgactaaagaagggacgtgtgtactggattccttttttttttttttt

SEQ ID NO: 190799 - DNA, 30 bp, Homo sapiens; identical to SEQ ID NO: 97959
  chr19:49318429-49318459
  hypo

SEQ ID NO: 190800 - DNA, 18 bp, Homo sapiens
  chr19:49328485-49328503
  hypo
ctccgtcgcaaaaaaaaa

SEQ ID NO: 190801 - DNA, 21 bp, Homo sapiens
  chr19:49329359-49329380
  hypo
agccaccgtgcccagcccaac

SEQ ID NO: 190802 - DNA, 21 bp, Homo sapiens
  chr19:49335057-49335078
  hypo
tggacacagttgcccacgcct

SEQ ID NO: 190803 - DNA, 183 bp, Homo sapiens; identical to SEQ ID NO: 97963
  chr19:49348662-49348845
  hypo

SEQ ID NO: 190804 - DNA, 30 bp, Homo sapiens
  chr19:49401706-49401736
  hypo
cacccagcccccagcggcctagaactccac

SEQ ID NO: 190805 - DNA, 39 bp, Homo sapiens; identical to SEQ ID NO: 32755
  chr19:49402038-49402077
  hypo

SEQ ID NO: 190806 - DNA, 94 bp, Homo sapiens
  chr19:49419215-49419309
  hypo
ttaattgtacagttcaatagtattaagtatatttacactgtcatgcaaccaattctgagagctcttcatctcgcacaaccgaaaccgtatccat

SEQ ID NO: 190807 - DNA, 30 bp, Homo sapiens
  chr19:49432688-49432718
  hypo
catgttaccagaggcgagtctgaccgggta

SEQ ID NO: 190808 - DNA, 43 bp, Homo sapiens; identical to SEQ ID NO: 32757
  chr19:49463918-49463961
  hypo

SEQ ID NO: 190809 - DNA, 42 bp, Homo sapiens
  chr19:49464191-49464233
  hypo
tcacccccaccaccgcgccctcaccaccgcccctgccccacc

SEQ ID NO: 190810 - DNA, 30 bp, Homo sapiens
  chr19:49464649-49464679
  hypo
cagctctttaatgcccgttcatctcagtcc

SEQ ID NO: 190811 - DNA, 30 bp, Homo sapiens; identical to SEQ ID NO: 32758
  chr19:49465032-49465062
  hypo

SEQ ID NO: 190812 - DNA, 31 bp, Homo sapiens; identical to SEQ ID NO: 12505
  chr19:49466992-49467023
  hypo

SEQ ID NO: 190813 - DNA, 586 bp, Homo sapiens; identical to SEQ ID NO: 131947
  chr19:49467049-49467635
  hypo

SEQ ID NO: 190814 - DNA, 30 bp, Homo sapiens; identical to SEQ ID NO: 32760
  chr19:49472809-49472839
  hypo

SEQ ID NO: 190815 - DNA, 102 bp, Homo sapiens
  chr19:49482061-49482163
  hypo
aattacaggcatgagctgccgcgcccagctacccttaggtttctaggatagcaaggaaactgaggtgtgagcagggaagccgtgccctggggcctccaggct

SEQ ID NO: 190816 - DNA, 153 bp, Homo sapiens; identical to SEQ ID NO: 97972
  chr19:49490479-49490632
  hypo

SEQ ID NO: 190817 - DNA, 27 bp, Homo sapiens
  chr19:49491325-49491352
  hypo
tgggattacaggcgtgagccaccgcac

SEQ ID NO: 190818 - DNA, 30 bp, Homo sapiens
  chr19:49493448-49493478
  hypo
tcccttagccctgccgcctgatggctttct

SEQ ID NO: 190819 - DNA, 30 bp, Homo sapiens; identical to SEQ ID NO: 32761
  chr19:49494756-49494786
  hypo

SEQ ID NO: 190820 - DNA, 49 bp, Homo sapiens
  chr19:49509360-49509409
  hypo
gtgtccccagatggcatgggccgtgctcgtccactcagccctcagcaga

SEQ ID NO: 190821 - DNA, 30 bp, Homo sapiens
  chr19:49517519-49517549
  hypo
agcagcccagctccgcggaaaggtgccctt

SEQ ID NO: 190822 - DNA, 34 bp, Homo sapiens; identical to SEQ ID NO: 32762
  chr19:49525577-49525611
  hypo

SEQ ID NO: 190823 - DNA, 30 bp, Homo sapiens
  chr19:49533230-49533260
  hypo
tcagggtgagctggccgtgtgcgatgcagt

SEQ ID NO: 190824 - DNA, 97 bp, Homo sapiens; identical to SEQ ID NO: 97975
  chr19:49540856-49540953
  hypo

SEQ ID NO: 190825 - DNA, 202 bp, Homo sapiens; identical to SEQ ID NO: 97976
  chr19:49545492-49545694
  hypo

SEQ ID NO: 190826 - DNA, 30 bp, Homo sapiens
  chr19:49553676-49553706
  hypo
ttatcggcctcgaagcggtgacaaagaagt

SEQ ID NO: 190827 - DNA, 301 bp, Homo sapiens
  chr19:49600407-49600708
  hypo
ctttatttctctagcttctggcaacacccacactgtcttcctgaaaaggtagcacccgagggttcggggaaggagcctggtagttcaagtgcccggggtgagaggtgaagtctgccttggcccttcgccactttaacacctccctttttctgtgtctcgagtttgttctgttttacttccatttgcaaaatagtaataaataaatatcagtgtccagcactgtgtctgggccatagtacgtgttcagtaaattatatgtctaatgttccattattggaacgctaagcatgtgggagttatt

SEQ ID NO: 190828 - DNA, 141 bp, Homo sapiens
  chr19:49600767-49600908
  hypo
aaaaattgcaacctctggcataaatgggttaatgttattccttttctcatgctctcccagaatgtgacagggcttccgagggaaacactataccatggaagaaccggcagagtgtccttaaggccccggcaggagtcaggg

SEQ ID NO: 190829 - DNA, 30 bp, Homo sapiens
  chr19:49606251-49606281
  hypo
ggttcaggggccaagcggcccctcctcaga

SEQ ID NO: 190830 - DNA, 164 bp, Homo sapiens
  chr19:49606742-49606906
  hypo
cccgtgtcccccccccgggaagcccgcctcctcgccaggcccccaggagttgccgagccccccccatcccgctcggtttggacacccgcaaggccggcatcggtaaatggcacctttttctcttcctctggttgttatttgggggggagcgggctggggcgggg

SEQ ID NO: 190831 - DNA, 30 bp, Homo sapiens
  chr19:49611718-49611748
  hypo
ctgctgtgtttggacgcgttcctgcccagc

SEQ ID NO: 190832 - DNA, 30 bp, Homo sapiens; identical to SEQ ID NO: 97980
  chr19:49621172-49621202
  hypo

SEQ ID NO: 190833 - DNA, 447 bp, Homo sapiens; identical to SEQ ID NO: 56470
  chr19:49660927-49661374
  hypo

SEQ ID NO: 190834 - DNA, 428 bp, Homo sapiens
  chr19:49703627-49704055
  hypo
tgcttcacatcttcacggtcaacaaacagctggggcccaagatcgtcatcgtgagcaagatggtgaggcaggggcggggccaaagtgggcggggacatagggaaaggggtggggccagggagggagtggtccgtggagaaggggcgtgactttggggagcaatggggcgtgtttttgggatataggggtggggccagagtaggaaagggcggggccagactcagccacatctccccacagatgaaggacgtgttcttcttcctcttcttcctcggcgtgtggctggtagcctatggcgtggccacggaggggctcctgaggccacgggacagtgacttcccaagtatcctgcgccgcgtcttctaccgtccctacctgcagatcttcgggcagattccccaggaggacatggacggtaggggggatga

SEQ ID NO: 190835 - DNA, 206 bp, Homo sapiens
  chr19:49705147-49705353
  hypo
gcgcccggcagtcttcctgtctttcttaggtctctgtccccctcaccccatctctgaatgtctctcttcacagtggccctcatggagcacagcaactgctcgtcggagcccggcttctgggcacaccctcctggggcccaggcgggcacctgcgtctcccagtatgccaactggctggtggtgctgctcctcgtcatcttcctgct

SEQ ID NO: 190836 - DNA, 30 bp, Homo sapiens
  chr19:49714919-49714949
  hypo
aaccacagcatgcccggctcctcccagaac

SEQ ID NO: 190837 - DNA, 22 bp, Homo sapiens
  chr19:49784805-49784827
  hypo
ctgtgaatagcagcattgaaac

SEQ ID NO: 190838 - DNA, 30 bp, Homo sapiens; identical to SEQ ID NO: 97985
  chr19:49828332-49828362
  hypo

SEQ ID NO: 190839 - DNA, 31 bp, Homo sapiens; identical to SEQ ID NO: 97986
  chr19:49828593-49828624
  hypo

SEQ ID NO: 190840 - DNA, 46 bp, Homo sapiens
  chr19:49890881-49890927
  hypo
acataaaaaggacaggccaggcgctgtgtctcacgcctgtaatccc

SEQ ID NO: 190841 - DNA, 640 bp, Homo sapiens; identical to SEQ ID NO: 12511
  chr19:49925605-49926245
  hypo

SEQ ID NO: 190842 - DNA, 30 bp, Homo sapiens; identical to SEQ ID NO: 97988
  chr19:49950569-49950599
  hypo

SEQ ID NO: 190843 - DNA, 30 bp, Homo sapiens; identical to SEQ ID NO: 32766
  chr19:49964945-49964975
  hypo

SEQ ID NO: 190844 - DNA, 30 bp, Homo sapiens; identical to SEQ ID NO: 97990
  chr19:49965211-49965241
  hypo

SEQ ID NO: 190845 - DNA, 30 bp, Homo sapiens; identical to SEQ ID NO: 32767
  chr19:49967835-49967865
  hypo

SEQ ID NO: 190846 - DNA, 31 bp, Homo sapiens; identical to SEQ ID NO: 32768
  chr19:49969561-49969592
  hypo

SEQ ID NO: 190847 - DNA, 505 bp, Homo sapiens; identical to SEQ ID NO: 97993
  chr19:49971402-49971907
  hypo

SEQ ID NO: 190848 - DNA, 132 bp, Homo sapiens; identical to SEQ ID NO: 32770
  chr19:49978919-49979051
  hypo

SEQ ID NO: 190849 - DNA, 30 bp, Homo sapiens; identical to SEQ ID NO: 12518
  chr19:49990679-49990709
  hypo

SEQ ID NO: 190850 - DNA, 30 bp, Homo sapiens
  chr19:49993475-49993505
  hypo
tccctccctctaggccggaaggtggtggtc

SEQ ID NO: 190851 - DNA, 491 bp, Homo sapiens
  chr19:49993763-49994254
  hypo
aacaccaacccttcccgaggcccctaccacttccgggcccccagccgcatcttctggcggaccgtgcgaggtgagcagagcgtggggactgcaggtggtgacgggcaggcggccggtgatgagaacttctcccactcacattcgagtttcccgaccatgagatgactccacatgcactaccatctgaggccaccccatgggcccacctcagtggggtgggtgggcatccttatgaggccctctgactgggcctgctatctgtcacccaacaggtatgctgccccacaaaaccaagcgaggccaggccgctctggaccgtctcaaggtgtttgacggcatcccaccgccctacgacaaggtgagctatgccaaaccccacaggcagcggccttacctgtggcgtccatgatgttccgcaactacctacattgtttgatcctcatgaaagcagcactggctgagacgccagtccagccgacctccttccctgt

SEQ ID NO: 190852 - DNA, 181 bp, Homo sapiens
  chr19:49997365-49997546
  hypo
ggcgtgagccatcgcgcccggccaattttttttttttttttattaagatgttctatagctgcactaactgatacacaatacacaagccactaaccccacttgtggctcctgagcacttaaatatgaatagagtgaggctgggtgcagtctcacctgttcccggaactttgggaggccgagg

SEQ ID NO: 190853 - DNA, 24 bp, Homo sapiens
  chr19:49998404-49998428
  hypo
tttttgagacggtctcgctccgtc

SEQ ID NO: 190854 - DNA, 35 bp, Homo sapiens
  chr19:50001235-50001270
  hypo
atccgcaagtacaaccgcttcgagaagcgccacaa

SEQ ID NO: 190855 - DNA, 178 bp, Homo sapiens
  chr19:50027846-50028024
  hypo
ccggagctgcaacttcggttcctgcggaatgggctggccgctggcaccggccagggtgacttcggccccaacagtgacggatccttccacgcctcgtcgtcactaacagtcaaaagtggcgatgagcaccactactgctgcattgtgcagcacgcggggctggcgcagcccctcaggg

SEQ ID NO: 190856 - DNA, 492 bp, Homo sapiens; identical to SEQ ID NO: 98000
  chr19:50028309-50028801
  hypo

SEQ ID NO: 190857 - DNA, 121 bp, Homo sapiens; identical to SEQ ID NO: 98001
  chr19:50049636-50049757
  hypo

SEQ ID NO: 190858 - DNA, 31 bp, Homo sapiens
  chr19:50050812-50050843
  hypo
tttttttttggaagacgaatctcgatttgtc

SEQ ID NO: 190859 - DNA, 45 bp, Homo sapiens
  chr19:50056050-50056095
  hypo
tctttacaagtaactgtaattttctggacgcgctgcctgtgagct

SEQ ID NO: 190860 - DNA, 274 bp, Homo sapiens; identical to SEQ ID NO: 56489
  chr19:50058956-50059230
  hypo

SEQ ID NO: 190861 - DNA, 880 bp, Homo sapiens; identical to SEQ ID NO: 98003
  chr19:50059647-50060527
  hypo

SEQ ID NO: 190862 - DNA, 173 bp, Homo sapiens; identical to SEQ ID NO: 32776
  chr19:50060911-50061084
  hypo

SEQ ID NO: 190863 - DNA, 164 bp, Homo sapiens; identical to SEQ ID NO: 32777
  chr19:50061335-50061499
  hypo

SEQ ID NO: 190864 - DNA, 191 bp, Homo sapiens; identical to SEQ ID NO: 32778
  chr19:50063174-50063365
  hypo

SEQ ID NO: 190865 - DNA, 23 bp, Homo sapiens
  chr19:50072345-50072368
  hypo
actgcgcccggcctgggaggatc

SEQ ID NO: 190866 - DNA, 31 bp, Homo sapiens; identical to SEQ ID NO: 32779
  chr19:50092048-50092079
  hypo

SEQ ID NO: 190867 - DNA, 30 bp, Homo sapiens; identical to SEQ ID NO: 32780
  chr19:50097732-50097762
  hypo

SEQ ID NO: 190868 - DNA, 30 bp, Homo sapiens; identical to SEQ ID NO: 32781
  chr19:50098345-50098375
  hypo

SEQ ID NO: 190869 - DNA, 30 bp, Homo sapiens; identical to SEQ ID NO: 32782
  chr19:50119400-50119430
  hypo

SEQ ID NO: 190870 - DNA, 30 bp, Homo sapiens
  chr19:50119985-50120015
  hypo
gggttcataatagacgaagctcataggaga

SEQ ID NO: 190871 - DNA, 30 bp, Homo sapiens; identical to SEQ ID NO: 98011
  chr19:50128908-50128938
  hypo

SEQ ID NO: 190872 - DNA, 234 bp, Homo sapiens
  chr19:50129558-50129792
  hypo
ccccgttctcgcccccgccccaccccctgctcccactaccctttgtctcttgctctttcttgggcttctgtacaactcaacttgtatacactgtgtacacacaaccagccaaacgaaaacccaacggcaaacactttaccggcaggctggagtgcctctgtcctgcggcgctggagtgggtggcagtggtagcaggggcagaggttctggaacgggactttcccagagccctgg

SEQ ID NO: 190873 - DNA, 39 bp, Homo sapiens
  chr19:50130456-50130495
  hypo
attacaggtgtgagccactgcgcccggcctcaagtcctg

SEQ ID NO: 190874 - DNA, 81 bp, Homo sapiens
  chr19:50130727-50130808
  hypo
tcaagtttgaagaaccgtgttctagaacaagaatgttaaaaatgtgcaggttggctgggcacggtggctcacggctataat

SEQ ID NO: 190875 - DNA, 25 bp, Homo sapiens
  chr19:50136817-50136842
  hypo
gggtgcggtggctcacgcctgtaat

SEQ ID NO: 190876 - DNA, 30 bp, Homo sapiens
  chr19:50139638-50139668
  hypo
gaatgtcctttgttccgtccagcagcctct

SEQ ID NO: 190877 - DNA, 30 bp, Homo sapiens
  chr19:50139918-50139948
  hypo
acggggaagtcgtcgcggtccttgacccgc

SEQ ID NO: 190878 - DNA, 30 bp, Homo sapiens
  chr19:50140362-50140392
  hypo
ggtcgtagtcagacacgaagtaggactggc

SEQ ID NO: 190879 - DNA, 30 bp, Homo sapiens; identical to SEQ ID NO: 32786
  chr19:50154362-50154392
  hypo

SEQ ID NO: 190880 - DNA, 30 bp, Homo sapiens; identical to SEQ ID NO: 98016
  chr19:50154592-50154622
  hypo

SEQ ID NO: 190881 - DNA, 30 bp, Homo sapiens; identical to SEQ ID NO: 98017
  chr19:50155028-50155058
  hypo

SEQ ID NO: 190882 - DNA, 30 bp, Homo sapiens; identical to SEQ ID NO: 98018
  chr19:50155678-50155708
  hypo

SEQ ID NO: 190883 - DNA, 30 bp, Homo sapiens; identical to SEQ ID NO: 98019
  chr19:50165217-50165247
  hypo

SEQ ID NO: 190884 - DNA, 30 bp, Homo sapiens; identical to SEQ ID NO: 98020
  chr19:50171632-50171662
  hypo

SEQ ID NO: 190885 - DNA, 30 bp, Homo sapiens; identical to SEQ ID NO: 98021
  chr19:50173387-50173417
  hypo

SEQ ID NO: 190886 - DNA, 36 bp, Homo sapiens
  chr19:50203509-50203545
  hypo
aaaacaaaacaaaaaaaaaaacgctgattgctggac

SEQ ID NO: 190887 - DNA, 200 bp, Homo sapiens; identical to SEQ ID NO: 98022
  chr19:50208441-50208641
  hypo

SEQ ID NO: 190888 - DNA, 44 bp, Homo sapiens
  chr19:50215611-50215655
  hypo
aaaaaggagggtgatgttgagaaaggatgcgtcagcagagaagt

SEQ ID NO: 190889 - DNA, 102 bp, Homo sapiens; identical to SEQ ID NO: 98023
  chr19:50218145-50218247
  hypo

SEQ ID NO: 190890 - DNA, 31 bp, Homo sapiens; identical to SEQ ID NO: 32788
  chr19:50223822-50223853
  hypo

SEQ ID NO: 190891 - DNA, 121 bp, Homo sapiens
  chr19:50240191-50240312
  hypo
gtgctgggataaggtgtgagccaccacacccggctttccctgcattccaggggacttgtttacagtcttttaactttgaattcttttgttgttttaagtgtgtttctttctgtctttcttt

SEQ ID NO: 190892 - DNA, 31 bp, Homo sapiens; identical to SEQ ID NO: 98025
  chr19:50247504-50247535
  hypo

SEQ ID NO: 190893 - DNA, 99 bp, Homo sapiens; identical to SEQ ID NO: 98026
  chr19:50249076-50249175
  hypo

SEQ ID NO: 190894 - DNA, 31 bp, Homo sapiens; identical to SEQ ID NO: 98027
  chr19:50264372-50264403
  hypo

SEQ ID NO: 190895 - DNA, 30 bp, Homo sapiens; identical to SEQ ID NO: 98028
  chr19:50266321-50266351
  hypo

SEQ ID NO: 190896 - DNA, 88 bp, Homo sapiens; identical to SEQ ID NO: 32789
  chr19:50274627-50274715
  hypo

SEQ ID NO: 190897 - DNA, 136 bp, Homo sapiens; identical to SEQ ID NO: 98030
  chr19:50289572-50289708
  hypo

SEQ ID NO: 190898 - DNA, 204 bp, Homo sapiens
  chr19:50291870-50292074
  hypo
ccagagtcagggctcgggagatgcactgtggctcgggagatgagcgccatgacagagatgggaaggtggcccagagtcagggctcgggagatgcgcgccgtgacggagatgggaaagtggcctggagtcagggctcgggagatgtgcgctgtgacggaggtgggaaagtgccgtcacaaatggagcatcgtctgtggccaggct

SEQ ID NO: 190899 - DNA, 37 bp, Homo sapiens
  chr19:50292281-50292318
  hypo
ggccgtagcaacaggcgtcagtcgggcgagtatctgc

SEQ ID NO: 190900 - DNA, 30 bp, Homo sapiens; identical to SEQ ID NO: 98032
  chr19:50295555-50295585
  hypo

SEQ ID NO: 190901 - DNA, 139 bp, Homo sapiens
  chr19:50297024-50297163
  hypo
gcttcctgggggcggcgatcccagaattgagacttagaatacacatgcgcatctcctgggcagtcaggaagaggcctggattcgcaggcaaagagaagaacacaccagctcgtgcatccactcattgtttctttttttt

SEQ ID NO: 190902 - DNA, 40 bp, Homo sapiens; identical to SEQ ID NO: 32790
  chr19:50303026-50303066
  hypo

SEQ ID NO: 190903 - DNA, 279 bp, Homo sapiens
  chr19:50303125-50303404
  hypo
cctgggtctccagatgggggcagtggtgagcccagatccaggtgagtgaaagcccgacatggcctgcggcacactctctctcacacgccccggcggcaggtcctgaaggtggccatcctggccgagaagtacgccgtggactacagctggtacgtggacaccatcctcaacctcatccgcattgcgggcgactacgtgagtgaggaggtgtggtaccgtgtgctacagatcgtcaccaaccgtgatgacgtccagggctatgccgccaagaccgtcttt

SEQ ID NO: 190904 - DNA, 102 bp, Homo sapiens
  chr19:50304784-50304886
  hypo
ggccggctcccagctgcgcaatgctgacgtggagctgcagcagcgagccgtggagtacctcaccctcagctcagtggccagcaccgacgtcctggtcagagc

SEQ ID NO: 190905 - DNA, 227 bp, Homo sapiens; identical to SEQ ID NO: 98036
  chr19:50305175-50305402
  hypo

SEQ ID NO: 190906 - DNA, 295 bp, Homo sapiens
  chr19:50306202-50306497
  hypo
cagcccaggtcctgaggacatcggccctcccattccggaagccgatgagttgctgaataagtgagtcctgggagtggtgggggaggggaacgggacaggtgcggagcccaggccaggtgcagacaggcacccccgtcatcttgcgccccctgccccctcaggtttgtgtgtaagaacaacggggtcctgttcgagaaccagctgctgcagatcggagtcaagtcagagttccgacagaacctgggtgtgtcccgggggactgtgggaatgggtcggagggagaccttggggaagg

SEQ ID NO: 190907 - DNA, 645 bp, Homo sapiens
  chr19:50308599-50309244
  hypo
ggtccctcaaagacctgcaggcgggagctgccgggagctctggggttcctgacccagacctcccgggggcccacctcctctgtctggcttccttgactcctggcgggcacagctggctgtgcagaccaagcgcgtggcggcgcaggtggacggcggcgcgcaggtgcagcaggtgctcaatatcgagtgcctgcgggacttcctgacgcccccgctgctgtccgtgcgcttccggtgagtcaggtacggcgcggccggtgggcggagcctccggggtgaggggcggggcctaatggagcctccctttcacctcatcaggtacggtggcgccccccaggccctcaccctgaagctcccagtgaccatcaacaagttcttccagcccaccgagatggcggcccaggatttcttccagcgctggaagcagctgagcctgtgaggggtggggagggggcggagccaaagccgcgcctctgggtgggcgggtcgggccgtccaggtccctgacttgaaccttcccggtccccagccctcaacaggaggcgcagaaaatcttcaaagccaaccaccccatggacgcagaagttactaaggccaaggtgagagaccgcgggcgtgtttgccggcctatggctgctttgcttc

SEQ ID NO: 190908 - DNA, 302 bp, Homo sapiens; identical to SEQ ID NO: 131998
  chr19:50312464-50312766
  hypo

SEQ ID NO: 190909 - DNA, 121 bp, Homo sapiens; identical to SEQ ID NO: 98040
  chr19:50318973-50319094
  hypo

SEQ ID NO: 190910 - DNA, 121 bp, Homo sapiens; identical to SEQ ID NO: 32793
  chr19:50319633-50319754
  hypo

SEQ ID NO: 190911 - DNA, 162 bp, Homo sapiens; identical to SEQ ID NO: 98042
  chr19:50320053-50320215
  hypo

SEQ ID NO: 190912 - DNA, 90 bp, Homo sapiens
  chr19:50326702-50326792
  hypo
gcatgtattaagtgccgtgtaagtgtttcctaggattttgtgcctcactctcctggtttgcaaatggataatggtcgcgtgtatctccgt

SEQ ID NO: 190913 - DNA, 30 bp, Homo sapiens
  chr19:50326995-50327025
  hypo
gaagcttccccttcgcggtagctggaattc

SEQ ID NO: 190914 - DNA, 58 bp, Homo sapiens; identical to SEQ ID NO: 32795
  chr19:50331698-50331756
  hypo

SEQ ID NO: 190915 - DNA, 217 bp, Homo sapiens
  chr19:50341933-50342150
  hypo
aatatgcaaacaaatcgtgtctgtgttgaaagaatacaacctgaaacgccactatgaatcaaagcatagtaagagctacgaccagtacacagaacagactcgagatgccatcctcaacgaactgaaaaagggactcaaatgtcaatagggtttgttttgaaaagcgaattaacagaagtggcgcggcagtggtacgccgttccggaatcacgtgaga

SEQ ID NO: 190916 - DNA, 594 bp, Homo sapiens
  chr19:50352980-50353574
  hypo
ctccagtcagccctcgggagcccctgggcaggaaaacatggacaggcctacgggttcttctgccatttcactggccactcctccgtgtcctttgctggttgcttctcattgtcgtgactgctaaagggatgagtgtcccagtctctttgtgagctcatccagtctccattcaaacactgatgactcccgaatttctctctccaggctatgacatcaatatctatctacattgtttagtcaacatccgaaacagaagtagggactccgtctctaacctcctacagctgtgtctatttctcctctctaccttcactcgactccgcccacactggctcccttttattccttctactttcaggatttgtctttgctgttctgtcctctttgcacacttttccagccatctggaatggcaggttgctcacaggtcgttttcttgacttcccttgcttgctaactttacctcgctatggtcatatcccatcgccctgtggatgtgcgctagttaacacttagcacagcctgtgattatgtctctccccagtggaccgtggggcctgtgagggacgtggtctgattcggtcgtcgccgagc

SEQ ID NO: 190917 - DNA, 186 bp, Homo sapiens; identical to SEQ ID NO: 132001
  chr19:50353783-50353969
  hypo

SEQ ID NO: 190918 - DNA, 31 bp, Homo sapiens
  chr19:50355763-50355794
  hypo
cgcgcagttttgcacacgattgccaagatgt

SEQ ID NO: 190919 - DNA, 30 bp, Homo sapiens; identical to SEQ ID NO: 98045
  chr19:50358892-50358922
  hypo

SEQ ID NO: 190920 - DNA, 49 bp, Homo sapiens; identical to SEQ ID NO: 98046
  chr19:50361409-50361458
  hypo

SEQ ID NO: 190921 - DNA, 30 bp, Homo sapiens; identical to SEQ ID NO: 32797
  chr19:50361778-50361808
  hypo

SEQ ID NO: 190922 - DNA, 472 bp, Homo sapiens
  chr19:50364772-50365244
  hypo
gggaacatcagaggggcggcaggcccaggggtcaggggaggaggggggtcagggggtgcagcccggggggtgtccgggctgagcgggctcacccggttgttgtggcgcgcctgctccagagtggcggtgaagaggaagcagcggcaggggacgcccgcggctcgggcacactggacgtacctgtgggggaaggagctggatgtgcaggccccgcccaccccgccgcaggccacctacggccccgcggtcacgctacctggcgcggctcgcggcgtctgggtttgtgttgtcgatggcgacccgtttcccttgcttcagggctgtctcacacgtggtcacacagcgctgccaggagcctagcgtgtcctggggacacgagaggtcacaaacagatcggcagacccagggggagagaagaccccgagcggggacggggaggcaatgatggaggaaagccgccccaaaccagttg

SEQ ID NO: 190923 - DNA, 30 bp, Homo sapiens; identical to SEQ ID NO: 32799
  chr19:50365744-50365774
  hypo

SEQ ID NO: 190924 - DNA, 30 bp, Homo sapiens; identical to SEQ ID NO: 32800
  chr19:50366037-50366067
  hypo

SEQ ID NO: 190925 - DNA, 30 bp, Homo sapiens; identical to SEQ ID NO: 98051
  chr19:50377322-50377352
  hypo

SEQ ID NO: 190926 - DNA, 30 bp, Homo sapiens; identical to SEQ ID NO: 98052
  chr19:50385188-50385218
  hypo

SEQ ID NO: 190927 - DNA, 30 bp, Homo sapiens; identical to SEQ ID NO: 98053
  chr19:50387490-50387520
  hypo

SEQ ID NO: 190928 - DNA, 205 bp, Homo sapiens; identical to SEQ ID NO: 32801
  chr19:50406381-50406586
  hypo

SEQ ID NO: 190929 - DNA, 174 bp, Homo sapiens
  chr19:50412837-50413011
  hypo
aaagtgaagcctgtcgtctgtgtggccggagtctgggtggcaagtgagaacaggccggtggaaggggtacttgtggctggttggaagggagccccaaaattaaaccctccagtgccagaggtggagaaagaaaaccctgtagcaggtgtggttgttgccgtctttgcagtgcca

SEQ ID NO: 190930 - DNA, 27 bp, Homo sapiens
  chr19:50415435-50415462
  hypo
ttttttttgagacgggagtctcgctct

SEQ ID NO: 190931 - DNA, 40 bp, Homo sapiens
  chr19:50422096-50422136
  hypo
aaaagctaggccgggcgcagtggctcacgcctgcaatccc

SEQ ID NO: 190932 - DNA, 30 bp, Homo sapiens
  chr19:50422690-50422720
  hypo
cttattctcctcacccgggtagatgaggaa

SEQ ID NO: 190933 - DNA, 348 bp, Homo sapiens; identical to SEQ ID NO: 98057
  chr19:50423832-50424180
  hypo

SEQ ID NO: 190934 - DNA, 326 bp, Homo sapiens; identical to SEQ ID NO: 98058
  chr19:50424484-50424810
  hypo

SEQ ID NO: 190935 - DNA, 197 bp, Homo sapiens
  chr19:50477608-50477805
  hypo
tgtcctgagaaatgcacggttaggtgattctgtcgtgtgagcatccttgaatgtgcttacacagtcataaatggtacagcctaccacacgccgaggctatacggtatagcccattgctcctagactatacacctgcacggcatgttcctgtagtgaaagctgtaggcaattataacgcaatggataggttaaagaca

SEQ ID NO: 190936 - DNA, 30 bp, Homo sapiens
  chr19:50553375-50553405
  hypo
gcaacactttgtgtgcggtcacacatcatt

SEQ ID NO: 190937 - DNA, 736 bp, Homo sapiens; identical to SEQ ID NO: 132012
  chr19:50553764-50554500
  hypo

SEQ ID NO: 190938 - DNA, 149 bp, Homo sapiens
  chr19:50654425-50654574
  hypo
ctggccccaactgtgacttgctatttgctcttccttctaccttttccccactactgctttcagaaaacacctacttttcttgcaagaacaagttcttacagcctctcctgcagtaaacgttctccgatttccaccgagctgagccggag

SEQ ID NO: 190939 - DNA, 30 bp, Homo sapiens
  chr19:50671110-50671140
  hypo
cacccgccaggggcacgcagacacgaatcc

SEQ ID NO: 190940 - DNA, 31 bp, Homo sapiens; identical to SEQ ID NO: 98061
  chr19:50673968-50673999
  hypo

SEQ ID NO: 190941 - DNA, 38 bp, Homo sapiens; identical to SEQ ID NO: 98062
  chr19:50705040-50705078
  hypo

SEQ ID NO: 190942 - DNA, 31 bp, Homo sapiens; identical to SEQ ID NO: 98063
  chr19:50726894-50726925
  hypo

SEQ ID NO: 190943 - DNA, 30 bp, Homo sapiens
  chr19:50750170-50750200
  hypo
caacagtgtgggaaacggtaccctctccct

SEQ ID NO: 190944 - DNA, 30 bp, Homo sapiens
  chr19:50750401-50750431
  hypo
aggcacagaaagagccgcgcaccccggccc

SEQ ID NO: 190945 - DNA, 31 bp, Homo sapiens; identical to SEQ ID NO: 98064
  chr19:50753943-50753974
  hypo

SEQ ID NO: 190946 - DNA, 54 bp, Homo sapiens; identical to SEQ ID NO: 98065
  chr19:50756057-50756111
  hypo

SEQ ID NO: 190947 - DNA, 23 bp, Homo sapiens
  chr19:50764002-50764025
  hypo
tgcgtgtgtgtgtgtgcgtgcat

SEQ ID NO: 190948 - DNA, 593 bp, Homo sapiens; identical to SEQ ID NO: 98067
  chr19:50764722-50765315
  hypo

SEQ ID NO: 190949 - DNA, 31 bp, Homo sapiens; identical to SEQ ID NO: 32806
  chr19:50766646-50766677
  hypo

SEQ ID NO: 190950 - DNA, 27 bp, Homo sapiens
  chr19:50774229-50774256
  hypo
cgtgagccactgcgcctgacctattta

SEQ ID NO: 190951 - DNA, 124 bp, Homo sapiens
  chr19:50774467-50774591
  hypo
aataaatgcttgttgcgctaatgaatgaaatgggaaagccaataagagtttgatccttcccggcctcacccagggcatggacatctctgaaccacaagccgcggggatccgtgggccagccatc

SEQ ID NO: 190952 - DNA, 324 bp, Homo sapiens
  chr19:50782873-50783197
  hypo
gagtgaaactctgtctcaaaaaaaccccaaaaaacaacagcacgcaatagatccatatacctttctattgccgaataatgcccgttgtatggatattccacatttgtttatccattcgtttattgatggacattggggctgttcccgcctcttggcgatggtgagtaatgccactgagaacattccggtacgagtttctgcatagacctatgcgttcatttcttttgggtatgcacctaggagcgggattgttgggtcatgtgggaaccctatgtttaagcatctgtggatctgccagactgttttccacggcagctgtaacat

SEQ ID NO: 190953 - DNA, 267 bp, Homo sapiens; identical to SEQ ID NO: 98070
  chr19:50784839-50785106
  hypo

SEQ ID NO: 190954 - DNA, 59 bp, Homo sapiens; identical to SEQ ID NO: 98071
  chr19:50789747-50789806
  hypo

SEQ ID NO: 190955 - DNA, 47 bp, Homo sapiens; identical to SEQ ID NO: 98072
  chr19:50789973-50790020
  hypo

SEQ ID NO: 190956 - DNA, 31 bp, Homo sapiens; identical to SEQ ID NO: 98073
  chr19:50819987-50820018
  hypo

SEQ ID NO: 190957 - DNA, 947 bp, Homo sapiens; identical to SEQ ID NO: 98074
  chr19:50826193-50827140
  hypo

SEQ ID NO: 190958 - DNA, 352 bp, Homo sapiens; identical to SEQ ID NO: 132023
  chr19:50828890-50829242
  hypo

SEQ ID NO: 190959 - DNA, 565 bp, Homo sapiens; identical to SEQ ID NO: 132025
  chr19:50831534-50832099
  hypo

SEQ ID NO: 190960 - DNA, 645 bp, Homo sapiens; identical to SEQ ID NO: 132027
  chr19:50833792-50834437
  hypo

SEQ ID NO: 190961 - DNA, 31 bp, Homo sapiens; identical to SEQ ID NO: 98078
  chr19:50838465-50838496
  hypo

SEQ ID NO: 190962 - DNA, 91 bp, Homo sapiens
  chr19:50871400-50871491
  hypo
caagactccctctcaaaaaaaaaaaaaaaaaaaaaagaaacaaaagaaaggctaggtgcggtgggggtgcgtttgggaggctgggggtgtc

SEQ ID NO: 190963 - DNA, 27 bp, Homo sapiens
  chr19:50875469-50875496
  hypo
agaggctcatgcctgtaatcccggcac

SEQ ID NO: 190964 - DNA, 17 bp, Homo sapiens
  chr19:50878666-50878683
  hypo
cccggtccgagactgag

SEQ ID NO: 190965 - DNA, 30 bp, Homo sapiens; identical to SEQ ID NO: 98081
  chr19:50885358-50885388
  hypo

SEQ ID NO: 190966 - DNA, 30 bp, Homo sapiens; identical to SEQ ID NO: 98082
  chr19:50885942-50885972
  hypo

SEQ ID NO: 190967 - DNA, 17 bp, Homo sapiens
  chr19:50898558-50898575
  hypo
ataaatagtgtaggccg

SEQ ID NO: 190968 - DNA, 77 bp, Homo sapiens; identical to SEQ ID NO: 98084
  chr19:50898814-50898891
  hypo

SEQ ID NO: 190969 - DNA, 30 bp, Homo sapiens; identical to SEQ ID NO: 98085
  chr19:50902827-50902857
  hypo

SEQ ID NO: 190970 - DNA, 30 bp, Homo sapiens; identical to SEQ ID NO: 98086
  chr19:50905570-50905600
  hypo

SEQ ID NO: 190971 - DNA, 30 bp, Homo sapiens; identical to SEQ ID NO: 98087
  chr19:50905936-50905966
  hypo

SEQ ID NO: 190972 - DNA, 31 bp, Homo sapiens; identical to SEQ ID NO: 32814
  chr19:50914693-50914724
  hypo

SEQ ID NO: 190973 - DNA, 503 bp, Homo sapiens; identical to SEQ ID NO: 98089
  chr19:50919572-50920075
  hypo

SEQ ID NO: 190974 - DNA, 220 bp, Homo sapiens; identical to SEQ ID NO: 98090
  chr19:50938503-50938723
  hypo

SEQ ID NO: 190975 - DNA, 30 bp, Homo sapiens
  chr19:50952588-50952618
  hypo
gctgggacagctgggcgcccagcacgccgc

SEQ ID NO: 190976 - DNA, 30 bp, Homo sapiens; identical to SEQ ID NO: 132033
  chr19:50979141-50979171
  hypo

SEQ ID NO: 190977 - DNA, 155 bp, Homo sapiens; identical to SEQ ID NO: 132034
  chr19:50979533-50979688
  hypo

SEQ ID NO: 190978 - DNA, 30 bp, Homo sapiens
  chr19:50982294-50982324
  hypo
tcagcgaggaggagcggggccgactccggg

SEQ ID NO: 190979 - DNA, 84 bp, Homo sapiens; identical to SEQ ID NO: 98091
  chr19:50983971-50984055
  hypo

SEQ ID NO: 190980 - DNA, 1578 bp, Homo sapiens; identical to SEQ ID NO: 98092
  chr19:51020735-51022313
  hypo

SEQ ID NO: 190981 - DNA, 30 bp, Homo sapiens
  chr19:51046280-51046310
  hypo
ctcacgggagggcgtcgcagggattcgcgt

SEQ ID NO: 190982 - DNA, 30 bp, Homo sapiens; identical to SEQ ID NO: 98093
  chr19:51047864-51047894
  hypo

SEQ ID NO: 190983 - DNA, 30 bp, Homo sapiens; identical to SEQ ID NO: 132039
  chr19:51070905-51070935
  hypo

SEQ ID NO: 190984 - DNA, 165 bp, Homo sapiens; identical to SEQ ID NO: 132040
  chr19:51071279-51071444
  hypo

SEQ ID NO: 190985 - DNA, 45 bp, Homo sapiens; identical to SEQ ID NO: 32817
  chr19:51098420-51098465
  hypo

SEQ ID NO: 190986 - DNA, 84 bp, Homo sapiens; identical to SEQ ID NO: 132041
  chr19:51111318-51111402
  hypo

SEQ ID NO: 190987 - DNA, 273 bp, Homo sapiens; identical to SEQ ID NO: 98096
  chr19:51128561-51128834
  hypo

SEQ ID NO: 190988 - DNA, 30 bp, Homo sapiens; identical to SEQ ID NO: 98097
  chr19:51132622-51132652
  hypo

SEQ ID NO: 190989 - DNA, 23 bp, Homo sapiens
  chr19:51156311-51156334
  hypo
ggcactagagtcttgctttgtcg

SEQ ID NO: 190990 - DNA, 157 bp, Homo sapiens; identical to SEQ ID NO: 132048
  chr19:51170580-51170737
  hypo

SEQ ID NO: 190991 - DNA, 175 bp, Homo sapiens; identical to SEQ ID NO: 132049
  chr19:51170905-51171080
  hypo

SEQ ID NO: 190992 - DNA, 30 bp, Homo sapiens; identical to SEQ ID NO: 98099
  chr19:51203446-51203476
  hypo

SEQ ID NO: 190993 - DNA, 628 bp, Homo sapiens; identical to SEQ ID NO: 12546
  chr19:51227640-51228268
  hypo

SEQ ID NO: 190994 - DNA, 270 bp, Homo sapiens; identical to SEQ ID NO: 12547
  chr19:51228368-51228638
  hypo

SEQ ID NO: 190995 - DNA, 201 bp, Homo sapiens; identical to SEQ ID NO: 12548
  chr19:51228702-51228903
  hypo

SEQ ID NO: 190996 - DNA, 31 bp, Homo sapiens; identical to SEQ ID NO: 98103
  chr19:51240466-51240497
  hypo

SEQ ID NO: 190997 - DNA, 30 bp, Homo sapiens
  chr19:51242405-51242435
  hypo
gagccccgccatgcacgcccgcatctgtgc

SEQ ID NO: 190998 - DNA, 30 bp, Homo sapiens
  chr19:51242695-51242725
  hypo
ctgcctcgctggggccgtttcaacacaaat

SEQ ID NO: 190999 - DNA, 39 bp, Homo sapiens; identical to SEQ ID NO: 98104
  chr19:51269872-51269911
  hypo

SEQ ID NO: 191000 - DNA, 137 bp, Homo sapiens; identical to SEQ ID NO: 98105
  chr19:51293555-51293692
  hypo

SEQ ID NO: 191001 - DNA, 30 bp, Homo sapiens; identical to SEQ ID NO: 98106
  chr19:51293916-51293946
  hypo

SEQ ID NO: 191002 - DNA, 340 bp, Homo sapiens
  chr19:51295113-51295453
  hypo
agctctgggtctggccgcctgagctggctccgagaagcaagactgtcctcgagctggtctgtccagaccagggtgagccccggcccacgctgctctcctggatctgggagaaactgcgacaaagacgcaggggccgagagcccgggttcccccgacccgctgtgagacccaaggcaaggcacacggctgtcctctctgagactcagttttccccagctgctgaggttccccatgcgcagctgtccccgataccacgagctgctgcgggaggccaccgaggccgccgagtaccaggaggccctggagggctggacggtgagcagggcggcggtggggggcg

SEQ ID NO: 191003 - DNA, 106 bp, Homo sapiens; identical to SEQ ID NO: 32822
  chr19:51302698-51302804
  hypo

SEQ ID NO: 191004 - DNA, 696 bp, Homo sapiens; identical to SEQ ID NO: 98109
  chr19:51303005-51303701
  hypo

SEQ ID NO: 191005 - DNA, 61 bp, Homo sapiens; identical to SEQ ID NO: 98110
  chr19:51304554-51304615
  hypo

SEQ ID NO: 191006 - DNA, 23 bp, Homo sapiens
  chr19:51305746-51305769
  hypo
agtaggaaacgcggccgggcacg

SEQ ID NO: 191007 - DNA, 30 bp, Homo sapiens; identical to SEQ ID NO: 98111
  chr19:51355990-51356020
  hypo

SEQ ID NO: 191008 - DNA, 30 bp, Homo sapiens
  chr19:51430810-51430840
  hypo
cacggtggggttgaccgtggctgatagtac

SEQ ID NO: 191009 - DNA, 118 bp, Homo sapiens; identical to SEQ ID NO: 12555
  chr19:51527587-51527705
  hypo

SEQ ID NO: 191010 - DNA, 204 bp, Homo sapiens; identical to SEQ ID NO: 98113
  chr19:51535216-51535420
  hypo

SEQ ID NO: 191011 - DNA, 30 bp, Homo sapiens
  chr19:51537224-51537254
  hypo
aagggacttacctgccgctgcagtgagccg

SEQ ID NO: 191012 - DNA, 30 bp, Homo sapiens; identical to SEQ ID NO: 32827
  chr19:51582826-51582856
  hypo

SEQ ID NO: 191013 - DNA, 107 bp, Homo sapiens
  chr19:51589547-51589654
  hypo
ttgccgtccccagcccggacctcagcacctgccgtgccgtggccaggttgctgggccctcttcccaccacatgctaggttcccagggtatctcgctcaccactccac

SEQ ID NO: 191014 - DNA, 328 bp, Homo sapiens; identical to SEQ ID NO: 98116
  chr19:51597215-51597543
  hypo

SEQ ID NO: 191015 - DNA, 254 bp, Homo sapiens; identical to SEQ ID NO: 98117
  chr19:51607193-51607447
  hypo

SEQ ID NO: 191016 - DNA, 179 bp, Homo sapiens; identical to SEQ ID NO: 98118
  chr19:51607824-51608003
  hypo

SEQ ID NO: 191017 - DNA, 108 bp, Homo sapiens; identical to SEQ ID NO: 98119
  chr19:51684621-51684729
  hypo

SEQ ID NO: 191018 - DNA, 55 bp, Homo sapiens; identical to SEQ ID NO: 98120
  chr19:51753979-51754034
  hypo

SEQ ID NO: 191019 - DNA, 354 bp, Homo sapiens
  chr19:51754290-51754644
  hypo
tgtaaagtaagcccatgcagccgctgattggctgcgggtggatgcactcacctaaggatgcgagctagcaggtcttgcagcggctatcacgcccctcacgccgctatctctgtgcagccgactgaggatccctagtcgcataaggctgtgcctggcctgttggcgtccctggcagttgttgggttctggcggttgttgggtccctggcagttgttggcggttgttgggttccttcattgaaactgcactaactgggcttccagtcagcgtcagtcagcggatccttgggccgtggggcagccgcaggtcggttaggccaccagggcggctctcgtgccagtgaggcccctgaga

SEQ ID NO: 191020 - DNA, 45 bp, Homo sapiens; identical to SEQ ID NO: 132076
  chr19:51830365-51830410
  hypo

SEQ ID NO: 191021 - DNA, 204 bp, Homo sapiens; identical to SEQ ID NO: 12558
  chr19:51830798-51831002
  hypo

SEQ ID NO: 191022 - DNA, 180 bp, Homo sapiens; identical to SEQ ID NO: 132078
  chr19:51831120-51831300
  hypo

SEQ ID NO: 191023 - DNA, 193 bp, Homo sapiens
  chr19:51840538-51840731
  hypo
aggatgggcaggatccgaaaggtccaggtccctgggttccgaggtggaaggggcaccacggctgaccgctcctgaggccccaggatgagcagggagacccagtccctgtaggtggaagtcctgcccagagcaggcccatctggccatgcctggatctcaaaactgctgatcagggccccgcgctccacatccc

SEQ ID NO: 191024 - DNA, 30 bp, Homo sapiens; identical to SEQ ID NO: 98124
  chr19:51844412-51844442
  hypo

SEQ ID NO: 191025 - DNA, 166 bp, Homo sapiens
  chr19:51893082-51893248
  hypo
atggtatcaaaggtgcgtatgacagcgctgggtctggtaagtgctaaaacagtggacagctacgatttctccagccttctggggatccctggagtcttcacatttcttggtttattcttggaaatttctgttcgatgagtatctgtttctagctcttttttttttt

SEQ ID NO: 191026 - DNA, 30 bp, Homo sapiens
  chr19:51905516-51905546
  hypo
tttcatgtcctctagcgttccttcaccggg

SEQ ID NO: 191027 - DNA, 206 bp, Homo sapiens
  chr19:51906687-51906893
  hypo
gtgcttgcaaacctgcgccacctccttttgaaactggacatcttcctgcgggttaagcagtgagatctcagccaggccagaaaaagctgccatgccaaaagcggccgacactaactccacgcggtgctcctggaaacgtcgggctcccagctcccatgaggcagaaaacgggcatctattcttttaacatacgtatgtatacacag

SEQ ID NO: 191028 - DNA, 30 bp, Homo sapiens
  chr19:51932716-51932746
  hypo
cccacggtaaagggacgtccataggaataa

SEQ ID NO: 191029 - DNA, 18 bp, Homo sapiens
  chr19:51999427-51999445
  hypo
aaagtccatggaaagcct

SEQ ID NO: 191030 - DNA, 42 bp, Homo sapiens; identical to SEQ ID NO: 32833
  chr19:52026930-52026972
  hypo

SEQ ID NO: 191031 - DNA, 30 bp, Homo sapiens
  chr19:52033100-52033130
  hypo
gggtggcgttcagggcggggaagccctgga

SEQ ID NO: 191032 - DNA, 30 bp, Homo sapiens; identical to SEQ ID NO: 98126
  chr19:52033457-52033487
  hypo

SEQ ID NO: 191033 - DNA, 303 bp, Homo sapiens; identical to SEQ ID NO: 32834
  chr19:52058086-52058389
  hypo

SEQ ID NO: 191034 - DNA, 17 bp, Homo sapiens
  chr19:52077686-52077703
  hypo
ggaggccgaggcgggcg

SEQ ID NO: 191035 - DNA, 483 bp, Homo sapiens
  chr19:52101646-52102129
  hypo
ccatttataacccacgtatataagagcagcagccacagctgcccctggtctattccaggcaggggcactatctagggaactcctcaaaggcaatgaaacatgtgtaacccgcctcctctcccggtctaggagaagctgtcccttcttgcaatgcccgccccgtcatgtgcctcctgccacgtggcatgcgcctccctccgccgtccatgctcgggccaagtgctgtgcggttcctgcttctgcaccgccttcgaggcggaggtgcagcacatggtgcttgtgggctacctgctgccgccaggcgcagtggtggccctgggcacctcgggcggcaaggattccacggtgctggcacacgtgctgcgcacgctggcaccgggcctgggcatcttactgcagctcatggctgtagacaagggcatcgggcgtggcttagcgggaggatcccagtaaggagctggggaaatacgcatgtgcctattt

SEQ ID NO: 191036 - DNA, 23 bp, Homo sapiens
  chr19:52125685-52125708
  hypo
ccggccttgacaacctgattcta

SEQ ID NO: 191037 - DNA, 23 bp, Homo sapiens
  chr19:52139147-52139170
  hypo
ttattttttttgagacagagtcg

SEQ ID NO: 191038 - DNA, 23 bp, Homo sapiens
  chr19:52151080-52151103
  hypo
gggcgcagtggctcacgcctgta

SEQ ID NO: 191039 - DNA, 749 bp, Homo sapiens; identical to SEQ ID NO: 132095
  chr19:52207057-52207806
  hypo

SEQ ID NO: 191040 - DNA, 394 bp, Homo sapiens; identical to SEQ ID NO: 132096
  chr19:52222529-52222923
  hypo

SEQ ID NO: 191041 - DNA, 39 bp, Homo sapiens; identical to SEQ ID NO: 32838
  chr19:52289293-52289332
  hypo

SEQ ID NO: 191042 - DNA, 608 bp, Homo sapiens
  chr19:52342885-52343493
  hypo
ttccccagcccttcccatcaccgatagccataatggcccccaactccgcatcgcttgctcgcttttcctggttccccagacaccgacttccactcgacgctgaggatgctccaatccagaccacagaagccctcagtggctaacccccagcttcagattccactgaccattccctgaagccttcttacaccgcaaacctccacaagtaccccatgctggtcgcatccggtcaaggaccccaacagcgctgggaaactcaccctacagctggagtcgcacaaacattcgcttgaggactagcaggtttccgtaacctcttcactcactgccgtagtcacgctcttgtgcagactcagtagcaccttcgcggaacacaagatgtctacagactttgaaaccaggcgtgcacatggaagcagcagtcttggaagatgcttcttacagatagcgagatggccattttctggcgactaaattccatcgtgctagaaaggaaagaggcaatgcagctgatcttctactgtccttttcaccacttccccagctgctaccagcagcgttgtgcattctcaggaacaacattcagcgttctcacctgtctacttcaa

SEQ ID NO: 191043 - DNA, 83 bp, Homo sapiens; identical to SEQ ID NO: 98137
  chr19:52350891-52350974
  hypo

SEQ ID NO: 191044 - DNA, 42 bp, Homo sapiens; identical to SEQ ID NO: 98138
  chr19:52368626-52368668
  hypo

SEQ ID NO: 191045 - DNA, 30 bp, Homo sapiens
  chr19:52405328-52405358
  hypo
cctccaaagaaatagcgacaaaacaccata

SEQ ID NO: 191046 - DNA, 48 bp, Homo sapiens
  chr19:52405664-52405712
  hypo
aaatcaggattcacacggcctcctcctcaggttcgattaatttgctgg

SEQ ID NO: 191047 - DNA, 94 bp, Homo sapiens
  chr19:52405953-52406047
  hypo
aatcatcagaattctcgatttggtaaaaatcggatccatccagtgagtcttcagccaagaactgtttgagaatgatgttaacatcacatgtagg

SEQ ID NO: 191048 - DNA, 153 bp, Homo sapiens; identical to SEQ ID NO: 32842
  chr19:52406166-52406319
  hypo

SEQ ID NO: 191049 - DNA, 19 bp, Homo sapiens
  chr19:52406783-52406802
  hypo
aatcatagctaggcgcgat

SEQ ID NO: 191050 - DNA, 30 bp, Homo sapiens; identical to SEQ ID NO: 98143
  chr19:52431484-52431514
  hypo

SEQ ID NO: 191051 - DNA, 26 bp, Homo sapiens
  chr19:52431824-52431850
  hypo
ggtaaggtggcctggcgcggtggctc

SEQ ID NO: 191052 - DNA, 25 bp, Homo sapiens
  chr19:52432149-52432174
  hypo
aaaaacaaaacgaagaaaatgataa

SEQ ID NO: 191053 - DNA, 121 bp, Homo sapiens; identical to SEQ ID NO: 32846
  chr19:52479227-52479348
  hypo

SEQ ID NO: 191054 - DNA, 83 bp, Homo sapiens
  chr19:52479587-52479670
  hypo
tccaaatacactcttttgtctcatctttattcccgtgttcaccccactttgtttagtccacctaggtccgtgcaggttacaaa

SEQ ID NO: 191055 - DNA, 78 bp, Homo sapiens
  chr19:52484728-52484806
  hypo
gtagagatcggatttcagcatcttggtcaggctggccttcaactccggatctcatcacacacccgcctcagcctcccc

SEQ ID NO: 191056 - DNA, 321 bp, Homo sapiens; identical to SEQ ID NO: 98147
  chr19:52488647-52488968
  hypo

SEQ ID NO: 191057 - DNA, 30 bp, Homo sapiens; identical to SEQ ID NO: 98148
  chr19:52491099-52491129
  hypo

SEQ ID NO: 191058 - DNA, 66 bp, Homo sapiens; identical to SEQ ID NO: 98149
  chr19:52530499-52530565
  hypo

SEQ ID NO: 191059 - DNA, 822 bp, Homo sapiens; identical to SEQ ID NO: 56569
  chr19:52531284-52532106
  hypo

SEQ ID NO: 191060 - DNA, 31 bp, Homo sapiens; identical to SEQ ID NO: 98151
  chr19:52565128-52565159
  hypo

SEQ ID NO: 191061 - DNA, 219 bp, Homo sapiens; identical to SEQ ID NO: 32849
  chr19:52569173-52569392
  hypo

SEQ ID NO: 191062 - DNA, 115 bp, Homo sapiens; identical to SEQ ID NO: 132109
  chr19:52643386-52643501
  hypo

SEQ ID NO: 191063 - DNA, 30 bp, Homo sapiens
  chr19:52670360-52670390
  hypo
cagtctctgtgggacggatacagtgacaat

SEQ ID NO: 191064 - DNA, 36 bp, Homo sapiens; identical to SEQ ID NO: 56575
  chr19:52674676-52674712
  hypo

SEQ ID NO: 191065 - DNA, 161 bp, Homo sapiens; identical to SEQ ID NO: 12571
  chr19:52715131-52715292
  hypo

SEQ ID NO: 191066 - DNA, 37 bp, Homo sapiens; identical to SEQ ID NO: 32852
  chr19:52718577-52718614
  hypo

SEQ ID NO: 191067 - DNA, 33 bp, Homo sapiens; identical to SEQ ID NO: 98157
  chr19:52780412-52780445
  hypo

SEQ ID NO: 191068 - DNA, 121 bp, Homo sapiens; identical to SEQ ID NO: 32854
  chr19:52780744-52780865
  hypo

SEQ ID NO: 191069 - DNA, 36 bp, Homo sapiens; identical to SEQ ID NO: 32855
  chr19:52801590-52801626
  hypo

SEQ ID NO: 191070 - DNA, 35 bp, Homo sapiens; identical to SEQ ID NO: 98160
  chr19:52801865-52801900
  hypo

SEQ ID NO: 191071 - DNA, 111 bp, Homo sapiens; identical to SEQ ID NO: 98161
  chr19:52838575-52838686
  hypo

SEQ ID NO: 191072 - DNA, 97 bp, Homo sapiens
  chr19:52843260-52843357
  hypo
actgcacctttaacccgtggaatctgtgcctatctccaagtagacagtagcaaagttgagttaacctgtgggacacacagctgcgagcgtgccacag

SEQ ID NO: 191073 - DNA, 28 bp, Homo sapiens
  chr19:52845773-52845801
  hypo
tttttttttttttttttgagacggagtc

SEQ ID NO: 191074 - DNA, 43 bp, Homo sapiens; identical to SEQ ID NO: 98163
  chr19:52851165-52851208
  hypo

SEQ ID NO: 191075 - DNA, 42 bp, Homo sapiens; identical to SEQ ID NO: 98164
  chr19:52860522-52860564
  hypo

SEQ ID NO: 191076 - DNA, 32 bp, Homo sapiens; identical to SEQ ID NO: 32856
  chr19:52861438-52861470
  hypo

SEQ ID NO: 191077 - DNA, 30 bp, Homo sapiens; identical to SEQ ID NO: 98166
  chr19:52869632-52869662
  hypo

SEQ ID NO: 191078 - DNA, 30 bp, Homo sapiens; identical to SEQ ID NO: 98167
  chr19:52870286-52870316
  hypo

SEQ ID NO: 191079 - DNA, 617 bp, Homo sapiens; identical to SEQ ID NO: 132119
  chr19:52872916-52873533
  hypo

SEQ ID NO: 191080 - DNA, 17 bp, Homo sapiens
  chr19:52891004-52891021
  hypo
aatactattaaatgaaa

SEQ ID NO: 191081 - DNA, 28 bp, Homo sapiens
  chr19:52907489-52907517
  hypo
ttgtttttttaggtgaagtctcgctctc

SEQ ID NO: 191082 - DNA, 183 bp, Homo sapiens; identical to SEQ ID NO: 32858
  chr19:52917255-52917438
  hypo

SEQ ID NO: 191083 - DNA, 43 bp, Homo sapiens; identical to SEQ ID NO: 98172
  chr19:52927549-52927592
  hypo

SEQ ID NO: 191084 - DNA, 102 bp, Homo sapiens; identical to SEQ ID NO: 98173
  chr19:52927831-52927933
  hypo

SEQ ID NO: 191085 - DNA, 17 bp, Homo sapiens
  chr19:52931210-52931227
  hypo
gagcaagactccatctc

SEQ ID NO: 191086 - DNA, 181 bp, Homo sapiens; identical to SEQ ID NO: 98174
  chr19:52931618-52931799
  hypo

SEQ ID NO: 191087 - DNA, 42 bp, Homo sapiens
  chr19:52978880-52978922
  hypo
attataggcgtgagccaccgcgcctggctgagtgcagccaat

SEQ ID NO: 191088 - DNA, 22 bp, Homo sapiens
  chr19:53007622-53007644
  hypo
cgtgaaccaccatgcccagccc

SEQ ID NO: 191089 - DNA, 77 bp, Homo sapiens; identical to SEQ ID NO: 32859
  chr19:53027351-53027428
  hypo

SEQ ID NO: 191090 - DNA, 16 bp, Homo sapiens
  chr19:53027667-53027683
  hypo
gaagtggaattttttt

SEQ ID NO: 191091 - DNA, 23 bp, Homo sapiens
  chr19:53028922-53028945
  hypo
attgatttatttatttagagacg

SEQ ID NO: 191092 - DNA, 202 bp, Homo sapiens; identical to SEQ ID NO: 98179
  chr19:53029364-53029566
  hypo

SEQ ID NO: 191093 - DNA, 30 bp, Homo sapiens; identical to SEQ ID NO: 132124
  chr19:53030462-53030492
  hypo

SEQ ID NO: 191094 - DNA, 39 bp, Homo sapiens; identical to SEQ ID NO: 132125
  chr19:53030695-53030734
  hypo

SEQ ID NO: 191095 - DNA, 735 bp, Homo sapiens; identical to SEQ ID NO: 132126
  chr19:53030790-53031525
  hypo

SEQ ID NO: 191096 - DNA, 31 bp, Homo sapiens; identical to SEQ ID NO: 98182
  chr19:53034437-53034468
  hypo

SEQ ID NO: 191097 - DNA, 30 bp, Homo sapiens
  chr19:53039610-53039640
  hypo
gattcccgccctgggcgcctcccagcctct

SEQ ID NO: 191098 - DNA, 37 bp, Homo sapiens; identical to SEQ ID NO: 98183
  chr19:53045475-53045512
  hypo

SEQ ID NO: 191099 - DNA, 39 bp, Homo sapiens; identical to SEQ ID NO: 98184
  chr19:53055547-53055586
  hypo

SEQ ID NO: 191100 - DNA, 80 bp, Homo sapiens
  chr19:53058375-53058455
  hypo
agtgtagtgagtgcagcaagacgttcagtcagaaggcaacccttctatgccatcgtagacttcatagtggtgagaaacct

SEQ ID NO: 191101 - DNA, 90 bp, Homo sapiens
  chr19:53071291-53071381
  hypo
catgcaacctgagtccggtggcatgcaggcgcaacttctacaagttttcctggccaggcatgcaggctcaggcctgtaatcccagcactc

SEQ ID NO: 191102 - DNA, 104 bp, Homo sapiens
  chr19:53074697-53074801
  hypo
tatggagattgaggacgatcgaagaattggggagaaggagcaacaagagattaaataagacgtgaggatggagcccaggtaatttttgtatttttagtagagac

SEQ ID NO: 191103 - DNA, 332 bp, Homo sapiens
  chr19:53077050-53077382
  hypo
tgagccaccgcaccgagcctctgcatgggatttggtcagggctgggtctgtgccctgaaagggagctcattccagcccagctccccactgctgcagcgtgtgagggcttctccaggagggaagcgagagttttcttatagaaatttattatccctggtgcagtgggcagcagaggtgaccatattttttcagagtgagggcacctttgtatgtgtcattgtgttacaggcaggaggtgtgttgattctgagcagtaaacaacatatttctaacattcaggattgacttctaaagacttggtacgtgaggaaaaaacacggaagaggaagagg

SEQ ID NO: 191104 - DNA, 34 bp, Homo sapiens; identical to SEQ ID NO: 98185
  chr19:53078218-53078252
  hypo

SEQ ID NO: 191105 - DNA, 31 bp, Homo sapiens; identical to SEQ ID NO: 98186
  chr19:53089213-53089244
  hypo

SEQ ID NO: 191106 - DNA, 159 bp, Homo sapiens; identical to SEQ ID NO: 32863
  chr19:53089792-53089951
  hypo

SEQ ID NO: 191107 - DNA, 48 bp, Homo sapiens; identical to SEQ ID NO: 98188
  chr19:53090166-53090214
  hypo

SEQ ID NO: 191108 - DNA, 65 bp, Homo sapiens
  chr19:53090868-53090933
  hypo
ttttagctccttcaccgttcactggatcctggtgagaacaagtccgtaagcggagagcagaatca

SEQ ID NO: 191109 - DNA, 258 bp, Homo sapiens
  chr19:53100992-53101250
  hypo
gggccagagggtgatcgtcatcttgagggcaaggtctggaagtggtgttttgaagggcagggtctcgagggggcgggtcctggctttctcctcagctggaccccaggtgtcgtctgctgtcatcctcttgccctgcaggactagattctccgggtactaattggtggatagtttctgatgtgccgtgatattacccctaatatcacagggatgcctcctgtccattttagagacttgctctgtcgcccaggctggagg

SEQ ID NO: 191110 - DNA, 258 bp, Homo sapiens
  chr19:53101489-53101747
  hypo
cccggcccctaagttaatatttcaaacaatcgaaggtaaaacaacatattgtgttgggccacctgtactgaacgctgaatcgtttttcctcttaagttgaaaatggttttaatgcaaagcgccttttttgagcaggtagagtcacgcatccggcaggcggggcgagctcccctctgtctggggcagggtgggggagaggggcagggacctcggtaaaggggtggagtggcgcgctggttgccgcgggcactggcaatt

SEQ ID NO: 191111 - DNA, 41 bp, Homo sapiens; identical to SEQ ID NO: 98190
  chr19:53102421-53102462
  hypo

SEQ ID NO: 191112 - DNA, 45 bp, Homo sapiens
  chr19:53108413-53108458
  hypo
gaaaaaaaggccatgcgcggtggctcatgcctgtaatcccatcat

SEQ ID NO: 191113 - DNA, 30 bp, Homo sapiens
  chr19:53110227-53110257
  hypo
tgcagatcgatttttcgggctgctctttgt

SEQ ID NO: 191114 - DNA, 46 bp, Homo sapiens; identical to SEQ ID NO: 98192
  chr19:53114550-53114596
  hypo

SEQ ID NO: 191115 - DNA, 30 bp, Homo sapiens
  chr19:53152731-53152761
  hypo
tagaccagaaattcccgacccaagatcctc

SEQ ID NO: 191116 - DNA, 32 bp, Homo sapiens; identical to SEQ ID NO: 98193
  chr19:53163139-53163171
  hypo

SEQ ID NO: 191117 - DNA, 30 bp, Homo sapiens
  chr19:53186596-53186626
  hypo
ggaggaggtggccctcgggctgcagttcac

SEQ ID NO: 191118 - DNA, 44 bp, Homo sapiens
  chr19:53213085-53213129
  hypo
ctgggattgcaggcgtgagccaccatgcccggcaaagactagtg

SEQ ID NO: 191119 - DNA, 30 bp, Homo sapiens
  chr19:53217586-53217616
  hypo
tcccataagtcactacggaaatctcgattt

SEQ ID NO: 191120 - DNA, 516 bp, Homo sapiens; identical to SEQ ID NO: 98194
  chr19:53228719-53229235
  hypo

SEQ ID NO: 191121 - DNA, 137 bp, Homo sapiens
  chr19:53233230-53233367
  hypo
tatgcattgtccttcgttatctagtcaactgtgcaaaaaatatagaaagtgtactgggaaaatttatcaactgagatcacagaaaacattgtataaaacaaattgcacaataaaaccataaaaaacatgatgtaggc

SEQ ID NO: 191122 - DNA, 841 bp, Homo sapiens; identical to SEQ ID NO: 132134
  chr19:53237618-53238459
  hypo

SEQ ID NO: 191123 - DNA, 79 bp, Homo sapiens; identical to SEQ ID NO: 32865
  chr19:53241621-53241700
  hypo

SEQ ID NO: 191124 - DNA, 149 bp, Homo sapiens; identical to SEQ ID NO: 98198
  chr19:53242765-53242914
  hypo

SEQ ID NO: 191125 - DNA, 43 bp, Homo sapiens
  chr19:53247898-53247941
  hypo
acaaactgagcactaacctctcgagaagaaaagccacacactg

SEQ ID NO: 191126 - DNA, 100 bp, Homo sapiens; identical to SEQ ID NO: 98199
  chr19:53297748-53297848
  hypo

SEQ ID NO: 191127 - DNA, 30 bp, Homo sapiens
  chr19:53299636-53299666
  hypo
gaattggggggcttccgggtcacaggtaga

SEQ ID NO: 191128 - DNA, 154 bp, Homo sapiens; identical to SEQ ID NO: 98200
  chr19:53316597-53316751
  hypo

SEQ ID NO: 191129 - DNA, 42 bp, Homo sapiens; identical to SEQ ID NO: 98201
  chr19:53317557-53317599
  hypo

SEQ ID NO: 191130 - DNA, 30 bp, Homo sapiens
  chr19:53340651-53340681
  hypo
cttctaccagcctcccgagtagctgtgtta

SEQ ID NO: 191131 - DNA, 27 bp, Homo sapiens
  chr19:53362266-53362293
  hypo
tacttcgctttttaaatgttgaaaaaa

SEQ ID NO: 191132 - DNA, 30 bp, Homo sapiens; identical to SEQ ID NO: 98203
  chr19:53362650-53362680
  hypo

SEQ ID NO: 191133 - DNA, 30 bp, Homo sapiens
  chr19:53380439-53380469
  hypo
aggaggtcctgatgacgtgtgtccatggtg

SEQ ID NO: 191134 - DNA, 30 bp, Homo sapiens; identical to SEQ ID NO: 98204
  chr19:53382158-53382188
  hypo

SEQ ID NO: 191135 - DNA, 36 bp, Homo sapiens; identical to SEQ ID NO: 98205
  chr19:53398427-53398463
  hypo

SEQ ID NO: 191136 - DNA, 151 bp, Homo sapiens
  chr19:53401586-53401737
  hypo
cagcagggatgtgggcgaggtggcgagtctggggtcccggctactcaggaagcaggagccgcaagaccgctgagcccggaggtccaggccagcgtgggcgacaaagtaagaccctctaccccagagctccttcctccgcctcaataagaaa

SEQ ID NO: 191137 - DNA, 121 bp, Homo sapiens; identical to SEQ ID NO: 98206
  chr19:53412363-53412484
  hypo

SEQ ID NO: 191138 - DNA, 26 bp, Homo sapiens
  chr19:53412783-53412809
  hypo
gccactgcgcccgggggcacttttga

SEQ ID NO: 191139 - DNA, 18 bp, Homo sapiens
  chr19:53428257-53428275
  hypo
cccaagaaatactcttta

SEQ ID NO: 191140 - DNA, 30 bp, Homo sapiens; identical to SEQ ID NO: 32867
  chr19:53429034-53429064
  hypo

SEQ ID NO: 191141 - DNA, 35 bp, Homo sapiens; identical to SEQ ID NO: 98210
  chr19:53429314-53429349
  hypo

SEQ ID NO: 191142 - DNA, 28 bp, Homo sapiens
  chr19:53431247-53431275
  hypo
acttcaggccggacgcgtggctcaagcc

SEQ ID NO: 191143 - DNA, 30 bp, Homo sapiens
  chr19:53431656-53431686
  hypo
caaaaacaagggcaacgccacctcttttaa

SEQ ID NO: 191144 - DNA, 38 bp, Homo sapiens; identical to SEQ ID NO: 32868
  chr19:53438069-53438107
  hypo

SEQ ID NO: 191145 - DNA, 706 bp, Homo sapiens; identical to SEQ ID NO: 132141
  chr19:53445361-53446067
  hypo

SEQ ID NO: 191146 - DNA, 157 bp, Homo sapiens; identical to SEQ ID NO: 56602
  chr19:53446325-53446482
  hypo

SEQ ID NO: 191147 - DNA, 30 bp, Homo sapiens
  chr19:53451256-53451286
  hypo
tcacatatttattaccgaacctagccaacc

SEQ ID NO: 191148 - DNA, 99 bp, Homo sapiens
  chr19:53460884-53460983
  hypo
cagtagtaaccgccccggttgcccccctttccaaaaagactattgttataatcggagccatgggagttttatcaaagcaagctttctgttgccccagac

SEQ ID NO: 191149 - DNA, 30 bp, Homo sapiens
  chr19:53461518-53461548
  hypo
caacagtacctaacccgtacacgttaaggt

SEQ ID NO: 191150 - DNA, 91 bp, Homo sapiens
  chr19:53463665-53463756
  hypo
ttacgaatcagctcggataacgggctggagtttgtggctgacttagtacagacgacagcaaaggtattaaagatcacgtggaaactgcatg

SEQ ID NO: 191151 - DNA, 26 bp, Homo sapiens
  chr19:53475611-53475637
  hypo
aaaatacacagcattgccaggcgcag

SEQ ID NO: 191152 - DNA, 154 bp, Homo sapiens; identical to SEQ ID NO: 32872
  chr19:53477543-53477697
  hypo

SEQ ID NO: 191153 - DNA, 25 bp, Homo sapiens
  chr19:53479270-53479295
  hypo
aataataataatggctgggcacggt

SEQ ID NO: 191154 - DNA, 24 bp, Homo sapiens
  chr19:53479534-53479558
  hypo
cccgagtgacagagtgagacttca

SEQ ID NO: 191155 - DNA, 20 bp, Homo sapiens
  chr19:53490044-53490064
  hypo
ctcccatttcatggtcgcac

SEQ ID NO: 191156 - DNA, 79 bp, Homo sapiens
  chr19:53490183-53490262
  hypo
acacctttgggtaaacttgcctcttttcctctaacacttgccaatgtcgttctgctagtcttaccgtctgtaccaggag

SEQ ID NO: 191157 - DNA, 22 bp, Homo sapiens
  chr19:53499829-53499851
  hypo
cgcccagccaaaaaagaaaact

SEQ ID NO: 191158 - DNA, 32 bp, Homo sapiens; identical to SEQ ID NO: 98220
  chr19:53506511-53506543
  hypo

SEQ ID NO: 191159 - DNA, 287 bp, Homo sapiens; identical to SEQ ID NO: 32875
  chr19:53507229-53507516
  hypo

SEQ ID NO: 191160 - DNA, 233 bp, Homo sapiens
  chr19:53507955-53508188
  hypo
cagccacgacagcaccgttatctgttgctgatgcctcaaaaagtgtgcaggtctcaattctgaagacagagttcctaccactcctgagtgtgtcatttgtctcagagaacagtgtcgtggctgctggccatgactgctacccaatgctctttaattatgatgaccgcggctgcctgaccttcgtctccaagttagacattccaaaacagagcatccaacgcaacatgtctgcc

SEQ ID NO: 191161 - DNA, 121 bp, Homo sapiens; identical to SEQ ID NO: 98223
  chr19:53509013-53509134
  hypo

SEQ ID NO: 191162 - DNA, 25 bp, Homo sapiens
  chr19:53516407-53516432
  hypo
ctccgtctcaaaaacaaaaagaaaa

SEQ ID NO: 191163 - DNA, 31 bp, Homo sapiens; identical to SEQ ID NO: 98225
  chr19:53520194-53520225
  hypo

SEQ ID NO: 191164 - DNA, 30 bp, Homo sapiens; identical to SEQ ID NO: 32876
  chr19:53550008-53550038
  hypo

SEQ ID NO: 191165 - DNA, 161 bp, Homo sapiens
  chr19:53589027-53589188
  hypo
ttacgagtttggagtcggaaatccaatgactcacttgttcggcttcaaatgcagttaccaatgaggcaggaaagctttccccttagtgttcttttctatgccagtgagcaggtacgtgtgcacctgacttcatgggcagcttctgttatcatggtttacac

SEQ ID NO: 191166 - DNA, 100 bp, Homo sapiens
  chr19:53589307-53589407
  hypo
atgcccagtgcagcctcttcccaagttcatgtcactggatcacgggagatggaatctaaacgagatgagagggactgagggaaggcgcgggtgagtgcta

SEQ ID NO: 191167 - DNA, 30 bp, Homo sapiens
  chr19:53594045-53594075
  hypo
agacgcaatgaagggcgaggcttaggggac

SEQ ID NO: 191168 - DNA, 30 bp, Homo sapiens
  chr19:53594351-53594381
  hypo
ggctgtaatcccagccgaagcgggaggatc

SEQ ID NO: 191169 - DNA, 30 bp, Homo sapiens
  chr19:53594908-53594938
  hypo
cagtgggctgggagccgggatctctctagg

SEQ ID NO: 191170 - DNA, 143 bp, Homo sapiens; identical to SEQ ID NO: 98227
  chr19:53601967-53602110
  hypo

SEQ ID NO: 191171 - DNA, 1171 bp, Homo sapiens; identical to SEQ ID NO: 132148
  chr19:53606065-53607236
  hypo

SEQ ID NO: 191172 - DNA, 22 bp, Homo sapiens
  chr19:53624042-53624064
  hypo
tggtttaaaaacttggctgggc

SEQ ID NO: 191173 - DNA, 32 bp, Homo sapiens
  chr19:53627569-53627601
  hypo
gggcctcaggaagcttccgtttagggtggagg

SEQ ID NO: 191174 - DNA, 26 bp, Homo sapiens
  chr19:53628572-53628598
  hypo
gtgtgagccaccgcgcctggcctttt

SEQ ID NO: 191175 - DNA, 88 bp, Homo sapiens
  chr19:53653016-53653104
  hypo
gcccccataataacccgaaaggacagggcctgaacaagcttcaggatagggaaacacacggaggctctgaggacgcccccaccgaccc

SEQ ID NO: 191176 - DNA, 94 bp, Homo sapiens; identical to SEQ ID NO: 32877
  chr19:53667652-53667746
  hypo

SEQ ID NO: 191177 - DNA, 160 bp, Homo sapiens; identical to SEQ ID NO: 98231
  chr19:53668464-53668624
  hypo

SEQ ID NO: 191178 - DNA, 30 bp, Homo sapiens; identical to SEQ ID NO: 32878
  chr19:53682616-53682646
  hypo

SEQ ID NO: 191179 - DNA, 101 bp, Homo sapiens
  chr19:53685269-53685370
  hypo
caatattctgtcttttcagggcgctgcctgagggataagtttctctcttggttgaatataagtaatgaaggccgggcgcggtagttcacgcctgtaatccc

SEQ ID NO: 191180 - DNA, 160 bp, Homo sapiens; identical to SEQ ID NO: 32880
  chr19:53685609-53685769
  hypo

SEQ ID NO: 191181 - DNA, 39 bp, Homo sapiens; identical to SEQ ID NO: 98235
  chr19:53693898-53693937
  hypo

SEQ ID NO: 191182 - DNA, 30 bp, Homo sapiens
  chr19:53694446-53694476
  hypo
tttgttcaagaactgcgtgttggtgaggag

SEQ ID NO: 191183 - DNA, 650 bp, Homo sapiens; identical to SEQ ID NO: 132153
  chr19:53696014-53696664
  hypo

SEQ ID NO: 191184 - DNA, 30 bp, Homo sapiens
  chr19:53697255-53697285
  hypo
tctgatgccatgtcccggcaaaatggaacg

SEQ ID NO: 191185 - DNA, 198 bp, Homo sapiens; identical to SEQ ID NO: 98237
  chr19:53701620-53701818
  hypo

SEQ ID NO: 191186 - DNA, 40 bp, Homo sapiens
  chr19:53702028-53702068
  hypo
tatacagcaggtcctcgaataacgttgttttgttcaatgt

SEQ ID NO: 191187 - DNA, 30 bp, Homo sapiens
  chr19:53702367-53702397
  hypo
ccgcacttggccattcgatgtcatttttta

SEQ ID NO: 191188 - DNA, 153 bp, Homo sapiens
  chr19:53703491-53703644
  hypo
tcctccatttctgaggcctcagctcagcctgggatccatagggatgtgagggcggctgtgctctgcatgaggtttgctcaaggccaggtgtgcaccctgaaggggagctcagtccagcccagctccccaccgctgcagcgtgcgtgtgggcct

SEQ ID NO: 191189 - DNA, 27 bp, Homo sapiens
  chr19:53705800-53705827
  hypo
ccaggctggagtacagtggtgcgatct

SEQ ID NO: 191190 - DNA, 26 bp, Homo sapiens
  chr19:53706006-53706032
  hypo
actgcgcccagcctaaatatttaaat

SEQ ID NO: 191191 - DNA, 36 bp, Homo sapiens; identical to SEQ ID NO: 98238
  chr19:53728436-53728472
  hypo

SEQ ID NO: 191192 - DNA, 35 bp, Homo sapiens; identical to SEQ ID NO: 98239
  chr19:53728771-53728806
  hypo

SEQ ID NO: 191193 - DNA, 21 bp, Homo sapiens
  chr19:53745484-53745505
  hypo
ggaatgtgtatttcaaaagca

SEQ ID NO: 191194 - DNA, 41 bp, Homo sapiens; identical to SEQ ID NO: 32883
  chr19:53756648-53756689
  hypo

SEQ ID NO: 191195 - DNA, 507 bp, Homo sapiens; identical to SEQ ID NO: 132155
  chr19:53757804-53758311
  hypo

SEQ ID NO: 191196 - DNA, 89 bp, Homo sapiens; identical to SEQ ID NO: 98243
  chr19:53764645-53764734
  hypo

SEQ ID NO: 191197 - DNA, 39 bp, Homo sapiens; identical to SEQ ID NO: 98244
  chr19:53786609-53786648
  hypo

SEQ ID NO: 191198 - DNA, 29 bp, Homo sapiens
  chr19:53790981-53791010
  hypo
ccgcgcccggcccagcaattattaatctt

SEQ ID NO: 191199 - DNA, 74 bp, Homo sapiens; identical to SEQ ID NO: 98246
  chr19:53793745-53793819
  hypo

SEQ ID NO: 191200 - DNA, 672 bp, Homo sapiens; identical to SEQ ID NO: 98247
  chr19:53794080-53794752
  hypo

SEQ ID NO: 191201 - DNA, 166 bp, Homo sapiens; identical to SEQ ID NO: 98248
  chr19:53806010-53806176
  hypo

SEQ ID NO: 191202 - DNA, 98 bp, Homo sapiens
  chr19:53807086-53807184
  hypo
tgagccggtcatggacggggagcctgcttcagccttcccccaggcttggactccacccattccacctgcctcccaggtgaccccgcagctcccgtact

SEQ ID NO: 191203 - DNA, 241 bp, Homo sapiens; identical to SEQ ID NO: 98250
  chr19:53813500-53813741
  hypo

SEQ ID NO: 191204 - DNA, 35 bp, Homo sapiens; identical to SEQ ID NO: 32885
  chr19:53821073-53821108
  hypo

SEQ ID NO: 191205 - DNA, 32 bp, Homo sapiens; identical to SEQ ID NO: 98252
  chr19:53827528-53827560
  hypo

SEQ ID NO: 191206 - DNA, 30 bp, Homo sapiens
  chr19:53835648-53835678
  hypo
attttttagaaaccacgtaatccttttttc

SEQ ID NO: 191207 - DNA, 30 bp, Homo sapiens
  chr19:53845860-53845890
  hypo
gagcaaatctcgcgcgtctgtatttctgca

SEQ ID NO: 191208 - DNA, 19 bp, Homo sapiens
  chr19:53852564-53852583
  hypo
tgagacagagtggcgcgat

SEQ ID NO: 191209 - DNA, 34 bp, Homo sapiens; identical to SEQ ID NO: 98253
  chr19:53854270-53854304
  hypo

SEQ ID NO: 191210 - DNA, 94 bp, Homo sapiens; identical to SEQ ID NO: 98254
  chr19:53854363-53854457
  hypo

SEQ ID NO: 191211 - DNA, 59 bp, Homo sapiens
  chr19:53859527-53859586
  hypo
ggcctgtaatcccagcggttttagaggcccaggcaggtgggtgacgtgagcctagggat

SEQ ID NO: 191212 - DNA, 37 bp, Homo sapiens
  chr19:53859892-53859929
  hypo
gtaaatgaggccgggcgtggtggctcacgcctgtaat

SEQ ID NO: 191213 - DNA, 121 bp, Homo sapiens
  chr19:53873290-53873411
  hypo
gcccagatatgtgaaagatacctctctaattttcaaggataggggtgataaagaccaacacttccattagctcttccaggcccccatgtaataattcaggtagctgggtgcggtggcccac

SEQ ID NO: 191214 - DNA, 30 bp, Homo sapiens; identical to SEQ ID NO: 32886
  chr19:53886323-53886353
  hypo

SEQ ID NO: 191215 - DNA, 327 bp, Homo sapiens; identical to SEQ ID NO: 32887
  chr19:53886594-53886921
  hypo

SEQ ID NO: 191216 - DNA, 173 bp, Homo sapiens
  chr19:53936944-53937117
  hypo
ggtagtctgcctggtcgcaattgcttctatagttgattgaatgctcttaacacggagaggtaagaggtaagggagtatcaaaccaattcttagtatggctagaactactcctattaaggttttgaatctactgaaggaggaaaaccagcctctaaagacggactcaagagtct

SEQ ID NO: 191217 - DNA, 30 bp, Homo sapiens
  chr19:53937374-53937404
  hypo
tgcgagtttatgatgcggttaagtgtgtaa

SEQ ID NO: 191218 - DNA, 30 bp, Homo sapiens; identical to SEQ ID NO: 98257
  chr19:53938250-53938280
  hypo

SEQ ID NO: 191219 - DNA, 198 bp, Homo sapiens; identical to SEQ ID NO: 98258
  chr19:53977469-53977667
  hypo

SEQ ID NO: 191220 - DNA, 28 bp, Homo sapiens
  chr19:53979590-53979618
  hypo
attgtgggagagaaccgggcatggtggc

SEQ ID NO: 191221 - DNA, 235 bp, Homo sapiens
  chr19:53982538-53982773
  hypo
aggaggctgcaatgccgaatggaggaggcaggaaccggagtgtgagcagtagctgggtgggcaccatggctgggatcaccaccatcgaggcagtgaagcgcaagatccaggttctgcagctgcaggcagatgatgaggagtgagctgagcacctccagtgagaagctgagagagaaaggtgggcccgggaacaggctgaggctgaagtggcctccgtgaacggtaggatccagct

SEQ ID NO: 191222 - DNA, 30 bp, Homo sapiens; identical to SEQ ID NO: 98259
  chr19:53993423-53993453
  hypo

SEQ ID NO: 191223 - DNA, 163 bp, Homo sapiens; identical to SEQ ID NO: 98260
  chr19:54017722-54017885
  hypo

SEQ ID NO: 191224 - DNA, 43 bp, Homo sapiens; identical to SEQ ID NO: 98261
  chr19:54048833-54048876
  hypo

SEQ ID NO: 191225 - DNA, 31 bp, Homo sapiens; identical to SEQ ID NO: 98262
  chr19:54072512-54072543
  hypo

SEQ ID NO: 191226 - DNA, 43 bp, Homo sapiens; identical to SEQ ID NO: 98263
  chr19:54074925-54074968
  hypo

SEQ ID NO: 191227 - DNA, 398 bp, Homo sapiens
  chr19:54080851-54081249
  hypo
gaggatacatacgggcgagaagccgtacaagtgcacagaatgtgggaaggccttcaattgtggctatcacctcactcagcacgagagaatccacacaggcgaaaccccgtataaatgtaaggagtgtgggaaggctttcatttatggatcgagcctcgtgaaacatgagagaattcataccggggtgaaaccctatgggtgtacagaatgtgggaagagctttagtcacggccatcagcttacacaacatcagaaaacgcacagtggggcgaaatcctacgaatgtaaggagtgcgggaaggcatgtaaccacctaaaccatctccgagaacatcagaggatccacaacagttgaagagccttttgaacgcagtagcccgctcgtatctatggtttcg

SEQ ID NO: 191228 - DNA, 98 bp, Homo sapiens
  chr19:54081308-54081406
  hypo
cagaaataaagaattttaagtctcaaatggtgtgcccttctgagtagcgtgatgaaatctctcgctgtccggctccagccggccggggatgtgagtca

SEQ ID NO: 191229 - DNA, 43 bp, Homo sapiens; identical to SEQ ID NO: 98265
  chr19:54087416-54087459
  hypo

SEQ ID NO: 191230 - DNA, 29 bp, Homo sapiens
  chr19:54099371-54099400
  hypo
gcctggacgacaagagtgagactccattt

SEQ ID NO: 191231 - DNA, 464 bp, Homo sapiens; identical to SEQ ID NO: 98266
  chr19:54109745-54110209
  hypo

SEQ ID NO: 191232 - DNA, 27 bp, Homo sapiens
  chr19:54115041-54115068
  hypo
atttgaggtgaactggctgggcgcagt

SEQ ID NO: 191233 - DNA, 40 bp, Homo sapiens; identical to SEQ ID NO: 98268
  chr19:54115654-54115694
  hypo

SEQ ID NO: 191234 - DNA, 141 bp, Homo sapiens; identical to SEQ ID NO: 32891
  chr19:54120020-54120161
  hypo

SEQ ID NO: 191235 - DNA, 109 bp, Homo sapiens; identical to SEQ ID NO: 98270
  chr19:54120402-54120511
  hypo

SEQ ID NO: 191236 - DNA, 447 bp, Homo sapiens; identical to SEQ ID NO: 98271
  chr19:54135107-54135554
  hypo

SEQ ID NO: 191237 - DNA, 38 bp, Homo sapiens; identical to SEQ ID NO: 98272
  chr19:54136227-54136265
  hypo

SEQ ID NO: 191238 - DNA, 37 bp, Homo sapiens; identical to SEQ ID NO: 98273
  chr19:54137675-54137712
  hypo

SEQ ID NO: 191239 - DNA, 43 bp, Homo sapiens; identical to SEQ ID NO: 98274
  chr19:54140110-54140153
  hypo

SEQ ID NO: 191240 - DNA, 87 bp, Homo sapiens
  chr19:54140567-54140654
  hypo
gatccctgacagctaagcatgcggacgtacctggagggtggcatatccggggagggcatggaagctccgggcccctcgtcatacgcc

SEQ ID NO: 191241 - DNA, 35 bp, Homo sapiens; identical to SEQ ID NO: 98275
  chr19:54141501-54141536
  hypo

SEQ ID NO: 191242 - DNA, 304 bp, Homo sapiens; identical to SEQ ID NO: 98276
  chr19:54150799-54151103
  hypo

SEQ ID NO: 191243 - DNA, 30 bp, Homo sapiens; identical to SEQ ID NO: 32893
  chr19:54151509-54151539
  hypo

SEQ ID NO: 191244 - DNA, 226 bp, Homo sapiens; identical to SEQ ID NO: 98278
  chr19:54152257-54152483
  hypo

SEQ ID NO: 191245 - DNA, 46 bp, Homo sapiens; identical to SEQ ID NO: 32894
  chr19:54153202-54153248
  hypo

SEQ ID NO: 191246 - DNA, 34 bp, Homo sapiens; identical to SEQ ID NO: 32895
  chr19:54161841-54161875
  hypo

SEQ ID NO: 191247 - DNA, 162 bp, Homo sapiens; identical to SEQ ID NO: 98281
  chr19:54170238-54170400
  hypo

SEQ ID NO: 191248 - DNA, 41 bp, Homo sapiens; identical to SEQ ID NO: 98282
  chr19:54171163-54171204
  hypo

SEQ ID NO: 191249 - DNA, 241 bp, Homo sapiens; identical to SEQ ID NO: 98283
  chr19:54196083-54196324
  hypo

SEQ ID NO: 191250 - DNA, 81 bp, Homo sapiens; identical to SEQ ID NO: 56629
  chr19:54206967-54207048
  hypo

SEQ ID NO: 191251 - DNA, 34 bp, Homo sapiens; identical to SEQ ID NO: 98285
  chr19:54212283-54212317
  hypo

SEQ ID NO: 191252 - DNA, 23 bp, Homo sapiens
  chr19:54224258-54224281
  hypo
ccgtcaaaaagaaacaaaaacaa

SEQ ID NO: 191253 - DNA, 173 bp, Homo sapiens; identical to SEQ ID NO: 98287
  chr19:54224587-54224760
  hypo

SEQ ID NO: 191254 - DNA, 65 bp, Homo sapiens; identical to SEQ ID NO: 98288
  chr19:54254581-54254646
  hypo

SEQ ID NO: 191255 - DNA, 78 bp, Homo sapiens
  chr19:54256493-54256571
  hypo
tctgttgcccaggctggagtgcggtggcatttttaacatagatctcttgggctcgagtggtccttttttttggttcag

SEQ ID NO: 191256 - DNA, 22 bp, Homo sapiens
  chr19:54261208-54261230
  hypo
cgagacttcatctcaaaaaata

SEQ ID NO: 191257 - DNA, 110 bp, Homo sapiens
  chr19:54268117-54268227
  hypo
tccctagtaacaggtgggatgcgaggcagctctcgttgttgccgtagtgagcgatgcctgttcgtccagccctcaacaccttttactccgtggaagttatgcctgcactg

SEQ ID NO: 191258 - DNA, 24 bp, Homo sapiens
  chr19:54269957-54269981
  hypo
gagattttattggttgaagatcgg

SEQ ID NO: 191259 - DNA, 83 bp, Homo sapiens; identical to SEQ ID NO: 98291
  chr19:54271335-54271418
  hypo

SEQ ID NO: 191260 - DNA, 241 bp, Homo sapiens; identical to SEQ ID NO: 32899
  chr19:54271717-54271958
  hypo

SEQ ID NO: 191261 - DNA, 22 bp, Homo sapiens
  chr19:54302746-54302768
  hypo
tttttttttgagatggaatctc

SEQ ID NO: 191262 - DNA, 30 bp, Homo sapiens
  chr19:54306713-54306743
  hypo
gtgaactaccgcacccggcccatctctgga

SEQ ID NO: 191263 - DNA, 407 bp, Homo sapiens; identical to SEQ ID NO: 32900
  chr19:54313978-54314385
  hypo

SEQ ID NO: 191264 - DNA, 212 bp, Homo sapiens
  chr19:54317867-54318079
  hypo
gtgctgggattacaggcgtgagccactgtacctggcctcttagccttccttgttgcccctgcgtgtatgagatggtttggtagccatctttcagccaggagatgacacgtgtcaggacaaaatgctgacgtggaaaggttgatgagttgaaacacaggaggaaactgcccctttgatggtgtcattaatccaccccacgaattcctcaatca

SEQ ID NO: 191265 - DNA, 1002 bp, Homo sapiens; identical to SEQ ID NO: 132170
  chr19:54371621-54372623
  hypo

SEQ ID NO: 191266 - DNA, 417 bp, Homo sapiens; identical to SEQ ID NO: 132171
  chr19:54372682-54373099
  hypo

SEQ ID NO: 191267 - DNA, 610 bp, Homo sapiens; identical to SEQ ID NO: 132172
  chr19:54382388-54382998
  hypo

SEQ ID NO: 191268 - DNA, 601 bp, Homo sapiens; identical to SEQ ID NO: 132173
  chr19:54385475-54386076
  hypo

SEQ ID NO: 191269 - DNA, 30 bp, Homo sapiens; identical to SEQ ID NO: 98299
  chr19:54395005-54395035
  hypo

SEQ ID NO: 191270 - DNA, 728 bp, Homo sapiens; identical to SEQ ID NO: 132176
  chr19:54411188-54411916
  hypo

SEQ ID NO: 191271 - DNA, 189 bp, Homo sapiens; identical to SEQ ID NO: 132177
  chr19:54412559-54412748
  hypo

SEQ ID NO: 191272 - DNA, 161 bp, Homo sapiens; identical to SEQ ID NO: 56638
  chr19:54412808-54412969
  hypo

SEQ ID NO: 191273 - DNA, 99 bp, Homo sapiens; identical to SEQ ID NO: 56639
  chr19:54413008-54413107
  hypo

SEQ ID NO: 191274 - DNA, 54 bp, Homo sapiens; identical to SEQ ID NO: 132180
  chr19:54413509-54413563
  hypo

SEQ ID NO: 191275 - DNA, 31 bp, Homo sapiens; identical to SEQ ID NO: 12614
  chr19:54415929-54415960
  hypo

SEQ ID NO: 191276 - DNA, 133 bp, Homo sapiens
  chr19:54487089-54487222
  hypo
agtgaggcaggtgagcggggatcaaggtgaggccggagacacagacagggccagattgtgcaggggctcgtaggtcaggagttcagattttattctaggagtggtgagggccgtggaacgggtttaagcagga

SEQ ID NO: 191277 - DNA, 40 bp, Homo sapiens
  chr19:54498878-54498918
  hypo
agcacctgcacccttcgctcagtgacgtgaagcacccttt

SEQ ID NO: 191278 - DNA, 30 bp, Homo sapiens
  chr19:54527996-54528026
  hypo
cttcactcatacgtccggtgtctgggctgg

SEQ ID NO: 191279 - DNA, 30 bp, Homo sapiens; identical to SEQ ID NO: 98305
  chr19:55602807-55602837
  hypo

SEQ ID NO: 191280 - DNA, 30 bp, Homo sapiens; identical to SEQ ID NO: 32906
  chr19:55606063-55606093
  hypo

SEQ ID NO: 191281 - DNA, 41 bp, Homo sapiens; identical to SEQ ID NO: 32907
  chr19:55609522-55609563
  hypo

SEQ ID NO: 191282 - DNA, 77 bp, Homo sapiens
  chr19:55631055-55631132
  hypo
gccagattttttttttttttaaaggacaaccttttgcattacttaagtctttccaaggcatgcgctggtacaacaca

SEQ ID NO: 191283 - DNA, 31 bp, Homo sapiens; identical to SEQ ID NO: 98308
  chr19:55671890-55671921
  hypo

SEQ ID NO: 191284 - DNA, 185 bp, Homo sapiens
  chr19:55721104-55721289
  hypo
actgctgcacggatgcgggacgtggggcagaggatgagagcagggggtgctgagagaaaggccagctgactccctcgcctccctggtgggtgatcacacatcaagagcagcctggggcttagacctcatgcccctcgtccctggagcacgctcttccattcagcctctgacgcctttcccctctc

SEQ ID NO: 191285 - DNA, 148 bp, Homo sapiens
  chr19:55732004-55732152
  hypo
aaagcaaggaaggctcgaccccagatcacacagggagaggtggacagacagcatggctccgcccatttgcagccatttctgggcctgtaggctctggcagctcctgggattgctgtcctcggtgctgaatacgcgtttgttgggggca

SEQ ID NO: 191286 - DNA, 105 bp, Homo sapiens; identical to SEQ ID NO: 32908
  chr19:55740667-55740772
  hypo

SEQ ID NO: 191287 - DNA, 30 bp, Homo sapiens; identical to SEQ ID NO: 98310
  chr19:55741461-55741491
  hypo

SEQ ID NO: 191288 - DNA, 148 bp, Homo sapiens
  chr19:55750623-55750771
  hypo
aggccacggccaacgcgtgcccaggaggggccacagctgcaggctgagcccacagggcatgtaggtgcgtgcaggggacagatacaagtaggcgcgcctgctgctgcagaggcaggacagggctgtgaccctgcgcaggagacactca

SEQ ID NO: 191289 - DNA, 93 bp, Homo sapiens; identical to SEQ ID NO: 98311
  chr19:55775275-55775368
  hypo

SEQ ID NO: 191290 - DNA, 461 bp, Homo sapiens
  chr19:55785504-55785965
  hypo
ctgctgtgtgcaaagcgctcacgctgagggccaggtggtctccccgggaagtggtcacatctgctgcctggctagcagggggtttggccgagtgcgccactcactctgcccgcagcactcagccgtgcaggggtccaacaagcatgggaacaaacgagggaaggagatgcctctccctctgccccagcagatcccgggggcccacccggcacccccccccaccgccagcacccctgtccccagccccacccggacactcacaggagatggcgaagagggccttgacgcgcaccgtgtcgcaggcgtcgcggtccagcagccgcagcagcttacgcagggcacccaggcccagcacctgctcctggatggctgccacgttctgactgcacgtgccgatgagctgtgccgcccgccaccgcagtcccgcagcccccgcctccaggtaccggcccaccagcagg

SEQ ID NO: 191291 - DNA, 263 bp, Homo sapiens
  chr19:55798402-55798665
  hypo
cacgggtcagaaggtcgccatcaagatcgtgaaccgggagaagctgtcggagtcggtgctgatgaaggtgtgtgcgcctgctgcagtgtgcctgcgggtgggggggcctccggggctgagggcaggggcggggccgtgctgacctcttttcccgtgtccccacccctcttgaccctcaggtggagcgggagatcgccatcctgaagctcatcgaacacccacatgtcctcaagctccacgacgtctacgagaacaagaaatat

SEQ ID NO: 191292 - DNA, 80 bp, Homo sapiens
  chr19:55799280-55799360
  hypo
gaggggacagccctcgtgttcccccccggcacccagtcccccggatgaactgacatcaggtccgtcgatgctggcgcagg

SEQ ID NO: 191293 - DNA, 30 bp, Homo sapiens; identical to SEQ ID NO: 98314
  chr19:55814053-55814083
  hypo

SEQ ID NO: 191294 - DNA, 177 bp, Homo sapiens
  chr19:55824301-55824478
  hypo
gcagctctccagggcggagaagtcaacggctaagagaccgaagagcgcgaacagcagcatggccacgacccactcgcaggccgcagagacgctacgcagcgagcaggcgtggaggacgatcactgccccagggtcaagggccacactgctaccgtgacagacgcggagcccggcctg

SEQ ID NO: 191295 - DNA, 101 bp, Homo sapiens; identical to SEQ ID NO: 98316
  chr19:55838910-55839011
  hypo

SEQ ID NO: 191296 - DNA, 203 bp, Homo sapiens
  chr19:55842493-55842696
  hypo
agcaactccagaaaacgataaacatttacttcacctggtttttatgggtcatacatttcggaacggcttagctgagcgattctggttttggggtgcttggaaggttgcagtaagacatggaccagggctgcacagccacctgaagacttgatggacaccggaggattattgccggggtggcccaagcacgtggctgacgagct

SEQ ID NO: 191297 - DNA, 94 bp, Homo sapiens; identical to SEQ ID NO: 32914
  chr19:55848033-55848127
  hypo

SEQ ID NO: 191298 - DNA, 121 bp, Homo sapiens
  chr19:55849158-55849279
  hypo
cgacagagcaagaccctctctcaaaaaaaaaaaaaaagaagggagcatcacttgaatgagcccctagagagaccctgtctctacaaaaattaaaggattagccgagcatggtggcatgcgt

SEQ ID NO: 191299 - DNA, 30 bp, Homo sapiens; identical to SEQ ID NO: 32915
  chr19:55853653-55853683
  hypo

SEQ ID NO: 191300 - DNA, 378 bp, Homo sapiens
  chr19:55856149-55856527
  hypo
gggttggctccagggcggcattgagggtgcaccctctggagcacagacctcgatggggcaccccgggaggcatgacaaagggatccagatttttggctccagagtcagaactgagttggggtcctggcgatgccacccctggcctttggtttttcatctcagatggggttggtgaggatctctggaactctgcgggctggtcaagtgtgccggagggttttggacagcgaatgcgtggccctggtctgacaccacacacagacgctgggggggatggaaacaaaaggcggcattcggagaggctctgcagggccagtgtgctccagccaccttgagcacacgagagggcggccagctctccagcgatctagaaccatc

SEQ ID NO: 191301 - DNA, 30 bp, Homo sapiens
  chr19:55857586-55857616
  hypo
cctgcagatgggaacgcagcctgcgtgaag

SEQ ID NO: 191302 - DNA, 210 bp, Homo sapiens; identical to SEQ ID NO: 98319
  chr19:55857842-55858052
  hypo

SEQ ID NO: 191303 - DNA, 37 bp, Homo sapiens; identical to SEQ ID NO: 32916
  chr19:55858738-55858775
  hypo

SEQ ID NO: 191304 - DNA, 643 bp, Homo sapiens; identical to SEQ ID NO: 132218
  chr19:55865816-55866459
  hypo

SEQ ID NO: 191305 - DNA, 405 bp, Homo sapiens; identical to SEQ ID NO: 32918
  chr19:55872207-55872612
  hypo

SEQ ID NO: 191306 - DNA, 30 bp, Homo sapiens; identical to SEQ ID NO: 32919
  chr19:55903269-55903299
  hypo

SEQ ID NO: 191307 - DNA, 213 bp, Homo sapiens; identical to SEQ ID NO: 32920
  chr19:55912228-55912441
  hypo

SEQ ID NO: 191308 - DNA, 162 bp, Homo sapiens; identical to SEQ ID NO: 98325
  chr19:55944090-55944252
  hypo

SEQ ID NO: 191309 - DNA, 1363 bp, Homo sapiens; identical to SEQ ID NO: 132224
  chr19:55953357-55954720
  hypo

SEQ ID NO: 191310 - DNA, 50 bp, Homo sapiens; identical to SEQ ID NO: 132225
  chr19:55954937-55954987
  hypo

SEQ ID NO: 191311 - DNA, 256 bp, Homo sapiens; identical to SEQ ID NO: 132227
  chr19:55962683-55962939
  hypo

SEQ ID NO: 191312 - DNA, 288 bp, Homo sapiens; identical to SEQ ID NO: 132228
  chr19:55963044-55963332
  hypo

SEQ ID NO: 191313 - DNA, 30 bp, Homo sapiens
  chr19:55975793-55975823
  hypo
ttggggggccgggtgcgccggggctgcagg

SEQ ID NO: 191314 - DNA, 137 bp, Homo sapiens
  chr19:55976220-55976357
  hypo
gggatatggacctggcgtgcgtcggcggggggcagagaatggtgcctggagatggccaattaagggaacaaaggcctcgttcgggaggcgaggccgccagtaagtcaaatgcagcgattgagcgtggaggaccctta

SEQ ID NO: 191315 - DNA, 109 bp, Homo sapiens
  chr19:55976810-55976919
  hypo
ttggacccccaccctcgggggtctgctctgggaagccaggatgtttcccgaaattgatgtaacaaatgaccacggctcagtacctagaaccgcacgcgctgattctcct

SEQ ID NO: 191316 - DNA, 514 bp, Homo sapiens; identical to SEQ ID NO: 98328
  chr19:55986209-55986723
  hypo

SEQ ID NO: 191317 - DNA, 30 bp, Homo sapiens
  chr19:55989384-55989414
  hypo
ccaggggcgacactgcggctaagactcgga

SEQ ID NO: 191318 - DNA, 30 bp, Homo sapiens
  chr19:55990005-55990035
  hypo
cgggtgggcagggcacgggtggaaacacgg

SEQ ID NO: 191319 - DNA, 397 bp, Homo sapiens
  chr19:55990559-55990956
  hypo
agggcagtgagggagcgaggtatcccggaggccagggggaggcgggccacggacccagtgacaagtgggccattgcgggccacgcgccgcccaggccatggagtgggggcacccgcgtgggactgaaggggtttgcgctgggaaagagcgggctgacacttgagctgctctgctgtgaaggaatggagaaacgagtctgcagctggacagggaagtggagtgaagagctttttggtttttaaagatgggagacatagattgttggttctgcagatgggaacgtccaggagaggaggaaaagtggaggatgtgggtgggaaggcacagtccacgggcactgggtcaggcctgtggggaaggattgcgcagggtttctggacctcgcactgctgacatt

SEQ ID NO: 191320 - DNA, 134 bp, Homo sapiens; identical to SEQ ID NO: 32922
  chr19:55993944-55994078
  hypo

SEQ ID NO: 191321 - DNA, 30 bp, Homo sapiens
  chr19:55994677-55994707
  hypo
gcccaactctcagacgttcctcctggtgca

SEQ ID NO: 191322 - DNA, 97 bp, Homo sapiens; identical to SEQ ID NO: 98330
  chr19:55995220-55995317
  hypo

SEQ ID NO: 191323 - DNA, 30 bp, Homo sapiens; identical to SEQ ID NO: 98331
  chr19:55995629-55995659
  hypo

SEQ ID NO: 191324 - DNA, 30 bp, Homo sapiens
  chr19:55997635-55997665
  hypo
tgccacactgaacatcggactgtgctgcct

SEQ ID NO: 191325 - DNA, 44 bp, Homo sapiens
  chr19:55998066-55998110
  hypo
gggcccgggtcacccgcctgtctgtctctcgctggcaccgccgc

SEQ ID NO: 191326 - DNA, 30 bp, Homo sapiens; identical to SEQ ID NO: 98333
  chr19:56011513-56011543
  hypo

SEQ ID NO: 191327 - DNA, 30 bp, Homo sapiens; identical to SEQ ID NO: 98334
  chr19:56041496-56041526
  hypo

SEQ ID NO: 191328 - DNA, 119 bp, Homo sapiens; identical to SEQ ID NO: 98335
  chr19:56047528-56047647
  hypo

SEQ ID NO: 191329 - DNA, 31 bp, Homo sapiens; identical to SEQ ID NO: 98336
  chr19:56052608-56052639
  hypo

SEQ ID NO: 191330 - DNA, 31 bp, Homo sapiens; identical to SEQ ID NO: 98337
  chr19:56066672-56066703
  hypo

SEQ ID NO: 191331 - DNA, 30 bp, Homo sapiens; identical to SEQ ID NO: 98338
  chr19:56089478-56089508
  hypo

SEQ ID NO: 191332 - DNA, 109 bp, Homo sapiens; identical to SEQ ID NO: 98339
  chr19:56089713-56089822
  hypo

SEQ ID NO: 191333 - DNA, 30 bp, Homo sapiens
  chr19:56090185-56090215
  hypo
tggagcactggtgtcgcttggggcgtggcg

SEQ ID NO: 191334 - DNA, 30 bp, Homo sapiens
  chr19:56090766-56090796
  hypo
gccttggggcacagcgggcaggcgtggggc

SEQ ID NO: 191335 - DNA, 83 bp, Homo sapiens; identical to SEQ ID NO: 98340
  chr19:56104272-56104355
  hypo

SEQ ID NO: 191336 - DNA, 82 bp, Homo sapiens; identical to SEQ ID NO: 98341
  chr19:56104955-56105037
  hypo

SEQ ID NO: 191337 - DNA, 261 bp, Homo sapiens; identical to SEQ ID NO: 98342
  chr19:56108940-56109201
  hypo

SEQ ID NO: 191338 - DNA, 176 bp, Homo sapiens; identical to SEQ ID NO: 56680
  chr19:56112770-56112946
  hypo

SEQ ID NO: 191339 - DNA, 304 bp, Homo sapiens; identical to SEQ ID NO: 98344
  chr19:56113854-56114158
  hypo

SEQ ID NO: 191340 - DNA, 39 bp, Homo sapiens; identical to SEQ ID NO: 32924
  chr19:56115322-56115361
  hypo

SEQ ID NO: 191341 - DNA, 206 bp, Homo sapiens
  chr19:56125725-56125931
  hypo
ggggagaggccctacgaatgcggcgtctgcggccgcacctacaaccacgtgtccagcctcatccgccaccgccgctgccacaaggacgtgccaccggccgcggggggcccgccccagcccggcccccacctcccgccgctgggcctcccagcacccgctgccagcgccgccaccgccgccgccccctccacggtgtcctcgggccc

SEQ ID NO: 191342 - DNA, 92 bp, Homo sapiens; identical to SEQ ID NO: 98347
  chr19:56126760-56126852
  hypo

SEQ ID NO: 191343 - DNA, 30 bp, Homo sapiens; identical to SEQ ID NO: 98348
  chr19:56127132-56127162
  hypo

SEQ ID NO: 191344 - DNA, 30 bp, Homo sapiens; identical to SEQ ID NO: 32925
  chr19:56128012-56128042
  hypo

SEQ ID NO: 191345 - DNA, 30 bp, Homo sapiens; identical to SEQ ID NO: 98350
  chr19:56133665-56133695
  hypo

SEQ ID NO: 191346 - DNA, 776 bp, Homo sapiens; identical to SEQ ID NO: 132246
  chr19:56159254-56160030
  hypo

SEQ ID NO: 191347 - DNA, 879 bp, Homo sapiens; identical to SEQ ID NO: 98352
  chr19:56163305-56164184
  hypo

SEQ ID NO: 191348 - DNA, 118 bp, Homo sapiens
  chr19:56164402-56164520
  hypo
tctccgccctggccccgcggaggagctgcccacctgattcccggacagacctccccaactccgcgtgagacagagaattattcagataatttaaattaaaaaacgacgtgaaaatttg

SEQ ID NO: 191349 - DNA, 30 bp, Homo sapiens
  chr19:56164727-56164757
  hypo
tcgggaaaagaagcgcggacacagccgggc

SEQ ID NO: 191350 - DNA, 140 bp, Homo sapiens
  chr19:56170492-56170632
  hypo
gacatagccaccagcgcgcagggtgggctgggcccgcatccttactccgcttatcccgtgcccctcctctcacccttgcccagagcgggacaaggagaaccggcatcggaagcgcagccacagccgctctcggagccggg

SEQ ID NO: 191351 - DNA, 55 bp, Homo sapiens; identical to SEQ ID NO: 98354
  chr19:56176621-56176676
  hypo

SEQ ID NO: 191352 - DNA, 79 bp, Homo sapiens; identical to SEQ ID NO: 32929
  chr19:56176925-56177004
  hypo

SEQ ID NO: 191353 - DNA, 30 bp, Homo sapiens; identical to SEQ ID NO: 32930
  chr19:56177778-56177808
  hypo

SEQ ID NO: 191354 - DNA, 214 bp, Homo sapiens; identical to SEQ ID NO: 98357
  chr19:56178937-56179151
  hypo

SEQ ID NO: 191355 - DNA, 814 bp, Homo sapiens
  chr19:56179450-56180264
  hypo
actgagctttaatgggagccttgcctgggtggctgtcagagaaggggtggggtgtgttgtgactcaccagtaggtcccgagcccaggtgacctgccagcattccacagcagcaggtagcagatgtgggtgtgaactttgtgcctttggagcgttctggaggatgttctagtttgaggttcccctgaggctgggcagatttgggagacatggtgcgttctccccgaggagcctctgtgtgccactgcccaggaccctcactggtcagataaggctggggtggggtgggcacgtggcgacccctccctcgtcagatcaggcaggaagtgttctctttggcaattgaggagctcgccgtagactgtccaggttttgggagataacctggtactggaattgaagtcctcctcttctctacccataggggttgtgtccactgtggtccccgactctgcccacaagctgttcatcgggggcttacccaactacctgaacgatgaccaggtaacttccctgcctccctccagacccgtccccccaccccgccccacctcatcccagccctgatggactctcggctactgcaggtcaaagagctgctgacatcctttgggcccctcaaggccttcaacctggtcaaggacagtgccacggggctctccaagggctacgccttctgtgagtacgtggacatcaacgtcacggatcaggtgagtccccggtcgctggccgctgccgcgtctgtccttccctgccctgcgctgttgccaagccatggtctcccctcctcaggggacggggcgggaggcggccaac

SEQ ID NO: 191356 - DNA, 31 bp, Homo sapiens
  chr19:56181898-56181929
  hypo
cctgcaccctgctgtccgtgcagctgttaga

SEQ ID NO: 191357 - DNA, 95 bp, Homo sapiens
  chr19:56190514-56190609
  hypo
tcctcacagcagccaagtttccgctctgggccccatctatgaatgcctctcaggcaggtgtgtgctccccgtggcacaggcgatgccacgctggg

SEQ ID NO: 191358 - DNA, 30 bp, Homo sapiens; identical to SEQ ID NO: 98361
  chr19:56196832-56196862
  hypo

SEQ ID NO: 191359 - DNA, 31 bp, Homo sapiens; identical to SEQ ID NO: 98362
  chr19:56197525-56197556
  hypo

SEQ ID NO: 191360 - DNA, 31 bp, Homo sapiens; identical to SEQ ID NO: 98363
  chr19:56197772-56197803
  hypo

SEQ ID NO: 191361 - DNA, 781 bp, Homo sapiens
  chr19:56198985-56199766
  hypo
aggggtgtggtcctccctgtgcgctggcctcacctgtgccccacgctgcccttccatctgcccatcccctcagaaggccgcttacccacccaagtccgtcaatccctgctggttctctcgtcctttcctcactcataaccccagatggtcacccttcggccccgctctgccacccacatgctccctggagcatcccatgcacccagccctgctgggcacaccacacgggggccagcctgggggcccctggacccggtgcaggtggggccgccagacagctgcctgctgcggctccgggcaaggggagccagggcctgctcgtcagggagaggcctgggcctggggagtgggttgggtggggacacaagtacaggacacaggtgcaaggcggcgtcttggagctggagcagacagaacttgctgaccagtgcacagtggttgggagggcggggcaggagaggcagggtccgccctggggctttggaggctggggcaatggccctgtgctcggcgggcctagggcctggttggagcctgtcctctgcactgtggaggggggcaagggtccacaggccttgggggtggagagaacagtgtcaggacagagtttgagggtaggcggggttgctgagaggatgctgcagtggaggccggggatatctcagcagcctcctggagggtccggccctgccttcctgtgtcctctctctcccttcccctcctgctcttggaaccaagggctcctcgctagcccactccctaaccccgactaggccttgga

SEQ ID NO: 191362 - DNA, 410 bp, Homo sapiens
  chr19:56200284-56200694
  hypo
gtggccgcagagcagcggggaggaggagctgcagctccagctggccctggccatgagcaaggaggaggccgaccaggtactgggcgtgcagctggggctgtctgtccgccacccgcctccacgcctcacttcaggctccctcccagccaggcgtgggcctggccctcactgtcgctgctccacatgctgtcactcgtctcctccccagtcctgcctcatcctcaccccgccgtccctctgcgtgtcactctctgcctgtccctcactggttcagggacccccagccctctctttcttcggctctatctgaccctggctctgcctctgactctgcctctggcccctcccgtcatgcccctcacactctctctcccccagcccccgtcctgcggccccgaggacgacgccca

SEQ ID NO: 191363 - DNA, 30 bp, Homo sapiens
  chr19:56201247-56201277
  hypo
cgcggggatgacctgcggctgcagatggca

SEQ ID NO: 191364 - DNA, 466 bp, Homo sapiens
  chr19:56201479-56201945
  hypo
ctgctgggctgaggccggtgactgaccaggctgccctgcggccacctcctgtggtcagcgctggccatcccccttcgggctgagcaccgtgagggccaccaccggccgccacagctgaatggggaggcccagaataggccaacagcctggcatggccacagggaggagggtgcagggctcgccccatctgtcacactttgtcgggcacctccttggtgccaggccgtgtgctgcacacccagggcctgttggtgagcgaggaggcatggtcccgccctcgcgaacactgtttctgtggcgtccccatgctctgcagctgagtagcaaaccctcccacaaccttgtgcttccaggtcacgcttcagtacttccctgtgacgggcccgctggctggttgtttcgtgtcatggctgaggtcactcatgcctctgggcccggggtgtccgcactggccttgccctccagc

SEQ ID NO: 191365 - DNA, 95 bp, Homo sapiens
  chr19:56205700-56205795
  hypo
ctgtgtactcaaggagcgtctgagggcaggctcctctgagcctggaggcacctgtgaacacgcccccgctgccttcccccgcgggcctatagacc

SEQ ID NO: 191366 - DNA, 27 bp, Homo sapiens
  chr19:56213277-56213304
  hypo
gtgtgctgtctgcatcgagcagagtct

SEQ ID NO: 191367 - DNA, 27 bp, Homo sapiens
  chr19:56213603-56213630
  hypo
ggcgtgagccaccgcgccgggccccca

SEQ ID NO: 191368 - DNA, 30 bp, Homo sapiens
  chr19:56214121-56214151
  hypo
ttcgttcatctaagccgcatttactccttt

SEQ ID NO: 191369 - DNA, 51 bp, Homo sapiens; identical to SEQ ID NO: 98370
  chr19:56223262-56223313
  hypo

SEQ ID NO: 191370 - DNA, 163 bp, Homo sapiens; identical to SEQ ID NO: 32936
  chr19:56227937-56228100
  hypo

SEQ ID NO: 191371 - DNA, 24 bp, Homo sapiens
  chr19:56228680-56228704
  hypo
gagccaccgcgcccggccacatta

SEQ ID NO: 191372 - DNA, 24 bp, Homo sapiens
  chr19:56308069-56308093
  hypo
tgagatggagtcttgctctgtcgc

SEQ ID NO: 191373 - DNA, 56 bp, Homo sapiens
  chr19:56320359-56320415
  hypo
aacttttccgggtcacggtccaaatgtttcatgtatcccaccgagtaccacttgaa

SEQ ID NO: 191374 - DNA, 30 bp, Homo sapiens
  chr19:56346712-56346742
  hypo
gtctaaaaaacttagcgcctgttctgccta

SEQ ID NO: 191375 - DNA, 30 bp, Homo sapiens; identical to SEQ ID NO: 98373
  chr19:56352598-56352628
  hypo

SEQ ID NO: 191376 - DNA, 220 bp, Homo sapiens; identical to SEQ ID NO: 98374
  chr19:56369327-56369547
  hypo

SEQ ID NO: 191377 - DNA, 131 bp, Homo sapiens
  chr19:56372689-56372820
  hypo
gtgttacaagtggctcgtgttgaccgcctgcctgtggaaagctcgtcctttcttgaccacaggtcggattacagcctcatctgttggcatcacatctgctctgtgctcaccaccagcgggcacctcagaga

SEQ ID NO: 191378 - DNA, 30 bp, Homo sapiens
  chr19:56382235-56382265
  hypo
tctgaaatgcttctgcgtaacaagagcgtg

SEQ ID NO: 191379 - DNA, 323 bp, Homo sapiens; identical to SEQ ID NO: 98375
  chr19:56461800-56462123
  hypo

SEQ ID NO: 191380 - DNA, 335 bp, Homo sapiens
  chr19:56465554-56465889
  hypo
aagggctgagagaatcgtgatgctgctggacctgaaactatggcgccactgaacctaatttcaacagctttacgcccgccatacttctcacgtagaaagcagtccttgttttgtttaagccacttcaagctgagttttctgttcgttggtgcttcctagttgacacagcagtatcaggaaaggttatttcatttatgcaagggcatcacggggcttcacgtagacatcgagactggttttcttattgctctattagttcttgcaattcactctgatgtcataccctttatttctcccatctcacaaatctaggtaaaatacggcggtataaatcg

SEQ ID NO: 191381 - DNA, 87 bp, Homo sapiens; identical to SEQ ID NO: 98376
  chr19:56467207-56467294
  hypo

SEQ ID NO: 191382 - DNA, 36 bp, Homo sapiens; identical to SEQ ID NO: 98377
  chr19:56475819-56475855
  hypo

SEQ ID NO: 191383 - DNA, 30 bp, Homo sapiens
  chr19:56503879-56503909
  hypo
caacctcagcagcgtcggttttttgacttt

SEQ ID NO: 191384 - DNA, 814 bp, Homo sapiens
  chr19:56538403-56539217
  hypo
gcttttgattcagaccggtggggcttccggcctcgcacggtggttctgcacggaaagtcaggaattgggaaatcggctctagccagaaggatcgtgctgtgctgggcgcaaggtggactctaccagggaatgttctcctacgtcttcttcctccccgttagagagatgcagcggaagaaggagagcagtgtcacagagttcatctccagggagtggccagactcccaggctccggtgacggagatcatgtcccgaccagaaaggctgttgttcatcattgacggtttcgatgacctgggctctgtcctcaacaatgacacaaagctctgcaaagactgggctgagaagcagcctccgttcaccctcatacgcagtctgctgaggaaggtcctgctccctgagtccttcctgatcgtcaccgtcagagacgtgggcacagagaagctcaagtcagaggtcgtgtctccccgttacctgttagttagaggaatctccggggaacaaagaatccacttgctccttgagcgcgggattggtgagcatcagaagacacaagggttgcgtgcgatcatgaacaaccgtgagctgctcgaccagtgccaggtgcccgccgtgggctctctcatctgcgtggccctgcagctgcaggacgtggtgggggagagcgtcgcccccttcaaccaaacgctcacaggcctgcacgccgcttttgtgtttcatcagctcacccctcgaggcgtggtccggcgctgtctcaatctggaggaaagagttgtcctgaagcgcttctgccgtatggctgtggagggagtgt

SEQ ID NO: 191385 - DNA, 147 bp, Homo sapiens
  chr19:56543707-56543854
  hypo
ctcaaaaaaaaaaaaaaaagatctgattcaggagctggcggttcccagtcatgcctgcataccccctcgggtatcggtatatccgggaggcagggtggacaccgggctagtcatgcaaagtgtgatggcagccgctaagttgcctca

SEQ ID NO: 191386 - DNA, 271 bp, Homo sapiens; identical to SEQ ID NO: 32938
  chr19:56564932-56565203
  hypo

SEQ ID NO: 191387 - DNA, 30 bp, Homo sapiens; identical to SEQ ID NO: 32939
  chr19:56599652-56599682
  hypo

SEQ ID NO: 191388 - DNA, 208 bp, Homo sapiens
  chr19:56602174-56602382
  hypo
agcaagactccatctcaaaacaaaacaaaaacgcttatgctcaggcctccctccagacgcactgtatgagaaagtgccgggccgggcctgtgcttcagcaagccccccaggtgattctgatgccagctccagtgtgagaatcactattccaaggcagagagtattcgaatatggctcttgaacctgcggcagaagaaaacactccagg

SEQ ID NO: 191389 - DNA, 30 bp, Homo sapiens
  chr19:56603721-56603751
  hypo
actcagctgaggtcccgaggggatgggctg

SEQ ID NO: 191390 - DNA, 30 bp, Homo sapiens; identical to SEQ ID NO: 98382
  chr19:56609839-56609869
  hypo

SEQ ID NO: 191391 - DNA, 30 bp, Homo sapiens; identical to SEQ ID NO: 98383
  chr19:56615088-56615118
  hypo

SEQ ID NO: 191392 - DNA, 156 bp, Homo sapiens; identical to SEQ ID NO: 98384
  chr19:56615754-56615910
  hypo

SEQ ID NO: 191393 - DNA, 547 bp, Homo sapiens
  chr19:56617294-56617841
  hypo
gcccacggcagtcaccgcgcattcccccctccgcgcccacggcagtcaccgcgcattcccccctccgcgcccacggcagtcaccgcgcattccgcattcccccctccgcgcccacggcagtcaccgcgcattccgccctccgcgcccacggcagtcaccgcgcattcccccttccgcgcccacggcagtcaccgcgcattcccccgccgcgccctgcagcctctgaactcctttccgtccctctggacttgctgccgtgtgctctgcacaggagagggacagcatctgttcctgcgtgtctgactcttccacacagcatggtgctgcggcgtgccagcgtgtcgctcctctctcgggctgaaccccactccactgtacggcggccacagtggtccatgcacccacccatcgctggaggacaactgtgagctgcttccacagcgggcattgtgtatactccagcttcaacgccgcgtccatccatttatttctgtggacgttcgcgttcatctctctgggaaggagaagcctgcgcaggccccagccc

SEQ ID NO: 191394 - DNA, 389 bp, Homo sapiens
  chr19:56642158-56642547
  hypo
gccatcacgcctggccggaagatgactctttggataatgtaccctatattgtctgaccctgttagggcaaacacctcacaggtgtggccagtgctaaatgagatgcatgaagccgctaaacccagtgctcagacacataagaagtgctcacaaccgtgagtagttattaccattatggcgattgtctaaagtggaatggagaagtgtctcagtctgggttcgagagaggaaacaggtaaatagaccccacgccaggtattttatctaccaaagggtttaatgtagggaattaaatgttcacaaaattattgaatgggctgagcctcctgcgataactcagagaaccacacggaactgtcccagcaaggagccaccgcctttgaggactc

SEQ ID NO: 191395 - DNA, 229 bp, Homo sapiens; identical to SEQ ID NO: 32942
  chr19:56658487-56658716
  hypo

SEQ ID NO: 191396 - DNA, 272 bp, Homo sapiens
  chr19:56663679-56663951
  hypo
gacagagtgagactctgtctcaaaaaaaaaaaaaaaaaataccgttgccgggattttactcttagatttgaagttgcggttatgaggtgattcgggcctcagcttcagtaattttttaactgaatgtctccattctcctgttgaaggacatttgggttgattccagggttttgttttttttttttttttaatagagctggtttacgtctctgaataggtttctgtgtgaatacacgtttacatttatctagggtaagcgcccaggagtgcag

SEQ ID NO: 191397 - DNA, 463 bp, Homo sapiens; identical to SEQ ID NO: 98387
  chr19:56671131-56671594
  hypo

SEQ ID NO: 191398 - DNA, 41 bp, Homo sapiens
  chr19:56686390-56686431
  hypo
aaagatgtctccagccgggcgcggtggctcacgcctgtaat

SEQ ID NO: 191399 - DNA, 295 bp, Homo sapiens; identical to SEQ ID NO: 98388
  chr19:56688202-56688497
  hypo

SEQ ID NO: 191400 - DNA, 30 bp, Homo sapiens
  chr19:56701412-56701442
  hypo
gactcgtgggcgaaccgcttttggcagacg

SEQ ID NO: 191401 - DNA, 406 bp, Homo sapiens
  chr19:56707985-56708391
  hypo
gaaagtaaattaggcctggtgcgatggctcactcctgtcaccccagtgctctgggaggcggaggtggcaggatcacttcagcccagcagtgaaccgcgattgtgccactgtgctccagcctgggagacacatccagcggccatctcgttttgtttatttattaagtaaatcgatacattttttaaaagcatacagatatgagaaaaggcagcctgaaattctgggaattaaagaggttttcccgccaggttccctaagcgcccctgctcagaaagcggagatcgaggctgaggcgggcagattgcttgagccgaggagttcgagaccagactgggcaaagcagcgagaccacgtctctatagtaaataaaaaaatgcactcgggcggtgtggtggtgtgctcctgc

SEQ ID NO: 191402 - DNA, 30 bp, Homo sapiens; identical to SEQ ID NO: 98390
  chr19:56709041-56709071
  hypo

SEQ ID NO: 191403 - DNA, 269 bp, Homo sapiens
  chr19:56727700-56727969
  hypo
atggtccccgccctccgctcgttatcgtgttgagaatgaaatgagaggacatgcttggcacctggagatgattggatattacagctgtgcgccataagggcaaatggttccattgtttgatgagccgtcctggcggtgggtgggtcggtcacttctaaacagataaggaatggctagaaagctcttgtaccaaaccagcttgaagcaacctcacccacaccgaatccctccacgtttcttttcttttttctttcttccttttttttttt

SEQ ID NO: 191404 - DNA, 130 bp, Homo sapiens; identical to SEQ ID NO: 12634
  chr19:56728658-56728788
  hypo

SEQ ID NO: 191405 - DNA, 31 bp, Homo sapiens; identical to SEQ ID NO: 32945
  chr19:56733401-56733432
  hypo

SEQ ID NO: 191406 - DNA, 65 bp, Homo sapiens; identical to SEQ ID NO: 98393
  chr19:56761105-56761170
  hypo

SEQ ID NO: 191407 - DNA, 30 bp, Homo sapiens
  chr19:56804936-56804966
  hypo
tgggcttcggaccctcgcctcctgaagggc

SEQ ID NO: 191408 - DNA, 80 bp, Homo sapiens; identical to SEQ ID NO: 98394
  chr19:56805612-56805692
  hypo

SEQ ID NO: 191409 - DNA, 167 bp, Homo sapiens; identical to SEQ ID NO: 98395
  chr19:56806260-56806427
  hypo

SEQ ID NO: 191410 - DNA, 217 bp, Homo sapiens; identical to SEQ ID NO: 32946
  chr19:56806988-56807205
  hypo

SEQ ID NO: 191411 - DNA, 108 bp, Homo sapiens
  chr19:56807586-56807694
  hypo
tccagcagggcttctcggaggaggagtggcttggggcgagcctgctggacctgctggtctggaagtgtttatcatgctgtcccttctgactcgcgttgtatgcccctg

SEQ ID NO: 191412 - DNA, 43 bp, Homo sapiens
  chr19:56829440-56829483
  hypo
ccagagctctcaccaccacagcgccatttaggtggactgtttg

SEQ ID NO: 191413 - DNA, 80 bp, Homo sapiens
  chr19:56863412-56863492
  hypo
cttctttatgccctgcgcttgggtatgctttggtggatagtgtggggtttttttgtttgtttgtttctttgtttttgaga

SEQ ID NO: 191414 - DNA, 32 bp, Homo sapiens; identical to SEQ ID NO: 98398
  chr19:56877556-56877588
  hypo

SEQ ID NO: 191415 - DNA, 541 bp, Homo sapiens; identical to SEQ ID NO: 12636
  chr19:56879474-56880015
  hypo

SEQ ID NO: 191416 - DNA, 198 bp, Homo sapiens; identical to SEQ ID NO: 56692
  chr19:56904505-56904703
  hypo

SEQ ID NO: 191417 - DNA, 605 bp, Homo sapiens; identical to SEQ ID NO: 132264
  chr19:56904723-56905328
  hypo

SEQ ID NO: 191418 - DNA, 30 bp, Homo sapiens
  chr19:56906198-56906228
  hypo
atttattagtttcttcgtgcctatctcggt

SEQ ID NO: 191419 - DNA, 841 bp, Homo sapiens; identical to SEQ ID NO: 56694
  chr19:56915126-56915967
  hypo

SEQ ID NO: 191420 - DNA, 34 bp, Homo sapiens
  chr19:56936855-56936889
  hypo
tgcgtgagctaccgtgcctggcctaaaaagtcat

SEQ ID NO: 191421 - DNA, 214 bp, Homo sapiens
  chr19:56981662-56981876
  hypo
cacatgctctatgcacgtgctcaggtgtgtgtgctgaatgtgctccatgcctgggcagcagcgtcacctcctcagttaatgacgatgagaatgaaagctgtgctggctcctttctatgcatcacaccatctcctttaaccttgaatggcaaatcaaccacccagggtcctcatcttccatcgcggggatgagagagggacgatgacccgcctgt

SEQ ID NO: 191422 - DNA, 30 bp, Homo sapiens
  chr19:56982104-56982134
  hypo
gcgagggctcggtgacgaactgagcagact

SEQ ID NO: 191423 - DNA, 161 bp, Homo sapiens; identical to SEQ ID NO: 132266
  chr19:56987541-56987702
  hypo

SEQ ID NO: 191424 - DNA, 172 bp, Homo sapiens; identical to SEQ ID NO: 12641
  chr19:56988111-56988283
  hypo

SEQ ID NO: 191425 - DNA, 280 bp, Homo sapiens; identical to SEQ ID NO: 56697
  chr19:56988383-56988663
  hypo

SEQ ID NO: 191426 - DNA, 17 bp, Homo sapiens
  chr19:57014397-57014414
  hypo
tgagtggcagcatattc

SEQ ID NO: 191427 - DNA, 30 bp, Homo sapiens; identical to SEQ ID NO: 98407
  chr19:57129767-57129797
  hypo

SEQ ID NO: 191428 - DNA, 664 bp, Homo sapiens; identical to SEQ ID NO: 98408
  chr19:57133005-57133669
  hypo

SEQ ID NO: 191429 - DNA, 171 bp, Homo sapiens
  chr19:57134012-57134183
  hypo
tcactgtgcaccagcggatccacacgggcgagaagccctaccgatgcggcgagtgcgggaagaccttcagccgcaacacgaacctgacgcgccacctgcggattcacacctgagcgcctctgtgcagggctctcactggcggtgcccaggacggacgccagatggctgcgc

SEQ ID NO: 191430 - DNA, 30 bp, Homo sapiens; identical to SEQ ID NO: 98410
  chr19:57137101-57137131
  hypo

SEQ ID NO: 191431 - DNA, 1449 bp, Homo sapiens; identical to SEQ ID NO: 98411
  chr19:57175021-57176470
  hypo

SEQ ID NO: 191432 - DNA, 489 bp, Homo sapiens
  chr19:57181877-57182366
  hypo
agggtcccgggcacacgtagctacacacacacccagccccacacgtagctccctgtgtgaagaggtgcacagagacgcacaaggtcacacatgccacctgctccacacaggccggccattactgggacacacccacaggggatggctggacacatgtgcagtcacactcggtggatagagctccagcatagccaaagcccacatgtgcagcgtctccatcatgtgcagatgcacacacttcagacagcacggcactctacaggctcgcacagccaggtcacccatcattgtgctggcaggcacacgggccgagccagcctacacggcggcacacccagacatgcacacgtggggtcacacacctcacatccaggagaactttcagacttgcccaaaggcagccacacgtgtatgtgacatgctgtgatatgcagacaccgcttcacatgaacgagcacataacacaccgataaagtgttacatgccttt

SEQ ID NO: 191433 - DNA, 33 bp, Homo sapiens; identical to SEQ ID NO: 98413
  chr19:57189203-57189236
  hypo

SEQ ID NO: 191434 - DNA, 40 bp, Homo sapiens; identical to SEQ ID NO: 98414
  chr19:57190502-57190542
  hypo

SEQ ID NO: 191435 - DNA, 31 bp, Homo sapiens; identical to SEQ ID NO: 32958
  chr19:57229771-57229802
  hypo

SEQ ID NO: 191436 - DNA, 92 bp, Homo sapiens; identical to SEQ ID NO: 98416
  chr19:57254043-57254135
  hypo

SEQ ID NO: 191437 - DNA, 30 bp, Homo sapiens
  chr19:57272435-57272465
  hypo
agctccacctacatgcgacccaccacccgc

SEQ ID NO: 191438 - DNA, 29 bp, Homo sapiens
  chr19:57280106-57280135
  hypo
ccgcgcccggcctgggtgactttaataaa

SEQ ID NO: 191439 - DNA, 312 bp, Homo sapiens
  chr19:57328578-57328890
  hypo
gacagcctttttgatcgtgaatcgagcccttcccatctgtgtcaaaatgatagcgcctctttctttcaagaactctctttctggaaacaagggttgaattaaacctaaagcctcccctaaatgcattcccttcataaacccgctgctggatcactgactccctcttgttcaatgaaatgtccttccagttatcatctgacattctggggaatctctgtgaccggtcgcttgactcccttgctcttcccgatttggaactgcgtgacacatccttgatgaatttttccattatcactccgtgggaagattcat

SEQ ID NO: 191440 - DNA, 30 bp, Homo sapiens; identical to SEQ ID NO: 98418
  chr19:57335777-57335807
  hypo

SEQ ID NO: 191441 - DNA, 30 bp, Homo sapiens
  chr19:57336298-57336328
  hypo
ctcgaggagttagctcggctactaacttgg

SEQ ID NO: 191442 - DNA, 30 bp, Homo sapiens; identical to SEQ ID NO: 98419
  chr19:57344735-57344765
  hypo

SEQ ID NO: 191443 - DNA, 592 bp, Homo sapiens
  chr19:57349849-57350441
  hypo
ggcgcctgcacaacccgcctcgcagctcccccactaagccgcccccatacacaagatggaaccacacgcatcctgtggtgaacaaagtcttggtcaggcaacaacaggggaaggggtgagcctctgccaccgttagccaaaaacacagcgagcgcggtgataacccgtcaccctgtccttaagcataaatggctccgcggccgctaaggcaaactctttaggcacgtctcccggctcccccagatgcggggactgagccagtcccactggcaaaacagcctggcgaccagcacacacagcccaaggagcgcggcactccacagctttccatcaccgcaaggcaggcaagcacagcaaccgtggccccgcccctccctgtggacaaccccacacctatgcggcaaaccgcagccgccccgatcaaagatggcacccaggtgggcggggcttgaacagaccgtcccgcccatgccacctgcagccacttcagccttgccccgccgcatctgccgccaaccaatccgggcaacgcctgcgcggcaaacctcagctgcccccatcaaagatggcgcccaggcgggcgggccttgtc

SEQ ID NO: 191444 - DNA, 31 bp, Homo sapiens; identical to SEQ ID NO: 98420
  chr19:57373747-57373778
  hypo

SEQ ID NO: 191445 - DNA, 116 bp, Homo sapiens
  chr19:57388568-57388684
  hypo
tgtaggtactaaagctgaaagcgtgcacaccctctgaccccgccattcttattcagggagcccagatgaccactccacaaatgtgcactgagcgcggaataataataattgccaat

SEQ ID NO: 191446 - DNA, 20 bp, Homo sapiens
  chr19:57420044-57420064
  hypo
gccaccgcgcccagcctatg

SEQ ID NO: 191447 - DNA, 30 bp, Homo sapiens
  chr19:57422038-57422068
  hypo
ggatgttgggtgtctcgttcacctctcact

SEQ ID NO: 191448 - DNA, 93 bp, Homo sapiens
  chr19:57425613-57425706
  hypo
aaacctgtatataagcggactcgcacatttcaaacctgtgttgtttgagggtcaactgtatagtatataatgcaatataatatgtaatatagg

SEQ ID NO: 191449 - DNA, 30 bp, Homo sapiens
  chr19:57445084-57445114
  hypo
aatgtggccggtccccgaagagacatgctg

SEQ ID NO: 191450 - DNA, 21 bp, Homo sapiens
  chr19:57451244-57451265
  hypo
gagaccctgtctcaaaaaaaa

SEQ ID NO: 191451 - DNA, 30 bp, Homo sapiens
  chr19:57451594-57451624
  hypo
ggcgtggggctgcaccgaccgtgcccagcc

SEQ ID NO: 191452 - DNA, 164 bp, Homo sapiens; identical to SEQ ID NO: 98423
  chr19:57477085-57477249
  hypo

SEQ ID NO: 191453 - DNA, 159 bp, Homo sapiens; identical to SEQ ID NO: 98424
  chr19:57491358-57491517
  hypo

SEQ ID NO: 191454 - DNA, 33 bp, Homo sapiens
  chr19:57501949-57501982
  hypo
aaacaaaaaataaaaacaggccgggtgcggtgg

SEQ ID NO: 191455 - DNA, 17 bp, Homo sapiens
  chr19:57509118-57509135
  hypo
tttttttttttttttga

SEQ ID NO: 191456 - DNA, 17 bp, Homo sapiens
  chr19:57509374-57509391
  hypo
tccccaggtgctgggat

SEQ ID NO: 191457 - DNA, 88 bp, Homo sapiens; identical to SEQ ID NO: 98427
  chr19:57543652-57543740
  hypo

SEQ ID NO: 191458 - DNA, 30 bp, Homo sapiens
  chr19:57576873-57576903
  hypo
tgtcaaacagtctcacgttgcagtggcaaa

SEQ ID NO: 191459 - DNA, 43 bp, Homo sapiens; identical to SEQ ID NO: 98428
  chr19:57579642-57579685
  hypo

SEQ ID NO: 191460 - DNA, 43 bp, Homo sapiens
  chr19:57583562-57583605
  hypo
attgtgaagtggtgatacattcgcagagtcaaaatgacatttt

SEQ ID NO: 191461 - DNA, 30 bp, Homo sapiens; identical to SEQ ID NO: 98429
  chr19:57602304-57602334
  hypo

SEQ ID NO: 191462 - DNA, 77 bp, Homo sapiens; identical to SEQ ID NO: 32962
  chr19:57604470-57604547
  hypo

SEQ ID NO: 191463 - DNA, 76 bp, Homo sapiens
  chr19:57604846-57604922
  hypo
gaaaaagaaattgacgcatgcgattgtgtgtgactgtggggttgttccacgtcgttgggaccgtttgattcattgt

SEQ ID NO: 191464 - DNA, 31 bp, Homo sapiens; identical to SEQ ID NO: 32963
  chr19:57617000-57617031
  hypo

SEQ ID NO: 191465 - DNA, 338 bp, Homo sapiens; identical to SEQ ID NO: 132289
  chr19:57617831-57618169
  hypo

SEQ ID NO: 191466 - DNA, 36 bp, Homo sapiens; identical to SEQ ID NO: 98432
  chr19:57627882-57627918
  hypo

SEQ ID NO: 191467 - DNA, 35 bp, Homo sapiens; identical to SEQ ID NO: 98433
  chr19:57628157-57628192
  hypo

SEQ ID NO: 191468 - DNA, 87 bp, Homo sapiens; identical to SEQ ID NO: 98434
  chr19:57630720-57630807
  hypo

SEQ ID NO: 191469 - DNA, 387 bp, Homo sapiens
  chr19:57631106-57631493
  hypo
acaattcccggcgtggtttctagcaccagcccacctaccacaccccacctcgcttgaggctgaatgggtaacaggatgaacccgcccctgggctggttttctctgaaccctaactcctgccgttacgccccaccagctctaggccaggaactctatgtgccccggccacgctagagcccgtacctagacccgtaggtcgggaggcctgcgcccggcactgcgcagacgcagcgtgctgtgcccagaactcttctgttcccaggagaatcaggggagtcggcgccggaaggggcgggtccgagctgagatttccagagccatgggagccggaagtccaaggaactgtacctccatcatgacgactccggttacgtaaaaacattcaaa

SEQ ID NO: 191470 - DNA, 33 bp, Homo sapiens; identical to SEQ ID NO: 98436
  chr19:57631761-57631794
  hypo

SEQ ID NO: 191471 - DNA, 27 bp, Homo sapiens
  chr19:57656935-57656962
  hypo
tctcacgtctcaaaaaaaaaaaaagaa

SEQ ID NO: 191472 - DNA, 91 bp, Homo sapiens
  chr19:57689866-57689957
  hypo
acatggtgaggtccatcgctcttgtcatcaggataagcctgcaacctacaatgttggtgcgctgacctcgtgctgccgtcctcgtgtgact

SEQ ID NO: 191473 - DNA, 464 bp, Homo sapiens; identical to SEQ ID NO: 56720
  chr19:57831522-57831986
  hypo

SEQ ID NO: 191474 - DNA, 409 bp, Homo sapiens; identical to SEQ ID NO: 56721
  chr19:57832024-57832433
  hypo

SEQ ID NO: 191475 - DNA, 30 bp, Homo sapiens
  chr19:57867017-57867047
  hypo
cacattaaatagtccgtgagaatgagctac

SEQ ID NO: 191476 - DNA, 30 bp, Homo sapiens
  chr19:57989959-57989989
  hypo
atggaattcccgtgcgtaacctcaactaca

SEQ ID NO: 191477 - DNA, 31 bp, Homo sapiens; identical to SEQ ID NO: 98441
  chr19:58006805-58006836
  hypo

SEQ ID NO: 191478 - DNA, 23 bp, Homo sapiens
  chr19:58036047-58036070
  hypo
atgaagtaagatttattcattcg

SEQ ID NO: 191479 - DNA, 15 bp, Homo sapiens
  chr19:58038569-58038584
  hypo
cagcgcggcggactg

SEQ ID NO: 191480 - DNA, 376 bp, Homo sapiens; identical to SEQ ID NO: 56731
  chr19:58038923-58039299
  hypo

SEQ ID NO: 191481 - DNA, 31 bp, Homo sapiens; identical to SEQ ID NO: 32969
  chr19:58054994-58055025
  hypo

SEQ ID NO: 191482 - DNA, 30 bp, Homo sapiens; identical to SEQ ID NO: 98446
  chr19:58069204-58069234
  hypo

SEQ ID NO: 191483 - DNA, 814 bp, Homo sapiens; identical to SEQ ID NO: 12669
  chr19:58070514-58071328
  hypo

SEQ ID NO: 191484 - DNA, 825 bp, Homo sapiens; identical to SEQ ID NO: 132317
  chr19:58125364-58126189
  hypo

SEQ ID NO: 191485 - DNA, 31 bp, Homo sapiens; identical to SEQ ID NO: 98449
  chr19:58161230-58161261
  hypo

SEQ ID NO: 191486 - DNA, 42 bp, Homo sapiens; identical to SEQ ID NO: 98450
  chr19:58177291-58177333
  hypo

SEQ ID NO: 191487 - DNA, 43 bp, Homo sapiens; identical to SEQ ID NO: 98451
  chr19:58180748-58180791
  hypo

SEQ ID NO: 191488 - DNA, 43 bp, Homo sapiens
  chr19:58184720-58184763
  hypo
tgccataggcatagtagctcacgcctgtaatcccagaaaggct

SEQ ID NO: 191489 - DNA, 33 bp, Homo sapiens
  chr19:58200877-58200910
  hypo
attatcagaaaatagtctggccgggcatggtgt

SEQ ID NO: 191490 - DNA, 33 bp, Homo sapiens; identical to SEQ ID NO: 98452
  chr19:58201149-58201182
  hypo

SEQ ID NO: 191491 - DNA, 413 bp, Homo sapiens; identical to SEQ ID NO: 12679
  chr19:58238325-58238738
  hypo

SEQ ID NO: 191492 - DNA, 249 bp, Homo sapiens; identical to SEQ ID NO: 56743
  chr19:58238987-58239236
  hypo

SEQ ID NO: 191493 - DNA, 30 bp, Homo sapiens; identical to SEQ ID NO: 98455
  chr19:58297458-58297488
  hypo

SEQ ID NO: 191494 - DNA, 82 bp, Homo sapiens; identical to SEQ ID NO: 98456
  chr19:58298050-58298132
  hypo

SEQ ID NO: 191495 - DNA, 267 bp, Homo sapiens
  chr19:58304690-58304957
  hypo
tacaggcatgagcccccgtgcctggccaaaactgcacatatttaaactgtaaagtgtgataagttttgacattaataagcctgtaatatgatccatcaccttcatatttacctggagtctggtaacgtctttacctctgccttccagatgaccattgataactttgctttataatagattattttacattttctacatttttatacgtgatttgatgtcgtgaagtgtttaatctttatccctggatggtatcgtgcggtatattta

SEQ ID NO: 191496 - DNA, 40 bp, Homo sapiens; identical to SEQ ID NO: 32974
  chr19:58316855-58316895
  hypo

SEQ ID NO: 191497 - DNA, 39 bp, Homo sapiens; identical to SEQ ID NO: 98459
  chr19:58317134-58317173
  hypo

SEQ ID NO: 191498 - DNA, 30 bp, Homo sapiens; identical to SEQ ID NO: 98460
  chr19:58336936-58336966
  hypo

SEQ ID NO: 191499 - DNA, 246 bp, Homo sapiens; identical to SEQ ID NO: 12685
  chr19:58385531-58385777
  hypo

SEQ ID NO: 191500 - DNA, 31 bp, Homo sapiens; identical to SEQ ID NO: 32976
  chr19:58416014-58416045
  hypo

SEQ ID NO: 191501 - DNA, 30 bp, Homo sapiens; identical to SEQ ID NO: 98463
  chr19:58442850-58442880
  hypo

SEQ ID NO: 191502 - DNA, 30 bp, Homo sapiens
  chr19:58448052-58448082
  hypo
ctggagacactaggcgtatgttaaattatc

SEQ ID NO: 191503 - DNA, 30 bp, Homo sapiens; identical to SEQ ID NO: 98464
  chr19:58457579-58457609
  hypo

SEQ ID NO: 191504 - DNA, 59 bp, Homo sapiens; identical to SEQ ID NO: 98465
  chr19:58465095-58465154
  hypo

SEQ ID NO: 191505 - DNA, 34 bp, Homo sapiens; identical to SEQ ID NO: 32977
  chr19:58472251-58472285
  hypo

SEQ ID NO: 191506 - DNA, 28 bp, Homo sapiens
  chr19:58483127-58483155
  hypo
cgcacccggcccagaataaaggcttttg

SEQ ID NO: 191507 - DNA, 45 bp, Homo sapiens; identical to SEQ ID NO: 98468
  chr19:58484261-58484306
  hypo

SEQ ID NO: 191508 - DNA, 29 bp, Homo sapiens
  chr19:58519550-58519579
  hypo
aagactccgtctaaataaataaataaata

SEQ ID NO: 191509 - DNA, 92 bp, Homo sapiens; identical to SEQ ID NO: 98470
  chr19:58524544-58524636
  hypo

SEQ ID NO: 191510 - DNA, 121 bp, Homo sapiens
  chr19:58544601-58544722
  hypo
ctcccgagttctgggattacaggcgtgagctatcgcgcccggcctccttgtttttcttgagtttacatataactgaggtttcttttttctttcttttttttgggggtggggggacggagtc

SEQ ID NO: 191511 - DNA, 22 bp, Homo sapiens
  chr19:58548346-58548368
  hypo
cggccacaaaaggttattttaa

SEQ ID NO: 191512 - DNA, 684 bp, Homo sapiens; identical to SEQ ID NO: 98472
  chr19:58551436-58552120
  hypo

SEQ ID NO: 191513 - DNA, 32 bp, Homo sapiens; identical to SEQ ID NO: 98473
  chr19:58555624-58555656
  hypo

SEQ ID NO: 191514 - DNA, 344 bp, Homo sapiens
  chr19:58556343-58556687
  hypo
gaacaagaagctggaggaaggcggccctgtgtacagcgcccccgcagagatggtggtgaagtcccgggggcagagagggtgctgggcgagctgaggcactactaccatggcttccgcctgctacggatccacaccaagatcgcagcacgcatgctctggcgcatcctcaactgccacaccctgacccgccaggcgcgcaggcagttgctccggttctgtgccgacctcttccgcctggtgccgttcctcctgttcgtggtggtgccgttcgtggagtttctgctgcctgttgctgtgaaactcttccccaacatgttgccatccacatccgagactcagtccat

SEQ ID NO: 191515 - DNA, 147 bp, Homo sapiens
  chr19:58556944-58557091
  hypo
tgctggagctacagcttcctgcgcttccagctcacgatgcggctgcgctccataaaggcagaggacaagctgtttgctgaggaaggggtggacagcctgaacgtcaaggagctgcaggcggcatgtcgggcacgaggcatgcgggcc

SEQ ID NO: 191516 - DNA, 39 bp, Homo sapiens
  chr19:58557380-58557419
  hypo
agctgcagaagcattcggaggtggcgaaggatgttgaac

SEQ ID NO: 191517 - DNA, 319 bp, Homo sapiens; identical to SEQ ID NO: 32981
  chr19:58557756-58558075
  hypo

SEQ ID NO: 191518 - DNA, 25 bp, Homo sapiens
  chr19:58561890-58561915
  hypo
ttcattttgttttgtttgagacggc

SEQ ID NO: 191519 - DNA, 185 bp, Homo sapiens; identical to SEQ ID NO: 98478
  chr19:58563695-58563880
  hypo

SEQ ID NO: 191520 - DNA, 737 bp, Homo sapiens; identical to SEQ ID NO: 98479
  chr19:58564631-58565368
  hypo

SEQ ID NO: 191521 - DNA, 30 bp, Homo sapiens
  chr19:58578540-58578570
  hypo
tcgaacaccaccggacgcacacaggagaga

SEQ ID NO: 191522 - DNA, 30 bp, Homo sapiens
  chr19:58578814-58578844
  hypo
aggcgagaagccctacgagtgcagtgagtg

SEQ ID NO: 191523 - DNA, 30 bp, Homo sapiens
  chr19:58579121-58579151
  hypo
ctcctgaccgagcatcggaggattcacaca

SEQ ID NO: 191524 - DNA, 26 bp, Homo sapiens
  chr19:58590371-58590397
  hypo
tcttcgattttgctagtcttaattat

SEQ ID NO: 191525 - DNA, 36 bp, Homo sapiens; identical to SEQ ID NO: 32983
  chr19:58593732-58593768
  hypo

SEQ ID NO: 191526 - DNA, 482 bp, Homo sapiens; identical to SEQ ID NO: 98482
  chr19:58595752-58596234
  hypo

SEQ ID NO: 191527 - DNA, 233 bp, Homo sapiens
  chr19:58596708-58596941
  hypo
gcaggcgcacccagcgctctcctgccgcctcccgccttctggaacaaggtcagagccctagcgtgagcgccccgcccagggccagggagaggaggacccagccgagcctcagctgccggaacagcgcacagggctccgggctctggatccccgcggggctcacggctgtttggaagcagcgctgtccctcccaggcagccctgcagcgcatgccccgcgcctgctgctgcaga

SEQ ID NO: 191528 - DNA, 366 bp, Homo sapiens; identical to SEQ ID NO: 98484
  chr19:58598367-58598733
  hypo

SEQ ID NO: 191529 - DNA, 43 bp, Homo sapiens; identical to SEQ ID NO: 98485
  chr19:58605133-58605176
  hypo

SEQ ID NO: 191530 - DNA, 30 bp, Homo sapiens
  chr19:58607030-58607060
  hypo
atgacgtggggaggacgggacaccctccgg

SEQ ID NO: 191531 - DNA, 30 bp, Homo sapiens
  chr19:58607451-58607481
  hypo
gggcaggtgcggcagcgtacatctataatc

SEQ ID NO: 191532 - DNA, 116 bp, Homo sapiens; identical to SEQ ID NO: 132346
  chr19:58609243-58609359
  hypo

SEQ ID NO: 191533 - DNA, 53 bp, Homo sapiens; identical to SEQ ID NO: 12690
  chr19:58609472-58609525
  hypo

SEQ ID NO: 191534 - DNA, 434 bp, Homo sapiens; identical to SEQ ID NO: 132348
  chr19:58609712-58610146
  hypo

SEQ ID NO: 191535 - DNA, 29 bp, Homo sapiens
  chr19:58623721-58623750
  hypo
aaaaacatactcaaggctgggcgtggtgg

SEQ ID NO: 191536 - DNA, 27 bp, Homo sapiens
  chr19:58628395-58628422
  hypo
aagcgcgtgctttaggggacatgtgag

SEQ ID NO: 191537 - DNA, 49 bp, Homo sapiens; identical to SEQ ID NO: 132349
  chr19:58629357-58629406
  hypo

SEQ ID NO: 191538 - DNA, 653 bp, Homo sapiens; identical to SEQ ID NO: 132350
  chr19:58661654-58662307
  hypo

SEQ ID NO: 191539 - DNA, 542 bp, Homo sapiens; identical to SEQ ID NO: 12693
  chr19:58665952-58666494
  hypo

SEQ ID NO: 191540 - DNA, 407 bp, Homo sapiens; identical to SEQ ID NO: 132352
  chr19:58666550-58666957
  hypo

SEQ ID NO: 191541 - DNA, 1036 bp, Homo sapiens; identical to SEQ ID NO: 132353
  chr19:58694196-58695232
  hypo

SEQ ID NO: 191542 - DNA, 157 bp, Homo sapiens; identical to SEQ ID NO: 98495
  chr19:58711830-58711987
  hypo

SEQ ID NO: 191543 - DNA, 817 bp, Homo sapiens
  chr19:58830533-58831350
  hypo
gccacaaggagtccacgctggggagggtgtactgccatgtagtgggtgggaagatacctttggcaagaacacgtgccttgtgagctatcagcagattcccaacaaaaggagaccctgtacgtgcgaagagtgtggcaaggcctttggacagagaagtcaccttgttcagcacaccagtgagaagctgtatgcatgccaggaatgtgggtgtaccttcagcaacaattcatctctagtcaagcactggcacgtccacacaggcgagaagccctacatgtgtggccactgtggcaagtgcttccgagagagctcatcccttgccaagcaccagcgtgtgcacacaggtgagaagccatacgtgtgtggtgagtgtggacgcaccttcagcgagagcacacaccttgtacagcactggtgattccacaccggggaaaagccatttgcctgccaagagcagcaaagcctttgctgacttctcggccctccttgcatgccacggaacctacacgggtgagaggccctacgagtgccgggtatgctgcaaggcattcagccccagcttgtccctggctgagcacatacgctgccacacgggagagaagctgtatgcgtgtcaggaatgtgggaaagctttcagccacagctcatccctcagcaagcaccagcaggtacacacaggtgagtggccctatgtgtgtgcagaatgtggaaaggccttcagccaggggtcctacctgacccagcacctcaagatccacagcggtgagaagccgtacatacgtggtgagtaaaggaagccattcggtgactcctcagc

SEQ ID NO: 191544 - DNA, 30 bp, Homo sapiens
  chr19:58855196-58855226
  hypo
gctcactgcaagctccgcctcccgtcaacc

SEQ ID NO: 191545 - DNA, 30 bp, Homo sapiens
  chr19:58855446-58855476
  hypo
aaatatggctggaggcggctgggcgcggtg

SEQ ID NO: 191546 - DNA, 196 bp, Homo sapiens; identical to SEQ ID NO: 132360
  chr19:58858560-58858756
  hypo

SEQ ID NO: 191547 - DNA, 27 bp, Homo sapiens
  chr19:58858901-58858928
  hypo
cgaaggtgacgtcggggatgggtccct

SEQ ID NO: 191548 - DNA, 30 bp, Homo sapiens; identical to SEQ ID NO: 12701
  chr19:58859150-58859180
  hypo

SEQ ID NO: 191549 - DNA, 30 bp, Homo sapiens; identical to SEQ ID NO: 98500
  chr19:58869409-58869439
  hypo

SEQ ID NO: 191550 - DNA, 158 bp, Homo sapiens; identical to SEQ ID NO: 98501
  chr19:58872590-58872748
  hypo

SEQ ID NO: 191551 - DNA, 333 bp, Homo sapiens; identical to SEQ ID NO: 132363
  chr19:58874183-58874516
  hypo

SEQ ID NO: 191552 - DNA, 121 bp, Homo sapiens; identical to SEQ ID NO: 33000
  chr19:58874822-58874943
  hypo

SEQ ID NO: 191553 - DNA, 119 bp, Homo sapiens; identical to SEQ ID NO: 33001
  chr19:58878555-58878674
  hypo

SEQ ID NO: 191554 - DNA, 30 bp, Homo sapiens; identical to SEQ ID NO: 98505
  chr19:58887171-58887201
  hypo

SEQ ID NO: 191555 - DNA, 30 bp, Homo sapiens; identical to SEQ ID NO: 98506
  chr19:58905964-58905994
  hypo

SEQ ID NO: 191556 - DNA, 61 bp, Homo sapiens; identical to SEQ ID NO: 56775
  chr19:58907575-58907636
  hypo

SEQ ID NO: 191557 - DNA, 33 bp, Homo sapiens; identical to SEQ ID NO: 33002
  chr19:58915037-58915070
  hypo

SEQ ID NO: 191558 - DNA, 32 bp, Homo sapiens; identical to SEQ ID NO: 33003
  chr19:58915309-58915341
  hypo

SEQ ID NO: 191559 - DNA, 72 bp, Homo sapiens; identical to SEQ ID NO: 56779
  chr19:58920315-58920387
  hypo

SEQ ID NO: 191560 - DNA, 201 bp, Homo sapiens; identical to SEQ ID NO: 132373
  chr19:58951199-58951400
  hypo

SEQ ID NO: 191561 - DNA, 554 bp, Homo sapiens; identical to SEQ ID NO: 12706
  chr19:58951525-58952079
  hypo

SEQ ID NO: 191562 - DNA, 145 bp, Homo sapiens
  chr19:58964116-58964261
  hypo
gagcagtcaggcgtgcggagttacagcttgagggtaaagaaaaccggctggggtgcctgaggctatcaggggaggagttcggcaggtggctgaataggagagggtggcagcaatgtgggaaagaaattgcgggagcgctgagatc

SEQ ID NO: 191563 - DNA, 30 bp, Homo sapiens; identical to SEQ ID NO: 98514
  chr19:58975114-58975144
  hypo

SEQ ID NO: 191564 - DNA, 30 bp, Homo sapiens
  chr19:58982492-58982522
  hypo
gacctggaggctgccggcggtcggggacat

SEQ ID NO: 191565 - DNA, 100 bp, Homo sapiens
  chr19:58990989-58991089
  hypo
gtgatgggccacatccgcaggaggagtgggggctgctggaccggtcacagaaggaactgtactgggatgcgatgctggagaagtacggcacagtggtctc

SEQ ID NO: 191566 - DNA, 30 bp, Homo sapiens
  chr19:58991368-58991398
  hypo
gcagaagcctgcgctcgggtgagtgcccca

SEQ ID NO: 191567 - DNA, 30 bp, Homo sapiens; identical to SEQ ID NO: 98515
  chr19:58991826-58991856
  hypo

SEQ ID NO: 191568 - DNA, 161 bp, Homo sapiens
  chr19:59003734-59003895
  hypo
caccatctgagccatcgctacagcatctgcctgtatttctcacatgcttacatgaaaggcattatttattcacttggacaacaaaggctgcttttcgtgagagtcactggtcctcccatgagggcatccaccgatacttcaagaatccttcctggggccgg

SEQ ID NO: 191569 - DNA, 30 bp, Homo sapiens; identical to SEQ ID NO: 98516
  chr19:59008279-59008309
  hypo

SEQ ID NO: 191570 - DNA, 526 bp, Homo sapiens; identical to SEQ ID NO: 132378
  chr19:59010486-59011012
  hypo

SEQ ID NO: 191571 - DNA, 30 bp, Homo sapiens; identical to SEQ ID NO: 98517
  chr19:59028505-59028535
  hypo

SEQ ID NO: 191572 - DNA, 30 bp, Homo sapiens; identical to SEQ ID NO: 33007
  chr19:59028749-59028779
  hypo

SEQ ID NO: 191573 - DNA, 30 bp, Homo sapiens
  chr19:59060344-59060374
  hypo
gcatctacaggtcccgctcaggtgagggcg

SEQ ID NO: 191574 - DNA, 30 bp, Homo sapiens; identical to SEQ ID NO: 98519
  chr19:59067545-59067575
  hypo

SEQ ID NO: 191575 - DNA, 150 bp, Homo sapiens; identical to SEQ ID NO: 98520
  chr20:276871-277021
  hypo

SEQ ID NO: 191576 - DNA, 44 bp, Homo sapiens
  chr20:304448-304492
  hypo
acaggtgtgagccaccgcgtcccgtctatcataagttttattga

SEQ ID NO: 191577 - DNA, 62 bp, Homo sapiens; identical to SEQ ID NO: 98521
  chr20:309114-309176
  hypo

SEQ ID NO: 191578 - DNA, 23 bp, Homo sapiens
  chr20:338667-338690
  hypo
gcgaaactccatctcaaaaaaat

SEQ ID NO: 191579 - DNA, 243 bp, Homo sapiens; identical to SEQ ID NO: 98523
  chr20:371969-372212
  hypo

SEQ ID NO: 191580 - DNA, 30 bp, Homo sapiens; identical to SEQ ID NO: 98524
  chr20:376991-377021
  hypo

SEQ ID NO: 191581 - DNA, 30 bp, Homo sapiens; identical to SEQ ID NO: 33011
  chr20:377335-377365
  hypo

SEQ ID NO: 191582 - DNA, 30 bp, Homo sapiens; identical to SEQ ID NO: 33012
  chr20:398167-398197
  hypo

SEQ ID NO: 191583 - DNA, 299 bp, Homo sapiens; identical to SEQ ID NO: 98527
  chr20:399990-400289
  hypo

SEQ ID NO: 191584 - DNA, 267 bp, Homo sapiens
  chr20:400916-401183
  hypo
gccttagccctaccccgcccccatcgtgacacacgcactaatgacacagacattgatccccgagtgctccccattctgatctcacccctggccccacctgcattccccttggacccggtgctgcccctggccaccccactcctgttcccgtctcagctcctcggcttcgtcacttccccacccctgacgttgagtggctccaccagccctggcccgggccctgccctgctacctgactcaccactcagaccccggcccccttcctta

SEQ ID NO: 191585 - DNA, 555 bp, Homo sapiens; identical to SEQ ID NO: 98529
  chr20:401566-402121
  hypo

SEQ ID NO: 191586 - DNA, 117 bp, Homo sapiens; identical to SEQ ID NO: 33015
  chr20:413053-413170
  hypo

SEQ ID NO: 191587 - DNA, 44 bp, Homo sapiens; identical to SEQ ID NO: 98531
  chr20:417444-417488
  hypo

SEQ ID NO: 191588 - DNA, 150 bp, Homo sapiens; identical to SEQ ID NO: 33016
  chr20:488506-488656
  hypo

SEQ ID NO: 191589 - DNA, 24 bp, Homo sapiens
  chr20:491107-491131
  hypo
ctcgcccagcccaagaatatgtct

SEQ ID NO: 191590 - DNA, 30 bp, Homo sapiens; identical to SEQ ID NO: 98534
  chr20:516099-516129
  hypo

SEQ ID NO: 191591 - DNA, 26 bp, Homo sapiens
  chr20:539493-539519
  hypo
gagtgagccaccgcgcccggccatgc

SEQ ID NO: 191592 - DNA, 35 bp, Homo sapiens
  chr20:540394-540429
  hypo
agcatgggccgggcgcggtggctcacgcctgtaat

SEQ ID NO: 191593 - DNA, 295 bp, Homo sapiens; identical to SEQ ID NO: 56805
  chr20:590303-590598
  hypo

SEQ ID NO: 191594 - DNA, 107 bp, Homo sapiens; identical to SEQ ID NO: 132411
  chr20:590967-591074
  hypo

SEQ ID NO: 191595 - DNA, 30 bp, Homo sapiens
  chr20:631481-631511
  hypo
cgggtactggaggcacgatggtggatggcc

SEQ ID NO: 191596 - DNA, 92 bp, Homo sapiens; identical to SEQ ID NO: 98537
  chr20:631994-632086
  hypo

SEQ ID NO: 191597 - DNA, 273 bp, Homo sapiens; identical to SEQ ID NO: 132412
  chr20:644552-644825
  hypo

SEQ ID NO: 191598 - DNA, 69 bp, Homo sapiens
  chr20:688356-688425
  hypo
gggcattgccgaacacgcgtcctttttttcttttcttctttcattattatgatcgggcccataaatctt

SEQ ID NO: 191599 - DNA, 361 bp, Homo sapiens; identical to SEQ ID NO: 56809
  chr20:708540-708901
  hypo

SEQ ID NO: 191600 - DNA, 474 bp, Homo sapiens; identical to SEQ ID NO: 56810
  chr20:708944-709418
  hypo

SEQ ID NO: 191601 - DNA, 362 bp, Homo sapiens
  chr20:745877-746239
  hypo
gtacagggcttggtacgctgtctgatatctcagtgacattgacgcaggtagtgagaccggagccctgggcaagagccaccagggcgggcaagaggccgctgagtccttcacccacaaagaaggtggtgaggtagtaggtgggcagccggctcatgaacggcaggaaggtcactgaagaggtgcagtccaccagggccaggaagaaggtgaggaccaagaaggcgatgctgtggtggccgtccagcacccaggaggtcatattccagaggaaggcaaagatgatgcaggtgacggttcccacgcccagcagggtgaagatgatgggcacttcggaaaggcagctgggccggaagtgatggagc

SEQ ID NO: 191602 - DNA, 138 bp, Homo sapiens
  chr20:773016-773154
  hypo
ctccgccccctgtggcggcctcagccgggagaaatcagaacccacccagtgcgaggaacaacccgagctgtcagcaacaggggggaagaaaactggccggcaacctagcttaaagaatcctcacatactgcagcgacg

SEQ ID NO: 191603 - DNA, 41 bp, Homo sapiens
  chr20:799688-799729
  hypo
tgccgggatcacaggcgtgagccaccgcgccgggcccagct

SEQ ID NO: 191604 - DNA, 25 bp, Homo sapiens
  chr20:807352-807377
  hypo
attttacaggcgaggaagctgaagc

SEQ ID NO: 191605 - DNA, 39 bp, Homo sapiens
  chr20:923176-923215
  hypo
tggaattacaggtgtgagccaccgcgtccggccgaaacc

SEQ ID NO: 191606 - DNA, 214 bp, Homo sapiens; identical to SEQ ID NO: 98543
  chr20:926438-926652
  hypo

SEQ ID NO: 191607 - DNA, 30 bp, Homo sapiens
  chr20:933742-933772
  hypo
tttcacttggcaattcgtctcagggactgc

SEQ ID NO: 191608 - DNA, 41 bp, Homo sapiens
  chr20:1094602-1094643
  hypo
ggattacaggcgtgagccaccgcgcccggcctgggttacgg

SEQ ID NO: 191609 - DNA, 30 bp, Homo sapiens
  chr20:1169672-1169702
  hypo
ggagaaactgacaaacgtgatgacctcagc

SEQ ID NO: 191610 - DNA, 30 bp, Homo sapiens
  chr20:1255585-1255615
  hypo
ccctttcagaagtggcggactttggacgtg

SEQ ID NO: 191611 - DNA, 30 bp, Homo sapiens
  chr20:1256003-1256033
  hypo
tgtctctatgggcctcgattgcttttctga

SEQ ID NO: 191612 - DNA, 37 bp, Homo sapiens; identical to SEQ ID NO: 33021
  chr20:1276609-1276646
  hypo

SEQ ID NO: 191613 - DNA, 30 bp, Homo sapiens; identical to SEQ ID NO: 98545
  chr20:1276986-1277016
  hypo

SEQ ID NO: 191614 - DNA, 155 bp, Homo sapiens
  chr20:1277695-1277850
  hypo
cactttgggccgcagcggcctggcagtgttcgcccagtgtccgcagctgcccgccagccagaacgagcacctgcctcttcttcctgcctccaggcgcacctctccacctgtgagcgtgcgggatgcctacggcacctcttcgctcagcagcagca

SEQ ID NO: 191615 - DNA, 30 bp, Homo sapiens; identical to SEQ ID NO: 33022
  chr20:1286615-1286645
  hypo

SEQ ID NO: 191616 - DNA, 159 bp, Homo sapiens; identical to SEQ ID NO: 98547
  chr20:1323451-1323610
  hypo

SEQ ID NO: 191617 - DNA, 30 bp, Homo sapiens
  chr20:1419983-1420013
  hypo
gtgtttgacagcgcccggcacatggtaagg

SEQ ID NO: 191618 - DNA, 30 bp, Homo sapiens
  chr20:1420343-1420373
  hypo
ctgtccctccctgcccgacccaatcgtccc

SEQ ID NO: 191619 - DNA, 30 bp, Homo sapiens; identical to SEQ ID NO: 33024
  chr20:1425545-1425575
  hypo

SEQ ID NO: 191620 - DNA, 30 bp, Homo sapiens; identical to SEQ ID NO: 33025
  chr20:1426332-1426362
  hypo

SEQ ID NO: 191621 - DNA, 193 bp, Homo sapiens; identical to SEQ ID NO: 33026
  chr20:1435436-1435629
  hypo

SEQ ID NO: 191622 - DNA, 985 bp, Homo sapiens; identical to SEQ ID NO: 56820
  chr20:1783320-1784305
  hypo

SEQ ID NO: 191623 - DNA, 249 bp, Homo sapiens
  chr20:2104363-2104612
  hypo
ggtaaattttaaaatcgttttaggtgagaagttgggaccgccagtactaaataggtccactctatgacttcctggcccagctctcaggatggccaggaactagctcctgccttacaggactgccctcccttgcctgtacctggtgcctggctgaggagtgtggcagcctgaggggttaggctgtgaagaagggcagcagcgccaaagatgaccaaaacggcagtgattcatggtcgtccctgggctgag

SEQ ID NO: 191624 - DNA, 117 bp, Homo sapiens
  chr20:2113455-2113572
  hypo
tacttactagctgggcggctttgggcaagtgatctaccttctctgggcccccatttccttgtctggtcagtgcagtaagtgttgctcactgtaggctgtgtccggcgcagttcctag

SEQ ID NO: 191625 - DNA, 31 bp, Homo sapiens; identical to SEQ ID NO: 33028
  chr20:2143498-2143529
  hypo

SEQ ID NO: 191626 - DNA, 31 bp, Homo sapiens; identical to SEQ ID NO: 98554
  chr20:2150415-2150446
  hypo

SEQ ID NO: 191627 - DNA, 850 bp, Homo sapiens; identical to SEQ ID NO: 56823
  chr20:2187673-2188523
  hypo

SEQ ID NO: 191628 - DNA, 305 bp, Homo sapiens; identical to SEQ ID NO: 33030
  chr20:2308757-2309062
  hypo

SEQ ID NO: 191629 - DNA, 125 bp, Homo sapiens
  chr20:2321101-2321226
  hypo
gaggggtcccgggtccgttttgatatcctgccctcccggagtggcaccaagcaactgctcgccgacttctcctgcaacaagttccctgcaatcaaggccatgttgtccatcgatgtagccgaatg

SEQ ID NO: 191630 - DNA, 30 bp, Homo sapiens; identical to SEQ ID NO: 33031
  chr20:2321545-2321575
  hypo

SEQ ID NO: 191631 - DNA, 256 bp, Homo sapiens
  chr20:2397895-2398151
  hypo
aggtgtacagcaaggcggtgaacaggctgttcggcgtggaagcctctggaaggagaatctggatccgcagggctgggggtcgctgtctctggcgtgacgacctcctggagcctgccaccaagcccagcatcgctggcaagttcaaggtgctagagcctcccatgctgggccacgacctgagactggccctgtgcttggccaacctcacctcccgggcccagcgggtgagggtcaacctgagcggtgccaccatcct

SEQ ID NO: 191632 - DNA, 278 bp, Homo sapiens; identical to SEQ ID NO: 56824
  chr20:2444390-2444668
  hypo

SEQ ID NO: 191633 - DNA, 195 bp, Homo sapiens; identical to SEQ ID NO: 132444
  chr20:2489031-2489226
  hypo

SEQ ID NO: 191634 - DNA, 30 bp, Homo sapiens; identical to SEQ ID NO: 12726
  chr20:2489270-2489300
  hypo

SEQ ID NO: 191635 - DNA, 107 bp, Homo sapiens
  chr20:2636505-2636612
  hypo
gggagcagggctgtcgtgcaactgggcaggtcagcagttcatttctctgactgcttccttgactctctctccaggtaggtgcacgtctcatcgcacatgctggcagc

SEQ ID NO: 191636 - DNA, 28 bp, Homo sapiens
  chr20:2645502-2645530
  hypo
ctggacaacatagggagacctcgactct

SEQ ID NO: 191637 - DNA, 28 bp, Homo sapiens
  chr20:2646009-2646037
  hypo
cagtcacgattttaggtgtgtacaattg

SEQ ID NO: 191638 - DNA, 88 bp, Homo sapiens; identical to SEQ ID NO: 132456
  chr20:2674066-2674154
  hypo

SEQ ID NO: 191639 - DNA, 22 bp, Homo sapiens
  chr20:2674696-2674718
  hypo
cgggctgtctatggctctgaga

SEQ ID NO: 191640 - DNA, 208 bp, Homo sapiens; identical to SEQ ID NO: 98565
  chr20:2739579-2739787
  hypo

SEQ ID NO: 191641 - DNA, 31 bp, Homo sapiens; identical to SEQ ID NO: 33035
  chr20:2751260-2751291
  hypo

SEQ ID NO: 191642 - DNA, 220 bp, Homo sapiens
  chr20:2797287-2797507
  hypo
aggcatggctgggtgcgctggtgggtgagccacatgcccccgagctggatccagtggtggagcacctcgaactggcggcaaccgctgcagcgcctgctgtggggtctggaggggatactctacctgctgctggcactgatgttgtgccatgcactcttcaccactggctcccacctgctgagctccttgtggcctgtcgtggccgcggtgtggcgccacc

SEQ ID NO: 191643 - DNA, 30 bp, Homo sapiens; identical to SEQ ID NO: 98567
  chr20:2820172-2820202
  hypo

SEQ ID NO: 191644 - DNA, 570 bp, Homo sapiens; identical to SEQ ID NO: 132468
  chr20:2820434-2821004
  hypo

SEQ ID NO: 191645 - DNA, 30 bp, Homo sapiens; identical to SEQ ID NO: 98569
  chr20:2843510-2843540
  hypo

SEQ ID NO: 191646 - DNA, 32 bp, Homo sapiens
  chr20:2907824-2907856
  hypo
attacagtcgtgagtgccgcgcccacttaata

SEQ ID NO: 191647 - DNA, 179 bp, Homo sapiens; identical to SEQ ID NO: 33037
  chr20:2939674-2939853
  hypo

SEQ ID NO: 191648 - DNA, 130 bp, Homo sapiens; identical to SEQ ID NO: 98571
  chr20:3003331-3003461
  hypo

SEQ ID NO: 191649 - DNA, 69 bp, Homo sapiens
  chr20:3017787-3017856
  hypo
gctctgttgcagcgccggggcaggaaggacggggaccttctgtgccctgagcaccgtcctggagcgtgt

SEQ ID NO: 191650 - DNA, 30 bp, Homo sapiens; identical to SEQ ID NO: 33038
  chr20:3019131-3019161
  hypo

SEQ ID NO: 191651 - DNA, 426 bp, Homo sapiens; identical to SEQ ID NO: 132476
  chr20:3063059-3063485
  hypo

SEQ ID NO: 191652 - DNA, 30 bp, Homo sapiens; identical to SEQ ID NO: 132477
  chr20:3063751-3063781
  hypo

SEQ ID NO: 191653 - DNA, 30 bp, Homo sapiens; identical to SEQ ID NO: 98573
  chr20:3066628-3066658
  hypo

SEQ ID NO: 191654 - DNA, 106 bp, Homo sapiens; identical to SEQ ID NO: 132478
  chr20:3073285-3073391
  hypo

SEQ ID NO: 191655 - DNA, 359 bp, Homo sapiens; identical to SEQ ID NO: 56847
  chr20:3073560-3073919
  hypo

SEQ ID NO: 191656 - DNA, 30 bp, Homo sapiens
  chr20:3089034-3089064
  hypo
tgagccaccatgcccggccatgctggggct

SEQ ID NO: 191657 - DNA, 46 bp, Homo sapiens; identical to SEQ ID NO: 98576
  chr20:3109207-3109253
  hypo

SEQ ID NO: 191658 - DNA, 21 bp, Homo sapiens
  chr20:3141176-3141197
  hypo
tgcccaggctagtctcgaact

SEQ ID NO: 191659 - DNA, 301 bp, Homo sapiens; identical to SEQ ID NO: 56849
  chr20:3154655-3154956
  hypo

SEQ ID NO: 191660 - DNA, 31 bp, Homo sapiens; identical to SEQ ID NO: 33042
  chr20:3175799-3175830
  hypo

SEQ ID NO: 191661 - DNA, 97 bp, Homo sapiens
  chr20:3199942-3200039
  hypo
ccagggttcaagcatagaatgttaattcttggccaggtttggtgatttacacctgtaatcctagcactttgcgaggccccagcgggaggctttcttg

SEQ ID NO: 191662 - DNA, 424 bp, Homo sapiens
  chr20:3202085-3202509
  hypo
gcatctggcttgtccacggagttcagggtacttagcttcctattaggagaaaacgttttctgtctatctttctttctgtctatctttcaaagtagcctcattgttcttcagtgatgtcccaatttgtcccgggtgtggctggcgagggcgcgtggccccggaggtgctggtggtcctgtgggtccatgcctcctccctgtgtgtgagggaagagctgccccgctctgctttttattgtattcagcaaacatttgcaggtgctgtaggggccttgcaactacattttgcgtaagttgggtcaaatcaaattcacagactcaccaaactcatactggccactgccctcctcgtgcttgtcctctggacccagttacacacctgtcccccctttcctgtggcagggccggatcgtggcacccagagg

SEQ ID NO: 191663 - DNA, 33 bp, Homo sapiens
  chr20:3203125-3203158
  hypo
attacaggcgtgagccaccgcgcctggccacat

SEQ ID NO: 191664 - DNA, 30 bp, Homo sapiens; identical to SEQ ID NO: 33044
  chr20:3204883-3204913
  hypo

SEQ ID NO: 191665 - DNA, 136 bp, Homo sapiens; identical to SEQ ID NO: 98581
  chr20:3208370-3208506
  hypo

SEQ ID NO: 191666 - DNA, 42 bp, Homo sapiens; identical to SEQ ID NO: 33045
  chr20:3208778-3208820
  hypo

SEQ ID NO: 191667 - DNA, 117 bp, Homo sapiens
  chr20:3209205-3209322
  hypo
gagggaggtgagcgcgatgtagaggaagaggccatagagcacgggcttggggatccactgaagcgggaccggcagcagcaacagggacaggcccaccaggacgctggcgcccagcga

SEQ ID NO: 191668 - DNA, 30 bp, Homo sapiens
  chr20:3209653-3209683
  hypo
cagcctgcagcagacgggcactcgtggaca

SEQ ID NO: 191669 - DNA, 30 bp, Homo sapiens; identical to SEQ ID NO: 98583
  chr20:3209930-3209960
  hypo

SEQ ID NO: 191670 - DNA, 76 bp, Homo sapiens
  chr20:3211427-3211503
  hypo
tgcccagagaagagcgcgtagagcaggcccccgatgctctgcccggctatggtcttctgcacgtctgtgggggtgc

SEQ ID NO: 191671 - DNA, 35 bp, Homo sapiens; identical to SEQ ID NO: 98585
  chr20:3211813-3211848
  hypo

SEQ ID NO: 191672 - DNA, 30 bp, Homo sapiens; identical to SEQ ID NO: 98586
  chr20:3212162-3212192
  hypo

SEQ ID NO: 191673 - DNA, 155 bp, Homo sapiens; identical to SEQ ID NO: 98587
  chr20:3214741-3214896
  hypo

SEQ ID NO: 191674 - DNA, 941 bp, Homo sapiens; identical to SEQ ID NO: 12741
  chr20:3220009-3220950
  hypo

SEQ ID NO: 191675 - DNA, 372 bp, Homo sapiens; identical to SEQ ID NO: 132487
  chr20:3229107-3229479
  hypo

SEQ ID NO: 191676 - DNA, 291 bp, Homo sapiens; identical to SEQ ID NO: 132488
  chr20:3229526-3229817
  hypo

SEQ ID NO: 191677 - DNA, 22 bp, Homo sapiens
  chr20:3399653-3399675
  hypo
agaattcggtcctggcgcagtg

SEQ ID NO: 191678 - DNA, 437 bp, Homo sapiens; identical to SEQ ID NO: 12744
  chr20:3451348-3451785
  hypo

SEQ ID NO: 191679 - DNA, 30 bp, Homo sapiens; identical to SEQ ID NO: 98592
  chr20:3576319-3576349
  hypo

SEQ ID NO: 191680 - DNA, 30 bp, Homo sapiens; identical to SEQ ID NO: 98593
  chr20:3594928-3594958
  hypo

SEQ ID NO: 191681 - DNA, 30 bp, Homo sapiens; identical to SEQ ID NO: 12746
  chr20:3632574-3632604
  hypo

SEQ ID NO: 191682 - DNA, 42 bp, Homo sapiens
  chr20:3635385-3635427
  hypo
agcagagcagcttcccgagacatcctccgatccagggcttcc

SEQ ID NO: 191683 - DNA, 222 bp, Homo sapiens
  chr20:3635665-3635887
  hypo
cttgcacctaatcaccgggctccacaccaggatggacattcatgagccgtgaagtttccagtaataaatccacagatgcttccagcacctgccttttcgcatcacctccactcccagccacctgccaggcaacaggtaacagagacccagtcacaggagggcagtgtgggggcaggactgcagtctcccaaagcccatgcacaaaaccgacagcgccctggc

SEQ ID NO: 191684 - DNA, 210 bp, Homo sapiens
  chr20:3637822-3638032
  hypo
ctcggcttcctccagttttttttttttttcaatgcttatattttactctaattaactgagtcaaaaatggagaatagttgaatacactttcatgtaaggcgaatcatttagccgatacttaactctgcatttgggctaccatgccgctgtggttagcggggcaaggtgatgagccctgtctcaacacacacaccccgcctctccccagcc

SEQ ID NO: 191685 - DNA, 237 bp, Homo sapiens; identical to SEQ ID NO: 56860
  chr20:3641310-3641547
  hypo

SEQ ID NO: 191686 - DNA, 190 bp, Homo sapiens; identical to SEQ ID NO: 132495
  chr20:3641773-3641963
  hypo

SEQ ID NO: 191687 - DNA, 30 bp, Homo sapiens; identical to SEQ ID NO: 98597
  chr20:3728771-3728801
  hypo

SEQ ID NO: 191688 - DNA, 338 bp, Homo sapiens
  chr20:3763165-3763503
  hypo
ggcacctgaccggaccgctgcctggtttctcatggctttacctaccttataggggctttgtgagcatctaaagcatttagcacagagcaggggccctattagtatcagctggtactatcattaatgagacagtctcagttccagcaagaactgttctttttcgcaggagacaaatggaagtaattcgtcttgttggaacctgcggtgaggtagctgggttaaacaggagcacctgggcaagcaggcaatgctcctcctgctcactcgagagcaggtggggcttccttgtggccttctggtctccaactccagggctcggatttcgggagggaaggtgg

SEQ ID NO: 191689 - DNA, 378 bp, Homo sapiens
  chr20:3781112-3781490
  hypo
cagtttgccatcagacgcttccagtctatgccggtgagtgtcttcgaggcctgactgaggcttaggcatgctagccaggcatggggtagatgagcaggatgcattcagggatcacctcccagctgggtgtccccaggcaggctgtaggagatggggtttcagaggtaggtaggtaagtgggaggagctggaggagaggtggagaaggtagggcctgggctcgtgccggaggaatgcagccttcattcctctgcctgccgccctgcctggctctctaggtgaggctgctgggccacagccccgtgcttcggaacatcaccaactcccaggcgcccgacggccggaggaagagcgaggcgggcagtggagctgccagcag

SEQ ID NO: 191690 - DNA, 30 bp, Homo sapiens
  chr20:3786475-3786505
  hypo
ggatggccgtggatgcgcagtgccttgcat

SEQ ID NO: 191691 - DNA, 37 bp, Homo sapiens
  chr20:3797903-3797940
  hypo
tacaagcgtgagccactgcgcccggctatcccattct

SEQ ID NO: 191692 - DNA, 37 bp, Homo sapiens
  chr20:3820917-3820954
  hypo
agtcgtcccactgcactccagtcgctgcactctcgcc

SEQ ID NO: 191693 - DNA, 442 bp, Homo sapiens
  chr20:3838302-3838744
  hypo
acactctcagggaaccgggacaccctctggcatctcttcaatacccttcagcggcggcccggctgggtggagtacttcattgcggcactgaggggctgtgagctagttgatctcgcggacgaagtggcctctgtctaccagagctaccagcctcgtgagcgtcctgcccttgccctcctggacccccagcctgctccctggcctccgctctccttttctctctccctgtacttcctgcctttctctgtcatcctctttcttgtcactgtgaagcgatgaataaacctgggtgtagatccaggctgagccacttaccagctgtgtccctttggccaagtcccttaatttccctgagcctcaggcctctcttctgtaaaatgaagctcatggcagcatctgccgcggggagctgcagtgggtgatactgcgggacgatgcgtgt

SEQ ID NO: 191694 - DNA, 121 bp, Homo sapiens
  chr20:3857968-3858089
  hypo
tcacgatcacagcacttccaaaaaaaaaaaaaaaaagacctgactccagtggactgaaactcatcaaataggcttttaaaatccatgagttggccaggcgcggtggctcacgcctgtaatc

SEQ ID NO: 191695 - DNA, 150 bp, Homo sapiens; identical to SEQ ID NO: 98603
  chr20:3909804-3909954
  hypo

SEQ ID NO: 191696 - DNA, 30 bp, Homo sapiens
  chr20:3915591-3915621
  hypo
atgtgcctcaaactcgggtcccattaagta

SEQ ID NO: 191697 - DNA, 31 bp, Homo sapiens
  chr20:4037449-4037480
  hypo
aaagtgtttggattaccggtgtgagccactg

SEQ ID NO: 191698 - DNA, 96 bp, Homo sapiens
  chr20:4085051-4085147
  hypo
tcaaaactcatgttgtagaggcgcaaaagccattcggcaccctttcatgtttttgttgtataaattctttcagtaaattttggattcccggctggg

SEQ ID NO: 191699 - DNA, 980 bp, Homo sapiens; identical to SEQ ID NO: 132511
  chr20:4129264-4130244
  hypo

SEQ ID NO: 191700 - DNA, 30 bp, Homo sapiens; identical to SEQ ID NO: 98606
  chr20:4133638-4133668
  hypo

SEQ ID NO: 191701 - DNA, 30 bp, Homo sapiens; identical to SEQ ID NO: 98607
  chr20:4168217-4168247
  hypo

SEQ ID NO: 191702 - DNA, 219 bp, Homo sapiens
  chr20:4270512-4270731
  hypo
ttggctgccctccctcggaagtactttcttggagacctggaaagggcctttcagtttatggatcccctgactcactttacaaatgagggagcagagttccattaaagtgaagagacttgctagaaagagtgggagcccagcaagagccccagatcctgcccgttcagcgcgttttgtgagatcacttctttctccagcaggggacgccagtcagtagct

SEQ ID NO: 191703 - DNA, 30 bp, Homo sapiens; identical to SEQ ID NO: 33055
  chr20:4665554-4665584
  hypo

SEQ ID NO: 191704 - DNA, 107 bp, Homo sapiens
  chr20:4786434-4786541
  hypo
tttggggaaagggtgtgctgccggatgaaacgtggggtgacaggcagagtcctggtgacgcacaggctgctggcgaggaccgcaacgtaggcagaggtgccaccttc

SEQ ID NO: 191705 - DNA, 1406 bp, Homo sapiens; identical to SEQ ID NO: 56872
  chr20:4803015-4804421
  hypo

SEQ ID NO: 191706 - DNA, 31 bp, Homo sapiens; identical to SEQ ID NO: 98611
  chr20:4865129-4865160
  hypo

SEQ ID NO: 191707 - DNA, 147 bp, Homo sapiens; identical to SEQ ID NO: 98612
  chr20:4869815-4869962
  hypo

SEQ ID NO: 191708 - DNA, 218 bp, Homo sapiens; identical to SEQ ID NO: 98613
  chr20:4951347-4951565
  hypo

SEQ ID NO: 191709 - DNA, 30 bp, Homo sapiens
  chr20:4966659-4966689
  hypo
atgcccacagaatctcgtctggtttctttt

SEQ ID NO: 191710 - DNA, 106 bp, Homo sapiens; identical to SEQ ID NO: 33057
  chr20:4966923-4967029
  hypo

SEQ ID NO: 191711 - DNA, 30 bp, Homo sapiens
  chr20:4967716-4967746
  hypo
gctgcaggtgggcagcgtggacatgcaggc

SEQ ID NO: 191712 - DNA, 36 bp, Homo sapiens
  chr20:4968206-4968242
  hypo
ctatgtggccgggcgcggtggctcacgcctataatc

SEQ ID NO: 191713 - DNA, 30 bp, Homo sapiens; identical to SEQ ID NO: 33058
  chr20:4990305-4990335
  hypo

SEQ ID NO: 191714 - DNA, 54 bp, Homo sapiens; identical to SEQ ID NO: 33059
  chr20:5072893-5072947
  hypo

SEQ ID NO: 191715 - DNA, 18 bp, Homo sapiens
  chr20:5135599-5135617
  hypo
ttccgattctgcttagag

SEQ ID NO: 191716 - DNA, 47 bp, Homo sapiens; identical to SEQ ID NO: 33060
  chr20:5178250-5178297
  hypo

SEQ ID NO: 191717 - DNA, 30 bp, Homo sapiens
  chr20:5273539-5273569
  hypo
tcttgattatcctggcggcggggcaggatt

SEQ ID NO: 191718 - DNA, 790 bp, Homo sapiens; identical to SEQ ID NO: 12758
  chr20:5296191-5296981
  hypo

SEQ ID NO: 191719 - DNA, 42 bp, Homo sapiens; identical to SEQ ID NO: 12759
  chr20:5297005-5297047
  hypo

SEQ ID NO: 191720 - DNA, 193 bp, Homo sapiens; identical to SEQ ID NO: 12760
  chr20:5297225-5297418
  hypo

SEQ ID NO: 191721 - DNA, 168 bp, Homo sapiens; identical to SEQ ID NO: 12761
  chr20:5297672-5297840
  hypo

SEQ ID NO: 191722 - DNA, 30 bp, Homo sapiens; identical to SEQ ID NO: 98623
  chr20:5565428-5565458
  hypo

SEQ ID NO: 191723 - DNA, 38 bp, Homo sapiens
  chr20:5593412-5593450
  hypo
tacttgggtgacagctagactctcgcaaaaacaacaac

SEQ ID NO: 191724 - DNA, 38 bp, Homo sapiens; identical to SEQ ID NO: 98624
  chr20:5610248-5610286
  hypo

SEQ ID NO: 191725 - DNA, 175 bp, Homo sapiens
  chr20:5610575-5610750
  hypo
cttagcaatacagttcggaagatagctcaaatgcttggtacacgtatctcctctcaacttcaagttcactgtcctcagcctggggacttgaaattggccatcatgggaatcagaagccagcagaaaacaccattcatcagggctatcctccttggagagccggttgttcgatatt

SEQ ID NO: 191726 - DNA, 36 bp, Homo sapiens
  chr20:5649289-5649325
  hypo
gagaacctgcccaggcgagcccgctggaggatgaga

SEQ ID NO: 191727 - DNA, 29 bp, Homo sapiens
  chr20:5651213-5651242
  hypo
gaaagttgccgggcgcggtggctcatgcc

SEQ ID NO: 191728 - DNA, 28 bp, Homo sapiens
  chr20:5729110-5729138
  hypo
ttgcagggccgggtgcggtggctcatgg

SEQ ID NO: 191729 - DNA, 30 bp, Homo sapiens
  chr20:5732409-5732439
  hypo
tttagtaagtgatcccgaggcagttgggtt

SEQ ID NO: 191730 - DNA, 22 bp, Homo sapiens
  chr20:5732772-5732794
  hypo
ggctcacacctgtaatctcaac

SEQ ID NO: 191731 - DNA, 181 bp, Homo sapiens; identical to SEQ ID NO: 33067
  chr20:5734497-5734678
  hypo

SEQ ID NO: 191732 - DNA, 197 bp, Homo sapiens; identical to SEQ ID NO: 98628
  chr20:5762407-5762604
  hypo

SEQ ID NO: 191733 - DNA, 93 bp, Homo sapiens; identical to SEQ ID NO: 33069
  chr20:5765407-5765500
  hypo

SEQ ID NO: 191734 - DNA, 19 bp, Homo sapiens
  chr20:5766163-5766182
  hypo
aggcacgatgtctcacgcc

SEQ ID NO: 191735 - DNA, 36 bp, Homo sapiens; identical to SEQ ID NO: 33071
  chr20:5801859-5801895
  hypo

SEQ ID NO: 191736 - DNA, 19 bp, Homo sapiens
  chr20:5812594-5812613
  hypo
ttttcatttctttctttga

SEQ ID NO: 191737 - DNA, 138 bp, Homo sapiens; identical to SEQ ID NO: 98633
  chr20:5812852-5812990
  hypo

SEQ ID NO: 191738 - DNA, 26 bp, Homo sapiens
  chr20:5819405-5819431
  hypo
ggagcgagactctgtctcaaaaataa

SEQ ID NO: 191739 - DNA, 757 bp, Homo sapiens; identical to SEQ ID NO: 132528
  chr20:5891857-5892614
  hypo

SEQ ID NO: 191740 - DNA, 30 bp, Homo sapiens; identical to SEQ ID NO: 98636
  chr20:5918825-5918855
  hypo

SEQ ID NO: 191741 - DNA, 91 bp, Homo sapiens; identical to SEQ ID NO: 98637
  chr20:5934378-5934469
  hypo

SEQ ID NO: 191742 - DNA, 30 bp, Homo sapiens
  chr20:5996130-5996160
  hypo
ttccaggtaagaacgcgtcatgcgtacttt

SEQ ID NO: 191743 - DNA, 30 bp, Homo sapiens; identical to SEQ ID NO: 33073
  chr20:6019325-6019355
  hypo

SEQ ID NO: 191744 - DNA, 155 bp, Homo sapiens; identical to SEQ ID NO: 98639
  chr20:6021569-6021724
  hypo

SEQ ID NO: 191745 - DNA, 31 bp, Homo sapiens; identical to SEQ ID NO: 33075
  chr20:6022361-6022392
  hypo

SEQ ID NO: 191746 - DNA, 279 bp, Homo sapiens
  chr20:6022707-6022986
  hypo
gggctgcgctgggcgcgacggtggtaccctgtgcgtaggtggagcggttgaagcaaggtgggtgtgaagccccgagagtggtgctttggtcggactggcacactccgggcagctgggagagtgacagggaggctgagaaggggccgctggatcccgcagctggcgcgcacatagtgtctgctgccctggaggggaggccaaccagttagaagacgtctggcttcagggacacttctgcgcagagctttgaatcctcattgccgacgtcaccccctgcca

SEQ ID NO: 191747 - DNA, 31 bp, Homo sapiens; identical to SEQ ID NO: 33077
  chr20:6023267-6023298
  hypo

SEQ ID NO: 191748 - DNA, 121 bp, Homo sapiens
  chr20:6302506-6302627
  hypo
aaataacaatttcctggacacatatcagccaaactaaagagtaacaaccaaagtaaacttgtaggtgtgagactgaagttttgttgttgctttttttttttttttgagacggagtcttgct

SEQ ID NO: 191749 - DNA, 24 bp, Homo sapiens
  chr20:6302866-6302890
  hypo
ggcgtgagccactgctcccagcct

SEQ ID NO: 191750 - DNA, 30 bp, Homo sapiens; identical to SEQ ID NO: 56886
  chr20:6404265-6404295
  hypo

SEQ ID NO: 191751 - DNA, 30 bp, Homo sapiens
  chr20:6430247-6430277
  hypo
tgtgtaaagtggtaacgatagtactttcct

SEQ ID NO: 191752 - DNA, 30 bp, Homo sapiens
  chr20:6635268-6635298
  hypo
ggcttgtgacagcagcggcagaggtaaaca

SEQ ID NO: 191753 - DNA, 144 bp, Homo sapiens; identical to SEQ ID NO: 98646
  chr20:6663945-6664089
  hypo

SEQ ID NO: 191754 - DNA, 35 bp, Homo sapiens; identical to SEQ ID NO: 98647
  chr20:6732280-6732315
  hypo

SEQ ID NO: 191755 - DNA, 35 bp, Homo sapiens; identical to SEQ ID NO: 98648
  chr20:6732554-6732589
  hypo

SEQ ID NO: 191756 - DNA, 1683 bp, Homo sapiens; identical to SEQ ID NO: 132535
  chr20:6747981-6749664
  hypo

SEQ ID NO: 191757 - DNA, 170 bp, Homo sapiens
  chr20:6759074-6759244
  hypo
taaaacctgcaacagccaactcgaaattccccgtgaccagacttttggacaccaggttggtgaatcagaatgcaagcaggtgggaaagttttgatgtcacccccgctgtgatgcggtggactgcacagggacacgccaaccatggattcgtggtggaagtggcccacttg

SEQ ID NO: 191758 - DNA, 162 bp, Homo sapiens; identical to SEQ ID NO: 98651
  chr20:6837484-6837646
  hypo

SEQ ID NO: 191759 - DNA, 36 bp, Homo sapiens; identical to SEQ ID NO: 33080
  chr20:6861140-6861176
  hypo

SEQ ID NO: 191760 - DNA, 30 bp, Homo sapiens; identical to SEQ ID NO: 56888
  chr20:7812334-7812364
  hypo

SEQ ID NO: 191761 - DNA, 148 bp, Homo sapiens
  chr20:7958417-7958565
  hypo
aagctaataacaaatacgattaaaccacttcagaaacacgtcaaagttgtacgagtcacacatatacagtgtcacagtctacataaagctttactgagaataagccatctgaagggcatgtcccgggctgaagcgatcaaagggcttt

SEQ ID NO: 191762 - DNA, 30 bp, Homo sapiens
  chr20:8379326-8379356
  hypo
acgttggggtttaagcgtccatatatgaat

SEQ ID NO: 191763 - DNA, 30 bp, Homo sapiens
  chr20:8655859-8655889
  hypo
tgactgcttcttgcacgcaccaccgcacct

SEQ ID NO: 191764 - DNA, 34 bp, Homo sapiens; identical to SEQ ID NO: 98654
  chr20:8731860-8731894
  hypo

SEQ ID NO: 191765 - DNA, 1862 bp, Homo sapiens; identical to SEQ ID NO: 132541
  chr20:9048354-9050216
  hypo

SEQ ID NO: 191766 - DNA, 30 bp, Homo sapiens; identical to SEQ ID NO: 12766
  chr20:9112082-9112112
  hypo

SEQ ID NO: 191767 - DNA, 30 bp, Homo sapiens
  chr20:9194164-9194194
  hypo
attctattatgtgaacgtactacacgtttt

SEQ ID NO: 191768 - DNA, 30 bp, Homo sapiens; identical to SEQ ID NO: 56894
  chr20:9329023-9329053
  hypo

SEQ ID NO: 191769 - DNA, 30 bp, Homo sapiens; identical to SEQ ID NO: 98658
  chr20:9460920-9460950
  hypo

SEQ ID NO: 191770 - DNA, 508 bp, Homo sapiens; identical to SEQ ID NO: 12767
  chr20:9487211-9487719
  hypo

SEQ ID NO: 191771 - DNA, 209 bp, Homo sapiens; identical to SEQ ID NO: 56896
  chr20:9487788-9487997
  hypo

SEQ ID NO: 191772 - DNA, 28 bp, Homo sapiens
  chr20:9513984-9514012
  hypo
agttttagccaggcgcggtggctcacgc

SEQ ID NO: 191773 - DNA, 150 bp, Homo sapiens
  chr20:9546625-9546775
  hypo
cgatgcatacgatgccggttgagccttccccgattttgataaagttggccaagtattccctggggtctcctgggctgaccaccagctgcagggccgcccgaaactgttcatgggacaccctggagggctgctggtcggaggaggagcccc

SEQ ID NO: 191774 - DNA, 28 bp, Homo sapiens
  chr20:9598483-9598511
  hypo
gagccacgacgcccggcaagaatcccaa

SEQ ID NO: 191775 - DNA, 31 bp, Homo sapiens; identical to SEQ ID NO: 12785
  chr20:10491693-10491724
  hypo

SEQ ID NO: 191776 - DNA, 168 bp, Homo sapiens; identical to SEQ ID NO: 98664
  chr20:10515151-10515319
  hypo

SEQ ID NO: 191777 - DNA, 43 bp, Homo sapiens; identical to SEQ ID NO: 98665
  chr20:10571269-10571312
  hypo

SEQ ID NO: 191778 - DNA, 401 bp, Homo sapiens; identical to SEQ ID NO: 56916
  chr20:10653623-10654024
  hypo

SEQ ID NO: 191779 - DNA, 1020 bp, Homo sapiens; identical to SEQ ID NO: 56918
  chr20:10654668-10655688
  hypo

SEQ ID NO: 191780 - DNA, 33 bp, Homo sapiens
  chr20:10686676-10686709
  hypo
cgagaggagccagggcgtcggctcggcacagaa

SEQ ID NO: 191781 - DNA, 206 bp, Homo sapiens; identical to SEQ ID NO: 98668
  chr20:10687192-10687398
  hypo

SEQ ID NO: 191782 - DNA, 362 bp, Homo sapiens; identical to SEQ ID NO: 98669
  chr20:10774347-10774709
  hypo

SEQ ID NO: 191783 - DNA, 30 bp, Homo sapiens; identical to SEQ ID NO: 56919
  chr20:10961919-10961949
  hypo

SEQ ID NO: 191784 - DNA, 43 bp, Homo sapiens
  chr20:11209699-11209742
  hypo
atgtgacagataacacggcgaaaccccatctctacaaaaaata

SEQ ID NO: 191785 - DNA, 415 bp, Homo sapiens; identical to SEQ ID NO: 33089
  chr20:11589405-11589820
  hypo

SEQ ID NO: 191786 - DNA, 1710 bp, Homo sapiens; identical to SEQ ID NO: 56921
  chr20:11871114-11872824
  hypo

SEQ ID NO: 191787 - DNA, 186 bp, Homo sapiens; identical to SEQ ID NO: 98673
  chr20:11903618-11903804
  hypo

SEQ ID NO: 191788 - DNA, 30 bp, Homo sapiens; identical to SEQ ID NO: 12794
  chr20:12947867-12947897
  hypo

SEQ ID NO: 191789 - DNA, 129 bp, Homo sapiens; identical to SEQ ID NO: 98675
  chr20:13279832-13279961
  hypo

SEQ ID NO: 191790 - DNA, 154 bp, Homo sapiens
  chr20:13417378-13417532
  hypo
tggataatccctttccagcaacgcagccaactcaagactaacgacctacttgagagacacccccaagaaaacgtgtcctcgacttagggtaagagcttcaagatgacaagtatgactcatacactaaaggtttttagttcggcttagcgtttaa

SEQ ID NO: 191791 - DNA, 18 bp, Homo sapiens
  chr20:13596452-13596470
  hypo
aatcttaaaaattatgta

SEQ ID NO: 191792 - DNA, 25 bp, Homo sapiens
  chr20:13626963-13626988
  hypo
ccaccacgcccggccaagaccacct

SEQ ID NO: 191793 - DNA, 30 bp, Homo sapiens
  chr20:13783972-13784002
  hypo
tcctgagaggttgctcggctagaaagcgga

SEQ ID NO: 191794 - DNA, 253 bp, Homo sapiens
  chr20:13881179-13881432
  hypo
tgagtaggagatgaactttggcgaactcttattgttataatcttaaaaacccggcccagggaggagcttattctccattttctatacaggcgacatatgtagaaacataatccgccgctgtgcctgtgcggccaggactccctctctacacgcaatgattcagctgaccagcccaagacatgctcggttttcacgcctgtttgtaggggcactgctttggggcactacctccggtgtcctccttacttgtttc

SEQ ID NO: 191795 - DNA, 31 bp, Homo sapiens; identical to SEQ ID NO: 98679
  chr20:14115133-14115164
  hypo

SEQ ID NO: 191796 - DNA, 59 bp, Homo sapiens; identical to SEQ ID NO: 98680
  chr20:14812473-14812532
  hypo

SEQ ID NO: 191797 - DNA, 181 bp, Homo sapiens
  chr20:15011644-15011825
  hypo
ccacacctgccaagggtgagctaggcacggagcagtgaagggtatgtgagggagctcagggtctggccactgtgcacagccaggctgtggtggggcgggcagcaccaggtgcctgcacaggcgccagctctatgcaaggctccagctgaaccaggcatactgcaaatggcttccgctgtgg

SEQ ID NO: 191798 - DNA, 30 bp, Homo sapiens; identical to SEQ ID NO: 98682
  chr20:15012241-15012271
  hypo

SEQ ID NO: 191799 - DNA, 30 bp, Homo sapiens; identical to SEQ ID NO: 56932
  chr20:15816804-15816834
  hypo

SEQ ID NO: 191800 - DNA, 30 bp, Homo sapiens
  chr20:16105615-16105645
  hypo
cttgggttgtttccacgggataaccagagt

SEQ ID NO: 191801 - DNA, 67 bp, Homo sapiens; identical to SEQ ID NO: 98684
  chr20:16431606-16431673
  hypo

SEQ ID NO: 191802 - DNA, 30 bp, Homo sapiens
  chr20:16479648-16479678
  hypo
aggagcataagcgttcgtcttggtaggcaa

SEQ ID NO: 191803 - DNA, 410 bp, Homo sapiens
  chr20:16510875-16511285
  hypo
ctcccagtgattgcccggcactcacaccctgtcgtgtgcgatccttgcccttgactatgggctggacctggtgagtcacttctaatgactacaacacaaacacacccaagtgatggtctgtcacttcccaggcgggctttcaagactgtgacttctgtcttgctggctctctcttctgccctctctgtttgagccctggcagtgtgaaaagtcagggacgacagagtgaggacccctgtggacagacccagccagcaggaaacaggggcccgctagcagcacgccagacagcctggcagggcacgctccccaagcccgcaccgggacatgatgatgagagatgactgggaagccgtctggcaccctgactgcagcgctaggggagagccggagtcagaggaccctgctca

SEQ ID NO: 191804 - DNA, 209 bp, Homo sapiens; identical to SEQ ID NO: 98686
  chr20:16543129-16543338
  hypo

SEQ ID NO: 191805 - DNA, 30 bp, Homo sapiens
  chr20:16552283-16552313
  hypo
tttttttttgagagggagtctcgctctgtc

SEQ ID NO: 191806 - DNA, 30 bp, Homo sapiens; identical to SEQ ID NO: 33097
  chr20:16552552-16552582
  hypo

SEQ ID NO: 191807 - DNA, 36 bp, Homo sapiens
  chr20:16554697-16554733
  hypo
taagggagttaaaggcgaacacaactggtatttttt

SEQ ID NO: 191808 - DNA, 276 bp, Homo sapiens
  chr20:16555032-16555308
  hypo
gtatcttaaggcttagggcctctggtagaagtgagctccacctcccttcctgtgtagaaggtaaatgcattcattcattcagtgaatcgagcatgcatgaaatcgtttgcgcacacccagaagcccacctgcgagccacaggagcagccattccaggaagccaagctataatgggagacgcaaggaatggaggcggaactcctgtttttaagtcctagctccaacactagccttgtcagcctgtaattctgaattactgggcgcctctgaggcttc

SEQ ID NO: 191809 - DNA, 208 bp, Homo sapiens
  chr20:16955526-16955734
  hypo
aaccccctgccgcctcggccccctccagactttggttgctgacgagtgccgggggaaagccaaggtgggactgagggcagctacctgctggcttgcaggtgacccttggcgctagcagcctgggcgccacggacagcggcaggaggcaggaaaactcctgggtggaaggggacgggtccccggtgagcccccaccttcaagccaggga

SEQ ID NO: 191810 - DNA, 27 bp, Homo sapiens
  chr20:16955793-16955820
  hypo
gccttttccggtcgcccgtggccgccc

SEQ ID NO: 191811 - DNA, 30 bp, Homo sapiens
  chr20:16956294-16956324
  hypo
aggagagaagctctgcggccctttggggaa

SEQ ID NO: 191812 - DNA, 30 bp, Homo sapiens; identical to SEQ ID NO: 12804
  chr20:17429350-17429380
  hypo

SEQ ID NO: 191813 - DNA, 39 bp, Homo sapiens
  chr20:17460140-17460179
  hypo
tttaaccacacaagaatcatacggccgggcgcggtggct

SEQ ID NO: 191814 - DNA, 31 bp, Homo sapiens; identical to SEQ ID NO: 98690
  chr20:17471843-17471874
  hypo

SEQ ID NO: 191815 - DNA, 267 bp, Homo sapiens
  chr20:17481117-17481384
  hypo
acatgtctgtgaggacgccggcgtaaacagactgtgctgccagttgcataaaaaaaagtctagcacatgcaattatgtacaacacataatacttgatgatgataataaacaactatgttactggtttatgtatttacgatactacactttttctcattattttggcgtgtagtcccacttttaacgagatgtttctggtaagacagtgacgccgcattaccccagccgcagcctcctacagctcacgtttcccacagctcttgattg

SEQ ID NO: 191816 - DNA, 385 bp, Homo sapiens; identical to SEQ ID NO: 98692
  chr20:17489361-17489746
  hypo

SEQ ID NO: 191817 - DNA, 30 bp, Homo sapiens
  chr20:17505470-17505500
  hypo
cccaaggatgtgttccgctcaccttgttaa

SEQ ID NO: 191818 - DNA, 30 bp, Homo sapiens
  chr20:17505737-17505767
  hypo
gtaccatttgcacaccgcgtggggtaacca

SEQ ID NO: 191819 - DNA, 43 bp, Homo sapiens; identical to SEQ ID NO: 98693
  chr20:17512773-17512816
  hypo

SEQ ID NO: 191820 - DNA, 30 bp, Homo sapiens; identical to SEQ ID NO: 56943
  chr20:17518082-17518112
  hypo

SEQ ID NO: 191821 - DNA, 479 bp, Homo sapiens; identical to SEQ ID NO: 132591
  chr20:17549572-17550051
  hypo

SEQ ID NO: 191822 - DNA, 65 bp, Homo sapiens
  chr20:17625934-17625999
  hypo
agagtgttctcggagcggcattctcataaatctttattaaaactttctaacgtaattccattcta

SEQ ID NO: 191823 - DNA, 30 bp, Homo sapiens; identical to SEQ ID NO: 132593
  chr20:17661329-17661359
  hypo

SEQ ID NO: 191824 - DNA, 188 bp, Homo sapiens; identical to SEQ ID NO: 132594
  chr20:17661563-17661751
  hypo

SEQ ID NO: 191825 - DNA, 384 bp, Homo sapiens
  chr20:17674234-17674618
  hypo
aaaattaatgagctccgtctttggcatgggctagaaaattccactgtggcattggcagggtttatgcagaatcagaactttaaagcaaccctgcgctgaatgctgcgaggaacaaaggtaaggcagattggtctgacttccttgctcacggtggggaagagacggcggggaaaggaggcaaggacaaatcacctggctaggagaggtgtgtccagtgggaggaggtgctttcccgaattctgaattcttttcggaacgtgtctctgcaggcagcacaatgccctccttattcccgcatcttcacaccacggtggctgacttggagcctgatgggcagtggcaagcgttcagatctatggccgacgggcacgtcttggacggatt

SEQ ID NO: 191826 - DNA, 30 bp, Homo sapiens
  chr20:17711206-17711236
  hypo
catgccggcagccaacgatagccctacctc

SEQ ID NO: 191827 - DNA, 30 bp, Homo sapiens
  chr20:17922295-17922325
  hypo
gacatacaacacaccgccctcaccccccag

SEQ ID NO: 191828 - DNA, 43 bp, Homo sapiens; identical to SEQ ID NO: 33103
  chr20:17971880-17971923
  hypo

SEQ ID NO: 191829 - DNA, 37 bp, Homo sapiens; identical to SEQ ID NO: 98698
  chr20:17987478-17987515
  hypo

SEQ ID NO: 191830 - DNA, 468 bp, Homo sapiens; identical to SEQ ID NO: 132605
  chr20:18039559-18040027
  hypo

SEQ ID NO: 191831 - DNA, 37 bp, Homo sapiens; identical to SEQ ID NO: 98700
  chr20:18041676-18041713
  hypo

SEQ ID NO: 191832 - DNA, 22 bp, Homo sapiens
  chr20:18073114-18073136
  hypo
taacttgcttgataacgcagct

SEQ ID NO: 191833 - DNA, 21 bp, Homo sapiens
  chr20:18073435-18073456
  hypo
gggggataacgcggctttctt

SEQ ID NO: 191834 - DNA, 108 bp, Homo sapiens
  chr20:18122801-18122909
  hypo
ggggaccacctgttcgggatgttactgaaatctgtttcttacgtttttagaggcttcgtgacggagttatcagagacattgagaggcaaattcggaaaaaagaaaaca

SEQ ID NO: 191835 - DNA, 30 bp, Homo sapiens; identical to SEQ ID NO: 98702
  chr20:18123337-18123367
  hypo

SEQ ID NO: 191836 - DNA, 30 bp, Homo sapiens
  chr20:18178327-18178357
  hypo
gtgacggcttgcctccggagaacaagtcct

SEQ ID NO: 191837 - DNA, 312 bp, Homo sapiens
  chr20:18233317-18233629
  hypo
ctatcttctcagacacgcaaagtcccaggttttgttttccgagtcttggcgtccccagccaaagttcctgggtactggctgccacccatgggagaggggaacacccaccagctccaccccataggacattgctagggccttagtcacctagaaaagccctccacgtatttgcctggttaatgcaacaatagaagggttacgccccagcaactttggtctcctcactcggtcacctcaagaaagcctcatcaaacctttgccatgaaagcacaatgccagaaacgcggctgcgtgcctggcttagccatactt

SEQ ID NO: 191838 - DNA, 31 bp, Homo sapiens; identical to SEQ ID NO: 98704
  chr20:18449103-18449134
  hypo

SEQ ID NO: 191839 - DNA, 156 bp, Homo sapiens; identical to SEQ ID NO: 98705
  chr20:18489631-18489787
  hypo

SEQ ID NO: 191840 - DNA, 30 bp, Homo sapiens
  chr20:18707845-18707875
  hypo
atgtggattcccccacggctcccgggggtg

SEQ ID NO: 191841 - DNA, 73 bp, Homo sapiens; identical to SEQ ID NO: 98706
  chr20:18724826-18724899
  hypo

SEQ ID NO: 191842 - DNA, 30 bp, Homo sapiens
  chr20:18811448-18811478
  hypo
aactcagtggggctccgctttctgcctgtc

SEQ ID NO: 191843 - DNA, 34 bp, Homo sapiens
  chr20:19182181-19182215
  hypo
agccaccgcgcccggccctttagtaataactctt

SEQ ID NO: 191844 - DNA, 1394 bp, Homo sapiens; identical to SEQ ID NO: 132620
  chr20:19192500-19193894
  hypo

SEQ ID NO: 191845 - DNA, 45 bp, Homo sapiens; identical to SEQ ID NO: 98709
  chr20:19207655-19207700
  hypo

SEQ ID NO: 191846 - DNA, 91 bp, Homo sapiens
  chr20:19264551-19264642
  hypo
ctccagctactccctgcagagcgagtctgtcagcaggccacaccgcaggtagctcaggtctaaacagaccgtcatctagacaggaggcttc

SEQ ID NO: 191847 - DNA, 21 bp, Homo sapiens
  chr20:19303562-19303583
  hypo
aatataggccgggcgcggtgg

SEQ ID NO: 191848 - DNA, 185 bp, Homo sapiens; identical to SEQ ID NO: 98710
  chr20:19497028-19497213
  hypo

SEQ ID NO: 191849 - DNA, 200 bp, Homo sapiens
  chr20:19565475-19565675
  hypo
agccccaggtcccatcggtcctactctcgctgaagccccagtctttgcttctcagggcttggactctcgggtgtcacagtcacctctcttccgagatggaatcccaactcacctgtgctttgtctttgctcctctgtagcgcctgcacctcagtgaagatgtggctggggccacattcatggcagcgggaagttcggccc

SEQ ID NO: 191850 - DNA, 221 bp, Homo sapiens
  chr20:19673881-19674102
  hypo
tggcctttttcatttttccagcgggtaaactggaaacagtgaaatgggcgttcacctggccgctgagtttcgtcttatacttcactgtacccaactgcaacaagccgcgctgggagaaatggttcatggtgacgtttgcttcctccacgctgtggatcgcagccttctcctacatgatggtgtggatggtgagtgcaatcgggaccccatggcactgttaa

SEQ ID NO: 191851 - DNA, 539 bp, Homo sapiens; identical to SEQ ID NO: 132622
  chr20:19738145-19738684
  hypo

SEQ ID NO: 191852 - DNA, 31 bp, Homo sapiens; identical to SEQ ID NO: 98714
  chr20:19952936-19952967
  hypo

SEQ ID NO: 191853 - DNA, 189 bp, Homo sapiens; identical to SEQ ID NO: 132626
  chr20:19997707-19997896
  hypo

SEQ ID NO: 191854 - DNA, 30 bp, Homo sapiens
  chr20:19999160-19999190
  hypo
ggtaagtgaggaagacggaagttccggaga

SEQ ID NO: 191855 - DNA, 246 bp, Homo sapiens
  chr20:19999396-19999642
  hypo
tgttctgagtgcccacgtaataatccagttaatcctcacgattctttgaggtgctgtcacccccattttgtgtatgagtaaaccaaggcatggcaagcacaagtgaattggcccaggtgagaatgagtaaagcgaggaacttcatccaaggatattggctctggagcagtggttctgaaagacttggtgcctgtggtcaggggaccatgttagaaacgcacattccgtttgcgatccactgctctg

SEQ ID NO: 191856 - DNA, 30 bp, Homo sapiens
  chr20:20065308-20065338
  hypo
atgttctggatgtcgcggtgctcctagcaa

SEQ ID NO: 191857 - DNA, 30 bp, Homo sapiens
  chr20:20065776-20065806
  hypo
cactggaacactgtgcggcctgtcagtgcc

SEQ ID NO: 191858 - DNA, 30 bp, Homo sapiens
  chr20:20341032-20341062
  hypo
cgcgtggccaggcatcgtttagttgtaggc

SEQ ID NO: 191859 - DNA, 489 bp, Homo sapiens; identical to SEQ ID NO: 12818
  chr20:20347220-20347709
  hypo

SEQ ID NO: 191860 - DNA, 485 bp, Homo sapiens; identical to SEQ ID NO: 12819
  chr20:20347736-20348221
  hypo

SEQ ID NO: 191861 - DNA, 2586 bp, Homo sapiens; identical to SEQ ID NO: 56978
  chr20:20348257-20350843
  hypo

SEQ ID NO: 191862 - DNA, 34 bp, Homo sapiens
  chr20:20367697-20367731
  hypo
tcaagaagtgggaaccggccgggcgcggtggctc

SEQ ID NO: 191863 - DNA, 173 bp, Homo sapiens; identical to SEQ ID NO: 33113
  chr20:20372435-20372608
  hypo

SEQ ID NO: 191864 - DNA, 30 bp, Homo sapiens
  chr20:20376129-20376159
  hypo
ggacatgcatggagacgggggtctcggcaa

SEQ ID NO: 191865 - DNA, 692 bp, Homo sapiens; identical to SEQ ID NO: 98720
  chr20:20376598-20377290
  hypo

SEQ ID NO: 191866 - DNA, 169 bp, Homo sapiens; identical to SEQ ID NO: 98721
  chr20:20378094-20378263
  hypo

SEQ ID NO: 191867 - DNA, 31 bp, Homo sapiens; identical to SEQ ID NO: 33115
  chr20:20380169-20380200
  hypo

SEQ ID NO: 191868 - DNA, 223 bp, Homo sapiens; identical to SEQ ID NO: 33116
  chr20:20392200-20392423
  hypo

SEQ ID NO: 191869 - DNA, 120 bp, Homo sapiens; identical to SEQ ID NO: 33117
  chr20:20392661-20392781
  hypo

SEQ ID NO: 191870 - DNA, 221 bp, Homo sapiens
  chr20:20394639-20394860
  hypo
cacggctcggccctccgtgcatggccccagcaagccgctggtccggggaacagcaggacgttaggcctgagtggccgtctggcgaacaggcactctgacactaagctggcacgtgctggcccagcaggggctgagcgaggcgtgacaaattactcaaagagctgagctaaacttatggctgacaaccacctgagcctttggaccgccgtggcccgctgtca

SEQ ID NO: 191871 - DNA, 270 bp, Homo sapiens; identical to SEQ ID NO: 33118
  chr20:20421238-20421508
  hypo

SEQ ID NO: 191872 - DNA, 284 bp, Homo sapiens; identical to SEQ ID NO: 98726
  chr20:20435757-20436041
  hypo

SEQ ID NO: 191873 - DNA, 30 bp, Homo sapiens
  chr20:20527364-20527394
  hypo
taaggaccctggcagcggccgtgatgaagt

SEQ ID NO: 191874 - DNA, 30 bp, Homo sapiens
  chr20:20538464-20538494
  hypo
aacagacacggagaacggcatcaatcaagg

SEQ ID NO: 191875 - DNA, 31 bp, Homo sapiens; identical to SEQ ID NO: 12822
  chr20:20692668-20692699
  hypo

SEQ ID NO: 191876 - DNA, 30 bp, Homo sapiens; identical to SEQ ID NO: 132635
  chr20:20692748-20692778
  hypo

SEQ ID NO: 191877 - DNA, 30 bp, Homo sapiens
  chr20:20971786-20971816
  hypo
agaccatgttctcaccgcgtcctcacatgg

SEQ ID NO: 191878 - DNA, 1104 bp, Homo sapiens; identical to SEQ ID NO: 132646
  chr20:21086194-21087298
  hypo

SEQ ID NO: 191879 - DNA, 33 bp, Homo sapiens; identical to SEQ ID NO: 98728
  chr20:21115584-21115617
  hypo

SEQ ID NO: 191880 - DNA, 30 bp, Homo sapiens; identical to SEQ ID NO: 33121
  chr20:21115989-21116019
  hypo

SEQ ID NO: 191881 - DNA, 165 bp, Homo sapiens
  chr20:21213372-21213537
  hypo
tttgaatattggcagcggtgcattcgagacaaagacagctaacaaaattgcttcggaagctagtttttcatctagtgaaggaagtcctttgtcaaggtaaagttgtgaaagcctttctgaatagcagcaacaagatgagaaatgtcacagcgcaatgaattaaac

SEQ ID NO: 191882 - DNA, 30 bp, Homo sapiens
  chr20:21226225-21226255
  hypo
gtagtagacgtggtccgctccactacacct

SEQ ID NO: 191883 - DNA, 18 bp, Homo sapiens
  chr20:21291664-21291682
  hypo
aggcgtgagccactgcgc

SEQ ID NO: 191884 - DNA, 155 bp, Homo sapiens; identical to SEQ ID NO: 33122
  chr20:21371532-21371687
  hypo

SEQ ID NO: 191885 - DNA, 849 bp, Homo sapiens; identical to SEQ ID NO: 132655
  chr20:21377737-21378586
  hypo

SEQ ID NO: 191886 - DNA, 39 bp, Homo sapiens; identical to SEQ ID NO: 12833
  chr20:21378678-21378717
  hypo

SEQ ID NO: 191887 - DNA, 1378 bp, Homo sapiens; identical to SEQ ID NO: 132671
  chr20:21494360-21495738
  hypo

SEQ ID NO: 191888 - DNA, 256 bp, Homo sapiens; identical to SEQ ID NO: 12849
  chr20:21502443-21502699
  hypo

SEQ ID NO: 191889 - DNA, 336 bp, Homo sapiens; identical to SEQ ID NO: 12850
  chr20:21502837-21503173
  hypo

SEQ ID NO: 191890 - DNA, 557 bp, Homo sapiens; identical to SEQ ID NO: 57024
  chr20:21503454-21504011
  hypo

SEQ ID NO: 191891 - DNA, 193 bp, Homo sapiens; identical to SEQ ID NO: 33128
  chr20:21555353-21555546
  hypo

SEQ ID NO: 191892 - DNA, 30 bp, Homo sapiens
  chr20:21622170-21622200
  hypo
caggttatggcccatcggcgggggcagccg

SEQ ID NO: 191893 - DNA, 30 bp, Homo sapiens; identical to SEQ ID NO: 98737
  chr20:21663255-21663285
  hypo

SEQ ID NO: 191894 - DNA, 1176 bp, Homo sapiens; identical to SEQ ID NO: 12855
  chr20:21686206-21687382
  hypo

SEQ ID NO: 191895 - DNA, 30 bp, Homo sapiens
  chr20:22020310-22020340
  hypo
cttcactcaggtagacgagcttgtgtgtaa

SEQ ID NO: 191896 - DNA, 36 bp, Homo sapiens; identical to SEQ ID NO: 98739
  chr20:22324532-22324568
  hypo

SEQ ID NO: 191897 - DNA, 30 bp, Homo sapiens; identical to SEQ ID NO: 57037
  chr20:22515568-22515598
  hypo

SEQ ID NO: 191898 - DNA, 397 bp, Homo sapiens; identical to SEQ ID NO: 132710
  chr20:22563238-22563635
  hypo

SEQ ID NO: 191899 - DNA, 1630 bp, Homo sapiens; identical to SEQ ID NO: 132711
  chr20:22563663-22565293
  hypo

SEQ ID NO: 191900 - DNA, 32 bp, Homo sapiens
  chr20:22876829-22876861
  hypo
tttttttttgaggtagagtctcgctctatcgc

SEQ ID NO: 191901 - DNA, 32 bp, Homo sapiens; identical to SEQ ID NO: 98743
  chr20:22877100-22877132
  hypo

SEQ ID NO: 191902 - DNA, 300 bp, Homo sapiens
  chr20:23015049-23015349
  hypo
agggtaattccaggccggaacccctttctttcccgacctctcgaccacagtcctccccaggcacattttagtggccagggatggagacccgcggataatgactgaaccaggtcacagggtgaaggttctgagatgtccggctcccgtagcttctgccagttcccgagggagctagcacaggcttggccttctttggtggcatctctgcctccacctgtccgtctccattccttgtgcccatagcacctcagctgctcggacacagaagttaaaaggtccggcatctgcacttgtccagag

SEQ ID NO: 191903 - DNA, 501 bp, Homo sapiens; identical to SEQ ID NO: 98745
  chr20:23016425-23016926
  hypo

SEQ ID NO: 191904 - DNA, 245 bp, Homo sapiens; identical to SEQ ID NO: 33133
  chr20:23092301-23092546
  hypo

SEQ ID NO: 191905 - DNA, 30 bp, Homo sapiens
  chr20:23104763-23104793
  hypo
aggaaaaactaactccgccagttgtacacg

SEQ ID NO: 191906 - DNA, 31 bp, Homo sapiens; identical to SEQ ID NO: 98747
  chr20:23108362-23108393
  hypo

SEQ ID NO: 191907 - DNA, 26 bp, Homo sapiens
  chr20:23114971-23114997
  hypo
tgggcgacagagtgagactctgtctc

SEQ ID NO: 191908 - DNA, 246 bp, Homo sapiens
  chr20:23117578-23117824
  hypo
gcagcagcagctgtggcctctcgcgggcaggcgggaaaccgacaccgttcactggtaggtattctgctggttaggcgtgagtcagcgcctggcccagattccaccctggaggggctgcaccagggcgtgaactctcggggcgtggctccccaaccctctttagaaacattaccttgaacaccatagctcagagcagtaatcaccagtccactgaggcagcagaggggcctacggctgggactgtgg

SEQ ID NO: 191909 - DNA, 167 bp, Homo sapiens; identical to SEQ ID NO: 98750
  chr20:23137427-23137594
  hypo

SEQ ID NO: 191910 - DNA, 136 bp, Homo sapiens
  chr20:23138480-23138616
  hypo
tagtgtcttctgagtcttccaagggttgggcaattttccctccggtcatggagctgagccgatttcactgtgctctgattctctaaatactgctactcacgtagggcaattctgttcaacacggtgagctgggccg

SEQ ID NO: 191911 - DNA, 43 bp, Homo sapiens; identical to SEQ ID NO: 98752
  chr20:23283472-23283515
  hypo

SEQ ID NO: 191912 - DNA, 92 bp, Homo sapiens; identical to SEQ ID NO: 98753
  chr20:23336929-23337021
  hypo

SEQ ID NO: 191913 - DNA, 156 bp, Homo sapiens; identical to SEQ ID NO: 98754
  chr20:23337305-23337461
  hypo

SEQ ID NO: 191914 - DNA, 384 bp, Homo sapiens; identical to SEQ ID NO: 98755
  chr20:23346217-23346601
  hypo

SEQ ID NO: 191915 - DNA, 158 bp, Homo sapiens; identical to SEQ ID NO: 98756
  chr20:23380017-23380175
  hypo

SEQ ID NO: 191916 - DNA, 43 bp, Homo sapiens
  chr20:23426500-23426543
  hypo
gcaaaggcaaaaggtgcatggcgctaggtcaggagaaaaccag

SEQ ID NO: 191917 - DNA, 29 bp, Homo sapiens
  chr20:23427169-23427198
  hypo
agcgtgagccactgcgcccagcctgcaag

SEQ ID NO: 191918 - DNA, 31 bp, Homo sapiens; identical to SEQ ID NO: 33135
  chr20:23490570-23490601
  hypo

SEQ ID NO: 191919 - DNA, 756 bp, Homo sapiens; identical to SEQ ID NO: 132724
  chr20:23617971-23618727
  hypo

SEQ ID NO: 191920 - DNA, 90 bp, Homo sapiens
  chr20:23669394-23669484
  hypo
agcacctgcagcgggcgtctgtagtactcatcttcggtggccttgttgtactcgctgatggcgaagtgaagggcacgctgtacccactca

SEQ ID NO: 191921 - DNA, 121 bp, Homo sapiens; identical to SEQ ID NO: 33137
  chr20:23969311-23969432
  hypo

SEQ ID NO: 191922 - DNA, 30 bp, Homo sapiens
  chr20:24090357-24090387
  hypo
ggcgaacggtcagaccgaaagggaaagaaa

SEQ ID NO: 191923 - DNA, 241 bp, Homo sapiens; identical to SEQ ID NO: 98760
  chr20:24188721-24188962
  hypo

SEQ ID NO: 191924 - DNA, 259 bp, Homo sapiens; identical to SEQ ID NO: 98761
  chr20:24189021-24189280
  hypo

SEQ ID NO: 191925 - DNA, 77 bp, Homo sapiens; identical to SEQ ID NO: 98762
  chr20:24236949-24237026
  hypo

SEQ ID NO: 191926 - DNA, 30 bp, Homo sapiens
  chr20:24343853-24343883
  hypo
caggggttgcgctgccgctcgccgtcggtc

SEQ ID NO: 191927 - DNA, 30 bp, Homo sapiens
  chr20:24346109-24346139
  hypo
ttccaatgctcatgacgctcgccagtccgt

SEQ ID NO: 191928 - DNA, 30 bp, Homo sapiens
  chr20:24391882-24391912
  hypo
tggaccaaattactccggaacaaatacagc

SEQ ID NO: 191929 - DNA, 36 bp, Homo sapiens; identical to SEQ ID NO: 98763
  chr20:24467577-24467613
  hypo

SEQ ID NO: 191930 - DNA, 30 bp, Homo sapiens
  chr20:24468547-24468577
  hypo
gctgtccaaacatgtcggtgaggctgtagt

SEQ ID NO: 191931 - DNA, 31 bp, Homo sapiens
  chr20:24476178-24476209
  hypo
ccctgagatgctgactcgcaacccagcctcc

SEQ ID NO: 191932 - DNA, 44 bp, Homo sapiens; identical to SEQ ID NO: 98764
  chr20:24484893-24484937
  hypo

SEQ ID NO: 191933 - DNA, 217 bp, Homo sapiens
  chr20:24523923-24524140
  hypo
gcagcaggagtgagccgatgcagcagctgctggaccccaacaccctgcagcagtcagtggagtcccgctaccggcccaacatcatcctctattcagagggcgtgctgcgctcctggggggacggtgtggccgccgactgctgcgagaccaccttcatcgaggaccggtcgcccaccaaagacagcctcgagtacccggatgggaagttcattgacct

SEQ ID NO: 191934 - DNA, 31 bp, Homo sapiens; identical to SEQ ID NO: 12884
  chr20:24564177-24564208
  hypo

SEQ ID NO: 191935 - DNA, 231 bp, Homo sapiens; identical to SEQ ID NO: 33140
  chr20:24570953-24571184
  hypo

SEQ ID NO: 191936 - DNA, 30 bp, Homo sapiens
  chr20:24591029-24591059
  hypo
ttccggatcacccgccgtgggcactcggaa

SEQ ID NO: 191937 - DNA, 30 bp, Homo sapiens
  chr20:24613984-24614014
  hypo
gcccacagtggagtgcgtgatgcccctgct

SEQ ID NO: 191938 - DNA, 30 bp, Homo sapiens
  chr20:24614516-24614546
  hypo
gacacccgcaccagccgctctcaccttttc

SEQ ID NO: 191939 - DNA, 178 bp, Homo sapiens; identical to SEQ ID NO: 98768
  chr20:24646764-24646942
  hypo

SEQ ID NO: 191940 - DNA, 30 bp, Homo sapiens
  chr20:24802213-24802243
  hypo
gaggttttgttgagccgtgtctctcgtgtt

SEQ ID NO: 191941 - DNA, 407 bp, Homo sapiens
  chr20:24944572-24944979
  hypo
cttctccggaaggcaccgctgtcgctgagttctaggacgaggctgtaccgcggcacaaacttcatcaccgtctcttgactaaagagctagagggaagcacagtgcagggaaagttcaccagctggccaagaacactgtgcgcagatcaaccgtgccgcccccaccatccaggaacggtctgactccttcccatgacagggcagccccacagggcagtgccccacaggacagctaatccagctcccactcccagcccaggggccccaaagcaggccccaccccacccctgtccctgtgaagatcaggccaaagaggctccccagcacaaggacagcaacgcaagcacatctctggatggcctggctgaactgagagagacatatcacatccgacgtggtcacagcact

SEQ ID NO: 191942 - DNA, 30 bp, Homo sapiens
  chr20:24945189-24945219
  hypo
ttcctcaaagcggggcgtgcagatcctgag

SEQ ID NO: 191943 - DNA, 30 bp, Homo sapiens
  chr20:24945591-24945621
  hypo
ctcctgctgttcggccgtggatccttccca

SEQ ID NO: 191944 - DNA, 30 bp, Homo sapiens
  chr20:24946673-24946703
  hypo
gggacctgggagcagcgacacccaaagcag

SEQ ID NO: 191945 - DNA, 174 bp, Homo sapiens
  chr20:24947028-24947202
  hypo
agacatgaaagaaccacgtccaggtggagacacctggcattccctgcctgaatcaggtggccaaagttgccaccaccccaacagagcaaactggtatcgcgccctcatgacagccgcgccaagatgagcacagcttcactgctgcgccactgctgccaacgatgcgagagcaga

SEQ ID NO: 191946 - DNA, 38 bp, Homo sapiens; identical to SEQ ID NO: 33143
  chr20:24950216-24950254
  hypo

SEQ ID NO: 191947 - DNA, 30 bp, Homo sapiens
  chr20:24987124-24987154
  hypo
ggccagcacaaccacgaccgagtgggtact

SEQ ID NO: 191948 - DNA, 110 bp, Homo sapiens
  chr20:24997315-24997425
  hypo
ggagatgccccgcagcgctggtggacacgctgggagactgcgacagcctgcacccagccacggggctgtgaccacacaagccagggtaatccccacggcaaagcaggtcc

SEQ ID NO: 191949 - DNA, 20 bp, Homo sapiens
  chr20:24997780-24997800
  hypo
caccacgcccagctcctaag

SEQ ID NO: 191950 - DNA, 240 bp, Homo sapiens
  chr20:25000499-25000739
  hypo
gctttctaccagatccggtctggcattgcgtgaattcacacatacaaagccgggcagcttcatgactgaagtcctgctgaagcccgtattggctctgagggtctagggcaagcacaacctctcctgctgcagggcaggccgctcacctgaccccagggtccgcagggaggagcgatcatacttcttcacccaggcatcaccgtatttcagcaacagccggacagccgttggggcgccata

SEQ ID NO: 191951 - DNA, 466 bp, Homo sapiens
  chr20:25012784-25013250
  hypo
ccatgtcgtccaccacgttgcctatgtctatggtgtgcgcatgcccttcctctctggccactctggggcctatcaccaggttcacccaccactcagggcgcatcatctctctgggcaagctgattggctcagggccgacacgtgacccaacctggtccagtcagagtcaaccatactcaactccgggaaaactgggagcaggcgagagccgccaacttgccggccatgcggtgcgaagtggaggaagtggaagcgatcccaaggttgtctttcctttcggcgcctcatccctctgaatctggacctggcaattgcattaaccactttcccactcttgctgtactgactttaattaattatttgcaataaaaagagctaacacagaacgaagaatgaggggaagccaaggccctttctctctgggcggggcagaccaccagcccgcgacccctgccctctgcagggg

SEQ ID NO: 191952 - DNA, 282 bp, Homo sapiens; identical to SEQ ID NO: 98772
  chr20:25028525-25028807
  hypo

SEQ ID NO: 191953 - DNA, 56 bp, Homo sapiens; identical to SEQ ID NO: 98773
  chr20:25030307-25030363
  hypo

SEQ ID NO: 191954 - DNA, 514 bp, Homo sapiens
  chr20:25039219-25039733
  hypo
gctggtgcacccaagcgcactggtgggtcccaagacaataggtcggtcagttccgcatctcagaggctgaagccaaggttttcatgcctttgtgcgcccctgagagtgaaccccacccctggagtctcagcagcacgcgaaaggggctggcgcctttctaggctcccgcctagaagccaggaggctgcgcaagcctgagtccgtgttctgggtcccatgctccagccccccagctgccggcctccgtcctggcgggggtcacgtcctgctgggggtcggtggtgggtgatatggggcgatgaggactttctccagttgctgcagcatctgtagcctgagttcaaactctgtgaccttgagcaagttccttaacttctcggtgcctcgttttccttttggggaagacggaagtaatgtctccctggggggcggggacggcgggggtgggcagctgcagtaaggaatacattggacaatgtctgtcaagcgtctacccttgcgtggccccatagta

SEQ ID NO: 191955 - DNA, 213 bp, Homo sapiens
  chr20:25040599-25040812
  hypo
actcttccttcccacgcctgcaccgcctgcacatgatggtgtgctgctctgtccagaggaggaccctggctggctggattgctttggccagtacagcctggtgggagggatgctgtgacagttccatgtggaggtcctgagagaccccgtagccccagcttatcctcccatggaacccagctgcgagctgtgaggaagcggggctggccttcc

SEQ ID NO: 191956 - DNA, 30 bp, Homo sapiens; identical to SEQ ID NO: 33145
  chr20:25042641-25042671
  hypo

SEQ ID NO: 191957 - DNA, 489 bp, Homo sapiens; identical to SEQ ID NO: 98776
  chr20:25187624-25188113
  hypo

SEQ ID NO: 191958 - DNA, 128 bp, Homo sapiens; identical to SEQ ID NO: 98777
  chr20:25202579-25202707
  hypo

SEQ ID NO: 191959 - DNA, 30 bp, Homo sapiens; identical to SEQ ID NO: 57076
  chr20:25203124-25203154
  hypo

SEQ ID NO: 191960 - DNA, 30 bp, Homo sapiens
  chr20:25207232-25207262
  hypo
cctgctcagtgtggcgtcagtgtcggggct

SEQ ID NO: 191961 - DNA, 19 bp, Homo sapiens
  chr20:25212064-25212083
  hypo
tttataagaacctactggg

SEQ ID NO: 191962 - DNA, 231 bp, Homo sapiens; identical to SEQ ID NO: 98780
  chr20:25223053-25223284
  hypo

SEQ ID NO: 191963 - DNA, 17 bp, Homo sapiens
  chr20:25230503-25230520
  hypo
attctgagtcttgccct

SEQ ID NO: 191964 - DNA, 196 bp, Homo sapiens; identical to SEQ ID NO: 98782
  chr20:25230759-25230955
  hypo

SEQ ID NO: 191965 - DNA, 332 bp, Homo sapiens; identical to SEQ ID NO: 98783
  chr20:25231670-25232002
  hypo

SEQ ID NO: 191966 - DNA, 80 bp, Homo sapiens
  chr20:25236290-25236370
  hypo
ggggacaggaggggaccggtttcagaccagatctgcctgtagaatgaggctcttcatcttggtgaaagcagccgcccaac

SEQ ID NO: 191967 - DNA, 104 bp, Homo sapiens
  chr20:25240118-25240222
  hypo
gaaggaatgggttggcggggctgctctctgtttttgagagtagaaagtaagaatcgaacggaccgcaagcgtggggttgaattgggatgcgaaggtgtggaggt

SEQ ID NO: 191968 - DNA, 30 bp, Homo sapiens
  chr20:25240614-25240644
  hypo
tcagcgccctgccaccgcctttgctttgct

SEQ ID NO: 191969 - DNA, 178 bp, Homo sapiens
  chr20:25251530-25251708
  hypo
gggcccctggtactgcggtgtttgcacaggtggacattgatttgtatgcagccagctgccactgctgtgccggcttcactcaggagtagggtgaggcttgatgtgttgatgtgtccctgctgtcagaacagcctgggtttcagtggaacgtgcaagggattggcgaggcctcagcctc

SEQ ID NO: 191970 - DNA, 225 bp, Homo sapiens
  chr20:25254264-25254489
  hypo
tcgaatctgcagggccgcttttagtgtgggggttggtttcatgtagttactcgtctctagtgccactgggcacagattctgggaataagcttcttcttggaagccctcccggaacagcttgtcttcctgggtgcatccagggcgtcctcactgccagctgccaacttggccccagcacttgcggatttgcagtgtcactttctttcttttttaattttaatttaa

SEQ ID NO: 191971 - DNA, 44 bp, Homo sapiens
  chr20:25254608-25254652
  hypo
agagtgctgggactgtaggcgtgagcctccgcctggccagtgtg

SEQ ID NO: 191972 - DNA, 197 bp, Homo sapiens
  chr20:25255134-25255331
  hypo
gtgatctcgaccgcacggtctgctgggtccaggacagggcggtggcctgggacatctgcgctgagggtgccctcacagctggcttctttccaggtagaggaggccgatgactggctgcgctacggcaacccctgggagaaagcgcggcctgagtatatgcttcccgtgcacttctacggacgcgtggagcacacccc

SEQ ID NO: 191973 - DNA, 30 bp, Homo sapiens; identical to SEQ ID NO: 33151
  chr20:25276724-25276754
  hypo

SEQ ID NO: 191974 - DNA, 34 bp, Homo sapiens; identical to SEQ ID NO: 98786
  chr20:25278857-25278891
  hypo

SEQ ID NO: 191975 - DNA, 34 bp, Homo sapiens; identical to SEQ ID NO: 33153
  chr20:25284745-25284779
  hypo

SEQ ID NO: 191976 - DNA, 164 bp, Homo sapiens; identical to SEQ ID NO: 98788
  chr20:25290091-25290255
  hypo

SEQ ID NO: 191977 - DNA, 30 bp, Homo sapiens; identical to SEQ ID NO: 98789
  chr20:25300297-25300327
  hypo

SEQ ID NO: 191978 - DNA, 171 bp, Homo sapiens
  chr20:25300607-25300778
  hypo
cctgcttcatgtaaacgtcacctaaactccgccttccctcaaccccttcagaactctgcctttcccttcgttcttgggaggctctccctcattgcagtgggtcagtacacccaattttgtgggaccgcaggttgctcctgctggtttccggcagaccgggccaggacattc

SEQ ID NO: 191979 - DNA, 190 bp, Homo sapiens; identical to SEQ ID NO: 98790
  chr20:25310087-25310277
  hypo

SEQ ID NO: 191980 - DNA, 273 bp, Homo sapiens
  chr20:25320326-25320599
  hypo
taacctcgtatcaggaaagagcggcctcctcaggcctcccgatccgtcttctgtgagacaactgcaggcaggcgtaggttacttattagctcctggtaggaagcacgtagaccaaggacatcaacagaacctgcctgaccaggtcctcagagagcaggaggctaagaactggcacggtgtgtccttgcatttacgcgtgggcgagcccctctgtacccacccaacagaggacccttttccaggcccgtcaagccaggtcgccagcccagggtc

SEQ ID NO: 191981 - DNA, 48 bp, Homo sapiens
  chr20:25322419-25322467
  hypo
cagaaagactcaggacgttatcctgagagaaaacgaaaagcccattaa

SEQ ID NO: 191982 - DNA, 103 bp, Homo sapiens
  chr20:25344141-25344244
  hypo
cgcacctggctgacatttacttttcattataatgttggttgatgagatggatgcctttaatcaatatttaattttaagggggcaggcacggtggctcattcct

SEQ ID NO: 191983 - DNA, 30 bp, Homo sapiens
  chr20:25359427-25359457
  hypo
tccctcactgacagccgtgtccacgttcac

SEQ ID NO: 191984 - DNA, 30 bp, Homo sapiens
  chr20:25359773-25359803
  hypo
tgtgtgcagggaccccgtgcaggcttccca

SEQ ID NO: 191985 - DNA, 200 bp, Homo sapiens; identical to SEQ ID NO: 98793
  chr20:25377962-25378162
  hypo

SEQ ID NO: 191986 - DNA, 30 bp, Homo sapiens; identical to SEQ ID NO: 33156
  chr20:25392097-25392127
  hypo

SEQ ID NO: 191987 - DNA, 132 bp, Homo sapiens
  chr20:25434106-25434238
  hypo
gggcaatcctactgacgagtttgttgagagcgcgaactttttcttccaagaggcggctttgtttctcggcgcctcgctgcttctcctcggtggcctgaagtgctctcaccaggtgggcgttctccacgtaca

SEQ ID NO: 191988 - DNA, 31 bp, Homo sapiens; identical to SEQ ID NO: 33157
  chr20:25451905-25451936
  hypo

SEQ ID NO: 191989 - DNA, 173 bp, Homo sapiens
  chr20:25459744-25459917
  hypo
agcacgctgacctcgcgcctgcgagcctgctccatgtccttcctctccttctcaaagttccttttcagtgccgcaatttccctttcgtagtaatttacctaaaacgagaaacatgagccccgtggaccaggagaccctaagaatgatcttgctgctgacgtaacacagaaaca

SEQ ID NO: 191990 - DNA, 167 bp, Homo sapiens; identical to SEQ ID NO: 98796
  chr20:25470594-25470761
  hypo

SEQ ID NO: 191991 - DNA, 39 bp, Homo sapiens; identical to SEQ ID NO: 98797
  chr20:25605595-25605634
  hypo

SEQ ID NO: 191992 - DNA, 39 bp, Homo sapiens; identical to SEQ ID NO: 98798
  chr20:25605873-25605912
  hypo

SEQ ID NO: 191993 - DNA, 30 bp, Homo sapiens; identical to SEQ ID NO: 33158
  chr20:25657013-25657043
  hypo

SEQ ID NO: 191994 - DNA, 30 bp, Homo sapiens
  chr20:25833872-25833902
  hypo
acgcacacacacaaacgcacagacatacag

SEQ ID NO: 191995 - DNA, 30 bp, Homo sapiens; identical to SEQ ID NO: 98800
  chr20:25967102-25967132
  hypo

SEQ ID NO: 191996 - DNA, 197 bp, Homo sapiens; identical to SEQ ID NO: 33159
  chr20:25971829-25972026
  hypo

SEQ ID NO: 191997 - DNA, 219 bp, Homo sapiens
  chr20:25972701-25972920
  hypo
gcggagagcagaacacggcagcttcaggggctgcctgggggtgagtgttaccgtgccactgccctatgtctttttgcgtttgtgtgtgtgcgtaagtctctctcttatttctctctctcctttctcggtctttcgctctgtgaccgtctgtgtgtgcgtgtgtgtgttgggacacatgtgccctgtgtgccagagggcggtatcttgtacgtcagcctt

SEQ ID NO: 191998 - DNA, 36 bp, Homo sapiens; identical to SEQ ID NO: 98802
  chr20:26062266-26062302
  hypo

SEQ ID NO: 191999 - DNA, 531 bp, Homo sapiens; identical to SEQ ID NO: 132762
  chr20:26189956-26190487
  hypo

SEQ ID NO: 192000 - DNA, 30 bp, Homo sapiens
  chr20:29457931-29457961
  hypo
tgtcttacaatttttcgactttacaatact

SEQ ID NO: 192001 - DNA, 30 bp, Homo sapiens
  chr20:29867582-29867612
  hypo
gaggtaccaggacatcgggaagactggtgc

SEQ ID NO: 192002 - DNA, 157 bp, Homo sapiens
  chr20:29873905-29874062
  hypo
tccctgtcctccactcgtacaccgttgagtttccccgcttctgcacgaaccacagcattggcaacacctgctctgtggggctatcacacacaaaccccacagaggcctggtacacttcgatggcttcccccagggactgctgcgccgctgccccagt

SEQ ID NO: 192003 - DNA, 30 bp, Homo sapiens
  chr20:29985162-29985192
  hypo
acctatgcacgcgcacgcgcgtgcacacac

SEQ ID NO: 192004 - DNA, 21 bp, Homo sapiens
  chr20:30110867-30110888
  hypo
ttatgagacagagtctcgctc

SEQ ID NO: 192005 - DNA, 181 bp, Homo sapiens; identical to SEQ ID NO: 98804
  chr20:30134130-30134311
  hypo

SEQ ID NO: 192006 - DNA, 155 bp, Homo sapiens; identical to SEQ ID NO: 33162
  chr20:30139495-30139650
  hypo

SEQ ID NO: 192007 - DNA, 140 bp, Homo sapiens; identical to SEQ ID NO: 98806
  chr20:30153939-30154079
  hypo

SEQ ID NO: 192008 - DNA, 31 bp, Homo sapiens; identical to SEQ ID NO: 33163
  chr20:30169440-30169471
  hypo

SEQ ID NO: 192009 - DNA, 36 bp, Homo sapiens; identical to SEQ ID NO: 98808
  chr20:30174476-30174512
  hypo

SEQ ID NO: 192010 - DNA, 144 bp, Homo sapiens; identical to SEQ ID NO: 98809
  chr20:30181152-30181296
  hypo

SEQ ID NO: 192011 - DNA, 1362 bp, Homo sapiens; identical to SEQ ID NO: 132767
  chr20:30192833-30194195
  hypo

SEQ ID NO: 192012 - DNA, 30 bp, Homo sapiens; identical to SEQ ID NO: 33165
  chr20:30232723-30232753
  hypo

SEQ ID NO: 192013 - DNA, 30 bp, Homo sapiens
  chr20:30286066-30286096
  hypo
aggattttgctctgtcgcccaggttggagt

SEQ ID NO: 192014 - DNA, 82 bp, Homo sapiens; identical to SEQ ID NO: 98812
  chr20:30297084-30297166
  hypo

SEQ ID NO: 192015 - DNA, 31 bp, Homo sapiens; identical to SEQ ID NO: 98813
  chr20:30302783-30302814
  hypo

SEQ ID NO: 192016 - DNA, 40 bp, Homo sapiens
  chr20:30306170-30306210
  hypo
ggccggggccaggcacggtggttcatgcctgtaatcccag

SEQ ID NO: 192017 - DNA, 27 bp, Homo sapiens
  chr20:30326141-30326168
  hypo
gctaccgcacccagcctaggcttaatt

SEQ ID NO: 192018 - DNA, 36 bp, Homo sapiens; identical to SEQ ID NO: 33166
  chr20:30334934-30334970
  hypo

SEQ ID NO: 192019 - DNA, 30 bp, Homo sapiens; identical to SEQ ID NO: 33167
  chr20:30407130-30407160
  hypo

SEQ ID NO: 192020 - DNA, 42 bp, Homo sapiens
  chr20:30468279-30468321
  hypo
ctctccgcaccccaaccgactttttttttttttttgagacgg

SEQ ID NO: 192021 - DNA, 42 bp, Homo sapiens; identical to SEQ ID NO: 33169
  chr20:30468560-30468602
  hypo

SEQ ID NO: 192022 - DNA, 25 bp, Homo sapiens
  chr20:30502986-30503011
  hypo
aaggaatgtgaaaatcggccgggcg

SEQ ID NO: 192023 - DNA, 36 bp, Homo sapiens
  chr20:30521656-30521692
  hypo
agaaggtgaggaagccgggctcggctatgcacgggt

SEQ ID NO: 192024 - DNA, 1282 bp, Homo sapiens; identical to SEQ ID NO: 57101
  chr20:30555390-30556672
  hypo

SEQ ID NO: 192025 - DNA, 248 bp, Homo sapiens; identical to SEQ ID NO: 132782
  chr20:30582820-30583068
  hypo

SEQ ID NO: 192026 - DNA, 780 bp, Homo sapiens
  chr20:30584444-30585224
  hypo
agcattgccgcccgcggcctggccttcgcgctcttcgccagcgtctacaagctctattttggcatcttcatcgtggcccactggtgcgtcatgaccttctgggtcatccaaggggagacggacttctgcatgtccaagtgggaggagatcatctacaacatggtcgtgggcatcatctacatcttctgctggttcaacgtcaaggagggccgcagccgccgccgcatgaccctctaccactgcatcgtcctgctggagaacgccgcgctcaccggcttctggtactccagccgcaacttctcaaccgacttctactcgctcatcatggtctgcgtagtggcctccagctttgcgctgggcatattcttcatgtgtgtctactactgtctcctgcaccccaatgggcccatgctgggtccccaggcacctggttgcatcttccgtaaggcctcagagccctgtggcccacccgctgacgccatcacgagtccccccaggtccctgccaaggactacaggtgctgagcgggatggggcctcggcgggagagcgtgcagggacccccaccccacctgtcttccaggtgcggcctggcttgcctcccacaccagtggcccgcaccttgcggacagaggggcctgtcatccggattgacttgcctcgcaagaagtacccggcctgggatgctcattttattgaccgccggctccggaagaccatcctggcactggagtactcctcacctgccacgccccggttgcagtaccggagtgtggggact

SEQ ID NO: 192027 - DNA, 30 bp, Homo sapiens; identical to SEQ ID NO: 132785
  chr20:30619002-30619032
  hypo

SEQ ID NO: 192028 - DNA, 1672 bp, Homo sapiens; identical to SEQ ID NO: 132786
  chr20:30639045-30640717
  hypo

SEQ ID NO: 192029 - DNA, 41 bp, Homo sapiens; identical to SEQ ID NO: 33172
  chr20:30713762-30713803
  hypo

SEQ ID NO: 192030 - DNA, 189 bp, Homo sapiens
  chr20:30720873-30721062
  hypo
atgtgcctggggtcgcgcctatcaacttccaccagaacgatcccgtagaaatcaaggtaagtgtgttcctggatttttggagcctctgtgctaggcagtgtgtctggagcaccatggtgagctgttcgtgtccatcctgtggttgcagagaagaaagaatagtgccagttaccccggaactctgcctct

SEQ ID NO: 192031 - DNA, 30 bp, Homo sapiens
  chr20:30724317-30724347
  hypo
atagctcctctcttgcggcttcatcacctc

SEQ ID NO: 192032 - DNA, 101 bp, Homo sapiens
  chr20:30753239-30753340
  hypo
tagactgattggagtggaccacggccaagcttgctccgtcctcggacaggaagccaccctgcgtgggggactgcaggcacgcaaaataaaataactcctgc

SEQ ID NO: 192033 - DNA, 18 bp, Homo sapiens
  chr20:30762569-30762587
  hypo
acccggcctccagtgtat

SEQ ID NO: 192034 - DNA, 30 bp, Homo sapiens
  chr20:30770103-30770133
  hypo
aatatcaaagtcccccgagctgtaatcaag

SEQ ID NO: 192035 - DNA, 331 bp, Homo sapiens
  chr20:30770376-30770707
  hypo
ctctgtagtaggagtcgggaatgggctccgggacatttattgcctcaattccaagactgcctggaaaagggcggtactgccttgggcagtagagagttcctatcgctagagatacaaaccccagaagggccttcagcaggcatctgatgccttcatacatgctgtcgcctcgcccaccaggaagaccctcctgaacctcaaagatgtgacacatgcattcattcatttcacaaagaactacttgtgccaggtgctgctctaggtaagggggatttagcaatgaataaaacaaagtgcctctgggtgtggcggctcacgcctgtaatcccag

SEQ ID NO: 192036 - DNA, 271 bp, Homo sapiens
  chr20:30772696-30772967
  hypo
atacgttaaccacgccgcacattttcccatccagtgccttcgctcatgttgttcgctctgccaggaattcccttctctggctccactttccaaactactgcctattctttaacacccagctcgtgacccaacttcagagaagtctccgccctctggtcccacatcatcacatacctggtgaactataagccacgttgaacacagttgggttttgtctccttggatgaccgttggataccagttacacctcttgccccggtgtaattattag

SEQ ID NO: 192037 - DNA, 31 bp, Homo sapiens; identical to SEQ ID NO: 33174
  chr20:30807275-30807306
  hypo

SEQ ID NO: 192038 - DNA, 290 bp, Homo sapiens
  chr20:30810303-30810593
  hypo
tctcattggctagtacgagggcacatgggccatacctagctgcaagaagtacttagaaatgtctgtctttctttttctttcccccacctcgcccggggtatgtttggctgataagaagtgtctttattttaggctgccacgtatccagctgaaaactgggttcgagggaaagaggataagaggtatttcttctttaccacgtgatttctgaggatccttccagctctgctcgttctgagcctgtgaatagcctggcacagctctaattcagctgacgcttactgcacatt

SEQ ID NO: 192039 - DNA, 148 bp, Homo sapiens
  chr20:30864849-30864997
  hypo
ggagccaccgcacctggccgcatgatctgttttaaataattactctggccaccttatggaaaatggattgttcggacagagctggacaaaagaatggaaacagaccagatatttcaggcaggctagagatgagcgtggcctggccttg

SEQ ID NO: 192040 - DNA, 172 bp, Homo sapiens
  chr20:30915286-30915458
  hypo
tctgtcagtgtcttccgagtgctggttccacaggactccagccagggctttaacactgcagttcatttccaggaaccagcagatgatgaagcggccagtctcagccgtgggatataagagaccattgagccagcacgcaagaatgtccatgatgattcgtccagaggcccga

SEQ ID NO: 192041 - DNA, 38 bp, Homo sapiens
  chr20:30935780-30935818
  hypo
catgagccaccgcgcccggcccccaaggattttttaac

SEQ ID NO: 192042 - DNA, 96 bp, Homo sapiens; identical to SEQ ID NO: 57107
  chr20:30946057-30946153
  hypo

SEQ ID NO: 192043 - DNA, 111 bp, Homo sapiens; identical to SEQ ID NO: 12905
  chr20:30946218-30946329
  hypo

SEQ ID NO: 192044 - DNA, 290 bp, Homo sapiens; identical to SEQ ID NO: 12906
  chr20:30946345-30946635
  hypo

SEQ ID NO: 192045 - DNA, 84 bp, Homo sapiens; identical to SEQ ID NO: 12907
  chr20:30954185-30954269
  hypo

SEQ ID NO: 192046 - DNA, 30 bp, Homo sapiens; identical to SEQ ID NO: 12908
  chr20:30955515-30955545
  hypo

SEQ ID NO: 192047 - DNA, 110 bp, Homo sapiens; identical to SEQ ID NO: 12909
  chr20:30956816-30956926
  hypo

SEQ ID NO: 192048 - DNA, 387 bp, Homo sapiens; identical to SEQ ID NO: 12910
  chr20:30959965-30960352
  hypo

SEQ ID NO: 192049 - DNA, 30 bp, Homo sapiens
  chr20:30995125-30995155
  hypo
aacagagctagactccgtctcggggggaaa

SEQ ID NO: 192050 - DNA, 51 bp, Homo sapiens
  chr20:30996045-30996096
  hypo
tttctatgtacggttcgaggtagtcattcaggtttgcgtttttacgtgttt

SEQ ID NO: 192051 - DNA, 296 bp, Homo sapiens; identical to SEQ ID NO: 12911
  chr20:31015929-31016225
  hypo

SEQ ID NO: 192052 - DNA, 105 bp, Homo sapiens; identical to SEQ ID NO: 12912
  chr20:31017139-31017244
  hypo

SEQ ID NO: 192053 - DNA, 154 bp, Homo sapiens; identical to SEQ ID NO: 12913
  chr20:31017702-31017856
  hypo

SEQ ID NO: 192054 - DNA, 360 bp, Homo sapiens; identical to SEQ ID NO: 12914
  chr20:31019122-31019482
  hypo

SEQ ID NO: 192055 - DNA, 107 bp, Homo sapiens; identical to SEQ ID NO: 12915
  chr20:31020681-31020788
  hypo

SEQ ID NO: 192056 - DNA, 635 bp, Homo sapiens; identical to SEQ ID NO: 12916
  chr20:31021085-31021720
  hypo

SEQ ID NO: 192057 - DNA, 4889 bp, Homo sapiens; identical to SEQ ID NO: 12917
  chr20:31022233-31027122
  hypo

SEQ ID NO: 192058 - DNA, 30 bp, Homo sapiens; identical to SEQ ID NO: 33189
  chr20:31046821-31046851
  hypo

SEQ ID NO: 192059 - DNA, 358 bp, Homo sapiens
  chr20:31051293-31051651
  hypo
cctccccactgtggcaaagggcgactccttcatctgggcaggacccggagcccaccacctgtgcccagaatgcctacgggcagggaaggactgccgtgtccgtctatttgaacatggggcaatgtgctgctattcaaatggaggaattagtgatgaatgggggaaattgttcctccctctgtcccgtctccagaaggagacaaaaaccccttttacctcagcaaacaatgcccttatgtgggcgccagtgccccgcagcccgcacaagcccagctctgtgcgaaccaccaatcgccacaccgcgctctggggcccacagccagtggcaccctctcccggtgggcgactcccaccagct

SEQ ID NO: 192060 - DNA, 30 bp, Homo sapiens; identical to SEQ ID NO: 33190
  chr20:31055945-31055975
  hypo

SEQ ID NO: 192061 - DNA, 65 bp, Homo sapiens; identical to SEQ ID NO: 98843
  chr20:31081012-31081077
  hypo

SEQ ID NO: 192062 - DNA, 24 bp, Homo sapiens
  chr20:31092068-31092092
  hypo
gaaacatctcagaggccgggcgtg

SEQ ID NO: 192063 - DNA, 194 bp, Homo sapiens
  chr20:31108565-31108759
  hypo
ctcttagatggcccccgccctagccctccagcacgccacccctgctacctttgggttccaggccattggagttaaagtgcatcctcttctgacactccgtacagctcatcaggaaccgggtcacggcctctctcgggaggaaggcataggtctctgcgatctggaggagagaagagcttcgcttgttatatgga

SEQ ID NO: 192064 - DNA, 274 bp, Homo sapiens
  chr20:31115683-31115957
  hypo
gatgccctctggctccgacaggccatctgccccctgcgacagggtggacaagctgtgttagtgtcaggaatgatggcggggtgagaactgggccctgaggccggggcaaggggtcaggacgggcaatgcctccgacagtgggtcttggggtggggaggggagggagcctaccgagggggctccctggagggggacgccagagtcagggtggctgcagctatgaaatctaccagcaacaatgggcagagaacggcgacaacgaaaatacaaatta

SEQ ID NO: 192065 - DNA, 206 bp, Homo sapiens; identical to SEQ ID NO: 98846
  chr20:31144445-31144651
  hypo

SEQ ID NO: 192066 - DNA, 102 bp, Homo sapiens; identical to SEQ ID NO: 98847
  chr20:31144702-31144804
  hypo

SEQ ID NO: 192067 - DNA, 57 bp, Homo sapiens; identical to SEQ ID NO: 33192
  chr20:31146688-31146745
  hypo

SEQ ID NO: 192068 - DNA, 426 bp, Homo sapiens
  chr20:31151692-31152118
  hypo
ccctaagcgtatcctcggcagccacctgctaattagccaggcggctcctgcctgctcagtggctgctttggagcaattctcccaggaaaggccgagcttgcaggagcaggaaaggtaattgctaatttgcacgagaggagacaaagggacaaaggcgcccttggctgcccggtgcagcctgagccagcttcacatccagagctccctgccacttgccatccaccacggcgggccccaggatgtctgtctgtccccatgacacatccacacagtctctgttcggtgtaggccacccggccgcgccccaggaaggccagaagagaccattaacgtggccctgtcatccttcagagcactgcaggggaggtgtacagggagctaacgattgaaaaagcggatgattcccacgaacgttccagcatcttc

SEQ ID NO: 192069 - DNA, 107 bp, Homo sapiens; identical to SEQ ID NO: 98849
  chr20:31196056-31196163
  hypo

SEQ ID NO: 192070 - DNA, 348 bp, Homo sapiens
  chr20:31213873-31214221
  hypo
ctcacccccacagcgcgggttccgcctcagtcctgtgtctcctacctcattctcacccagcccacgcccagacgcacttgtgggatcaggggattaacacccaccttctcagtaggctgcgagcttcccacttcccagcatgcctgtggtgactagcgcccacccggagcgccccaggagaccagagccaaaagggaccttggtgagcatcgaggtccgcccccacgtgttgtaacaacaataataaaaaataatatttccaacaacaacagcagcagctaacactgcccacgtgccaggcgtttcgccttccgtgcagtttcctcgaatccacgcaacaaccccata

SEQ ID NO: 192071 - DNA, 32 bp, Homo sapiens
  chr20:31279909-31279941
  hypo
agtgctgggattacaggcgtgagccaccacgc

SEQ ID NO: 192072 - DNA, 17 bp, Homo sapiens
  chr20:31282870-31282887
  hypo
agcgtaagccaccgtgc

SEQ ID NO: 192073 - DNA, 36 bp, Homo sapiens; identical to SEQ ID NO: 98850
  chr20:31332338-31332374
  hypo

SEQ ID NO: 192074 - DNA, 35 bp, Homo sapiens; identical to SEQ ID NO: 98851
  chr20:31332613-31332648
  hypo

SEQ ID NO: 192075 - DNA, 181 bp, Homo sapiens
  chr20:31334704-31334885
  hypo
gccaccgcgcccggcctttttccagtctttttccacatcgcaggtcactggggttgtgtgatttgttttcgttttacatacacaggactctcgcatttcaccaagttatttaataatccctcatactccacgtgtggttccttggaccagcagtgcaggcgttacctggaagcttgttaga

SEQ ID NO: 192076 - DNA, 589 bp, Homo sapiens; identical to SEQ ID NO: 132815
  chr20:31350974-31351563
  hypo

SEQ ID NO: 192077 - DNA, 69 bp, Homo sapiens; identical to SEQ ID NO: 33195
  chr20:31367768-31367837
  hypo

SEQ ID NO: 192078 - DNA, 60 bp, Homo sapiens; identical to SEQ ID NO: 98854
  chr20:31392268-31392328
  hypo

SEQ ID NO: 192079 - DNA, 31 bp, Homo sapiens; identical to SEQ ID NO: 33196
  chr20:31547891-31547922
  hypo

SEQ ID NO: 192080 - DNA, 89 bp, Homo sapiens
  chr20:31556102-31556191
  hypo
tcatccgtaagttgccggtgtctgtggggtgcccgttttaaccaactaggcgactgcatcccacataggggttttttttgagacggagt

SEQ ID NO: 192081 - DNA, 30 bp, Homo sapiens; identical to SEQ ID NO: 98856
  chr20:31619405-31619435
  hypo

SEQ ID NO: 192082 - DNA, 31 bp, Homo sapiens; identical to SEQ ID NO: 33197
  chr20:31629661-31629692
  hypo

SEQ ID NO: 192083 - DNA, 306 bp, Homo sapiens
  chr20:31647791-31648097
  hypo
tcaagcgctgcagcacgctcctgggccacatcagcctgttctcagggtgagtctgcaggttccagcctgcaaccctgacccgctcaggatcatctcgcacccatctgggcatctcccaggtctccctggagctgccagctgcgggggcctgaactcgtcctacccctgcttgtcccgccggtttcaacccacttcacagaccgacagattgagtcccaccactgacagggactccggcttaatccatagcttgtgccacccactcctgggcaattcctctagtctggttcacgggatcctgccgtc

SEQ ID NO: 192084 - DNA, 30 bp, Homo sapiens; identical to SEQ ID NO: 33198
  chr20:31699289-31699319
  hypo

SEQ ID NO: 192085 - DNA, 31 bp, Homo sapiens; identical to SEQ ID NO: 98859
  chr20:31859916-31859947
  hypo

SEQ ID NO: 192086 - DNA, 82 bp, Homo sapiens; identical to SEQ ID NO: 33199
  chr20:31900462-31900544
  hypo

SEQ ID NO: 192087 - DNA, 30 bp, Homo sapiens
  chr20:31920896-31920926
  hypo
gtgccatcgtggacgcgggcccaggacaca

SEQ ID NO: 192088 - DNA, 254 bp, Homo sapiens
  chr20:31936114-31936368
  hypo
cacctggagactgtgcggagagactgcccatcccctccctgctgggccccagggctcacccagactcccacaggtgctgaaacctcaatccgctttaacaggagccaggaaatgggaaatctgggccccgccatcatccccttgaccagacttgttctctccaaactccttttgttcactcactccctgagtctcacctcctgcattagacaatgaggaattctttcctccaagaaccccgcagagggtgaggg

SEQ ID NO: 192089 - DNA, 30 bp, Homo sapiens; identical to SEQ ID NO: 98861
  chr20:31998164-31998194
  hypo

SEQ ID NO: 192090 - DNA, 30 bp, Homo sapiens
  chr20:32108697-32108727
  hypo
gtttttacacacgcacgcgcacacacacac

SEQ ID NO: 192091 - DNA, 38 bp, Homo sapiens; identical to SEQ ID NO: 33200
  chr20:32151829-32151867
  hypo

SEQ ID NO: 192092 - DNA, 30 bp, Homo sapiens; identical to SEQ ID NO: 98863
  chr20:32155205-32155235
  hypo

SEQ ID NO: 192093 - DNA, 30 bp, Homo sapiens
  chr20:32226528-32226558
  hypo
ttacgtagggagctacgtattttgggactt

SEQ ID NO: 192094 - DNA, 30 bp, Homo sapiens
  chr20:32232156-32232186
  hypo
gctggaactgtggccgcaaagccagcgaga

SEQ ID NO: 192095 - DNA, 30 bp, Homo sapiens
  chr20:32238767-32238797
  hypo
caattggatcgctttcgcgttttccagtgt

SEQ ID NO: 192096 - DNA, 30 bp, Homo sapiens
  chr20:32241627-32241657
  hypo
ccctcctgcgtgactcggagcaaggcactt

SEQ ID NO: 192097 - DNA, 30 bp, Homo sapiens; identical to SEQ ID NO: 98864
  chr20:32245601-32245631
  hypo

SEQ ID NO: 192098 - DNA, 174 bp, Homo sapiens
  chr20:32250054-32250228
  hypo
tggtgaggtcagcccgtgaggtcacaatgttgccagggcccagggggcagagcagacggagtgtgggccatcgtccccagtggtgaccagccctgccatgggaaactatagttcccacaaaaggaccaaagcacccaagcaggcccgcaaggagaggccggctgacatggacaa

SEQ ID NO: 192099 - DNA, 30 bp, Homo sapiens; identical to SEQ ID NO: 98865
  chr20:32264700-32264730
  hypo

SEQ ID NO: 192100 - DNA, 259 bp, Homo sapiens
  chr20:32266839-32267098
  hypo
tagcatgatgactggcgcgaaggcgagagggggaaaataaaacaagaataaaatatctatgccagacagatctcaccgagggcatgagaagccaggatagtggtgacctggcggtgtgaggggttggcaatgactggaaaggggcacaagagaaccttctagggtgttgaaaatgctcttatcttgatctgaatggtggcaacccagatgaataaatatataaagctgcgcggggcgcagtggctcatgcctgtaatcc

SEQ ID NO: 192101 - DNA, 30 bp, Homo sapiens
  chr20:32267663-32267693
  hypo
cagcccagttcaggtcgacgacaccgtcag

SEQ ID NO: 192102 - DNA, 43 bp, Homo sapiens; identical to SEQ ID NO: 98866
  chr20:32270660-32270703
  hypo

SEQ ID NO: 192103 - DNA, 30 bp, Homo sapiens
  chr20:32281242-32281272
  hypo
gctcagggcccgccacgtcacaggccctca

SEQ ID NO: 192104 - DNA, 211 bp, Homo sapiens
  chr20:32284901-32285112
  hypo
cacaaattgtggtgacgtgggcttcgttttgagaggttgagtacagcatggtgttctggtttaggagagagccacgttcaaagtctgattcttatacaccccaaatgcactcatggagaggtaaaagtgaacaatgtggaaggaaacactgtcactagaatcccttctgcagcttcagtgtggaaggctgcagcggcgagcatcaaacaag

SEQ ID NO: 192105 - DNA, 31 bp, Homo sapiens
  chr20:32286278-32286309
  hypo
ttctgctctcgctctcgctctcgctctccct

SEQ ID NO: 192106 - DNA, 317 bp, Homo sapiens
  chr20:32301636-32301953
  hypo
gcattaaacactagaccgcaacccgttttctgagaagtgccttgagggaagagctacgggagatgacaggaaggtgaagatgcttcagcgagagacaagagatcagggagctttgaggaggaagtgatcctcagagaactggtctggattgccaggagggaagtaaaggtggagtgcgagccaaaggcactcctggcgggggtgctgcgtgagcagatgtgtgcaggtggagctatacacatggcatgtgcatggaatggcagcgagttctgtgtgccaagggcacgccagggtggacacaacgggggtcagctgag

SEQ ID NO: 192107 - DNA, 24 bp, Homo sapiens
  chr20:32306032-32306056
  hypo
aaggctgggtgtggtggctcacgc

SEQ ID NO: 192108 - DNA, 101 bp, Homo sapiens
  chr20:32311063-32311164
  hypo
cgaaagtccatcttaaaaaaaaaaaaaaaagtatgaggaatgctcaggccaattatggagtgaaagctggtaaccagatgcttaacgggaagattgggata

SEQ ID NO: 192109 - DNA, 249 bp, Homo sapiens
  chr20:32332872-32333121
  hypo
tggcctcttcccactactctgcgggtatgaccccagatgacgaggatgtatttctctgcgggaagtgtaagaagcaattcaactcgctgccagcgtttatgacccacaagcgggaacagtgccaggggaatgcccccgccctggccacagtctcactggccaccaacagcatctacccaccttcggcagcacccacagcggtccagcaggccccaactcctgccaatcgccaggtatttgttcatttat

SEQ ID NO: 192110 - DNA, 30 bp, Homo sapiens; identical to SEQ ID NO: 12926
  chr20:32342006-32342036
  hypo

SEQ ID NO: 192111 - DNA, 165 bp, Homo sapiens; identical to SEQ ID NO: 33204
  chr20:32370538-32370703
  hypo

SEQ ID NO: 192112 - DNA, 201 bp, Homo sapiens
  chr20:32376689-32376890
  hypo
cagtgtgcgagtctgcgttcaaccgcaaggacaaactgaagagacacatgttgatccacgagcccttcaagaaatacaaatgccctttctcgtgagtagagactgccatgcaggggggtgggtagcgggacagattctccaggggtgctgctggggagggtgggacagatgtcaggcctgagggcaggcctctcctttttt

SEQ ID NO: 192113 - DNA, 20 bp, Homo sapiens
  chr20:32377129-32377149
  hypo
tgagccactgtgcctggcca

SEQ ID NO: 192114 - DNA, 969 bp, Homo sapiens
  chr20:32378462-32379431
  hypo
tgtgggtggcctcaggcgtcacggcccctccctgagcctgagatgacctggcaaagcgagccaaggtgcagagagtgagcagctgttccaggcagaggagaatggcaagtacaaaggcgcagagggaggagccagcgtggcatctctgaggagagcgagtgtggctggcgcagagagtggctggaagaaggcagacgacgagggtggagagagctggggccagatcacacaggtgctggtggggaaagagcctggattttattcccagcgcagggcactgttgcggggtgaaggtctggatgcttctcactgactttcccttgccctccaggcatgaagctccacaaatgcgccctgtgcagcaagtccttcagccgccgtgcccacctcgccgagcatcagcgcgcccacacgggcaactacaagttccgctgtgctggctgcgccaagggcttttcccgccacaaatacctcaaagatcaccgctgtcgtctcggcccccaaaaggacaaggacctgcaaacccggcggcccccccagaggagggcagccccccgcagttgcggcagtggtgggcgcaaggtgctgacccccttgcctgacccgctggggctggaggagctgaaggacacaggggctgggctggtgcccgaggctgtccccggcaagccgcccttcgcagagccggacgcggtgctgtccatcgttgtgggtggtgcggtgggcgcggaaactgagctggtggtacctggacacgctgaggggctgggctccaacctggctctggcggagctgcaggctggggccgagggcccatgtgccatgctcgctgtgcccgtctacatccaggcctccgagtgacggacctgaggtgtctgtttcctgggcaggcctgatgctcctgtttgggtccagggcccctgggggcagaccggtgatccttaccagtggaagcgagccatcgagcca

SEQ ID NO: 192115 - DNA, 36 bp, Homo sapiens; identical to SEQ ID NO: 98876
  chr20:32381767-32381803
  hypo

SEQ ID NO: 192116 - DNA, 30 bp, Homo sapiens
  chr20:32403562-32403592
  hypo
aaatgaggctcacgacgggacgaactcaac

SEQ ID NO: 192117 - DNA, 215 bp, Homo sapiens; identical to SEQ ID NO: 33209
  chr20:32413014-32413229
  hypo

SEQ ID NO: 192118 - DNA, 256 bp, Homo sapiens; identical to SEQ ID NO: 33210
  chr20:32436252-32436508
  hypo

SEQ ID NO: 192119 - DNA, 224 bp, Homo sapiens
  chr20:32441361-32441585
  hypo
tgtaatggggtccagcgctggctgggcccagacagactgtggtggcctgcgcagcgagcaggcgtgtgcgtgtgtggggcaggcaggatgtggtgcaggcaggttccatcgctttcgactctcactccaaagcagtagggccgcgttgctgctcactctctgcatagcatggtctgcacctgggagatgggcggggggaggggggcgggcggggtgggaagtgc

SEQ ID NO: 192120 - DNA, 138 bp, Homo sapiens
  chr20:32450377-32450515
  hypo
gcccggctggcttgtgtttatttaaggaatggaagcgttcactcaagccagacttcaggggcaaatgtacattgggaatctccaagggacatctcccaaactacctgaccagggtgtgggttccgccgaatatctttt

SEQ ID NO: 192121 - DNA, 30 bp, Homo sapiens
  chr20:32579427-32579457
  hypo
tgaccatatggttccgatggggctgccatc

SEQ ID NO: 192122 - DNA, 32 bp, Homo sapiens; identical to SEQ ID NO: 33212
  chr20:32584927-32584959
  hypo

SEQ ID NO: 192123 - DNA, 30 bp, Homo sapiens
  chr20:32609182-32609212
  hypo
gatcaaggggccgcccgcatctggtgaggg

SEQ ID NO: 192124 - DNA, 36 bp, Homo sapiens
  chr20:32630020-32630056
  hypo
aacaaagacgatccccgctcccgccgaggcagctgc

SEQ ID NO: 192125 - DNA, 30 bp, Homo sapiens; identical to SEQ ID NO: 98882
  chr20:32667833-32667863
  hypo

SEQ ID NO: 192126 - DNA, 100 bp, Homo sapiens
  chr20:32669098-32669198
  hypo
gttccaggcctggcacgtactcctcctgctcctactttctctacctgggaaatagccgctcaggacgaagctgctgctgtggtgtcgccacctctgagaa

SEQ ID NO: 192127 - DNA, 30 bp, Homo sapiens; identical to SEQ ID NO: 98883
  chr20:32676483-32676513
  hypo

SEQ ID NO: 192128 - DNA, 30 bp, Homo sapiens
  chr20:32677137-32677167
  hypo
ttctcagtcagagcccggcacacactgttt

SEQ ID NO: 192129 - DNA, 295 bp, Homo sapiens; identical to SEQ ID NO: 98884
  chr20:32677609-32677904
  hypo

SEQ ID NO: 192130 - DNA, 42 bp, Homo sapiens; identical to SEQ ID NO: 98885
  chr20:32768413-32768455
  hypo

SEQ ID NO: 192131 - DNA, 43 bp, Homo sapiens
  chr20:32772601-32772644
  hypo
aaaagttatatgaacaaagcccggtatatagaaaagatagtgc

SEQ ID NO: 192132 - DNA, 61 bp, Homo sapiens
  chr20:32772951-32773012
  hypo
tgctcagctttggtttcttctcggttcttttggtcagtccggatcttgctcatcaacaatt

SEQ ID NO: 192133 - DNA, 30 bp, Homo sapiens
  chr20:32938604-32938634
  hypo
gtgagccacagcgcccggcctgataaaaat

SEQ ID NO: 192134 - DNA, 93 bp, Homo sapiens
  chr20:32950142-32950235
  hypo
agggaggatttgaatccggtcagtgtaactctcaagtgtacattttttttcttttattttctttttaaccacgccctttaatgtacattgtta

SEQ ID NO: 192135 - DNA, 101 bp, Homo sapiens; identical to SEQ ID NO: 33214
  chr20:33085650-33085751
  hypo

SEQ ID NO: 192136 - DNA, 140 bp, Homo sapiens; identical to SEQ ID NO: 33215
  chr20:33112447-33112587
  hypo

SEQ ID NO: 192137 - DNA, 19 bp, Homo sapiens
  chr20:33112826-33112845
  hypo
ccccatttgccactttata

SEQ ID NO: 192138 - DNA, 244 bp, Homo sapiens
  chr20:33131627-33131871
  hypo
cgtgagcagggccggcgtttcagggaagtggcagcttctcgggaggtgccgcagctgccatctcccgtcagcactcatgcctccgcctcagccctggccacggctccctggaattctgatcctcctctgtgagctggtattgctgtttctccaaaaattaaaaatgctcaaaggattataggttttctcctctttcgtatgtttggctctgagacactgcatgttggcacgtttttcattgaga

SEQ ID NO: 192139 - DNA, 245 bp, Homo sapiens; identical to SEQ ID NO: 33217
  chr20:33134795-33135040
  hypo

SEQ ID NO: 192140 - DNA, 30 bp, Homo sapiens
  chr20:33155916-33155946
  hypo
gcttcccaggagttacgggatgtgcctgag

SEQ ID NO: 192141 - DNA, 30 bp, Homo sapiens
  chr20:33156242-33156272
  hypo
gcatatcgggagcaacgagccttcccacac

SEQ ID NO: 192142 - DNA, 26 bp, Homo sapiens
  chr20:33179692-33179718
  hypo
tagaaatttactttggtaggccggcg

SEQ ID NO: 192143 - DNA, 156 bp, Homo sapiens; identical to SEQ ID NO: 98893
  chr20:33183816-33183972
  hypo

SEQ ID NO: 192144 - DNA, 30 bp, Homo sapiens
  chr20:33210024-33210054
  hypo
taaaaagttacaatccggctgggcgtggtg

SEQ ID NO: 192145 - DNA, 17 bp, Homo sapiens
  chr20:33212875-33212892
  hypo
tggaaaaaaaacatatg

SEQ ID NO: 192146 - DNA, 241 bp, Homo sapiens
  chr20:33265772-33266013
  hypo
atgtttttaaagagtgttaaatgtgtattttttaaaaaatttattctggcagttgtttgttaaacgccaactattttccaggcactatgttaggttctacagatgcgttttggagtagtagactgatttattagctagttcaacaagtcgcttaacccttgtgtgctgaaaaatgtgctgattataggctaactagggacagttgaggaaggcttagaaattttttttttgttttggaaac

SEQ ID NO: 192147 - DNA, 27 bp, Homo sapiens
  chr20:33290340-33290367
  hypo
gggcacggtggctcacgcctgtaatcc

SEQ ID NO: 192148 - DNA, 26 bp, Homo sapiens
  chr20:33290606-33290632
  hypo
actccgtctcaaaaaaaaaaaaaaag

SEQ ID NO: 192149 - DNA, 30 bp, Homo sapiens; identical to SEQ ID NO: 12934
  chr20:33345729-33345759
  hypo

SEQ ID NO: 192150 - DNA, 16 bp, Homo sapiens
  chr20:33349757-33349773
  hypo
actgcatggtttctat

SEQ ID NO: 192151 - DNA, 43 bp, Homo sapiens
  chr20:33410313-33410356
  hypo
agacacacccatctccgtgtccttatagcgtttaataactctt

SEQ ID NO: 192152 - DNA, 135 bp, Homo sapiens
  chr20:33447336-33447471
  hypo
ggccgatgcagcaacgagccaggtagtggcgggcggcccgatggcaggaacgtctcccggaagcgctcggacatgttgggtggcagctgttcagccagggcacgggctaggggcagggacgggaggctgggcagg

SEQ ID NO: 192153 - DNA, 590 bp, Homo sapiens; identical to SEQ ID NO: 57155
  chr20:33464342-33464932
  hypo

SEQ ID NO: 192154 - DNA, 22 bp, Homo sapiens
  chr20:33540535-33540557
  hypo
cgaggctttgtatttttaacaa

SEQ ID NO: 192155 - DNA, 27 bp, Homo sapiens
  chr20:33541703-33541730
  hypo
ccagccgacttccctttcaagtaagat

SEQ ID NO: 192156 - DNA, 77 bp, Homo sapiens
  chr20:33544842-33544919
  hypo
tgagaccctgtcctaaaaacaaaacaaacgagcagcgaaggcatataattctgagggttgctcggcttgttttacag

SEQ ID NO: 192157 - DNA, 79 bp, Homo sapiens; identical to SEQ ID NO: 98902
  chr20:33547577-33547656
  hypo

SEQ ID NO: 192158 - DNA, 195 bp, Homo sapiens
  chr20:33572632-33572827
  hypo
accccctcacccccaccgccccagggcacccttgaggatcaaatcatcgaggccaaccctgccatggaggcctttggcaacgccaagaccctgaggaatgataactcctcccgctttgtgagtggctgaggtgggaggggtggcggggatgccgtaggccaccagcggcaggtcgggcacaggtggggacagtgc

SEQ ID NO: 192159 - DNA, 81 bp, Homo sapiens; identical to SEQ ID NO: 98904
  chr20:33579657-33579738
  hypo

SEQ ID NO: 192160 - DNA, 30 bp, Homo sapiens; identical to SEQ ID NO: 98905
  chr20:33581478-33581508
  hypo

SEQ ID NO: 192161 - DNA, 30 bp, Homo sapiens; identical to SEQ ID NO: 98906
  chr20:33588409-33588439
  hypo

SEQ ID NO: 192162 - DNA, 30 bp, Homo sapiens; identical to SEQ ID NO: 33223
  chr20:33589977-33590007
  hypo

SEQ ID NO: 192163 - DNA, 30 bp, Homo sapiens; identical to SEQ ID NO: 33224
  chr20:33665389-33665419
  hypo

SEQ ID NO: 192164 - DNA, 35 bp, Homo sapiens; identical to SEQ ID NO: 98909
  chr20:33696513-33696548
  hypo

SEQ ID NO: 192165 - DNA, 82 bp, Homo sapiens; identical to SEQ ID NO: 98910
  chr20:33803019-33803101
  hypo

SEQ ID NO: 192166 - DNA, 195 bp, Homo sapiens
  chr20:33834615-33834810
  hypo
catctttttctttcccgtgtctttcagaactggttaaagtcctatggctatctgcttccctatgactcacgggcatctgcgctgcactcagcgaaggccttgcagtcggcagtctccactatgcagcagttttacgggatcccggtcaccggtgtgttggatcagacaacgatcgagtaagatttccataggaca

SEQ ID NO: 192167 - DNA, 229 bp, Homo sapiens; identical to SEQ ID NO: 98911
  chr20:33854996-33855225
  hypo

SEQ ID NO: 192168 - DNA, 118 bp, Homo sapiens; identical to SEQ ID NO: 98912
  chr20:33864188-33864306
  hypo

SEQ ID NO: 192169 - DNA, 112 bp, Homo sapiens
  chr20:33876235-33876347
  hypo
ccccccttgcctcctcgtgcctgctcacctgtaactgcccgccaccacttgctcacagtcaatgaggacgaacttctccagggcctgccccgtgaagcggcggccagccttg

SEQ ID NO: 192170 - DNA, 650 bp, Homo sapiens
  chr20:33879775-33880425
  hypo
acttcagagagcaggctgaggcggtctggcccggaggcctcctgcccctgagcctcgctgagctcagggcccccgcgcacatggctggtcatgtagtccacatccagggcgctcaggaagggcagctcccgctcctcggagatgacccgcaggtaggcagcctcaccccgctccaggagggcgtcggccgccagccgagccgcctcgctgtgccgcagcaccagcggtgagctctcccgccaccacggcagcttcagctcttccacccggccccgcaggggtcccgccatgccctgggctcccaggaccccaggccccgggcctccgaacatgcctgccacgcggctgcctcacccgccggcagggcccatggcccgcacgctgggctggctgcagcaggaagaggagaccagcagaaccgccttctgcccgcccgctcgctgtgtgtgtggcagggcccccaaactgttgccaccctaaatcagagccacgctccaccctattgcccctggcctctggaacctgtcaggtcagccccacctgtctgcctgtgttgggactcgcctgcccagggaagcggcagtgccaggccctcggtgcacactcctgcctccctctcttcctcccagcaacgccgccccatccccacc

SEQ ID NO: 192171 - DNA, 30 bp, Homo sapiens
  chr20:33894302-33894332
  hypo
tggacatacagaaggcgctccttcttcagc

SEQ ID NO: 192172 - DNA, 20 bp, Homo sapiens
  chr20:33945866-33945886
  hypo
agaatgcaggctgggcgcgc

SEQ ID NO: 192173 - DNA, 21 bp, Homo sapiens
  chr20:33959417-33959438
  hypo
agccaccgcgcccagcctgag

SEQ ID NO: 192174 - DNA, 24 bp, Homo sapiens
  chr20:33988031-33988055
  hypo
ctcgtcctttttcctttccacctc

SEQ ID NO: 192175 - DNA, 30 bp, Homo sapiens; identical to SEQ ID NO: 33228
  chr20:34022336-34022366
  hypo

SEQ ID NO: 192176 - DNA, 42 bp, Homo sapiens; identical to SEQ ID NO: 98918
  chr20:34041980-34042022
  hypo

SEQ ID NO: 192177 - DNA, 192 bp, Homo sapiens
  chr20:34055201-34055393
  hypo
gtgggagcacagtctcgggaacccaacggatctggaagaatggatgggcgggagccggcccagctgctgctgctactagccaagacccaggagctggagaaggaagcccatgaaaggagccaggagttaatacagctgaagagtcaaggggatctggagaaggctgaacttcaggaccggtgagatggcctg

SEQ ID NO: 192178 - DNA, 50 bp, Homo sapiens; identical to SEQ ID NO: 98920
  chr20:34092135-34092185
  hypo

SEQ ID NO: 192179 - DNA, 30 bp, Homo sapiens
  chr20:34099496-34099526
  hypo
ggtcatggcccctccgcacacctacaggtt

SEQ ID NO: 192180 - DNA, 44 bp, Homo sapiens
  chr20:34110880-34110924
  hypo
tctgtaggggttcaacggtactgtcgaagcgtctgtcaaaccag

SEQ ID NO: 192181 - DNA, 30 bp, Homo sapiens
  chr20:34146738-34146768
  hypo
agggtgcgccagtaccggcgccagatgaag

SEQ ID NO: 192182 - DNA, 274 bp, Homo sapiens
  chr20:34147084-34147358
  hypo
cctggcctctgcccacgggcacccaccgtgaggatgtacacattgccacccatgtctgtgaactccaggtcttctggccggcccttcctcctcctctgctttcgcttcttcttgccagcctgagcctcctgcgcctcccgctccacgtcctctgcctccttcagcttcactaccggccaccagcccctcaggcggcggcagcgaaacagattgcacctcggcccggccccattgcgggccagctgcacagagcagagctcggggccccgggccc

SEQ ID NO: 192183 - DNA, 367 bp, Homo sapiens; identical to SEQ ID NO: 98921
  chr20:34147939-34148306
  hypo

SEQ ID NO: 192184 - DNA, 97 bp, Homo sapiens
  chr20:34166312-34166409
  hypo
gggattacaggcgtgagccaccgcgcctggccccttctactttaatgtggctactacaaaagttaaaattacgtatgtggctcgtgttatgtctttt

SEQ ID NO: 192185 - DNA, 172 bp, Homo sapiens
  chr20:34171851-34172023
  hypo
ctgcactcaccgtcccggtgtaggctggagggcagcccggctgagggctcgggcagcaaatccgggggcagctcagaggtgcaggccttggcttgcttgcccaggcccagccgcaggaagagctccagcttggcacagacctcaccaggggctgccccgggtgcctgtgtgt

SEQ ID NO: 192186 - DNA, 37 bp, Homo sapiens; identical to SEQ ID NO: 33230
  chr20:34176525-34176562
  hypo

SEQ ID NO: 192187 - DNA, 30 bp, Homo sapiens
  chr20:34192339-34192369
  hypo
caagggtcactgaatcggcagatccagagt

SEQ ID NO: 192188 - DNA, 148 bp, Homo sapiens; identical to SEQ ID NO: 98923
  chr20:34195357-34195505
  hypo

SEQ ID NO: 192189 - DNA, 84 bp, Homo sapiens; identical to SEQ ID NO: 98924
  chr20:34200332-34200416
  hypo

SEQ ID NO: 192190 - DNA, 30 bp, Homo sapiens; identical to SEQ ID NO: 98925
  chr20:34242964-34242994
  hypo

SEQ ID NO: 192191 - DNA, 117 bp, Homo sapiens; identical to SEQ ID NO: 98926
  chr20:34312501-34312618
  hypo

SEQ ID NO: 192192 - DNA, 19 bp, Homo sapiens
  chr20:34345914-34345933
  hypo
actattggccgggcgcggt

SEQ ID NO: 192193 - DNA, 30 bp, Homo sapiens; identical to SEQ ID NO: 132873
  chr20:34359683-34359713
  hypo

SEQ ID NO: 192194 - DNA, 470 bp, Homo sapiens; identical to SEQ ID NO: 132874
  chr20:34359741-34360211
  hypo

SEQ ID NO: 192195 - DNA, 41 bp, Homo sapiens; identical to SEQ ID NO: 98929
  chr20:34472078-34472119
  hypo

SEQ ID NO: 192196 - DNA, 551 bp, Homo sapiens; identical to SEQ ID NO: 132875
  chr20:34652339-34652890
  hypo

SEQ ID NO: 192197 - DNA, 95 bp, Homo sapiens; identical to SEQ ID NO: 98930
  chr20:34655042-34655137
  hypo

SEQ ID NO: 192198 - DNA, 87 bp, Homo sapiens; identical to SEQ ID NO: 33232
  chr20:34670677-34670764
  hypo

SEQ ID NO: 192199 - DNA, 238 bp, Homo sapiens; identical to SEQ ID NO: 132876
  chr20:34680126-34680364
  hypo

SEQ ID NO: 192200 - DNA, 988 bp, Homo sapiens; identical to SEQ ID NO: 57168
  chr20:34680572-34681560
  hypo

SEQ ID NO: 192201 - DNA, 24 bp, Homo sapiens
  chr20:34683669-34683693
  hypo
aaatgcaatttattggcagggcgt

SEQ ID NO: 192202 - DNA, 23 bp, Homo sapiens
  chr20:34683932-34683955
  hypo
gcgagactccatctcagggaaaa

SEQ ID NO: 192203 - DNA, 31 bp, Homo sapiens; identical to SEQ ID NO: 33235
  chr20:34730052-34730083
  hypo

SEQ ID NO: 192204 - DNA, 30 bp, Homo sapiens
  chr20:34839549-34839579
  hypo
gtcactgcgtgttgccgcatgcctagtgtc

SEQ ID NO: 192205 - DNA, 30 bp, Homo sapiens; identical to SEQ ID NO: 98937
  chr20:34844496-34844526
  hypo

SEQ ID NO: 192206 - DNA, 31 bp, Homo sapiens; identical to SEQ ID NO: 98938
  chr20:34859595-34859626
  hypo

SEQ ID NO: 192207 - DNA, 30 bp, Homo sapiens
  chr20:35000052-35000082
  hypo
ttactgcagccacaccgtggcgcctgctac

SEQ ID NO: 192208 - DNA, 30 bp, Homo sapiens
  chr20:35005171-35005201
  hypo
aggcctccagggtcccgcgtctcttcccct

SEQ ID NO: 192209 - DNA, 30 bp, Homo sapiens
  chr20:35060215-35060245
  hypo
cctgctgtcgcccacggaggccttcgcccg

SEQ ID NO: 192210 - DNA, 24 bp, Homo sapiens
  chr20:35088589-35088613
  hypo
aatcaaccttggctcacgcctgta

SEQ ID NO: 192211 - DNA, 83 bp, Homo sapiens; identical to SEQ ID NO: 33237
  chr20:35088672-35088755
  hypo

SEQ ID NO: 192212 - DNA, 166 bp, Homo sapiens; identical to SEQ ID NO: 98941
  chr20:35089001-35089167
  hypo

SEQ ID NO: 192213 - DNA, 37 bp, Homo sapiens
  chr20:35145388-35145425
  hypo
gctcacgcctgacctcgtgatccgcccgcctcggcct

SEQ ID NO: 192214 - DNA, 431 bp, Homo sapiens
  chr20:35155296-35155727
  hypo
gccagcgacaagcagcgccaggaggcccgcaagagactcctggcggccaagcgggcagcttctgtgcggcagaactcagccaccgagagcgcagacagcatcgagatttatgtcccggaggcccagaccaggctctgagaccatgcaggaggaaagaaacgattttaaatcattaaaaacacaaaaactaagtgcgaacggaacagagttttctcaacctttgctatggttattctgtctagagaccctgagccaactttcaaattgacgcatacaagggctcacaatttggcttttttgggtccctcccagctttaggttatgaagattttactcacaaaaaaaatcaacaaaaatcacgaaactagaaaactttttttttcctcttgctggccgtggtggactagatagatggacgtcggcaactcccg

SEQ ID NO: 192215 - DNA, 30 bp, Homo sapiens
  chr20:35156026-35156056
  hypo
tcacacacaacctcacgcgcacacacacac

SEQ ID NO: 192216 - DNA, 15 bp, Homo sapiens
  chr20:35168996-35169011
  hypo
tgatccttgctgggt

SEQ ID NO: 192217 - DNA, 65 bp, Homo sapiens; identical to SEQ ID NO: 98943
  chr20:35169055-35169120
  hypo

SEQ ID NO: 192218 - DNA, 13 bp, Homo sapiens
  chr20:35169198-35169211
  hypo
cccccatcctcct

SEQ ID NO: 192219 - DNA, 30 bp, Homo sapiens; identical to SEQ ID NO: 98945
  chr20:35206985-35207015
  hypo

SEQ ID NO: 192220 - DNA, 30 bp, Homo sapiens
  chr20:35244261-35244291
  hypo
aagcaatatgcacagcggcattgtttgtaa

SEQ ID NO: 192221 - DNA, 29 bp, Homo sapiens
  chr20:35380153-35380182
  hypo
ccgcacccggcactccctttttgtttata

SEQ ID NO: 192222 - DNA, 129 bp, Homo sapiens; identical to SEQ ID NO: 33239
  chr20:35441116-35441245
  hypo

SEQ ID NO: 192223 - DNA, 84 bp, Homo sapiens; identical to SEQ ID NO: 98948
  chr20:35442202-35442286
  hypo

SEQ ID NO: 192224 - DNA, 877 bp, Homo sapiens
  chr20:35443719-35444596
  hypo
gcttggtgtccctggggccctcgctgttgtcgggggcctcatgcagccggaagtcagcacactcgttgtccagacacagccggaggccagccgtgaagccattggcatcagccaccaggacatcgatggccttactgaccagggcggcctgctctctcagcccaggcagcacctcggcctccctggctctgcagagtcggaccgcatgggactcgtgtgtctcgcccaggggagcaggcacacactgggcagagtccccggcctcggcgtccgtctccagcatgggccgcgtactctggcaggaggcgaggtcacagcgctggaggttggagaggagcacgcggttctcgtactgcagcttcttgaccttgccgctgagctcgccgatctgcagcttggcggccgccagctcctcctgtgaaggttcgctgagcacagaacaactgtcctccgacagcgccacgtccagctcgtgctccgagcggaacttggccagctcgttcagcagcagcttgttctggtcctcgagctcggcagaggagcgccgcagcagctcggcctcctcttcgacaaactgcaggtgtcgccgcagctctgccaagctctccccgcactctccgccacccagcgcggagaaggccaggcgtgcctcaggacccccacagccacctccatgatccttcatgtcgtccatctcagcccgcaggcctcggttctccacctccagctccacgatgcggcggctcagcaggttggcttcctcctccaccagcttcaggtgcaccttcagctcggtctcccgcgagtggggggcatcggccagctcctcggctgacagcgcgctgtccaggtccccatagagcgagcggtacttcag

SEQ ID NO: 192225 - DNA, 85 bp, Homo sapiens; identical to SEQ ID NO: 98950
  chr20:35467711-35467796
  hypo

SEQ ID NO: 192226 - DNA, 43 bp, Homo sapiens
  chr20:35470831-35470874
  hypo
aatacctactcttaatgtgaccgaatgatttaaataagattgt

SEQ ID NO: 192227 - DNA, 472 bp, Homo sapiens; identical to SEQ ID NO: 132890
  chr20:35491258-35491730
  hypo

SEQ ID NO: 192228 - DNA, 146 bp, Homo sapiens
  chr20:35506570-35506716
  hypo
atcatgcgttacctccggcaaattgcttcttctctcggggctttgctttcccttcttgtaaaatcatccagtgttgctagcacctccctctacactgggccaggaggttaaggaggtaaagaaagaggctaggacgggcgcggtgg

SEQ ID NO: 192229 - DNA, 31 bp, Homo sapiens; identical to SEQ ID NO: 98952
  chr20:35553257-35553288
  hypo

SEQ ID NO: 192230 - DNA, 31 bp, Homo sapiens; identical to SEQ ID NO: 33243
  chr20:35612049-35612080
  hypo

SEQ ID NO: 192231 - DNA, 98 bp, Homo sapiens; identical to SEQ ID NO: 98954
  chr20:35615274-35615372
  hypo

SEQ ID NO: 192232 - DNA, 30 bp, Homo sapiens; identical to SEQ ID NO: 33245
  chr20:35627247-35627277
  hypo

SEQ ID NO: 192233 - DNA, 30 bp, Homo sapiens
  chr20:35742571-35742601
  hypo
aagcaattcactgaacgtgtgcgtgcttag

SEQ ID NO: 192234 - DNA, 21 bp, Homo sapiens
  chr20:35748758-35748779
  hypo
ccaccgcgcctgcccttgaat

SEQ ID NO: 192235 - DNA, 164 bp, Homo sapiens
  chr20:35753147-35753311
  hypo
cattttaataatatcccaaagtgattgtggtttgtgtgcatattaaatctgagaaggactagtgtacagggcatgaacaaacaagtcataaaagaaatacaaacggccaattaaaaacatatacaaggctgggtgtggtggctcacgtccgtaatcagcatttt

SEQ ID NO: 192236 - DNA, 37 bp, Homo sapiens; identical to SEQ ID NO: 33246
  chr20:35788335-35788372
  hypo

SEQ ID NO: 192237 - DNA, 137 bp, Homo sapiens; identical to SEQ ID NO: 33247
  chr20:35812618-35812755
  hypo

SEQ ID NO: 192238 - DNA, 88 bp, Homo sapiens; identical to SEQ ID NO: 98959
  chr20:35833167-35833255
  hypo

SEQ ID NO: 192239 - DNA, 94 bp, Homo sapiens; identical to SEQ ID NO: 98960
  chr20:35860692-35860786
  hypo

SEQ ID NO: 192240 - DNA, 517 bp, Homo sapiens; identical to SEQ ID NO: 98961
  chr20:35874022-35874539
  hypo

SEQ ID NO: 192241 - DNA, 322 bp, Homo sapiens
  chr20:35907655-35907977
  hypo
ttgctttttcacccacgtatgtgtcacctagcatagtgcctggtgcatagctgggactcgaaatatttgttgaacgtacaagaattcctgaattccaagggcttgccattaatatggtgttcttgccccgcggccagctttctcactcagcctgctgcacgtgttggatggggctgggtgttgagacttgtcccgcccatctctcggtggggaatcaggatcccatcaaggtaaatcagtgcctgaagatgtggctttggcttctgtcatttctgttaaatcctctccagccagctctgacccttgccgagctacattcctt

SEQ ID NO: 192242 - DNA, 280 bp, Homo sapiens
  chr20:35924129-35924409
  hypo
gtggtggtgaagtatgcgagttgctgcctgtaaagtgctgttcgcaacacctggccgttcatttgccgactgctgctgctgctggaacaatggccagggaacaaaacctgtcacagccagtcgaaggggtgtctcctagttgagatctgcaggatgaataggacttgtttgactttggtcatcaggaaaggaaagcccagaaatactggcaggagggctgggaagtaaagcacagaggtgcagagagaactagatgagagccgtacggcgcacagtgtgt

SEQ ID NO: 192243 - DNA, 30 bp, Homo sapiens; identical to SEQ ID NO: 98964
  chr20:35925492-35925522
  hypo

SEQ ID NO: 192244 - DNA, 138 bp, Homo sapiens
  chr20:35925945-35926083
  hypo
ggctctgtttacttacgaaggttgtttttattattcttcggttacttcatgttggaaacatggtgcaaagcagtgaagcagcagagccaaggtggcggcaggcctttttttttttttgagatggagtttcactcttgt

SEQ ID NO: 192245 - DNA, 94 bp, Homo sapiens; identical to SEQ ID NO: 33252
  chr20:35929625-35929719
  hypo

SEQ ID NO: 192246 - DNA, 103 bp, Homo sapiens; identical to SEQ ID NO: 98966
  chr20:35940185-35940288
  hypo

SEQ ID NO: 192247 - DNA, 283 bp, Homo sapiens; identical to SEQ ID NO: 98967
  chr20:35956276-35956559
  hypo

SEQ ID NO: 192248 - DNA, 123 bp, Homo sapiens
  chr20:35987181-35987304
  hypo
tctgggctgcaggccccgtccccagtgcacccctccatgtctgccggtgtccgccccggcctgccgtctccaccccagccccactggcagagccggtttgagtctactgtccctgagcatgtt

SEQ ID NO: 192249 - DNA, 30 bp, Homo sapiens; identical to SEQ ID NO: 33254
  chr20:36146054-36146084
  hypo

SEQ ID NO: 192250 - DNA, 420 bp, Homo sapiens
  chr20:36151087-36151507
  hypo
agaagctggcatacacggtgtcgcggaccgggcggcaggtgttgggggagcgcaggcagcgagcccccaactgaggccccagctcccagccctgggcggccgtatcatcaggtgctcctgtgcatctcggccagcacgggagccagtgccgcgcaggaatgtggggtcccctgtgttccctcgccagaggagcacttggcaaggtcagtgaggggccagtagacccccggagaagcagtaccgacaatgacgaagataccagatcccttcccaacccctttgcaccggtcccactaaggggcagggtcgagagaggaggggggatagggggagcagacccctgagatctgggcataggcaccgcattctgatctggacaaagtcgggacagcaccatcccagccccgaagccagggccat

SEQ ID NO: 192251 - DNA, 31 bp, Homo sapiens; identical to SEQ ID NO: 12954
  chr20:36235666-36235697
  hypo

SEQ ID NO: 192252 - DNA, 155 bp, Homo sapiens
  chr20:36474777-36474932
  hypo
tttatcctggttctccgactgtgggcaaacagttgaactgccctatccttattttctttctggatggtgtttgttttgtgtttaaggtgtatgtcccagtttgtgtactttgagaagttatgtatgtagggatatggtgtcggtgaatgtattat

SEQ ID NO: 192253 - DNA, 33 bp, Homo sapiens
  chr20:36475442-36475475
  hypo
gtattaaggaagatacggcgagtcaccctgcgc

SEQ ID NO: 192254 - DNA, 286 bp, Homo sapiens
  chr20:36493722-36494008
  hypo
aactcacagttaatccggctggacatgaaaaggagcccaaagatccagggaagctgtacggaaggcatggcttcttttttattttttattattgtagtaataatttatcgttttgactattactaccatcactaccatctatccacaggcctttttttcatcttgcaaaactggaattgcccgttcctccctccccccagcccctggcagccactattctgcattctgtctctgtggctgcctgcatgggaagggtttccgcaggcagctacgcatgggcattgtt

SEQ ID NO: 192255 - DNA, 47 bp, Homo sapiens
  chr20:36498750-36498797
  hypo
tgtcgaagtttgtgtcgggggactgcaccccccgacagcccctccct

SEQ ID NO: 192256 - DNA, 51 bp, Homo sapiens; identical to SEQ ID NO: 98973
  chr20:36532324-36532375
  hypo

SEQ ID NO: 192257 - DNA, 31 bp, Homo sapiens; identical to SEQ ID NO: 98974
  chr20:36567344-36567375
  hypo

SEQ ID NO: 192258 - DNA, 22 bp, Homo sapiens
  chr20:36571373-36571395
  hypo
tttatttttttgagacggagtc

SEQ ID NO: 192259 - DNA, 209 bp, Homo sapiens; identical to SEQ ID NO: 98975
  chr20:36572547-36572756
  hypo

SEQ ID NO: 192260 - DNA, 30 bp, Homo sapiens
  chr20:36605107-36605137
  hypo
acaagaggtggggtgcgctgaggcctatcc

SEQ ID NO: 192261 - DNA, 30 bp, Homo sapiens
  chr20:36623524-36623554
  hypo
taaattgattctgtacggaataaaaatgcc

SEQ ID NO: 192262 - DNA, 30 bp, Homo sapiens
  chr20:36624756-36624786
  hypo
gggtgatcaggcagacgtacctcctggcag

SEQ ID NO: 192263 - DNA, 31 bp, Homo sapiens; identical to SEQ ID NO: 33257
  chr20:36627480-36627511
  hypo

SEQ ID NO: 192264 - DNA, 33 bp, Homo sapiens; identical to SEQ ID NO: 98977
  chr20:36666709-36666742
  hypo

SEQ ID NO: 192265 - DNA, 30 bp, Homo sapiens
  chr20:36697634-36697664
  hypo
taggagagggaattacggctcaaagtagga

SEQ ID NO: 192266 - DNA, 206 bp, Homo sapiens
  chr20:36753454-36753660
  hypo
tccccgagaaggccccgcatagtgcctggcgcagagtgtgactcaaaaacattgattcctttttctccatccctttgaactttcagaacccttgagtattgtattttttttaaaattcacattgaagtatatcatgcatacaaacagagtgcgatcatgcatatgcggttgacacatcttcccatgttgaacgtgcttgtttaccc

SEQ ID NO: 192267 - DNA, 31 bp, Homo sapiens; identical to SEQ ID NO: 33258
  chr20:36759315-36759346
  hypo

SEQ ID NO: 192268 - DNA, 582 bp, Homo sapiens
  chr20:36760811-36761393
  hypo
tccacgaggagggcccgcaccttgatgaggttggactccgtaaggcagtcacggtatttctcatagaggatgcaaagaggaacgctcttctctgcagaaggggagaaaggagggtgctcatgatgcagaatcacccctcccaactctcttgcaactccaagaggcacagagaggggaaggaatgtgcttggggtcacacagcgggggaatggctgggcggatccctgaactccccactgtggctccagggttcccagcgaggagctggagagtggacactgagcagcgggtagaggacgcacttggactcccacgggccttggttctaatcctgcctttgcctcttctaatgggtgaccccgcgtgagccactccacctcccaggtcctcgatgtttggatctgcgtggcacaggcactcctaaggctgtgggaggatgagctgagcgagtgtcccggaagagcctggtgcgctcgggactcagggtgtgtgagccgcgggcccttcatcctggggaggatcagagccgacatctgcttgctgcaccaggcactgcacttcccacggcgggctcctacttca

SEQ ID NO: 192269 - DNA, 281 bp, Homo sapiens; identical to SEQ ID NO: 98980
  chr20:36764033-36764314
  hypo

SEQ ID NO: 192270 - DNA, 218 bp, Homo sapiens; identical to SEQ ID NO: 98981
  chr20:36765890-36766108
  hypo

SEQ ID NO: 192271 - DNA, 307 bp, Homo sapiens
  chr20:36766574-36766881
  hypo
tcccattgtagctgacggtgcgggcacagagcaggaggcggcagacgtactcctcagcggtgttgttggtgatgtgggcaaagacgtcaaagtcactgcccatgttcatgctctggcccacacggatccgcatggccatccctgtctcctccttctcggccagtttgttcaggtggttcgcccttgtgaaggcctccctctcctctgaggaccctgtaggggttgagaagagagcctcaatcacagctggaatagatcacaggaagggggctgcaacagggcgagctgtcttcgcagaggcctgatg

SEQ ID NO: 192272 - DNA, 354 bp, Homo sapiens; identical to SEQ ID NO: 98984
  chr20:36767669-36768023
  hypo

SEQ ID NO: 192273 - DNA, 280 bp, Homo sapiens
  chr20:36770536-36770816
  hypo
gttctggtcatgggccgagttgtagttggtcacgacgcgggtagggatgcccaggcacctcagcactgttggagaggagtggaaagcggggtgaggtcctggagacatccgccctgctctgggcctccacctgcccatctgcattccagggaacactgtacctgctgtccaagtgctgagaacatgagccagcccttcctgccgggacaatggcgcccacctctctggtcaccccatgtccattctatgcccctcacatcacagttgccagaaggagact

SEQ ID NO: 192274 - DNA, 408 bp, Homo sapiens; identical to SEQ ID NO: 132913
  chr20:36774949-36775357
  hypo

SEQ ID NO: 192275 - DNA, 161 bp, Homo sapiens; identical to SEQ ID NO: 98987
  chr20:36779358-36779519
  hypo

SEQ ID NO: 192276 - DNA, 190 bp, Homo sapiens
  chr20:36802858-36803048
  hypo
ctgatctggttactgcgccgatggttttgtctttccagaatgtcataggcatgaaatcacgcagtatacagccttttgtgtctggcttccttcgcttaccgtaatgtatttgattcatccctgttgttgcaggtatcagcggttcattcctttttattactgagtactattctgtcgcatgaatatacca

SEQ ID NO: 192277 - DNA, 31 bp, Homo sapiens; identical to SEQ ID NO: 98989
  chr20:36848110-36848141
  hypo

SEQ ID NO: 192278 - DNA, 44 bp, Homo sapiens
  chr20:36990662-36990706
  hypo
ggtcagggctgggcgcggtggctcacgcctttattttttgtttt

SEQ ID NO: 192279 - DNA, 31 bp, Homo sapiens; identical to SEQ ID NO: 98990
  chr20:36992908-36992939
  hypo

SEQ ID NO: 192280 - DNA, 121 bp, Homo sapiens; identical to SEQ ID NO: 98991
  chr20:37036240-37036361
  hypo

SEQ ID NO: 192281 - DNA, 50 bp, Homo sapiens; identical to SEQ ID NO: 33264
  chr20:37054865-37054915
  hypo

SEQ ID NO: 192282 - DNA, 30 bp, Homo sapiens; identical to SEQ ID NO: 98993
  chr20:37057167-37057197
  hypo

SEQ ID NO: 192283 - DNA, 17 bp, Homo sapiens
  chr20:37106514-37106531
  hypo
aacactttgggaggccg

SEQ ID NO: 192284 - DNA, 44 bp, Homo sapiens; identical to SEQ ID NO: 33265
  chr20:37114342-37114386
  hypo

SEQ ID NO: 192285 - DNA, 178 bp, Homo sapiens
  chr20:37145083-37145261
  hypo
gttattagaaaacatccgaaggaaaagatgaacagatttgatgacaaataacaagcgaggaaaaattatttgcaacaaataaaatagccagagggttatcgtttctatgtaaatatttagattggtgcaaaagtaattgcggtttttgccattaaaagtaatgcggccaaaactgcag

SEQ ID NO: 192286 - DNA, 30 bp, Homo sapiens; identical to SEQ ID NO: 33266
  chr20:37217070-37217100
  hypo

SEQ ID NO: 192287 - DNA, 653 bp, Homo sapiens; identical to SEQ ID NO: 132922
  chr20:37274624-37275277
  hypo

SEQ ID NO: 192288 - DNA, 1034 bp, Homo sapiens; identical to SEQ ID NO: 132923
  chr20:37302481-37303515
  hypo

SEQ ID NO: 192289 - DNA, 961 bp, Homo sapiens; identical to SEQ ID NO: 132924
  chr20:37351554-37352515
  hypo

SEQ ID NO: 192290 - DNA, 1112 bp, Homo sapiens; identical to SEQ ID NO: 57199
  chr20:37352606-37353718
  hypo

SEQ ID NO: 192291 - DNA, 25 bp, Homo sapiens
  chr20:37383057-37383082
  hypo
ctttaaaaaaaacaatggagtcggc

SEQ ID NO: 192292 - DNA, 24 bp, Homo sapiens
  chr20:37383501-37383525
  hypo
gattacaggcgtgagcccctgcgc

SEQ ID NO: 192293 - DNA, 644 bp, Homo sapiens; identical to SEQ ID NO: 132935
  chr20:37433708-37434352
  hypo

SEQ ID NO: 192294 - DNA, 233 bp, Homo sapiens; identical to SEQ ID NO: 12972
  chr20:37434488-37434721
  hypo

SEQ ID NO: 192295 - DNA, 157 bp, Homo sapiens; identical to SEQ ID NO: 12973
  chr20:37434736-37434893
  hypo

SEQ ID NO: 192296 - DNA, 439 bp, Homo sapiens; identical to SEQ ID NO: 12974
  chr20:37434930-37435369
  hypo

SEQ ID NO: 192297 - DNA, 429 bp, Homo sapiens; identical to SEQ ID NO: 57210
  chr20:37435487-37435916
  hypo

SEQ ID NO: 192298 - DNA, 30 bp, Homo sapiens; identical to SEQ ID NO: 33275
  chr20:37464579-37464609
  hypo

SEQ ID NO: 192299 - DNA, 24 bp, Homo sapiens
  chr20:37501417-37501441
  hypo
acggtggcgcatgcccgtagtccc

SEQ ID NO: 192300 - DNA, 21 bp, Homo sapiens
  chr20:37528725-37528746
  hypo
tgtgcccggtcatgtctgagt

SEQ ID NO: 192301 - DNA, 233 bp, Homo sapiens
  chr20:37536534-37536767
  hypo
aagtcatccttgagccggaggacctccagcgcaggcagccgtgggtgagtccggggcagggcagccaggagtccctgtgtgtgctcctgcctgtggtgcctgggtgcagcctctaggacccactttgtcctctcaggaaggtggtgcggcgagccagcctgtcggacaggaccaacctgtataggaaggagtatgagggagaggccatcctgtggcagcggagtgcagctgag

SEQ ID NO: 192302 - DNA, 121 bp, Homo sapiens; identical to SEQ ID NO: 33276
  chr20:37540090-37540211
  hypo

SEQ ID NO: 192303 - DNA, 146 bp, Homo sapiens
  chr20:37549577-37549723
  hypo
agttctgagggaagccgcgtgctcctcaggagagagctgtttaggttttccgatctttttgctcaggggccaaacactgaaggcacgtactgcccaacccactgagcgcctgaggccattccctccttttccgcatgcctcctgcc

SEQ ID NO: 192304 - DNA, 30 bp, Homo sapiens
  chr20:37551499-37551529
  hypo
cgtagccccttgccacgcggcaccggtggg

SEQ ID NO: 192305 - DNA, 121 bp, Homo sapiens; identical to SEQ ID NO: 99009
  chr20:37588338-37588459
  hypo

SEQ ID NO: 192306 - DNA, 148 bp, Homo sapiens; identical to SEQ ID NO: 99010
  chr20:37596754-37596902
  hypo

SEQ ID NO: 192307 - DNA, 30 bp, Homo sapiens
  chr20:37597845-37597875
  hypo
ccggtattcaaggtacgtcaaataatcatg

SEQ ID NO: 192308 - DNA, 86 bp, Homo sapiens; identical to SEQ ID NO: 99011
  chr20:37622328-37622414
  hypo

SEQ ID NO: 192309 - DNA, 30 bp, Homo sapiens
  chr20:37631465-37631495
  hypo
ccagacagagggagacggagacgttttagc

SEQ ID NO: 192310 - DNA, 30 bp, Homo sapiens
  chr20:37632149-37632179
  hypo
cattgcagatcataccgagtttttagtaac

SEQ ID NO: 192311 - DNA, 199 bp, Homo sapiens; identical to SEQ ID NO: 99012
  chr20:37632408-37632607
  hypo

SEQ ID NO: 192312 - DNA, 44 bp, Homo sapiens; identical to SEQ ID NO: 33278
  chr20:37632980-37633024
  hypo

SEQ ID NO: 192313 - DNA, 283 bp, Homo sapiens
  chr20:37646802-37647085
  hypo
tgagatttgggtgggaacacagccaaaccatatcactcatttagtatgagaagggcacaggacacgggatgccatcgataccatcctggcacatctgtggcctgtccggtcctggaggtggtagaaagtccagacagtgagggggcaatggagatggcagagaaccaggagagttgggggccgggagctggcgaagagtagttccaagaagcagcggccagcagagccgagtgctgctgaggccatcaggaagatgccttgcgtttggtgctacccagttgtt

SEQ ID NO: 192314 - DNA, 152 bp, Homo sapiens; identical to SEQ ID NO: 33279
  chr20:37656984-37657136
  hypo

SEQ ID NO: 192315 - DNA, 45 bp, Homo sapiens; identical to SEQ ID NO: 33280
  chr20:37659949-37659994
  hypo

SEQ ID NO: 192316 - DNA, 30 bp, Homo sapiens
  chr20:37671071-37671101
  hypo
agtgaactttggcgccgctggaggacattt

SEQ ID NO: 192317 - DNA, 76 bp, Homo sapiens
  chr20:37671508-37671584
  hypo
cttgctggaacagggcgtctccttgcctgcttaagtgcggccaaagagattcccagcgcagcgttcccccaggccc

SEQ ID NO: 192318 - DNA, 26 bp, Homo sapiens
  chr20:37672973-37672999
  hypo
cacccggcctcttcatttcttattat

SEQ ID NO: 192319 - DNA, 168 bp, Homo sapiens; identical to SEQ ID NO: 33282
  chr20:37673287-37673455
  hypo

SEQ ID NO: 192320 - DNA, 27 bp, Homo sapiens
  chr20:37995836-37995863
  hypo
aagagcgaaactccatctcaaaaaaac

SEQ ID NO: 192321 - DNA, 23 bp, Homo sapiens
  chr20:38065080-38065103
  hypo
tcggcctcccaaagacctgggat

SEQ ID NO: 192322 - DNA, 30 bp, Homo sapiens
  chr20:38232087-38232117
  hypo
agcagagaaggagagcgtgcctccctcttt

SEQ ID NO: 192323 - DNA, 35 bp, Homo sapiens; identical to SEQ ID NO: 99021
  chr20:38483395-38483430
  hypo

SEQ ID NO: 192324 - DNA, 19 bp, Homo sapiens
  chr20:38487554-38487573
  hypo
gtacagattagtggtttgt

SEQ ID NO: 192325 - DNA, 26 bp, Homo sapiens
  chr20:38787923-38787949
  hypo
ccaccgtgcccagcctcagttctctt

SEQ ID NO: 192326 - DNA, 82 bp, Homo sapiens; identical to SEQ ID NO: 99024
  chr20:38809043-38809125
  hypo

SEQ ID NO: 192327 - DNA, 29 bp, Homo sapiens
  chr20:38877139-38877168
  hypo
ccgcgcccggcctatttgatattttctaa

SEQ ID NO: 192328 - DNA, 104 bp, Homo sapiens
  chr20:38888177-38888281
  hypo
agttaaaggaacttgaaaaaccgcagatccaagaaggacactctgatcttccttccatctctcaaaagagagagatgaaggccggacgtggtggttcatgcctg

SEQ ID NO: 192329 - DNA, 45 bp, Homo sapiens; identical to SEQ ID NO: 99027
  chr20:39054743-39054788
  hypo

SEQ ID NO: 192330 - DNA, 39 bp, Homo sapiens; identical to SEQ ID NO: 99028
  chr20:39076957-39076996
  hypo

SEQ ID NO: 192331 - DNA, 811 bp, Homo sapiens; identical to SEQ ID NO: 12976
  chr20:39316041-39316852
  hypo

SEQ ID NO: 192332 - DNA, 2220 bp, Homo sapiens; identical to SEQ ID NO: 57214
  chr20:39316983-39319203
  hypo

SEQ ID NO: 192333 - DNA, 91 bp, Homo sapiens; identical to SEQ ID NO: 99031
  chr20:39436087-39436178
  hypo

SEQ ID NO: 192334 - DNA, 98 bp, Homo sapiens
  chr20:39632545-39632643
  hypo
tcacctctacttcttcggggacctgcagtgtctaacaccgactagggtacacagtgacactcaaaaatgaggcataggcatataggccgggcattgtg

SEQ ID NO: 192335 - DNA, 43 bp, Homo sapiens; identical to SEQ ID NO: 33285
  chr20:39672621-39672664
  hypo

SEQ ID NO: 192336 - DNA, 22 bp, Homo sapiens
  chr20:39687576-39687598
  hypo
ggattaaaaaaaagaatgtggc

SEQ ID NO: 192337 - DNA, 43 bp, Homo sapiens
  chr20:39695463-39695506
  hypo
gattacaggcgtgagccaccgcgcctggccacttctgtgcctt

SEQ ID NO: 192338 - DNA, 30 bp, Homo sapiens; identical to SEQ ID NO: 33286
  chr20:39739653-39739683
  hypo

SEQ ID NO: 192339 - DNA, 221 bp, Homo sapiens
  chr20:39791146-39791367
  hypo
aacatgcgcttcctccgagagcggctgacggtaagtgccacccagggctgtctgtagatgggggcaggggaagccaagagcccttcagctgggggcctgactgcctgactggcactcctgctctataccatgcaggacctggagcagcgcagcggggacatcacctacgggcagtttgctcagctgtaccgcagcctcatgtacagcgcccagaagacggt

SEQ ID NO: 192340 - DNA, 43 bp, Homo sapiens; identical to SEQ ID NO: 33287
  chr20:39831201-39831244
  hypo

SEQ ID NO: 192341 - DNA, 24 bp, Homo sapiens
  chr20:39847848-39847872
  hypo
gtcagccaccgcacctggccttcc

SEQ ID NO: 192342 - DNA, 22 bp, Homo sapiens
  chr20:39893818-39893840
  hypo
atcactgaagtcattacgataa

SEQ ID NO: 192343 - DNA, 30 bp, Homo sapiens; identical to SEQ ID NO: 99039
  chr20:39972290-39972320
  hypo

SEQ ID NO: 192344 - DNA, 129 bp, Homo sapiens; identical to SEQ ID NO: 33290
  chr20:39989812-39989941
  hypo

SEQ ID NO: 192345 - DNA, 540 bp, Homo sapiens
  chr20:39990754-39991294
  hypo
gccaatgttgctaggcgctcctcgaggctctgcacgcgctcttccagcatggtcccaaagccgcccactccccacccccccatgtccaacctcagacagcatccccttgctccaccctctgtcccattgagcgtctccagaccctcaagcagcccgtccacacctccctcgagcatggcagcagagagcctcgtaagctcatccccggccggggcaccggggcccctttgggtctcggtgactgcctgcagggccctctcaaggccatccatacgggcattgatcaaggctagttgcccacagcagctgcccctgccagacacgctcaggccctgcagctggctgcccagctgtgacagctcctggcgcagggccagctcccggccatcaaggctctggtgcagcctccggctggcggcctgaccctcctcacattgccgccgtacctcctgcacccgcaggtcacactcactctggacgccttgcagcttctgctcaaagccatccagcaggctcccccagagtcggtgcagccgtcgg

SEQ ID NO: 192346 - DNA, 76 bp, Homo sapiens; identical to SEQ ID NO: 57218
  chr20:39994654-39994730
  hypo

SEQ ID NO: 192347 - DNA, 1051 bp, Homo sapiens; identical to SEQ ID NO: 132955
  chr20:39994762-39995813
  hypo

SEQ ID NO: 192348 - DNA, 24 bp, Homo sapiens
  chr20:40010905-40010929
  hypo
tggactgggcgtcacggtccatct

SEQ ID NO: 192349 - DNA, 323 bp, Homo sapiens; identical to SEQ ID NO: 99043
  chr20:40020280-40020603
  hypo

SEQ ID NO: 192350 - DNA, 65 bp, Homo sapiens; identical to SEQ ID NO: 99044
  chr20:40161662-40161727
  hypo

SEQ ID NO: 192351 - DNA, 30 bp, Homo sapiens
  chr20:40167645-40167675
  hypo
actgcccagatacgccgcagtgactccact

SEQ ID NO: 192352 - DNA, 310 bp, Homo sapiens; identical to SEQ ID NO: 132957
  chr20:40321458-40321768
  hypo

SEQ ID NO: 192353 - DNA, 42 bp, Homo sapiens; identical to SEQ ID NO: 99045
  chr20:40352412-40352454
  hypo

SEQ ID NO: 192354 - DNA, 30 bp, Homo sapiens
  chr20:40627220-40627250
  hypo
tcctcggactgcagcgtgctctgcaccgca

SEQ ID NO: 192355 - DNA, 30 bp, Homo sapiens
  chr20:40739011-40739041
  hypo
aggaacttgacctggcggacgaagcccaga

SEQ ID NO: 192356 - DNA, 30 bp, Homo sapiens; identical to SEQ ID NO: 99046
  chr20:41614691-41614721
  hypo

SEQ ID NO: 192357 - DNA, 919 bp, Homo sapiens; identical to SEQ ID NO: 132959
  chr20:41816996-41817915
  hypo

SEQ ID NO: 192358 - DNA, 741 bp, Homo sapiens; identical to SEQ ID NO: 12983
  chr20:41818007-41818748
  hypo

SEQ ID NO: 192359 - DNA, 383 bp, Homo sapiens; identical to SEQ ID NO: 132961
  chr20:41818804-41819187
  hypo

SEQ ID NO: 192360 - DNA, 37 bp, Homo sapiens
  chr20:41967666-41967703
  hypo
agagacgagggagggaggagaccgtggaaagcaggag

SEQ ID NO: 192361 - DNA, 342 bp, Homo sapiens; identical to SEQ ID NO: 99050
  chr20:42088444-42088786
  hypo

SEQ ID NO: 192362 - DNA, 30 bp, Homo sapiens
  chr20:42089197-42089227
  hypo
agccgcagtagatctcgaagtatctcaaaa

SEQ ID NO: 192363 - DNA, 27 bp, Homo sapiens
  chr20:42098590-42098617
  hypo
tttttttttttttttctgaggcggagt

SEQ ID NO: 192364 - DNA, 131 bp, Homo sapiens
  chr20:42142556-42142687
  hypo
cccggagcaagtggccggctgcgaaccagtttctgccaccgtcctgccgcagcttagcgccgggccggccagctccagcaccagcacagtgcggcttctggaatggacagaggccgcggccccgcccccag

SEQ ID NO: 192365 - DNA, 144 bp, Homo sapiens; identical to SEQ ID NO: 33296
  chr20:42192720-42192864
  hypo

SEQ ID NO: 192366 - DNA, 92 bp, Homo sapiens; identical to SEQ ID NO: 33297
  chr20:42193731-42193823
  hypo

SEQ ID NO: 192367 - DNA, 183 bp, Homo sapiens
  chr20:42199169-42199352
  hypo
tcgcagccgcacagggcggggagcaggtgcaccctagccctacagcagccacccaataactcctgtcacactcctcctcccctccagctcttcttccacctgcagcgggagcgccggttcctggagccccgggccaggttctacgctgctgaggtggccagcgccattggctacctgcactcc

SEQ ID NO: 192368 - DNA, 121 bp, Homo sapiens
  chr20:42215916-42216037
  hypo
atcggacagaacgtgagcggtaacacctcataaattcagaacaccctgcacttgtgggatggattgtgcttccttacttcagtggaaaagtggttcgtttcggctgggcgtgctggctcac

SEQ ID NO: 192369 - DNA, 45 bp, Homo sapiens
  chr20:42218619-42218664
  hypo
ttccagtgacagaaattgtggaaagcaacacgagttgtatgtgtt

SEQ ID NO: 192370 - DNA, 28 bp, Homo sapiens
  chr20:42229176-42229204
  hypo
cttgtgatccgcccgccttggcctctgg

SEQ ID NO: 192371 - DNA, 29 bp, Homo sapiens
  chr20:42281345-42281374
  hypo
ttaaagagaaaccagagtggccgggcgcg

SEQ ID NO: 192372 - DNA, 170 bp, Homo sapiens; identical to SEQ ID NO: 33298
  chr20:42314842-42315012
  hypo

SEQ ID NO: 192373 - DNA, 31 bp, Homo sapiens; identical to SEQ ID NO: 33299
  chr20:42320467-42320498
  hypo

SEQ ID NO: 192374 - DNA, 262 bp, Homo sapiens; identical to SEQ ID NO: 99057
  chr20:42345994-42346256
  hypo

SEQ ID NO: 192375 - DNA, 31 bp, Homo sapiens; identical to SEQ ID NO: 33300
  chr20:42565991-42566022
  hypo

SEQ ID NO: 192376 - DNA, 55 bp, Homo sapiens
  chr20:42712322-42712377
  hypo
gccaggtgaagagaacgtgaccggggctatcctgaggctgcgggtggccagggac

SEQ ID NO: 192377 - DNA, 275 bp, Homo sapiens
  chr20:42745400-42745675
  hypo
cctattttataaatacgaatggaaggattgagaaaatgcatgtcaaaggcggagctcagggccccgcaccggcatagaccagcagggggagcgctgtgaccagaagtgagggatcctcccaggcataggttttcgctcctaggtttttcatcaggcctcctttggcctcctttctgcagccaggatcacgtttagaaaacacacatctgatcatgtcattaacttaaaaacccttcatggctgggcgcggtggctcacgcctgtaatcccagcac

SEQ ID NO: 192378 - DNA, 43 bp, Homo sapiens; identical to SEQ ID NO: 99060
  chr20:42774215-42774258
  hypo

SEQ ID NO: 192379 - DNA, 30 bp, Homo sapiens; identical to SEQ ID NO: 99061
  chr20:42788288-42788318
  hypo

SEQ ID NO: 192380 - DNA, 183 bp, Homo sapiens
  chr20:42804038-42804221
  hypo
tgagcatttagactgcgttacatttttcccgtaacaatcccaaggccttgctctctggctcgcctgcaaggctggcaccaaagtcccttcccatggcttccaaatgccgctgtccatcaaatctccatagtctctggtttcctgggatcaccaacagacaacccgaagcggaggagctggcgg

SEQ ID NO: 192381 - DNA, 30 bp, Homo sapiens
  chr20:42825782-42825812
  hypo
tcatccacgaagactcgagcttgctcagaa

SEQ ID NO: 192382 - DNA, 97 bp, Homo sapiens
  chr20:42826252-42826349
  hypo
gagttgactgctggaagaagacgctattgtactgcaatgtataaactttggaggatgaaggacaggagacttagaacgtcgacgacgctgagttctc

SEQ ID NO: 192383 - DNA, 211 bp, Homo sapiens; identical to SEQ ID NO: 33301
  chr20:42833283-42833494
  hypo

SEQ ID NO: 192384 - DNA, 114 bp, Homo sapiens
  chr20:42885824-42885938
  hypo
gtgcgaggagcgggacgtgagcctgccacagagcgagcacaaggagccctggttcatgcggctcaacctgggcgaggaggtgcccgtcatcatccaccgcgacaacatcatcag

SEQ ID NO: 192385 - DNA, 30 bp, Homo sapiens
  chr20:42908075-42908105
  hypo
agtgtgaaaacattccgtagtttagaagta

SEQ ID NO: 192386 - DNA, 157 bp, Homo sapiens
  chr20:42924600-42924757
  hypo
ataaataaaataaaaaagacaattaaagactagtgtggcagaaagtattatcctcacttcgtagttgagtaaccagctcagaaaaacgaagtgatttgcccaagatcatacagctgaggagctgattggcagatctggaacgcggtctgcttggctc

SEQ ID NO: 192387 - DNA, 152 bp, Homo sapiens; identical to SEQ ID NO: 99065
  chr20:42931303-42931455
  hypo

SEQ ID NO: 192388 - DNA, 239 bp, Homo sapiens; identical to SEQ ID NO: 99066
  chr20:42965897-42966136
  hypo

SEQ ID NO: 192389 - DNA, 38 bp, Homo sapiens
  chr20:42980254-42980292
  hypo
aaaagaaagaaagaaaggaaacccgctttcattcgtct

SEQ ID NO: 192390 - DNA, 18 bp, Homo sapiens
  chr20:42998544-42998562
  hypo
gcccggccctgggctctt

SEQ ID NO: 192391 - DNA, 24 bp, Homo sapiens
  chr20:42999917-42999941
  hypo
tgttgctttttgtttttgagacgg

SEQ ID NO: 192392 - DNA, 196 bp, Homo sapiens; identical to SEQ ID NO: 99069
  chr20:43019102-43019298
  hypo

SEQ ID NO: 192393 - DNA, 31 bp, Homo sapiens; identical to SEQ ID NO: 99070
  chr20:43047810-43047841
  hypo

SEQ ID NO: 192394 - DNA, 131 bp, Homo sapiens; identical to SEQ ID NO: 99071
  chr20:43052652-43052783
  hypo

SEQ ID NO: 192395 - DNA, 18 bp, Homo sapiens
  chr20:43113465-43113483
  hypo
aaaactggctgggcgcgg

SEQ ID NO: 192396 - DNA, 41 bp, Homo sapiens; identical to SEQ ID NO: 99073
  chr20:43154800-43154841
  hypo

SEQ ID NO: 192397 - DNA, 155 bp, Homo sapiens; identical to SEQ ID NO: 99074
  chr20:43219719-43219874
  hypo

SEQ ID NO: 192398 - DNA, 166 bp, Homo sapiens
  chr20:43243174-43243340
  hypo
gcctgaggagcgatgcgacaggcatgatggaggtcgagtcctcctactcggacttcatctcctgtgaccggacaggccgtcggaatgcggtccctgacatccagggagactcagaggctgtgagcgtgaggaagctggctggagacatgggcgagctggcactcga

SEQ ID NO: 192399 - DNA, 84 bp, Homo sapiens
  chr20:43329105-43329189
  hypo
tagtaataacaacagcgttgagcactcacactgtaccagagcaggggtggcgccgcgctgcacacctgccgcccagggtctcca

SEQ ID NO: 192400 - DNA, 30 bp, Homo sapiens
  chr20:43329900-43329930
  hypo
ggtcgctgggagcagcgcacggcccagccc

SEQ ID NO: 192401 - DNA, 30 bp, Homo sapiens
  chr20:43338227-43338257
  hypo
cctatcccgtggccccgcctcctgcaaagc

SEQ ID NO: 192402 - DNA, 30 bp, Homo sapiens
  chr20:43338647-43338677
  hypo
ggtagaggccgtaagcgggaaagcgggcac

SEQ ID NO: 192403 - DNA, 200 bp, Homo sapiens; identical to SEQ ID NO: 99075
  chr20:43356085-43356285
  hypo

SEQ ID NO: 192404 - DNA, 884 bp, Homo sapiens; identical to SEQ ID NO: 132992
  chr20:43438334-43439218
  hypo

SEQ ID NO: 192405 - DNA, 312 bp, Homo sapiens; identical to SEQ ID NO: 132993
  chr20:43439247-43439559
  hypo

SEQ ID NO: 192406 - DNA, 223 bp, Homo sapiens
  chr20:43465518-43465741
  hypo
gttgtgcccggaagtcgtgaagacttctgggatggattcatcctgcatcaatgagggctagttgttttcagctaaagcttgtgagtatgagggcacagggaccgtgcttgtgagtaagcgggccggcatgctgctgggggtgcgtcaggtagagagactatagcgtgtgcatctgttcctctctctcaatgtctgcccgaatctccttcgccctccccagagt

SEQ ID NO: 192407 - DNA, 136 bp, Homo sapiens
  chr20:43530110-43530246
  hypo
acgtttcctaggccccgaaacctgacatttgctctttctttttctcttgctcttgttctagggaatgacaatggataaaagtgagctggtacagaaagccaaactcgctgagcaggctgagcgatatgatgatatg

SEQ ID NO: 192408 - DNA, 30 bp, Homo sapiens; identical to SEQ ID NO: 99078
  chr20:43568409-43568439
  hypo

SEQ ID NO: 192409 - DNA, 200 bp, Homo sapiens; identical to SEQ ID NO: 99079
  chr20:43568747-43568947
  hypo

SEQ ID NO: 192410 - DNA, 30 bp, Homo sapiens; identical to SEQ ID NO: 99080
  chr20:43569165-43569195
  hypo

SEQ ID NO: 192411 - DNA, 30 bp, Homo sapiens; identical to SEQ ID NO: 99081
  chr20:43586155-43586185
  hypo

SEQ ID NO: 192412 - DNA, 53 bp, Homo sapiens
  chr20:43587084-43587137
  hypo
gaaacagcagtggtgcggtggaaagggcatcaaccctgcgatccggacaagtc

SEQ ID NO: 192413 - DNA, 102 bp, Homo sapiens
  chr20:43660155-43660257
  hypo
gaaagaaaatacaaccgaaaagtttaaaacagaggaatggaaaaagatacactaggcaaatactcactaaaagaaagtgggtgaaacaatattgatatcaaa

SEQ ID NO: 192414 - DNA, 32 bp, Homo sapiens; identical to SEQ ID NO: 33307
  chr20:43717046-43717078
  hypo

SEQ ID NO: 192415 - DNA, 30 bp, Homo sapiens; identical to SEQ ID NO: 133000
  chr20:43726309-43726339
  hypo

SEQ ID NO: 192416 - DNA, 53 bp, Homo sapiens; identical to SEQ ID NO: 133001
  chr20:43726576-43726629
  hypo

SEQ ID NO: 192417 - DNA, 330 bp, Homo sapiens; identical to SEQ ID NO: 57248
  chr20:43726764-43727094
  hypo

SEQ ID NO: 192418 - DNA, 174 bp, Homo sapiens; identical to SEQ ID NO: 99086
  chr20:43926536-43926710
  hypo

SEQ ID NO: 192419 - DNA, 30 bp, Homo sapiens; identical to SEQ ID NO: 99087
  chr20:43938169-43938199
  hypo

SEQ ID NO: 192420 - DNA, 25 bp, Homo sapiens
  chr20:43961085-43961110
  hypo
ccactgtgcccggcctatatatata

SEQ ID NO: 192421 - DNA, 31 bp, Homo sapiens; identical to SEQ ID NO: 99089
  chr20:43963003-43963034
  hypo

SEQ ID NO: 192422 - DNA, 227 bp, Homo sapiens; identical to SEQ ID NO: 57251
  chr20:43976985-43977212
  hypo

SEQ ID NO: 192423 - DNA, 139 bp, Homo sapiens
  chr20:43977554-43977693
  hypo
ctattcaaactcgagcgtcgtagctcaaaagcagccataaatactaaaggaatgagggcagctaggtcctaataaaacattatttatagacaccgacatttgaatttaatataattttcatgtgtcacgaaatattatt

SEQ ID NO: 192424 - DNA, 30 bp, Homo sapiens; identical to SEQ ID NO: 99091
  chr20:43995525-43995555
  hypo

SEQ ID NO: 192425 - DNA, 344 bp, Homo sapiens; identical to SEQ ID NO: 99092
  chr20:44005911-44006255
  hypo

SEQ ID NO: 192426 - DNA, 17 bp, Homo sapiens
  chr20:44033745-44033762
  hypo
ccagatagggccgggcg

SEQ ID NO: 192427 - DNA, 1375 bp, Homo sapiens; identical to SEQ ID NO: 133012
  chr20:44098344-44099719
  hypo

SEQ ID NO: 192428 - DNA, 30 bp, Homo sapiens; identical to SEQ ID NO: 33311
  chr20:44456136-44456166
  hypo

SEQ ID NO: 192429 - DNA, 74 bp, Homo sapiens; identical to SEQ ID NO: 57259
  chr20:44462766-44462840
  hypo

SEQ ID NO: 192430 - DNA, 189 bp, Homo sapiens; identical to SEQ ID NO: 99096
  chr20:44463584-44463773
  hypo

SEQ ID NO: 192431 - DNA, 30 bp, Homo sapiens; identical to SEQ ID NO: 99097
  chr20:44469105-44469135
  hypo

SEQ ID NO: 192432 - DNA, 78 bp, Homo sapiens; identical to SEQ ID NO: 99098
  chr20:44469455-44469533
  hypo

SEQ ID NO: 192433 - DNA, 30 bp, Homo sapiens; identical to SEQ ID NO: 33313
  chr20:44470444-44470474
  hypo

SEQ ID NO: 192434 - DNA, 18 bp, Homo sapiens
  chr20:44498388-44498406
  hypo
aagaagcctttcttgccg

SEQ ID NO: 192435 - DNA, 42 bp, Homo sapiens; identical to SEQ ID NO: 33314
  chr20:44502011-44502053
  hypo

SEQ ID NO: 192436 - DNA, 30 bp, Homo sapiens; identical to SEQ ID NO: 99102
  chr20:44516335-44516365
  hypo

SEQ ID NO: 192437 - DNA, 399 bp, Homo sapiens; identical to SEQ ID NO: 133023
  chr20:44518896-44519295
  hypo

SEQ ID NO: 192438 - DNA, 24 bp, Homo sapiens
  chr20:44537143-44537167
  hypo
aaataaaaaaataggccgggcaca

SEQ ID NO: 192439 - DNA, 30 bp, Homo sapiens; identical to SEQ ID NO: 99104
  chr20:44538273-44538303
  hypo

SEQ ID NO: 192440 - DNA, 23 bp, Homo sapiens
  chr20:44538962-44538985
  hypo
gtttgtttgccaggtgcggtggt

SEQ ID NO: 192441 - DNA, 172 bp, Homo sapiens; identical to SEQ ID NO: 57263
  chr20:44540033-44540205
  hypo

SEQ ID NO: 192442 - DNA, 398 bp, Homo sapiens; identical to SEQ ID NO: 57264
  chr20:44540444-44540842
  hypo

SEQ ID NO: 192443 - DNA, 33 bp, Homo sapiens
  chr20:44560011-44560044
  hypo
tgggttttgttttgtttgagacggagttttgct

SEQ ID NO: 192444 - DNA, 35 bp, Homo sapiens; identical to SEQ ID NO: 33316
  chr20:44560414-44560449
  hypo

SEQ ID NO: 192445 - DNA, 30 bp, Homo sapiens; identical to SEQ ID NO: 33317
  chr20:44567519-44567549
  hypo

SEQ ID NO: 192446 - DNA, 101 bp, Homo sapiens
  chr20:44573534-44573635
  hypo
gtggcccccacgtctcggccgcagccaaggactccgtggaaggcatctgcagtaagatctaccacatctccctggagtacgtcaaacggatccgagagaag

SEQ ID NO: 192447 - DNA, 112 bp, Homo sapiens
  chr20:44574034-44574146
  hypo
cggcgatgcagttctcgttcttctgcctggcagcacaacccacgggcctgagccttcttgcctgacagcccaaggcacggcatacggggccctgcttcggtactgagtgtgt

SEQ ID NO: 192448 - DNA, 30 bp, Homo sapiens; identical to SEQ ID NO: 33318
  chr20:44577543-44577573
  hypo

SEQ ID NO: 192449 - DNA, 133 bp, Homo sapiens
  chr20:44578452-44578585
  hypo
tcaccaggtgctgtacggtctggccatctgccgtggtgatctcttggatgtaggcggcttcctcctgccaggaccaagacagctctagcctcatttctctaccccaacccctgcctgtcgctggccagagggc

SEQ ID NO: 192450 - DNA, 21 bp, Homo sapiens
  chr20:44601522-44601543
  hypo
gggcgctgtgagtcacgcctg

SEQ ID NO: 192451 - DNA, 301 bp, Homo sapiens; identical to SEQ ID NO: 99111
  chr20:44601782-44602083
  hypo

SEQ ID NO: 192452 - DNA, 121 bp, Homo sapiens; identical to SEQ ID NO: 33322
  chr20:44602322-44602443
  hypo

SEQ ID NO: 192453 - DNA, 707 bp, Homo sapiens; identical to SEQ ID NO: 133037
  chr20:44642404-44643111
  hypo

SEQ ID NO: 192454 - DNA, 607 bp, Homo sapiens; identical to SEQ ID NO: 57276
  chr20:44660334-44660941
  hypo

SEQ ID NO: 192455 - DNA, 170 bp, Homo sapiens
  chr20:44707475-44707645
  hypo
aaaaagggagaccttcgagagctggagtgttttgccctttttatttcccctcaaacagataacccaagtatgtaagcaaacaggggatctgcagcacaggcacagcggcaatctctcaagcagcactttccgtaaacctgggttaacatctggaccggcagccatttgga

SEQ ID NO: 192456 - DNA, 99 bp, Homo sapiens
  chr20:44707991-44708090
  hypo
tcccaaggtaactcacggcttcagggtactttaccttcgtgtggggctgggtcttgatggagccgtattcatatttcttctttccgctgccttattaat

SEQ ID NO: 192457 - DNA, 23 bp, Homo sapiens
  chr20:44720299-44720322
  hypo
aaccctattgagaggtgacagcg

SEQ ID NO: 192458 - DNA, 121 bp, Homo sapiens; identical to SEQ ID NO: 99116
  chr20:44720741-44720862
  hypo

SEQ ID NO: 192459 - DNA, 150 bp, Homo sapiens; identical to SEQ ID NO: 133054
  chr20:44802975-44803125
  hypo

SEQ ID NO: 192460 - DNA, 460 bp, Homo sapiens; identical to SEQ ID NO: 133055
  chr20:44803172-44803632
  hypo

SEQ ID NO: 192461 - DNA, 30 bp, Homo sapiens; identical to SEQ ID NO: 33324
  chr20:44869323-44869353
  hypo

SEQ ID NO: 192462 - DNA, 203 bp, Homo sapiens
  chr20:44893573-44893776
  hypo
agactccttggctagcactgctcacctgcccaggggcaacctgttagaaccctccacctcaggtgcccctggcctgcacctgtctccctgccctgcccccaccctgcccgtgtgccggtgccaccggcagagccgtgctgtacatcatgttgacagtagaaattacatcccgagctgctgttttacaccgcgccctgtcagaa

SEQ ID NO: 192463 - DNA, 225 bp, Homo sapiens; identical to SEQ ID NO: 13016
  chr20:44935839-44936064
  hypo

SEQ ID NO: 192464 - DNA, 156 bp, Homo sapiens; identical to SEQ ID NO: 57288
  chr20:44936314-44936470
  hypo

SEQ ID NO: 192465 - DNA, 803 bp, Homo sapiens; identical to SEQ ID NO: 57289
  chr20:44936608-44937411
  hypo

SEQ ID NO: 192466 - DNA, 299 bp, Homo sapiens; identical to SEQ ID NO: 133062
  chr20:44937425-44937724
  hypo

SEQ ID NO: 192467 - DNA, 77 bp, Homo sapiens
  chr20:44978786-44978863
  hypo
ctgctgcgattccagcgcagcttgggcccagctctggccagtcccaggctggcctggtgctcgccccttgtgtgacc

SEQ ID NO: 192468 - DNA, 158 bp, Homo sapiens
  chr20:44982232-44982390
  hypo
ggctcagcagaactgcaaaggcgtcggcaaattgaagggaattcggggaagagcagcataagtaatgaaggcgcttgggggattaatttaccagaaaagattaaaggagctaaatccatgcagctttgccaagtgacgactaccaggggctttcagat

SEQ ID NO: 192469 - DNA, 31 bp, Homo sapiens; identical to SEQ ID NO: 33330
  chr20:45000400-45000431
  hypo

SEQ ID NO: 192470 - DNA, 30 bp, Homo sapiens
  chr20:45006368-45006398
  hypo
gccctgtcacaggcacgccctctgtctctt

SEQ ID NO: 192471 - DNA, 140 bp, Homo sapiens
  chr20:45242088-45242228
  hypo
ctgttcttacctggccggctggactccaacaagcatcaggatcttgagggcgattcgccggtgcaggttccactcctcaatggcgctggccatgatcagcccactgaggaagaggaagttggtgtcgaggaagtactggg

SEQ ID NO: 192472 - DNA, 142 bp, Homo sapiens
  chr20:45337749-45337891
  hypo
ttctgttttgttcttcggcccatcccaagcctagcgtagtgcctggtatgtggtggtgtccaaacccaagcgtggagtgaatgagggatgaatccatgagagagtgagcggctccagtgggtatgcgcgagtgtctcactcg

SEQ ID NO: 192473 - DNA, 129 bp, Homo sapiens
  chr20:45343198-45343327
  hypo
aacaaggacagtgcacgtaggaggcccagcacgtgcagtggtggagcggcatgaaagcatacagtatgtgccgggaacaaacatgttggcaaggtgtgtggggcggggctgtggcgacagagtccggga

SEQ ID NO: 192474 - DNA, 30 bp, Homo sapiens
  chr20:45379389-45379419
  hypo
ggtgaagagttggaacggctttttctccag

SEQ ID NO: 192475 - DNA, 122 bp, Homo sapiens
  chr20:45380532-45380654
  hypo
ttttcattttcttgccgctttctaacagtatcactcatacatttcagagagtcccatagactttccgtaaggggtggagtcacagaagcgggcatctgttgcttggacgccatccacttcca

SEQ ID NO: 192476 - DNA, 1616 bp, Homo sapiens; identical to SEQ ID NO: 133077
  chr20:45523119-45524735
  hypo

SEQ ID NO: 192477 - DNA, 67 bp, Homo sapiens
  chr20:45628461-45628528
  hypo
tgaccttcggagccccggtttcttcatctgtacaacggggttaatggcatcgcgtgctcagagcgct

SEQ ID NO: 192478 - DNA, 30 bp, Homo sapiens
  chr20:45771568-45771598
  hypo
aggccacgcgtgagccgagcagatgaggaa

SEQ ID NO: 192479 - DNA, 113 bp, Homo sapiens
  chr20:45803227-45803340
  hypo
tcgtgttcatggctgcggtgctaatgcagcccacgtgctaagcgcggtcctggcagtagctaatgtttaaggagcactcgctctgccagttttgccaccgttttcatggacta

SEQ ID NO: 192480 - DNA, 33 bp, Homo sapiens; identical to SEQ ID NO: 99128
  chr20:45829043-45829076
  hypo

SEQ ID NO: 192481 - DNA, 277 bp, Homo sapiens
  chr20:45833333-45833610
  hypo
agttattacaaaacccgaaggattacagcatggaaagcctcagcacagagccccacgtggggcaggcccacatcagcgacacttggaggaatataggtgacctttgcttctctagactaaagaaaataaataagaatatagatggggtcctgatgtaccctgatatgaaggtggcagctaaatgctgacctttggaaaactcaactctgattatcgccactcgactgtatagtttaaaatggacggtcggccgggcgcggtgactcatgcctgtaat

SEQ ID NO: 192482 - DNA, 197 bp, Homo sapiens; identical to SEQ ID NO: 99130
  chr20:45837755-45837952
  hypo

SEQ ID NO: 192483 - DNA, 30 bp, Homo sapiens
  chr20:45858816-45858846
  hypo
aaaaacaatgacctacgagcccaaaatgtc

SEQ ID NO: 192484 - DNA, 22 bp, Homo sapiens
  chr20:45859283-45859305
  hypo
cccacctcggcctcccaaagtg

SEQ ID NO: 192485 - DNA, 30 bp, Homo sapiens
  chr20:45875414-45875444
  hypo
agtggcaactggctacggctgccaagtggt

SEQ ID NO: 192486 - DNA, 70 bp, Homo sapiens
  chr20:45878124-45878194
  hypo
ggactgttgctggaccgactcgctcagctccttcaaatccatctcagctttgcttcgatctgaaagaaac

SEQ ID NO: 192487 - DNA, 41 bp, Homo sapiens; identical to SEQ ID NO: 33334
  chr20:45880360-45880401
  hypo

SEQ ID NO: 192488 - DNA, 108 bp, Homo sapiens; identical to SEQ ID NO: 99133
  chr20:45885507-45885615
  hypo

SEQ ID NO: 192489 - DNA, 34 bp, Homo sapiens; identical to SEQ ID NO: 99134
  chr20:45908163-45908197
  hypo

SEQ ID NO: 192490 - DNA, 101 bp, Homo sapiens
  chr20:45938701-45938802
  hypo
atccaagaaagccggcgcttacaaggatccagaggttcagcgctactagctggcctctgtcccaccagtgaggacaccgttcccagcggctgctttacctg

SEQ ID NO: 192491 - DNA, 142 bp, Homo sapiens
  chr20:45949053-45949195
  hypo
ctgaaacgccaggtacgaagggacaggccctccacagtcaccttgtcacattcctttggggagcgaagagttcagacccaacatgtcacccaaattaccctggccagccaccacgtaaagatgctgcggctgtgcatggtgg

SEQ ID NO: 192492 - DNA, 37 bp, Homo sapiens; identical to SEQ ID NO: 33336
  chr20:45968503-45968540
  hypo

SEQ ID NO: 192493 - DNA, 121 bp, Homo sapiens; identical to SEQ ID NO: 99137
  chr20:46011001-46011122
  hypo

SEQ ID NO: 192494 - DNA, 198 bp, Homo sapiens; identical to SEQ ID NO: 99138
  chr20:46013565-46013763
  hypo

SEQ ID NO: 192495 - DNA, 28 bp, Homo sapiens
  chr20:46103341-46103369
  hypo
tctggccgcctttcttcatttttgtggg

SEQ ID NO: 192496 - DNA, 20 bp, Homo sapiens
  chr20:46143916-46143936
  hypo
tttttttttgagatggagtc

SEQ ID NO: 192497 - DNA, 32 bp, Homo sapiens; identical to SEQ ID NO: 99141
  chr20:46175276-46175308
  hypo

SEQ ID NO: 192498 - DNA, 31 bp, Homo sapiens
  chr20:46175547-46175578
  hypo
tacaggcatgagccaccgctaccggcctgcc

SEQ ID NO: 192499 - DNA, 466 bp, Homo sapiens
  chr20:46234978-46235444
  hypo
tctcaacgtgtggtgcgtggactcccggtagtctctgagaaccttttaagggttctacatggttaagactattctcataataatgctaatgtgttatttgctattttcatcccgttggtgtttgcaccgatggtggaaatgcggtgatgcataaaattgctgacaccttaccatgaattaaggcagtggcgccagactccgctcctaggtagacattgcattcttcactgccaggagctcataaagaaaaaaaaaaatcagttttccactgaggattgtccatgatgaagcagcaacactacacctggccctcattcccttttttccttaagtacctttcactgtacccttaagtactgtcgttttaatgttctgtgtgatgagaatggaaaatgtgcacaaagacttctgcctgccaaagtatgatggctgtctccgggaaaagcacttgcgcagtttgcgttgt

SEQ ID NO: 192500 - DNA, 253 bp, Homo sapiens
  chr20:46305159-46305412
  hypo
cggctctcagagcctcgcaggtcagggccggctgcagtcaggagggggagccgttgggagggaagggagccttcttacctgtcccagctgctcacacgccgtctggtactcagcacgctgacacaggtccttcacacgctggtacttgggcagaaagttctcctcctgggcgtccaccttgtcattgtctctcttgtgtagcagcttgctatggggcagagagcaggagccgcggggccggcctctcagctct

SEQ ID NO: 192501 - DNA, 171 bp, Homo sapiens
  chr20:46315384-46315555
  hypo
tctggcctggtacgtcgggacttcagcagcgtctcagatatcacaatcgtccggggcagaaattgtgacgctgccgctggggtagcttggcagctgtggacaccgttgctatgtaaggcgggaggtgagtcactgtctccaaggctcccctggactcggctttctcagccc

SEQ ID NO: 192502 - DNA, 338 bp, Homo sapiens
  chr20:46365436-46365774
  hypo
ccctgctcacctgtccggtagccagtgctattgaggtacacggcaaaggtgcggctctcgtgctgtgcctgccaggagggcgaggagcagttctcattgttggtgtaggtgttgtggttgtggacgtacttgccagtgaggatggaggagcgtgaggggcagcacatgggtgtggtcacgaaggcgttgatgaagtgcgccccgccctgctccatgatgcgccgggtcttgttcatcacctgcatggaacctgcaagtcaagggtggaagtaaggcgcagggcaggagacccgggcggcaccggcaccagggggctctcagcacgtggcatccctagg

SEQ ID NO: 192503 - DNA, 122 bp, Homo sapiens
  chr20:46390912-46391034
  hypo
cccatgtccctccatcgggaaacactacgggatgctttgcacttgaaactacgattgcagcagccagcgttctaagatgcacattcacgttccttcagagagacagacgtggagtgctaata

SEQ ID NO: 192504 - DNA, 30 bp, Homo sapiens
  chr20:46429277-46429307
  hypo
ttccacggctcaggccgcactgtgggagct

SEQ ID NO: 192505 - DNA, 141 bp, Homo sapiens
  chr20:46429633-46429774
  hypo
ttccccgggccagggcgtcagctgagtcctggcagtgcaggcagcccccaagctgggcatctgggcagcagggaggggggggagcttcagggaggacgcggtgggtagcacgtgtctcaggggacacgtgtgcgtgtgaga

SEQ ID NO: 192506 - DNA, 30 bp, Homo sapiens
  chr20:46454253-46454283
  hypo
gtttgaatgatgggacgagcactcccagca

SEQ ID NO: 192507 - DNA, 30 bp, Homo sapiens
  chr20:46471815-46471845
  hypo
tctggcctcacctcccgctgctcctctcct

SEQ ID NO: 192508 - DNA, 60 bp, Homo sapiens
  chr20:46489239-46489299
  hypo
ccagactggcttcatgctgtgcggcagaacatgatcacccgtgaccgggagctggtgcag

SEQ ID NO: 192509 - DNA, 30 bp, Homo sapiens
  chr20:46609657-46609687
  hypo
cccgaatgcacctgccgtcagggccatctt

SEQ ID NO: 192510 - DNA, 84 bp, Homo sapiens
  chr20:46798540-46798624
  hypo
catgtgcatccgcaccgcagacgcaggagtgctcagcgtctaacagagtgtacgtgccaagtcacatgacggtgcttcttaata

SEQ ID NO: 192511 - DNA, 312 bp, Homo sapiens
  chr20:46823363-46823675
  hypo
gtgcaccatcaccgccgtggggcccacaggtaatgggagatgcccccaggtcctggtttgtgcttcgccagagccctcctagagctgcaggcgatgatgggagcttttcaaacaccagcagggcctagatgagctgctccagggacaggagtgttgcgggcgaatgagctggacgagggccagccctgcagggcgcgcagacttgcggctctcttcgcaggcttttggcccaaacagctctttggaaaagagcacaggaatggccccggaaggtgggacctgtttccatggtgcacgcgcaacattggagga

SEQ ID NO: 192512 - DNA, 208 bp, Homo sapiens
  chr20:46846105-46846313
  hypo
gtcatccattcagtacgtattcattgagctcccactctgtgccaagcaagattccaggcatcggggcgtgaaacgctagaaaaaagacacagatgaaatatagtctaatcaggtgagataaagacaggaggcaggaggaaacgatgggaggagggagtgagggaggaaggacaagcgaatgccagtgaattgccggtttgctcatgca

SEQ ID NO: 192513 - DNA, 106 bp, Homo sapiens
  chr20:46888888-46888994
  hypo
atgcagtacccggcacgaggaggtgctccagaaatgcttgcagaacaaatgaacaaatgactacacagtagtattatgcacatgtgtgttccgatgagcacgtgtg

SEQ ID NO: 192514 - DNA, 188 bp, Homo sapiens
  chr20:46972056-46972244
  hypo
gcagcgcctcagctccgcccatactcgctccgccctggtgggctccagcctttccctttccctggggctcagcctcccaatcagtcaaatgggcagattaacacccatggccttgactccgtcagagactgggggaagaaatcgtgagtcagggcagcgaggtctgcggggagcgttgtgaaggtgtg

SEQ ID NO: 192515 - DNA, 85 bp, Homo sapiens
  chr20:47027448-47027533
  hypo
agggtggggctcctgcgcgctctgtggagtgggaagcccaggcctgcagccgtggtatgaatggctgcagcggcacctggggagc

SEQ ID NO: 192516 - DNA, 261 bp, Homo sapiens
  chr20:47117550-47117811
  hypo
ccctcgaagatgccacgtcatcagcctctggcccgagggcttcccagagcctccctttctccgttttgggtgacttgggcaggcactggcgtctacatctgtgtactcttggcccctagtgggtgtgacctgggccctcccatcagacacacttcaatctcatcccacacagcccagggccaggccttggcacctcatgcacagactcagacaacgcacctgcgatccgggcgctgagactctgcacgtggcctcatccca

SEQ ID NO: 192517 - DNA, 31 bp, Homo sapiens; identical to SEQ ID NO: 33340
  chr20:47214550-47214581
  hypo

SEQ ID NO: 192518 - DNA, 31 bp, Homo sapiens; identical to SEQ ID NO: 99146
  chr20:47247200-47247231
  hypo

SEQ ID NO: 192519 - DNA, 265 bp, Homo sapiens; identical to SEQ ID NO: 99147
  chr20:47252918-47253183
  hypo

SEQ ID NO: 192520 - DNA, 47 bp, Homo sapiens; identical to SEQ ID NO: 99148
  chr20:47268238-47268285
  hypo

SEQ ID NO: 192521 - DNA, 143 bp, Homo sapiens
  chr20:47273536-47273679
  hypo
gagagggagggctgccggacaccccgccctgggacactcactctttggccttcgtggccaccaggaggcgcagagggcggcgggagcagaaggactggttgaggatggactccacctctgaaaacggccgcaggaacaccagg

SEQ ID NO: 192522 - DNA, 182 bp, Homo sapiens
  chr20:47274120-47274302
  hypo
caaggtcaacctagccgctccggccatgggtatgtcgctccttgcagcccaaagcattcctaattgccacaggggcaagctgggctccagccagcacggcaggtgcatctcccccacccacctgcacacgccccaggcaaagccggaaggccccagggctgaatcctcggccagccacaccc

SEQ ID NO: 192523 - DNA, 171 bp, Homo sapiens; identical to SEQ ID NO: 33341
  chr20:47296130-47296301
  hypo

SEQ ID NO: 192524 - DNA, 30 bp, Homo sapiens; identical to SEQ ID NO: 57302
  chr20:47340101-47340131
  hypo

SEQ ID NO: 192525 - DNA, 30 bp, Homo sapiens
  chr20:47343907-47343937
  hypo
ccatgtcaatacttccgccctgcagccccc

SEQ ID NO: 192526 - DNA, 264 bp, Homo sapiens; identical to SEQ ID NO: 13025
  chr20:47443672-47443936
  hypo

SEQ ID NO: 192527 - DNA, 483 bp, Homo sapiens; identical to SEQ ID NO: 13026
  chr20:47443944-47444427
  hypo

SEQ ID NO: 192528 - DNA, 128 bp, Homo sapiens; identical to SEQ ID NO: 13027
  chr20:47444452-47444580
  hypo

SEQ ID NO: 192529 - DNA, 183 bp, Homo sapiens; identical to SEQ ID NO: 13028
  chr20:47444609-47444792
  hypo

SEQ ID NO: 192530 - DNA, 241 bp, Homo sapiens; identical to SEQ ID NO: 13029
  chr20:47444920-47445161
  hypo

SEQ ID NO: 192531 - DNA, 156 bp, Homo sapiens; identical to SEQ ID NO: 99157
  chr20:47490311-47490467
  hypo

SEQ ID NO: 192532 - DNA, 31 bp, Homo sapiens; identical to SEQ ID NO: 33347
  chr20:47559246-47559277
  hypo

SEQ ID NO: 192533 - DNA, 30 bp, Homo sapiens
  chr20:47562901-47562931
  hypo
atttggtctgctacacgcttccccgcagcc

SEQ ID NO: 192534 - DNA, 44 bp, Homo sapiens
  chr20:47563130-47563174
  hypo
ggcttccgaaaaccccgacttccccaggctcaggtgatcctccc

SEQ ID NO: 192535 - DNA, 31 bp, Homo sapiens; identical to SEQ ID NO: 33348
  chr20:47601990-47602021
  hypo

SEQ ID NO: 192536 - DNA, 23 bp, Homo sapiens
  chr20:47617870-47617893
  hypo
ccggccctcactctgggactctt

SEQ ID NO: 192537 - DNA, 220 bp, Homo sapiens
  chr20:47659757-47659977
  hypo
gtgtccagacatgatcgtcttggcacagcttgagggttttctacagaaactggtagagatgctagacagacacaagatgccagccagcctcctttgcgattggctcttagaggtggaaaatggtaaagtcatcaggctcattctccctaggactagaggaacatgttaattatattaaagtagattagtgggccgggtgtggtggctcacgcttgtaatc

SEQ ID NO: 192538 - DNA, 31 bp, Homo sapiens; identical to SEQ ID NO: 13030
  chr20:47663142-47663173
  hypo

SEQ ID NO: 192539 - DNA, 30 bp, Homo sapiens; identical to SEQ ID NO: 133091
  chr20:47663221-47663251
  hypo

SEQ ID NO: 192540 - DNA, 159 bp, Homo sapiens; identical to SEQ ID NO: 33350
  chr20:47688820-47688979
  hypo

SEQ ID NO: 192541 - DNA, 121 bp, Homo sapiens; identical to SEQ ID NO: 99163
  chr20:47698960-47699081
  hypo

SEQ ID NO: 192542 - DNA, 30 bp, Homo sapiens
  chr20:47700627-47700657
  hypo
tgttgttcatacttacgcagctcatgctct

SEQ ID NO: 192543 - DNA, 79 bp, Homo sapiens
  chr20:47713208-47713287
  hypo
agttcagtgtatggcgttggtttgtgttgagcgtttgcacggtttggataatcttaaattttgacggacactgtggaga

SEQ ID NO: 192544 - DNA, 158 bp, Homo sapiens
  chr20:47713758-47713916
  hypo
taatgggatggcggtcgagagtacttgagactgtggatgttttgatctctttcatctctgctgttccctggagagtggaggttacttggaacttttcaaaccctgacaccttagaaccgtgaagtccagtccagtggtggatccggccggatgcctgg

SEQ ID NO: 192545 - DNA, 30 bp, Homo sapiens
  chr20:47715166-47715196
  hypo
atcttaaactcagatcgagttcgaaacgtt

SEQ ID NO: 192546 - DNA, 31 bp, Homo sapiens; identical to SEQ ID NO: 33352
  chr20:47745702-47745733
  hypo

SEQ ID NO: 192547 - DNA, 30 bp, Homo sapiens
  chr20:47764170-47764200
  hypo
agactttaactgcaacgatgttcttcccga

SEQ ID NO: 192548 - DNA, 96 bp, Homo sapiens; identical to SEQ ID NO: 99166
  chr20:47765229-47765325
  hypo

SEQ ID NO: 192549 - DNA, 61 bp, Homo sapiens; identical to SEQ ID NO: 33353
  chr20:47766302-47766363
  hypo

SEQ ID NO: 192550 - DNA, 31 bp, Homo sapiens; identical to SEQ ID NO: 33354
  chr20:47768035-47768066
  hypo

SEQ ID NO: 192551 - DNA, 39 bp, Homo sapiens; identical to SEQ ID NO: 33355
  chr20:47799075-47799114
  hypo

SEQ ID NO: 192552 - DNA, 32 bp, Homo sapiens; identical to SEQ ID NO: 99170
  chr20:47805437-47805469
  hypo

SEQ ID NO: 192553 - DNA, 40 bp, Homo sapiens; identical to SEQ ID NO: 99171
  chr20:47816847-47816887
  hypo

SEQ ID NO: 192554 - DNA, 29 bp, Homo sapiens
  chr20:47824321-47824350
  hypo
gctgggattataggcgtgagccaccacgc

SEQ ID NO: 192555 - DNA, 31 bp, Homo sapiens
  chr20:47835036-47835067
  hypo
caggcgtgagccaccacgcccagccaacacg

SEQ ID NO: 192556 - DNA, 22 bp, Homo sapiens
  chr20:47835277-47835299
  hypo
tttaattaaaaagtttcggggc

SEQ ID NO: 192557 - DNA, 289 bp, Homo sapiens
  chr20:47836967-47837256
  hypo
ttccagtgtattcttcgcttagcagcagagggatctctgcgatacagtcacgttagagacctcccttgcttaaaactctccagcctgctggtagagacccccgggcctgtccaccttgcaaagactcctcaggcagcgtctgggtcccgtacactgtcgccatttccccgatgtcccctgtgggcgcgggcggccacccaggcctgctggctgcggccccctctcggacaggccttggctcagcccgctgcgtgggaggtcatgggccagtccccgaggagccaggccc

SEQ ID NO: 192558 - DNA, 28 bp, Homo sapiens
  chr20:47837521-47837549
  hypo
agagtcttgctcggtcgcccagggtgga

SEQ ID NO: 192559 - DNA, 68 bp, Homo sapiens
  chr20:47845271-47845339
  hypo
ctgcctgttttggagcgtctgatttataaaccccgccaggctccagtcacccgcgtgctggtgctagt

SEQ ID NO: 192560 - DNA, 273 bp, Homo sapiens
  chr20:47865550-47865823
  hypo
caaacaaggggacaccggtgcccttcctgacagatgaccttctggcatggcttcatgcattggaactccttgtgtgaagagtcataagggtggcaggcacgggtgcagacatgcccacagcccaggcggaactcgcagggcaggctgcagcctccttcgggtactttttggaagtcagaagctttggatactaaggtgtgggtttcagggtggttctggcagcagagccggagcatggggcctatttgattgttctctcgaagtgtatgaatg

SEQ ID NO: 192561 - DNA, 254 bp, Homo sapiens; identical to SEQ ID NO: 99175
  chr20:47905349-47905603
  hypo

SEQ ID NO: 192562 - DNA, 1198 bp, Homo sapiens; identical to SEQ ID NO: 133096
  chr20:47934764-47935962
  hypo

SEQ ID NO: 192563 - DNA, 30 bp, Homo sapiens; identical to SEQ ID NO: 99177
  chr20:47952200-47952230
  hypo

SEQ ID NO: 192564 - DNA, 31 bp, Homo sapiens
  chr20:47988939-47988970
  hypo
tgagtaagggttttgcgctgggatcgtggct

SEQ ID NO: 192565 - DNA, 30 bp, Homo sapiens
  chr20:47989179-47989209
  hypo
tgagatggaaagccacgagagaatggggag

SEQ ID NO: 192566 - DNA, 30 bp, Homo sapiens; identical to SEQ ID NO: 33360
  chr20:48098627-48098657
  hypo

SEQ ID NO: 192567 - DNA, 748 bp, Homo sapiens; identical to SEQ ID NO: 133099
  chr20:48100302-48101050
  hypo

SEQ ID NO: 192568 - DNA, 106 bp, Homo sapiens
  chr20:48124418-48124524
  hypo
gggcagaggcgagcacgtggatccatctgctccctgtgtcatgggcggatgcggtagcggacgggcacgtcgtgttccggctgcatcagaccgaagccgtacctgc

SEQ ID NO: 192569 - DNA, 31 bp, Homo sapiens; identical to SEQ ID NO: 99181
  chr20:48157030-48157061
  hypo

SEQ ID NO: 192570 - DNA, 98 bp, Homo sapiens; identical to SEQ ID NO: 57316
  chr20:48194979-48195077
  hypo

SEQ ID NO: 192571 - DNA, 230 bp, Homo sapiens
  chr20:48209644-48209874
  hypo
gcctccaggcacaaccgtcttccctcccttccactttcctccctcctcctcaaacccttgcccaggtgccccccggctggctgggttcaccagaggatagatgaccacatactaatcccagcctcctgtggaggttagtcccaccctccaccgaggtggaaaattcctgcaggtagagtcagcagtggttcaagtcccaccgttgtccatgagatcggactacacagcac

SEQ ID NO: 192572 - DNA, 30 bp, Homo sapiens
  chr20:48210229-48210259
  hypo
gtcttagtggaaaatcggccacaaggaggg

SEQ ID NO: 192573 - DNA, 30 bp, Homo sapiens
  chr20:48227677-48227707
  hypo
acaggtacacgctcgcggtgcggttatcac

SEQ ID NO: 192574 - DNA, 140 bp, Homo sapiens; identical to SEQ ID NO: 99183
  chr20:48252795-48252935
  hypo

SEQ ID NO: 192575 - DNA, 123 bp, Homo sapiens; identical to SEQ ID NO: 33362
  chr20:48259014-48259137
  hypo

SEQ ID NO: 192576 - DNA, 30 bp, Homo sapiens
  chr20:48259559-48259589
  hypo
ggctggcacagaatacgcattttaatagat

SEQ ID NO: 192577 - DNA, 77 bp, Homo sapiens; identical to SEQ ID NO: 99185
  chr20:48300265-48300342
  hypo

SEQ ID NO: 192578 - DNA, 30 bp, Homo sapiens
  chr20:48313824-48313854
  hypo
cctcaagcgcagcggcgcctttgagggagc

SEQ ID NO: 192579 - DNA, 30 bp, Homo sapiens; identical to SEQ ID NO: 33363
  chr20:48334214-48334244
  hypo

SEQ ID NO: 192580 - DNA, 87 bp, Homo sapiens
  chr20:48350344-48350431
  hypo
gccgtttacaatactttctaaaacaatgtaggtagagaagagggctaattataatcaaacaaacaaaggtaacgcctgcctaggtta

SEQ ID NO: 192581 - DNA, 30 bp, Homo sapiens
  chr20:48375281-48375311
  hypo
ttagccaacagccttcggcctcagcacatt

SEQ ID NO: 192582 - DNA, 121 bp, Homo sapiens
  chr20:48395182-48395303
  hypo
cccagcctataaatgagtaaataaatgtatgtatccatacaatggagtcttactgagcaataaaaagaaatagaggctgacacttactacaatacagattaactggaaaaacatgttaaac

SEQ ID NO: 192583 - DNA, 212 bp, Homo sapiens
  chr20:48477264-48477476
  hypo
ataataataataaaatgatatcgattcatgacatggtgattgatgaagctgaatattactgttgactattctttgtttcatttactgagtcaacaaaaaggtattgactgtcttttgtgtgggaggctctgctttaagccccggacataaggcagcgaacaagatggacacaggcttcatcctcatggaatgaggcacgacagtttcccatg

SEQ ID NO: 192584 - DNA, 38 bp, Homo sapiens
  chr20:48489293-48489331
  hypo
ttacaggcatgagccaccgcgcccggccgattttcacc

SEQ ID NO: 192585 - DNA, 30 bp, Homo sapiens
  chr20:48497258-48497288
  hypo
agatgcatagaatcccgcagctgtggcagc

SEQ ID NO: 192586 - DNA, 536 bp, Homo sapiens; identical to SEQ ID NO: 99188
  chr20:48498752-48499288
  hypo

SEQ ID NO: 192587 - DNA, 354 bp, Homo sapiens; identical to SEQ ID NO: 33364
  chr20:48504342-48504696
  hypo

SEQ ID NO: 192588 - DNA, 115 bp, Homo sapiens
  chr20:48520117-48520232
  hypo
tgaccacagtgcgtccgtgatgacaggtacactggactttccctcctaggatgtgttagtcattcctgcttttgtccatagggtaagttacgtggcatcacggttggttagaaag

SEQ ID NO: 192589 - DNA, 673 bp, Homo sapiens; identical to SEQ ID NO: 99191
  chr20:48524516-48525189
  hypo

SEQ ID NO: 192590 - DNA, 40 bp, Homo sapiens; identical to SEQ ID NO: 99192
  chr20:48549956-48549996
  hypo

SEQ ID NO: 192591 - DNA, 1008 bp, Homo sapiens; identical to SEQ ID NO: 133107
  chr20:48598695-48599703
  hypo

SEQ ID NO: 192592 - DNA, 30 bp, Homo sapiens
  chr20:48636454-48636484
  hypo
gactgaatgaaacagcgctggctacattgg

SEQ ID NO: 192593 - DNA, 31 bp, Homo sapiens; identical to SEQ ID NO: 33367
  chr20:48673064-48673095
  hypo

SEQ ID NO: 192594 - DNA, 131 bp, Homo sapiens; identical to SEQ ID NO: 99195
  chr20:48673853-48673984
  hypo

SEQ ID NO: 192595 - DNA, 20 bp, Homo sapiens
  chr20:48701734-48701754
  hypo
tccttctttaaaaggctaac

SEQ ID NO: 192596 - DNA, 121 bp, Homo sapiens; identical to SEQ ID NO: 33369
  chr20:48707850-48707971
  hypo

SEQ ID NO: 192597 - DNA, 25 bp, Homo sapiens
  chr20:48708210-48708235
  hypo
tgagttaccacgccccgcctcaaag

SEQ ID NO: 192598 - DNA, 81 bp, Homo sapiens
  chr20:48720256-48720337
  hypo
ttaaaagctataaagcttaattagaagccaggcagtcaggagaggccctctcagagaccccggtcccggtcccaaacacct

SEQ ID NO: 192599 - DNA, 121 bp, Homo sapiens; identical to SEQ ID NO: 99199
  chr20:48720798-48720919
  hypo

SEQ ID NO: 192600 - DNA, 30 bp, Homo sapiens; identical to SEQ ID NO: 99200
  chr20:48741126-48741156
  hypo

SEQ ID NO: 192601 - DNA, 142 bp, Homo sapiens
  chr20:48744174-48744316
  hypo
gcccagctgattcatgctattttgtttgctgcaggagcctacgcccaaagcaccatggcatgtggtaggtgctcaataaatacgggatgatgggtggctggaatcacaacgccatgaagtcgagggagagggctttgtcagt

SEQ ID NO: 192602 - DNA, 232 bp, Homo sapiens
  chr20:48755327-48755559
  hypo
ccctgggggcagcttcggcttggttaccacccttccccgcagaacactgggacaaggagagggatgggagacggctcaccccaggctaccctgactcacgggggaacttgaggtagtcgctgggcccgtgcgggcttccatttccccagaggtcacccagctgggacttcctcacccctccctgcccacctcaaaggcctggcgtggagatggaaggcgtggctgaggagcc

SEQ ID NO: 192603 - DNA, 30 bp, Homo sapiens
  chr20:48760029-48760059
  hypo
ggcactcaccaacaccgagtatgacgaggg

SEQ ID NO: 192604 - DNA, 30 bp, Homo sapiens
  chr20:48766419-48766449
  hypo
tgctgcccggtgccccgccgtatgacctca

SEQ ID NO: 192605 - DNA, 80 bp, Homo sapiens; identical to SEQ ID NO: 99201
  chr20:48767151-48767231
  hypo

SEQ ID NO: 192606 - DNA, 19 bp, Homo sapiens
  chr20:48767530-48767549
  hypo
ccagctccatttttttctg

SEQ ID NO: 192607 - DNA, 27 bp, Homo sapiens
  chr20:48768093-48768120
  hypo
ctactgttaacaacagggaggcgccag

SEQ ID NO: 192608 - DNA, 204 bp, Homo sapiens; identical to SEQ ID NO: 57322
  chr20:48771156-48771360
  hypo

SEQ ID NO: 192609 - DNA, 43 bp, Homo sapiens; identical to SEQ ID NO: 99205
  chr20:48791872-48791915
  hypo

SEQ ID NO: 192610 - DNA, 40 bp, Homo sapiens; identical to SEQ ID NO: 99206
  chr20:48853283-48853323
  hypo

SEQ ID NO: 192611 - DNA, 50 bp, Homo sapiens; identical to SEQ ID NO: 99207
  chr20:48860988-48861038
  hypo

SEQ ID NO: 192612 - DNA, 217 bp, Homo sapiens
  chr20:48863408-48863625
  hypo
cattgccacggggtacggcggagcttggatgctgcacccaggactgaaagggggacctgtgggcggcctctgcctctccccgcgcagcgtcaggacacaggcccacattccctcctggcttctccctgaagggagagagaataatagttggttcaaatgtcaggcctgctccgtgctggtggggagactggttgagcaggtccgcaggagggacgga

SEQ ID NO: 192613 - DNA, 80 bp, Homo sapiens
  chr20:48868293-48868373
  hypo
agctgggattacaggcgtgtgccaacacacctggctaatttttcgcatacaaaatcccttctcgacgaaaaatactcctg

SEQ ID NO: 192614 - DNA, 31 bp, Homo sapiens; identical to SEQ ID NO: 33373
  chr20:48887085-48887116
  hypo

SEQ ID NO: 192615 - DNA, 30 bp, Homo sapiens
  chr20:48912233-48912263
  hypo
tggaaggcgggaagtcgtctttgctgatcc

SEQ ID NO: 192616 - DNA, 31 bp, Homo sapiens; identical to SEQ ID NO: 33374
  chr20:48916106-48916137
  hypo

SEQ ID NO: 192617 - DNA, 31 bp, Homo sapiens; identical to SEQ ID NO: 99211
  chr20:48916376-48916407
  hypo

SEQ ID NO: 192618 - DNA, 43 bp, Homo sapiens
  chr20:48936570-48936613
  hypo
tgaggctttccagctccctttcgtcctccctgtgatgccaagg

SEQ ID NO: 192619 - DNA, 141 bp, Homo sapiens; identical to SEQ ID NO: 99212
  chr20:48968283-48968424
  hypo

SEQ ID NO: 192620 - DNA, 88 bp, Homo sapiens; identical to SEQ ID NO: 99213
  chr20:48974137-48974225
  hypo

SEQ ID NO: 192621 - DNA, 31 bp, Homo sapiens; identical to SEQ ID NO: 99214
  chr20:48975510-48975541
  hypo

SEQ ID NO: 192622 - DNA, 31 bp, Homo sapiens; identical to SEQ ID NO: 33375
  chr20:48975789-48975820
  hypo

SEQ ID NO: 192623 - DNA, 31 bp, Homo sapiens; identical to SEQ ID NO: 33376
  chr20:48988162-48988193
  hypo

SEQ ID NO: 192624 - DNA, 55 bp, Homo sapiens; identical to SEQ ID NO: 99217
  chr20:49008037-49008092
  hypo

SEQ ID NO: 192625 - DNA, 31 bp, Homo sapiens; identical to SEQ ID NO: 99218
  chr20:49013290-49013321
  hypo

SEQ ID NO: 192626 - DNA, 25 bp, Homo sapiens
  chr20:49024736-49024761
  hypo
agattacaggcgtgagccaccgcgc

SEQ ID NO: 192627 - DNA, 99 bp, Homo sapiens; identical to SEQ ID NO: 99219
  chr20:49046545-49046644
  hypo

SEQ ID NO: 192628 - DNA, 219 bp, Homo sapiens
  chr20:49046943-49047162
  hypo
ccagccctgcattttcaatcaccgcgactgggagaggaagccaaccgccggccctagtgggtggcagccaggaatgctgctcggtaccctacagcgcacaacacggcccttgccagaaagaatcaacagggctgtgggcgaggagccctggtctcacgagaggttgcccacccctcacctggtgccccaggaggtgggaggcttcgcgggctccaggtc

SEQ ID NO: 192629 - DNA, 31 bp, Homo sapiens; identical to SEQ ID NO: 99221
  chr20:49054049-49054080
  hypo

SEQ ID NO: 192630 - DNA, 26 bp, Homo sapiens
  chr20:49109304-49109330
  hypo
ttctttcttttcttttttagacgcag

SEQ ID NO: 192631 - DNA, 31 bp, Homo sapiens; identical to SEQ ID NO: 57326
  chr20:49131961-49131992
  hypo

SEQ ID NO: 192632 - DNA, 142 bp, Homo sapiens
  chr20:49150321-49150463
  hypo
tggaacagggctgctcgctagaactccagattgttccacaagtgccttctggcagagaatgatggaagcttccgtgatttttttttctccttaatagttatgagcacagaagaggagcagattgtctggctatagaagctgt

SEQ ID NO: 192633 - DNA, 30 bp, Homo sapiens
  chr20:49152838-49152868
  hypo
tttaaaaatgtattccgtgaatgcagttgc

SEQ ID NO: 192634 - DNA, 30 bp, Homo sapiens
  chr20:49162569-49162599
  hypo
tcctgtctcgaaaagaaagaagaagaatta

SEQ ID NO: 192635 - DNA, 200 bp, Homo sapiens; identical to SEQ ID NO: 99224
  chr20:49178933-49179133
  hypo

SEQ ID NO: 192636 - DNA, 30 bp, Homo sapiens
  chr20:49185223-49185253
  hypo
ctgcacggacctcttcgcccccgccttctc

SEQ ID NO: 192637 - DNA, 30 bp, Homo sapiens
  chr20:49190799-49190829
  hypo
gttgccacgtttgaccggggagccgatggg

SEQ ID NO: 192638 - DNA, 31 bp, Homo sapiens
  chr20:49194286-49194317
  hypo
acatccacctcctcatcggaaaatggatggg

SEQ ID NO: 192639 - DNA, 182 bp, Homo sapiens; identical to SEQ ID NO: 33378
  chr20:49197042-49197224
  hypo

SEQ ID NO: 192640 - DNA, 196 bp, Homo sapiens
  chr20:49197872-49198068
  hypo
cagccaaaggggagccgtcactgcccgagaaggacgaggaccatgcactgagttactggaagcccttcctggtcaacatgtgcgtggctacggtcctcacggccggcgcttacctctgctacagggtatgtttccactgacagacgcgctggcgagatgctcgtgtgcagagagcactggccgctagcccgatggt

SEQ ID NO: 192641 - DNA, 30 bp, Homo sapiens
  chr20:49198520-49198550
  hypo
gttaggacgctgttgcgctcaagcccccct

SEQ ID NO: 192642 - DNA, 247 bp, Homo sapiens; identical to SEQ ID NO: 33379
  chr20:49203140-49203387
  hypo

SEQ ID NO: 192643 - DNA, 709 bp, Homo sapiens
  chr20:49204053-49204762
  hypo
acctctaggatgttccgctgaatgggaaccctgccttgcctctggcttctatcccaaaggtctaagaagacagcgaacactccctgccaccccagccatggaggaggcctgccttggcaggatgctacaaagggtggaggtcggctctgtgccagggctgctaacggtgcccatcccaggtgccccagagttgttctgcctgctgggagagctgggtgtggcctctcgcagattctaagggccccaggcaccccgctgcgctgcacagtttgtgccactttttaccgaacgacagtgtggtttcccgggctgccgcccgcacggcctccaggtcagactggcacaggctggcagtctggtcgatgctttcaatgccctgttcgagattaggagaaaaagaaccctttagggggccttctcaacagcaggtagagtccacttagtggccctgcagggccagtcctagcatggtctctggggcctcagccccttccttttctccaggcttccaggttttttaggtggcctcaggttcatgagaggcacctctggactctggaagcgtctcgcctcttcagcccttacacccgctagggagccaggctgttagcagaactcgtcatcctggatgcctgctgaaaggctagaattgaaaaggagacctgctgctttctggaccttcctgcctccctcacgctctccttgccct

SEQ ID NO: 192644 - DNA, 256 bp, Homo sapiens; identical to SEQ ID NO: 33381
  chr20:49206898-49207154
  hypo

SEQ ID NO: 192645 - DNA, 162 bp, Homo sapiens; identical to SEQ ID NO: 99229
  chr20:49210376-49210538
  hypo

SEQ ID NO: 192646 - DNA, 43 bp, Homo sapiens; identical to SEQ ID NO: 99230
  chr20:49214095-49214138
  hypo

SEQ ID NO: 192647 - DNA, 321 bp, Homo sapiens
  chr20:49218570-49218891
  hypo
gcaaagcagggccaccgcccggggcggggtggccataccttcagccggtcccggaagccgaggacctggtactccagctcccggagctggggctgggtggagtccgtgggcctcagcaactccaggacctcctgcagaggcccctcgagggccacgccaggcccgtcctctctgtccccggttgccccttcctcgtggccgttctggctactcgaggctgtgccgctgtggaacagggagccctgtggcaggctggggctctcccctcctaagttcctccagccaggctgctctgcaaacgggcctccagagaggtgggcc

SEQ ID NO: 192648 - DNA, 31 bp, Homo sapiens; identical to SEQ ID NO: 99232
  chr20:49222908-49222939
  hypo

SEQ ID NO: 192649 - DNA, 584 bp, Homo sapiens; identical to SEQ ID NO: 99233
  chr20:49223637-49224221
  hypo

SEQ ID NO: 192650 - DNA, 30 bp, Homo sapiens; identical to SEQ ID NO: 99234
  chr20:49224522-49224552
  hypo

SEQ ID NO: 192651 - DNA, 589 bp, Homo sapiens; identical to SEQ ID NO: 57328
  chr20:49224899-49225488
  hypo

SEQ ID NO: 192652 - DNA, 324 bp, Homo sapiens; identical to SEQ ID NO: 133121
  chr20:49225975-49226299
  hypo

SEQ ID NO: 192653 - DNA, 31 bp, Homo sapiens; identical to SEQ ID NO: 99237
  chr20:49228230-49228261
  hypo

SEQ ID NO: 192654 - DNA, 100 bp, Homo sapiens; identical to SEQ ID NO: 99238
  chr20:49230487-49230587
  hypo

SEQ ID NO: 192655 - DNA, 30 bp, Homo sapiens; identical to SEQ ID NO: 99239
  chr20:49236160-49236190
  hypo

SEQ ID NO: 192656 - DNA, 174 bp, Homo sapiens; identical to SEQ ID NO: 33387
  chr20:49236428-49236602
  hypo

SEQ ID NO: 192657 - DNA, 30 bp, Homo sapiens; identical to SEQ ID NO: 33388
  chr20:49237361-49237391
  hypo

SEQ ID NO: 192658 - DNA, 161 bp, Homo sapiens
  chr20:49240801-49240962
  hypo
tgaggctggcagagacggtcagggctgcagactcgggaaaaggcaggtttctgagaggttagggaccccggcaggtgggcagcaggcagtggggcaggagctcgctcactcccagctcctgcctccagcccccaacaggtgtgcaccgttggcccagcccc

SEQ ID NO: 192659 - DNA, 102 bp, Homo sapiens; identical to SEQ ID NO: 33390
  chr20:49244320-49244422
  hypo

SEQ ID NO: 192660 - DNA, 145 bp, Homo sapiens; identical to SEQ ID NO: 33391
  chr20:49247307-49247452
  hypo

SEQ ID NO: 192661 - DNA, 239 bp, Homo sapiens; identical to SEQ ID NO: 99245
  chr20:49261865-49262104
  hypo

SEQ ID NO: 192662 - DNA, 17 bp, Homo sapiens
  chr20:49263591-49263608
  hypo
ctcacacctgtaatccg

SEQ ID NO: 192663 - DNA, 151 bp, Homo sapiens; identical to SEQ ID NO: 33393
  chr20:49264293-49264444
  hypo

SEQ ID NO: 192664 - DNA, 30 bp, Homo sapiens
  chr20:49281340-49281370
  hypo
aagaaaaaagaaacccggctgggcacggtg

SEQ ID NO: 192665 - DNA, 25 bp, Homo sapiens
  chr20:49281971-49281996
  hypo
ttttgagatggagtctcgccctgtc

SEQ ID NO: 192666 - DNA, 204 bp, Homo sapiens
  chr20:49282235-49282439
  hypo
catgagccactgtgcctgccgggtgggtttcttatggcgaatgatcccacaccacttttcagtgcacgtagttacatggagtagaacacagacagtcacacctccacgttcttttggccaccatgactggttcaaccaaggaatctgctccaagctaggtgaaggaaaatcagccctaaggccccccgtcgccacgcacctcac

SEQ ID NO: 192667 - DNA, 98 bp, Homo sapiens; identical to SEQ ID NO: 99249
  chr20:49284100-49284198
  hypo

SEQ ID NO: 192668 - DNA, 31 bp, Homo sapiens; identical to SEQ ID NO: 99250
  chr20:49285098-49285129
  hypo

SEQ ID NO: 192669 - DNA, 146 bp, Homo sapiens; identical to SEQ ID NO: 33396
  chr20:49286717-49286863
  hypo

SEQ ID NO: 192670 - DNA, 30 bp, Homo sapiens; identical to SEQ ID NO: 33397
  chr20:49287169-49287199
  hypo

SEQ ID NO: 192671 - DNA, 23 bp, Homo sapiens
  chr20:49287930-49287953
  hypo
tctcacatgagcacgcgcgcgtg

SEQ ID NO: 192672 - DNA, 181 bp, Homo sapiens; identical to SEQ ID NO: 99254
  chr20:49289682-49289863
  hypo

SEQ ID NO: 192673 - DNA, 379 bp, Homo sapiens; identical to SEQ ID NO: 99255
  chr20:49290276-49290655
  hypo

SEQ ID NO: 192674 - DNA, 218 bp, Homo sapiens
  chr20:49294479-49294697
  hypo
tataggcatgagccaccgcgcctggccttattattcgtcttcttagtctgctttcagatgaggacacggagccacaggagttacaagggtggaggtgctgggaagtcaggaccaaaatcagcctcctgactccccatctcattttctcaatcatcatgggttttgccccccaagaagagaaccagccaccatgggtgctaaaccggtggctgatatag

SEQ ID NO: 192675 - DNA, 30 bp, Homo sapiens
  chr20:49301233-49301263
  hypo
ccagggtggagggagcggaggtgacagagc

SEQ ID NO: 192676 - DNA, 77 bp, Homo sapiens; identical to SEQ ID NO: 99257
  chr20:49302563-49302640
  hypo

SEQ ID NO: 192677 - DNA, 30 bp, Homo sapiens
  chr20:49302960-49302990
  hypo
gcgcccttcctacctcgcaaaacaataaaa

SEQ ID NO: 192678 - DNA, 91 bp, Homo sapiens; identical to SEQ ID NO: 99258
  chr20:49318872-49318963
  hypo

SEQ ID NO: 192679 - DNA, 36 bp, Homo sapiens; identical to SEQ ID NO: 33399
  chr20:49323814-49323850
  hypo

SEQ ID NO: 192680 - DNA, 17 bp, Homo sapiens
  chr20:49330735-49330752
  hypo
ttttgagatagagtctc

SEQ ID NO: 192681 - DNA, 77 bp, Homo sapiens; identical to SEQ ID NO: 33400
  chr20:49331493-49331570
  hypo

SEQ ID NO: 192682 - DNA, 16 bp, Homo sapiens
  chr20:49331629-49331645
  hypo
tcgagaccagcctgga

SEQ ID NO: 192683 - DNA, 197 bp, Homo sapiens; identical to SEQ ID NO: 99263
  chr20:49345550-49345747
  hypo

SEQ ID NO: 192684 - DNA, 212 bp, Homo sapiens; identical to SEQ ID NO: 99264
  chr20:49346547-49346759
  hypo

SEQ ID NO: 192685 - DNA, 25 bp, Homo sapiens
  chr20:49350864-49350889
  hypo
aaccaaaactaggtagtgtgccggt

SEQ ID NO: 192686 - DNA, 44 bp, Homo sapiens
  chr20:49355685-49355729
  hypo
aaagtagcttgagagcggccaggcttggtggctcacgtgtgtaa

SEQ ID NO: 192687 - DNA, 102 bp, Homo sapiens; identical to SEQ ID NO: 33403
  chr20:49358021-49358123
  hypo

SEQ ID NO: 192688 - DNA, 41 bp, Homo sapiens; identical to SEQ ID NO: 33404
  chr20:49358362-49358403
  hypo

SEQ ID NO: 192689 - DNA, 18 bp, Homo sapiens
  chr20:49371625-49371643
  hypo
cagccttgcaatttgcat

SEQ ID NO: 192690 - DNA, 139 bp, Homo sapiens; identical to SEQ ID NO: 99268
  chr20:49377932-49378071
  hypo

SEQ ID NO: 192691 - DNA, 78 bp, Homo sapiens; identical to SEQ ID NO: 99269
  chr20:49381162-49381240
  hypo

SEQ ID NO: 192692 - DNA, 21 bp, Homo sapiens
  chr20:49381439-49381460
  hypo
gtacgttttttgagacgaagt

SEQ ID NO: 192693 - DNA, 31 bp, Homo sapiens; identical to SEQ ID NO: 99270
  chr20:49398687-49398718
  hypo

SEQ ID NO: 192694 - DNA, 31 bp, Homo sapiens; identical to SEQ ID NO: 99271
  chr20:49399781-49399812
  hypo

SEQ ID NO: 192695 - DNA, 70 bp, Homo sapiens; identical to SEQ ID NO: 99272
  chr20:49406842-49406912
  hypo

SEQ ID NO: 192696 - DNA, 30 bp, Homo sapiens
  chr20:49451514-49451544
  hypo
tcactttacggctgtcgtaaacaatgctgc

SEQ ID NO: 192697 - DNA, 30 bp, Homo sapiens; identical to SEQ ID NO: 33406
  chr20:49457312-49457342
  hypo

SEQ ID NO: 192698 - DNA, 194 bp, Homo sapiens; identical to SEQ ID NO: 99274
  chr20:49467236-49467430
  hypo

SEQ ID NO: 192699 - DNA, 78 bp, Homo sapiens; identical to SEQ ID NO: 99275
  chr20:49468872-49468950
  hypo

SEQ ID NO: 192700 - DNA, 30 bp, Homo sapiens
  chr20:49482947-49482977
  hypo
ccagacagcgcatgtcgtggctgatggggc

SEQ ID NO: 192701 - DNA, 30 bp, Homo sapiens
  chr20:49483479-49483509
  hypo
actctgtaaatgctccgttctcggtcactg

SEQ ID NO: 192702 - DNA, 30 bp, Homo sapiens
  chr20:49487032-49487062
  hypo
agctgctgggtgttgcggattgccggggcc

SEQ ID NO: 192703 - DNA, 481 bp, Homo sapiens
  chr20:49487402-49487883
  hypo
tccctgtggcagaggcgggccttgggctgggggtgggctgcggaggagctcacagccgtgtcaggtttctgtgtcttgacctatcctatcccagagcagagaacattcctgcctgcggcccgggaggagggggtggggagctggattccaaagggttggacgcacctcctggaccccagcggggactcattcccagccggagggcgagaggtgggacgtggagagctctgaagtcttctctgagattttcaaaggtgaaaaccccagggtttgagtttgctgctccatcctcaaggagccctagagggcgatgggcaagggctggtcttggagctggacaggccgaggggaccccagctccagtgctccctccctcccgggacccctgagacatagcgactcctcccttgcaggctgccatgatagtccaagagagaacgggtgtgaaagtggtttccatggcatgcgggtgtgccggtga

SEQ ID NO: 192704 - DNA, 30 bp, Homo sapiens; identical to SEQ ID NO: 99276
  chr20:49493591-49493621
  hypo

SEQ ID NO: 192705 - DNA, 24 bp, Homo sapiens
  chr20:49502196-49502220
  hypo
taccacacccggccggattttcct

SEQ ID NO: 192706 - DNA, 34 bp, Homo sapiens; identical to SEQ ID NO: 33407
  chr20:49556445-49556479
  hypo

SEQ ID NO: 192707 - DNA, 31 bp, Homo sapiens; identical to SEQ ID NO: 99278
  chr20:49572852-49572883
  hypo

SEQ ID NO: 192708 - DNA, 31 bp, Homo sapiens; identical to SEQ ID NO: 13044
  chr20:49574742-49574773
  hypo

SEQ ID NO: 192709 - DNA, 31 bp, Homo sapiens; identical to SEQ ID NO: 33409
  chr20:49610453-49610484
  hypo

SEQ ID NO: 192710 - DNA, 106 bp, Homo sapiens
  chr20:49620546-49620652
  hypo
ggcaggcagggcaggcgtgtcctccgcgctcagttattgtctctggtgtccgaggaggcacttccgaacaagatgtcactgtcctgggacacgctcagctgcgact

SEQ ID NO: 192711 - DNA, 460 bp, Homo sapiens; identical to SEQ ID NO: 99281
  chr20:49620877-49621337
  hypo

SEQ ID NO: 192712 - DNA, 134 bp, Homo sapiens; identical to SEQ ID NO: 13045
  chr20:49639050-49639184
  hypo

SEQ ID NO: 192713 - DNA, 639 bp, Homo sapiens; identical to SEQ ID NO: 13046
  chr20:49639217-49639856
  hypo

SEQ ID NO: 192714 - DNA, 114 bp, Homo sapiens; identical to SEQ ID NO: 13047
  chr20:49639882-49639996
  hypo

SEQ ID NO: 192715 - DNA, 131 bp, Homo sapiens; identical to SEQ ID NO: 57337
  chr20:49640094-49640225
  hypo

SEQ ID NO: 192716 - DNA, 31 bp, Homo sapiens; identical to SEQ ID NO: 99286
  chr20:49810091-49810122
  hypo

SEQ ID NO: 192717 - DNA, 18 bp, Homo sapiens
  chr20:49874168-49874186
  hypo
ctggaaagtgctaggatg

SEQ ID NO: 192718 - DNA, 183 bp, Homo sapiens
  chr20:49948209-49948392
  hypo
gcagcctgcccaggacgcgccgttctgcggggaccacagctcccactgcgagcagggccagccaggcagagccttggaaaaatgctgcggcggggtacaccctggcactcggctgtgctctgtgccgccccaaatccgcccgtggcctcctgccaaccgagtgggattcggtacattggttta

SEQ ID NO: 192719 - DNA, 92 bp, Homo sapiens
  chr20:49969376-49969468
  hypo
actgtcacttttatgcgtcctaatttttctataatatacatacattatttgagtaagaaaaataaacatgtttgtagcgggatcagatttac

SEQ ID NO: 192720 - DNA, 30 bp, Homo sapiens; identical to SEQ ID NO: 99289
  chr20:49994619-49994649
  hypo

SEQ ID NO: 192721 - DNA, 30 bp, Homo sapiens
  chr20:49999585-49999615
  hypo
ggcgcccagccggagcgcgttagcaccatc

SEQ ID NO: 192722 - DNA, 118 bp, Homo sapiens
  chr20:50084693-50084811
  hypo
gtgggcttgaggaggcggccttggctgaagggacatggggaacgttcaagagtgaagaaagtgctctgtcttgagtggtggttacgtgggtatatgcgattgtcaaaaatcactgaac

SEQ ID NO: 192723 - DNA, 61 bp, Homo sapiens; identical to SEQ ID NO: 99291
  chr20:50104486-50104547
  hypo

SEQ ID NO: 192724 - DNA, 30 bp, Homo sapiens; identical to SEQ ID NO: 99292
  chr20:50140407-50140437
  hypo

SEQ ID NO: 192725 - DNA, 414 bp, Homo sapiens
  chr20:50150221-50150635
  hypo
ggtgccttccaggcaggctgccgcaaggccaggcgcccaggacacaggactgaggtgatccacaagcaatgaggcttgcagactggctctggcatgaccgcttgcaaaaacacacgaacccacgcgctgacacgtattgcttttggataggggtggagaaatgtatggaatctgcaacccgcaggcctcaaggtcaccttttagatgggggcagcagggcccaggcatgtggcacacataaggactcatctccatcttcaaatctggatgggaagaactgtctcttgctggtttcaagccatttcctggggccctcctgccttggagaattccagagatattcctatttttagtcattctaatagcttatgtccactgtgccgcaagctttcacgtgtacgctcccctgttctc

SEQ ID NO: 192726 - DNA, 368 bp, Homo sapiens
  chr20:50199789-50200157
  hypo
gccttaagtcaacaccgacgcggccacggtgcctggcaagatgaatttcttttttcaattcagccacaaccttatttatttattggatgctaacacctggtatttctttcgtctggaagttcgcggcttgctttggcacgttttaggttcagtaccgcggggtggctgagctacctgacggggtgacaggaggcctccctctgaggtggatccatggagcagaggcagcacaaaccaacttccaaggacatagtctagaccgaaaaggacaccctgaccctcgttttcaagctttactggctaggagaattccgtccacagaagctgctatccttgagagcgcaaagcatagccgatcgtgagtgctc

SEQ ID NO: 192727 - DNA, 25 bp, Homo sapiens
  chr20:50203083-50203108
  hypo
tatagaaaagacaatgaaggccggg

SEQ ID NO: 192728 - DNA, 26 bp, Homo sapiens
  chr20:50205979-50206005
  hypo
accgcgcccagcccagaatccactct

SEQ ID NO: 192729 - DNA, 321 bp, Homo sapiens
  chr20:50208574-50208895
  hypo
ttcttttccacagcctgttctcgtttattctttctttcttccggaggaatttgaacacagcctgggctcccgcagttcatgactgcaaaaggcttcgccttcgaaatctgacccaagtgggcatattcgggaaatgtggcagcttcgaagaacatgagccagttaagttttctctacctattcttcctccgcactcacctcccagttctaggcagctggtttatgcagcctgctttccaggactgtcgaaggaaaaggcacctctgccaaaagcaccccaggctacagggctgaacagagacccatcgtatcattcgctgg

SEQ ID NO: 192730 - DNA, 80 bp, Homo sapiens
  chr20:50213711-50213791
  hypo
caaaccatgctgtggcggagaagacagattcacgggtaatgccgctttggcctgagaagatgcttcggagctccaggtgg

SEQ ID NO: 192731 - DNA, 24 bp, Homo sapiens
  chr20:50266158-50266182
  hypo
aatcgcacagctaggccgggtgca

SEQ ID NO: 192732 - DNA, 201 bp, Homo sapiens; identical to SEQ ID NO: 99299
  chr20:50293890-50294091
  hypo

SEQ ID NO: 192733 - DNA, 31 bp, Homo sapiens; identical to SEQ ID NO: 99300
  chr20:50296832-50296863
  hypo

SEQ ID NO: 192734 - DNA, 31 bp, Homo sapiens; identical to SEQ ID NO: 33417
  chr20:50309616-50309647
  hypo

SEQ ID NO: 192735 - DNA, 18 bp, Homo sapiens
  chr20:50316471-50316489
  hypo
gcccggccaacactactg

SEQ ID NO: 192736 - DNA, 32 bp, Homo sapiens; identical to SEQ ID NO: 99303
  chr20:50326110-50326142
  hypo

SEQ ID NO: 192737 - DNA, 103 bp, Homo sapiens; identical to SEQ ID NO: 33419
  chr20:50337347-50337450
  hypo

SEQ ID NO: 192738 - DNA, 42 bp, Homo sapiens; identical to SEQ ID NO: 33420
  chr20:50346532-50346574
  hypo

SEQ ID NO: 192739 - DNA, 213 bp, Homo sapiens
  chr20:50378296-50378509
  hypo
tcaaaaaaaaaaaaaaattagcacaacttgagtggcttaaaacaatgcaagtttattaccctacagttaggtccgaagtccaaaatgggcctcatgggactaaaatcaaggaaggtgtcagcagagccgtgttccttctggaggctccaaccgagtccgtttccttaactcttccaacttctagagtcccccgcattccttggctcatggccc

SEQ ID NO: 192740 - DNA, 17 bp, Homo sapiens
  chr20:50383092-50383109
  hypo
gaaggaggccgggcgcg

SEQ ID NO: 192741 - DNA, 1664 bp, Homo sapiens; identical to SEQ ID NO: 57344
  chr20:50383654-50385318
  hypo

SEQ ID NO: 192742 - DNA, 94 bp, Homo sapiens; identical to SEQ ID NO: 33423
  chr20:50390635-50390729
  hypo

SEQ ID NO: 192743 - DNA, 80 bp, Homo sapiens; identical to SEQ ID NO: 33424
  chr20:50405411-50405491
  hypo

SEQ ID NO: 192744 - DNA, 209 bp, Homo sapiens
  chr20:50406977-50407186
  hypo
tagcgccggtgctgccgttctcacccacggtcattggctcagaacccgtaaagtcacagggattctctggcaggggcgtgttgggaatctgaccgcccatgtgcatccgaatatgttgctgcagcatcacggcattagtgaacttcttctggcagatggggcacgaatgctgcgtcttaatggatgtgttggttcggtgaaccccaagg

SEQ ID NO: 192745 - DNA, 194 bp, Homo sapiens
  chr20:50407492-50407686
  hypo
ccaggctgcaggtcaccgggcaaggagccacccgtgaggtccttgggattagtccccgaagaaagattctgaggtagccctacagaggtggttacaaggacaggtttgctgtctaaagaaagactcggttcatctatggggtcaggtacagagagtgcataggggatgccattgccggccgccactttgtcctg

SEQ ID NO: 192746 - DNA, 156 bp, Homo sapiens
  chr20:50407904-50408060
  hypo
gtttgacatccaccgcggagatgttcggtggcttccccttccctttcttggatgtgtctagcgccacagtggagaaagggctctggaagagcaccgagcccggggcctgaggaagcaaagcgctcgggaggcgggacatgacgttcgggagcaccc

SEQ ID NO: 192747 - DNA, 150 bp, Homo sapiens
  chr20:50408299-50408449
  hypo
atgttcacctggatgcggatctgctcggtgagctggatctgctgtagctgctgctgctgcagacacaagatctgctcgaggacccacgggatgctgttggcaccaggcacgggggcagggagtgcatccgcgctccgctgattcaccgcc

SEQ ID NO: 192748 - DNA, 179 bp, Homo sapiens
  chr20:50408657-50408836
  hypo
ggctcagtacagctccggagaagtcttctgaaggcacaggcccctcgctgtcattcatgatgaggacaggtggatttttagtgcaatttttcttatgttccaggaactcagagatgctgaagaactccgcacagcatttctcacagacgtgcgtctcctcccgacgaagccgctttact

SEQ ID NO: 192749 - DNA, 39 bp, Homo sapiens; identical to SEQ ID NO: 99314
  chr20:50411954-50411993
  hypo

SEQ ID NO: 192750 - DNA, 213 bp, Homo sapiens
  chr20:50419258-50419471
  hypo
tggctggggcggggacgaaatcagagggggacccatccttgctccagctatctcagtccttggagaggaaaagaaaatggggagaaatgcgtactcattaaaaagtaggagcttacgtagaagttttggaacggctttatttggtagttacttgctccaaagattacttggtaaggttgatgtccaccagccgagaagggagatctcttcaca

SEQ ID NO: 192751 - DNA, 32 bp, Homo sapiens; identical to SEQ ID NO: 99316
  chr20:50430799-50430831
  hypo

SEQ ID NO: 192752 - DNA, 39 bp, Homo sapiens; identical to SEQ ID NO: 33428
  chr20:50441825-50441864
  hypo

SEQ ID NO: 192753 - DNA, 158 bp, Homo sapiens; identical to SEQ ID NO: 99318
  chr20:50451580-50451738
  hypo

SEQ ID NO: 192754 - DNA, 31 bp, Homo sapiens; identical to SEQ ID NO: 99319
  chr20:50462772-50462803
  hypo

SEQ ID NO: 192755 - DNA, 31 bp, Homo sapiens; identical to SEQ ID NO: 99320
  chr20:50468578-50468609
  hypo

SEQ ID NO: 192756 - DNA, 20 bp, Homo sapiens
  chr20:50506832-50506852
  hypo
tttgagatggcgtctcgctc

SEQ ID NO: 192757 - DNA, 30 bp, Homo sapiens
  chr20:50529238-50529268
  hypo
catcgtggtccaaatcgggacgtggtgcta

SEQ ID NO: 192758 - DNA, 27 bp, Homo sapiens
  chr20:50556883-50556910
  hypo
aatttgtgggccgggcgcggtggctca

SEQ ID NO: 192759 - DNA, 31 bp, Homo sapiens; identical to SEQ ID NO: 99322
  chr20:50557513-50557544
  hypo

SEQ ID NO: 192760 - DNA, 18 bp, Homo sapiens
  chr20:50569355-50569373
  hypo
tggcctttaatataattt

SEQ ID NO: 192761 - DNA, 30 bp, Homo sapiens; identical to SEQ ID NO: 99324
  chr20:50577008-50577038
  hypo

SEQ ID NO: 192762 - DNA, 43 bp, Homo sapiens; identical to SEQ ID NO: 99325
  chr20:50591573-50591616
  hypo

SEQ ID NO: 192763 - DNA, 301 bp, Homo sapiens
  chr20:50602380-50602681
  hypo
gcccagctccaagctgcttctttcttggttctctgctttgcagagtcaaatgacctcattgccgaagatggcggcatccaagttccaggcagcaagatggagaaaagaacaaagagaaagcaaagatacccacccgaggcttgacacttccatttatatcccattggccagaacaaagtcacgtgaccgtacctaagctacaagggaggcttggaaaggtagcgtttctttctgaaaaaattcagccctgctgagaattcaattccatggaagaaagagacaggatcttgacaactagaac

SEQ ID NO: 192764 - DNA, 201 bp, Homo sapiens
  chr20:50633364-50633565
  hypo
aataaaataggtatctcctattttaacgcatgatgtggctgttgcaggtggcattatcggcgggaggaccacacccggtagagcatataatgcctctgtaaggtgagcctcagcatgcacatagggacctcactggggatagtgaagtttctcctttttgtgttttgtaatgtgagtgagggacttcgatgactccaacca

SEQ ID NO: 192765 - DNA, 30 bp, Homo sapiens; identical to SEQ ID NO: 99328
  chr20:50701251-50701281
  hypo

SEQ ID NO: 192766 - DNA, 30 bp, Homo sapiens; identical to SEQ ID NO: 99329
  chr20:50704993-50705023
  hypo

SEQ ID NO: 192767 - DNA, 30 bp, Homo sapiens; identical to SEQ ID NO: 99330
  chr20:50769068-50769098
  hypo

SEQ ID NO: 192768 - DNA, 35 bp, Homo sapiens; identical to SEQ ID NO: 33430
  chr20:50805265-50805300
  hypo

SEQ ID NO: 192769 - DNA, 121 bp, Homo sapiens; identical to SEQ ID NO: 33431
  chr20:50805539-50805660
  hypo

SEQ ID NO: 192770 - DNA, 34 bp, Homo sapiens; identical to SEQ ID NO: 33432
  chr20:50805899-50805933
  hypo

SEQ ID NO: 192771 - DNA, 987 bp, Homo sapiens; identical to SEQ ID NO: 133155
  chr20:51589092-51590079
  hypo

SEQ ID NO: 192772 - DNA, 30 bp, Homo sapiens
  chr20:51596733-51596763
  hypo
aagagaactttgttgcggcaggataagaag

SEQ ID NO: 192773 - DNA, 22 bp, Homo sapiens
  chr20:51793497-51793519
  hypo
acaggcacgagccatcgcaccc

SEQ ID NO: 192774 - DNA, 43 bp, Homo sapiens; identical to SEQ ID NO: 99335
  chr20:51794667-51794710
  hypo

SEQ ID NO: 192775 - DNA, 30 bp, Homo sapiens
  chr20:51870259-51870289
  hypo
ccagtgatcaggtgtcggacatcaagagtg

SEQ ID NO: 192776 - DNA, 140 bp, Homo sapiens
  chr20:51870536-51870676
  hypo
cttgccttctcggtccgtctcgaaacccagcctgttcagctcggtgcagttgtaccgacagagcagcaagatgtgcgggactgtgttcacaggggccagcagattccgatgccgacagtgcagcgcggcctatgacaccc

SEQ ID NO: 192777 - DNA, 30 bp, Homo sapiens
  chr20:51870950-51870980
  hypo
cccggctaagaaacgcgtttttgatgtcaa

SEQ ID NO: 192778 - DNA, 30 bp, Homo sapiens
  chr20:51958665-51958695
  hypo
acaaatgaaccagcacggatacgttattat

SEQ ID NO: 192779 - DNA, 30 bp, Homo sapiens; identical to SEQ ID NO: 13062
  chr20:51963662-51963692
  hypo

SEQ ID NO: 192780 - DNA, 44 bp, Homo sapiens; identical to SEQ ID NO: 33435
  chr20:52179946-52179990
  hypo

SEQ ID NO: 192781 - DNA, 339 bp, Homo sapiens; identical to SEQ ID NO: 99338
  chr20:52198074-52198413
  hypo

SEQ ID NO: 192782 - DNA, 167 bp, Homo sapiens; identical to SEQ ID NO: 13063
  chr20:52209196-52209363
  hypo

SEQ ID NO: 192783 - DNA, 118 bp, Homo sapiens
  chr20:52210892-52211010
  hypo
ccttcaccggccgcccggccacgccccacaccgccccggccccgccccagcgcccacgtgactagcataggcgcgcccctgctccgccccccgccgccgactccgcctccgggacggg

SEQ ID NO: 192784 - DNA, 183 bp, Homo sapiens
  chr20:52214812-52214995
  hypo
ccatgcacgtgaacgcggagtctgctgttggaaatgtgttgggaagggagagttcccggtaagaattatgtatttaggagctttccaaatactgatggcatgttgagccatcagactggataaaatcacacgaaagaggtgctagtattgggcccttgggtggttcagcgcctggaagtcaag

SEQ ID NO: 192785 - DNA, 251 bp, Homo sapiens; identical to SEQ ID NO: 99341
  chr20:52234389-52234640
  hypo

SEQ ID NO: 192786 - DNA, 30 bp, Homo sapiens
  chr20:52253995-52254025
  hypo
acaggcgtgagctaccgtgcccggtatcaa

SEQ ID NO: 192787 - DNA, 31 bp, Homo sapiens; identical to SEQ ID NO: 99342
  chr20:52275977-52276008
  hypo

SEQ ID NO: 192788 - DNA, 30 bp, Homo sapiens
  chr20:52276247-52276277
  hypo
gccaccgcgcccagccgaatcagtgatttt

SEQ ID NO: 192789 - DNA, 30 bp, Homo sapiens
  chr20:52276821-52276851
  hypo
agcgtccacgccgcccgcgagtggccgcag

SEQ ID NO: 192790 - DNA, 33 bp, Homo sapiens; identical to SEQ ID NO: 33437
  chr20:52281657-52281690
  hypo

SEQ ID NO: 192791 - DNA, 27 bp, Homo sapiens
  chr20:52285650-52285677
  hypo
gccaccgtgcccagcctttgctgtggg

SEQ ID NO: 192792 - DNA, 40 bp, Homo sapiens; identical to SEQ ID NO: 99346
  chr20:52305002-52305042
  hypo

SEQ ID NO: 192793 - DNA, 19 bp, Homo sapiens
  chr20:52311457-52311476
  hypo
ctaatttaaagtagaagct

SEQ ID NO: 192794 - DNA, 78 bp, Homo sapiens; identical to SEQ ID NO: 33439
  chr20:52311775-52311853
  hypo

SEQ ID NO: 192795 - DNA, 23 bp, Homo sapiens
  chr20:52319011-52319034
  hypo
ccgtctcaaacaaaacaaaacaa

SEQ ID NO: 192796 - DNA, 154 bp, Homo sapiens; identical to SEQ ID NO: 99350
  chr20:52341603-52341757
  hypo

SEQ ID NO: 192797 - DNA, 31 bp, Homo sapiens; identical to SEQ ID NO: 33441
  chr20:52360542-52360573
  hypo

SEQ ID NO: 192798 - DNA, 19 bp, Homo sapiens
  chr20:52361079-52361098
  hypo
tttgagacagtcttgctct

SEQ ID NO: 192799 - DNA, 19 bp, Homo sapiens
  chr20:52361157-52361176
  hypo
gttcaagtgattctcagct

SEQ ID NO: 192800 - DNA, 199 bp, Homo sapiens
  chr20:52374062-52374261
  hypo
gtgtgagccaccgcgcccggccttaagtttgttttcaaagtgcgtttcaaacttaaataaacccaggctcagcaatgaaaggattcaggttattacattctgattgtccagggagcaggcagtgcggctggctccccgggagaatgctggatcgttcattcagcgagtgcgcatgcctagaagacgatctgccagctgc

SEQ ID NO: 192801 - DNA, 31 bp, Homo sapiens; identical to SEQ ID NO: 99355
  chr20:52401840-52401871
  hypo

SEQ ID NO: 192802 - DNA, 30 bp, Homo sapiens
  chr20:52417873-52417903
  hypo
gttagacccattttacgagcgaggacactc

SEQ ID NO: 192803 - DNA, 31 bp, Homo sapiens; identical to SEQ ID NO: 99356
  chr20:52429880-52429911
  hypo

SEQ ID NO: 192804 - DNA, 183 bp, Homo sapiens
  chr20:52481242-52481425
  hypo
agagggaggagaggatcgtgactgaggaaaagcgttctgacagaaataactgcaaatattgcaaggttgagcttctaccaatgctagtttttcctgacccaggagaactcacatagtgttatgaattttaatatcacagcaattttttatcgagaacctaacaggagccgcacattggattaa

SEQ ID NO: 192805 - DNA, 30 bp, Homo sapiens; identical to SEQ ID NO: 33442
  chr20:52484679-52484709
  hypo

SEQ ID NO: 192806 - DNA, 260 bp, Homo sapiens
  chr20:52538410-52538670
  hypo
ttgatgtaaatgtgccgcgttgtggtggtggtggagaggttgtcggagcctattaatgttaaaaggaaaagtgcgcactcaatcagcctgcaggtgcaattctttacctgccctagagaaatgaaattctcatgggtgcacagggagaagtggtaaagggtgccctttgttgtattattatttgtttcagtgaagaactagaaacaacctaaacgtgcatcaggagttcaagaccagcccggccaagagaccagcctcgc

SEQ ID NO: 192807 - DNA, 30 bp, Homo sapiens; identical to SEQ ID NO: 33444
  chr20:52561278-52561308
  hypo

SEQ ID NO: 192808 - DNA, 30 bp, Homo sapiens
  chr20:52682890-52682920
  hypo
gtgagccaccgggcccggccgaggcaggta

SEQ ID NO: 192809 - DNA, 217 bp, Homo sapiens
  chr20:52685952-52686169
  hypo
gttgtgttaacataccgtttatctccatgactgagttttttggcatcccttacatttcgtgcccaaggtgagagtctcactggctgcaccctcatcccaggcccgactggactccagttccacagcatcctttccatgagacctggaaccagatgcagctccctcttcacccagcttcatgttcctagttgtaaaatggagacgatggtaacagcga

SEQ ID NO: 192810 - DNA, 162 bp, Homo sapiens; identical to SEQ ID NO: 99360
  chr20:52758813-52758975
  hypo

SEQ ID NO: 192811 - DNA, 173 bp, Homo sapiens
  chr20:52773805-52773978
  hypo
tggatgtcgtatttgcggacaatctgtaatgcacacgcacacaaaaacagaattacccctctcttcttctgccttgtgaaacagcacagaacataattgcagaaaccggtaaaggttttacccaacaaagagccaaatgcagttgaagctctgctaatcggcgaccaatgcac

SEQ ID NO: 192812 - DNA, 30 bp, Homo sapiens; identical to SEQ ID NO: 99361
  chr20:52893383-52893413
  hypo

SEQ ID NO: 192813 - DNA, 18 bp, Homo sapiens
  chr20:53530452-53530470
  hypo
tttagattagtcttttaa

SEQ ID NO: 192814 - DNA, 35 bp, Homo sapiens
  chr20:54522656-54522691
  hypo
ggaggaggaagaggagaactcgttgagttttatct

SEQ ID NO: 192815 - DNA, 71 bp, Homo sapiens
  chr20:54681486-54681557
  hypo
acggggcagggagcacgggatcatggagacaagacggaccaaggagcacgggaccacggagacgagatgga

SEQ ID NO: 192816 - DNA, 39 bp, Homo sapiens
  chr20:54747157-54747196
  hypo
tttgagtcaaaaaagaccagccggtgcggtggctcatgc

SEQ ID NO: 192817 - DNA, 142 bp, Homo sapiens
  chr20:54880314-54880456
  hypo
tttccgctacccctgcgctttcccctaacgcccacaacttggtaataattgggaggccagcgccagactgagtggattcaacagtcattaagcaaaatgcaaaagttaaaccagagcctcgctggatcgcacagctgttcct

SEQ ID NO: 192818 - DNA, 43 bp, Homo sapiens; identical to SEQ ID NO: 99363
  chr20:54931801-54931844
  hypo

SEQ ID NO: 192819 - DNA, 394 bp, Homo sapiens; identical to SEQ ID NO: 57374
  chr20:54934125-54934519
  hypo

SEQ ID NO: 192820 - DNA, 129 bp, Homo sapiens
  chr20:54944843-54944972
  hypo
gctccttaactgatcggggtcagggcagagtggtcactttccccacagccaggctctggatttgcctcctgtgaagacaccatgcctagcacaggctgacggggcggctgcagtcgaaccttgcctcca

SEQ ID NO: 192821 - DNA, 31 bp, Homo sapiens; identical to SEQ ID NO: 33448
  chr20:54974275-54974306
  hypo

SEQ ID NO: 192822 - DNA, 104 bp, Homo sapiens
  chr20:55026765-55026869
  hypo
aatggggagccactgaaggagcggcggagtgacgatgagatttaaacaacgcactcgcgccctctttggaaagctactaacccggcaactatgtgtggttctcc

SEQ ID NO: 192823 - DNA, 87 bp, Homo sapiens
  chr20:55071605-55071692
  hypo
aatcagtcagtcaatcaatcaatcaatcaatctatctgctgctgttgctgctgactgcacaggcatccatatcggtgggtctttctt

SEQ ID NO: 192824 - DNA, 51 bp, Homo sapiens
  chr20:55091875-55091926
  hypo
tcatgtgactagcatcggtcagtcagacagggcacccgggacaatgggcag

SEQ ID NO: 192825 - DNA, 30 bp, Homo sapiens; identical to SEQ ID NO: 99368
  chr20:55124678-55124708
  hypo

SEQ ID NO: 192826 - DNA, 26 bp, Homo sapiens
  chr20:55198511-55198537
  hypo
cttttttttttgagaccgagtctagc

SEQ ID NO: 192827 - DNA, 136 bp, Homo sapiens; identical to SEQ ID NO: 13083
  chr20:55206293-55206429
  hypo

SEQ ID NO: 192828 - DNA, 134 bp, Homo sapiens; identical to SEQ ID NO: 13084
  chr20:55206463-55206597
  hypo

SEQ ID NO: 192829 - DNA, 147 bp, Homo sapiens; identical to SEQ ID NO: 133189
  chr20:55206736-55206883
  hypo

SEQ ID NO: 192830 - DNA, 30 bp, Homo sapiens
  chr20:55267418-55267448
  hypo
ctcgctttatctcaacggcgcgatcttggc

SEQ ID NO: 192831 - DNA, 17 bp, Homo sapiens
  chr20:55379054-55379071
  hypo
tttgagacggagtctcg

SEQ ID NO: 192832 - DNA, 17 bp, Homo sapiens
  chr20:55379430-55379447
  hypo
cccggccagttcagcct

SEQ ID NO: 192833 - DNA, 30 bp, Homo sapiens; identical to SEQ ID NO: 33453
  chr20:55566744-55566774
  hypo

SEQ ID NO: 192834 - DNA, 114 bp, Homo sapiens
  chr20:55667944-55668058
  hypo
agacttgctgggagccgggaagatgccagcctgcttttctgctctccctccttcaatccgcaccggggtctagggagcaggcgctgtcgtgatgatgcccgctttacggagagg

SEQ ID NO: 192835 - DNA, 33 bp, Homo sapiens
  chr20:55668444-55668477
  hypo
atgactcgggcagtgcgacggctcatgtctgcg

SEQ ID NO: 192836 - DNA, 620 bp, Homo sapiens; identical to SEQ ID NO: 99376
  chr20:55685232-55685852
  hypo

SEQ ID NO: 192837 - DNA, 153 bp, Homo sapiens
  chr20:55692779-55692932
  hypo
caccccatcaaagcaccgcccacccaccccacctaagcactgcccaccccaccccatcaaagcaccgcccacccccaccccatcaaagcaccgcccacccccacctaagcaccgcccactctcccgcacctgcagcaccgcccaccccacccc

SEQ ID NO: 192838 - DNA, 30 bp, Homo sapiens
  chr20:55693399-55693429
  hypo
tcaccccactacacccgcagcactgcccgc

SEQ ID NO: 192839 - DNA, 30 bp, Homo sapiens
  chr20:55717846-55717876
  hypo
ggtccaggtccaggacggtctaagaacttg

SEQ ID NO: 192840 - DNA, 241 bp, Homo sapiens; identical to SEQ ID NO: 99378
  chr20:55740617-55740858
  hypo

SEQ ID NO: 192841 - DNA, 31 bp, Homo sapiens; identical to SEQ ID NO: 33454
  chr20:55741638-55741669
  hypo

SEQ ID NO: 192842 - DNA, 172 bp, Homo sapiens
  chr20:55742061-55742233
  hypo
actacccgtgtgcagcgtccacggtacagcaggctggccatcggccccacccaccagagaagctaacactcagcgttggtgcgcacagaggaaggccctcaggcagtctggaagcaggagggagaccgagccctgagcaatggtccaggaactcagtcgtcagggcccaaca

SEQ ID NO: 192843 - DNA, 123 bp, Homo sapiens; identical to SEQ ID NO: 99380
  chr20:55748183-55748306
  hypo

SEQ ID NO: 192844 - DNA, 30 bp, Homo sapiens
  chr20:55787122-55787152
  hypo
cagaggctgggcgtgcgtagcacacaagag

SEQ ID NO: 192845 - DNA, 40 bp, Homo sapiens; identical to SEQ ID NO: 99381
  chr20:55797061-55797101
  hypo

SEQ ID NO: 192846 - DNA, 230 bp, Homo sapiens; identical to SEQ ID NO: 99382
  chr20:55904349-55904579
  hypo

SEQ ID NO: 192847 - DNA, 221 bp, Homo sapiens; identical to SEQ ID NO: 99383
  chr20:55925380-55925601
  hypo

SEQ ID NO: 192848 - DNA, 30 bp, Homo sapiens
  chr20:55929748-55929778
  hypo
attgacttttttcccgcaggatattgaagt

SEQ ID NO: 192849 - DNA, 65 bp, Homo sapiens; identical to SEQ ID NO: 99384
  chr20:55936562-55936627
  hypo

SEQ ID NO: 192850 - DNA, 30 bp, Homo sapiens; identical to SEQ ID NO: 33456
  chr20:55953199-55953229
  hypo

SEQ ID NO: 192851 - DNA, 106 bp, Homo sapiens; identical to SEQ ID NO: 33457
  chr20:55959113-55959219
  hypo

SEQ ID NO: 192852 - DNA, 226 bp, Homo sapiens; identical to SEQ ID NO: 33458
  chr20:55959338-55959564
  hypo

SEQ ID NO: 192853 - DNA, 30 bp, Homo sapiens; identical to SEQ ID NO: 33459
  chr20:55959781-55959811
  hypo

SEQ ID NO: 192854 - DNA, 146 bp, Homo sapiens; identical to SEQ ID NO: 57402
  chr20:55966823-55966969
  hypo

SEQ ID NO: 192855 - DNA, 72 bp, Homo sapiens
  chr20:55969231-55969303
  hypo
atccctaatgccagttgatcacgtgtgtgtgctcacgcatgtgcgcaccacgtagattccattgagagagac

SEQ ID NO: 192856 - DNA, 219 bp, Homo sapiens; identical to SEQ ID NO: 33461
  chr20:55969521-55969740
  hypo

SEQ ID NO: 192857 - DNA, 30 bp, Homo sapiens; identical to SEQ ID NO: 99391
  chr20:55971332-55971362
  hypo

SEQ ID NO: 192858 - DNA, 166 bp, Homo sapiens
  chr20:55981560-55981726
  hypo
aagccgacggggtgacgcacccagtcacagtacgggtctccccccagcgtgggcgctggcgagtatggcagctgttggcgccatcatctctgtggtcaccgccattgcactcctttgctccagcattcacgcagtcactctcacatcctcacggagctgctgcagg

SEQ ID NO: 192859 - DNA, 63 bp, Homo sapiens
  chr20:55996754-55996817
  hypo
cctgctgaaactccttcccaccgcggggccttcgcacataccgtgtccactgcctggagcacc

SEQ ID NO: 192860 - DNA, 30 bp, Homo sapiens
  chr20:55997094-55997124
  hypo
agcttcaaagtcagccgaagcagcatctgc

SEQ ID NO: 192861 - DNA, 261 bp, Homo sapiens
  chr20:56001370-56001631
  hypo
agatggatgtttactcttccccgcttcgagcacaggccatttgctctgcacggcacctgtctctttcccactaaatgcatcttgaccaggccccttagcacacacggggcttgctctttctttgccgtcagctgcgtgctatctgtggcgtgcatggggcaggtggggtgggcgttcccatccccagcgatggaggcaggagctctttcaggctcacctggaacacagtcacatgtgctggtctgtcggcatcacctcagc

SEQ ID NO: 192862 - DNA, 134 bp, Homo sapiens; identical to SEQ ID NO: 99393
  chr20:56031268-56031402
  hypo

SEQ ID NO: 192863 - DNA, 275 bp, Homo sapiens
  chr20:56076053-56076328
  hypo
aggtggccagtagcccggccttgggtttctacaatgtgcgctgatgaactgtgggtcaaatttcaccggtctgtcttctccagtaaaggactgtgcttactattcactcgtttattcaacaagtggtgacttaacgagcaatgctgaggccaggcctagtgccaggagctggggacggacccgatgggccaggcccgccttggaggagcctgcggtgccctgcatgtgggaatccggcacttattaaagaaccaaataagcgtgaagtgtgcagg

SEQ ID NO: 192864 - DNA, 206 bp, Homo sapiens; identical to SEQ ID NO: 99394
  chr20:56099533-56099739
  hypo

SEQ ID NO: 192865 - DNA, 120 bp, Homo sapiens
  chr20:56115073-56115193
  hypo
aggacagacatcgatcgaggtgtccttgtgctgagggtgttgctagcatgtgctttactcagtgagcagcagtgactcagcacagggcaggccggccgccgtctgcgtcaggaggctgta

SEQ ID NO: 192866 - DNA, 30 bp, Homo sapiens
  chr20:56115480-56115510
  hypo
tcacgtgcaccagctcgccagtggctcctt

SEQ ID NO: 192867 - DNA, 372 bp, Homo sapiens; identical to SEQ ID NO: 33464
  chr20:56126191-56126563
  hypo

SEQ ID NO: 192868 - DNA, 30 bp, Homo sapiens
  chr20:56134493-56134523
  hypo
attgtggtcatgcatcgggatggctaattc

SEQ ID NO: 192869 - DNA, 30 bp, Homo sapiens; identical to SEQ ID NO: 99396
  chr20:56155799-56155829
  hypo

SEQ ID NO: 192870 - DNA, 156 bp, Homo sapiens; identical to SEQ ID NO: 99397
  chr20:56167907-56168063
  hypo

SEQ ID NO: 192871 - DNA, 149 bp, Homo sapiens; identical to SEQ ID NO: 99398
  chr20:56186965-56187114
  hypo

SEQ ID NO: 192872 - DNA, 104 bp, Homo sapiens
  chr20:56227530-56227634
  hypo
gtggcaggtcgatctcgtgctgcaggtacggataggtgggctggaagcggtggaagcgctcccgctgggcgaagggcggcacggccaggcggtcggtgggccga

SEQ ID NO: 192873 - DNA, 650 bp, Homo sapiens
  chr20:56239139-56239789
  hypo
gcagtgcctgctggcgaggtcggtcgcaaaccagagacccaagggcacgcgcaccgaccgtccctggccccagccgtgttcccacctggcatcacgggagcagggctgtgggcagccaccctctccacaggcctggtcccgggactcacctggcctgggacagccacgccctgacactgtcggtccccaccccacaccaccccagggatgcctgagactcagcatgcgggcctctacgacgcactgatcagggcccactcaggccgagttcatcaagcatgggctccctccccacactaagtcccacacatccctctgggcaggcaccgtgaatccaccagcaaagaccccttgggggagagaaaggtgcctccccgcaaaggccttggagtcaagttcaaaacatgatgtgtgtatgaagcggcaccaatataaacacggctctccacccgcggcagctcgcagaatcctcttcgtgcctgcatttgttccgaggagcgcagggaggctgctggggcccattcccagtcgcagcttgagagccggactctcaggatcagatgcctcgcgggcaagggaaggaaccccagcaggactgccaacgcgaggcggaaggagagaaggcccagcgcggccgcatccctccctct

SEQ ID NO: 192874 - DNA, 30 bp, Homo sapiens
  chr20:56242062-56242092
  hypo
tgcattaaatgacctcgcagtggacaccca

SEQ ID NO: 192875 - DNA, 30 bp, Homo sapiens
  chr20:56242451-56242481
  hypo
ggcggggaggtgcggcggcgactgagtttc

SEQ ID NO: 192876 - DNA, 30 bp, Homo sapiens
  chr20:56242698-56242728
  hypo
ctcctggccgcacaccgaggaattaggaat

SEQ ID NO: 192877 - DNA, 30 bp, Homo sapiens; identical to SEQ ID NO: 99401
  chr20:56252473-56252503
  hypo

SEQ ID NO: 192878 - DNA, 103 bp, Homo sapiens
  chr20:56262195-56262298
  hypo
tgtaggttctagaaccgatctgccaacgcggaggaatgagttcaagatgtggagcaatgttctttttccgttaaggggttcaactgagcgacttccttcttct

SEQ ID NO: 192879 - DNA, 146 bp, Homo sapiens; identical to SEQ ID NO: 99402
  chr20:56264916-56265062
  hypo

SEQ ID NO: 192880 - DNA, 39 bp, Homo sapiens
  chr20:56265325-56265364
  hypo
ggggcacagaccacccgggggggccgggcccagtgcctg

SEQ ID NO: 192881 - DNA, 30 bp, Homo sapiens; identical to SEQ ID NO: 33467
  chr20:56265671-56265701
  hypo

SEQ ID NO: 192882 - DNA, 154 bp, Homo sapiens
  chr20:56265962-56266116
  hypo
actgcgcctgataaacgctgatgcctctacaccccgaggcctggggatcccgcttacaaggctaccagagaagcagggttagagaaagctggtcctggtgcctcctcctcgtccctaccggcccctcggtcttttcctacgggacttctgaaaa

SEQ ID NO: 192883 - DNA, 166 bp, Homo sapiens
  chr20:56270429-56270595
  hypo
ctctggtacccgttacgggcccagattcaggttacaaaatgttttccccgctgaagcacctggcatttcaccgctagagaatcggacctccagcccagcttggccctttcacaatccgtctgccctgcttaaaactgcaggcctggcccggcgcagcggctcacgc

SEQ ID NO: 192884 - DNA, 181 bp, Homo sapiens
  chr20:56271494-56271675
  hypo
ttcaaatcctgctctgcggtgtgctgggcaatccctggcaggtgacttagctccacctcctccatgcgatggggttgccatgaggattagtgagacagggtgtgcaaagagctcagtgagcacctgccactgtcagtaggaattgctagggttcaaaaagccgcgacgtcaccggcaagaa

SEQ ID NO: 192885 - DNA, 96 bp, Homo sapiens
  chr20:56299649-56299745
  hypo
tttttgcaggagtcaccctctttggtttctgaaatgcggacacacgttacaatggaaacgagcacttggggctccctgtctcggaaaagttgttga

SEQ ID NO: 192886 - DNA, 78 bp, Homo sapiens
  chr20:56323231-56323309
  hypo
aagcataggcacccacgggcagggctggctttcagggacgtgctgctgctggtgcaggaggcccgcctgggttcagat

SEQ ID NO: 192887 - DNA, 30 bp, Homo sapiens
  chr20:56484254-56484284
  hypo
aggctctcagaacaacgagggcgattcagg

SEQ ID NO: 192888 - DNA, 23 bp, Homo sapiens
  chr20:56577649-56577672
  hypo
acagaaagccaaacaccgcatgt

SEQ ID NO: 192889 - DNA, 68 bp, Homo sapiens
  chr20:56717705-56717773
  hypo
acagggtcttaaatacgagataaagtggaagtgacagctgagttacaggcaaacgagagccagatcat

SEQ ID NO: 192890 - DNA, 30 bp, Homo sapiens
  chr20:56718103-56718133
  hypo
gtgaccacggtggcacgtgacccacaacag

SEQ ID NO: 192891 - DNA, 30 bp, Homo sapiens
  chr20:56771714-56771744
  hypo
cgaccctcctcttctcgtgccaccagcttt

SEQ ID NO: 192892 - DNA, 304 bp, Homo sapiens
  chr20:56772088-56772392
  hypo
atcttaccaccaccccgtcaccggggccacctctcctgggcctcctcctctcccactccaccccgtcaccggggccacctctcctgggcctcctcctctcccactctgccccgtcaccggggccacctcttctggccctcctctcccactccgccccgtcaccggggccacctctcctggccctccgcctctccctcgcttcttttctccttgctaggtcagcagatctttgaggacggagccaggctcacacttctgtggcactgatgctgtcccaccagcacaccgtcgtaagcattcacga

SEQ ID NO: 192893 - DNA, 1032 bp, Homo sapiens; identical to SEQ ID NO: 33469
  chr20:56780189-56781221
  hypo

SEQ ID NO: 192894 - DNA, 449 bp, Homo sapiens; identical to SEQ ID NO: 133218
  chr20:56784796-56785245
  hypo

SEQ ID NO: 192895 - DNA, 30 bp, Homo sapiens; identical to SEQ ID NO: 133219
  chr20:56785265-56785295
  hypo

SEQ ID NO: 192896 - DNA, 225 bp, Homo sapiens; identical to SEQ ID NO: 57409
  chr20:56811735-56811960
  hypo

SEQ ID NO: 192897 - DNA, 36 bp, Homo sapiens; identical to SEQ ID NO: 33471
  chr20:56941011-56941047
  hypo

SEQ ID NO: 192898 - DNA, 337 bp, Homo sapiens; identical to SEQ ID NO: 99410
  chr20:56941587-56941924
  hypo

SEQ ID NO: 192899 - DNA, 155 bp, Homo sapiens; identical to SEQ ID NO: 99411
  chr20:56977719-56977874
  hypo

SEQ ID NO: 192900 - DNA, 84 bp, Homo sapiens
  chr20:56999384-56999468
  hypo
tggccacgttgaaagcggcccatgtgacagtgcatagcagacagtggacgggctgggcaagaacaccaccgagagcaagtgcag

SEQ ID NO: 192901 - DNA, 213 bp, Homo sapiens; identical to SEQ ID NO: 33474
  chr20:57009362-57009575
  hypo

SEQ ID NO: 192902 - DNA, 34 bp, Homo sapiens
  chr20:57036550-57036584
  hypo
cgggtggtgcacatcggagcgggcaatgaggcca

SEQ ID NO: 192903 - DNA, 186 bp, Homo sapiens; identical to SEQ ID NO: 99414
  chr20:57037019-57037205
  hypo

SEQ ID NO: 192904 - DNA, 163 bp, Homo sapiens; identical to SEQ ID NO: 99415
  chr20:57041474-57041637
  hypo

SEQ ID NO: 192905 - DNA, 30 bp, Homo sapiens
  chr20:57070297-57070327
  hypo
caaattgaaaatacacggccccttgttcaa

SEQ ID NO: 192906 - DNA, 184 bp, Homo sapiens
  chr20:57070697-57070881
  hypo
aagcctcagtgccctcgtctgtcgcggggtcagagacatgtttgggggaaaggggtgaggtgggttgagagcctcaccgggggtcgcacacacatgaaggtgtgacccatgccatcaccacctcctgtagcaacacagaaccagaaacctgtgcctgccacactgcgcccggcacctggctggg

SEQ ID NO: 192907 - DNA, 213 bp, Homo sapiens; identical to SEQ ID NO: 99416
  chr20:57154975-57155188
  hypo

SEQ ID NO: 192908 - DNA, 30 bp, Homo sapiens
  chr20:57177569-57177599
  hypo
aagtttttgtaaacgcgaattttcattttt

SEQ ID NO: 192909 - DNA, 30 bp, Homo sapiens
  chr20:57207160-57207190
  hypo
tctctaaagctattccggaaagtgaggggg

SEQ ID NO: 192910 - DNA, 30 bp, Homo sapiens; identical to SEQ ID NO: 99417
  chr20:57212788-57212818
  hypo

SEQ ID NO: 192911 - DNA, 89 bp, Homo sapiens
  chr20:57213158-57213247
  hypo
tgtggagcccgcggccgttccctgcgcacagtagtccctgcctcgtgcccaccgtaaagactgcctttatcactcgggaggttcattca

SEQ ID NO: 192912 - DNA, 281 bp, Homo sapiens; identical to SEQ ID NO: 13101
  chr20:57224798-57225079
  hypo

SEQ ID NO: 192913 - DNA, 375 bp, Homo sapiens; identical to SEQ ID NO: 57413
  chr20:57225218-57225593
  hypo

SEQ ID NO: 192914 - DNA, 30 bp, Homo sapiens
  chr20:57240312-57240342
  hypo
ctttactgacactaacgtcactcactggcg

SEQ ID NO: 192915 - DNA, 161 bp, Homo sapiens; identical to SEQ ID NO: 99421
  chr20:57240787-57240948
  hypo

SEQ ID NO: 192916 - DNA, 39 bp, Homo sapiens; identical to SEQ ID NO: 33478
  chr20:57241749-57241788
  hypo

SEQ ID NO: 192917 - DNA, 235 bp, Homo sapiens; identical to SEQ ID NO: 33479
  chr20:57244308-57244543
  hypo

SEQ ID NO: 192918 - DNA, 30 bp, Homo sapiens
  chr20:57251470-57251500
  hypo
aacctttgcatccacggactcctccttccc

SEQ ID NO: 192919 - DNA, 30 bp, Homo sapiens
  chr20:57252486-57252516
  hypo
cctcgtttgtgtgagcgtgggtcagaccgc

SEQ ID NO: 192920 - DNA, 322 bp, Homo sapiens; identical to SEQ ID NO: 99424
  chr20:57268839-57269161
  hypo

SEQ ID NO: 192921 - DNA, 30 bp, Homo sapiens
  chr20:57269611-57269641
  hypo
acaagacaacgggccggtggaggtgtccac

SEQ ID NO: 192922 - DNA, 30 bp, Homo sapiens; identical to SEQ ID NO: 99425
  chr20:57270537-57270567
  hypo

SEQ ID NO: 192923 - DNA, 30 bp, Homo sapiens
  chr20:57324626-57324656
  hypo
cccatgaaccctgtccggctgctcagctcc

SEQ ID NO: 192924 - DNA, 30 bp, Homo sapiens
  chr20:57329074-57329104
  hypo
gctcaccgccacacacgttgctccgccctc

SEQ ID NO: 192925 - DNA, 309 bp, Homo sapiens
  chr20:57375850-57376159
  hypo
tgtcaggttccatggcggaagccatgctggatttgtggcgcggtcacaccatcgcccagagaatatgcgtgacttcctgacacagggaggaacacgcacgtggttgccaaagcgctatcaagcacagcaagacctccccaggccagggcccccacgccggctcaggacgggactggccctggtcactcattccacagggaagccagccaagtggtaagcagagagcaagcctattacaaagctacactcacacagcggaaaggctgtccccgggcaggaccttgagcacccacgcgcctgggatgccac

SEQ ID NO: 192926 - DNA, 265 bp, Homo sapiens
  chr20:57386553-57386818
  hypo
tgccgccagccggtgcgtgggagaagcgatgacccagcacttccccagcatgagtgaccaaatagccgctctagcctttcccaagaagccatcctctgtccataatggagaaattatgtgaggcgtaatttatagtaaaaatcaaatgaacattaattctggtgagtcatccatgcagaaagggcatcggctatggatgtgggctgccgccgagtacagctgaatgtttaatcaaactgagccaagactgcgccacaggttgtgg

SEQ ID NO: 192927 - DNA, 157 bp, Homo sapiens; identical to SEQ ID NO: 99426
  chr20:57392357-57392514
  hypo

SEQ ID NO: 192928 - DNA, 30 bp, Homo sapiens
  chr20:57409136-57409166
  hypo
tctcccctccgggctcgaggcgcgctcgct

SEQ ID NO: 192929 - DNA, 209 bp, Homo sapiens; identical to SEQ ID NO: 133233
  chr20:57414592-57414801
  hypo

SEQ ID NO: 192930 - DNA, 159 bp, Homo sapiens; identical to SEQ ID NO: 133234
  chr20:57415179-57415338
  hypo

SEQ ID NO: 192931 - DNA, 303 bp, Homo sapiens; identical to SEQ ID NO: 13104
  chr20:57415538-57415841
  hypo

SEQ ID NO: 192932 - DNA, 2077 bp, Homo sapiens; identical to SEQ ID NO: 13105
  chr20:57428310-57430387
  hypo

SEQ ID NO: 192933 - DNA, 30 bp, Homo sapiens
  chr20:57450762-57450792
  hypo
cagtcaggttcagatcgtagccttcagggt

SEQ ID NO: 192934 - DNA, 34 bp, Homo sapiens; identical to SEQ ID NO: 13107
  chr20:57470652-57470686
  hypo

SEQ ID NO: 192935 - DNA, 252 bp, Homo sapiens; identical to SEQ ID NO: 13108
  chr20:57478607-57478859
  hypo

SEQ ID NO: 192936 - DNA, 30 bp, Homo sapiens; identical to SEQ ID NO: 13109
  chr20:57480439-57480469
  hypo

SEQ ID NO: 192937 - DNA, 438 bp, Homo sapiens; identical to SEQ ID NO: 13110
  chr20:57484404-57484842
  hypo

SEQ ID NO: 192938 - DNA, 30 bp, Homo sapiens; identical to SEQ ID NO: 13111
  chr20:57485068-57485098
  hypo

SEQ ID NO: 192939 - DNA, 205 bp, Homo sapiens; identical to SEQ ID NO: 57424
  chr20:57485750-57485955
  hypo

SEQ ID NO: 192940 - DNA, 38 bp, Homo sapiens
  chr20:57547946-57547984
  hypo
cagctcacctgttctcggctcaccgttccctccaggcg

SEQ ID NO: 192941 - DNA, 203 bp, Homo sapiens
  chr20:57554934-57555137
  hypo
ggtaaaggctgaaaaagttgccgaaaggattagaagcatcacgcaatataccaatgtaacaaacctgcacacgcaccgaatctaaaattaaaacaaaacaaaaacacaacaaccaaacaaaaacctttccgtgatcatcaggaggctgtcatattctcaccccctacttcacgctgggaatcgagctgcgggctttacaacag

SEQ ID NO: 192942 - DNA, 30 bp, Homo sapiens
  chr20:57559931-57559961
  hypo
gctcggggtgaagtccggcctctgtcatgc

SEQ ID NO: 192943 - DNA, 438 bp, Homo sapiens
  chr20:57571496-57571934
  hypo
caggatggcggcagccgcgcatgtcagagaagggtctggccccaaaagccactcgcgcggtggctgagacagctggagcaaggaaccctctgtcaaggccccagtttttagctaaacgtaaacagaaccattcaagcgagaggagtaccaggacgtttttttctaggaatgaccttaagaaaatgaaaacatcttacccatggttcaccccatgaattccggacaatccagtactcagtcccatcactgatgccccacccagccacagaaacgacatggtttatatatgtggtgtcctggtattcggcatagatgcctccggtgtagttagccagtctttctgttgccattattccacagctgagagcaagcagttaaagaattaccacttttaaattgagagaatttaccgtcattagaaataatctgatatggctg

SEQ ID NO: 192944 - DNA, 231 bp, Homo sapiens; identical to SEQ ID NO: 33490
  chr20:57577636-57577867
  hypo

SEQ ID NO: 192945 - DNA, 270 bp, Homo sapiens; identical to SEQ ID NO: 33491
  chr20:57578207-57578477
  hypo

SEQ ID NO: 192946 - DNA, 203 bp, Homo sapiens; identical to SEQ ID NO: 33492
  chr20:57578997-57579200
  hypo

SEQ ID NO: 192947 - DNA, 24 bp, Homo sapiens
  chr20:57616448-57616472
  hypo
tacaaatgcggacaacgttttaaa

SEQ ID NO: 192948 - DNA, 30 bp, Homo sapiens; identical to SEQ ID NO: 99441
  chr20:57679306-57679336
  hypo

SEQ ID NO: 192949 - DNA, 240 bp, Homo sapiens; identical to SEQ ID NO: 99442
  chr20:57699765-57700005
  hypo

SEQ ID NO: 192950 - DNA, 381 bp, Homo sapiens
  chr20:57767482-57767863
  hypo
tgcgctccacctggacgcccccagacaagtctcggcccctcttcttccactccgtccccactcagctctccaccaccgtggaatgtgtccccgtcaccaggagcaactcgctgcccttcgtcgagggctccaggacgtggctggagcccagggagccccgggacccctggtccaggacgcagaagcctctgagccccaggcccggcccagcccgcctgggctgccgctcgggactaagctcgactgacgttcccagtgggcatccccgggccctggtcagacaggccgcggtggaggacctgccaggcacccccattggcgatgccctggtgcccgcagaggacacagacgcaaagagaactgctgcgcgggaggccatgg

SEQ ID NO: 192951 - DNA, 58 bp, Homo sapiens; identical to SEQ ID NO: 57429
  chr20:57797334-57797392
  hypo

SEQ ID NO: 192952 - DNA, 348 bp, Homo sapiens; identical to SEQ ID NO: 133255
  chr20:57797934-57798282
  hypo

SEQ ID NO: 192953 - DNA, 762 bp, Homo sapiens; identical to SEQ ID NO: 133257
  chr20:57875350-57876112
  hypo

SEQ ID NO: 192954 - DNA, 30 bp, Homo sapiens; identical to SEQ ID NO: 99446
  chr20:57895634-57895664
  hypo

SEQ ID NO: 192955 - DNA, 315 bp, Homo sapiens; identical to SEQ ID NO: 13116
  chr20:57978780-57979095
  hypo

SEQ ID NO: 192956 - DNA, 30 bp, Homo sapiens
  chr20:57985894-57985924
  hypo
ggctgtagctggcctcgggccccatctcca

SEQ ID NO: 192957 - DNA, 30 bp, Homo sapiens
  chr20:57986270-57986300
  hypo
tgaatgtgaactagccggagagagaacagg

SEQ ID NO: 192958 - DNA, 30 bp, Homo sapiens
  chr20:57986530-57986560
  hypo
gcagcagggagctttcgagtctcgtccatc

SEQ ID NO: 192959 - DNA, 30 bp, Homo sapiens; identical to SEQ ID NO: 99448
  chr20:58014172-58014202
  hypo

SEQ ID NO: 192960 - DNA, 30 bp, Homo sapiens
  chr20:58014806-58014836
  hypo
aatgaatttggccttcggtacgtggtctgc

SEQ ID NO: 192961 - DNA, 88 bp, Homo sapiens
  chr20:58045740-58045828
  hypo
gcgtgtgtcctgtgccggttcccgccttgcctccttaccgacgcgcctcccttctggcctccaatccccacggcggcactgtggccgc

SEQ ID NO: 192962 - DNA, 123 bp, Homo sapiens
  chr20:58166169-58166292
  hypo
cgtagaatattctagcgcatggtgcagcgccagggatgaggcagcctccccagcaatttgcaccagccccagcctgcccttgacagggctctggccattctcgtccctcgcacggacacatct

SEQ ID NO: 192963 - DNA, 163 bp, Homo sapiens; identical to SEQ ID NO: 133263
  chr20:58179831-58179994
  hypo

SEQ ID NO: 192964 - DNA, 189 bp, Homo sapiens; identical to SEQ ID NO: 57436
  chr20:58180213-58180402
  hypo

SEQ ID NO: 192965 - DNA, 105 bp, Homo sapiens; identical to SEQ ID NO: 57437
  chr20:58180470-58180575
  hypo

SEQ ID NO: 192966 - DNA, 113 bp, Homo sapiens; identical to SEQ ID NO: 133266
  chr20:58180687-58180800
  hypo

SEQ ID NO: 192967 - DNA, 30 bp, Homo sapiens
  chr20:58203508-58203538
  hypo
gcactgcactgtccccgcagcctgcacgtg

SEQ ID NO: 192968 - DNA, 30 bp, Homo sapiens
  chr20:58262230-58262260
  hypo
tgatagtggtgatgacgatgatgatcatgg

SEQ ID NO: 192969 - DNA, 31 bp, Homo sapiens; identical to SEQ ID NO: 13120
  chr20:58323973-58324004
  hypo

SEQ ID NO: 192970 - DNA, 30 bp, Homo sapiens
  chr20:58363316-58363346
  hypo
gtcatcgtacagatgcgtttttctctagag

SEQ ID NO: 192971 - DNA, 111 bp, Homo sapiens; identical to SEQ ID NO: 33500
  chr20:58397112-58397223
  hypo

SEQ ID NO: 192972 - DNA, 79 bp, Homo sapiens
  chr20:58407606-58407685
  hypo
ggacagaaatctggaagagtccggagagtgtttgcaaatgcaaatctagtcctggcacgcccacaccccatctcaccca

SEQ ID NO: 192973 - DNA, 401 bp, Homo sapiens; identical to SEQ ID NO: 99454
  chr20:58507040-58507441
  hypo

SEQ ID NO: 192974 - DNA, 581 bp, Homo sapiens
  chr20:58507740-58508321
  hypo
aacaaaaaaaaaccacgctgccgtattcgcagatgctcggccagcctggagcccggtccagaaaaggccgcacgtggagccacgtgtcgcgcattgagccgccgcgggacgcatcaggcccagctgcgcggaggggctggcggcctcaaccgcaaggagaggccgcaggtggggacggcgggagggagagaagggactgaaggcgccgagcaggaggaaggttttgcgcgcactcccttcttccctaagtggaaccggcagtggcaacaacgaggccgaaggcgaagtccctgctcccaccgccggcacggtgacccttttcccagggtcacccccgaaccaacaaagcacacacacacccgagatgcgccccaggccgcagcgccaaccccccttcagatgtcccggagacaggcgagcagcggtccccagggctcccgtcgccaccgcttctcccgcacccctcagcctcctcgggccggcgacgcgcgcagccccaggcctgctccccgctcgccaagcgcaccgccccgcgcctcagccaccttgaccgagtcgcccacgcgcgggggcggctccga

SEQ ID NO: 192975 - DNA, 509 bp, Homo sapiens; identical to SEQ ID NO: 57439
  chr20:58514020-58514529
  hypo

SEQ ID NO: 192976 - DNA, 330 bp, Homo sapiens; identical to SEQ ID NO: 57440
  chr20:58514800-58515130
  hypo

SEQ ID NO: 192977 - DNA, 112 bp, Homo sapiens; identical to SEQ ID NO: 133271
  chr20:58515464-58515576
  hypo

SEQ ID NO: 192978 - DNA, 30 bp, Homo sapiens
  chr20:58525272-58525302
  hypo
gtagtgtacattgtacgtcatgtgcagttt

SEQ ID NO: 192979 - DNA, 30 bp, Homo sapiens
  chr20:58875117-58875147
  hypo
agtggccgccgcactcgccctgtatgggcc

SEQ ID NO: 192980 - DNA, 30 bp, Homo sapiens
  chr20:58900226-58900256
  hypo
cttctccaatgctaacgcgccagtcaccaa

SEQ ID NO: 192981 - DNA, 30 bp, Homo sapiens; identical to SEQ ID NO: 99459
  chr20:58987233-58987263
  hypo

SEQ ID NO: 192982 - DNA, 24 bp, Homo sapiens
  chr20:59225102-59225126
  hypo
gtgtgtgtttaggtgcgtgcgtgt

SEQ ID NO: 192983 - DNA, 143 bp, Homo sapiens; identical to SEQ ID NO: 99460
  chr20:59225185-59225328
  hypo

SEQ ID NO: 192984 - DNA, 37 bp, Homo sapiens; identical to SEQ ID NO: 99461
  chr20:59330840-59330877
  hypo

SEQ ID NO: 192985 - DNA, 462 bp, Homo sapiens
  chr20:59598778-59599240
  hypo
aagcccccacccacacggccactcgcaggagcccccaccctcacaaccacttgcagggagccccccgcccacacggccactcgcaggagccccccacccacgcggccactcgcaggagcccccacccacgcagccactcgcaggagcccgcctcccacacggccactggcaggagcctccgcccacgcggccactcgcagggagccccccacccacgcggccactcgcaggagcccccacccacgcggccactcgcaggagccccccacccacgcggccactcgcaggagcacgcggccactcgcaggagcccgcctcccacacggccactggcaggagcccccgcccacgcggccactcgcagggagccccccacccacgtggccactcgcaggagcccccgcccacgcggccactcgcagggagccccccacccacacggccactcgcagggagcccccc

SEQ ID NO: 192986 - DNA, 30 bp, Homo sapiens; identical to SEQ ID NO: 99462
  chr20:59600975-59601005
  hypo

SEQ ID NO: 192987 - DNA, 30 bp, Homo sapiens
  chr20:59667448-59667478
  hypo
gggctggcataacggcggcttcctctggat

SEQ ID NO: 192988 - DNA, 159 bp, Homo sapiens; identical to SEQ ID NO: 133272
  chr20:59804277-59804436
  hypo

SEQ ID NO: 192989 - DNA, 21 bp, Homo sapiens
  chr20:59826956-59826977
  hypo
aatggaagtgcacactcccac

SEQ ID NO: 192990 - DNA, 67 bp, Homo sapiens; identical to SEQ ID NO: 13123
  chr20:59828340-59828407
  hypo

SEQ ID NO: 192991 - DNA, 104 bp, Homo sapiens
  chr20:59832948-59833052
  hypo
ggaaccgagggctcccgggtcgtatctcccctctatcctgcaacgaagcgggaacaggtgagtggaaacgctgttcactggggatggggcggagcctggcatcc

SEQ ID NO: 192992 - DNA, 83 bp, Homo sapiens
  chr20:59871229-59871312
  hypo
aagtatgagtgtgtgcgtgtgtgtgtgtgagagagagaccttagagttgtcaaaataatgagtgtgtgtatgtgtgtgtgcat

SEQ ID NO: 192993 - DNA, 23 bp, Homo sapiens
  chr20:59871371-59871394
  hypo
catgcgtgcgtgtgtgtgtgtgt

SEQ ID NO: 192994 - DNA, 28 bp, Homo sapiens
  chr20:59872425-59872453
  hypo
caagagcgaaactccatctcaaaaaaca

SEQ ID NO: 192995 - DNA, 468 bp, Homo sapiens
  chr20:59872749-59873217
  hypo
tggattctggaggccttgcagcgcactttcctgccctctcgcgtgtatgatagagacattagcgcgtgtcagcccctttaccggggcttcccattgtcttagcgtgctcctttcatctaatgagcaggcgcccttggctgaacttttcaggaatccgtggggaaccagagtgaatatattatggcgctgtggagcgaatgacaatcgggcagtgctcgcctgtggccgtggaggtatctgcgccaccgcaaaatgcctcacccttcttttgggttttggggtttcaggtcagctctgggggcccgttatcccgtgtcaaggaggcccacgcaggcacccgaggaaggctttggctatcacgaggtggcctttgtgcaggcgggttcagcaactttggcattcattggggcagcctgttactggtgcttggagtaagtgaagagtgcgattgggcgccagagctgacct

SEQ ID NO: 192996 - DNA, 30 bp, Homo sapiens
  chr20:59942009-59942039
  hypo
agcttgggccctttgcggaccctccagaca

SEQ ID NO: 192997 - DNA, 520 bp, Homo sapiens; identical to SEQ ID NO: 99468
  chr20:59965386-59965906
  hypo

SEQ ID NO: 192998 - DNA, 30 bp, Homo sapiens
  chr20:59967399-59967429
  hypo
ccgctcggagtcccacgctgctcagtatgc

SEQ ID NO: 192999 - DNA, 30 bp, Homo sapiens
  chr20:59982435-59982465
  hypo
ttcacctgttgtcaccgaaccctggggaca

SEQ ID NO: 193000 - DNA, 23 bp, Homo sapiens
  chr20:60029502-60029525
  hypo
ttttttctttcttttttgagacg

SEQ ID NO: 193001 - DNA, 31 bp, Homo sapiens; identical to SEQ ID NO: 33508
  chr20:60079876-60079907
  hypo

SEQ ID NO: 193002 - DNA, 253 bp, Homo sapiens; identical to SEQ ID NO: 33509
  chr20:60094623-60094876
  hypo

SEQ ID NO: 193003 - DNA, 196 bp, Homo sapiens; identical to SEQ ID NO: 99472
  chr20:60098285-60098481
  hypo

SEQ ID NO: 193004 - DNA, 30 bp, Homo sapiens
  chr20:60106745-60106775
  hypo
gacatggatgcagcacggtggagccccagc

SEQ ID NO: 193005 - DNA, 30 bp, Homo sapiens
  chr20:60107084-60107114
  hypo
agtggcgcctgttgccggccctcaggctct

SEQ ID NO: 193006 - DNA, 30 bp, Homo sapiens; identical to SEQ ID NO: 33510
  chr20:60107463-60107493
  hypo

SEQ ID NO: 193007 - DNA, 30 bp, Homo sapiens; identical to SEQ ID NO: 33511
  chr20:60107959-60107989
  hypo

SEQ ID NO: 193008 - DNA, 30 bp, Homo sapiens
  chr20:60108373-60108403
  hypo
acacccaggactgcccgccaactccgagcc

SEQ ID NO: 193009 - DNA, 366 bp, Homo sapiens
  chr20:60119293-60119659
  hypo
tgtgtatgtatatggcggggtacggctgacatcgagcgggtggaggctgggtacggctaaacaccccacagcccaggacagcctcgcagcagaagcatccagctccatgtatcactcgtgtccaggccgagaaacccgacgtagaaatccagcttgcccaggagagaggggtgggactcctggtgttcacttcgtagctgttctgtggtgggagcgcagtgggagccgcagggcatcggggtcttcgaaggaaagcccgtggattatgcatccaggaattaaagcagtccatgcaatggcagccgccaagcagagacggtgacgggatccctgcgttgacggtggcatgaccgtgtgtgatgggat

SEQ ID NO: 193010 - DNA, 43 bp, Homo sapiens
  chr20:60120725-60120768
  hypo
tttggcaactggtgccgctcatgcttggcgccagcgggcagga

SEQ ID NO: 193011 - DNA, 30 bp, Homo sapiens; identical to SEQ ID NO: 99475
  chr20:60121966-60121996
  hypo

SEQ ID NO: 193012 - DNA, 30 bp, Homo sapiens
  chr20:60131916-60131946
  hypo
ccggggcaacaacaccgagaacacgtgagg

SEQ ID NO: 193013 - DNA, 30 bp, Homo sapiens
  chr20:60132764-60132794
  hypo
gagggaaccacggagcgcctcttgagaagg

SEQ ID NO: 193014 - DNA, 30 bp, Homo sapiens
  chr20:60156948-60156978
  hypo
cgccgtctccccagccggtagacctgagcc

SEQ ID NO: 193015 - DNA, 30 bp, Homo sapiens
  chr20:60170726-60170756
  hypo
cgtgcatgaaagtagcgaggctcgtttcga

SEQ ID NO: 193016 - DNA, 31 bp, Homo sapiens; identical to SEQ ID NO: 33512
  chr20:60170957-60170988
  hypo

SEQ ID NO: 193017 - DNA, 150 bp, Homo sapiens
  chr20:60173820-60173970
  hypo
ccgagggactggctgcggggcaccccacatggcggggtcctccatggaagtgtggtcggagtacccgaggccccttccctactgcaggcactgcccgccaagcttccctggatggctcctccagggctgacactgcgcagcctgggcgtc

SEQ ID NO: 193018 - DNA, 45 bp, Homo sapiens; identical to SEQ ID NO: 99477
  chr20:60176906-60176951
  hypo

SEQ ID NO: 193019 - DNA, 43 bp, Homo sapiens; identical to SEQ ID NO: 99478
  chr20:60194625-60194668
  hypo

SEQ ID NO: 193020 - DNA, 330 bp, Homo sapiens
  chr20:60198707-60199037
  hypo
gttctgacgtcaccacgcagccctggggaccagccatccccaggagaaggctggttttagtgcatcactgagcgcaaagtatttttgcaatcagaaaataaaaggtacccagaatctgagcaggaaagacacggttcctagagcgaggaacaccccagaatctgagcaggaaggacacggttcctagagcgaggaacaccccagaatctgagcaggaaggacacggttcctagagcgaggaacaccccagaatctgaggaggaaagacacggttcctagagcgaggaacaccccagaatctgagcaggaaagacacggttcctagagcga

SEQ ID NO: 193021 - DNA, 30 bp, Homo sapiens
  chr20:60209725-60209755
  hypo
cttaacataagcgttcgttttaacactttg

SEQ ID NO: 193022 - DNA, 71 bp, Homo sapiens; identical to SEQ ID NO: 99479
  chr20:60210048-60210119
  hypo

SEQ ID NO: 193023 - DNA, 446 bp, Homo sapiens
  chr20:60226060-60226506
  hypo
tgtgcttgtgtgagttagcctcgtgcttggccgtgcactggtgtgcttgtgtgagtgagttagcgccgtgcttggccgtgcactggtgtgctcgtgtcagtgagttagcaccgtgcttggccgtgcactggtgtgctcgtgtgagtgagttagcctcgtgcttggtcacgcactggtgtgcttgtgtgagttagcgtcatgcttggccgtgcactggtgtgcttgtgtgagtgagttagcatcgtgcttggccatggcagtgagttctgattgcagggtctcaacgctcagggaaggacgagtgccccttctgtgccattttccaaaactctagggatattgagtcttgctcaggtcacccaaaggcacatgtcccagccccgagtcaagcgtacaggggcctcccgggagcacccttgtgcctgtcgcggcgttcctctccttct

SEQ ID NO: 193024 - DNA, 30 bp, Homo sapiens
  chr20:60235333-60235363
  hypo
tacaacagaaacgcccgcaaggcatctgtt

SEQ ID NO: 193025 - DNA, 30 bp, Homo sapiens
  chr20:60235563-60235593
  hypo
ttttcaaacatcagccgtggcaagtctgtt

SEQ ID NO: 193026 - DNA, 30 bp, Homo sapiens
  chr20:60235857-60235887
  hypo
atacctggactcccgcgtggaacacccagc

SEQ ID NO: 193027 - DNA, 30 bp, Homo sapiens; identical to SEQ ID NO: 99481
  chr20:60236253-60236283
  hypo

SEQ ID NO: 193028 - DNA, 176 bp, Homo sapiens
  chr20:60236696-60236872
  hypo
ggaccatggatccttcgtgtttgtcacctttgcctttgtgtttgtcacctttgtggcaagttgttgcaaagacgtcacagccaccgcacacatttccactttgggtctggactgaccatctttgagtgtccgcccatcattcaccaaacactgacgcggctcgtatgacaggccag

SEQ ID NO: 193029 - DNA, 30 bp, Homo sapiens; identical to SEQ ID NO: 33514
  chr20:60237750-60237780
  hypo

SEQ ID NO: 193030 - DNA, 742 bp, Homo sapiens; identical to SEQ ID NO: 99484
  chr20:60238323-60239065
  hypo

SEQ ID NO: 193031 - DNA, 29 bp, Homo sapiens
  chr20:60261374-60261403
  hypo
gagagaacaagcccaactgtgcgtgtata

SEQ ID NO: 193032 - DNA, 121 bp, Homo sapiens; identical to SEQ ID NO: 33518
  chr20:60261582-60261703
  hypo

SEQ ID NO: 193033 - DNA, 29 bp, Homo sapiens
  chr20:60261822-60261851
  hypo
attcgcgcgtgtgtgtgtgcatgtgtgca

SEQ ID NO: 193034 - DNA, 30 bp, Homo sapiens
  chr20:60268235-60268265
  hypo
tgatgaaggcgggtacgagcagtcactcca

SEQ ID NO: 193035 - DNA, 20 bp, Homo sapiens
  chr20:60272659-60272679
  hypo
gggggaacaaaaaaaaggaa

SEQ ID NO: 193036 - DNA, 381 bp, Homo sapiens
  chr20:60273114-60273495
  hypo
gtctcacactgccacactgcccgagacagcagccattagccgcacgttgctggacagcacagacctggcacgtgtcgtccaccctcggaggggtccccttgcacgggctccactccggacggtccctgagactctcccgccctcacgcctgctctctaagccaagcacaaagccaagtgcagcccccactgaccattccagcccatgccggcgtctgccccaggccccagatccgtcctgctggtgcgattgagggcacagagtcgagccttcaagtaggtcttctaatatggctccattcatgcagaaacctcccagtggggctgtgccaggcacttggaaagtgggagccgcagccctgccgtccgggtgcttcccatt

SEQ ID NO: 193037 - DNA, 582 bp, Homo sapiens
  chr20:60275648-60276230
  hypo
gaaagaatgtcaccccgtacggcctcactgtggggccacacatcaccccatacagcctcactgtggggccacacgtcaccccatacggcctccctgtggggccacacatcaccctatacggcctcactgtggggccatgtctgtcttcatgggtgtcttcttcatgtcttcttcatgtctgtcttcatggcccaggcctggggcagagccggggttgccggctcagcgggtgagtgccacatgagtcttgccttcaaagctggagtgcctgatcttgacagcggaccgacatcttcaagggaacggcggctccccccttttttgcagaacactttcaaaggtgtattcgtgttccagggccgccataacagagcgccacagaggggcggtgtaaacagcagaggtgtatgctctcgctgctctggaggatggaagcttaaagccgaggcatcggcaggggtggtttgacgaaagccgtcagagagctcggagggaagactctgttccaggcctctctcctcggcttgcaggtgccatcttcttcccgcatctcttcacatcgccttccctctgggagtgtgt

SEQ ID NO: 193038 - DNA, 30 bp, Homo sapiens
  chr20:60276708-60276738
  hypo
aagagcaagaaggaacggactcaccaggca

SEQ ID NO: 193039 - DNA, 334 bp, Homo sapiens
  chr20:60281571-60281905
  hypo
ctacgacgaagactccggggaggaagaacggatggaaaggccagcccaaatggaagttggagtttgctgagctgaggacagggcctgtgggatctgctggaagagaggcgaaccaagaccaaagggatcggtttctcccgagctgcacacagtggcaccgactccctgatccccgatgtgtagaaaccaccttggctgaattctcccgagcccgctgcaggccagtgggaacagtggttgggaatctcaccggaactggctcgggcaggacgttcatggtgaggttccaaccggaatgagtcatgtgaccgtcagcatccgacctccacattag

SEQ ID NO: 193040 - DNA, 30 bp, Homo sapiens
  chr20:60285078-60285108
  hypo
tgttcttcccctgtccgtgggcggccaggg

SEQ ID NO: 193041 - DNA, 324 bp, Homo sapiens
  chr20:60304093-60304417
  hypo
gtctccagccgtcctcgcccatgtgggaatgacaagcaaggctttgcccattagccctgttgctctgcgagcgctgactgcagcgtgttttgacaagaggccctggcatctcacaagcccaggagtcctcggtgcatggcgcattggtggctggatttgccactattattctctgctcactcctgtgttggcgtgagtgggaggacttcattagcgacatcgcccacatcaagagccactgtgcttcgttccagtgggcaccagtaggactggctaatgaggcgctcacagctcagtttctacggccactgtggaaaagaactt

SEQ ID NO: 193042 - DNA, 268 bp, Homo sapiens; identical to SEQ ID NO: 99492
  chr20:60313849-60314117
  hypo

SEQ ID NO: 193043 - DNA, 220 bp, Homo sapiens; identical to SEQ ID NO: 33522
  chr20:60316297-60316517
  hypo

SEQ ID NO: 193044 - DNA, 184 bp, Homo sapiens; identical to SEQ ID NO: 99494
  chr20:60329679-60329863
  hypo

SEQ ID NO: 193045 - DNA, 69 bp, Homo sapiens; identical to SEQ ID NO: 33523
  chr20:60334002-60334071
  hypo

SEQ ID NO: 193046 - DNA, 425 bp, Homo sapiens; identical to SEQ ID NO: 33524
  chr20:60352645-60353070
  hypo

SEQ ID NO: 193047 - DNA, 191 bp, Homo sapiens; identical to SEQ ID NO: 33525
  chr20:60361299-60361490
  hypo

SEQ ID NO: 193048 - DNA, 352 bp, Homo sapiens
  chr20:60373188-60373540
  hypo
cgccctctcaccctgcgcctctcctgagccagcagccataacccccgccccgcccggccctgccccgggctctgtggcagcacctcctgccaggagcaccctcagctccctgcgggagcacgcagcaacagaggggagggggtgtggtcccgcctcgcacgcatccccgctgtgggcggcccctcgctgcgcctcagcctctccctggccccacgggcctccacactcctcacatacagaatgggctgtgggtcctcagcccgtccggaccctccgctcctttcctgctacctccgtgcgcagcaggccttgtggggtgtggtccagagcgtggccccggggtgcatcgcgc

SEQ ID NO: 193049 - DNA, 30 bp, Homo sapiens
  chr20:60382954-60382984
  hypo
gggatgcaggcacagcgcgatccagcacag

SEQ ID NO: 193050 - DNA, 30 bp, Homo sapiens
  chr20:60416217-60416247
  hypo
tgccactcagccactcgagcacctactgcg

SEQ ID NO: 193051 - DNA, 30 bp, Homo sapiens
  chr20:60416818-60416848
  hypo
gtgtgcgcgcgtgcgcgcaccgtgggcctg

SEQ ID NO: 193052 - DNA, 30 bp, Homo sapiens; identical to SEQ ID NO: 99498
  chr20:60424539-60424569
  hypo

SEQ ID NO: 193053 - DNA, 30 bp, Homo sapiens
  chr20:60433811-60433841
  hypo
tgtggcgtagaattccgtggcctgggtgta

SEQ ID NO: 193054 - DNA, 160 bp, Homo sapiens
  chr20:60445700-60445860
  hypo
gaacagtgagtgcttcgggaagctggagtggcttctccctttgactttctgaaccagatgagccaaatgcggtcaccaccgacccccatgactttcccagctctgccctttcgtagagatgggtggtttcaaatagtgcctgatgcgccaacattggctt

SEQ ID NO: 193055 - DNA, 30 bp, Homo sapiens
  chr20:60447553-60447583
  hypo
accccgcacctggcccgccgcatgacccca

SEQ ID NO: 193056 - DNA, 30 bp, Homo sapiens
  chr20:60447811-60447841
  hypo
ccaggtgagagagcccgccgtgccagcatc

SEQ ID NO: 193057 - DNA, 329 bp, Homo sapiens; identical to SEQ ID NO: 33526
  chr20:60448754-60449083
  hypo

SEQ ID NO: 193058 - DNA, 225 bp, Homo sapiens
  chr20:60470123-60470348
  hypo
cagtgacgcatggcccgtgcagggcaggaatgcactggcgtgcggcacagcctcctctctctctgcggctctgcctgacgggcacttggcagatagcgtgtaagaaaggccctgggcagcggaggctgctgtgtggagtggctcgattcctgatgtgcgcagtaggagagaggccggggctcagtcagggaggggaccggcggcggaggtcggttgccacctggg

SEQ ID NO: 193059 - DNA, 274 bp, Homo sapiens
  chr20:60477305-60477579
  hypo
gcagaaaaggtcaagccggggcctctgaaaccaggacccccggggcctccattccaggagaagcagcctcactctgcccttcaccagccacggagacccggggtctatgggcagtgccctaaatgccagccatgccctggggcacgcggtcaccaccccgcagaaccgctcccgtgctcgttgcaggagtgcaagggcagatccacagaggagcgtgcggggccccaccttcccagggatttgcaggcaaatgagcggccgttgacacagggac

SEQ ID NO: 193060 - DNA, 30 bp, Homo sapiens
  chr20:60482311-60482341
  hypo
ctcccgcccattccccggcccttctggaac

SEQ ID NO: 193061 - DNA, 214 bp, Homo sapiens
  chr20:60482669-60482883
  hypo
gatctgactcctgggcggctcaaaacgtgtgatgaagggaagacagagtgagtcccgaagctccctcctctagggccaggtcagcgtctccaggcctccccgggtacccagctgcaggttccgggctctggccacctggctcaggaacagagacagctgggagattccgtcccacactagacatcgggagtggtgggggcggtagctgtccact

SEQ ID NO: 193062 - DNA, 30 bp, Homo sapiens
  chr20:60483088-60483118
  hypo
gacccagagctgggccgggctgcggggttt

SEQ ID NO: 193063 - DNA, 663 bp, Homo sapiens
  chr20:60485025-60485688
  hypo
ggctgacgcacctgccgggcaggtctgcacgcctgcttcagtggggccccggcagccgtgctatgaggcgtgcactcccgtgcacccctgagcagcctgtcttctctgattcctgatctgggcgtggctgacacggtgtgttctgtttgtgaacactcgttgagctgggctgacacggtgtgctctgtttgtgaacactccttgagctgggctgacatggtgtgttctgtttgtgaacactccttgagctgggccgacacgttgtgttctgtttgtgaacactcgttgagctgggctgacacggtgtgttctgtttgtgaacactcgagctgggctgacacggtgtgttctgtttgtgaacactcgttgagctgcacatatgctacgtgcacttctctgtgcatatttacacttaacacgggtttgtgacattctttccttccattttgcagtttgcaggggaggtccccgaaaaccgcgtggagaccgtggtcgcaaacctcacggtgatggaccgagatcagccccactctccaaactggaatgccgtttaccgcatcatcagtggggatccatccgggcacttcagcgtccgcacagaccccgtaaccaacgagggcatggtcaccgtggtgaaggtgcgtactcttctcacaccctgcc

SEQ ID NO: 193064 - DNA, 30 bp, Homo sapiens; identical to SEQ ID NO: 99504
  chr20:60493872-60493902
  hypo

SEQ ID NO: 193065 - DNA, 799 bp, Homo sapiens
  chr20:60494907-60495706
  hypo
gaagcatggtgtcgcggtgattgcatggaagcttgtgattgtgtggaagcatggtatcgtgattatgtggaagcgtggtgtcacggtgattgcgtggaagcgtgttgtgattgtgtggaagcgtggtatcgcggtgattgcatggaagtgtggtgtcacagtgattgcgtggaagcgtgtcgtgattgtgtggaagcatggtatcgtgattgtgtggaagcgtggtgtcacggtgattgcgtggaagcatgttgtgattggaagcgtgtcacggtgattgcgtggaagcgtggttttgtgattgcatggaagcatggcgtcacagtgactgcgtggaagcgtggtgtcatggtgactgcgtggaagcatggtgtcacggtgattgcatggaagcgtggtgtcacagtgattgcatggaagcgtgtcatgattgtgtggaagcatggtatcgtgattgtgtggaagcgtggtgtgattgtgtggaagcgtggtgtcatagtgattgcatggaagcgtgtcgtgattggaagcgtggtgtcgcggtgattgtgtggaagtgtggtgtgattgcgtggaagcgtgtcttggtgattgcatggaaatgtgtgattgcatggaagcgcagtgtcacggtgattgtgtggaagcgtgtcatggtgattatgtggaagtgtggtgtcgtgatgattgcatggaagcaccgtgtcatggtgattgtgtggaaatgtggtgtgattgcgtggaagcgtggtgtcacagtgattgcatggaagtgtggtgtcacagtgattgcatggaa

SEQ ID NO: 193066 - DNA, 558 bp, Homo sapiens; identical to SEQ ID NO: 99506
  chr20:60495765-60496323
  hypo

SEQ ID NO: 193067 - DNA, 470 bp, Homo sapiens
  chr20:60500126-60500596
  hypo
tgggagtgcagagggcggtggcaaggtcccggggcaggcggcacagcagacgacctcaggagcctggacgggagggcgaggatgggctgggcagagacggcaggaagaaggtttgagagcacgtggggctttctgagggacatgggccagcatctcaagaagcagccaccccttcctggacctgcagtaaccctgcgaactggccgagccccccacgggtcgcacgctctcagaggcatggaggcagggcgggtgggagcagggattctggaaccgaagatcagtccagtaccaccgcttaccagtgggaaaagacgtgaccgctctgtgcctcagtttcctcctctgccaagtcgggggagtcttagtacccctgagaatcaaacgagtcggagtcaccggaacactgaggaagggcctggctcagagcagcatgggctcctgtttgctgcggccgtgatgactgcccg

SEQ ID NO: 193068 - DNA, 70 bp, Homo sapiens; identical to SEQ ID NO: 99507
  chr20:60502076-60502146
  hypo

SEQ ID NO: 193069 - DNA, 528 bp, Homo sapiens; identical to SEQ ID NO: 99508
  chr20:60502539-60503067
  hypo

SEQ ID NO: 193070 - DNA, 172 bp, Homo sapiens; identical to SEQ ID NO: 99509
  chr20:60503294-60503466
  hypo

SEQ ID NO: 193071 - DNA, 555 bp, Homo sapiens
  chr20:60507696-60508251
  hypo
cctcctgcagatacacgtatgcatgcttacacagacgcatgaagcacctacatccacgactcctgcggatacacgtatgcatgcttacacagacatgcatgaagcacctacatccacgaatgcacacgcacgtgggccgcacatgtgcacagatgtgtccttgcacatccaggcctgcatgtgcagagacatgcgcgtgtgcagtacaggtgtgcatgcacacatgggcacagtcatgcttgtgtgccacctgcatgtacatgcccacatagacacatggcaaacacagaggcacacatgcgcacacccgcagcacaccctgctcacgggcagccctcccccacagccatggtcctgctgtttgtcatgtggatgaagcggcgagagaaggagcgccacacgaagcagctgctcattgaccccgaggacgacgtccgcgacaacatcctcaagtatgacgaggaaggcggtggcgaggaggaccaggtgagactgcggcccgcccccgcctccccacgcgaggccggctctcacgtgtactagtgtctcagcagg

SEQ ID NO: 193072 - DNA, 372 bp, Homo sapiens; identical to SEQ ID NO: 99511
  chr20:60511743-60512115
  hypo

SEQ ID NO: 193073 - DNA, 30 bp, Homo sapiens; identical to SEQ ID NO: 99512
  chr20:60515748-60515778
  hypo

SEQ ID NO: 193074 - DNA, 30 bp, Homo sapiens
  chr20:60528969-60528999
  hypo
acaaggagctgcactcgtggtaacataaaa

SEQ ID NO: 193075 - DNA, 31 bp, Homo sapiens
  chr20:60541625-60541656
  hypo
cctgggagctcgttctcgtggctggctgggt

SEQ ID NO: 193076 - DNA, 31 bp, Homo sapiens
  chr20:60543270-60543301
  hypo
ctcctgctgtcgcaagcgttccactgcgggg

SEQ ID NO: 193077 - DNA, 875 bp, Homo sapiens; identical to SEQ ID NO: 99513
  chr20:60544917-60545792
  hypo

SEQ ID NO: 193078 - DNA, 30 bp, Homo sapiens
  chr20:60548464-60548494
  hypo
catgcctgcagacccggtcttctggcagtg

SEQ ID NO: 193079 - DNA, 419 bp, Homo sapiens
  chr20:60549274-60549693
  hypo
acgtaaacctgcatatcgctgtgggtccgtcacagtaggtggagtgaacgtcacaatgggagaccaactccaattgcatcagagaccgttcccaaaggctctccaaggtgctcgaaggcagggagcggtacacattggcgctgagcctctgagggcccagcaggagctgtgacctgtcaggaccaaccaataccacaaactgccctggagacgccctctctcgccacaggaggtctgcgtcaaggctggggccctctgggcacctcagccgggctcgccacgtgcgtttctgtgtacatctcccccagcactgggcctcccgccgcccctcctagctgtgcccagctcatctccacctgtgacagcagaaggtgttaagcgcagccgccagcccccagactccacgcagagagtagctc

SEQ ID NO: 193080 - DNA, 204 bp, Homo sapiens
  chr20:60551196-60551400
  hypo
taaaaagtccccaggcgtcctcctgtgtcacttaaggaatgctttgtagagcagcagtgaatggcttgtctcacgttcattttctaaacaaaatatgaggtccctgaggttgacccgcgtgattctttgtcgcgtgaactgtctgggggttccgacacccgagctgcctgggaccactgagccggggcccgacccctggtgatg

SEQ ID NO: 193081 - DNA, 578 bp, Homo sapiens; identical to SEQ ID NO: 133276
  chr20:60551923-60552501
  hypo

SEQ ID NO: 193082 - DNA, 373 bp, Homo sapiens; identical to SEQ ID NO: 33538
  chr20:60563048-60563421
  hypo

SEQ ID NO: 193083 - DNA, 151 bp, Homo sapiens; identical to SEQ ID NO: 99517
  chr20:60563781-60563932
  hypo

SEQ ID NO: 193084 - DNA, 72 bp, Homo sapiens
  chr20:60580208-60580280
  hypo
tcaggccaggccctgcggcgcagggaacctgccatcaaatgcccgggccaggccctgcggtgcagggagcct

SEQ ID NO: 193085 - DNA, 71 bp, Homo sapiens; identical to SEQ ID NO: 33540
  chr20:60581686-60581757
  hypo

SEQ ID NO: 193086 - DNA, 30 bp, Homo sapiens; identical to SEQ ID NO: 33541
  chr20:60586705-60586735
  hypo

SEQ ID NO: 193087 - DNA, 30 bp, Homo sapiens; identical to SEQ ID NO: 99521
  chr20:60587250-60587280
  hypo

SEQ ID NO: 193088 - DNA, 30 bp, Homo sapiens; identical to SEQ ID NO: 99522
  chr20:60589397-60589427
  hypo

SEQ ID NO: 193089 - DNA, 814 bp, Homo sapiens
  chr20:60615349-60616163
  hypo
aaccagctactggcacgcacacgacacaccacttgggcaccacgcagaagtatcccgccaagggaaagggccagatgtgaggctcccactacataatctcatttatacaaaattctagaagaggcaaaatcacagtgacagcagcagctcagtggctgccggggaggaagctggagcaggggctcacccccaggggcacgaggctacagaatgattccgatcctgtactcgacggtggtggtgacgtgactatcgttaaaactcacagacctacaggctgagaaaggtgcgctctgccacgcgccaactacgcctccataaacggagatttaaaaagtagtatgtgctaacactgcatgcccactagaataggcaaaacagaaaagcctggccacgccaagagccagcaagatctcacggcagcagcactgagcccgcggatgaaactaaattcgcagagccgctcaggaacacagcctggcagtttctgacaagaccaaactcacaccttccgtacgactcagcgattccactcctaacatttacccaaaagaaaaggacgtctacacgtatgttcgcacaaaggcttgaacacaaatgttcaaaaagaagctttattcgtaatagccaaaaactggaaacatgccagactcctcagctggcaaatgtatagcgtacatccaaacagaaaccattccccataaaaataacaaactgtggacacgtgttgcacacgatgcccctccaagtactctgagtaggaagccggacaccagggagcacacaactggggtttcagcgacctgagcgctcc

SEQ ID NO: 193090 - DNA, 389 bp, Homo sapiens
  chr20:60620116-60620505
  hypo
caaggaaaagaaaactcacaacgccgacatgaaaacacaggtgagtaggtaaataacctcaggtagggagagacagtctagccacactgcaggaagagaactcgcaaagccatgccgctcaaacggaatcccatcgggatgctccccgctcaggactgtcacagggacaaccgtcccgcacctcctggcccatgcaccctccccaccggccacacaaggtctggaatgttcttccctgcccttcctgggaaagccctgcctgccgtgcctgcccgctcctctctacccttgactcgcttcaggtgcttggtggagacgatggcggtgaaactttcaacagcgcgcctgtttgggtttaagcttcagagaacaggcgcagaatccctgca

SEQ ID NO: 193091 - DNA, 30 bp, Homo sapiens
  chr20:60623195-60623225
  hypo
aattccctgtggctgcgacatacctagcac

SEQ ID NO: 193092 - DNA, 30 bp, Homo sapiens
  chr20:60623623-60623653
  hypo
tctgttaagcaggatcgtctccccacgtgc

SEQ ID NO: 193093 - DNA, 65 bp, Homo sapiens
  chr20:60635092-60635157
  hypo
tctgttctgctgagcccggtctgtgctgctctgaccagacgccgcctcccggcctccctgtgctg

SEQ ID NO: 193094 - DNA, 476 bp, Homo sapiens; identical to SEQ ID NO: 99526
  chr20:60662672-60663148
  hypo

SEQ ID NO: 193095 - DNA, 18 bp, Homo sapiens
  chr20:60670105-60670123
  hypo
gtccggcctagaaacatt

SEQ ID NO: 193096 - DNA, 30 bp, Homo sapiens
  chr20:60670413-60670443
  hypo
agcaaaagtgagtaacgtgctgtacgaggc

SEQ ID NO: 193097 - DNA, 204 bp, Homo sapiens
  chr20:60687902-60688106
  hypo
gtttgtggacaggaccgcactccacctggtcagtgaccaggactctccctggttcaaggggcacagccagcctggccggcccagctgttcatgctctccctgcaataacctgggagaatgagagggtgcagagaccgtggccagccctgtgccacaacccaagctgattcgggttcttaaaatgtgtggcgagggcgaggataa

SEQ ID NO: 193098 - DNA, 415 bp, Homo sapiens
  chr20:60691752-60692167
  hypo
ataaggcacgagttccggttccacccagcacagaagggccagactctgagattccgcggtgcgtggggaaggccatttgtaaacactctctggcccaaatgcagcaaggctcccagggcaaatggggtttccatgttccagtgcttgggaaagactaacacgtattcgcgtccgtccgcgactgcctgtctaagcgagatgagccaccagaaatgtctcaggcgccatcctccccatccagctcctggtacctgctggaaaagcctggggcagccctgcactggcgcaccttcttctcacccggcccatgccctgccccttccgccgcacacacccccgcgcagccagttatgggcttcactgccagggtcgacctcggtgggcccgtgtggctgcctgccggcttctgatgcac

SEQ ID NO: 193099 - DNA, 30 bp, Homo sapiens
  chr20:60695281-60695311
  hypo
tgagagtctgggtcgcgcttcccagggcca

SEQ ID NO: 193100 - DNA, 437 bp, Homo sapiens; identical to SEQ ID NO: 33544
  chr20:60725125-60725562
  hypo

SEQ ID NO: 193101 - DNA, 31 bp, Homo sapiens; identical to SEQ ID NO: 33545
  chr20:60731379-60731410
  hypo

SEQ ID NO: 193102 - DNA, 30 bp, Homo sapiens
  chr20:60735258-60735288
  hypo
aagggagggaagccccggagaagccactcc

SEQ ID NO: 193103 - DNA, 225 bp, Homo sapiens
  chr20:60735521-60735746
  hypo
tgaaccgtgcacatgcgctgctgtgggtgagaacggaacttaaaagagaacatgcccagcacagtaaattctcccagtgttagttcaaatattttattttgtttgattttttaaaatgcatttttccaagattaaattgtcacagtgaagacgaggtcgtgctgctgcagcctctgtcctgctgacggggttccgggacagacatgtcgccgggaatgacgtatc

SEQ ID NO: 193104 - DNA, 30 bp, Homo sapiens; identical to SEQ ID NO: 33546
  chr20:60736049-60736079
  hypo

SEQ ID NO: 193105 - DNA, 30 bp, Homo sapiens
  chr20:60737942-60737972
  hypo
gcaactacgtgtctcggaccaacatcaaca

SEQ ID NO: 193106 - DNA, 30 bp, Homo sapiens; identical to SEQ ID NO: 99530
  chr20:60738648-60738678
  hypo

SEQ ID NO: 193107 - DNA, 30 bp, Homo sapiens; identical to SEQ ID NO: 99531
  chr20:60739581-60739611
  hypo

SEQ ID NO: 193108 - DNA, 114 bp, Homo sapiens; identical to SEQ ID NO: 99532
  chr20:60740451-60740565
  hypo

SEQ ID NO: 193109 - DNA, 194 bp, Homo sapiens; identical to SEQ ID NO: 99533
  chr20:60756173-60756367
  hypo

SEQ ID NO: 193110 - DNA, 31 bp, Homo sapiens; identical to SEQ ID NO: 33547
  chr20:60766097-60766128
  hypo

SEQ ID NO: 193111 - DNA, 30 bp, Homo sapiens
  chr20:60772546-60772576
  hypo
ggtcgcgtgaaagcacgaggcctgtgtggt

SEQ ID NO: 193112 - DNA, 1396 bp, Homo sapiens; identical to SEQ ID NO: 33548
  chr20:60772852-60774248
  hypo

SEQ ID NO: 193113 - DNA, 30 bp, Homo sapiens
  chr20:60775728-60775758
  hypo
ttccctgcagtggccgacatccccggcatc

SEQ ID NO: 193114 - DNA, 30 bp, Homo sapiens
  chr20:60777937-60777967
  hypo
acgctggggtggggcgcgctttgcacagca

SEQ ID NO: 193115 - DNA, 740 bp, Homo sapiens
  chr20:60781093-60781833
  hypo
cagtgccctgcccagacaccccgtgaaatgccctctagtcaaaaagccaaagacagccacacgcgcccaggctctgcacagttgggcccaccaccctctcgtgcacgcactttccacacttcacgttagccgccgtcgcccccccgccctaagctcctggagaacagagacctcgtttgtctgtatgcagtgcccgggtcggcgctggccccgggatggaggcctgaagggcagacatgctgaggcaaccggagcgtctcatcagtgaacacacgtgccggggacctgtcctggtgccgctaaagaggctgcagagccgcggggtgcggcagtgcttggcgggggcggggtgcagctctgcgtgcatggcgtccacctggggaccgcaggtgtcaagccggggagagccagtgccaggaggtcacacacgatggttccctctacagagtgttccagaaacgatgaggagaatggattggcggtcctcgggctgaggagggcgggagggtggaggtagccgtggacacaaaagggccatgccagggtcctcagaccatcaccctgtgtgttggcggtggggccacgagtctgcacgtgcgaaagaatcctgttggcttagtgtttcaggctgggaagatgaccggctctgaaggtggagggtggtgatgggagagccactgaaccgcacacttcagatagctcaagtggtgaactttatgtttatcaccacgataaaaaat

SEQ ID NO: 193116 - DNA, 30 bp, Homo sapiens
  chr20:60782202-60782232
  hypo
cgtgtgtcctgcgtgcggcgatggcgtgtg

SEQ ID NO: 193117 - DNA, 241 bp, Homo sapiens
  chr20:60791329-60791570
  hypo
gccactttcctgtcccgagacagccgaaagcgctgggtgaagctctgggacaccatcttcatgcgcttctccagcgaggccgaggacgccgacggcttggagcccctcttgagtgagcgcggcctctcagtgcccctcgaggagctgccggagctggaggtgggtgaagccacggagccgcccccaccgccacccccgagggtcgcctccccggcctcagcgcctacggccgcctcaccca

SEQ ID NO: 193118 - DNA, 30 bp, Homo sapiens
  chr20:60803768-60803798
  hypo
gtctgtcagtgtacacgtctctgtgcatcc

SEQ ID NO: 193119 - DNA, 91 bp, Homo sapiens
  chr20:60805900-60805991
  hypo
gggaacccgaggtcccgggccagaccaagggcatgagcagggggcagcgccgggccttgatggaggatgatggaggcgcagctcctagacc

SEQ ID NO: 193120 - DNA, 30 bp, Homo sapiens
  chr20:60807132-60807162
  hypo
gacctccatcggcagcgaagacctccatca

SEQ ID NO: 193121 - DNA, 30 bp, Homo sapiens
  chr20:60807563-60807593
  hypo
gtgccgcaccctcctcgcccaggatggctg

SEQ ID NO: 193122 - DNA, 213 bp, Homo sapiens; identical to SEQ ID NO: 99538
  chr20:60816040-60816253
  hypo

SEQ ID NO: 193123 - DNA, 333 bp, Homo sapiens; identical to SEQ ID NO: 33552
  chr20:60816432-60816765
  hypo

SEQ ID NO: 193124 - DNA, 30 bp, Homo sapiens
  chr20:60829137-60829167
  hypo
gccaacacgcccggccgactcaccctttta

SEQ ID NO: 193125 - DNA, 22 bp, Homo sapiens
  chr20:60830168-60830190
  hypo
tttgagatggagtctcgctctg

SEQ ID NO: 193126 - DNA, 86 bp, Homo sapiens; identical to SEQ ID NO: 33553
  chr20:60842012-60842098
  hypo

SEQ ID NO: 193127 - DNA, 459 bp, Homo sapiens
  chr20:60842461-60842920
  hypo
tctcttcaaggtggcccggagtcctttacaaaaggagcttcaggcctatcctgtgcgtttactgtttggggtctggcatcatctacttgtccagggagagaaggagaattcaggaccacagccgggctctcaggaggccaccggggtagtcttatttcgaggtctgttcctacagctaggaactgtgtttttgtttgtttcagtgatgcttcaaatttgggccaacaggctccacctaacctctgcggcctcatgtctgcgtctcttttctccctcactgacagtcccagttttctgcagccctggcgaggacagatttagaccggcacgcagttgtgactcactcactttgccccacatacctgtgggaccagctctgctgccgacagtgtctttgctgagacagcacatgtctgtgcctcctgcagttgccacttgtcattgtcttcagggtatatc

SEQ ID NO: 193128 - DNA, 39 bp, Homo sapiens
  chr20:60843219-60843258
  hypo
tgggattacaagcgtgagccaccgcgcccggccaaatga

SEQ ID NO: 193129 - DNA, 35 bp, Homo sapiens; identical to SEQ ID NO: 33555
  chr20:60845090-60845125
  hypo

SEQ ID NO: 193130 - DNA, 31 bp, Homo sapiens; identical to SEQ ID NO: 33556
  chr20:60848398-60848429
  hypo

SEQ ID NO: 193131 - DNA, 1272 bp, Homo sapiens
  chr20:60855789-60857061
  hypo
ctgccgtgtgtgtttcgtgaggtggcctttcttttgacgacttcacaggaaagccatttgtctttgttcagtcttctttgattgcttattaacttgtcttgacatttaagtagaaagctttgtagatgctacaaaggaaagaagaagtacatttcaaacgcatgctaaatacacagcctccgtcgcaggggcttcaaagcagcgtgctgctctcccgcgggtgccggttgctgtgacccagccccgcctggtcgttgcgtcttgggtcacgtcgtgtcttggcttttctggactctcactgcttgttttctggtgtcttcacagacataatgaagcctacacctggaccaaccccacctgctgcgtccacaacgtcatcatcgggaagctgtggatagagcagtatgggacagtggagattttaaaccacaggtgacagcaccccaccgttgggtgagagcgcgaggctccgggtggggatgggcgagccggggagcgtgagcatccgtgctcctggtgggttttagctcagcctcacgagctgctgccgtgtccccgccagcccaggcatagcagctgcctagacttgactctgaccggtgttggccatgaatgctcctcgttcaagacctcgtttttcgtcacggttgttactttaaggctttgagctatgctgaagagctgtgtcattgccaggtgcagcgcagtggccgtccacggccgttggccactgtctaggcttgaatgccctattcctggaagctcatgactggtgggctttgccttttcaccactttagtgaggtataatcgatgcatcataagactcgcccattctgaatggacacttaagtgatttttagtaaattgaccgaatcatggagccgtccccacagcccatttcaaacacttccatcgccccaaaggcccaccacacccatttgcagtcaccccccgcctgccccaggggcctccaccgcgcttctcctgttacagagttaccctttccggctgtttgctgtcttgcagcagaaacctgtgtttgtttttctcacagaactggacataagtgtgtgcttcactttaaaccgtgtggattatttggaaaagaacttcacaaggtggaaggacacattcaagacaaaaagtaggtccttgccaagtgttcatggggcaccactacagcctgtgtgtccacgttagaagggctcaggtgctcctgggcctgcgtgtgcctacgtgcatgagacgcgggtacaccagtgccatctgt

SEQ ID NO: 193132 - DNA, 98 bp, Homo sapiens
  chr20:60866830-60866928
  hypo
aggcagagtggcagacgaggtgagtactgtggtagccacgcaggctggggcagcggggaggccccacacacacctggggacggcggggaggccccaca

SEQ ID NO: 193133 - DNA, 210 bp, Homo sapiens; identical to SEQ ID NO: 33557
  chr20:60868205-60868415
  hypo

SEQ ID NO: 193134 - DNA, 441 bp, Homo sapiens
  chr20:60868772-60869213
  hypo
cccagaacagggctgcgttttccttttgggctgagcatcttctgacccccctcccttgtatccggcaggtggttctacccaggcaataacccctacactgggacccccgactggttgtatgcaggggattactttgagcggaatttctccgactgcccagatatctactgagggcctggaggggcctggggcccgggaccggaggctgacgaggctggacttcctcgagtggccactgtgagcctcgtcacagcagaaaccaacttttctaacgactgagttcgcggagatagcatcatccctgatcaaggatgtaattctaattaactgttgattgccaaacatttcactctgctgtgccgtctcttcataaagcttcacttgggatcatcgtcttcattaaggtttcaacagggaaattcttcacggcgcccttttatg

SEQ ID NO: 193135 - DNA, 152 bp, Homo sapiens; identical to SEQ ID NO: 99549
  chr20:60875560-60875712
  hypo

SEQ ID NO: 193136 - DNA, 452 bp, Homo sapiens; identical to SEQ ID NO: 99550
  chr20:60880674-60881126
  hypo

SEQ ID NO: 193137 - DNA, 30 bp, Homo sapiens; identical to SEQ ID NO: 33559
  chr20:60882632-60882662
  hypo

SEQ ID NO: 193138 - DNA, 30 bp, Homo sapiens; identical to SEQ ID NO: 99552
  chr20:60883812-60883842
  hypo

SEQ ID NO: 193139 - DNA, 30 bp, Homo sapiens; identical to SEQ ID NO: 99553
  chr20:60884313-60884343
  hypo

SEQ ID NO: 193140 - DNA, 716 bp, Homo sapiens; identical to SEQ ID NO: 99554
  chr20:60891779-60892495
  hypo

SEQ ID NO: 193141 - DNA, 31 bp, Homo sapiens; identical to SEQ ID NO: 33561
  chr20:60893765-60893796
  hypo

SEQ ID NO: 193142 - DNA, 518 bp, Homo sapiens; identical to SEQ ID NO: 99556
  chr20:60905728-60906246
  hypo

SEQ ID NO: 193143 - DNA, 30 bp, Homo sapiens
  chr20:60909616-60909646
  hypo
cagacgcccgtcctcggttcacagctctgg

SEQ ID NO: 193144 - DNA, 31 bp, Homo sapiens; identical to SEQ ID NO: 33563
  chr20:60912468-60912499
  hypo

SEQ ID NO: 193145 - DNA, 273 bp, Homo sapiens; identical to SEQ ID NO: 33564
  chr20:60912906-60913179
  hypo

SEQ ID NO: 193146 - DNA, 235 bp, Homo sapiens
  chr20:60913380-60913615
  hypo
ggtcacagcggtcatcggccactccagggctggaacactggcaggctgcaggaaagggtggcccacatgcttggtcagaggcaccaggcctcaggtgtccacctcgagcgcaggtagaggttgagcggggagaggggactcacgctggcagccggggccgtagaaccctggcgcgcagagctcacaatgggtgccttggaagttgggtttgcacagacagcgtcccacccttggg

SEQ ID NO: 193147 - DNA, 30 bp, Homo sapiens; identical to SEQ ID NO: 57454
  chr20:60921028-60921058
  hypo

SEQ ID NO: 193148 - DNA, 237 bp, Homo sapiens
  chr20:60921814-60922051
  hypo
ggtcgtagtaacagtcggtggcatggccgtagcagttacaggctagagagaggggagcgcagctgttggcacgccctccacaggcccgggcaccggggccctctcatgggccagggtgtgggcaggacacacgtgtgtgggaggaggcactcacactggcactcgttggcactgttggcagtcgcaggcttccacggctgctgattgaagccggggcagcagcggtcgcaggtgccc

SEQ ID NO: 193149 - DNA, 87 bp, Homo sapiens; identical to SEQ ID NO: 99561
  chr20:60925164-60925251
  hypo

SEQ ID NO: 193150 - DNA, 684 bp, Homo sapiens
  chr20:60925490-60926174
  hypo
aggggcccagggctcccgcctctgctcggcactggccgtgagaatgggagtgaacctttgtcctgtctgagctccacccgcctccccacctcccctgtaaactggagcgtggacagagcagtaaggccccacagaaggcaagggcgggtcccaaatccaagcgcatgaaagttgggctgctcggttgcaggcactagatgagccctgccagctccctgctgggggtccaggagcctcgtcacacactcagcctcagctgcaccactctgagtggcttctgtccagccccatgcctgcactgccaccctagggtgttacaccctccgggcaccacgctgagtactggtttgcgtgtttcccagctgcctcccccggaacaggtgctcctgaggccgggctggggtcccaccctgtgttcccattcccaggaaaacggcccagcgtgtgttaggcgctcaacatacagctgctggctgaaagaaccaacgaagggagggaggaaaggacggacgtgccctggggttgcttctccgcagaatgagcccggccctaccttactgaggactctgggtgaggcccaggaatgtgccggtgccagcaccagggctgctgcccatcctgtgaggggctcccgggaggtggatgctctgcagtgccctcggctgcccccgaaagcaggcacac

SEQ ID NO: 193151 - DNA, 30 bp, Homo sapiens; identical to SEQ ID NO: 99563
  chr20:60936631-60936661
  hypo

SEQ ID NO: 193152 - DNA, 563 bp, Homo sapiens; identical to SEQ ID NO: 99564
  chr20:60936961-60937524
  hypo

SEQ ID NO: 193153 - DNA, 30 bp, Homo sapiens; identical to SEQ ID NO: 99565
  chr20:60937806-60937836
  hypo

SEQ ID NO: 193154 - DNA, 244 bp, Homo sapiens; identical to SEQ ID NO: 13129
  chr20:60941670-60941914
  hypo

SEQ ID NO: 193155 - DNA, 285 bp, Homo sapiens; identical to SEQ ID NO: 99567
  chr20:60952095-60952380
  hypo

SEQ ID NO: 193156 - DNA, 700 bp, Homo sapiens
  chr20:60953030-60953730
  hypo
atggcacgcagtggccggcccgggggtgcaaccccatcccctctctggggtccctttgcagggcagccttaggatccattcactgtggccccagggcccagggcgacctgtgaccctgcggagccacctgcaggagtcccagcagatgagggcctctggctgcccctcaggggcttgttgggtcccacaagaacttccagggcctcggagctccagccgggccacagagctgggaaccttgagtggctgggaaccctgaggagctgggagagccaggctgagcaagacaagcctgggcgactcacctggggcaggaatgtggattccatcactccgcagaggctttcaagcaaaacacagcctcgtctctgggcctgtttctgccgtgcgggcacgtccagcccgacgctctcagaagcagctgggatgggctcggggaggtgggggtggagcaggagtcccagccgccttcctctggggcccatcccaggctcccggctgggcgccagcagggctccagaaatgagggggcctcacaccgttgcctctggacgtgccgtgcccgaaatcccgccattcccactgggcatgccgggccctcgaatcctccatgactccagggaagcgactccgtcccgcttggcctcagtcactgctctgtcaatgggatgataactgcccttcccgcaggctgccatgg

SEQ ID NO: 193157 - DNA, 30 bp, Homo sapiens; identical to SEQ ID NO: 57458
  chr20:60956901-60956931
  hypo

SEQ ID NO: 193158 - DNA, 15 bp, Homo sapiens
  chr20:60962687-60962702
  hypo
cggtgccaaggacca

SEQ ID NO: 193159 - DNA, 202 bp, Homo sapiens
  chr20:60963091-60963293
  hypo
gggctggccgcctgccgcttcttgagggtggaagaggggtgctctgagaagacactcaggcagcagactctgcctctcactaggaggtgcccccccgaccccgctccaccatagtcaggctgcaggctgccccgggagaggtggctccccttctgcgcctgtctccattcgctcagcgggggagagacgtgggctggtggca

SEQ ID NO: 193160 - DNA, 30 bp, Homo sapiens; identical to SEQ ID NO: 33571
  chr20:60967329-60967359
  hypo

SEQ ID NO: 193161 - DNA, 30 bp, Homo sapiens
  chr20:60969128-60969158
  hypo
ctcgtgggcactgacgtgggactgctccca

SEQ ID NO: 193162 - DNA, 30 bp, Homo sapiens; identical to SEQ ID NO: 57459
  chr20:60969435-60969465
  hypo

SEQ ID NO: 193163 - DNA, 31 bp, Homo sapiens; identical to SEQ ID NO: 99573
  chr20:60970998-60971029
  hypo

SEQ ID NO: 193164 - DNA, 366 bp, Homo sapiens
  chr20:60976547-60976913
  hypo
cccatgagatggacccctgctcgccccgggccccacagagaggtgtcggtgtgtccggcagacatggagaggatcacgcatgtgcagatgtaccaccttacgcctagctggaagcagcacacacgccggtcagcaggaggcgggacatgcgcaatcaggggacggcatgcacagcatgctgcaggtgcacacagacgccacacgggttgagaggctcgtcatgtggtgacacaggtcccctcagtgtgggggaggggctgaggaggggcaccagggagctgggggattggcctgtgtctccgcaggggagtggctccgtggggtgtgcccaggcaaatgcactgagctgcacgcaccttccatgtg

SEQ ID NO: 193165 - DNA, 329 bp, Homo sapiens
  chr20:60982951-60983280
  hypo
tcagaacctgtgagcccgtggcaccgggatggtcagggcctgcctctggagcccgggagcctgtctgcagtctggaggggaacccgctgtatctttgtggagggactcaggaccttgcacccacctctgtgtcacctgcctgctctgtccagctttctttcatgggtttacgtatctttaaagaggggacaatgatttcagcctcagggtactgtcaggatgaaactggctcagtgagggggtcgggctgtggccggaggccaggcacatgcagtggtcagtccgcgaatgcgctgcagtacctcgcacctgcccgcatgcgcccagcc

SEQ ID NO: 193166 - DNA, 483 bp, Homo sapiens
  chr20:60983919-60984402
  hypo
ccgtgctggctgcagcgccgggtcctggggatcggctgtgcagtaggggggcccctagccagttcttctttgctggcgctaagctagactttgagggacaaggaggaatgctgaggaaggaacggggtctcttcctgggtctggtgaacccccttgctaggctcccgctgccagtcttctcccctccccagggtgtcgatgggtggccaaaagccaacctggcctgcgggcagtgtgtagggaacacacggcttttgtttcgtgtgattctggagaaattaaagcaacctttaacacacctggacttccctcttgggagttcagtccctctggcctctcaggacaacaggcagacatgtcacaggctgcaggtgggaggcagtgccccctgagtcaggcccgcaccccagtctggcccaggcctcacccagcccagtcgttggcccgtgtcctgccatccctgtgatgcgtggttttaaatgc

SEQ ID NO: 193167 - DNA, 30 bp, Homo sapiens; identical to SEQ ID NO: 99576
  chr20:60987214-60987244
  hypo

SEQ ID NO: 193168 - DNA, 30 bp, Homo sapiens; identical to SEQ ID NO: 99577
  chr20:60987817-60987847
  hypo

SEQ ID NO: 193169 - DNA, 278 bp, Homo sapiens; identical to SEQ ID NO: 99578
  chr20:60988928-60989206
  hypo

SEQ ID NO: 193170 - DNA, 456 bp, Homo sapiens
  chr20:60992542-60992998
  hypo
cgtctgtcccgtccacgcagcccccccagtcatctgcacgctcctctgtgacgtctgtcccgtccacgcaacgcccccccagtcatctgcacgctcctctgtgacgtctgttccgtccacgcaccaccccccccagtcatctgcacgctcctctgtgacgtctgtcccgtccacgcaccccccccagtcatctgcacgctcctctgtgatgtctgtcctgtccacgcaacgcccccccagtcatctgcacgctcctctgtgacgtctgtcctgtccacacaccacccccccggtcatctgcacgctcctctgtgacgtctgtcctgtccacgcaacgcccccccagtcatctgcacgctcctctgtcacgtctgtcctgtccacgcaacgcccccccagtcatctgcacgctcctctgtgacgtctgtcctgtccacgcaacgcccccccagtcat

SEQ ID NO: 193171 - DNA, 350 bp, Homo sapiens
  chr20:60996143-60996493
  hypo
ggaggttgggataccggtcaagtggctgggcctctgcaagccagtgtttgtggcacacaaaccgctgcagttcagacttcttcaccgggtggcttgtgcttcacgcggtcgggtgggggagtgtgtgtgtttgccgtgtgtgtgcacgcccgagccagtgtgcatgtgtgtgccgtgtgtgtgcatgatagccagtgtgcgtgtgtgtgtgccatgtgtgtgcacgcccgagccagtgtgtgtcccatgtgtgtgcacacctgagccagtgtgcatgtgtgtgtgccatgtgtgtgcacacccaagtcagtgtgcgtgagtgtgcgtgtgtgtgccgtgtatgcgtgatt

SEQ ID NO: 193172 - DNA, 202 bp, Homo sapiens; identical to SEQ ID NO: 33574
  chr20:60997209-60997411
  hypo

SEQ ID NO: 193173 - DNA, 622 bp, Homo sapiens
  chr20:61000250-61000872
  hypo
accccgattcacctgcgcctccctcatgacctgcgcctccctcatgtgggaccccaggtgtccagcagtgctgacggcaggaccctctgtgcttggacaaggtcaagtctcattgccacaaaggccttgtgcaggaggacgcagccctccccacgctcagggcagaggtccggcttctgacggtgatgacactcatccttggacggctgctcactacggactccaatgggctcacggcatctctgtggctacacccaggggagatgccacctgcctcccacacacaggccagggaatcacaggcccagctgtggccctggcaggactggacattgtccggccgagtgccaaaacccacagtgatgcctgttcttaccctgtcctctgggaggccgggccccctgagctcctctgctgtctgagcaggaggcatccggggcatcactgggctccccgcctctccgagggcactcaaccagagaagccgcctgggcaccagtgctccaaggacgtctgccaggccggctgctctccaccccagccaccgacccccagcaggctctttggggcaggagtgcggagctggacactggtaccctccgtctctgaggcctgggctgtc

SEQ ID NO: 193174 - DNA, 30 bp, Homo sapiens
  chr20:61001141-61001171
  hypo
aagtagcagcggcagcggcagtggcagtgg

SEQ ID NO: 193175 - DNA, 30 bp, Homo sapiens
  chr20:61005173-61005203
  hypo
agcaaggcctcaacacgctgctggcaaacc

SEQ ID NO: 193176 - DNA, 134 bp, Homo sapiens
  chr20:61009826-61009960
  hypo
aaccacatgtggggccgagtcccccagacccagggaccagctccttccaccctggaatctgcgtgcagcaggcgctgatgagcgtctgtggacgagggatggattgacctgggtgaatgcgcctgtgggcgagg

SEQ ID NO: 193177 - DNA, 38 bp, Homo sapiens
  chr20:61010379-61010417
  hypo
ggtgtttcgtgtcaccgtatccacgccacgtgcagtct

SEQ ID NO: 193178 - DNA, 81 bp, Homo sapiens
  chr20:61013032-61013113
  hypo
ccttcccatagccaccgactgcccggggctcagcgggcaggcagggagatgcctcaggactcacgggtgaggggtgttggg

SEQ ID NO: 193179 - DNA, 219 bp, Homo sapiens
  chr20:61013193-61013412
  hypo
gggagctggcagctgagtgccatccttccaaagacgtggtgctccagggcgcatggcccgtgaccaccaccggggtgtggagacacctgaatggagtcctcactgccggcccggcctgcgctgcctgctctcggcctccctgtgtgtcgcgtgatgttgtgtgccagggttgggcggtggctgtgtgaggcctgtgaggacacacgcaaatgggagagg

SEQ ID NO: 193180 - DNA, 223 bp, Homo sapiens; identical to SEQ ID NO: 99583
  chr20:61022049-61022272
  hypo

SEQ ID NO: 193181 - DNA, 30 bp, Homo sapiens
  chr20:61022481-61022511
  hypo
cacacagggtagcgccggcctggacagagg

SEQ ID NO: 193182 - DNA, 31 bp, Homo sapiens; identical to SEQ ID NO: 99584
  chr20:61024982-61025013
  hypo

SEQ ID NO: 193183 - DNA, 31 bp, Homo sapiens; identical to SEQ ID NO: 33576
  chr20:61025493-61025524
  hypo

SEQ ID NO: 193184 - DNA, 30 bp, Homo sapiens
  chr20:61028431-61028461
  hypo
gggcgctgagggccacgcggacccacattg

SEQ ID NO: 193185 - DNA, 31 bp, Homo sapiens
  chr20:61270287-61270318
  hypo
gagcaggaagcagaagcgcaggaaagccaat

SEQ ID NO: 193186 - DNA, 30 bp, Homo sapiens
  chr20:61275477-61275507
  hypo
tgggttgtcagtgatcgcaggacaccagta

SEQ ID NO: 193187 - DNA, 106 bp, Homo sapiens; identical to SEQ ID NO: 99586
  chr20:61275876-61275982
  hypo

SEQ ID NO: 193188 - DNA, 202 bp, Homo sapiens; identical to SEQ ID NO: 99587
  chr20:61285584-61285786
  hypo

SEQ ID NO: 193189 - DNA, 1253 bp, Homo sapiens
  chr20:61287385-61288638
  hypo
agtaggccttgcccccgtcacagccctgacgccacaccgctgaagcggcagcttctccttccaacagttctaaaaagggcaggaattgagtccctgtgagcaagctgggcacagccccccacctttccgcagcggagctgtggctgggagacacagtgcctgggtgtgggcctggccagacgccaccctggatttgggaggctcttgagacaaggcaggcagagctttgagccacccccgtgatgggtgtgctggaatgttccctcctggatgtgctgtacccgtggagagacgtgagcttgctaaccagacattcttctcacaggacacaccagcccctcggataccacttggccactcccgctgaggccactcccactgcgtggctgaagcctcgaggtcaccaggcggaggcgcggagatgcccctgcatcagctgggggacaagccgctcaccttccccagccccaactcagccatggaaaacgggcttgaccacaccccacccagcaggagggcatccccgggcacacccctgagccccggctccctccgctccgctgcccatagccccctggacaccagcaagcagcccctctgccagctctgggccgagaagcatggcgcccgggggacccatgaggtgcggtacgtctcggccgggcagagcgtggcgtgcggctggtgggccttcgcaccgccgtgcctgcaggtcctcaacacgcccaagggcatcctgttcttcctgtgtgcggccgcattcctgcaggggatgactgtgaatggcttcatcaacacagtcatcacctccctggagcgccgctatgacctgcacagctaccagagcgggctcatcgccagctcctacgacattgccgcctgcctctgcctcaccttcgtcagctacttcgggggctcagggcacaagccgcgctggctgggctggggcgtgctgcttatgggcacggggtcgctggtgttcgcgctgccccacttcacggctggccgctatgaggtggagttggacgcgggtgtcaggacgtgccctgccaaccccggcgcggtgtgtgcggacagcacctcgggcctgtcccgctaccagctggtcttcatgctgggccagttcctgcatggcgtgggtgccacacccctctacacgctgggcgtcacctacctggatgagaacgtcaagtccagctgctcgcccgtctacattggtgagtggggctggcggggtaagtgctggcaggggt

SEQ ID NO: 193190 - DNA, 253 bp, Homo sapiens; identical to SEQ ID NO: 99589
  chr20:61289924-61290177
  hypo

SEQ ID NO: 193191 - DNA, 255 bp, Homo sapiens
  chr20:61291017-61291272
  hypo
gccgcagcatttctgcgctggagcaagcaggtgccgcctggctgcagccttgcagggtgttggcgctccctgtgtcctctgtctgtctctgcggctctgctcccggcctttgctggccttttgccctcccgccgctgcctcactgtgaagacacatccccgaaagcccagagcttgtcctcactgtgaagacgcgtccctggatgcccagagcttggatgggcttctaccactccacggccgcctcagcccatgg

SEQ ID NO: 193192 - DNA, 102 bp, Homo sapiens
  chr20:61291763-61291865
  hypo
gacggagctgaccaccgagagcccactgtgggtcggcgcctggtgggtcggcttcctgggctctggggccgctgctttcttcaccgccgttcccatccttgg

SEQ ID NO: 193193 - DNA, 307 bp, Homo sapiens
  chr20:61297759-61298066
  hypo
cggcaccttcctgggcggcttctttgtgaacaagctcaggctccggggctccgcggtcatcaagttctgcctgttctgcaccgttgtcagcctgctgggcatcctcgtcttctcactgcactgccccagtgtgcccatggcgggcgtcacagccagctacggcgggaggtgagggccagatggcacctgggtacgcgtcggggccccaagcacccgcggtccctgggcatggaggaggagtggtgcagcacttgggagaggtggttttgaaaagggctacgtcacaggacagcggcaagggcaacac

SEQ ID NO: 193194 - DNA, 314 bp, Homo sapiens
  chr20:61298974-61299288
  hypo
gcaagtttgtagacccgaaatgcaggctgcatggggacgagccccatggctgaccctgtgcctgctgggcgccagcatggctctggcctggaccctaccactcgcttgtcccccctctgcagcctcctgcccgaaggccacctgaacctaacggctccctgcaacgctgcctgcagctgccagccagaacactacagccctgtgtgcggctcggacggcctcatgtacttctcactgtgccacgcagggtgccctgcagccacggagacgaatgtggacggccagaaggtgagtggagccgctgcctaccgccc

SEQ ID NO: 193195 - DNA, 30 bp, Homo sapiens
  chr20:61299541-61299571
  hypo
ctggggtcgggtgtgcgcttgtccagagct

SEQ ID NO: 193196 - DNA, 31 bp, Homo sapiens; identical to SEQ ID NO: 33579
  chr20:61300098-61300129
  hypo

SEQ ID NO: 193197 - DNA, 31 bp, Homo sapiens
  chr20:61305618-61305649
  hypo
tgtggcactgagcatccgtgtggaggtgtcc

SEQ ID NO: 193198 - DNA, 130 bp, Homo sapiens
  chr20:61312773-61312903
  hypo
ccttgtgtacacactcgtgtgtgtgtattaagccgtgtgtacacactcgtgtgtgtgttaagctgtgtgtacacactcatgtgtgcgcgtgtttattaagccgtgtgtacacactcgtgtgtgtattaaa

SEQ ID NO: 193199 - DNA, 30 bp, Homo sapiens
  chr20:61314338-61314368
  hypo
tggaccctgaagctgcgcaggctgtgaggg

SEQ ID NO: 193200 - DNA, 289 bp, Homo sapiens; identical to SEQ ID NO: 33580
  chr20:61314588-61314877
  hypo

SEQ ID NO: 193201 - DNA, 30 bp, Homo sapiens; identical to SEQ ID NO: 99593
  chr20:61315816-61315846
  hypo

SEQ ID NO: 193202 - DNA, 472 bp, Homo sapiens
  chr20:61318672-61319144
  hypo
gtggccaccctggggcgtctacactgaaggccaagggcatgtggaggaagagccatctgagccgaggcccggggaggagccagcaggccaaggaggcggaagaaaccacgcagtggcgtccagggcagggcaggtgcgtcatccgggcgggatgcagagacacgtccttccaccaaccatctgaggagcacttggcacccacacaatgagcccggcaagggccacgccaggaggcagcgcacggggcagagcctctgagccagagagggggaggtcccttgggaggcccctgccatcccccgctctgggtgggcctctccagccagactctgcgccccaagggcagggctgggcctaagccacacctcggggtgcacgggctgtggggggccgctcctggacacggaaggacgacaccggcttccctgtacctctgctggggccgcgggtcccatgtcgtcagcgtggccac

SEQ ID NO: 193203 - DNA, 30 bp, Homo sapiens
  chr20:61319534-61319564
  hypo
gccgcagaagctgggcgtccactgagcagc

SEQ ID NO: 193204 - DNA, 103 bp, Homo sapiens; identical to SEQ ID NO: 99594
  chr20:61323377-61323480
  hypo

SEQ ID NO: 193205 - DNA, 30 bp, Homo sapiens
  chr20:61326138-61326168
  hypo
aactacaagggctatcgtcgctctatgtca

SEQ ID NO: 193206 - DNA, 30 bp, Homo sapiens
  chr20:61326385-61326415
  hypo
gcttctcaagcggggcgttattcacaccac

SEQ ID NO: 193207 - DNA, 30 bp, Homo sapiens
  chr20:61327066-61327096
  hypo
tatcctgcggctgggcgaggagagggtggc

SEQ ID NO: 193208 - DNA, 119 bp, Homo sapiens
  chr20:61327483-61327602
  hypo
agcgctggcttccagcgcctcttacatggatggtgcaggtgaggctgtagagtgcgcctgtgtagtggggctgtgcagtggggctgaggagtgcacccgtgcagtgtgcctgtggagtg

SEQ ID NO: 193209 - DNA, 319 bp, Homo sapiens
  chr20:61330790-61331109
  hypo
gttgttcaggagctccgcccagcctctggtgttgtgtgtcagcaccccgagtggaccgggacaggctcccaagtggactgagacaggctcccgagtggaccgggacaggctcccgagtggactggagacaggctcccaagtggaccgggaaaggctcccgagtggaccgggacaggctcccgagtggaccgggacaggctccctctctcttgctgctgggatgtctccccgggagcttgcgtctctcgccaccctcacctcccagccagagggaagccaggaagccagggagatgcggcctgaccggcaagggtgccct

SEQ ID NO: 193210 - DNA, 204 bp, Homo sapiens
  chr20:61333199-61333403
  hypo
ggtgcagggcagggacgtcagggtgcagggcactacagtgcaggatgccagggtgcagggagccgggatgcagggcgccagtccttgcccctgttcacagtccagcaagctggggagggacgtggagcttcgtgggcaaggtttctccctaactgtgcctcccgctgctccacatggagagccgctctccgggcccggtctcct

SEQ ID NO: 193211 - DNA, 30 bp, Homo sapiens
  chr20:61337088-61337118
  hypo
gcccatgggaccggccggctcctcaacagg

SEQ ID NO: 193212 - DNA, 148 bp, Homo sapiens
  chr20:61349791-61349939
  hypo
ccttctgtgcttgttcgcacctatgagcttcgataaatgcagccatgtatccccacttcagaagacacaccggcccccgccctccagccctgtggcccacccgccccgatgcccgcccctccacccactggtccgctctcctccccca

SEQ ID NO: 193213 - DNA, 30 bp, Homo sapiens
  chr20:61350803-61350833
  hypo
cggtacatcgtcatacgatcatccccaccc

SEQ ID NO: 193214 - DNA, 234 bp, Homo sapiens
  chr20:61364296-61364530
  hypo
caacggcgctgacgtcgcctaaagggggttcccagctggcagcctccaggtgctggaatgtttctcggtgagaagccgccacgggagtctgtggacttgtcacatcacccgcaggcgtggccctgaggccacgtatccaagcagcagtgccgtgcatattcatgtcggcattggacttgcaaattctgagtgaagtaaatgtcatcggcagtgtgtagacgttctttcggaaga

SEQ ID NO: 193215 - DNA, 30 bp, Homo sapiens
  chr20:61369494-61369524
  hypo
aggcgggcctgggcacgcagtgcacgcaga

SEQ ID NO: 193216 - DNA, 30 bp, Homo sapiens
  chr20:61369842-61369872
  hypo
gctgatgaccaccagcgaagtatcatgaaa

SEQ ID NO: 193217 - DNA, 155 bp, Homo sapiens; identical to SEQ ID NO: 99596
  chr20:61370411-61370566
  hypo

SEQ ID NO: 193218 - DNA, 427 bp, Homo sapiens
  chr20:61385883-61386310
  hypo
cagccgggatagggccggacctcctgaacttgtgttgactgagcacctcacactgagcaggcctgacaccccaatcagcacggcaggcatcccagctgagggtgcatgagtcccgctgctggctctgacagcctcgcccttcctctcctgcaggtcaacaccttcatgtccttcatattccccatggtggtcatctcggtcctgaacaccatcatcgccaacaagctgaccgtcatggtacgccaggcggccgagcagggccaagtgtgcacggtcgggggcgagcacagcacattcagcatggccatcgagcctggcagggtccaggccctgcggcacggcgtgcgcgtcctacgtacgtaacctctgggccctccaggggcgggaggcaggccagggctagcaaaggcagcgagcgctgaaccac

SEQ ID NO: 193219 - DNA, 30 bp, Homo sapiens
  chr20:61393125-61393155
  hypo
tacagtatctgcagtcgcttggatctggct

SEQ ID NO: 193220 - DNA, 349 bp, Homo sapiens
  chr20:61393665-61394014
  hypo
ctggaggatccaccccggaacagacagaatggtgtctctcaggatggtgctctgagagagggcagagtggatgccccactgccctagaccctcggtagacgtggggtctctggggcggggtctgtggctgtgactgaagtcggcttttcccgttgatgtcttgatgctcctatctgtgcacttaccgtaggtagggacacgtgtccacgcaccacagacacacccacgacacctgatctcgtatcactagcttgcggccaggtcatgatgtggccccggaagctggccctgcgtgccatgagtgcgtcggtcatggagtccggagcccctgagccggcccctggtgacg

SEQ ID NO: 193221 - DNA, 30 bp, Homo sapiens
  chr20:61397609-61397639
  hypo
caggggaccccaggacgctggtcaggctca

SEQ ID NO: 193222 - DNA, 55 bp, Homo sapiens
  chr20:61398116-61398171
  hypo
cattgaccaccatcccgactggcttccacttggtttctcccggcttttcgcacac

SEQ ID NO: 193223 - DNA, 37 bp, Homo sapiens
  chr20:61398432-61398469
  hypo
ctgaaaaaggctgggcgcggtggctcacgcctgtaat

SEQ ID NO: 193224 - DNA, 125 bp, Homo sapiens
  chr20:61401676-61401801
  hypo
ccgggatccagacaccggcactccagcctgaggactgggacccaaatgccggcactccagcctgaggaccgggacccagacccagacgctggcactccagcctggacgcccgctcaccggcatgc

SEQ ID NO: 193225 - DNA, 146 bp, Homo sapiens
  chr20:61405558-61405704
  hypo
ggtgatgatagcagccgacagatgggcgagcatagagctcagacattgccagcagcgtcagatccttatatatccagagcacggctcacacgccaccgccctgctggctctgtcagccgcatggtcctccgcgacacctggggctc

SEQ ID NO: 193226 - DNA, 84 bp, Homo sapiens
  chr20:61411096-61411180
  hypo
agttagaaagctcttcgttgtggattctttgaatgtgggtaaatctttttttttttttttcttttttttgtgatggagtcttgc

SEQ ID NO: 193227 - DNA, 30 bp, Homo sapiens
  chr20:61411593-61411623
  hypo
cccgactttggcgggcgcagtgcttcagaa

SEQ ID NO: 193228 - DNA, 166 bp, Homo sapiens
  chr20:61412186-61412352
  hypo
agagcccaggtgccaccgagggaatgcaacgtgccacaccccaagacatgacacttgtgagaacagtgtggcccagcccccactccgggcacagcctcggacaccctgcccgcctccgcccatggaggtgcggcctgcaaagcgtacctgccgccgccttcccatc

SEQ ID NO: 193229 - DNA, 288 bp, Homo sapiens
  chr20:61424743-61425031
  hypo
gcaggcagacagccccggctgggatgagccaagcgtgtgtctccatgtggacccggcccaatgtggggctcagcaccctcgggtctcctggtccgggctcctgtctcacgcttttatgccatcttttctcaataggcacaggggacccccaagggaggaggcgctccagactgaaggaggagagtacctggcagggacgggtggagaggcgcagggaccccaaggtgtccagggaacagtaaggagatgagtaacggtgagggtcccgtctcccgagcgtatctgtgc

SEQ ID NO: 193230 - DNA, 30 bp, Homo sapiens
  chr20:61430884-61430914
  hypo
gggtgcaaagaaggcgcagacaagcggaag

SEQ ID NO: 193231 - DNA, 30 bp, Homo sapiens; identical to SEQ ID NO: 33581
  chr20:61431296-61431326
  hypo

SEQ ID NO: 193232 - DNA, 30 bp, Homo sapiens; identical to SEQ ID NO: 99600
  chr20:61431861-61431891
  hypo

SEQ ID NO: 193233 - DNA, 119 bp, Homo sapiens
  chr20:61442867-61442986
  hypo
atgctgggcttctacgggatccggctggaggaccgaggcacgggcacggtgggccgagcacagaactaccagaagcgcttccagaacctgaactggtgaggcccggctgctcccgccca

SEQ ID NO: 193234 - DNA, 30 bp, Homo sapiens; identical to SEQ ID NO: 99601
  chr20:61445081-61445111
  hypo

SEQ ID NO: 193235 - DNA, 531 bp, Homo sapiens; identical to SEQ ID NO: 57466
  chr20:61447608-61448139
  hypo

SEQ ID NO: 193236 - DNA, 422 bp, Homo sapiens
  chr20:61458919-61459341
  hypo
tgcccccagagaaaacggctctcgggttgagcaagtgaacataaggaaagtccagaggcagccaagcgttccaggagtggaactgaagtgaccgtccccagactggtcagcctccacacctccctcgactgagccctggcagccggagtgcagggagccgccgtgccgtcctgcagcatctgtggatccaaacacagttttctccacgcacccacaggccccagggtggtggtcgggggtggcccctgccgctgcccaccatagctccttggtgtccccgagcagctggccggagaatgcgtgaggccgtctgggaagagactgccactgcttctgtcacttgtgtgtcctctagggcagacctggtcccaagggaacccccggagtggccgggccaagcggagagccggtgagtgcacgtg

SEQ ID NO: 193237 - DNA, 408 bp, Homo sapiens
  chr20:61459925-61460333
  hypo
cacctgtgcggtcaccgaggcagcactggttgccacacggccaccttggtcatgaaaccagataactgccagggtgtgggggcagacacagttttaggttgatggggaaggaggctgcccccagggcaggactgtagagggagggaggggggccactgcccgacgggccttactcatcccttgtccccagggcatgccgggcaaggacggccagaatggcgtgccaggactcgatggccagaaggttggcatggggctcagggtgtgacgggagggagggggctggaggggagttcggcctcccgaggcctcagcctccccttccgcaccccaatctctgtcctcacagggagaggctggtcgcaacggtgctccgggagagaagggccccaacgggctgccggtgag

SEQ ID NO: 193238 - DNA, 206 bp, Homo sapiens
  chr20:61460569-61460775
  hypo
gccatccctggatgccgtgcggtcatcacccccatgggctctgagtaggggctcctgcatccaaggccagggaggctgtcaaagccgcacctcaggtccacaaggctgggagaagttggccctgcctttgggtgcactcactctggcccctgcaccctgcctgcgtgcacgcccctgggtgctgctgccggcgtgcaatgtaactg

SEQ ID NO: 193239 - DNA, 31 bp, Homo sapiens; identical to SEQ ID NO: 33584
  chr20:61466382-61466413
  hypo

SEQ ID NO: 193240 - DNA, 39 bp, Homo sapiens; identical to SEQ ID NO: 33585
  chr20:61470100-61470139
  hypo

SEQ ID NO: 193241 - DNA, 31 bp, Homo sapiens; identical to SEQ ID NO: 99606
  chr20:61471156-61471187
  hypo

SEQ ID NO: 193242 - DNA, 44 bp, Homo sapiens
  chr20:61471673-61471717
  hypo
gcctggggctggccgcgcctggccttccccggacactcccgacc

SEQ ID NO: 193243 - DNA, 444 bp, Homo sapiens
  chr20:61471927-61472371
  hypo
ccaggacggtgctcccggcgagcctgggcctcccggagatcctgggcttccaggtgccattggggcccaggggacaccggggatctgcgacacctcagcctgccaaggagccgtgttaggaggggtcggggagaaatcaggctctcgaagctcataaaattcaacgtgaggaagcaagtgacaaggacgcccgaagcacagtggacggtcatgaaggagcgggggtgtggcaggcgggtgacgtccaggagagggagcgcccctggctgcccctcggccgccgactggacgcgcgggccttgccagcgagcaccctcatcgggctgtcgcctgacagcatacctcaaaaggccctagctaataaacctgtaagcccagcatttgagagaaggtagggtgtgtatatataaaaggttgtgtacaactccacgaggtgaaaaatat

SEQ ID NO: 193244 - DNA, 181 bp, Homo sapiens; identical to SEQ ID NO: 99608
  chr20:61473182-61473363
  hypo

SEQ ID NO: 193245 - DNA, 99 bp, Homo sapiens
  chr20:61473724-61473823
  hypo
gtaaaatatacatgacatgaacgtttcaaccgctaatgggccctagctaataaacctgtaaacccagcgtgtgagagaaggtagagtgtatatattaaa

SEQ ID NO: 193246 - DNA, 98 bp, Homo sapiens
  chr20:61480529-61480627
  hypo
ggaagtatttaagtataaagaagcatggtgtctgcagcttactatcaaatggatcccaaagatacctggagagaaactgggaccggcagggagaatgg

SEQ ID NO: 193247 - DNA, 58 bp, Homo sapiens; identical to SEQ ID NO: 99609
  chr20:61482262-61482320
  hypo

SEQ ID NO: 193248 - DNA, 588 bp, Homo sapiens
  chr20:61488409-61488997
  hypo
aacctgcctgactccacagggcgcgctcttagaagcttgcacctcagctcctgccttctccccacgcgcctttgctgatcgcacctggcatcctttctccatagtaagtcacagcctgagagtgactgcatgcggagtcccgggagtcctcctagtgagccagcgagcctgggcatagtctgggggatccttgatccatctgggaaagctaacgatgctcctacctgctttattccctctgaacgcagaaacggctaaggatcactcatctgtgataaccatgtatgactaaggtaatcatatatgagtcagcctgacaagcagtcacacgtattaccttctatctctttccattcggttatgcctctccctacgttgagaccttcctccctggggcccactctgggcctgctcccccaggtttgcctgtgaggactccgaggactgccaagcgccttgtgtggcggtggcaccttcgcccacattctgaatctctccaagggctcttcgctctacatttgtgtccaactgacgcattctactccgattcctcttcagtgcttgtttgcatagcgctgcttctttgcg

SEQ ID NO: 193249 - DNA, 639 bp, Homo sapiens; identical to SEQ ID NO: 57468
  chr20:61492376-61493015
  hypo

SEQ ID NO: 193250 - DNA, 630 bp, Homo sapiens
  chr20:61505941-61506571
  hypo
tccattgggatctgccggtgaactccgcaggtcgtctttgaaggcacatgtggctcttctgccactgcctggggagctgagacccctttgcccaaagaccctcaagtgccttccctagggagctgccctgtaaggtgccgccgtcctgcccgggactcaccaccacctctgtgttccttctagacctagatccagactggagttccagcaggccccaaaagagaaagtgtgaggtgtggcctacaaatatgtttccctacgaaaacctgcggaaaatgtgtggaaatcgatgttgagagtgcgggatctgggtgggaggaatataagcttgcgtaagtggacagggactcagatacgagattctggatttgatgcgttggagggaacggctgggagtgacccaccccccacccccattttcttcatcagtcaccgaaactttcgccccacaggtagctgaccctaaattcagtgaaatccagaactttcctggcacactggagaggacggcagaacgctgggatggatttatcgtgcaagaccagcttgatgtccttagggcttggaggtcaccccttcacgaggattgtgaggagtgaattcatcggggagccccgcaccctcacctgc

SEQ ID NO: 193251 - DNA, 30 bp, Homo sapiens
  chr20:61512657-61512687
  hypo
ggggggcagtgaggcgggcttgtctgcaga

SEQ ID NO: 193252 - DNA, 94 bp, Homo sapiens; identical to SEQ ID NO: 33592
  chr20:61518344-61518438
  hypo

SEQ ID NO: 193253 - DNA, 158 bp, Homo sapiens; identical to SEQ ID NO: 99615
  chr20:61527424-61527582
  hypo

SEQ ID NO: 193254 - DNA, 314 bp, Homo sapiens; identical to SEQ ID NO: 33593
  chr20:61527971-61528285
  hypo

SEQ ID NO: 193255 - DNA, 131 bp, Homo sapiens
  chr20:61528806-61528937
  hypo
ttacacatctcacttcgttgtccttccagactggagtccattggaggcgatgccattaataaaaatatggaaagctggcatacacctgaaccacaggaagagcagccacacctttacgtgaagagtgagaa

SEQ ID NO: 193256 - DNA, 207 bp, Homo sapiens
  chr20:61529147-61529354
  hypo
cgagcaggggacagacggcgtgccaggggacagatggccaggggacagggctcgttgaggtgcaccgcatgccggggcagggatccagctagtggagcagagtgaaacgcctggggaatagggggcccccatgagggccccaggatggcagaggccatctcagctctacaggcaagtgcctgggagctacctcgggtgatcaagtca

SEQ ID NO: 193257 - DNA, 93 bp, Homo sapiens
  chr20:61538593-61538686
  hypo
tcattgtcgctgcggcgtgtttgaggatacagtcattactgcagtacaccgagtcgggctgcgccacgtgacagcacccggggccaatacatt

SEQ ID NO: 193258 - DNA, 93 bp, Homo sapiens
  chr20:61540949-61541042
  hypo
catgggtgcagcacccgtcctgggaggaatttctatctagagcgagactgaaaccagtgaggccgactgctgaatgctcgtctcagcggacaa

SEQ ID NO: 193259 - DNA, 30 bp, Homo sapiens
  chr20:61542183-61542213
  hypo
attcaggcttcggtcggcccaagtctccag

SEQ ID NO: 193260 - DNA, 30 bp, Homo sapiens; identical to SEQ ID NO: 99617
  chr20:61542481-61542511
  hypo

SEQ ID NO: 193261 - DNA, 64 bp, Homo sapiens
  chr20:61567397-61567461
  hypo
gaatgttaaggaatgtcgccttaaggcgctagcactcaagctttctgctcgtgcatccccttgc

SEQ ID NO: 193262 - DNA, 30 bp, Homo sapiens
  chr20:61571256-61571286
  hypo
cagagtggacggtggcgtgcccctgcctgt

SEQ ID NO: 193263 - DNA, 136 bp, Homo sapiens
  chr20:61576503-61576639
  hypo
gaatctggaaggttgcggtttgctcttccagtgttcgggggcctctggctgctgaaggattcggtctaccacggagggctgtgctgttaggctgcatcccactcaaaatacaggaaaagcacgaatcatgattctg

SEQ ID NO: 193264 - DNA, 31 bp, Homo sapiens; identical to SEQ ID NO: 33595
  chr20:61577748-61577779
  hypo

SEQ ID NO: 193265 - DNA, 450 bp, Homo sapiens; identical to SEQ ID NO: 57473
  chr20:61583881-61584331
  hypo

SEQ ID NO: 193266 - DNA, 30 bp, Homo sapiens
  chr20:61587559-61587589
  hypo
ttctcccgtgggaagcgtctaggcgcagac

SEQ ID NO: 193267 - DNA, 173 bp, Homo sapiens
  chr20:61591488-61591661
  hypo
gccggtgaacacgtgcgtgtgcaggcgcatgtgtgtgtgttggtgcgaggactctagagcacagctggaggccggtggtgagagtgtgcacatgtgcatgtgcgtgttcgcggggtgggagggctagcttggaagcaggggtgtttccctcagccgtgcgggtggcacgaccc

SEQ ID NO: 193268 - DNA, 30 bp, Homo sapiens
  chr20:61594161-61594191
  hypo
cccctggtggcagccgctgagcagcctgga

SEQ ID NO: 193269 - DNA, 30 bp, Homo sapiens; identical to SEQ ID NO: 99621
  chr20:61597987-61598017
  hypo

SEQ ID NO: 193270 - DNA, 30 bp, Homo sapiens; identical to SEQ ID NO: 99622
  chr20:61599110-61599140
  hypo

SEQ ID NO: 193271 - DNA, 176 bp, Homo sapiens
  chr20:61618988-61619164
  hypo
ggacacgggtgaacacggagctcgggggacacgaccatccagcgtcatgaaagccaggcgtgcgagccaactacttgtacctgcaggacaggaacagtgaggatagagcgatgggcacagacctcaccccgaggacagaggtcattgtcaccaaagacccccgagagaggacggcg

SEQ ID NO: 193272 - DNA, 30 bp, Homo sapiens; identical to SEQ ID NO: 99624
  chr20:61625349-61625379
  hypo

SEQ ID NO: 193273 - DNA, 14 bp, Homo sapiens
  chr20:61636764-61636778
  hypo
cccggggtcttcct

SEQ ID NO: 193274 - DNA, 215 bp, Homo sapiens; identical to SEQ ID NO: 133316
  chr20:61636875-61637090
  hypo

SEQ ID NO: 193275 - DNA, 367 bp, Homo sapiens; identical to SEQ ID NO: 133317
  chr20:61637281-61637648
  hypo

SEQ ID NO: 193276 - DNA, 221 bp, Homo sapiens; identical to SEQ ID NO: 13139
  chr20:61637735-61637956
  hypo

SEQ ID NO: 193277 - DNA, 249 bp, Homo sapiens; identical to SEQ ID NO: 13140
  chr20:61638220-61638469
  hypo

SEQ ID NO: 193278 - DNA, 263 bp, Homo sapiens; identical to SEQ ID NO: 13141
  chr20:61638534-61638797
  hypo

SEQ ID NO: 193279 - DNA, 17 bp, Homo sapiens
  chr20:61639020-61639037
  hypo
cgcgtgaggcttggtgg

SEQ ID NO: 193280 - DNA, 431 bp, Homo sapiens; identical to SEQ ID NO: 99629
  chr20:61665856-61666287
  hypo

SEQ ID NO: 193281 - DNA, 30 bp, Homo sapiens; identical to SEQ ID NO: 99630
  chr20:61666539-61666569
  hypo

SEQ ID NO: 193282 - DNA, 906 bp, Homo sapiens
  chr20:61674869-61675775
  hypo
gcctgagcagctctgcgatgcgcatcatggtcggggctgttttggggccgtttccaacaccagcagcgtcgtggctccacagcagcaaggcttcctgaaggaagaagggggcttcgcagtatagttcgagtcgggctctgtttctttccatcccaaacacatagagacgaccaaggccctgatcccaaaagaagaacccaggctgccggcgatcctggggacaacgatgttaactcagggacaggcgcagtctctggaccaggccaggtcgtggtgcacacactcgatctctgcagcgtttcccacatgggcactgcggaccgggaatgtcaggggaacgcgggcaccgtggaccgggaatgccaggggatcgtgggcaccgccgaccgggaatgtcaggggaacacgggcactgccgaccgggaatgtcaggggaacgggggcactgcagaccgggaatgtcaggggaacgtgggcactgcggaccgggaatgtcaggggaacgtgggcacggctgaccgggaatgtcaggggaacgcgggcacggccgaccgggaatgtcaggggaacgtgggcactgtggaccgggaatgtcaggggaacgcgggcacggctgaccgggaatgccaggggaacgcgggcactgcggaccgggaatgccaggggaacacgggcactgccgaccgggaatgtcaggggaacgtgggcacggccgaccgggaatgccaggggaacacgggcactgtggaccgggaatgtcaggggatcatgggcactgtggactgggaatgccaggggaacacgggcacggcggaccgggaatgtcaggggaacgcaggcacggctgaccgggaatgtcaggggatcgcgggcactgccgaccgggaatgtcgggaacgcaggcac

SEQ ID NO: 193283 - DNA, 126 bp, Homo sapiens
  chr20:61681327-61681453
  hypo
cccctcctggcctggcggcccttctggagcctgggagcagaggtgaggctggcatgggcacgaaatgtggaaatgctccacgcccccagggcttgcaggggaagcgaccgacgtaggtgtgtggcc

SEQ ID NO: 193284 - DNA, 512 bp, Homo sapiens; identical to SEQ ID NO: 99632
  chr20:61692614-61693126
  hypo

SEQ ID NO: 193285 - DNA, 271 bp, Homo sapiens; identical to SEQ ID NO: 33602
  chr20:61693185-61693456
  hypo

SEQ ID NO: 193286 - DNA, 265 bp, Homo sapiens
  chr20:61695622-61695887
  hypo
gtgtggacctcggcacggcccccactgacctgcatgggccgaggtcctgcaagagaacgggctccatttgcgtctgagggccaggatgcctgcactggggatcacgctgtgcttcggatggagcctccaatctcggggatgccattttaccctggaggccatcgggcttcatgccccacgggcattgtatcggcttccgtgtggccccgagagcagggcaatccgagggcaaggccaagggagtggtgagcgtggcctgcagggc

SEQ ID NO: 193287 - DNA, 14 bp, Homo sapiens
  chr20:61703451-61703465
  hypo
ctccgctccgggct

SEQ ID NO: 193288 - DNA, 30 bp, Homo sapiens
  chr20:61714581-61714611
  hypo
cctcctccttccggccggactctcacgtgg

SEQ ID NO: 193289 - DNA, 30 bp, Homo sapiens
  chr20:61714904-61714934
  hypo
cgaggctttatgaaccggatcctcctcttt

SEQ ID NO: 193290 - DNA, 172 bp, Homo sapiens
  chr20:61715255-61715427
  hypo
cccggaccagggccccggggcttcctgacagcaggaacaacaggaatcattcaaaccctggagcccagagggcaggacgggagcggccttttgtcccccgcgggcaggccagggaggtggacaggccgggagcctgaagcctgagcagctggaggctcgctcattctcccgt

SEQ ID NO: 193291 - DNA, 30 bp, Homo sapiens
  chr20:61715699-61715729
  hypo
tcgcaggaaaggtggcgtgtgacgggctgg

SEQ ID NO: 193292 - DNA, 148 bp, Homo sapiens
  chr20:61725270-61725418
  hypo
aaataaaaaaatgtaaacatcgcaagctgcacccaggtgtgaatctggagggcgcctccttggaaaacttggctggtgaccgcaccctcagttcaagctcaccggccgcccttccctgtgcacacacgtgagctctccagtatgtttg

SEQ ID NO: 193293 - DNA, 921 bp, Homo sapiens; identical to SEQ ID NO: 133326
  chr20:61733166-61734087
  hypo

SEQ ID NO: 193294 - DNA, 507 bp, Homo sapiens; identical to SEQ ID NO: 133327
  chr20:61734101-61734608
  hypo

SEQ ID NO: 193295 - DNA, 262 bp, Homo sapiens
  chr20:61748970-61749232
  hypo
tggacaacctcaccacgaagacaggagcgagggggtgaacacagtgtggaccaaatccacagtctgtctggacgaccagccaccacgcagacaggagcgagggggttaacgcagtgtggaccgaatccacagtctgtctggatgaccagccaccacgcagacaggagcgagggggtgaacgcggtgtggaccgaatccacagtctgtctggacgaccagccaccacgcagacaggagcaagggggttaacgcggtgtggacc

SEQ ID NO: 193296 - DNA, 384 bp, Homo sapiens; identical to SEQ ID NO: 99638
  chr20:61749622-61750006
  hypo

SEQ ID NO: 193297 - DNA, 30 bp, Homo sapiens; identical to SEQ ID NO: 99639
  chr20:61750361-61750391
  hypo

SEQ ID NO: 193298 - DNA, 97 bp, Homo sapiens
  chr20:61756481-61756578
  hypo
accctggagccatctcgccgggcctctgagagcgaagtgtttggggagacagcaggaggcacgtcccaccccggagctgtctcgcctccttcaggac

SEQ ID NO: 193299 - DNA, 250 bp, Homo sapiens; identical to SEQ ID NO: 133328
  chr20:61759827-61760077
  hypo

SEQ ID NO: 193300 - DNA, 30 bp, Homo sapiens; identical to SEQ ID NO: 133329
  chr20:61760516-61760546
  hypo

SEQ ID NO: 193301 - DNA, 263 bp, Homo sapiens
  chr20:61765375-61765638
  hypo
caggtaacaaagctgtcggcatccccagagcccagcgggcaaagatagccaagaatctaccaccaactggcagccaagattgcctgtgggtcatgcagcaggttcacgtccctgttttaacttttaagaaaccaccttagtaaaggttgtactgataaaccgagcaaagactgggcccgtgcccctgccccagcggactacagcctgaaggaggggccctggaaacccaggagctcctgtgccagctccgggcacttgaccat

SEQ ID NO: 193302 - DNA, 30 bp, Homo sapiens
  chr20:61770299-61770329
  hypo
gaggtcatgaagaaacgagatcactcatac

SEQ ID NO: 193303 - DNA, 144 bp, Homo sapiens; identical to SEQ ID NO: 33606
  chr20:61771323-61771467
  hypo

SEQ ID NO: 193304 - DNA, 30 bp, Homo sapiens
  chr20:61772176-61772206
  hypo
ctgatccctctgagtcgcccctgagttccc

SEQ ID NO: 193305 - DNA, 236 bp, Homo sapiens
  chr20:61772544-61772780
  hypo
ccacacagggggtgccgaggagcttgcacacccaggaggctccctggaagaggaaggtttcaagcagctgccctcaggcaccccacgcgtgttgacagccaagcgtgacttcttgtcaagggcatcgttaaaggagaacatgaggcctgctcgggggctgagaggagagaggtgccagggcaggcgccccccgcacataccctgccactgccatgggatcccggcactgcagcctc

SEQ ID NO: 193306 - DNA, 30 bp, Homo sapiens; identical to SEQ ID NO: 99643
  chr20:61773095-61773125
  hypo

SEQ ID NO: 193307 - DNA, 30 bp, Homo sapiens
  chr20:61781926-61781956
  hypo
cgcgggtcagcagaacgccccagggaaacc

SEQ ID NO: 193308 - DNA, 758 bp, Homo sapiens; identical to SEQ ID NO: 133330
  chr20:61806195-61806953
  hypo

SEQ ID NO: 193309 - DNA, 339 bp, Homo sapiens; identical to SEQ ID NO: 13145
  chr20:61808666-61809005
  hypo

SEQ ID NO: 193310 - DNA, 413 bp, Homo sapiens; identical to SEQ ID NO: 13146
  chr20:61809218-61809631
  hypo

SEQ ID NO: 193311 - DNA, 294 bp, Homo sapiens; identical to SEQ ID NO: 13147
  chr20:61809840-61810134
  hypo

SEQ ID NO: 193312 - DNA, 397 bp, Homo sapiens; identical to SEQ ID NO: 13148
  chr20:61810159-61810556
  hypo

SEQ ID NO: 193313 - DNA, 285 bp, Homo sapiens; identical to SEQ ID NO: 133337
  chr20:61810632-61810917
  hypo

SEQ ID NO: 193314 - DNA, 526 bp, Homo sapiens
  chr20:61817150-61817676
  hypo
atatgaccatgcatgtctatgcgtccccatgttagggcatatgatcacacgtgtctatgcctgctcatgttagggcatatgatcacgtgtgtcggtgtgtgcctatggtaggcacatgatcaagcgtgtcggcatgtgcccatggtagggcatatgatcatgtgtctgtgtatccccatggaaggacacatgctcatacatgtcggtgcatccccatgttagggcacatgatcacgtgtgtcggtgcgtgcccacggtagggcatatgatcacgcatatctgtacgtgcccatgttagggcatatgatcacacgtgtctatgcctgctcatgttagggcatataatcacatgtgtcggtgtgtgcccatggaaggacacatgatcatacatgtcggtgcatccccatgttagggcacatgatcacgtgtgtcagtgcacgcccatgttagggcatatgatcacacgtgtctgtgtgcccatgacaggcatgtgtgttgtatgcacgtgtttgttgtatgttctctg

SEQ ID NO: 193315 - DNA, 155 bp, Homo sapiens
  chr20:61819883-61820038
  hypo
cccacctccaactccacggactctactgcccagggcttccccagccacaaaggagagcttgtgcctgggacagcgaccacccccaggacagaaacaccccctcccgggactcctctaggacccactgtcccatgtgggaccgttccacaggtgct

SEQ ID NO: 193316 - DNA, 30 bp, Homo sapiens
  chr20:61822492-61822522
  hypo
acggccacagagctcggaggagtgcccaag

SEQ ID NO: 193317 - DNA, 30 bp, Homo sapiens; identical to SEQ ID NO: 99652
  chr20:61822876-61822906
  hypo

SEQ ID NO: 193318 - DNA, 86 bp, Homo sapiens; identical to SEQ ID NO: 99653
  chr20:61823113-61823199
  hypo

SEQ ID NO: 193319 - DNA, 30 bp, Homo sapiens; identical to SEQ ID NO: 99654
  chr20:61825692-61825722
  hypo

SEQ ID NO: 193320 - DNA, 30 bp, Homo sapiens
  chr20:61827000-61827030
  hypo
cgtgcagatccaggcgctggagcgtcaggc

SEQ ID NO: 193321 - DNA, 132 bp, Homo sapiens
  chr20:61827955-61828087
  hypo
cactcaacccccgcacgggacgacacactggagctgaccaagcacacgtgttttaaactgttttcaaagtcaaacgttagaacatgtaagaaactggttcgccctcattgtttgtttcgactctgccgttcc

SEQ ID NO: 193322 - DNA, 31 bp, Homo sapiens; identical to SEQ ID NO: 99655
  chr20:61835627-61835658
  hypo

SEQ ID NO: 193323 - DNA, 268 bp, Homo sapiens; identical to SEQ ID NO: 33612
  chr20:61838280-61838548
  hypo

SEQ ID NO: 193324 - DNA, 24 bp, Homo sapiens
  chr20:61844495-61844519
  hypo
aaaccaggctgggcgcggtgcctc

SEQ ID NO: 193325 - DNA, 30 bp, Homo sapiens
  chr20:61867518-61867548
  hypo
gtcccacgcaggagcgctgtggaccccgct

SEQ ID NO: 193326 - DNA, 384 bp, Homo sapiens
  chr20:61870766-61871150
  hypo
ccagggatgtggaggcgcagctgcggcggctgcaggaggagaggacgtgcaaggtgtgcctggaccgcgccgtgtccatcgtctttgtgccgtgcggccacctggtctgtgctgagtgtgcccccggcctgcagctgtgccccatctgcagagcccccgtccgcagccgcgtgcgcaccttcctgtcctaggccaggtgagcgccccagcaccacgcgcagccagccctcctgcggagggggccctgagccggctgtgcccggccctcctgaacccatgcaggcccttcccgggtggcagcgtcagcttgtttttacccggctcccaggtcccgctgatagcgcccatcaatcttactacctcccttgacgcttaggttggggc

SEQ ID NO: 193327 - DNA, 30 bp, Homo sapiens; identical to SEQ ID NO: 33614
  chr20:61874234-61874264
  hypo

SEQ ID NO: 193328 - DNA, 166 bp, Homo sapiens
  chr20:61880357-61880523
  hypo
tgctcctgagtctggcggcccccagatgcacagcatggagaaaggggtcccccaagcccaccctgggacacgtctcagagctttcccacgtgggtgccccgggaatgaggcggtgggacagccagctcaagggagccccagcgcaggtcggcgtacggacacagca

SEQ ID NO: 193329 - DNA, 479 bp, Homo sapiens; identical to SEQ ID NO: 133342
  chr20:61884623-61885102
  hypo

SEQ ID NO: 193330 - DNA, 355 bp, Homo sapiens; identical to SEQ ID NO: 57497
  chr20:61885195-61885550
  hypo

SEQ ID NO: 193331 - DNA, 426 bp, Homo sapiens; identical to SEQ ID NO: 13154
  chr20:61885777-61886203
  hypo

SEQ ID NO: 193332 - DNA, 107 bp, Homo sapiens; identical to SEQ ID NO: 133345
  chr20:61886256-61886363
  hypo

SEQ ID NO: 193333 - DNA, 56 bp, Homo sapiens; identical to SEQ ID NO: 33618
  chr20:61895762-61895818
  hypo

SEQ ID NO: 193334 - DNA, 30 bp, Homo sapiens; identical to SEQ ID NO: 99665
  chr20:61908468-61908498
  hypo

SEQ ID NO: 193335 - DNA, 38 bp, Homo sapiens; identical to SEQ ID NO: 99666
  chr20:61909561-61909599
  hypo

SEQ ID NO: 193336 - DNA, 59 bp, Homo sapiens; identical to SEQ ID NO: 33620
  chr20:61913594-61913653
  hypo

SEQ ID NO: 193337 - DNA, 30 bp, Homo sapiens; identical to SEQ ID NO: 33621
  chr20:61919435-61919465
  hypo

SEQ ID NO: 193338 - DNA, 30 bp, Homo sapiens
  chr20:61930258-61930288
  hypo
ccgtcccgggtgccccggtgcccttgccaa

SEQ ID NO: 193339 - DNA, 30 bp, Homo sapiens
  chr20:61930561-61930591
  hypo
tgtgtttctggtgtccgtgcgcctgttctg

SEQ ID NO: 193340 - DNA, 252 bp, Homo sapiens
  chr20:61942751-61943003
  hypo
tgcctccgccccgggcgctgaccctggccgcagtgacgcccagaaccgtccacctcacctggcagccctcggccggggccacccactacctggtgcgatgttctcctgcttcccccaagggtgaagaggaggagcgagaggtgagctgggccggggggtggcgggggaggcagaggagtggggcagagcgagtgggggctggcctgggacgtcatgtctctgcaggtgcaggtcgggcggcccgaggtgctg

SEQ ID NO: 193341 - DNA, 196 bp, Homo sapiens
  chr20:61947781-61947977
  hypo
acccctccctcccaccgcactgcagcccctgggtccctcttgagtccccgctcctgccccttcctccctcccctgccatctctgagggtccctcggtgccccttcccccaccatcttccccagggtttgacctgatggtggccttcagcctggtggaaaaggcttatgcgtccatccggggcgtggccatggagcc

SEQ ID NO: 193342 - DNA, 74 bp, Homo sapiens; identical to SEQ ID NO: 99669
  chr20:61951424-61951498
  hypo

SEQ ID NO: 193343 - DNA, 97 bp, Homo sapiens; identical to SEQ ID NO: 33622
  chr20:61967698-61967795
  hypo

SEQ ID NO: 193344 - DNA, 96 bp, Homo sapiens; identical to SEQ ID NO: 33623
  chr20:61967914-61968010
  hypo

SEQ ID NO: 193345 - DNA, 78 bp, Homo sapiens; identical to SEQ ID NO: 99672
  chr20:61973524-61973602
  hypo

SEQ ID NO: 193346 - DNA, 802 bp, Homo sapiens
  chr20:61973894-61974696
  hypo
agcagctcattgagccgaccacgcacccttccttcccacggcagagcgggagctcctgggtcagcctccctgccaaagtctgttcacagcagccccgagctggcgacgggtaaataagatggtggagccacgcggcggagcccgcagcacagtggccgcgcagcgagcaatgacccgggatcgggagccgacagaagggcacgcctggcgcggccacgcacagaacccagggccaggcaacgcggggcagaggtgttgggtgacctcgggcgggtcgtggccggccgggctgggcaggggattcctgggtgccggctctatgcgaatattcttcagtctgtgaaagaaaatgccttgtcatgccgctgaggattcatacgcacgctgtgtaccttaccccgcgaggcaggcaaatgccaagaaatgccagctcggattagcgcagcgggagcgcctgtctgcagacagggagtgtaaacggcacagtcacgtggaagacacgttggcattatctcctaaaacccagtgcaaacccctgacaatcccactaccaggtgttccgtcctaagcagcgagcttccaaccgtgggtcaagaaatcagttttgtgggttgcatccagcctttcctacagactgaaatagaagacacttgaatagaaaatgcaaagcacggcacacgtggtgacggtgcgttttattcattgaagtctgtgcacacactgggagcacattccagggcttggcagacattgcctgcagaagccgggcggccgcacctgggctcggcgggccacacggtcg

SEQ ID NO: 193347 - DNA, 245 bp, Homo sapiens
  chr20:61979330-61979575
  hypo
ctgggggcggggacgcggccgccctctcgccctttcctatgtgcctttagttccctgggttctgtgtgccgcgttccatccaccctgaagatgaaacgcagccgcagaccaaagccttccctttgtccccgaggtggctgctgtgaagtcagctctgctccccacaagcccagaaccaggtcaggcagcggcagcaatcggcccgagaaggctgctggaggggcccagggcgcgcgaccgccgag

SEQ ID NO: 193348 - DNA, 30 bp, Homo sapiens
  chr20:61979986-61980016
  hypo
gccaggaggtgccggcgacagcaggtggat

SEQ ID NO: 193349 - DNA, 1832 bp, Homo sapiens
  chr20:61980672-61982504
  hypo
ttcccagagcgcccccgttctgtgctggaaggacgctgcctgtggcccctcaccgtgccgtccgccgaggcccactgtgtcccaaagccagagacggcaccgggatccaccctgtgccagccactcggggccccctgccccgctcagcctgggacctgcggccacatagcaggcttgggaagaggctgctgcagcaggggccacgccctgcaccccaaagcgaagcagcctgaggcctgggcccggctcctggattacacaccaggaagaaagggcgtccgccggttccgtctgggtcagaggcgcccaacacagccatgggcgggacttaccgagaagtctgtgtcttcggccttcaggtggtctgcaatgtactggacgccctccaccgcccgggtcagggccggcgacaggggcaggtgcgggggcggcgctttggtgctgcgggtcttgaccgtggcgctcggggacaccgaagagggctccttcttgcatgtgcatttgcacggagagggctggtctgggggtgggagctcagccgagtgggtgttgcgagaggccagggcgccggcagcctggccatctgcctcgggggcggcatcgtctcggggaacacagtactggatgctccgagaccggcaccggacgccgccttccaccgcttcgccagggctggacatgtgctggacgctgagggacctggctttggccagccctggtgcctgggtgccgtggggcgggcggcagggtccaggcgaggggtgggggctggctttctcagcttccaggggctgctgaggagggagctggtcggagggtgacttgcaggaaggcccaggctcagccggcacatccagggggacacagaaggacggtgagggcgggtgcaggctctgggtgccgctcgtggcagggggctccccttctggctcgggccagaagcgcggggcactggccatcttatgcatggactcgatgagccgccggcaattgtccttgaccacggacggccgcttcatgaggagcaggcgtggcacgatgtccaggaagaccctgcgtacccaggtgggcatggtgtgcgtgcgtggcgagcggtggtgcacgttgagcacgaagaccgtgatgacgatggacagggtgacgaagatcatggtgaacagcaggtactcgccgatgagtgggatgaccagtgaggtggacgggatgatctcggtgatgagcagcaggaagacggtgagcgacagcagcacggagatgcacagcgtgatcttctcgccacactcggagggcaggtagaagaccagcacggtgaggcaggagatgagcaggcaggggatgatgaggttgatggtgtagaagagcggcagccgccggatgacgaaggcataggtgatgtccgggtagatctcggcacagcactcgtacttcctggtgttgtaggtgcccacggcatccacgatgacccactcgccactctcccagaagtccagctggtccacgcggctgtgcatgttcaccaggtcgatcttggccttgtcgtaggtccaggagccgaatttcatggtgcagttctgctggtcgaaggggaagaaggtgacgtcgatgctgcaggagctcttgtaaatggccgggggagtccactgcacccgcccgtcatggaacaggtgggccttggtcaggtgggtgaccgcgaagtccccgtcagcactgggcaggaagagagcgaagggtgtgagacccccacatccatgcccacgtccacacccacgcccactgccacacccatgcccacgtccacacccacacccacatccacgcccacatccacgtcc

SEQ ID NO: 193350 - DNA, 271 bp, Homo sapiens; identical to SEQ ID NO: 33626
  chr20:61982563-61982834
  hypo

SEQ ID NO: 193351 - DNA, 113 bp, Homo sapiens
  chr20:61986538-61986651
  hypo
gcgctggctgccgggcgcagggccctcggcacagatctgcaggaaggacaagttagaggacagcagcctccggaggccaccatctgccacggccaatccgtggcaacgctgcc

SEQ ID NO: 193352 - DNA, 30 bp, Homo sapiens; identical to SEQ ID NO: 99676
  chr20:61990530-61990560
  hypo

SEQ ID NO: 193353 - DNA, 381 bp, Homo sapiens; identical to SEQ ID NO: 99677
  chr20:61990837-61991218
  hypo

SEQ ID NO: 193354 - DNA, 20 bp, Homo sapiens
  chr20:61991277-61991297
  hypo
tgtgccgggcgtggcgtgcg

SEQ ID NO: 193355 - DNA, 144 bp, Homo sapiens
  chr20:62005348-62005492
  hypo
cacctacatgagccccgactttctcatccgtagagtgggacgaacaacgcccagtgctcagtgtgatattagaagagcccaagacagtggagggctcagcacagatgccgccatccgtccgcagaatcgcgctgagagcagctc

SEQ ID NO: 193356 - DNA, 36 bp, Homo sapiens; identical to SEQ ID NO: 33628
  chr20:62018864-62018900
  hypo

SEQ ID NO: 193357 - DNA, 85 bp, Homo sapiens; identical to SEQ ID NO: 99680
  chr20:62019256-62019341
  hypo

SEQ ID NO: 193358 - DNA, 85 bp, Homo sapiens; identical to SEQ ID NO: 99681
  chr20:62019400-62019485
  hypo

SEQ ID NO: 193359 - DNA, 94 bp, Homo sapiens
  chr20:62028717-62028811
  hypo
gtctcggccagaccccgcgttcaggtgttgggggcctgtgccccgacgtggggttgctgggtcgtctggtaattttatgcggaatgtttggagg

SEQ ID NO: 193360 - DNA, 556 bp, Homo sapiens
  chr20:62031204-62031760
  hypo
ccacaggtgccccagcggcaggcccaggccccagcatctttctgggtggctgcaggcctcagaggggagggagagctcggcgccccaagagagagcccagggaccacagcagccccacagcggcccctcctctggccagagccctaggacccagccgcccctgctcctcactcactgtggcccccagccccactgtttcacaacaccccagctcgttcgtgccctgaggagagggaccatccgtccccacacccggtccacagcaccgcacccgactcagccccagcatcgaccagaagtccccggccctcagaccggccgcccagagacagtgggagtgaggaggccacacaccgtccaggttgaatcactgcgttttactgagtgcacaggtccacctggcgtccgaactcgtccccgtggcagcagggatccccagaaccttccacggccatcgcggccgcaggaccccacacccgaagtcccccgcaaacccgcactggcgcattcttacggctctggcatcaacctgtccgtgtgagtaagttaatatctc

SEQ ID NO: 193361 - DNA, 352 bp, Homo sapiens
  chr20:62032041-62032393
  hypo
caatggcgtggggcgcgggcatggcgggcacacgtgggccgtgtggatcccgggcagagggatggcgtccagcgggaccaccagctctgggcgcctcagtgcgagacccctccgtgagacccctcctgccctgcgcgtgtctctggagcccgtcccttgggcccctcgcccgccccacctgttcgcagggtccagggcgtccgtacctggcacagccagggggcatggggcgacctcagggagttcctgtccacatgcattaaggcaacgactttgtaaaacccaggcggagttggcgtgtggcgatggcgatgtgcacgtgcctgcctggtagccccggggaccggcccct

SEQ ID NO: 193362 - DNA, 30 bp, Homo sapiens
  chr20:62034586-62034616
  hypo
tcggataccccacgacggcgcttgacattc

SEQ ID NO: 193363 - DNA, 30 bp, Homo sapiens
  chr20:62035190-62035220
  hypo
actggtccttggccacgctcattcacgcag

SEQ ID NO: 193364 - DNA, 698 bp, Homo sapiens
  chr20:62037977-62038675
  hypo
ccactggcccagcgccgcctcacttcctgggcccggcccagcccacgtcaccaaagggaccctcgccggtggccgagcgtggcgggggcccgcacggggtacagaggtcggagtcggtgtctgactctccctccgcaatgtagggcctgactttggcacaaggcgccacggccgcgtagcagctgttgagagcatccaggttctccttggactgggagatgctgaagccgctgaaggaacgctccagctcctcgtggtccacggacgggatggagatggacgtgtcgctgtcccgcaggttcccctcggggggcctgcagcccggggtgtcctcctgccgcaggaactccatgctggcgcggttgcccccgccgtaggcggacagcgaccgctcgtgggcaggcggcggcgggatgcgcaccagggagccgtggtcccccacgggggaggtgccgtggccctggcgcgggtggctctgtggctgccaggaggtggagggcggacactggacagggggcgcggccgggggcgccgagaagttcttctggcccgtggagctgctggagcgcacgatcttgacaatgcagccgtgcctgtcgacatgctcccggctgtcttccgggctgtggtacggcggcgccggctccggctctttggccccaaagtaggcctcggtctctgtcggggggatgcccatc

SEQ ID NO: 193365 - DNA, 30 bp, Homo sapiens
  chr20:62039838-62039868
  hypo
gtgcggtccttgtccgtgatcgctgggccc

SEQ ID NO: 193366 - DNA, 44 bp, Homo sapiens
  chr20:62045904-62045948
  hypo
agccgcagacacgcacggcccaagagcagcgggtgctggggctg

SEQ ID NO: 193367 - DNA, 402 bp, Homo sapiens
  chr20:62046180-62046582
  hypo
gggtggccacagtagcgtggccaccacatccatccccggagaggatggaccaggagaggatgcggccacacccaccttctgagttctgccgtgacgcggcacccttgatgcggaaagcctggcgtgcccggctgcggtccccgaagctccagctcttgggcaccttgctggggctgtcctcgaggctctggtcggcgctgggtgaccgcctcacagtctgggcctgcggggaccccttccccttggcagccacgcctcgggggctggagaagacacgatctttcaaactgaccttctggctgctcccacgggaaccgacagacagacagaaaaacagggagagaagtcactctgcaaagaacacaggccgtgtctgctcatggccgacgccgcccatgcgcc

SEQ ID NO: 193368 - DNA, 124 bp, Homo sapiens
  chr20:62048273-62048397
  hypo
ctgtccccactcaggcgtctctgagagaaagaaagaagcccctgggtgttgtgcccgctcggggaagcagagacggagtggccgagatcccccgagtcccgaggcgtcgcgtgcttggggacgt

SEQ ID NO: 193369 - DNA, 943 bp, Homo sapiens
  chr20:62050044-62050987
  hypo
ggcagcccacacgcccgtctccctctctggagctgccaacagtctccccgcaagcaccaacgcccccagaagcacacaagcagcaaagtcacagggagagggtggcatggagtcgcgggccccccatggagcagggtccgaagcatgcacggatgcagataggcagcatgcagccccaccagccctccaaggccagcaccaccggcggcatgcacatgccaaggagagccccacaggagcacgacacagccacctccaccttgctgggctgtgctggccaggagggaggggcccccagcgcaggcctgcacacacccaacagcagacaggggacgcggggacaggggaggtgcgggtcacggtgcaggccaggagcccacggtgcaaagggggcggctcctcccccgtcctatttccacctgccctaaaccaggcctgttgttgggagagggagccgcgggcctctggctttctggggcttctgatgcatcaggaccctgaggagcccggcacacacagacggagctgcctcccgcggtcgaggcagccaggaaggctcagtcatcctcaggtacgcagcagaggtgctagagtgacagccccaggggaaacgctccctgaagagcagtcggggaccccaggaggcacggacgccttgctgggttcagagcccctggctggcccctctggctgtgcgcaggacatcgcctggcgtggggagcaagaagaagcaccttcccccagctccgccctgcacgcagctgtcggctagaatagagggagctgagcccgcaccgccagggcggtgggtcagaattggggttggggcgccagcctccccctggctcctccagaacctctagtaagcagggaggggcagaggagccgtgcagcagccgtcagtccgtgcggcgtgttccgcggtacctagagcgtccggggc

SEQ ID NO: 193370 - DNA, 159 bp, Homo sapiens
  chr20:62051920-62052079
  hypo
ggaagaaagcacccagcctcccgtcttcctgcgcacacgtgtgtttagacaccgatgtccctgcacgcacccgcaggcagctctccgagcggcgtcacagacacggctagctccagtcacggcagcactcagccgcccgggtaggctgagggctctgga

SEQ ID NO: 193371 - DNA, 30 bp, Homo sapiens; identical to SEQ ID NO: 99687
  chr20:62052603-62052633
  hypo

SEQ ID NO: 193372 - DNA, 612 bp, Homo sapiens
  chr20:62052954-62053566
  hypo
acactgaccgagacccgacaggacagacatgcaccaaaaacacgcggacacgtgtgcttgagaagaggagggggagcccgaacaggcacgggggagcccgcacaggcatgagggggcagccggtgttgggggctcctcctccagcacgggggcaggaggcagtgagatggggtgtcggacaagacagcacaagtcagaaccgccgtggccaaagagaccccccgggacccccctggggcagcacggcccgagccccgcagcctgcctggctccccacccgaccccaacgtagacgcttcctctgactccagcacagccccagtggtccctacgggaaccgagcccccgccagccgggtcgcctgccaccacgtgcctgtgttctgagccaggatgggggtgggggtctcagcagtgagtgagggtccctgtgtccacaccatccacctgccaagaccagctgacaccagcggggtcctgccatgcggggtgcgggctccacctccaaagggcaggcggaggcacaggtcccaccagactcacagagcccaggtcaggcagcagaggggcgccaggagccgagctccccatcaagcttcgcagagcaggcccc

SEQ ID NO: 193373 - DNA, 277 bp, Homo sapiens
  chr20:62056055-62056332
  hypo
gcccagggtttgcaccgctgaccaactgtcccggcctcgtcctgcaggcaaagctgtctgggccttccggcgtctcatctggggctgtttccgcgggtaaaggcgttatggattgagtgagagatcggcggatcgtgatttggctcatccatggggaggccccagcgatctcattcgaacacctgggctggtgccccggctggtacgccgtgttacaagcaggctctttggtgcacttccaaatacttcatgtgacagggaccgtgttgccgtggaa

SEQ ID NO: 193374 - DNA, 61 bp, Homo sapiens
  chr20:62058718-62058779
  hypo
ttctgatgtcacacccgcgcttgtaggcgtttgccacagccgcacgcggctcccggtatta

SEQ ID NO: 193375 - DNA, 30 bp, Homo sapiens
  chr20:62059496-62059526
  hypo
ctctgcccgtcccccgaaccagctgcccct

SEQ ID NO: 193376 - DNA, 30 bp, Homo sapiens; identical to SEQ ID NO: 99690
  chr20:62075372-62075402
  hypo

SEQ ID NO: 193377 - DNA, 30 bp, Homo sapiens; identical to SEQ ID NO: 33634
  chr20:62083296-62083326
  hypo

SEQ ID NO: 193378 - DNA, 33 bp, Homo sapiens
  chr20:62083854-62083887
  hypo
acacctgcacagcagcgtcgaggcaggtgcgtg

SEQ ID NO: 193379 - DNA, 458 bp, Homo sapiens
  chr20:62090185-62090643
  hypo
ccaccttccgcacagcgggaagagcaaggcgagggctccgggagggggcctgtgtgggtctggggggctgagatgaggagggcacggcccacccagggcacctggccacatgtgacgcaggcttcgtcccaagaggaatgacgaaatgtccagagacactcaccgcgtgtccacagcagcctcacggcagacgcaacccaacatccagttggtgggtgggtagataaactgaggtccgtccgtgcggccacaggaaggacgaggcagcggcccccagacacggagaggatgaaggagtaccctaaacacgaaggaacctgagggcaggctcggcaaggaaagccaggcacaaaacggcaccacgatgacaactccacttacacgaaacatccgaagcaaacaggccaggcccggcggccacgcctgtactcccagagcttggcgaggccgaggcagga

SEQ ID NO: 193380 - DNA, 30 bp, Homo sapiens; identical to SEQ ID NO: 33636
  chr20:62092325-62092355
  hypo

SEQ ID NO: 193381 - DNA, 162 bp, Homo sapiens
  chr20:62094130-62094292
  hypo
cagagaagtcgtgagcgcccgacggagcctagagggggacatgcagggagagggggccacacgcacaaggcaggacacggagtgactccacacatgtgaaaagaagtgagtgaacacacacagacacacacatgctgtaccgtggcacgcatgcagagaacg

SEQ ID NO: 193382 - DNA, 89 bp, Homo sapiens; identical to SEQ ID NO: 99695
  chr20:62097172-62097261
  hypo

SEQ ID NO: 193383 - DNA, 386 bp, Homo sapiens
  chr20:62098052-62098438
  hypo
ggtctaggagcccgacgctggccagtctcaggatgacgcccccggccagagccccagccctgccctccccgagcctcacgccccacgggtcacgcagggtcttcacaggtcacggccacacaggagcacgtctcacacgggcggaagcacagaggggagcggggctgcgtccacagaccgcgcacacacgagcagtttcccgtctcagagctgcctggcatgcacactggaaaatagttaagacagccccccgtgaggtaacacgcttgggctctgtctgtgatgacaagatgtcggacacaaggccaaggtctcccccgggggacatcgcaggcatcaccccaccatccttgccccccatcctcccaaaacgggcacattgctcc

SEQ ID NO: 193384 - DNA, 484 bp, Homo sapiens; identical to SEQ ID NO: 133349
  chr20:62103141-62103625
  hypo

SEQ ID NO: 193385 - DNA, 312 bp, Homo sapiens; identical to SEQ ID NO: 133350
  chr20:62103667-62103979
  hypo

SEQ ID NO: 193386 - DNA, 252 bp, Homo sapiens; identical to SEQ ID NO: 33637
  chr20:62110512-62110764
  hypo

SEQ ID NO: 193387 - DNA, 23 bp, Homo sapiens
  chr20:62114930-62114953
  hypo
cgggcgcgggggcccacgcctgt

SEQ ID NO: 193388 - DNA, 22 bp, Homo sapiens
  chr20:62115192-62115214
  hypo
cgagactcaaaaaaaaaaaaaa

SEQ ID NO: 193389 - DNA, 222 bp, Homo sapiens
  chr20:62117852-62118074
  hypo
gggtgtcggcagccacggcaaggggtgaagcagggaaccgactctcctggggcctccagaggagcagagccccatcgacaccttgatttcggcagggaggctggttttggcctgaccccaggaggcctcgccatttgccgtcattggtcgcagcatccctaagagactaaggcgctatgaggccctgcggtcagcctgcctgctctgcggaaccctccgagt

SEQ ID NO: 193390 - DNA, 318 bp, Homo sapiens; identical to SEQ ID NO: 57504
  chr20:62119300-62119618
  hypo

SEQ ID NO: 193391 - DNA, 184 bp, Homo sapiens; identical to SEQ ID NO: 13157
  chr20:62119922-62120106
  hypo

SEQ ID NO: 193392 - DNA, 317 bp, Homo sapiens; identical to SEQ ID NO: 99701
  chr20:62126118-62126435
  hypo

SEQ ID NO: 193393 - DNA, 31 bp, Homo sapiens; identical to SEQ ID NO: 99702
  chr20:62127228-62127259
  hypo

SEQ ID NO: 193394 - DNA, 171 bp, Homo sapiens
  chr20:62137320-62137491
  hypo
agccgggagtgtgggcgcctccaagcaccctctcggtcttgtgctgtcctcaccccactgcctgaagagagcagcgcacgaattttgtctggtctcagagtcgtttctggagggagacgtacctggcagcagctactcccccgcaactggaagcagcggttgactccacat

SEQ ID NO: 193395 - DNA, 152 bp, Homo sapiens; identical to SEQ ID NO: 99703
  chr20:62149572-62149724
  hypo

SEQ ID NO: 193396 - DNA, 43 bp, Homo sapiens; identical to SEQ ID NO: 57507
  chr20:62152086-62152129
  hypo

SEQ ID NO: 193397 - DNA, 560 bp, Homo sapiens
  chr20:62153051-62153611
  hypo
ggccagcttctttttcgggaagtccaccctcccgttcatggccacggtgttggagtccgcagagcactcggaacctccccaggcctccagcagcatgaccgcctgtggcctggctcgggacgccccgaggaagcagcccggcggtcagtccagcacagccagcgctgggcccccgtcctgacctgagcggttaccaccagccccaggcctgcggaggcgctagtccaccagagcccctccccgcccctctccccactccgcatccctcgcccccctccccacctcccaccccccaccctgtaaactaggcggctgcagcaagcagaccttcgcatcaacacagcagacaccaaaaaccagtgagagccccgctctctaccgcccggccccagcactcgctagctttcctgacacctggaactgtgcacctggcaccaagcggaaaataaactccaagcagccagtagccccgatggtgtgtgcctgagctgtgtggcccgaggttccatttgagtgtgagaaatggctgaatccctcccgacctcactgccttgtggggg

SEQ ID NO: 193398 - DNA, 30 bp, Homo sapiens
  chr20:62153824-62153854
  hypo
ttcaggccccttacccgagggcctgcgggg

SEQ ID NO: 193399 - DNA, 31 bp, Homo sapiens; identical to SEQ ID NO: 33642
  chr20:62154842-62154873
  hypo

SEQ ID NO: 193400 - DNA, 23 bp, Homo sapiens
  chr20:62155440-62155463
  hypo
gggtgcgatggctcacgcctgta

SEQ ID NO: 193401 - DNA, 29 bp, Homo sapiens
  chr20:62155932-62155961
  hypo
gacagattaaactgggcgcagtggctcac

SEQ ID NO: 193402 - DNA, 28 bp, Homo sapiens
  chr20:62156260-62156288
  hypo
caaacatttaatgcgagttccatgtgat

SEQ ID NO: 193403 - DNA, 118 bp, Homo sapiens
  chr20:62165578-62165696
  hypo
ggctgaggaaggacaccgcctcgttcaggtgcagccggcccccggcacgccgccagatcttgtagtgccgcacagcctgcgtgtcccgcactgggagggagagcgtgagctgtgtggc

SEQ ID NO: 193404 - DNA, 30 bp, Homo sapiens; identical to SEQ ID NO: 33643
  chr20:62167655-62167685
  hypo

SEQ ID NO: 193405 - DNA, 30 bp, Homo sapiens; identical to SEQ ID NO: 99710
  chr20:62168240-62168270
  hypo

SEQ ID NO: 193406 - DNA, 50 bp, Homo sapiens
  chr20:62172262-62172312
  hypo
tgagcacgtagacctccgccgggcaggcagccgggcgcggcagccggtac

SEQ ID NO: 193407 - DNA, 30 bp, Homo sapiens; identical to SEQ ID NO: 99712
  chr20:62172574-62172604
  hypo

SEQ ID NO: 193408 - DNA, 283 bp, Homo sapiens; identical to SEQ ID NO: 99713
  chr20:62172923-62173206
  hypo

SEQ ID NO: 193409 - DNA, 577 bp, Homo sapiens
  chr20:62174492-62175069
  hypo
gagagcagaatgtgctggaaccgctgggatgctccgatgctcccaggcctgggcagggccctggagctgcgcctctgacagccccaggggttttgtgacggggtggggaggagcacctagaacagggccatgcctcgggcccagcatggggcagcttggcaggcacaggcccacctggggcatgcagggctgcagcagggggttctggatcagcttccagttggccttgtagtaggtgagcagctcctccaggccgggaaagagccgtcccttctgcaggtagaggctgccatcagctgccatggagacccggtagtggcagaccttggcctgggcccggactaggaagggttcagagatggagacccctgccttggctgccagctgccccgaccctcccaccccagaggatgctggccacaacccactaaggggtctggctcagacctagctggggaccctgagatggtcagagctgtgtggaggagggagtgtgggcagccacaggctggggcggggcagcgagagcggcccaggttggagcttttctgctgacggtgtgcacagagtaggcact

SEQ ID NO: 193410 - DNA, 76 bp, Homo sapiens
  chr20:62175656-62175732
  hypo
agcagctgctgtgcctgggtccgactgaccccgctaaagtaccagctgcaaacagcaggtgcggcagtcaccttgc

SEQ ID NO: 193411 - DNA, 69 bp, Homo sapiens
  chr20:62178215-62178284
  hypo
cacaggacctgaccacgcctgccggagcctcctctccctctcggcagcccacagcggacactgctgttt

SEQ ID NO: 193412 - DNA, 144 bp, Homo sapiens; identical to SEQ ID NO: 99717
  chr20:62179511-62179655
  hypo

SEQ ID NO: 193413 - DNA, 38 bp, Homo sapiens; identical to SEQ ID NO: 33645
  chr20:62180549-62180587
  hypo

SEQ ID NO: 193414 - DNA, 30 bp, Homo sapiens
  chr20:62186584-62186614
  hypo
agcgggaggatggcccgcgaatgtccccga

SEQ ID NO: 193415 - DNA, 30 bp, Homo sapiens
  chr20:62187214-62187244
  hypo
cgcatgcagctgctgcgtaagtgctcctac

SEQ ID NO: 193416 - DNA, 30 bp, Homo sapiens
  chr20:62187651-62187681
  hypo
tgaccgaaaggcgtcggcggctcaccagga

SEQ ID NO: 193417 - DNA, 78 bp, Homo sapiens; identical to SEQ ID NO: 33646
  chr20:62190623-62190701
  hypo

SEQ ID NO: 193418 - DNA, 30 bp, Homo sapiens
  chr20:62191533-62191563
  hypo
ggtgatggaggacacggccaccccggcgat

SEQ ID NO: 193419 - DNA, 30 bp, Homo sapiens; identical to SEQ ID NO: 99720
  chr20:62194930-62194960
  hypo

SEQ ID NO: 193420 - DNA, 30 bp, Homo sapiens
  chr20:62196963-62196993
  hypo
cagcgttgagctccccgtcccacggccaga

SEQ ID NO: 193421 - DNA, 562 bp, Homo sapiens
  chr20:62197204-62197766
  hypo
agccgcctgctcctcggccaggtcccctactggctctggggcagcctcccagttccccgctgccccagcctgtgtgcctcggggaggccagcgccgtctctgcgccacaccctgctcgacctgctccatggacaggccctcggggcagacactgtgccgctccacgcactcacggatgaagctctcccagagcttgccgcaggccccgaaggagcagagggccacggcgtcccccactaccaccagctgggactgggcgcgggtcaggacggtgttgagcacgcgggcgtcggtgaagaactcaggggccagtgccccagggctgagcaggctctggcaggtgtgcacagtgctgagcaccacgacccggaactgccgccctgcagggggcacgcagtcaggtcaggctgggtgcgcaagacggtgggaccagccccacccctgccgatgccaggctgaggagtgggccgagccacccggggtatcctggggcagctggcagcacctggccccgctggtcacccacctggcaggatctcaaaactgccgacagacacctggc

SEQ ID NO: 193422 - DNA, 372 bp, Homo sapiens; identical to SEQ ID NO: 99721
  chr20:62204125-62204497
  hypo

SEQ ID NO: 193423 - DNA, 185 bp, Homo sapiens
  chr20:62209402-62209587
  hypo
cgtacacacagcacacggccaacacgctcacacgggctgagtgtgacaccacgggacagagttccacgtacacacagcacacggccaacaacacgctcacacgggctgagtgtgagaccacgggacagagttccacgtacacacagcacacggccaacaacacgctcacacgggctgagtgtgag

SEQ ID NO: 193424 - DNA, 39 bp, Homo sapiens; identical to SEQ ID NO: 33647
  chr20:62214175-62214214
  hypo

SEQ ID NO: 193425 - DNA, 279 bp, Homo sapiens
  chr20:62218274-62218553
  hypo
tggcagcagggaggggaacagcgttggtgacgagaaggctctgggactgaacctgggagaggggaggaaggggcccccctgggcgtgagtctgttgagctcctgactggcgggcgcaggcccctgtgccactgagaggtctccttacctgtgagcggcggtgcctccgacgccagcctcgggtcaaggtggggcccaggctgttcttactattgtcctccagcgatttgcaggacaccttcaaaaccctcacgagttaccgaatcggctgattcaaaac

SEQ ID NO: 193426 - DNA, 1614 bp, Homo sapiens
  chr20:62220462-62222076
  hypo
cccacatgggaatcctcgacctccatagtgactggttctgtttatgcctctgccccaggactgaagccctagggacacacctcatggatctcagacccctgggaggggccggctcagggacaggctgcccaggacctccgcacccggtcaagtgcactcacaggggctcaggggccacccaaagagctaactcgggaagcctaggcactcaccattattttggttgaaaatgctataaatctgactcttcctagaagcctactaagcaattcacttaaaaacaccctcagtacatgtgcaacaatgcctggaccacgcctcgtctgtgcggcccctgggccacctgagcaccggctgggggcgggggaggcaggcacccatcaggatctgcaccccaagctccgggtgcatgttcccaactggaggagaacggggcgccagccacactaaacctacagaaaactgtgggaagaaaccaaatccataggatccagaggtttcacacttgggcttagctcccaagtcatgagttagtaacgtccccagggacctggctgggtgcagacatgggggcctcgtgacctgctgcaccgcgtccagcacctgcagggtcgcgctcggcacctggctctgcttcctctgtctctgctgcacccaggctccccctagcccccgcccacctggctcctgatcaaggcccaatgtgtaaacagtattaataagcaacagatggaaaaatatatttcccaagaaaaaagggggaggaaacgtgggacctgaagaccgattttccaggttgctctcgctgttctgtccccttctctcttctcgtgatttgttttggcgattcctctctttggttctgcagaccacgtgacccacctgcccgagccagccctgcggcctctgcccgctccctgctgccgcggctgagagacagccagccctgtccgtcccaggggcctcgccctcctgtcggctacttccgctcgtggtcctctgccatggcagccacctcaatggtggccgtgtgctcctcaggcccgggggcagcccctgcgggcactgtcacaattgtgctggagccaggcgaggcctgggccacgttctgcagggtggggcccaggccaggcaacgtgagcagctgtagcgggctgaccaccttgaacaccgtgctaccgtcctgcacggcggccgtgctcaggaccgtgaggctggacgcgtccgggtggatctccactgtgctggggtaggtggagccggaagaggccaagactgtgtatcccccgagcagcggggaggccggggagctggcggggggcgcctgaagggaacccttgcccaggacggtggacggcagggtggacaccactttaccaaggggcacgctggtcagctgggggacgggcacgcccgggccaagcgccagctgggcagactgggtgagcacctgcgaggccatggcggccggtcctgatgtggcacgtgcaagccggggccgcttcacaggcggtggcagggagaccggcgtcagcgtcatgagcacgttgctgaggtgctgggacttgtgcttcagctccttggctcggcgacgatgctcatcacactgctgct

SEQ ID NO: 193427 - DNA, 30 bp, Homo sapiens; identical to SEQ ID NO: 33651
  chr20:62225373-62225403
  hypo

SEQ ID NO: 193428 - DNA, 77 bp, Homo sapiens
  chr20:62231697-62231774
  hypo
tacatttttttctgatgcaggatccagcccaagactgtggagcatgcagctgccttgctcttcggcttttgtcccca

SEQ ID NO: 193429 - DNA, 30 bp, Homo sapiens; identical to SEQ ID NO: 33652
  chr20:62242063-62242093
  hypo

SEQ ID NO: 193430 - DNA, 256 bp, Homo sapiens
  chr20:62242304-62242560
  hypo
ccacatgcagagcctcggccagcccaccaatgcccggatatgcaagtgagcccagcctggaccccccggcgaggcccagcagcaccagcccaggcccgaaaaccttaagaaatgaccagtgtctgctgctttaagccaccaagctctgcggtggtttgttaggctgcaagcatggctaattcagaaactgccagaaacaagcactgctgtccccagcctgggacacacagcaccgcctctgcgtggggagagggca

SEQ ID NO: 193431 - DNA, 507 bp, Homo sapiens
  chr20:62248629-62249136
  hypo
accgtgaccttctaagaagtgaaagagaaagatctttctctctccctccctctccatcatgaggacacagcaagaagtcggccatctgcaaggtagaaagcgagtcctcccaacagctgaacctggcagaccctgatcttggacttcagccttcagagctgtaagaaaataactctctgctgttcaggccacgcggtctacggcagcccgagcagactaagacacacgccatctggggagtcagaccagatcaggaagaaaggcctagagctcaggatactgaaggtcccaacccggtgctggaccagaccaccccggcagccgcggccacggagtcacggctcgggtgaggtgacctggacaccatcccggcagccgcggccacggagtcacggctcgggtgaggtgacctggacaccatcccggcagccgcggccacggtgtcacggctcggatgagatgactcggacaccaccccggcagccgcggccacggtgtcagggctca

SEQ ID NO: 193432 - DNA, 422 bp, Homo sapiens; identical to SEQ ID NO: 99729
  chr20:62250722-62251144
  hypo

SEQ ID NO: 193433 - DNA, 377 bp, Homo sapiens
  chr20:62252078-62252455
  hypo
tgaacctaaccaggtcgatttcttgctatgaaaaaaaaaagtctacattctctgtgaaacttaaaacaagacctagagtccatagcacagtagtcaaagcatccagaacacgatcaaacttcctggcaaagggtagtctggttgattctcaaaggaacaaatacacaagagaagctggctcttgaacgcagaatccagagactttcaggtgctatcggaccagctccaagaggaaagcaaacattgtcaaccaagtggaaagaaaatcttggtatagaaacaggagttataaccaaacagaaatgtgaaaattaaaaacgacaaccaaaagaaaatacacaaagctgggatagtctcagctactcggaaggcggggc

SEQ ID NO: 193434 - DNA, 121 bp, Homo sapiens
  chr20:62252634-62252755
  hypo
atttctgtttgggatgatgaaaagctctggaaatggacggcggtgatggctgcacaatcactgtggctgttctgaatggtgctgaaccacacatttaaaaacagttaaaatgggctgggcg

SEQ ID NO: 193435 - DNA, 31 bp, Homo sapiens; identical to SEQ ID NO: 33654
  chr20:62266230-62266261
  hypo

SEQ ID NO: 193436 - DNA, 394 bp, Homo sapiens; identical to SEQ ID NO: 57509
  chr20:62273399-62273793
  hypo

SEQ ID NO: 193437 - DNA, 30 bp, Homo sapiens
  chr20:62274243-62274273
  hypo
tcaccgggaagggaacggagccgcttcccc

SEQ ID NO: 193438 - DNA, 44 bp, Homo sapiens
  chr20:62274577-62274621
  hypo
ctccttccaggtggccgcctcggaacccttcctcctctccatcc

SEQ ID NO: 193439 - DNA, 225 bp, Homo sapiens
  chr20:62275046-62275271
  hypo
cctgtccccgtgggccgcctccgttgaaactcctggggggtgggggatggaggactccttgccttcctccgctcctcggctgcctccagccgcttttgcagctcctccagggaggtgtccttcttcttgggtggggaggagagcatagggctctctggggacaggtcagaaggggacttgaggatgacctcgaagctctggcctgaggcccgcttgtccagctgc

SEQ ID NO: 193440 - DNA, 514 bp, Homo sapiens; identical to SEQ ID NO: 99732
  chr20:62281488-62282002
  hypo

SEQ ID NO: 193441 - DNA, 1166 bp, Homo sapiens; identical to SEQ ID NO: 133359
  chr20:62283518-62284684
  hypo

SEQ ID NO: 193442 - DNA, 296 bp, Homo sapiens; identical to SEQ ID NO: 99734
  chr20:62309943-62310239
  hypo

SEQ ID NO: 193443 - DNA, 163 bp, Homo sapiens
  chr20:62313527-62313690
  hypo
ggcttctgaggttcctacactcgaactgaatcctggaatgcggcttccaaggcttccagctatggagaagactccacactctggaaccgaatcctggaacgcggcctcccaggcccccagctatggagaagactccacactctggaaccgaatcctggaacgc

SEQ ID NO: 193444 - DNA, 304 bp, Homo sapiens
  chr20:62314815-62315119
  hypo
ctctctccttctgtgcgtacccaggcacgtgcacatgcatgcagagtacgcacacacgcacgcacgcctgcacaaatccacgcatgttgccaagtctctgtgttccagccgtggtgtctgccccccggtgttctctagttcggcttctccgcatttctgtgaatgattccggcttcttggtgttcccagcagaactccctcaagtctgcggcggggctctgacggcggtggcttggctgacatggccacattgctgagcctgttgggggctttgcgttcctgttctggccgtttttggctcgtt

SEQ ID NO: 193445 - DNA, 30 bp, Homo sapiens
  chr20:62315662-62315692
  hypo
cactgtggttttgtcgtaagtcctggtgtt

SEQ ID NO: 193446 - DNA, 212 bp, Homo sapiens; identical to SEQ ID NO: 99736
  chr20:62317397-62317609
  hypo

SEQ ID NO: 193447 - DNA, 30 bp, Homo sapiens
  chr20:62320565-62320595
  hypo
ccctgggggctgcccggtcccctccttggg

SEQ ID NO: 193448 - DNA, 1414 bp, Homo sapiens; identical to SEQ ID NO: 99737
  chr20:62320891-62322305
  hypo

SEQ ID NO: 193449 - DNA, 30 bp, Homo sapiens; identical to SEQ ID NO: 99738
  chr20:62322512-62322542
  hypo

SEQ ID NO: 193450 - DNA, 734 bp, Homo sapiens
  chr20:62326136-62326870
  hypo
agcagggaagcagggccagcacgccgtgagcgcctacctggctgatgcccgcagggccctggggtccgcgggctgtagccaactcttggcagcgctgacagcctataagcaagacgacgacctcgacaaggtgctggctgtgttggccgccctgaccactgcaaagccagaggacttccccctgctgcacagcaagtggccctggcgtggggaacagccggtggggtggggggcaggggacaaaatgggggctgtgccgggtctgattgaagctccccgcagggttcagcatgtttgtgcgtccacaccacaagcagcgcttctcacagacgtgcacagacctgaccggccggccctacccgggcatggagccaccgggaccccaggaggagaggcttgccgtgcctcctgtgcttacccacagggctccccaaccaggtagggcacctgcctggctgctcctggcagcgccccaaccgcacgcagccctgggagtgagcagcaaagccccaggcccccctcagactcaagtctctgtctccaggcccctcacggtccgagaagaccgggaagacccagagcaagatctcgtccttccttagacagaggccagcagggactgtgggggcgggcggtgaggatgcaggtcccagccagtcctcaggacctccccacgggcctgcagcatctgagtggggtgagcctcatgggagagacatcgctgggcagcaggc

SEQ ID NO: 193451 - DNA, 387 bp, Homo sapiens
  chr20:62329295-62329682
  hypo
aacatcaagtcaggtccggtccatctgcaggtcccaactcgccccttccgatggcccaggagccccaagcccttgcctgggcccccttgcctcttgcagccaaggtccgagtggccgctcctgccccctaggcctttgctccagctctctgaccgaaggctcctgccccttctccagtccccatcgttgcactgccctctccagcacggctcactgcacagggatttctctctcctgcaaaccccccgagtggggcccagaaagcagggtacctggcagcccccgccagtgtgtgtgggtgaaatgatcggaccgctgcctccccaccccactgcaggagctgaggagtgtgagcgtgccgtcatcgactttgtggctttccaggac

SEQ ID NO: 193452 - DNA, 132 bp, Homo sapiens
  chr20:62331798-62331930
  hypo
gtgatgtccctctgccgcggcggccggtgcacattccgcacgacacacttcaccatccactcgatgccctcgcgcacccctttgctgtgaagacagcgggtgtgaggcggggggtctcggtccccaaagccc

SEQ ID NO: 193453 - DNA, 77 bp, Homo sapiens
  chr20:62333476-62333553
  hypo
gccgcactcaccaaacgcctgcttggactcagccagcctctcctcgtcggtggagtcaatgacgtagatgacgccgt

SEQ ID NO: 193454 - DNA, 30 bp, Homo sapiens
  chr20:62340291-62340321
  hypo
ggaagagggagaggacgaggaagagctgag

SEQ ID NO: 193455 - DNA, 30 bp, Homo sapiens
  chr20:62380511-62380541
  hypo
ctggaccgggatgggcgctgtccagggatg

SEQ ID NO: 193456 - DNA, 18 bp, Homo sapiens
  chr20:62380964-62380982
  hypo
aggcgtcagccaccgcgc

SEQ ID NO: 193457 - DNA, 1079 bp, Homo sapiens; identical to SEQ ID NO: 133366
  chr20:62383136-62384215
  hypo

SEQ ID NO: 193458 - DNA, 381 bp, Homo sapiens; identical to SEQ ID NO: 57516
  chr20:62384602-62384983
  hypo

SEQ ID NO: 193459 - DNA, 144 bp, Homo sapiens
  chr20:62388762-62388906
  hypo
atcgcgcctggccacgattcacttttttcctccatgtcaatgtccagtcactcagcaccatatcttgaaaagaccatctgtcccacattgagttgcagagtgggctttctggtgcctcacgggccctggcggcgtgtctaccct

SEQ ID NO: 193460 - DNA, 121 bp, Homo sapiens; identical to SEQ ID NO: 99744
  chr20:62392096-62392217
  hypo

SEQ ID NO: 193461 - DNA, 30 bp, Homo sapiens; identical to SEQ ID NO: 99745
  chr20:62398204-62398234
  hypo

SEQ ID NO: 193462 - DNA, 491 bp, Homo sapiens
  chr20:62398513-62399004
  hypo
acacaccgccaaggacgccgtggcaggctttgtctttcgatctccctagaaagttgctgggtcggagccacgtggctccacttcccacggatggggacatgttttcccgcccctgaaagccccccgtccccacacattggcaatcccgtaggatctcggtcatctgaaccccgtcgggcagaagctggaggtccacccgccccagctgcccaccggctgggcatggagatgccttcacctggcagcagccggcagaggactcgagaaatgaccacagaaaggcacacaccggctcccagtcacagctctccgcagatatccccctccgacgcggctgttcggtcacccagttcccctcctgctcccacacacttgagagctctctcgcctgggcagctgcacccagctggagcccgggacccggacgccaaagctctggccgcagcactgaggtcaaagcaaacgccggctccagcgcacagaccagaggc

SEQ ID NO: 193463 - DNA, 108 bp, Homo sapiens
  chr20:62401272-62401380
  hypo
ctccgccatctccacggccaccttctccagtaacgagctggtcagaagccgtccccgcaggaaaggactgcagggagctggggtgagcttcacgggaggcggcaccgc

SEQ ID NO: 193464 - DNA, 30 bp, Homo sapiens
  chr20:62402656-62402686
  hypo
ctgcccccactctccggcccccacagtcac

SEQ ID NO: 193465 - DNA, 911 bp, Homo sapiens
  chr20:62406866-62407777
  hypo
tccaggctgtgacgccgcatcctcacctcccgcaacagggaggtcagcaggcggccgagcagcagggacagaccctcagcctcatctcatcttggcccgggacctgcaaccctcagccttcaaaaccacaccaaagccaagcggcccccagggcctgcacttacgggacagcgagtgggcccctctgggcaggtactcgaacagcagggagccgtcatcccccagcacgtcggccttcagcgacagcaggctgttcttactcatgagcgccgcgcgcaggttggccaccgcggtggcctgatgcagggcgtcgtccttctctggggtgaggggagggcccagatagctggcttctcctcccaggagaccctcctccacctgtgcatagagctcggccctctctcctcggctgtcggagctgctggcttcggtgacggacaggtccgcatctggggacagagggacacacgtcagaagacacgggtcgttcccagactctccaagtgggacaggcgacacatttagaaggacagcgaccagcttctgcctgagctacagagcagcatcaagtccagcccaccctgggagccgggcacctgccccagcaatgcagcagcctcggcccagcccggcctttcctgcccacccaggtcccatggctgcggtggagtctcagccaaggctttggaggacggctcaactcagaacaacggggttgccctccctggacgaggcgctgcagacctggtacctgctctgctccagggccgagggcctgagagtcagaggctcctggggcggcagtatttccatctcgcaaagacgaggagaggctcaaaatggatcaatgacgttagagctaaatctataaaattcttagaagaaaatccgcatgatctcagatttggcaa

SEQ ID NO: 193466 - DNA, 96 bp, Homo sapiens; identical to SEQ ID NO: 99749
  chr20:62412804-62412900
  hypo

SEQ ID NO: 193467 - DNA, 395 bp, Homo sapiens
  chr20:62413439-62413834
  hypo
aaaaaaaaaaaaaagaaaagaggcgtggcgattttcaccaaaatccccggctactgtatgcaaacccccagtggtgagccaatgactcctgcagagacgcccaggctgcaacccccgagccgtggttttgccaccttgtggcagaacgactccgcagacctgattcggttcaggatctcacgatgagtcctggatgagccacgtgggccctaaacggacccaccagggccccgtcagcagagaaggaggcaggagggtgacagaagcgaggatgggaaggggcaggaatgatgtcgggccacgagccaaggatgctatggcttccagaagccagaagaggcacatggactcccctggagctccaggggatgcagccctgccggctgcttcagact

SEQ ID NO: 193468 - DNA, 30 bp, Homo sapiens
  chr20:62417394-62417424
  hypo
cctgccagcgagttacgtgcacgcacaggg

SEQ ID NO: 193469 - DNA, 376 bp, Homo sapiens
  chr20:62422170-62422546
  hypo
aagctcagcacagacagaggccgtgagaggacgccgggcggggcgcaggagggccatggggcacagagtgcggccagtgggaggacgacccacgcgagagcccatccacaggtgtgcagcgggaggcctgtgtctccgcctgaagcagggcagcaaacaccggagggcaccagtgcgtccagggtgggacgtctgccacgtgtttccgtgctcgaggctaatggggttctgaacagaatcccacatacggcaactggcatatcccaggaacgatgagaacacccagccgtggctgagcaactcttacccaaactgagaactcggttaaatgacctacactgtggccatccctcacgcttgaagaaacattcttaag

SEQ ID NO: 193470 - DNA, 426 bp, Homo sapiens
  chr20:62426998-62427424
  hypo
tcccacccatcgtgccgtcctgtgctggcaccaggtcggccaatcctccctgggatccggggagcaaggtcatgcacctgtgtccccagcagaatgaccaccggcaaacaggctccgccaaacgtggcttctatcctcctcctccctgggtcagctggagtgaaggaagagtggcctctgccgaatgcgcataggaacggcccagcctctagggccatcttggaagtggcggtgcccatcccaaatcctctctccaacagactcccggaaggtgacgggtgtccatcattgagcgcctttgaagactgtaaacaggcgcgctgctgttgaggacgcacacttcccactcactccaatcctctcatttgaggacgaatgtgccctggccacagcctggatagatgcctgtgtcgcaggacgcagacc

SEQ ID NO: 193471 - DNA, 97 bp, Homo sapiens
  chr20:62432146-62432243
  hypo
gaagcccgccatgcctgagcctccccctccccgcagtgggctcctgcagagcttccctgacgagtgcccctccctgctctaccgcgctgggtcccat

SEQ ID NO: 193472 - DNA, 30 bp, Homo sapiens; identical to SEQ ID NO: 99751
  chr20:62439529-62439559
  hypo

SEQ ID NO: 193473 - DNA, 208 bp, Homo sapiens; identical to SEQ ID NO: 99752
  chr20:62440398-62440606
  hypo

SEQ ID NO: 193474 - DNA, 677 bp, Homo sapiens; identical to SEQ ID NO: 57517
  chr20:62461227-62461904
  hypo

SEQ ID NO: 193475 - DNA, 31 bp, Homo sapiens; identical to SEQ ID NO: 13168
  chr20:62467675-62467706
  hypo

SEQ ID NO: 193476 - DNA, 30 bp, Homo sapiens
  chr20:62474744-62474774
  hypo
ccgctgttcgtggcccgcttggccgcagcc

SEQ ID NO: 193477 - DNA, 98 bp, Homo sapiens
  chr20:62480660-62480758
  hypo
cacctctgccagggacgccgtctccttcctccgccacctctcccgttgtgttttttgaggttcgactcaaaatctttacatgtttttaaaaattgagt

SEQ ID NO: 193478 - DNA, 263 bp, Homo sapiens; identical to SEQ ID NO: 33668
  chr20:62481424-62481687
  hypo

SEQ ID NO: 193479 - DNA, 31 bp, Homo sapiens; identical to SEQ ID NO: 99756
  chr20:62487799-62487830
  hypo

SEQ ID NO: 193480 - DNA, 215 bp, Homo sapiens
  chr20:62488231-62488446
  hypo
gaaaagaaaagaagaaaagaaaagcccctagaggccagggtccttgaacaaaagtgcgcgatgccctgtgtctgcagcggggagaggtctggagcccgtgtgtccgacagcagaagtggacacagtggtgccagggcaggaaccctgggggcatttgcaggcctgtgctgcgagactgcagtggcgctcaggacacacctcggagaagagcaagc

SEQ ID NO: 193481 - DNA, 218 bp, Homo sapiens; identical to SEQ ID NO: 99758
  chr20:62493114-62493332
  hypo

SEQ ID NO: 193482 - DNA, 118 bp, Homo sapiens; identical to SEQ ID NO: 99759
  chr20:62494225-62494343
  hypo

SEQ ID NO: 193483 - DNA, 592 bp, Homo sapiens; identical to SEQ ID NO: 133374
  chr20:62495238-62495830
  hypo

SEQ ID NO: 193484 - DNA, 30 bp, Homo sapiens; identical to SEQ ID NO: 99762
  chr20:62510245-62510275
  hypo

SEQ ID NO: 193485 - DNA, 30 bp, Homo sapiens; identical to SEQ ID NO: 99763
  chr20:62512778-62512808
  hypo

SEQ ID NO: 193486 - DNA, 456 bp, Homo sapiens
  chr20:62513507-62513963
  hypo
ccactctgtgacgctcgttccccacagacgtggttgagcttgcattttctcccctcagcacagtctcatttgggaagaggaaagggaaacttgcacgcatgggccggtcagggcactgagaggcctttctgctctggcactgcctgccaggcgtgcacctcagggggcccgtccgctctagcaggcaaatggggcgtgttctctgtagtcagaggggctgtgagaagacaggaaagcgagcttagtgggtatcaggcaagggggtgaaattgggttgtgagatgagaaagcagcgtcattgcagggctggggggccgagactcggcagggtcgccgagagctcagtgagcgagcaatgcacaggcggctcctcgccgcaggggcctctgggggccgaggggctctgggcctgcaccccctctgtagacacctggcgagtgtccaccccttggccca

SEQ ID NO: 193487 - DNA, 30 bp, Homo sapiens
  chr20:62518467-62518497
  hypo
taggccaagccggggcgccgccagcacgtg

SEQ ID NO: 193488 - DNA, 313 bp, Homo sapiens
  chr20:62518964-62519277
  hypo
tatgcctgctcgctgcggctccagagccgggtgtctctggtgggggttggggcagctcccgccggttacaccttgcccttcccatattcctggattaattgaggactccattcccttggcaacctctgatgactaagggccggtaaaaaccccctctaggctgacgaggaagagctggtagggggtcaggctcttcacctgcagcctccagaggagatccttgtgtcaaactgggccgtgtcctttccaagtcctgaccctggctgcctgcagtgggtggggtggggttcgaggggctcgcacacagatcctg

SEQ ID NO: 193489 - DNA, 252 bp, Homo sapiens; identical to SEQ ID NO: 99765
  chr20:62520343-62520595
  hypo

SEQ ID NO: 193490 - DNA, 362 bp, Homo sapiens; identical to SEQ ID NO: 133376
  chr20:62525783-62526145
  hypo

SEQ ID NO: 193491 - DNA, 30 bp, Homo sapiens; identical to SEQ ID NO: 99766
  chr20:62541917-62541947
  hypo

SEQ ID NO: 193492 - DNA, 26 bp, Homo sapiens
  chr20:62543644-62543670
  hypo
gaatcggtctccaaaaaaaaaaaaaa

SEQ ID NO: 193493 - DNA, 43 bp, Homo sapiens; identical to SEQ ID NO: 99768
  chr20:62544236-62544279
  hypo

SEQ ID NO: 193494 - DNA, 44 bp, Homo sapiens; identical to SEQ ID NO: 99769
  chr20:62550219-62550263
  hypo

SEQ ID NO: 193495 - DNA, 536 bp, Homo sapiens
  chr20:62550637-62551173
  hypo
gctctgagaacagagcgaggcatgtgatcgatgcatcgtaactgttgagcaaatgaatgctgagctgtgatggcaccgacgtgtccggggagaggacgcacccggctgtgtggacatgtgcccagggcccaggacagcgccacggaagaggacacacccggctgtgtggacatgtgcccagggcccgggacagcgccacggaagaggacgcacccggctgtgtgcacatgtgcccagggcccgggacagcgccacggaagaggacgcacccggctgtgtgcacatgtgcccagggcccgggacagcgccacggaagaggacgcacccggctgtgtgcacatgtgcccagggcccgggacagcgccacggaagaggacgcacccggctgtgtggacatgtgcccagggcccgggacagcgccacggaagaggacgcacaggacagcgccacggaagaggacgcacccggctgtgtgcacatgtgcccagggcccgggacagcgccacggaagaggacgcacccggctgtgtgcacat

SEQ ID NO: 193496 - DNA, 591 bp, Homo sapiens
  chr20:62551401-62551992
  hypo
ccagggcccgggacagcgccacggaagaggacgcacccggctgtgtggacatgtgcccagggcccgggacagcgccacggaagaggacgcacaggacagcgccacggaagaggacgcacccggctgtgtggcaggggaggttcccaagagcaggctcagggctctggggtctgagtgagggctctccagccagcagggagcagggcagggtgttgaagagacggcaggtgcgtcaggggctgacgtgggacccggcactctgtgctctgtgtctgcccgggaacaggtagtcctgcgtcggaccgggaagtgtggtgggtgtggtgggggaaggggctggcgtcagcagggctctcgtccgccaacgtctggtggggatgcccgccatgcgggggcctcaggctacagccagggctgtgaaggagccgaggtcatagagtggctgccctggcgtagggagggaggacacgggtccccgccatttcagaagctcagcgtccctgcacgtgtgcggtcttgtctgcctaggcatgtgtgcgggccctggggctgctgccagcagaacggactgggatacgctggatttgtaaa

SEQ ID NO: 193497 - DNA, 30 bp, Homo sapiens
  chr20:62555211-62555241
  hypo
gctcttgagccagaacgacctggccgtttt

SEQ ID NO: 193498 - DNA, 95 bp, Homo sapiens
  chr20:62556212-62556307
  hypo
cctgcttggccacactggcgtgccccaactcacctgtgttatagcttgtactgtgttcggccattcccgagctcatgtaccgcactcaagatcaa

SEQ ID NO: 193499 - DNA, 31 bp, Homo sapiens; identical to SEQ ID NO: 99772
  chr20:62560382-62560413
  hypo

SEQ ID NO: 193500 - DNA, 30 bp, Homo sapiens; identical to SEQ ID NO: 99773
  chr20:62560803-62560833
  hypo

SEQ ID NO: 193501 - DNA, 1176 bp, Homo sapiens
  chr20:62562216-62563392
  hypo
tctgcggcctcctcacgtgctgctactgctgctgctgtctgtgctgctgcttcaactgctgctgcgggaagtgtaagcccaaggcgcctgaaggcgaggagacggagttctacgtgtcccccgaggatctggaggcacagctgcagtctgacgagaggggtgagtgcccgccccagggcccgtgtgtgtgtgtggggcagagccagaatgggccctgaatggtgtcaacctgtcttgtcaaacaggagggcactgacactgtgccgcgagtgtttgtggtggcagctgggactgttgaggtgtgaacgtggaccctgaggtaaagcaggcgcatagagctgtccccgccgtgacctgcggtagccgtagatcccagggactgcgaggcggggcagggcggcaggcagttggggcggggctgagggccgagggctggcggtgacccaaggcgacggaggaaagccgtgtggggtggaggtcagcgagtagcctctcccggtggagagtttgtccaggtgcccgaaagtcgctccacaggaccagcgttgggtgcgcgccaggctgtggccctcgtgcagtgccctgtgtgcttgcttttcagaggccacagacacgccgatcgtcatacagccggcatccgccaccgagaccacccagctcacagccgactcccaccccagctaccacactgacgggttcaactaaatccaggaggagctgtggtcagaggaggagccggcgcctggccacgccaaccttagaatcatgaactgtagtcacagagatgggaaggcagcctcctgcctgccctggccttgctggggcccctcctgcctccacgcccacccagcgtcgacccttgacccacgaagtgcgtagcatgcagtatttaaagcagtgtagctacggtcttctgtttttttcccttttttaatagcatgtatggggttctgttccatgtctgtgttgtggacattccgcggcatgaccgcgtgaactgcacggtggagctgcctcagggctgtcggtcaggttggtccagtgaggggtgactgcagccggtcaggtgggcgaggagaaggggggctgcccctttcctacctgtgcttgaggggccggaggcaggtgctgcctggcagagctgtgttaccgtcttggcctcggggtctggtccac

SEQ ID NO: 193502 - DNA, 30 bp, Homo sapiens; identical to SEQ ID NO: 33676
  chr20:62564940-62564970
  hypo

SEQ ID NO: 193503 - DNA, 30 bp, Homo sapiens; identical to SEQ ID NO: 99776
  chr20:62569089-62569119
  hypo

SEQ ID NO: 193504 - DNA, 245 bp, Homo sapiens; identical to SEQ ID NO: 99777
  chr20:62571649-62571894
  hypo

SEQ ID NO: 193505 - DNA, 30 bp, Homo sapiens; identical to SEQ ID NO: 99778
  chr20:62572219-62572249
  hypo

SEQ ID NO: 193506 - DNA, 46 bp, Homo sapiens; identical to SEQ ID NO: 99779
  chr20:62572478-62572524
  hypo

SEQ ID NO: 193507 - DNA, 126 bp, Homo sapiens; identical to SEQ ID NO: 99780
  chr20:62576161-62576287
  hypo

SEQ ID NO: 193508 - DNA, 326 bp, Homo sapiens; identical to SEQ ID NO: 33679
  chr20:62578678-62579004
  hypo

SEQ ID NO: 193509 - DNA, 140 bp, Homo sapiens; identical to SEQ ID NO: 33680
  chr20:62581867-62582007
  hypo

SEQ ID NO: 193510 - DNA, 30 bp, Homo sapiens
  chr20:62582233-62582263
  hypo
gcgtgggggctcaggcgcaggcagccgtgg

SEQ ID NO: 193511 - DNA, 30 bp, Homo sapiens
  chr20:62582684-62582714
  hypo
cggaggaccactgtgcgccgtgtgcctgca

SEQ ID NO: 193512 - DNA, 387 bp, Homo sapiens; identical to SEQ ID NO: 99783
  chr20:62583700-62584087
  hypo

SEQ ID NO: 193513 - DNA, 30 bp, Homo sapiens; identical to SEQ ID NO: 33682
  chr20:62591216-62591246
  hypo

SEQ ID NO: 193514 - DNA, 30 bp, Homo sapiens; identical to SEQ ID NO: 99785
  chr20:62595844-62595874
  hypo

SEQ ID NO: 193515 - DNA, 208 bp, Homo sapiens
  chr20:62598912-62599120
  hypo
tagcaccgcctaccaccggcggctgcacaggcccacagtgagcaccgctgtcccaacacgagggcaccgggggcaggggctgcggccagctgaggacaagaacccaggaccctgggctatgtccaaggcaacccctaccctggtaaggtccttgggaactctaggggcctagctgggtacctggagacaggacgcccagggcaatggt

SEQ ID NO: 193516 - DNA, 1009 bp, Homo sapiens; identical to SEQ ID NO: 57524
  chr20:62600639-62601648
  hypo

SEQ ID NO: 193517 - DNA, 239 bp, Homo sapiens; identical to SEQ ID NO: 133379
  chr20:62605237-62605476
  hypo

SEQ ID NO: 193518 - DNA, 30 bp, Homo sapiens; identical to SEQ ID NO: 133380
  chr20:62605874-62605904
  hypo

SEQ ID NO: 193519 - DNA, 126 bp, Homo sapiens; identical to SEQ ID NO: 33685
  chr20:62608160-62608286
  hypo

SEQ ID NO: 193520 - DNA, 171 bp, Homo sapiens
  chr20:62630917-62631088
  hypo
agcatggcctgatgccgtgtgcactctccctctcatagtgatatcaagaaggcgcgactgctcctcaagtctgttcgggagacgaaccctcatcacccgccagcctggattgcatcagcccgcctggaagaagtcactgggaagctacaagtagctcggaaccttatcatg

SEQ ID NO: 193521 - DNA, 121 bp, Homo sapiens; identical to SEQ ID NO: 33687
  chr20:62631470-62631591
  hypo

SEQ ID NO: 193522 - DNA, 121 bp, Homo sapiens; identical to SEQ ID NO: 33688
  chr20:62631830-62631951
  hypo

SEQ ID NO: 193523 - DNA, 42 bp, Homo sapiens; identical to SEQ ID NO: 99793
  chr20:62635238-62635280
  hypo

SEQ ID NO: 193524 - DNA, 30 bp, Homo sapiens; identical to SEQ ID NO: 99794
  chr20:62635564-62635594
  hypo

SEQ ID NO: 193525 - DNA, 105 bp, Homo sapiens; identical to SEQ ID NO: 99795
  chr20:62639422-62639527
  hypo

SEQ ID NO: 193526 - DNA, 31 bp, Homo sapiens; identical to SEQ ID NO: 33690
  chr20:62646173-62646204
  hypo

SEQ ID NO: 193527 - DNA, 30 bp, Homo sapiens
  chr20:62646837-62646867
  hypo
gctcacggtccatgtcgtggtcccccatgt

SEQ ID NO: 193528 - DNA, 87 bp, Homo sapiens; identical to SEQ ID NO: 99797
  chr20:62651735-62651822
  hypo

SEQ ID NO: 193529 - DNA, 30 bp, Homo sapiens; identical to SEQ ID NO: 99798
  chr20:62654792-62654822
  hypo

SEQ ID NO: 193530 - DNA, 373 bp, Homo sapiens; identical to SEQ ID NO: 99799
  chr20:62662104-62662477
  hypo

SEQ ID NO: 193531 - DNA, 30 bp, Homo sapiens; identical to SEQ ID NO: 99800
  chr20:62664614-62664644
  hypo

SEQ ID NO: 193532 - DNA, 30 bp, Homo sapiens; identical to SEQ ID NO: 99801
  chr20:62665557-62665587
  hypo

SEQ ID NO: 193533 - DNA, 15 bp, Homo sapiens
  chr20:62673410-62673425
  hypo
cgcccagacctggga

SEQ ID NO: 193534 - DNA, 474 bp, Homo sapiens; identical to SEQ ID NO: 133388
  chr20:62673631-62674105
  hypo

SEQ ID NO: 193535 - DNA, 337 bp, Homo sapiens; identical to SEQ ID NO: 133389
  chr20:62679893-62680230
  hypo

SEQ ID NO: 193536 - DNA, 757 bp, Homo sapiens; identical to SEQ ID NO: 133390
  chr20:62680421-62681178
  hypo

SEQ ID NO: 193537 - DNA, 770 bp, Homo sapiens; identical to SEQ ID NO: 133392
  chr20:62694477-62695247
  hypo

SEQ ID NO: 193538 - DNA, 35 bp, Homo sapiens; identical to SEQ ID NO: 99803
  chr20:62705148-62705183
  hypo

SEQ ID NO: 193539 - DNA, 30 bp, Homo sapiens; identical to SEQ ID NO: 33693
  chr20:62713070-62713100
  hypo

SEQ ID NO: 193540 - DNA, 1131 bp, Homo sapiens; identical to SEQ ID NO: 57531
  chr20:62714665-62715796
  hypo

SEQ ID NO: 193541 - DNA, 30 bp, Homo sapiens
  chr20:62718458-62718488
  hypo
tctgtgctgtcattcgcgtgtcatcgttcg

SEQ ID NO: 193542 - DNA, 252 bp, Homo sapiens
  chr20:62722776-62723028
  hypo
acacctctgaggcttcgtgctctcagcagtggccgggtatggtgggggtgactgagctccaggagcacacagcaggtgctgggccagtgccgtgtcctggacccaagcatcttacccgcttgtttacgacgaagctttgatctgtcgagagctggccgggtgggggcatttcggtgtgccgggagcccagctggggggtccgggccagtctgtccaaggctgtgtctccgtgtgagtcgtggtccccgtgtc

SEQ ID NO: 193543 - DNA, 30 bp, Homo sapiens; identical to SEQ ID NO: 99806
  chr20:62729870-62729900
  hypo

SEQ ID NO: 193544 - DNA, 748 bp, Homo sapiens; identical to SEQ ID NO: 133395
  chr20:62733381-62734129
  hypo

SEQ ID NO: 193545 - DNA, 923 bp, Homo sapiens; identical to SEQ ID NO: 33695
  chr20:62737168-62738091
  hypo

SEQ ID NO: 193546 - DNA, 30 bp, Homo sapiens
  chr20:62742042-62742072
  hypo
acctgtccctcagtccgtgctgcgacttgg

SEQ ID NO: 193547 - DNA, 92 bp, Homo sapiens
  chr20:62766351-62766443
  hypo
tccctcagttttgtgcgtcacacacacgctccctcagttttgtgcgccacaaacacgcgcactccctcagttatgtgcgtcacaaacacaga

SEQ ID NO: 193548 - DNA, 121 bp, Homo sapiens; identical to SEQ ID NO: 99810
  chr20:62766922-62767043
  hypo

SEQ ID NO: 193549 - DNA, 79 bp, Homo sapiens
  chr20:62784587-62784666
  hypo
ggctcacaccttgctcggtttagtcgctgtctgagccttagttcctggtcataactgggctgtgcggggcttggggcct

SEQ ID NO: 193550 - DNA, 52 bp, Homo sapiens
  chr20:62796670-62796722
  hypo
gaagtaaatatcggccgctcctctcagccccttttttcgctacgtgtccgtg

SEQ ID NO: 193551 - DNA, 72 bp, Homo sapiens
  chr20:62797052-62797124
  hypo
tggtgcggggggttccgtggctgcaggtgggtttggtcctgggcatggactctgtcacgatgatgataatgg

SEQ ID NO: 193552 - DNA, 30 bp, Homo sapiens; identical to SEQ ID NO: 99811
  chr20:62817583-62817613
  hypo

SEQ ID NO: 193553 - DNA, 389 bp, Homo sapiens
  chr20:62818171-62818560
  hypo
cggcatccacgtttccgtggagagtttcctgtagcacgtggctccggcatccacgtttccgtggagacttttcctgtagcccgtggccccggcatccatgtttccgtggagagttttcctgtagcacgtggctccggcatccacgtttccgtggagagttttcctgtagcctgtggccccggcatccacgtttccgtggagagatttcctgtagcccgtggccccggcatccacgtttccgtggagacttttcctgtagcccgtggccccggcatccatgtttccgtggagagttttcctgtggcacgtggccccggcatccacgtttccgtggagagttttcctgtagcccatggccccggcatccacgtttccgtggagacttttcc

SEQ ID NO: 193554 - DNA, 30 bp, Homo sapiens
  chr20:62818785-62818815
  hypo
tgtggcacgtggccccggcatccacgtttc

SEQ ID NO: 193555 - DNA, 30 bp, Homo sapiens
  chr20:62837124-62837154
  hypo
cgagattcatcgccccgagacagctgaagg

SEQ ID NO: 193556 - DNA, 213 bp, Homo sapiens; identical to SEQ ID NO: 33696
  chr20:62839566-62839779
  hypo

SEQ ID NO: 193557 - DNA, 30 bp, Homo sapiens; identical to SEQ ID NO: 33697
  chr20:62845140-62845170
  hypo

SEQ ID NO: 193558 - DNA, 30 bp, Homo sapiens; identical to SEQ ID NO: 33698
  chr20:62845653-62845683
  hypo

SEQ ID NO: 193559 - DNA, 183 bp, Homo sapiens
  chr20:62851113-62851296
  hypo
cacaaacaccgcaaacgagaaaatgctttccccagcagcagcagctgcagcagcagccccggtgtgaagtctcccgacgcctcccagcgccacagcagcaccagcgcccccagcagctccatgacctctccccagtccagccaggcctcccgccaggacgagtgggaccggcccctggactac

SEQ ID NO: 193560 - DNA, 30 bp, Homo sapiens
  chr20:62858609-62858639
  hypo
cggggtgaacatcggcgatgctcctctgcg

SEQ ID NO: 193561 - DNA, 264 bp, Homo sapiens
  chr20:62859282-62859546
  hypo
ggcacccaccaaggacgacaaggaggaccccgagctgatgaagtacgttgggccatgctggctctttcattgcattgcggaattgagattttcgtgtgttttataatgtaaaaaaactcctactagattcccttttcattaatacaacgggtcacctaactgaccaacgccaactttcgtttctttcatttttatggaagctctcatacgctacacgttgatacctgtgaagataggagccctggatgtcgcgtggagggcatg

SEQ ID NO: 193562 - DNA, 396 bp, Homo sapiens
  chr20:62863327-62863723
  hypo
tcttcacactcagcccggaagggccagttcttccctgaggctccaggacctcagcggccctccctgcctcactcagaagccctttaacggctctgagttgggctccccttgtgtctggcttgagagagtctccaggcttctcctcccaacccttcgcccctgtactcaccccggcctctctgtacccaggtgcccagttccaggctgtgtggggctcggtcacatcagcgggaaatacgcctctcacaggagcgcatccggctgcccactggccgcccgcaggcagaaggaagggtccctcaatggctcgtcattctcctggaagtccctgaagaatgaaggaccgacctgccccaccccgggctgtgacggctctggccacgccaatgggagttt

SEQ ID NO: 193563 - DNA, 26 bp, Homo sapiens
  chr20:62867846-62867872
  hypo
cctgggatggtcgtggtgggtgaccc

SEQ ID NO: 193564 - DNA, 248 bp, Homo sapiens
  chr20:62868739-62868987
  hypo
ccaggtaggtggtgccgccccccgctcctgggctctttgcccacccaacccaaacattcgtcttggggacagtgaggcatccgtcggcactcatcaaggttgctgtcagggctgagctgacggacagcgcagtggctggcacacaggcacacttaggacgtgctggccgctcacaatgcggagtccgtgaagtcacactgtgagtgccagtgggccgccggagctggttgtcccgccagggctgtggt

SEQ ID NO: 193565 - DNA, 30 bp, Homo sapiens
  chr20:62871226-62871256
  hypo
agtctcgccaatatccgccttccgcacatg

SEQ ID NO: 193566 - DNA, 253 bp, Homo sapiens
  chr20:62871680-62871933
  hypo
atgcgaacagaatttcgatgcctatgtgagcaccctcaccgacatgtactccaaccaggacccggagaacaaggacctcctggagagcatcaagcaggctgtgaggggcatccaggtctaggccgtgtggtacccagaagtgtcccagcccaccacaccgtttacctccctcgccctgccccgcaccgtggggatgcccaactcacagtgacttcccgtttggggcccggtgtggccgcgggcgggtttatcc

SEQ ID NO: 193567 - DNA, 132 bp, Homo sapiens
  chr20:62873337-62873469
  hypo
attatttaagtgtagcgcagatgtgtgtgcttgggcgtgtttctcgtgtcgcgtttgcgtgtcggctcttgcggtggagtcctgttgctgtgagggagtgctggccgcaggcagcctcgagtcaccgccagg

SEQ ID NO: 193568 - DNA, 335 bp, Homo sapiens; identical to SEQ ID NO: 99816
  chr20:62899594-62899929
  hypo

SEQ ID NO: 193569 - DNA, 39 bp, Homo sapiens
  chr20:62912884-62912923
  hypo
aaaattgtgaataacaccgttataaacatgtgtatacaa

SEQ ID NO: 193570 - DNA, 38 bp, Homo sapiens
  chr20:62914530-62914568
  hypo
gctgtattttctgggcgctccatggatggggttaacgg

SEQ ID NO: 193571 - DNA, 30 bp, Homo sapiens; identical to SEQ ID NO: 99817
  chr21:15443092-15443122
  hypo

SEQ ID NO: 193572 - DNA, 413 bp, Homo sapiens; identical to SEQ ID NO: 99818
  chr21:15443741-15444154
  hypo

SEQ ID NO: 193573 - DNA, 361 bp, Homo sapiens
  chr21:15445157-15445518
  hypo
aggccagggactccacgacaaccccgggcccggcgcaggggctgctggaaaggcactgtggtccgtgggacgaccgcggcccactgctttctttcccgtgctgcctcaacatcccctttcaggcctggcatcctcttcccttcccccggaggccttcttggcgctttggggtgctccccgtgggcgccacacgcaccctgggtgcaagccagcgactccacaaccccattgggcagggcgagaggctgccgggaaggcactgtcgttcgaaggacctgcctcgctaccttttaccccgggctgcctcaacatccccttttaagcctaacgtcttgtccccttcccccgaggaccttcatgc

SEQ ID NO: 193574 - DNA, 145 bp, Homo sapiens
  chr21:15448688-15448833
  hypo
ggtccctgactcccccggggacttggaaaataattcggcaggtgcctcagatgtccaggacctgtactggcctgccaccaggctgggaagttcgtccccagccacccgcaaaatgcccaatacgtccccgcgggtcttgggtcaa

SEQ ID NO: 193575 - DNA, 301 bp, Homo sapiens
  chr21:15449804-15450105
  hypo
tgcgtctgtagtcacagctcctcgaaaggctgagataagaccatctcttggactcggaaggtcaaggctgtggtgagccagggtcaggccaatgcactgcagcccgggtgacagagcgagacttcgtctgaaaaaacttgaacgaataaagattgcgagtcctgcaagaaaaagatataaaggaaatgaagaaggaggtcgcgttctgaaaggaaaaatattttaaaaagaaacaatgggcggatgcggtggctcttggctgtaatcccagcaatgtgggaggtcaagtattcaagaccag

SEQ ID NO: 193576 - DNA, 330 bp, Homo sapiens
  chr21:15455716-15456046
  hypo
acttaatacatctgttctcactgtgtcctgaccacatgcccttaaagaactcgagtcgagagagtcagcaagagactttcagcattgtctcccgaaagcagtgaggtggatggcggtggagtgtcccaaaagcagtgaggtggatggcggtggagtgtcccgaaagcagagaggtggatggcggtggattgtcccgcgctcctgtggttttaggtggccacgcatggaggatagatttcaaatatttccggagaggctcgagccacagtcattcagagcatccgagctcgggatggggtttctgacagcgccttaagggcaaggaagggc

SEQ ID NO: 193577 - DNA, 30 bp, Homo sapiens
  chr21:15456396-15456426
  hypo
tctaactccgctgaccggcccaccgttcct

SEQ ID NO: 193578 - DNA, 710 bp, Homo sapiens; identical to SEQ ID NO: 13177
  chr21:15588288-15588998
  hypo

SEQ ID NO: 193579 - DNA, 30 bp, Homo sapiens
  chr21:15762868-15762898
  hypo
aatgggtacaatgtacgatattgaatgatg

SEQ ID NO: 193580 - DNA, 25 bp, Homo sapiens
  chr21:15763442-15763467
  hypo
tttttgtttgtttgtttgcttcgtt

SEQ ID NO: 193581 - DNA, 29 bp, Homo sapiens
  chr21:15869846-15869875
  hypo
aggtcgcggtgagccgagatcgcaccgct

SEQ ID NO: 193582 - DNA, 209 bp, Homo sapiens; identical to SEQ ID NO: 133402
  chr21:16130746-16130955
  hypo

SEQ ID NO: 193583 - DNA, 39 bp, Homo sapiens; identical to SEQ ID NO: 99824
  chr21:16383776-16383815
  hypo

SEQ ID NO: 193584 - DNA, 154 bp, Homo sapiens; identical to SEQ ID NO: 33705
  chr21:16408139-16408293
  hypo

SEQ ID NO: 193585 - DNA, 448 bp, Homo sapiens; identical to SEQ ID NO: 57541
  chr21:16438266-16438714
  hypo

SEQ ID NO: 193586 - DNA, 30 bp, Homo sapiens; identical to SEQ ID NO: 13180
  chr21:16488404-16488434
  hypo

SEQ ID NO: 193587 - DNA, 30 bp, Homo sapiens; identical to SEQ ID NO: 57543
  chr21:16520816-16520846
  hypo

SEQ ID NO: 193588 - DNA, 161 bp, Homo sapiens; identical to SEQ ID NO: 99829
  chr21:16580449-16580610
  hypo

SEQ ID NO: 193589 - DNA, 203 bp, Homo sapiens; identical to SEQ ID NO: 99830
  chr21:16747502-16747705
  hypo

SEQ ID NO: 193590 - DNA, 30 bp, Homo sapiens; identical to SEQ ID NO: 99831
  chr21:17046414-17046444
  hypo

SEQ ID NO: 193591 - DNA, 26 bp, Homo sapiens
  chr21:17085071-17085097
  hypo
ttgtcgcaaaaaaaaaaaaaaaaaaa

SEQ ID NO: 193592 - DNA, 31 bp, Homo sapiens; identical to SEQ ID NO: 99832
  chr21:17092853-17092884
  hypo

SEQ ID NO: 193593 - DNA, 84 bp, Homo sapiens; identical to SEQ ID NO: 57545
  chr21:17102747-17102831
  hypo

SEQ ID NO: 193594 - DNA, 30 bp, Homo sapiens
  chr21:17433770-17433800
  hypo
ctctgctcgagcacgcggccccagccgtgc

SEQ ID NO: 193595 - DNA, 30 bp, Homo sapiens; identical to SEQ ID NO: 99834
  chr21:18665435-18665465
  hypo

SEQ ID NO: 193596 - DNA, 24 bp, Homo sapiens
  chr21:18794274-18794298
  hypo
ctagaaaagggactcatgggccgg

SEQ ID NO: 193597 - DNA, 31 bp, Homo sapiens; identical to SEQ ID NO: 33707
  chr21:18824915-18824946
  hypo

SEQ ID NO: 193598 - DNA, 1362 bp, Homo sapiens; identical to SEQ ID NO: 57546
  chr21:18885046-18886408
  hypo

SEQ ID NO: 193599 - DNA, 36 bp, Homo sapiens
  chr21:18887829-18887865
  hypo
tagaaatgcattggtatgggccgggcgcggtggctc

SEQ ID NO: 193600 - DNA, 35 bp, Homo sapiens
  chr21:18888104-18888139
  hypo
cagagctagactccgtctctgaaacaaataaacaa

SEQ ID NO: 193601 - DNA, 37 bp, Homo sapiens; identical to SEQ ID NO: 99837
  chr21:18913417-18913454
  hypo

SEQ ID NO: 193602 - DNA, 31 bp, Homo sapiens; identical to SEQ ID NO: 99838
  chr21:18936385-18936416
  hypo

SEQ ID NO: 193603 - DNA, 30 bp, Homo sapiens; identical to SEQ ID NO: 33709
  chr21:18966016-18966046
  hypo

SEQ ID NO: 193604 - DNA, 31 bp, Homo sapiens; identical to SEQ ID NO: 13184
  chr21:18985139-18985170
  hypo

SEQ ID NO: 193605 - DNA, 283 bp, Homo sapiens; identical to SEQ ID NO: 133415
  chr21:18985372-18985655
  hypo

SEQ ID NO: 193606 - DNA, 19 bp, Homo sapiens
  chr21:19097025-19097044
  hypo
tttttttttttgagacggg

SEQ ID NO: 193607 - DNA, 18 bp, Homo sapiens
  chr21:19097163-19097181
  hypo
tcccgtcaccattcactc

SEQ ID NO: 193608 - DNA, 30 bp, Homo sapiens; identical to SEQ ID NO: 33711
  chr21:19139461-19139491
  hypo

SEQ ID NO: 193609 - DNA, 354 bp, Homo sapiens
  chr21:19190761-19191115
  hypo
ccatcaaacaagcatcgccatacttgcactccaacattgcacttttcctgtggaaagacacaaagctagtaaaacttaaagccaggccataggtgacactatgtccgtgtcttttttgtcctatagttgattgggttagtggcacctgaaggaaagagatttgccggcattctagtcctcctccttcgtcccccaacctcgaataatcagagggcttagcagcgaggccttttcagctaccaggttctgtcaacctagttaacgctgtgagaaacaggaaaaacgacctgcacgggacactgctttgctaacttcattgggggaacctcagatgcgcctcgcgaactcggagtt

SEQ ID NO: 193610 - DNA, 94 bp, Homo sapiens; identical to SEQ ID NO: 99842
  chr21:19274378-19274472
  hypo

SEQ ID NO: 193611 - DNA, 153 bp, Homo sapiens; identical to SEQ ID NO: 99843
  chr21:19274771-19274924
  hypo

SEQ ID NO: 193612 - DNA, 30 bp, Homo sapiens
  chr21:20617691-20617721
  hypo
agacatcacctgcctcgagggcgcacaggt

SEQ ID NO: 193613 - DNA, 215 bp, Homo sapiens
  chr21:20618216-20618431
  hypo
tgtctttgactactacgcagctagcggtgtatgccttttaggggctgcgttctttgactgtatagttactgcctggatatatggtgttgataatatttatgacagtattgagaacgtgatcggctatcgggccgggccctggatgaagtacagctgggctgtgatcactccatttctctgtgttggatgttttgtcttctcgatcgtcaagtaca

SEQ ID NO: 193614 - DNA, 121 bp, Homo sapiens; identical to SEQ ID NO: 99844
  chr21:20865923-20866044
  hypo

SEQ ID NO: 193615 - DNA, 67 bp, Homo sapiens; identical to SEQ ID NO: 99845
  chr21:21132336-21132403
  hypo

SEQ ID NO: 193616 - DNA, 30 bp, Homo sapiens
  chr21:21905483-21905513
  hypo
cctcagctcccagatcgtggtttgtaatac

SEQ ID NO: 193617 - DNA, 38 bp, Homo sapiens; identical to SEQ ID NO: 99846
  chr21:22495684-22495722
  hypo

SEQ ID NO: 193618 - DNA, 30 bp, Homo sapiens
  chr21:23203582-23203612
  hypo
ccagtgagtggagttcggccctgctggcgt

SEQ ID NO: 193619 - DNA, 30 bp, Homo sapiens
  chr21:25338253-25338283
  hypo
cacctattgacctgccgcatcagcttatct

SEQ ID NO: 193620 - DNA, 30 bp, Homo sapiens
  chr21:26386523-26386553
  hypo
tcagactggcatcaccgttgttgttaagcc

SEQ ID NO: 193621 - DNA, 706 bp, Homo sapiens; identical to SEQ ID NO: 57554
  chr21:27011414-27012120
  hypo

SEQ ID NO: 193622 - DNA, 744 bp, Homo sapiens; identical to SEQ ID NO: 133423
  chr21:27012148-27012892
  hypo

SEQ ID NO: 193623 - DNA, 30 bp, Homo sapiens
  chr21:27228584-27228614
  hypo
ttcattactctttctcgttttatttcttca

SEQ ID NO: 193624 - DNA, 24 bp, Homo sapiens
  chr21:27245269-27245293
  hypo
caccgcgcccggccaggatcatct

SEQ ID NO: 193625 - DNA, 20 bp, Homo sapiens
  chr21:27341410-27341430
  hypo
gggaggcggaggctggcgga

SEQ ID NO: 193626 - DNA, 30 bp, Homo sapiens; identical to SEQ ID NO: 13190
  chr21:27403678-27403708
  hypo

SEQ ID NO: 193627 - DNA, 33 bp, Homo sapiens; identical to SEQ ID NO: 99852
  chr21:27456834-27456867
  hypo

SEQ ID NO: 193628 - DNA, 30 bp, Homo sapiens
  chr21:27688801-27688831
  hypo
ggacgtgaatgtgctcgacatccaaaaagc

SEQ ID NO: 193629 - DNA, 31 bp, Homo sapiens; identical to SEQ ID NO: 99853
  chr21:27783697-27783728
  hypo

SEQ ID NO: 193630 - DNA, 30 bp, Homo sapiens
  chr21:29910396-29910426
  hypo
agctgaactctgaacgtgaaatgaaatcct

SEQ ID NO: 193631 - DNA, 98 bp, Homo sapiens; identical to SEQ ID NO: 99854
  chr21:30037460-30037558
  hypo

SEQ ID NO: 193632 - DNA, 30 bp, Homo sapiens
  chr21:30244499-30244529
  hypo
gtacacactgaaaggcgaggagggcagaat

SEQ ID NO: 193633 - DNA, 30 bp, Homo sapiens; identical to SEQ ID NO: 99855
  chr21:30261509-30261539
  hypo

SEQ ID NO: 193634 - DNA, 84 bp, Homo sapiens; identical to SEQ ID NO: 33717
  chr21:30294960-30295044
  hypo

SEQ ID NO: 193635 - DNA, 214 bp, Homo sapiens
  chr21:30352358-30352572
  hypo
aatctgagtcacccacgtgcacattcccagctgaggttgaacaaggcgacgttcccttatttcagctctcatactgtaaacaagtgtccttttcacagtactttttcaaatttttgtgcttttgattggtgatttcatgttttaaatggcctccaagcagcagcactgaagtgctgtctattgtatctaggcacaagaacgctatgatatgcct

SEQ ID NO: 193636 - DNA, 36 bp, Homo sapiens
  chr21:30353853-30353889
  hypo
agtgagaaagtataccgctctcggtagcatgtacaa

SEQ ID NO: 193637 - DNA, 191 bp, Homo sapiens; identical to SEQ ID NO: 33718
  chr21:30357056-30357247
  hypo

SEQ ID NO: 193638 - DNA, 43 bp, Homo sapiens; identical to SEQ ID NO: 33719
  chr21:30406900-30406943
  hypo

SEQ ID NO: 193639 - DNA, 100 bp, Homo sapiens; identical to SEQ ID NO: 33720
  chr21:30407635-30407735
  hypo

SEQ ID NO: 193640 - DNA, 43 bp, Homo sapiens
  chr21:30488429-30488472
  hypo
atgtgcaacagtaaacagtggcgacgggtagttcatgagtttt

SEQ ID NO: 193641 - DNA, 237 bp, Homo sapiens; identical to SEQ ID NO: 133443
  chr21:30670773-30671010
  hypo

SEQ ID NO: 193642 - DNA, 30 bp, Homo sapiens
  chr21:30704946-30704976
  hypo
tctgtgcacccgcttcgctctctatccgag

SEQ ID NO: 193643 - DNA, 30 bp, Homo sapiens; identical to SEQ ID NO: 57573
  chr21:30717721-30717751
  hypo

SEQ ID NO: 193644 - DNA, 274 bp, Homo sapiens
  chr21:30722367-30722641
  hypo
gaaaaacaccacaagccacaacgatcctctagattcaatatgctcacagcctgctttaaaacctcttacccagaccaacgtcactcctgtaaaaacccacttggcctaatacaaacctccacatacaatcgaaggtaaaatgtcacggcctctactgcaccccgtggttcacaagactcccaatcacatgcgtctcttactacccaaactctgctcttctggttttgatttttcaatgtctgtatacaatgccgccctgccaaatgttgggttt

SEQ ID NO: 193645 - DNA, 31 bp, Homo sapiens; identical to SEQ ID NO: 33722
  chr21:30936923-30936954
  hypo

SEQ ID NO: 193646 - DNA, 113 bp, Homo sapiens
  chr21:31023451-31023564
  hypo
ccaaaaggccagtctcgggcctgggtggggcctgcagtctctccatggaccacttctcaatgatggatgacacgtgagggttgtcaatgttaagcagccgaaacccggtcatg

SEQ ID NO: 193647 - DNA, 30 bp, Homo sapiens
  chr21:32491787-32491817
  hypo
taaaaaaaaaaaatccgctttttggaagaa

SEQ ID NO: 193648 - DNA, 86 bp, Homo sapiens
  chr21:32558509-32558595
  hypo
gatgtagcggggaagcgctctctaaagaaggggagggaggctggatctcaaatccctaggttctcaactttcgcagattcttctat

SEQ ID NO: 193649 - DNA, 30 bp, Homo sapiens; identical to SEQ ID NO: 99865
  chr21:32624259-32624289
  hypo

SEQ ID NO: 193650 - DNA, 452 bp, Homo sapiens; identical to SEQ ID NO: 133450
  chr21:32716047-32716499
  hypo

SEQ ID NO: 193651 - DNA, 27 bp, Homo sapiens
  chr21:32863450-32863477
  hypo
aagaacgaaagaaaggaagggaaggaa

SEQ ID NO: 193652 - DNA, 30 bp, Homo sapiens
  chr21:32903009-32903039
  hypo
caccagctggtcagccgcacttcgcatccc

SEQ ID NO: 193653 - DNA, 89 bp, Homo sapiens; identical to SEQ ID NO: 13211
  chr21:32931770-32931859
  hypo

SEQ ID NO: 193654 - DNA, 179 bp, Homo sapiens; identical to SEQ ID NO: 57580
  chr21:32932325-32932504
  hypo

SEQ ID NO: 193655 - DNA, 30 bp, Homo sapiens; identical to SEQ ID NO: 99870
  chr21:33034948-33034978
  hypo

SEQ ID NO: 193656 - DNA, 151 bp, Homo sapiens; identical to SEQ ID NO: 33726
  chr21:33057408-33057559
  hypo

SEQ ID NO: 193657 - DNA, 46 bp, Homo sapiens; identical to SEQ ID NO: 13213
  chr21:33058220-33058266
  hypo

SEQ ID NO: 193658 - DNA, 33 bp, Homo sapiens; identical to SEQ ID NO: 33728
  chr21:33058552-33058585
  hypo

SEQ ID NO: 193659 - DNA, 112 bp, Homo sapiens
  chr21:33058884-33058996
  hypo
taaatacccaacaaacgttagctatttttttttttaagataaattttaacaacccccccagccacggaccattaccagtctatggcctgttaggaaacgggccacacagcag

SEQ ID NO: 193660 - DNA, 102 bp, Homo sapiens; identical to SEQ ID NO: 99874
  chr21:33175426-33175528
  hypo

SEQ ID NO: 193661 - DNA, 31 bp, Homo sapiens; identical to SEQ ID NO: 99875
  chr21:33253353-33253384
  hypo

SEQ ID NO: 193662 - DNA, 140 bp, Homo sapiens; identical to SEQ ID NO: 99876
  chr21:33340683-33340823
  hypo

SEQ ID NO: 193663 - DNA, 430 bp, Homo sapiens
  chr21:33370940-33371370
  hypo
ggattgtgaagaaaccggagccccatcagccagggcccggaagcactggcatcccccacaaggaagaccccctgatgctggacatggtgcgctccttcgagtctgtggatcgcgacgaccacgtagaagtgctgtctccctctcatcactacaggattctgaactccccggtcagcttggctcgcagaaattccagcgagaggacgctgtccccgggtctgccatccggaagcatgtcgcctctccatactcctttgcatccaactctggtctcttttgctcacgaagataagaacagccccccaaaagaggagggcctgtgttgcccacctccggttcccagcaatggccccatgcagcctctggggagccccaattgtgtgaaaagccgaggccggttccctatgatgggcatcggacagatgttaag

SEQ ID NO: 193664 - DNA, 31 bp, Homo sapiens; identical to SEQ ID NO: 99878
  chr21:33415198-33415229
  hypo

SEQ ID NO: 193665 - DNA, 203 bp, Homo sapiens; identical to SEQ ID NO: 99879
  chr21:33416033-33416236
  hypo

SEQ ID NO: 193666 - DNA, 31 bp, Homo sapiens; identical to SEQ ID NO: 33730
  chr21:33523366-33523397
  hypo

SEQ ID NO: 193667 - DNA, 121 bp, Homo sapiens
  chr21:33627819-33627940
  hypo
cgggcgtgagccaccgcgcttggcattcttgggtactttttgaagtttcaaagttatttcagcaggaagacccatctagttaaagaataaatgtgtgcttggccaggcgcggtggctcacg

SEQ ID NO: 193668 - DNA, 161 bp, Homo sapiens
  chr21:33628732-33628893
  hypo
gtggctgtcacactccggtagctaaggccacctttgttcaatggctctctaccgggaggcataaaaagtacggtgacacgtgtgctggttttcccgggacaattgacatctgtcatcccgacttaattattagacattccctgtttcgcgaatgtgccctg

SEQ ID NO: 193669 - DNA, 30 bp, Homo sapiens
  chr21:33630605-33630635
  hypo
tttagggacgaataccgaaaaagctgttag

SEQ ID NO: 193670 - DNA, 30 bp, Homo sapiens
  chr21:33632908-33632938
  hypo
gaggaaggtgaactccggcaaagcagcagc

SEQ ID NO: 193671 - DNA, 34 bp, Homo sapiens; identical to SEQ ID NO: 33731
  chr21:33641297-33641331
  hypo

SEQ ID NO: 193672 - DNA, 31 bp, Homo sapiens; identical to SEQ ID NO: 33732
  chr21:33642643-33642674
  hypo

SEQ ID NO: 193673 - DNA, 31 bp, Homo sapiens; identical to SEQ ID NO: 33733
  chr21:33688988-33689019
  hypo

SEQ ID NO: 193674 - DNA, 125 bp, Homo sapiens; identical to SEQ ID NO: 33734
  chr21:33694582-33694707
  hypo

SEQ ID NO: 193675 - DNA, 34 bp, Homo sapiens
  chr21:33698085-33698119
  hypo
ctcagccctccaccgcgggcgcctgtctataagc

SEQ ID NO: 193676 - DNA, 812 bp, Homo sapiens; identical to SEQ ID NO: 99886
  chr21:33707627-33708439
  hypo

SEQ ID NO: 193677 - DNA, 172 bp, Homo sapiens; identical to SEQ ID NO: 33736
  chr21:33711060-33711232
  hypo

SEQ ID NO: 193678 - DNA, 54 bp, Homo sapiens
  chr21:33720324-33720378
  hypo
ccagttataccacaatcgcctgagacactccacctgccccggaaggactggact

SEQ ID NO: 193679 - DNA, 30 bp, Homo sapiens; identical to SEQ ID NO: 99888
  chr21:33720855-33720885
  hypo

SEQ ID NO: 193680 - DNA, 263 bp, Homo sapiens
  chr21:33721618-33721881
  hypo
attggccaactccagcgaggccacggactccatgtccaggaagaggtcggcttcggcccgggcggcctcgcatctctgctggttctgggcatccagctgctcacagtggacaaccaggcgcctgaggagatccaggaagagctgcaggaggggcgggcccacacttctgcccagctgtgaggacaagagcacgagcctcagcagggaagagacgggttcacagctaccaggcagtgacttccagggcccgtgttttcagagca

SEQ ID NO: 193681 - DNA, 30 bp, Homo sapiens; identical to SEQ ID NO: 99890
  chr21:33749971-33750001
  hypo

SEQ ID NO: 193682 - DNA, 43 bp, Homo sapiens
  chr21:33754388-33754431
  hypo
tgtgtggccctgcagccgggcttcaggacgggaagccctttcc

SEQ ID NO: 193683 - DNA, 103 bp, Homo sapiens; identical to SEQ ID NO: 99892
  chr21:33759537-33759640
  hypo

SEQ ID NO: 193684 - DNA, 584 bp, Homo sapiens; identical to SEQ ID NO: 99893
  chr21:33760390-33760974
  hypo

SEQ ID NO: 193685 - DNA, 318 bp, Homo sapiens; identical to SEQ ID NO: 33738
  chr21:33781920-33782238
  hypo

SEQ ID NO: 193686 - DNA, 159 bp, Homo sapiens; identical to SEQ ID NO: 99895
  chr21:33791605-33791764
  hypo

SEQ ID NO: 193687 - DNA, 164 bp, Homo sapiens; identical to SEQ ID NO: 33739
  chr21:33812565-33812729
  hypo

SEQ ID NO: 193688 - DNA, 30 bp, Homo sapiens
  chr21:33821591-33821621
  hypo
acgtatggacaatgacgtggctccaccatt

SEQ ID NO: 193689 - DNA, 81 bp, Homo sapiens; identical to SEQ ID NO: 99897
  chr21:33824926-33825007
  hypo

SEQ ID NO: 193690 - DNA, 30 bp, Homo sapiens; identical to SEQ ID NO: 99898
  chr21:33840125-33840155
  hypo

SEQ ID NO: 193691 - DNA, 30 bp, Homo sapiens
  chr21:33842608-33842638
  hypo
ccaaatgcgaagccccgtattccgggaagg

SEQ ID NO: 193692 - DNA, 241 bp, Homo sapiens; identical to SEQ ID NO: 33740
  chr21:33844218-33844459
  hypo

SEQ ID NO: 193693 - DNA, 16 bp, Homo sapiens
  chr21:33844758-33844774
  hypo
gcgcccggctgagagt

SEQ ID NO: 193694 - DNA, 209 bp, Homo sapiens; identical to SEQ ID NO: 99900
  chr21:33845781-33845990
  hypo

SEQ ID NO: 193695 - DNA, 66 bp, Homo sapiens; identical to SEQ ID NO: 33742
  chr21:33849055-33849121
  hypo

SEQ ID NO: 193696 - DNA, 37 bp, Homo sapiens; identical to SEQ ID NO: 99902
  chr21:33857746-33857783
  hypo

SEQ ID NO: 193697 - DNA, 86 bp, Homo sapiens; identical to SEQ ID NO: 99903
  chr21:33870147-33870233
  hypo

SEQ ID NO: 193698 - DNA, 90 bp, Homo sapiens; identical to SEQ ID NO: 33743
  chr21:33875250-33875340
  hypo

SEQ ID NO: 193699 - DNA, 149 bp, Homo sapiens; identical to SEQ ID NO: 33744
  chr21:33876125-33876274
  hypo

SEQ ID NO: 193700 - DNA, 121 bp, Homo sapiens; identical to SEQ ID NO: 99906
  chr21:33879875-33879996
  hypo

SEQ ID NO: 193701 - DNA, 28 bp, Homo sapiens
  chr21:33880055-33880083
  hypo
gcatatgtgtttgcgtgtgtgtgcatgt

SEQ ID NO: 193702 - DNA, 21 bp, Homo sapiens
  chr21:33880311-33880332
  hypo
tgtgtacgcatgcatgtgtgt

SEQ ID NO: 193703 - DNA, 31 bp, Homo sapiens; identical to SEQ ID NO: 99909
  chr21:33884693-33884724
  hypo

SEQ ID NO: 193704 - DNA, 17 bp, Homo sapiens
  chr21:33890241-33890258
  hypo
aaaaaaaaaaaaacgcg

SEQ ID NO: 193705 - DNA, 30 bp, Homo sapiens; identical to SEQ ID NO: 33745
  chr21:33898149-33898179
  hypo

SEQ ID NO: 193706 - DNA, 23 bp, Homo sapiens
  chr21:33898640-33898663
  hypo
tggagtctcactctgtcgccagg

SEQ ID NO: 193707 - DNA, 30 bp, Homo sapiens
  chr21:33905225-33905255
  hypo
caagacagggcaccacgttctcgcgctcac

SEQ ID NO: 193708 - DNA, 118 bp, Homo sapiens
  chr21:33905870-33905988
  hypo
gtgtgtctgtgtgctcgtgcatgcgtgtgtacatgtctgtgtgtctgcatgctcacatgtgtgtgtgcgtgtgtatgtgtgtgtacacatacatgcatgtgtgcgtgcgtatgctatt

SEQ ID NO: 193709 - DNA, 24 bp, Homo sapiens
  chr21:33913567-33913591
  hypo
gttaagaagtccaggccgggcgcg

SEQ ID NO: 193710 - DNA, 220 bp, Homo sapiens
  chr21:33924143-33924363
  hypo
attagagagactcaggcgtgcaccaaggaaacgtctagctatgctcttctccagcctctcaccgggctgcaggtcttagcttttagtatcactggggtgtcccgggcttttgtttgaatggctcaacctggctgcaatcattgcagccgatcgctctgccagcatctgcattgtctgcttcaaaagtcaggctcaccagagagagcaatttcttttttct

SEQ ID NO: 193711 - DNA, 30 bp, Homo sapiens
  chr21:33932797-33932827
  hypo
tttttattttatgaacgaattaaaaactag

SEQ ID NO: 193712 - DNA, 30 bp, Homo sapiens
  chr21:33933516-33933546
  hypo
gcctattttacctgacggcctaacttttat

SEQ ID NO: 193713 - DNA, 27 bp, Homo sapiens
  chr21:33945056-33945083
  hypo
ggcctaacggagcgatggggtgtggct

SEQ ID NO: 193714 - DNA, 418 bp, Homo sapiens; identical to SEQ ID NO: 99914
  chr21:33954139-33954557
  hypo

SEQ ID NO: 193715 - DNA, 30 bp, Homo sapiens; identical to SEQ ID NO: 99915
  chr21:33976508-33976538
  hypo

SEQ ID NO: 193716 - DNA, 165 bp, Homo sapiens
  chr21:33976771-33976936
  hypo
gtattataaagcagacggtgagcagcactgagcatggagtacaatgaagtgcaaagaattctcaaaggagaaagagcccaatgctggcagcacagatggcagtgaggatcgggagatacggcaggcggagcaggcaccgcaggtgggcctcgaaatgcagatggg

SEQ ID NO: 193717 - DNA, 99 bp, Homo sapiens
  chr21:33983235-33983334
  hypo
tcaggaagtatcatcccgtcaagttcaaaaactatgctgtctaatgcggcagctactcgctccacttggcgatttaaatttatttaaattaaaatgacc

SEQ ID NO: 193718 - DNA, 121 bp, Homo sapiens
  chr21:34033542-34033663
  hypo
acacttgccagcccttgccaaagcagtagcacaatggtgtgttacttgctgacagcgcaatgtgaggcaaggccccacggttccacccagcatacaagcttatggagcggctccttttgag

SEQ ID NO: 193719 - DNA, 166 bp, Homo sapiens
  chr21:34350777-34350943
  hypo
cgctgttccccggcccgggcttgtgttttacaacaggggaggggcgggcgtgaatggtctgatgattggaacaatccccccgattcaggcctacaaacgcatcttctgttccacaccgaggggacagaaaggagaaaagtgacaaagaacgcggggcggggggaat

SEQ ID NO: 193720 - DNA, 14 bp, Homo sapiens
  chr21:34392153-34392167
  hypo
actcaaaaccgagt

SEQ ID NO: 193721 - DNA, 198 bp, Homo sapiens; identical to SEQ ID NO: 57589
  chr21:34392205-34392403
  hypo

SEQ ID NO: 193722 - DNA, 638 bp, Homo sapiens; identical to SEQ ID NO: 57590
  chr21:34392436-34393074
  hypo

SEQ ID NO: 193723 - DNA, 65 bp, Homo sapiens; identical to SEQ ID NO: 13222
  chr21:34442191-34442256
  hypo

SEQ ID NO: 193724 - DNA, 1768 bp, Homo sapiens; identical to SEQ ID NO: 13223
  chr21:34442594-34444362
  hypo

SEQ ID NO: 193725 - DNA, 58 bp, Homo sapiens; identical to SEQ ID NO: 133477
  chr21:34444444-34444502
  hypo

SEQ ID NO: 193726 - DNA, 30 bp, Homo sapiens
  chr21:34459440-34459470
  hypo
ttatgaatattttaccgcagcaaaatataa

SEQ ID NO: 193727 - DNA, 30 bp, Homo sapiens
  chr21:34459842-34459872
  hypo
ctaaaactccacgggcgagaacagccaatt

SEQ ID NO: 193728 - DNA, 27 bp, Homo sapiens
  chr21:34471072-34471099
  hypo
cgaagatttaaaaaacgcagctgggtg

SEQ ID NO: 193729 - DNA, 150 bp, Homo sapiens
  chr21:34493985-34494135
  hypo
cagcagccacactctcggcccacaccccgatctgcattttcaacacggcagactggggtaggatctatggccatggaacaaaggcaggttcgcttgtaaatgctgaggcaggaacaggcagttatttaaacaagacggcattaaatctac

SEQ ID NO: 193730 - DNA, 177 bp, Homo sapiens; identical to SEQ ID NO: 99925
  chr21:34498740-34498917
  hypo

SEQ ID NO: 193731 - DNA, 157 bp, Homo sapiens
  chr21:34508476-34508633
  hypo
gtgcaggcgaggggccgtgccgattcattatgacaaaatgacatatcaaaaaggttttgctggcctgcgaaagatgcccaacagcagatatgcattatcttataagttaagaatgctgtcttttagagggttagctgttttgtttgtttgtttgttt

SEQ ID NO: 193732 - DNA, 76 bp, Homo sapiens
  chr21:34630962-34631038
  hypo
aaggagttccatatgcggggttcagcaagtgccaagtgcccgaggcaggatatgcctggcacggcacggcaggagt

SEQ ID NO: 193733 - DNA, 30 bp, Homo sapiens; identical to SEQ ID NO: 99926
  chr21:34636140-34636170
  hypo

SEQ ID NO: 193734 - DNA, 18 bp, Homo sapiens
  chr21:34641964-34641982
  hypo
tttttttttttttttatg

SEQ ID NO: 193735 - DNA, 93 bp, Homo sapiens; identical to SEQ ID NO: 99927
  chr21:34710939-34711032
  hypo

SEQ ID NO: 193736 - DNA, 33 bp, Homo sapiens; identical to SEQ ID NO: 33754
  chr21:34711331-34711364
  hypo

SEQ ID NO: 193737 - DNA, 30 bp, Homo sapiens
  chr21:34717765-34717795
  hypo
actgggaggtgggtacgatatattggaaac

SEQ ID NO: 193738 - DNA, 30 bp, Homo sapiens
  chr21:34718242-34718272
  hypo
ggcctggtgcagtggcgcatgcctatcgtc

SEQ ID NO: 193739 - DNA, 41 bp, Homo sapiens; identical to SEQ ID NO: 33755
  chr21:34745738-34745779
  hypo

SEQ ID NO: 193740 - DNA, 255 bp, Homo sapiens
  chr21:34757191-34757446
  hypo
agtttccttgatgttcgcggcgcttactgttactttcacacttagctaagtaacctttgatactgtgtggttataacataataaccacaggtcctttgtcttctctgtcaagagtgaagaattcgaaggactttaaccactggtaaaagtgtcttctcacataaaccgcatagcagcaagcattacgtgaaccagctggttattctcactaaatgggttagatacaagttacaagccgatcgcgaagctgcctag

SEQ ID NO: 193741 - DNA, 687 bp, Homo sapiens; identical to SEQ ID NO: 133485
  chr21:34776085-34776772
  hypo

SEQ ID NO: 193742 - DNA, 42 bp, Homo sapiens; identical to SEQ ID NO: 133486
  chr21:34776996-34777038
  hypo

SEQ ID NO: 193743 - DNA, 37 bp, Homo sapiens; identical to SEQ ID NO: 99931
  chr21:34921349-34921386
  hypo

SEQ ID NO: 193744 - DNA, 513 bp, Homo sapiens; identical to SEQ ID NO: 99932
  chr21:34927030-34927543
  hypo

SEQ ID NO: 193745 - DNA, 37 bp, Homo sapiens; identical to SEQ ID NO: 99933
  chr21:35045296-35045333
  hypo

SEQ ID NO: 193746 - DNA, 30 bp, Homo sapiens
  chr21:35194452-35194482
  hypo
acaggtcaacactggcgctgaaggaggccc

SEQ ID NO: 193747 - DNA, 30 bp, Homo sapiens
  chr21:35200050-35200080
  hypo
ggatgtgaaataatacggtttctgtggcac

SEQ ID NO: 193748 - DNA, 309 bp, Homo sapiens
  chr21:35204297-35204606
  hypo
gcccctgtcctgttctggagacgtgggagactcccatcgcctgtcctccttgcctgccaggggaaggcttcctgcggggcccctctccccggtgcagcctcacgtcttaccgctgagcaatggcgtctccactccagcctctttgaaacaccagcaccccctgctctcctgccttgctgcctttgttcatgacatttctcaccagcggccaaccagctccaacctctccactttcgcaagagctgggagatcccacttctggaagctctctgtgaccatcccaaccagaagcaccgtgtccctcccctg

SEQ ID NO: 193749 - DNA, 291 bp, Homo sapiens
  chr21:35258632-35258923
  hypo
gccacatcaccaagacgatccaggacactctgaaccccaagtggaattccaactgccagttcttcatccgagacctggagcaggaagtcctctgcatcactgtgttcgagagggaccagttctcaccagatggtgagtggaacgcggccctgtggttattcctccttccctggcactcgtttgcgtgggttaatgttttcttacctggggacttggtgccaggattccttcggtttccctcctgagagatgaggctggctggcacaagacgaggctctgtctcccctggag

SEQ ID NO: 193750 - DNA, 79 bp, Homo sapiens; identical to SEQ ID NO: 99935
  chr21:35286344-35286423
  hypo

SEQ ID NO: 193751 - DNA, 155 bp, Homo sapiens
  chr21:35453129-35453284
  hypo
atttgctatgatacagcgtgttgacctcgtgctagtagtttgcttacaagtcagtgcacttcgctcacgctgggtgagttgtatgttaccagaagttgtgttgatttccaagactgttttatgacaggtaatcttgtttccgtaaaataatttaa

SEQ ID NO: 193752 - DNA, 30 bp, Homo sapiens; identical to SEQ ID NO: 99936
  chr21:35498675-35498705
  hypo

SEQ ID NO: 193753 - DNA, 31 bp, Homo sapiens; identical to SEQ ID NO: 33757
  chr21:35533044-35533075
  hypo

SEQ ID NO: 193754 - DNA, 31 bp, Homo sapiens; identical to SEQ ID NO: 99938
  chr21:35559282-35559313
  hypo

SEQ ID NO: 193755 - DNA, 30 bp, Homo sapiens; identical to SEQ ID NO: 99939
  chr21:35748395-35748425
  hypo

SEQ ID NO: 193756 - DNA, 30 bp, Homo sapiens
  chr21:35779938-35779968
  hypo
agtcgggataatcaccgaattctcttcgac

SEQ ID NO: 193757 - DNA, 31 bp, Homo sapiens; identical to SEQ ID NO: 33758
  chr21:35938134-35938165
  hypo

SEQ ID NO: 193758 - DNA, 30 bp, Homo sapiens
  chr21:35940779-35940809
  hypo
ttggcgagatggcagcgatgcccggagtca

SEQ ID NO: 193759 - DNA, 101 bp, Homo sapiens
  chr21:35954875-35954976
  hypo
gtggtattggagacgcgaggaggagctgaatctggagagggcagagcgggccacgtcctcacatgcccaggcaagcatctggagcccgcgctaaatgtgct

SEQ ID NO: 193760 - DNA, 30 bp, Homo sapiens
  chr21:35967090-35967120
  hypo
aactcgccaggcctccgtgtcttcactgta

SEQ ID NO: 193761 - DNA, 248 bp, Homo sapiens; identical to SEQ ID NO: 57618
  chr21:35986731-35986979
  hypo

SEQ ID NO: 193762 - DNA, 31 bp, Homo sapiens; identical to SEQ ID NO: 99943
  chr21:36026851-36026882
  hypo

SEQ ID NO: 193763 - DNA, 95 bp, Homo sapiens; identical to SEQ ID NO: 57620
  chr21:36041933-36042028
  hypo

SEQ ID NO: 193764 - DNA, 1219 bp, Homo sapiens; identical to SEQ ID NO: 133502
  chr21:36042091-36043310
  hypo

SEQ ID NO: 193765 - DNA, 45 bp, Homo sapiens
  chr21:36072873-36072918
  hypo
gtatcattataacccttcttcacgtgcttccgcattcccatggtg

SEQ ID NO: 193766 - DNA, 78 bp, Homo sapiens
  chr21:36073648-36073726
  hypo
ggactgcacaatttggcataaaaatctcactaattgaggctcgttaaaaggcaccctgcactccgtaattgtctgctc

SEQ ID NO: 193767 - DNA, 75 bp, Homo sapiens
  chr21:36074665-36074740
  hypo
ggcgcaggctgggggcgtggcgagcagccagggctcccgcgtgtctctttcacaagcacccgccattccatatgc

SEQ ID NO: 193768 - DNA, 30 bp, Homo sapiens
  chr21:36107320-36107350
  hypo
cgaagtagaccatggcgttgggttgacgtt

SEQ ID NO: 193769 - DNA, 1782 bp, Homo sapiens; identical to SEQ ID NO: 13236
  chr21:36160096-36161878
  hypo

SEQ ID NO: 193770 - DNA, 3167 bp, Homo sapiens; identical to SEQ ID NO: 57624
  chr21:36161931-36165098
  hypo

SEQ ID NO: 193771 - DNA, 163 bp, Homo sapiens; identical to SEQ ID NO: 13238
  chr21:36171596-36171759
  hypo

SEQ ID NO: 193772 - DNA, 204 bp, Homo sapiens; identical to SEQ ID NO: 13239
  chr21:36206694-36206898
  hypo

SEQ ID NO: 193773 - DNA, 78 bp, Homo sapiens; identical to SEQ ID NO: 99951
  chr21:36221022-36221100
  hypo

SEQ ID NO: 193774 - DNA, 106 bp, Homo sapiens; identical to SEQ ID NO: 13240
  chr21:36231769-36231875
  hypo

SEQ ID NO: 193775 - DNA, 54 bp, Homo sapiens
  chr21:36236601-36236655
  hypo
actctcaagtgtttctcccagcgagctgcagccggaatagtgagaaatcacagg

SEQ ID NO: 193776 - DNA, 43 bp, Homo sapiens; identical to SEQ ID NO: 99953
  chr21:36242108-36242151
  hypo

SEQ ID NO: 193777 - DNA, 180 bp, Homo sapiens; identical to SEQ ID NO: 13241
  chr21:36252844-36253024
  hypo

SEQ ID NO: 193778 - DNA, 267 bp, Homo sapiens; identical to SEQ ID NO: 13242
  chr21:36259126-36259393
  hypo

SEQ ID NO: 193779 - DNA, 40 bp, Homo sapiens; identical to SEQ ID NO: 13244
  chr21:36265220-36265260
  hypo

SEQ ID NO: 193780 - DNA, 30 bp, Homo sapiens; identical to SEQ ID NO: 57633
  chr21:36357845-36357875
  hypo

SEQ ID NO: 193781 - DNA, 123 bp, Homo sapiens
  chr21:36394525-36394648
  hypo
gaaagagggtggaagcgtctgcaccaggtgtgtgcaggcaagggcatgttgagagataggctgggtggtaaagagaggttccttctcggtcttactcttgatggagtccgctggttttctagc

SEQ ID NO: 193782 - DNA, 30 bp, Homo sapiens; identical to SEQ ID NO: 99958
  chr21:36402117-36402147
  hypo

SEQ ID NO: 193783 - DNA, 118 bp, Homo sapiens; identical to SEQ ID NO: 13245
  chr21:36421137-36421255
  hypo

SEQ ID NO: 193784 - DNA, 132 bp, Homo sapiens; identical to SEQ ID NO: 13246
  chr21:36421463-36421595
  hypo

SEQ ID NO: 193785 - DNA, 183 bp, Homo sapiens; identical to SEQ ID NO: 33771
  chr21:36437234-36437417
  hypo

SEQ ID NO: 193786 - DNA, 144 bp, Homo sapiens
  chr21:36696252-36696396
  hypo
tgggtggatcttcttcgagtttacttcaatgacaagatccacgtcctccatgaaccccgtgttttcttcaaataaagtcctgcaggcccacgtggctgcctgggctgctggcagcagcctcttagctcccgctgcactgggttt

SEQ ID NO: 193787 - DNA, 30 bp, Homo sapiens
  chr21:36748233-36748263
  hypo
tctatagaacttgctcgtcttgcctaactg

SEQ ID NO: 193788 - DNA, 30 bp, Homo sapiens
  chr21:36790106-36790136
  hypo
acgtccacgtgttctcgtcatttagctccc

SEQ ID NO: 193789 - DNA, 30 bp, Homo sapiens
  chr21:37258807-37258837
  hypo
caacatccttatcgcgaccaactgcccaag

SEQ ID NO: 193790 - DNA, 135 bp, Homo sapiens; identical to SEQ ID NO: 99962
  chr21:37259304-37259439
  hypo

SEQ ID NO: 193791 - DNA, 345 bp, Homo sapiens
  chr21:37405004-37405349
  hypo
ttctattgtgggggccgctgatgtgtgtgggggtcgctgttctattgtgggggccgctgatgtgtgtgggggtcgctgtcctattgtgggggccgctgatgtgtgtgggggttgctgtcctgttgtgagggccgctgatgtgtgggggtcgctgtcctgttgtggggcgctaatatgtgggggtcgctgtcctgttgtggggcgctgatgtgaggagtcgctgtcctgttgtggggcgctgatgtgtgtgggggtcgctgatctattgtgggggctgatgtgtgtgggggttgctgtcctattgtaggggccgctgatgtgtgggggtcacgtcctgttgtgggg

SEQ ID NO: 193792 - DNA, 30 bp, Homo sapiens
  chr21:37405589-37405619
  hypo
cgggacaaaacctgccgcccagcatttacc

SEQ ID NO: 193793 - DNA, 184 bp, Homo sapiens; identical to SEQ ID NO: 99964
  chr21:37411501-37411685
  hypo

SEQ ID NO: 193794 - DNA, 30 bp, Homo sapiens
  chr21:37411908-37411938
  hypo
tcccaacactaggtacgtttgcatgcacct

SEQ ID NO: 193795 - DNA, 33 bp, Homo sapiens; identical to SEQ ID NO: 99965
  chr21:37413158-37413191
  hypo

SEQ ID NO: 193796 - DNA, 178 bp, Homo sapiens; identical to SEQ ID NO: 99966
  chr21:37417894-37418072
  hypo

SEQ ID NO: 193797 - DNA, 19 bp, Homo sapiens
  chr21:37430872-37430891
  hypo
gagcatgctggctcacgcc

SEQ ID NO: 193798 - DNA, 139 bp, Homo sapiens; identical to SEQ ID NO: 99968
  chr21:37431010-37431149
  hypo

SEQ ID NO: 193799 - DNA, 30 bp, Homo sapiens
  chr21:37499159-37499189
  hypo
gatgggagtcaagagcgctttctttaaggc

SEQ ID NO: 193800 - DNA, 30 bp, Homo sapiens; identical to SEQ ID NO: 33774
  chr21:37504740-37504770
  hypo

SEQ ID NO: 193801 - DNA, 43 bp, Homo sapiens; identical to SEQ ID NO: 99970
  chr21:37514436-37514479
  hypo

SEQ ID NO: 193802 - DNA, 93 bp, Homo sapiens
  chr21:37527865-37527958
  hypo
tttctaaaggacgctcgggagttaaaaggagcgaggccactgcagaaatgacagccttcatccacaagtggcccacttcgggttggctggagc

SEQ ID NO: 193803 - DNA, 374 bp, Homo sapiens; identical to SEQ ID NO: 57637
  chr21:37528251-37528625
  hypo

SEQ ID NO: 193804 - DNA, 48 bp, Homo sapiens
  chr21:37571104-37571152
  hypo
ggccctcacccatcacgggctcagaggtgtgaccgagaagctggccac

SEQ ID NO: 193805 - DNA, 178 bp, Homo sapiens
  chr21:37571537-37571715
  hypo
gtttctgtacaggtgcgattgcttctctgctgtgttcctttttattacccaagtaaccggtatttcagctcacaagatgagaaaatgacaaacaggcaaaataagcgtagggctgtgtgtgcaacagtttatcataaagccatcaccaggagacgtcactgggcgccttctggagtct

SEQ ID NO: 193806 - DNA, 276 bp, Homo sapiens; identical to SEQ ID NO: 99973
  chr21:37582266-37582542
  hypo

SEQ ID NO: 193807 - DNA, 30 bp, Homo sapiens
  chr21:37583680-37583710
  hypo
cgcagcctgtggcctcgagagctagaaccc

SEQ ID NO: 193808 - DNA, 58 bp, Homo sapiens; identical to SEQ ID NO: 99974
  chr21:37612231-37612289
  hypo

SEQ ID NO: 193809 - DNA, 341 bp, Homo sapiens; identical to SEQ ID NO: 99975
  chr21:37617446-37617787
  hypo

SEQ ID NO: 193810 - DNA, 178 bp, Homo sapiens; identical to SEQ ID NO: 99976
  chr21:37618033-37618211
  hypo

SEQ ID NO: 193811 - DNA, 154 bp, Homo sapiens
  chr21:37650247-37650401
  hypo
ttttcttagggccttgttcttttaggtactggcttccctcctggacatggtttatcgaagtgatgagaaggagaaagctgtgccgttaatctcccgtctgctttactatgtttttccatacttacgcaaccacaggtaacgtcatcttcgccat

SEQ ID NO: 193812 - DNA, 30 bp, Homo sapiens
  chr21:37662532-37662562
  hypo
caggtttgggccggacgtggtgtctcatac

SEQ ID NO: 193813 - DNA, 30 bp, Homo sapiens; identical to SEQ ID NO: 99977
  chr21:37668466-37668496
  hypo

SEQ ID NO: 193814 - DNA, 30 bp, Homo sapiens
  chr21:37698233-37698263
  hypo
gggcgcagtggctcacgcctcagcactttg

SEQ ID NO: 193815 - DNA, 24 bp, Homo sapiens
  chr21:37699404-37699428
  hypo
cgcgcctggcctcaaatttaaatt

SEQ ID NO: 193816 - DNA, 90 bp, Homo sapiens; identical to SEQ ID NO: 99979
  chr21:37718543-37718633
  hypo

SEQ ID NO: 193817 - DNA, 46 bp, Homo sapiens
  chr21:37727416-37727462
  hypo
aattgtcttccacagcgttaacaatcttttccgtagatttgctgtg

SEQ ID NO: 193818 - DNA, 47 bp, Homo sapiens
  chr21:37747435-37747482
  hypo
tgcagcctcaaactccgatctcttcgagttaacgtaggacaactgct

SEQ ID NO: 193819 - DNA, 414 bp, Homo sapiens
  chr21:37750030-37750444
  hypo
caggtccagttggtgacgctgcctgtgatctcagacgcttgattcttgctgtcacatgagacgtcttaaacttgggtcatacatcattgaggaatcatttaagttctcacctctggctgcgtagtagaattacttggggagttttttaaactcccaaagtcaggctgcacctcacgttaattaagtcagcgtccttggggttagacccagataacagtatttttcaaggcctcccgggttaattccagtgcaccatcagagccaagcactgttgagttgtgtcttctgttgagtatttataaatgttgaacttgagtggttcacgaaacaaacgggatcagcatatccactttctcactggggcaagcagggggagggaggggaagcagagcggtgccccggtagagatgtaaa

SEQ ID NO: 193820 - DNA, 30 bp, Homo sapiens; identical to SEQ ID NO: 33778
  chr21:37756382-37756412
  hypo

SEQ ID NO: 193821 - DNA, 101 bp, Homo sapiens
  chr21:37758515-37758616
  hypo
aggatccacagactggcgtctgccggcgtggacaccaatgtcagggtaaactggggcagagatagacatccgggaacactgcttgaagcaatagttttcat

SEQ ID NO: 193822 - DNA, 207 bp, Homo sapiens; identical to SEQ ID NO: 33779
  chr21:37775028-37775235
  hypo

SEQ ID NO: 193823 - DNA, 137 bp, Homo sapiens; identical to SEQ ID NO: 99984
  chr21:37780708-37780845
  hypo

SEQ ID NO: 193824 - DNA, 150 bp, Homo sapiens
  chr21:37781582-37781732
  hypo
gccaccgcgccctgccaaaatgtttaccttttatttttgcttttgcttagtcacagtgccttttcctaacactgcaattaatccattaggcccatcgctcatcttccatgtcctggaaaagccactcttgctgttcgctgctgtccggtc

SEQ ID NO: 193825 - DNA, 19 bp, Homo sapiens
  chr21:37788316-37788335
  hypo
gctgcgattacaggcgtga

SEQ ID NO: 193826 - DNA, 36 bp, Homo sapiens; identical to SEQ ID NO: 99987
  chr21:37795934-37795970
  hypo

SEQ ID NO: 193827 - DNA, 31 bp, Homo sapiens; identical to SEQ ID NO: 99988
  chr21:37811705-37811736
  hypo

SEQ ID NO: 193828 - DNA, 432 bp, Homo sapiens
  chr21:37833297-37833729
  hypo
cccgctgtgcgtggccgaggtcactgagggggcccgattgtctttgtaggcagctggtggctggtaggcaggtgcggtgtttgcagtggtcgtggtggccctgggcggggcctggtagggcctgtagggtgcctcgtcctggcaggacaggcaaagcagggtgccaccaatgagcgagagggacgaggagatgaagcccaggtacagggcctggccaatctcaaacttcatgccgctgggcagcagcgggttgtagaagttctgcaccacgtcgttggtggtccaggagacggccaccatgcacaggaggccggccaggatgaagagggtgccgccgaggatggcaaaggtggtcttggcgggtgtgcccttggcgcagcgcgtgcacttcatcccgatgacggcgcaggcgcaggctatgcccgagagcag

SEQ ID NO: 193829 - DNA, 207 bp, Homo sapiens; identical to SEQ ID NO: 99990
  chr21:37847274-37847481
  hypo

SEQ ID NO: 193830 - DNA, 31 bp, Homo sapiens; identical to SEQ ID NO: 99991
  chr21:37848303-37848334
  hypo

SEQ ID NO: 193831 - DNA, 80 bp, Homo sapiens; identical to SEQ ID NO: 99992
  chr21:37855512-37855592
  hypo

SEQ ID NO: 193832 - DNA, 31 bp, Homo sapiens; identical to SEQ ID NO: 99993
  chr21:37855836-37855867
  hypo

SEQ ID NO: 193833 - DNA, 31 bp, Homo sapiens; identical to SEQ ID NO: 99994
  chr21:38016439-38016470
  hypo

SEQ ID NO: 193834 - DNA, 31 bp, Homo sapiens; identical to SEQ ID NO: 99995
  chr21:38040958-38040989
  hypo

SEQ ID NO: 193835 - DNA, 20 bp, Homo sapiens
  chr21:38089993-38090013
  hypo
tgcctcggcctaccaaagtg

SEQ ID NO: 193836 - DNA, 65 bp, Homo sapiens
  chr21:38103482-38103547
  hypo
ggtagctggtcagggaggaggcgctgaggacagagccgggggacgtgtcccttttgttggtgcaa

SEQ ID NO: 193837 - DNA, 30 bp, Homo sapiens
  chr21:38117460-38117490
  hypo
aaggtgggaggactgcgcacggccgggagc

SEQ ID NO: 193838 - DNA, 30 bp, Homo sapiens; identical to SEQ ID NO: 99997
  chr21:38118323-38118353
  hypo

SEQ ID NO: 193839 - DNA, 31 bp, Homo sapiens; identical to SEQ ID NO: 33782
  chr21:38140416-38140447
  hypo

SEQ ID NO: 193840 - DNA, 95 bp, Homo sapiens
  chr21:38163559-38163654
  hypo
gacccccacccctgccggagccgagtacacaccaacccacacatccagggctctgggcagcggtgactgttcagtgagaccgctttcagcatttg

SEQ ID NO: 193841 - DNA, 159 bp, Homo sapiens
  chr21:38175730-38175889
  hypo
tctggattccagaaacgctcgcacagggcgaccttgtgtgcagaagtttattgccaaggttccagtttatgcccacgaggcgcacagcgaggcttctggaggcagcagcttgcttttggcattcccttacagagctcagagccccgacaggttttggct

SEQ ID NO: 193842 - DNA, 203 bp, Homo sapiens
  chr21:38176468-38176671
  hypo
tcaaatgatcttccacggggtccattagttcctcttggctggtccctgggttcaatgcaacgctcccagcaggtacggtaactgccactcatctgaaactcccaagttacactctgcctcactgacaagggcatggggcgctgcctcctattctgttttgtgggttctttgatcaccagaaggaatttcgagccactgtgcta

SEQ ID NO: 193843 - DNA, 88 bp, Homo sapiens; identical to SEQ ID NO: 99999
  chr21:38179972-38180060
  hypo

SEQ ID NO: 193844 - DNA, 30 bp, Homo sapiens
  chr21:38198020-38198050
  hypo
accatctccagacgtcggcaatgccacagc

SEQ ID NO: 193845 - DNA, 28 bp, Homo sapiens
  chr21:38209182-38209210
  hypo
acatataaaaactgcacggcggctgggc

SEQ ID NO: 193846 - DNA, 74 bp, Homo sapiens; identical to SEQ ID NO: 100001
  chr21:38248310-38248384
  hypo

SEQ ID NO: 193847 - DNA, 201 bp, Homo sapiens
  chr21:38282806-38283007
  hypo
ctgcactccagcatgggggacagggcaagactctgtatggaaaaaaaaaaaaatggcgctcctgaaataggactatttttttttcctgacttcatctaaggcagggattgatcatctgacaacccttggggtgggcgtttattcagcgtgccagtaccaagcaaagcaaggctccatgcaggtttgcgaaatgcctgtctg

SEQ ID NO: 193848 - DNA, 30 bp, Homo sapiens
  chr21:38283207-38283237
  hypo
accggcacacaaaagcgaacggctctgaag

SEQ ID NO: 193849 - DNA, 245 bp, Homo sapiens
  chr21:38299535-38299780
  hypo
gcttcctcttggtatcgtgcacagtgacactgatggagccacacatgactgggttttatagtgggaatcacacgctaccatggtgtctgggtgtcgatgaaggtctccgagcacatccttcccaaatgccaagggctgaccgtcgctgaggcgagtgttttttctctttgggtcttgctactattctttccagttatatcacagtaacggagaagcacataaatcttctgcgctattcgtcataa

SEQ ID NO: 193850 - DNA, 41 bp, Homo sapiens
  chr21:38355343-38355384
  hypo
caaaaacaaaaacaaaaaaactctggcgtaagcatggtgtg

SEQ ID NO: 193851 - DNA, 199 bp, Homo sapiens; identical to SEQ ID NO: 57663
  chr21:38362191-38362390
  hypo

SEQ ID NO: 193852 - DNA, 183 bp, Homo sapiens
  chr21:38362977-38363160
  hypo
aatgcccgcatttctaccctgcccactagaaactgagggattgccacagctcccgtgaggttcagcaattccctgggacgacacagaactcagggagacactttactgttagaagattattgtaaagaacacaactcggtaacagccgagtgcaagagatgcgcagcacggggggtgaagggc

SEQ ID NO: 193853 - DNA, 31 bp, Homo sapiens; identical to SEQ ID NO: 100004
  chr21:38366029-38366060
  hypo

SEQ ID NO: 193854 - DNA, 152 bp, Homo sapiens
  chr21:38383158-38383310
  hypo
cgcacatatgttaaacgcagtgcttgcgttgtgcacatttctgttctcgtgtttcattataaaatgtgaatatttagacatttccctcagcagacaaaggatccttttggaaaacaatcaggatatttatggcattttttttttttgaggcg

SEQ ID NO: 193855 - DNA, 19 bp, Homo sapiens
  chr21:38385170-38385189
  hypo
ttttttttttttgagacgg

SEQ ID NO: 193856 - DNA, 121 bp, Homo sapiens
  chr21:38419196-38419317
  hypo
tgggtccccaagcaggccattgctgcctggcaccgcagggacccattgggagagcagctagagtggggggatatgctacagggagaaggaaatctccagctgaactggggcgagaagcctc

SEQ ID NO: 193857 - DNA, 18 bp, Homo sapiens
  chr21:38443336-38443354
  hypo
aggcgtgagccaccaggc

SEQ ID NO: 193858 - DNA, 416 bp, Homo sapiens; identical to SEQ ID NO: 133558
  chr21:38446374-38446790
  hypo

SEQ ID NO: 193859 - DNA, 74 bp, Homo sapiens; identical to SEQ ID NO: 33785
  chr21:38566695-38566769
  hypo

SEQ ID NO: 193860 - DNA, 183 bp, Homo sapiens; identical to SEQ ID NO: 100008
  chr21:38567962-38568145
  hypo

SEQ ID NO: 193861 - DNA, 116 bp, Homo sapiens
  chr21:38574612-38574728
  hypo
tcgaggctgtgtgtccgtcatcccagcccccggttggagcctgctctttgaactccgctgccttccttagcagcttctgtcctcttctgtgagtcagtcagcgagtgcttgggatc

SEQ ID NO: 193862 - DNA, 271 bp, Homo sapiens
  chr21:38603097-38603368
  hypo
cagcctgccatcgggcgggggcctgcgaagggcagtaggcaggtatcacaggtgagctcaccagatgggggaagctgccacagactggcaccacagcttcctgcaaaggggatctcccacccggaaaagcagactcggggcaaggtaggacaagtgtcccacgtcattcacagccacaatgcagacagcgagcctctggactcaggagacaagctgcctacaaacaccccggccacgtgccacacccagggcagagcgcctctgatgagca

SEQ ID NO: 193863 - DNA, 181 bp, Homo sapiens
  chr21:38603575-38603756
  hypo
gatgaaaggccactgcgtccgtcatggaagcagcagctatcccgaagaagaaacggtgtctagaaatgaatcacattactgctgaggtcagcgcttccgaagacaggctacagaggtgggagacgggagtctgagtggcccactggggtcgcgtgccctcagagcccggagaagggagacg

SEQ ID NO: 193864 - DNA, 270 bp, Homo sapiens
  chr21:38605418-38605688
  hypo
tgcctgatgtgccgacgtggagtccctctggcccgcggcctcagctgggggactctgggcccaggacaatgatgcacacgtgatgcgcatgccaccgactgtctctgacccagaagtcttgtgtcttctgccagcacccgtgaaacagtaagaggctaaatggtgagcttgtaaatagggtaaactctcagaccccatgggagattcctatcattaagcaccagagtccccgagtgaagcttacagcggagtgaacgataaattcacagg

SEQ ID NO: 193865 - DNA, 143 bp, Homo sapiens; identical to SEQ ID NO: 33786
  chr21:38605996-38606139
  hypo

SEQ ID NO: 193866 - DNA, 33 bp, Homo sapiens; identical to SEQ ID NO: 33787
  chr21:38638500-38638533
  hypo

SEQ ID NO: 193867 - DNA, 30 bp, Homo sapiens; identical to SEQ ID NO: 100012
  chr21:38643303-38643333
  hypo

SEQ ID NO: 193868 - DNA, 121 bp, Homo sapiens; identical to SEQ ID NO: 100013
  chr21:38673106-38673227
  hypo

SEQ ID NO: 193869 - DNA, 478 bp, Homo sapiens
  chr21:38823584-38824062
  hypo
gtcgaccgtagtagacggtttaatgtcctaggcctttgcattcattcactcatctctcttcctctccgtccctccatccctccctccctccatccctcccccacccattgcaacttccagtcctgcaagctccattcctgtaaacgcccacacaagtgatcttttatatcatatttttattgtaccttttccatgcctatagcacaaataatgagggttacagttgccctcattattcagcacggctgaacaggtttgcagcctaagagcagtaggctctaccgtctagcgtgggcgtgcagtaggctccaccgtctagcgtgggcgtgcagtaggctccaccgtctagcgtgggcgtgcagtaggctccaccgtctagcgtgggcgtgcagtaggctccactgtctagcgtgggcgtgcagtgtatactcagtgatgttctcacaaccatgaaatcgcctgacagtgaatttcttag

SEQ ID NO: 193870 - DNA, 155 bp, Homo sapiens
  chr21:38832659-38832814
  hypo
catggggaggcagtagcgaacaaaaggggtgggggagtcttgcggcgttcacatctcagaaatgttactgcgctatgagggagactttggcctctaatccactgttagccactagcctccagtcaaagttagagaaccaccggtcttcattcttt

SEQ ID NO: 193871 - DNA, 30 bp, Homo sapiens
  chr21:38881239-38881269
  hypo
agatctattccataccgcaaacacatacaa

SEQ ID NO: 193872 - DNA, 30 bp, Homo sapiens
  chr21:38887385-38887415
  hypo
ctgtgtatattgtaacgttaaatgaaaaaa

SEQ ID NO: 193873 - DNA, 31 bp, Homo sapiens; identical to SEQ ID NO: 33790
  chr21:38893253-38893284
  hypo

SEQ ID NO: 193874 - DNA, 363 bp, Homo sapiens; identical to SEQ ID NO: 100017
  chr21:38918381-38918744
  hypo

SEQ ID NO: 193875 - DNA, 128 bp, Homo sapiens
  chr21:38935380-38935508
  hypo
ggagaccatttttcacgcctggccggctctgtgcttaagtggccccatcgcagccagagtagcctcattacagctgaagtccctggtaggtctcctccttcctctgagcccagcgcagtgccaaggcc

SEQ ID NO: 193876 - DNA, 24 bp, Homo sapiens
  chr21:39018980-39019004
  hypo
tttttttttttgagacggagttgg

SEQ ID NO: 193877 - DNA, 215 bp, Homo sapiens
  chr21:39021858-39022073
  hypo
tgtctgcggcaccaccgcgatgtagccagaccccgcatcacctttgctaggctgtgccttgctgacatttctgcaggtgctgcttccagatgaaccagcctgggttctgatctagccacattgataatgaatgttccttttgataccgaagcacaaaactgggagaagctgagcttcttcacttatttcctatctgtttgttctatgtctctaaa

SEQ ID NO: 193878 - DNA, 30 bp, Homo sapiens; identical to SEQ ID NO: 100019
  chr21:39205185-39205215
  hypo

SEQ ID NO: 193879 - DNA, 23 bp, Homo sapiens
  chr21:39205603-39205626
  hypo
actgcacccggctgacttctcgg

SEQ ID NO: 193880 - DNA, 30 bp, Homo sapiens; identical to SEQ ID NO: 57674
  chr21:39286762-39286792
  hypo

SEQ ID NO: 193881 - DNA, 611 bp, Homo sapiens; identical to SEQ ID NO: 133569
  chr21:39288092-39288703
  hypo

SEQ ID NO: 193882 - DNA, 491 bp, Homo sapiens; identical to SEQ ID NO: 133570
  chr21:39288790-39289281
  hypo

SEQ ID NO: 193883 - DNA, 30 bp, Homo sapiens; identical to SEQ ID NO: 100022
  chr21:39578727-39578757
  hypo

SEQ ID NO: 193884 - DNA, 31 bp, Homo sapiens; identical to SEQ ID NO: 33793
  chr21:39654406-39654437
  hypo

SEQ ID NO: 193885 - DNA, 143 bp, Homo sapiens; identical to SEQ ID NO: 33794
  chr21:39726164-39726307
  hypo

SEQ ID NO: 193886 - DNA, 31 bp, Homo sapiens; identical to SEQ ID NO: 100025
  chr21:39778090-39778121
  hypo

SEQ ID NO: 193887 - DNA, 62 bp, Homo sapiens; identical to SEQ ID NO: 100026
  chr21:39800301-39800363
  hypo

SEQ ID NO: 193888 - DNA, 24 bp, Homo sapiens
  chr21:39840620-39840644
  hypo
ggcttctgccgggtgcggtggctc

SEQ ID NO: 193889 - DNA, 29 bp, Homo sapiens
  chr21:39953677-39953706
  hypo
acagaggcggccaggcgcggtggctcacg

SEQ ID NO: 193890 - DNA, 31 bp, Homo sapiens; identical to SEQ ID NO: 100027
  chr21:39959230-39959261
  hypo

SEQ ID NO: 193891 - DNA, 35 bp, Homo sapiens; identical to SEQ ID NO: 57677
  chr21:40032285-40032320
  hypo

SEQ ID NO: 193892 - DNA, 157 bp, Homo sapiens; identical to SEQ ID NO: 13270
  chr21:40032367-40032524
  hypo

SEQ ID NO: 193893 - DNA, 235 bp, Homo sapiens; identical to SEQ ID NO: 13271
  chr21:40032679-40032914
  hypo

SEQ ID NO: 193894 - DNA, 459 bp, Homo sapiens; identical to SEQ ID NO: 13272
  chr21:40032973-40033432
  hypo

SEQ ID NO: 193895 - DNA, 7 bp, Homo sapiens
  chr21:40047309-40047316
  hypo
catgacc

SEQ ID NO: 193896 - DNA, 13 bp, Homo sapiens
  chr21:40047326-40047339
  hypo
cctggacaatctt

SEQ ID NO: 193897 - DNA, 70 bp, Homo sapiens
  chr21:40047613-40047683
  hypo
gaaaaatgtacacaccgcgtctctcaactgcttggaaaaatagatgctaggatggcgcttttggacggtg

SEQ ID NO: 193898 - DNA, 165 bp, Homo sapiens
  chr21:40049305-40049470
  hypo
gagtcacagaaagttcgcgagctttggccgaaatgtctcatcagtgggagcctgaggttatctgcagcctccttccctcacagggcaactctaagaaccaaggagaggcaggcaccaaagggctctgaaaagtgcaaggatcggcctggcgcggtggcgcacgcc

SEQ ID NO: 193899 - DNA, 182 bp, Homo sapiens; identical to SEQ ID NO: 100036
  chr21:40056139-40056321
  hypo

SEQ ID NO: 193900 - DNA, 17 bp, Homo sapiens
  chr21:40075226-40075243
  hypo
accgcgcccggccagaa

SEQ ID NO: 193901 - DNA, 35 bp, Homo sapiens
  chr21:40082799-40082834
  hypo
gtgctgggattacaggcatgcgacaccgtgcctgg

SEQ ID NO: 193902 - DNA, 30 bp, Homo sapiens
  chr21:40113061-40113091
  hypo
agaataatggaatgtcgggagcccacgaaa

SEQ ID NO: 193903 - DNA, 87 bp, Homo sapiens; identical to SEQ ID NO: 33799
  chr21:40117699-40117786
  hypo

SEQ ID NO: 193904 - DNA, 18 bp, Homo sapiens
  chr21:40120547-40120565
  hypo
gcccggctccatgctgtt

SEQ ID NO: 193905 - DNA, 30 bp, Homo sapiens
  chr21:40124846-40124876
  hypo
gcgctctacacgtggcgacaccctttcctc

SEQ ID NO: 193906 - DNA, 31 bp, Homo sapiens; identical to SEQ ID NO: 33800
  chr21:40128612-40128643
  hypo

SEQ ID NO: 193907 - DNA, 182 bp, Homo sapiens; identical to SEQ ID NO: 100039
  chr21:40146603-40146785
  hypo

SEQ ID NO: 193908 - DNA, 197 bp, Homo sapiens
  chr21:40168979-40169176
  hypo
gtccctgacaccccccggcttatgcccgcttctctcccctcactgcctccgtcctcacacggccatcttctcatctccttgtatctcttctctgtgtgtctcttataaggacacttgtcatttgactcaggacccagcaggataacccaggataatctcatcttgagatccatcacttactacaactgcaaagtcct

SEQ ID NO: 193909 - DNA, 1244 bp, Homo sapiens; identical to SEQ ID NO: 133579
  chr21:40177484-40178728
  hypo

SEQ ID NO: 193910 - DNA, 330 bp, Homo sapiens
  chr21:40189391-40189721
  hypo
cttaagtggctcacacgatcttccataggtcagcactgttagtgctagtccaggcaattcttagagcaaggagcagaacgaagtgagctgattaccgcagtcaccagtaatgttggtttagtgtagcaaacaagaggcggcaggcacagagtgcgtgaaaagcaatttgtaaactggctctgaacttgggagcttaaagagctgtcatggaatctgggtcctttcttctggttgctgatactggggagggcacagggtctggccaggccagcgagggaggggtcctcggaacagcaggcttgggtggtgttggtccggcccagtgttttc

SEQ ID NO: 193911 - DNA, 244 bp, Homo sapiens
  chr21:40190267-40190511
  hypo
cacctgtcatttgctcgtaggggttagttactggggtaacactgactttaagagctctgccgtccgattgttctgttccaggttttggcacagagcaggcgccctatggaatgcagacacagaattaccccaaaggcggcctcctggacagcatgtgtccggcctccacacccagcgtactcagctctgagcaggagtttcagatgttccccaagtctcggctcagctccgtcagcgtcaccta

SEQ ID NO: 193912 - DNA, 184 bp, Homo sapiens
  chr21:40191658-40191842
  hypo
tatacctgcagctgtgctggccggcttcacaggtgtgtgtggaactccgagagcctggccgcccagtctcctgggtcctgtcccttgcttcctttcgagccacagtaccacattcaccgagggtgtttctaagctaggtacaccagtgctctacactccatgttttatgcgtggcttgctgtat

SEQ ID NO: 193913 - DNA, 44 bp, Homo sapiens; identical to SEQ ID NO: 100043
  chr21:40208389-40208433
  hypo

SEQ ID NO: 193914 - DNA, 37 bp, Homo sapiens
  chr21:40212523-40212560
  hypo
cctaaagtgctaagattccagacgtgagccaccgggc

SEQ ID NO: 193915 - DNA, 45 bp, Homo sapiens; identical to SEQ ID NO: 33805
  chr21:40278581-40278626
  hypo

SEQ ID NO: 193916 - DNA, 31 bp, Homo sapiens; identical to SEQ ID NO: 100045
  chr21:40296633-40296664
  hypo

SEQ ID NO: 193917 - DNA, 785 bp, Homo sapiens
  chr21:40316173-40316958
  hypo
cctctgtgactccagcgcactcggggtcccaattccacaccctctgcaaaggccctcgcagcctgcccgtgtctccgcctcctccccaaggtctcccctcccgcctgctcctccaacagatgggcccctggctttgcactactcctcttttcccttcctcaggactttatttttattttattttatttatttttattccggtaccacctctcagtgagacccactgtcaccccatcagcgccctctccaccctcccctgctttacttctccttatcatccagcatgcatctattcaccaatatattatttatcgcctggcttttctactaggcaaatgattctcaactggcggtgacatcgctcctcacttctcccgggggacagtgggcagtgcccggggtcacttttgattgtcacaattggaggaggcccctgacatctggtgagtggaggccagggatgctgcttaacatccttcaatgcacaggaaggcccagccacaaagcacgatccagcccaaaacgccggcagtgcctcggcagaaatgtcacctcctacaccatcaactctgtgagagcggggatttgtttgtcacgactgcgtcctggtgcccagaccaaagcctgcacatcacggtgctccgtggatgggtttgaaggagcggacctggaccagagcgtgctgtaggccacagtcagtgccggcccacccagaactggccactcagcggttacccatctctatcgctttctttcccagagtcggaaacttggaaccactttca

SEQ ID NO: 193918 - DNA, 75 bp, Homo sapiens
  chr21:40328292-40328367
  hypo
tggaacatccaccatcgtgcaccggagtccccacagcttccagtctcaataagccatggccgcaaataagcacca

SEQ ID NO: 193919 - DNA, 133 bp, Homo sapiens; identical to SEQ ID NO: 100047
  chr21:40331565-40331698
  hypo

SEQ ID NO: 193920 - DNA, 34 bp, Homo sapiens
  chr21:40333254-40333288
  hypo
ccacacatggcggggcgtggtggctcacgcctgt

SEQ ID NO: 193921 - DNA, 153 bp, Homo sapiens
  chr21:40333527-40333680
  hypo
gcaagactccatctcaaaaaaaaaaaaacaaaaaaaacatgtactatcctacagctctggaggctgaaagctcaaaaatcagcctcactgggctaaaattatggtgttggcagcgctggttccttccggaggctttaacggtgaattgttcct

SEQ ID NO: 193922 - DNA, 17 bp, Homo sapiens
  chr21:40335201-40335218
  hypo
ctgaagtgtagtggcac

SEQ ID NO: 193923 - DNA, 285 bp, Homo sapiens
  chr21:40340039-40340324
  hypo
aagaatttgccaacacgttgagtaaacttaatcatttcttccaaccagattgcatccccgagtctctccttttgggaaatttcagaacctacactgccgcccagctctctgccttcctacaactcagcccacccatgaccgcacctcattcacggcccaggtgtcagggacagggcaagggtaaggggggttcatccccctgataataagaaacccaatgctcttcctaccttcttggtagaaatcgcctctctgggacttcatgacagccgcctttcctatggc

SEQ ID NO: 193924 - DNA, 197 bp, Homo sapiens
  chr21:40348652-40348849
  hypo
aagcaggagaattgccgtggcaaccccaacctgaaaacaacgtaggcatgccaatggtgcagtgggggttcaagggcgtgattgggaaagtgttatggaagtgtctcagctagactttgatgaacgcatgggattcgtgcaggtagagatggctggaagtgctctccgggtaaaggaaccagcgcaaagaagagctc

SEQ ID NO: 193925 - DNA, 31 bp, Homo sapiens; identical to SEQ ID NO: 33808
  chr21:40352340-40352371
  hypo

SEQ ID NO: 193926 - DNA, 145 bp, Homo sapiens
  chr21:40354426-40354571
  hypo
gccatccgttcatgacgcgccctatccgtgctatgcaaatggtagccgctcacgacaatggcaatggaggaattggattttaaattttatttaactttattttagtgtattgtattttcgagacagagtcttgctctgtccccca

SEQ ID NO: 193927 - DNA, 30 bp, Homo sapiens; identical to SEQ ID NO: 100052
  chr21:40364052-40364082
  hypo

SEQ ID NO: 193928 - DNA, 428 bp, Homo sapiens
  chr21:40365998-40366426
  hypo
gctgagggtcaaggccgaaaccagctcaagatttccttcccccaccagtgccgtccctgtccccatgcagggcaatggtccacccattcccaagaaaaggcctccaactcccttcgtccagttccctgcccctgggcctgtcctcattctcgctctgctgaagttgacacaggcctcgctcctgtgcaggggtgggacgcggtgggggagctacatttagacaaggaaagggcccccaggcttctgagtgcgcgtacacacagacaggcctctgggacatattctggatggctctgggcagatggctgtgtttcctcttttttccagaaaaaaattccagacgacgcaatgatcacaaatgccaatatcctagtaattgataggactggatcacactatgtgaaaagaaaaggcgccccacaggcttt

SEQ ID NO: 193929 - DNA, 21 bp, Homo sapiens
  chr21:40421184-40421205
  hypo
atatatgcggccaggcgcggt

SEQ ID NO: 193930 - DNA, 31 bp, Homo sapiens; identical to SEQ ID NO: 100054
  chr21:40425094-40425125
  hypo

SEQ ID NO: 193931 - DNA, 41 bp, Homo sapiens; identical to SEQ ID NO: 100055
  chr21:40425339-40425380
  hypo

SEQ ID NO: 193932 - DNA, 146 bp, Homo sapiens
  chr21:40431055-40431201
  hypo
tctttcatacacgcagtctcctcccacatccaccagctgaatggaggagatgggaaggccctggaaaatggaaccaccgtaaggcaggagcctgggtccctgagtgatgctgtggagtagactttctcccccgcaagtttctgcca

SEQ ID NO: 193933 - DNA, 55 bp, Homo sapiens; identical to SEQ ID NO: 100057
  chr21:40433690-40433745
  hypo

SEQ ID NO: 193934 - DNA, 202 bp, Homo sapiens; identical to SEQ ID NO: 100058
  chr21:40434518-40434720
  hypo

SEQ ID NO: 193935 - DNA, 30 bp, Homo sapiens
  chr21:40445620-40445650
  hypo
acgatgtcaccggtccgaggacaggtgtac

SEQ ID NO: 193936 - DNA, 27 bp, Homo sapiens
  chr21:40451977-40452004
  hypo
atggtaagagtaagtactggtcgggcg

SEQ ID NO: 193937 - DNA, 43 bp, Homo sapiens
  chr21:40453321-40453364
  hypo
aaggagggccaagtgcggtggctcacgtctataatcccagcac

SEQ ID NO: 193938 - DNA, 47 bp, Homo sapiens; identical to SEQ ID NO: 100061
  chr21:40463108-40463155
  hypo

SEQ ID NO: 193939 - DNA, 230 bp, Homo sapiens; identical to SEQ ID NO: 100062
  chr21:40465399-40465629
  hypo

SEQ ID NO: 193940 - DNA, 137 bp, Homo sapiens; identical to SEQ ID NO: 100063
  chr21:40479890-40480027
  hypo

SEQ ID NO: 193941 - DNA, 30 bp, Homo sapiens; identical to SEQ ID NO: 33810
  chr21:40480267-40480297
  hypo

SEQ ID NO: 193942 - DNA, 149 bp, Homo sapiens; identical to SEQ ID NO: 33811
  chr21:40480500-40480649
  hypo

SEQ ID NO: 193943 - DNA, 63 bp, Homo sapiens; identical to SEQ ID NO: 100066
  chr21:40488783-40488846
  hypo

SEQ ID NO: 193944 - DNA, 30 bp, Homo sapiens; identical to SEQ ID NO: 100067
  chr21:40489849-40489879
  hypo

SEQ ID NO: 193945 - DNA, 84 bp, Homo sapiens; identical to SEQ ID NO: 100068
  chr21:40490343-40490427
  hypo

SEQ ID NO: 193946 - DNA, 30 bp, Homo sapiens
  chr21:40492802-40492832
  hypo
aaagaccgaaaatagcgagtagatggtcac

SEQ ID NO: 193947 - DNA, 30 bp, Homo sapiens
  chr21:40493340-40493370
  hypo
gcagtgatgctgccacgcattttcatgcac

SEQ ID NO: 193948 - DNA, 349 bp, Homo sapiens; identical to SEQ ID NO: 33813
  chr21:40506195-40506544
  hypo

SEQ ID NO: 193949 - DNA, 162 bp, Homo sapiens; identical to SEQ ID NO: 100070
  chr21:40510521-40510683
  hypo

SEQ ID NO: 193950 - DNA, 42 bp, Homo sapiens; identical to SEQ ID NO: 100071
  chr21:40510982-40511024
  hypo

SEQ ID NO: 193951 - DNA, 202 bp, Homo sapiens; identical to SEQ ID NO: 100072
  chr21:40525157-40525359
  hypo

SEQ ID NO: 193952 - DNA, 66 bp, Homo sapiens
  chr21:40580602-40580668
  hypo
gcggttctcatgcctcgtgcctataggtgggattacaggcaagcgccaacacgggctaattttttt

SEQ ID NO: 193953 - DNA, 28 bp, Homo sapiens
  chr21:40646951-40646979
  hypo
cagagctagactccgtctcaaaaaaaaa

SEQ ID NO: 193954 - DNA, 217 bp, Homo sapiens
  chr21:40693345-40693562
  hypo
gggcaacgagagcgaaactccatctcaagaaaaaaaaaaaaacaaactaaagacggacttgtccttcctctctcaaaatcctccagaggctcccatcagacccagaggaaaaggccaagtccacacgatctggcctctctctggtttgtcttacctctcacctgactgctccccttctcatagtgctccagcctcactgtggcgtgacctggcccac

SEQ ID NO: 193955 - DNA, 35 bp, Homo sapiens; identical to SEQ ID NO: 33815
  chr21:40697449-40697484
  hypo

SEQ ID NO: 193956 - DNA, 37 bp, Homo sapiens
  chr21:40705586-40705623
  hypo
ggattacaggcgtgagccacagcgcctggtcgacgac

SEQ ID NO: 193957 - DNA, 102 bp, Homo sapiens; identical to SEQ ID NO: 57690
  chr21:40751584-40751686
  hypo

SEQ ID NO: 193958 - DNA, 524 bp, Homo sapiens
  chr21:40762266-40762790
  hypo
gagctgcggcagtcccgggacagccagtgagagaaagggacatttacctagggctgtctgccacccgggggttggggtatggagtgtatgtgggagtttaaggactttgtcatggtggggctagtttgtaggtgtttctcagcaggatgaatctcccagtgttctccagcaacagcctttgctctttatcagtcctgggaacgttcacggccgcagtttgcattcagtcctgcagggacgcacacaactggctgggtcacagagtggtcagggcatagacagaaagtagcgggggactggggaaccctcctgtgacccgtgttggaaggtgctgatccccgttgtccgccctgccagatgtccagggtgctgcagaaggacgcggagcaggagtcacagatgagagcggagatccaggacatgaagcaggagctctccacagtcaacatgatggacgagtttgccagatatgccaggctggaaagaaagatcaacaagatgacggataagctcaaaacccatgg

SEQ ID NO: 193959 - DNA, 246 bp, Homo sapiens
  chr21:40764918-40765164
  hypo
acattagtggctgtgcgtgctcatctgttgtctgtggggactgggttcctaggcttgaggtgctcagtctggagagttttcctggttttattttcgcatttccctgtcctcccttctgtgtggtcggttgtgtgattggcaggctgctttgctcaccagaggtgtctttacaggctgccctgatgatctcactcatttggaagtattattctgtccctgtggctgtcgtgccgagtaaatggataa

SEQ ID NO: 193960 - DNA, 194 bp, Homo sapiens; identical to SEQ ID NO: 100077
  chr21:40820652-40820846
  hypo

SEQ ID NO: 193961 - DNA, 237 bp, Homo sapiens
  chr21:40891426-40891663
  hypo
ttcaattcagtacttcggcaatggctgaaccgaagctgagatatacctgtgtcccactccaaagccacgaacagccttcccaacaagccctttcctctcggtcctggaccacagtacggttcctctacggtgcctggctggccgtgggcagtgtgcgccttggccccagagcgcctcctccgcctggctttggtcctcgcattctgtcttcagactcgatgccgttcgggccctggt

SEQ ID NO: 193962 - DNA, 90 bp, Homo sapiens; identical to SEQ ID NO: 33817
  chr21:40904966-40905056
  hypo

SEQ ID NO: 193963 - DNA, 71 bp, Homo sapiens; identical to SEQ ID NO: 13282
  chr21:40941232-40941303
  hypo

SEQ ID NO: 193964 - DNA, 87 bp, Homo sapiens
  chr21:40952125-40952212
  hypo
ctcttgtctgggcagcgggaaaggtgaactcattgggtggttacagttttctcatgaatggtttagtgccatcgcccttggttgtga

SEQ ID NO: 193965 - DNA, 31 bp, Homo sapiens; identical to SEQ ID NO: 100080
  chr21:40976657-40976688
  hypo

SEQ ID NO: 193966 - DNA, 31 bp, Homo sapiens; identical to SEQ ID NO: 100081
  chr21:41040611-41040642
  hypo

SEQ ID NO: 193967 - DNA, 31 bp, Homo sapiens; identical to SEQ ID NO: 100082
  chr21:41137924-41137955
  hypo

SEQ ID NO: 193968 - DNA, 37 bp, Homo sapiens
  chr21:41281949-41281986
  hypo
atctcaggcgatctgcccgcctcggcctcccaagcct

SEQ ID NO: 193969 - DNA, 19 bp, Homo sapiens
  chr21:41654219-41654238
  hypo
gataggtaatctaggccgg

SEQ ID NO: 193970 - DNA, 36 bp, Homo sapiens
  chr21:41711101-41711137
  hypo
cagcggtagactcccccgtcccggacctgggagctg

SEQ ID NO: 193971 - DNA, 31 bp, Homo sapiens; identical to SEQ ID NO: 33819
  chr21:41753050-41753081
  hypo

SEQ ID NO: 193972 - DNA, 31 bp, Homo sapiens; identical to SEQ ID NO: 100085
  chr21:41931090-41931121
  hypo

SEQ ID NO: 193973 - DNA, 505 bp, Homo sapiens
  chr21:42447731-42448236
  hypo
cctcccaccctccaccggtactgggtggctgccccgtgtgatgggaagcagcggtggccaggccagcccaggggctgcgggctgccccagggtggcaggacccaacgggctgggacacgcccccgtttgcgaagcgtgcagatggtgggaatgaatgaactgtaacacgaacattgttattttatccagaatcagacacctcgaagaagctgcgacccttctggggcccagacctcaggactccctgagccagagccgtgacccactgtatcacccccttggagctccacagtggctgtcgtctctgagtttttaggcaccaccatgctccccttatctagatgctggctcccaaggcggacgccgcttgtggtatgcctggtccagccacagcctcacacggagccagcgctgtgccagcacctggagctgtcggccccgccacagcagcgcgtgcctgacccacccttggcaggtgtgagatctgggccgcaggcacaagccg

SEQ ID NO: 193974 - DNA, 123 bp, Homo sapiens; identical to SEQ ID NO: 133597
  chr21:42539419-42539542
  hypo

SEQ ID NO: 193975 - DNA, 1593 bp, Homo sapiens; identical to SEQ ID NO: 133598
  chr21:42539583-42541176
  hypo

SEQ ID NO: 193976 - DNA, 30 bp, Homo sapiens
  chr21:42568717-42568747
  hypo
cctggtcttcgttgacggtgacacactgca

SEQ ID NO: 193977 - DNA, 273 bp, Homo sapiens
  chr21:42572213-42572486
  hypo
cattatttcagaatgaaatttcgtttagtttatgagtctgtccaaatatttcgatcatttaaattcagatgttagtttacctcggtttgtggagaatggactgggctgtagaaacttagaagccaagcgaatgtggactccgctgtcttcattgctgtcttgttactatggatgtcggattaggtgcacccgtgaggtcttggattgtaaccccatgttctgcaggtctcaggacctcttccctgcactgtgctagcccggccccctgtgatg

SEQ ID NO: 193978 - DNA, 30 bp, Homo sapiens
  chr21:42572758-42572788
  hypo
ttgatctgagacttccggcctccacaaccg

SEQ ID NO: 193979 - DNA, 173 bp, Homo sapiens; identical to SEQ ID NO: 100090
  chr21:42582371-42582544
  hypo

SEQ ID NO: 193980 - DNA, 30 bp, Homo sapiens
  chr21:42583516-42583546
  hypo
gggcaaacagccccgcgtggctgggctgca

SEQ ID NO: 193981 - DNA, 40 bp, Homo sapiens; identical to SEQ ID NO: 33823
  chr21:42585676-42585716
  hypo

SEQ ID NO: 193982 - DNA, 21 bp, Homo sapiens
  chr21:42591071-42591092
  hypo
gccaccgcgcccagccaattc

SEQ ID NO: 193983 - DNA, 58 bp, Homo sapiens
  chr21:42591777-42591835
  hypo
tcaccaacaaacaatcgatcggttctgcgacagacaccagctgcgtatcctctaattt

SEQ ID NO: 193984 - DNA, 95 bp, Homo sapiens; identical to SEQ ID NO: 33824
  chr21:42593385-42593480
  hypo

SEQ ID NO: 193985 - DNA, 214 bp, Homo sapiens; identical to SEQ ID NO: 33825
  chr21:42593779-42593993
  hypo

SEQ ID NO: 193986 - DNA, 44 bp, Homo sapiens; identical to SEQ ID NO: 33826
  chr21:42596857-42596901
  hypo

SEQ ID NO: 193987 - DNA, 30 bp, Homo sapiens
  chr21:42598247-42598277
  hypo
actcctacatagacacgtactttgacacag

SEQ ID NO: 193988 - DNA, 30 bp, Homo sapiens
  chr21:42608367-42608397
  hypo
agggggcaggactttcgtctgatcttgtga

SEQ ID NO: 193989 - DNA, 181 bp, Homo sapiens; identical to SEQ ID NO: 33827
  chr21:42608631-42608812
  hypo

SEQ ID NO: 193990 - DNA, 86 bp, Homo sapiens; identical to SEQ ID NO: 33828
  chr21:42609013-42609099
  hypo

SEQ ID NO: 193991 - DNA, 86 bp, Homo sapiens; identical to SEQ ID NO: 100098
  chr21:42609398-42609484
  hypo

SEQ ID NO: 193992 - DNA, 30 bp, Homo sapiens
  chr21:42613411-42613441
  hypo
atccaccacctgccacggtaacctacttcc

SEQ ID NO: 193993 - DNA, 277 bp, Homo sapiens; identical to SEQ ID NO: 100099
  chr21:42613645-42613922
  hypo

SEQ ID NO: 193994 - DNA, 30 bp, Homo sapiens; identical to SEQ ID NO: 100100
  chr21:42614166-42614196
  hypo

SEQ ID NO: 193995 - DNA, 312 bp, Homo sapiens; identical to SEQ ID NO: 33830
  chr21:42617796-42618108
  hypo

SEQ ID NO: 193996 - DNA, 30 bp, Homo sapiens
  chr21:42620403-42620433
  hypo
tgcagacctggccaccgaaactcttccccg

SEQ ID NO: 193997 - DNA, 30 bp, Homo sapiens
  chr21:42620675-42620705
  hypo
cgtggttacgtggcacgtaccacccctgat

SEQ ID NO: 193998 - DNA, 253 bp, Homo sapiens; identical to SEQ ID NO: 100102
  chr21:42629053-42629306
  hypo

SEQ ID NO: 193999 - DNA, 199 bp, Homo sapiens
  chr21:42649172-42649371
  hypo
actctgccaaagagacgtggaggccacgtcggcttgtcatggtgtcctggaagactctccagcagccagaagaaccttctgtgctgttttcactagagaagatttgagttgcagcctcttggaaagaacatgacggcacggaacgggaggagggggctcttgtatcagggcccgttgtcacatccgctctcagcttgtt

SEQ ID NO: 194000 - DNA, 308 bp, Homo sapiens; identical to SEQ ID NO: 100103
  chr21:42676098-42676406
  hypo

SEQ ID NO: 194001 - DNA, 43 bp, Homo sapiens; identical to SEQ ID NO: 100104
  chr21:42700240-42700283
  hypo

SEQ ID NO: 194002 - DNA, 184 bp, Homo sapiens; identical to SEQ ID NO: 100105
  chr21:42710364-42710548
  hypo

SEQ ID NO: 194003 - DNA, 31 bp, Homo sapiens; identical to SEQ ID NO: 100106
  chr21:42722012-42722043
  hypo

SEQ ID NO: 194004 - DNA, 181 bp, Homo sapiens; identical to SEQ ID NO: 33832
  chr21:42780051-42780232
  hypo

SEQ ID NO: 194005 - DNA, 153 bp, Homo sapiens
  chr21:42838261-42838414
  hypo
gagctccggaaggagcgggcagcggatgtggaggccggcacaacaggcatctcttcagcagagtctgggcctcccccggctgctctcctgccacgcagcccttccctccctgcacagccatgcggacccacctgcagccgccaaacacacctg

SEQ ID NO: 194006 - DNA, 57 bp, Homo sapiens
  chr21:42860317-42860374
  hypo
caccacaccgattctcgtcctccccgccggggcagtgtgacacgccatcacaccagt

SEQ ID NO: 194007 - DNA, 121 bp, Homo sapiens; identical to SEQ ID NO: 100108
  chr21:42896356-42896477
  hypo

SEQ ID NO: 194008 - DNA, 31 bp, Homo sapiens; identical to SEQ ID NO: 100109
  chr21:42896753-42896784
  hypo

SEQ ID NO: 194009 - DNA, 243 bp, Homo sapiens
  chr21:42953484-42953727
  hypo
cctccctacaccctacgcacacggcggctgttccccacgacacagcggggggcaaatgaccaccaggagccagggagtcccagggaaaggacgcagatggctcgtgtcctggaatttcatgggagccatttgaaatcatcagcaaatgacgcccgagtctataagggacctcagcgcaggggctggatgagacagggtgggcagccacaaaacagggtggtgaaggcccgaggccaggagggc

SEQ ID NO: 194010 - DNA, 30 bp, Homo sapiens
  chr21:42953965-42953995
  hypo
ggcctctgggaggaccgcgcaggctcggca

SEQ ID NO: 194011 - DNA, 30 bp, Homo sapiens
  chr21:43020507-43020537
  hypo
atgaccctcggtgatcgcctctcgaaattt

SEQ ID NO: 194012 - DNA, 165 bp, Homo sapiens; identical to SEQ ID NO: 33834
  chr21:43021069-43021234
  hypo

SEQ ID NO: 194013 - DNA, 141 bp, Homo sapiens; identical to SEQ ID NO: 100112
  chr21:43026398-43026539
  hypo

SEQ ID NO: 194014 - DNA, 467 bp, Homo sapiens
  chr21:43033365-43033832
  hypo
ctctcctacagcgtgcgtgaacgggaggccaggatggccacaggccccaggaaacgcagatctcatgggaagaggttgcagtttcagcttctggctgtggatgctccgggcaatttcatgcatttccatgagttcagagaatggaagctcccctggcccctccctaccactctttgtaaatcagctcgctccttctgttcattcatccgctcattcatccattccgcacacgtgccttattgaatccctgctatgaccaggcacagggttagatactccatggagaccagaccagtcttagcctctgcactgatgaactcaacccagaagacacacgaaaagataagccacggtgtgacgggcggacgacagagcctgcgccgagacacgggcacttcagcttgatatgtggagagtgtcggctgcaaacctccctggtctctgccgccagacgcatgccaagatgg

SEQ ID NO: 194015 - DNA, 30 bp, Homo sapiens; identical to SEQ ID NO: 100114
  chr21:43034032-43034062
  hypo

SEQ ID NO: 194016 - DNA, 23 bp, Homo sapiens
  chr21:43038245-43038268
  hypo
cgggcgcggtggcccacgcctgt

SEQ ID NO: 194017 - DNA, 30 bp, Homo sapiens
  chr21:43042138-43042168
  hypo
ttatggagacaaagacggccactgggtctg

SEQ ID NO: 194018 - DNA, 339 bp, Homo sapiens
  chr21:43050297-43050636
  hypo
cttaactcttgtttacgtcaactaacctgtggtgaactggttgcattatatgtcattttgccgaaagtcacagtttccaagaacctatcaagcaagttaagtgaagacttactgtacatacctataagaaaaagcaacaacaaaatggggagacgccccgacacatgggggtacgcctatgtggaaggttgcagaatcgctgctctcaaagttccgtgtcaggccgcctaccctgatgctgtttccttgtccacgtgagtcagttctgcagaggcctggcctggcaagcgcagccgtgacttctcgctaatcttcctgagaagccgctccaccatccat

SEQ ID NO: 194019 - DNA, 88 bp, Homo sapiens; identical to SEQ ID NO: 57704
  chr21:43067057-43067145
  hypo

SEQ ID NO: 194020 - DNA, 95 bp, Homo sapiens
  chr21:43069861-43069956
  hypo
gtggcagccccaggccgagtccgtcagcctaggttagactctggcggggcagaaggagagctttgcttcggtgtgctggggagcgagctcacttg

SEQ ID NO: 194021 - DNA, 30 bp, Homo sapiens
  chr21:43070529-43070559
  hypo
aagggactgttcctccgcgactgttcctcc

SEQ ID NO: 194022 - DNA, 57 bp, Homo sapiens
  chr21:43083099-43083156
  hypo
tgcagctgctggggacggggcatggcagcccatctttgggtccggtagtcaggaagg

SEQ ID NO: 194023 - DNA, 244 bp, Homo sapiens
  chr21:43088943-43089187
  hypo
cactggcttgcctgagctgggcggccccgcggtctaagcattagagcgacctacctgtctcatcttgccggaaaactggggataataacgcttacctcacaaggaaggtgtggggattaatgacttaatgctgcttagcgcccctgtgggtctgctgagccagccaaggagggccggctgccctgggaccggagcccagcacttgggacttccggggccctgtaggagccggggtcctggcgag

SEQ ID NO: 194024 - DNA, 63 bp, Homo sapiens; identical to SEQ ID NO: 33837
  chr21:43090565-43090628
  hypo

SEQ ID NO: 194025 - DNA, 31 bp, Homo sapiens; identical to SEQ ID NO: 100120
  chr21:43098621-43098652
  hypo

SEQ ID NO: 194026 - DNA, 30 bp, Homo sapiens; identical to SEQ ID NO: 100121
  chr21:43101935-43101965
  hypo

SEQ ID NO: 194027 - DNA, 31 bp, Homo sapiens; identical to SEQ ID NO: 33838
  chr21:43102335-43102366
  hypo

SEQ ID NO: 194028 - DNA, 194 bp, Homo sapiens; identical to SEQ ID NO: 100123
  chr21:43102604-43102798
  hypo

SEQ ID NO: 194029 - DNA, 30 bp, Homo sapiens
  chr21:43105208-43105238
  hypo
ggcctgtggctgcatcgctcccatctctgc

SEQ ID NO: 194030 - DNA, 40 bp, Homo sapiens
  chr21:43108230-43108270
  hypo
actcctgggcaagaacgtccaatgccgcaggacgtcaagg

SEQ ID NO: 194031 - DNA, 255 bp, Homo sapiens; identical to SEQ ID NO: 100125
  chr21:43109375-43109630
  hypo

SEQ ID NO: 194032 - DNA, 31 bp, Homo sapiens; identical to SEQ ID NO: 100126
  chr21:43112993-43113024
  hypo

SEQ ID NO: 194033 - DNA, 31 bp, Homo sapiens; identical to SEQ ID NO: 33840
  chr21:43143548-43143579
  hypo

SEQ ID NO: 194034 - DNA, 31 bp, Homo sapiens; identical to SEQ ID NO: 100128
  chr21:43154177-43154208
  hypo

SEQ ID NO: 194035 - DNA, 31 bp, Homo sapiens; identical to SEQ ID NO: 100129
  chr21:43160665-43160696
  hypo

SEQ ID NO: 194036 - DNA, 1193 bp, Homo sapiens; identical to SEQ ID NO: 100130
  chr21:43160961-43162154
  hypo

SEQ ID NO: 194037 - DNA, 347 bp, Homo sapiens
  chr21:43162541-43162888
  hypo
tggcacctgccacccacggacgccccaggcctagcagcctgcagagatggtgactagagctggaaggggctgctccagctcttgccccacctcgaagtggcacctcctgacctggggaggttaagtcggaagttttctatgataatcctgaagggaccgagcttctcgtttcaggaggacgttagtccagcactcaggatgaaaagttgtatttaccacaaaaatcctaccgtagtgcctggaatgctgaaaccctgcaacgagactctcctccgccctcatgtgaaacgcgtggggacttggaagtcggcggtgggaaggtgttaagaaaacggaaccctcccagt

SEQ ID NO: 194038 - DNA, 645 bp, Homo sapiens; identical to SEQ ID NO: 100132
  chr21:43164043-43164688
  hypo

SEQ ID NO: 194039 - DNA, 367 bp, Homo sapiens; identical to SEQ ID NO: 100133
  chr21:43165724-43166091
  hypo

SEQ ID NO: 194040 - DNA, 327 bp, Homo sapiens; identical to SEQ ID NO: 100134
  chr21:43166636-43166963
  hypo

SEQ ID NO: 194041 - DNA, 193 bp, Homo sapiens; identical to SEQ ID NO: 100135
  chr21:43168155-43168348
  hypo

SEQ ID NO: 194042 - DNA, 31 bp, Homo sapiens; identical to SEQ ID NO: 100136
  chr21:43169650-43169681
  hypo

SEQ ID NO: 194043 - DNA, 163 bp, Homo sapiens
  chr21:43171156-43171319
  hypo
gcagcaagaggcctttctgaaagctgcagctcagggcatgaagcattgaggttgagagcccctggcacccacaggggatggggggcggcatgtcacacacctgtatacatcgtgcttggtgtcgaagagccggctcttctccctgatgcgctctggagggagg

SEQ ID NO: 194044 - DNA, 31 bp, Homo sapiens; identical to SEQ ID NO: 100137
  chr21:43175335-43175366
  hypo

SEQ ID NO: 194045 - DNA, 162 bp, Homo sapiens; identical to SEQ ID NO: 100138
  chr21:43176653-43176815
  hypo

SEQ ID NO: 194046 - DNA, 30 bp, Homo sapiens; identical to SEQ ID NO: 100139
  chr21:43230110-43230140
  hypo

SEQ ID NO: 194047 - DNA, 30 bp, Homo sapiens; identical to SEQ ID NO: 100140
  chr21:43230654-43230684
  hypo

SEQ ID NO: 194048 - DNA, 30 bp, Homo sapiens
  chr21:43232447-43232477
  hypo
gccactcgtgcccacggattctaagactcc

SEQ ID NO: 194049 - DNA, 30 bp, Homo sapiens; identical to SEQ ID NO: 100141
  chr21:43232796-43232826
  hypo

SEQ ID NO: 194050 - DNA, 30 bp, Homo sapiens
  chr21:43236203-43236233
  hypo
cagcgagtcagaggcggccacacccccacg

SEQ ID NO: 194051 - DNA, 677 bp, Homo sapiens
  chr21:43239692-43240369
  hypo
cacactcccagttctcgctcacatcccctcccagcgccctgcagcagctgagcggcctggctgagcctggcccgtggccctggcgcctgtacccacctttcccacactcggcccgtggccccggcccccgcccccgccacacccaccttccccacactcccagttctcgctcatgtccccttccagcaccctgcagcagggtggcctggctgagcctggcccatgtccccagcacccgtacccacctttcccacactcggcacacaggtactcgcggacattgtcgtgcacacgcatgtgctccttcagcatgtccttcctggcaaaggacttcccacactgctcgcaggcgtggctcttcacacctgagaacacaggcatctgccactcagagccgagcagctccgacctgcagtggctgcaaagaggatgcaccaaggagaggggcccagcctccccagcagctagaagcgcagtaacaggggtggggtcgcctcttcagcggcctccacagagccctcccggggatcctgtgactccagtagatccctgaggacctggaggggtgagggggctgggggcgctgggctgtgagtggcagggctgataaggacgggaaaagctggagaaacagaggaaggcatgggggaggcaaggtgcgacggctctgtgtgtag

SEQ ID NO: 194052 - DNA, 112 bp, Homo sapiens; identical to SEQ ID NO: 100143
  chr21:43245252-43245364
  hypo

SEQ ID NO: 194053 - DNA, 264 bp, Homo sapiens
  chr21:43245661-43245925
  hypo
tcccgggacgcgcagcgtgtttgctggatgtttaggatccagcatctctgccaagcagccaggtgtctgaatcctgagctagtgccaggatggccccctcaccgtgcagccctcggatggatgtgctcccatggatgacatcaccctttcctctcttgggcagcgccgggcatccactgaacgtgcctgggagcacctgccatgggatcggccatgctctaacttacagaacgccagccatccactgcacggaggagaccggca

SEQ ID NO: 194054 - DNA, 544 bp, Homo sapiens; identical to SEQ ID NO: 100145
  chr21:43248404-43248948
  hypo

SEQ ID NO: 194055 - DNA, 105 bp, Homo sapiens; identical to SEQ ID NO: 100146
  chr21:43251937-43252042
  hypo

SEQ ID NO: 194056 - DNA, 119 bp, Homo sapiens; identical to SEQ ID NO: 100147
  chr21:43255596-43255715
  hypo

SEQ ID NO: 194057 - DNA, 30 bp, Homo sapiens; identical to SEQ ID NO: 100148
  chr21:43256566-43256596
  hypo

SEQ ID NO: 194058 - DNA, 31 bp, Homo sapiens; identical to SEQ ID NO: 33849
  chr21:43256882-43256913
  hypo

SEQ ID NO: 194059 - DNA, 31 bp, Homo sapiens; identical to SEQ ID NO: 100150
  chr21:43259319-43259350
  hypo

SEQ ID NO: 194060 - DNA, 154 bp, Homo sapiens
  chr21:43269264-43269418
  hypo
acagcctggcattccagtgggcgcggctgactgcagggccgcacgagagaacttcctgggatgaagtcgaggtctgtaactcagctgtggtggtgcttatacaactgtagacactcaaaagtctctaaactggcgggaacactggctcatgcct

SEQ ID NO: 194061 - DNA, 565 bp, Homo sapiens
  chr21:43271128-43271693
  hypo
ggttcctgggttcgtcggctgccaatacggttctaggagcacaccaatggccccggaggccactcacatcactctgcctactcccactgggccagaggtacaacaatgcacaaaaggcctccttttctcccaccatgcagcagcgttctctctgggagtgtccaccccagagggcacgtcactgagcaggagtgggattacgcagttaccctagaactccagtccttcacgtatccagtctgaacagtgagaactgggcaagcggccagctttctggatgtttctagcctctcttcgaaggtcttgttatctatcgagatactcatttctgagacgcaggcagcgttgggctccagtgcatagcttcagctgggtgaggtgctcgacacacactcagactctggtgggccctgggtgcattgggcgggcagggctctagaagcgccactgtgcctcgagagggacccctggcagggtcagggaggaggggctcaggggaaggagccagataggtggcagagggtgagaggcagtgtgtgtgtggcgggggcgctgacgcggctgc

SEQ ID NO: 194062 - DNA, 243 bp, Homo sapiens; identical to SEQ ID NO: 100153
  chr21:43273196-43273439
  hypo

SEQ ID NO: 194063 - DNA, 30 bp, Homo sapiens; identical to SEQ ID NO: 100154
  chr21:43274611-43274641
  hypo

SEQ ID NO: 194064 - DNA, 30 bp, Homo sapiens; identical to SEQ ID NO: 33852
  chr21:43275299-43275329
  hypo

SEQ ID NO: 194065 - DNA, 30 bp, Homo sapiens
  chr21:43277347-43277377
  hypo
ctgtgtccgcttgacgagctgagtgatggc

SEQ ID NO: 194066 - DNA, 31 bp, Homo sapiens; identical to SEQ ID NO: 33853
  chr21:43282988-43283019
  hypo

SEQ ID NO: 194067 - DNA, 30 bp, Homo sapiens
  chr21:43289076-43289106
  hypo
atgagccactgcgcccggccctcttgcccg

SEQ ID NO: 194068 - DNA, 30 bp, Homo sapiens
  chr21:43289981-43290011
  hypo
gctgactggcttctgcgcctctgtcaaagc

SEQ ID NO: 194069 - DNA, 240 bp, Homo sapiens; identical to SEQ ID NO: 33854
  chr21:43290513-43290753
  hypo

SEQ ID NO: 194070 - DNA, 31 bp, Homo sapiens; identical to SEQ ID NO: 100158
  chr21:43296430-43296461
  hypo

SEQ ID NO: 194071 - DNA, 30 bp, Homo sapiens
  chr21:43326255-43326285
  hypo
agaaataaagcatacgcttatacagaaact

SEQ ID NO: 194072 - DNA, 30 bp, Homo sapiens; identical to SEQ ID NO: 100159
  chr21:43327808-43327838
  hypo

SEQ ID NO: 194073 - DNA, 40 bp, Homo sapiens; identical to SEQ ID NO: 100160
  chr21:43340737-43340777
  hypo

SEQ ID NO: 194074 - DNA, 153 bp, Homo sapiens; identical to SEQ ID NO: 100161
  chr21:43347889-43348042
  hypo

SEQ ID NO: 194075 - DNA, 21 bp, Homo sapiens
  chr21:43355675-43355696
  hypo
aaaagttctgacactgagggc

SEQ ID NO: 194076 - DNA, 150 bp, Homo sapiens; identical to SEQ ID NO: 100163
  chr21:43364210-43364360
  hypo

SEQ ID NO: 194077 - DNA, 980 bp, Homo sapiens; identical to SEQ ID NO: 133614
  chr21:43373385-43374365
  hypo

SEQ ID NO: 194078 - DNA, 90 bp, Homo sapiens
  chr21:43376404-43376494
  hypo
ccttgccagaataaccggggtgaggaatccgagggcccagtgttccccgtgccatgtgtgcacacaggccgcctgcggctgtgtgggcag

SEQ ID NO: 194079 - DNA, 61 bp, Homo sapiens; identical to SEQ ID NO: 33856
  chr21:43386122-43386183
  hypo

SEQ ID NO: 194080 - DNA, 279 bp, Homo sapiens
  chr21:43392887-43393166
  hypo
cacaacaatgctcttcgaaatcaaacatgcgagaaagcaacgtttaattttgtttttcatttggcgtattcacatttccgtcttttgcttttggtccatgtttgctctcctttctgtgcttgtcacgggcatctggtcactcccggcctactgcattcctactctttctcatcccagttcaagcgtgttccccaggccagcctgccccttgcatctctgccaagacgttgtttctcacgcacctgggaaggtgtttcacatgcccgaacacgctgaggg

SEQ ID NO: 194081 - DNA, 88 bp, Homo sapiens
  chr21:43393500-43393588
  hypo
gaggtgcggagctgaacgcttcccgcctgaggcttcatccgcccgcaagtgcatcaggactctgcttgcaaagcgacgatcatttcct

SEQ ID NO: 194082 - DNA, 31 bp, Homo sapiens; identical to SEQ ID NO: 33858
  chr21:43441079-43441110
  hypo

SEQ ID NO: 194083 - DNA, 31 bp, Homo sapiens; identical to SEQ ID NO: 33859
  chr21:43448738-43448769
  hypo

SEQ ID NO: 194084 - DNA, 66 bp, Homo sapiens; identical to SEQ ID NO: 33860
  chr21:43481097-43481163
  hypo

SEQ ID NO: 194085 - DNA, 30 bp, Homo sapiens
  chr21:43499103-43499133
  hypo
caggtgctggtgccacggcaactcggttta

SEQ ID NO: 194086 - DNA, 31 bp, Homo sapiens; identical to SEQ ID NO: 100173
  chr21:43501956-43501987
  hypo

SEQ ID NO: 194087 - DNA, 101 bp, Homo sapiens
  chr21:43506199-43506300
  hypo
ccagtgtggacagggcgctgcgtgtccccaaggctgccgcgtgtccccaaggccgccctccctgggggatggtctggcttcaggaccggctgctgacaggg

SEQ ID NO: 194088 - DNA, 30 bp, Homo sapiens; identical to SEQ ID NO: 100174
  chr21:43524085-43524115
  hypo

SEQ ID NO: 194089 - DNA, 210 bp, Homo sapiens
  chr21:43526202-43526412
  hypo
ggtgacgcctcaggccgtgcatggccggggaggcggccctgcctctgcactcttttgactccatgactactggtgtcttcggacgccagagtcgggggagcaaccatggggcaccgcccctgcctggggaggcagcacgaggcctgagcccagcttacagggggacatccacccccgctgagagccccaccttcacggcgaggatctgta

SEQ ID NO: 194090 - DNA, 97 bp, Homo sapiens
  chr21:43544447-43544544
  hypo
gcttcagagggagcccgtgccggctctgggttggggaagtggccttctgggaaggggctcgacctagaaaggaggccagcgtcgttccaagggtgag

SEQ ID NO: 194091 - DNA, 30 bp, Homo sapiens
  chr21:43545007-43545037
  hypo
aggcatcatcatccacgctctgcggctgag

SEQ ID NO: 194092 - DNA, 235 bp, Homo sapiens
  chr21:43546440-43546675
  hypo
cgctttgtgctcagaacatgacgaacaccgtggtgaggaccacgctgaggaacgacctgtcccaggagggcatcatccaccacctgaagatcctgagccccatctactgcgccttccagaatgacctgctgacatcctccggcttcaccctggagtgggggtaagggagaaatgccccggctgccccacagccacgtgcctccagaccacctgcgctttgagagttctttagggt

SEQ ID NO: 194093 - DNA, 30 bp, Homo sapiens; identical to SEQ ID NO: 100176
  chr21:43547211-43547241
  hypo

SEQ ID NO: 194094 - DNA, 391 bp, Homo sapiens; identical to SEQ ID NO: 100177
  chr21:43547670-43548061
  hypo

SEQ ID NO: 194095 - DNA, 149 bp, Homo sapiens
  chr21:43570324-43570473
  hypo
cactggttttgatgacggcattttctgcccctgtaccgcatggtaggccagggcctccctcccacctggctacgctgcgcctccaccttcactctcagtctctgtaaagacatgttttgagtgcttggggcagtcgctgagaatattaa

SEQ ID NO: 194096 - DNA, 234 bp, Homo sapiens
  chr21:43573758-43573992
  hypo
gtttgggcagaggcaaggtttcgaacatgaatgtttgttgaacttttattatgtgctgggtggtgaaccatgcacttcacagagatgaggcccttgaatgtgctcttggcggcaggaagcgttttccttattcttcagccagagaaactgagcgcagagcgaagggagcttggccaaggtcgtccgtgagcggtgtcgggcctgacctagcacgccacacctgggcaggtcacc

SEQ ID NO: 194097 - DNA, 72 bp, Homo sapiens; identical to SEQ ID NO: 100179
  chr21:43638118-43638190
  hypo

SEQ ID NO: 194098 - DNA, 45 bp, Homo sapiens
  chr21:43675551-43675596
  hypo
atgtgtgggtgtgtgtgcatgcgcgtgtgcctgtgtgcacatggt

SEQ ID NO: 194099 - DNA, 30 bp, Homo sapiens
  chr21:43698817-43698847
  hypo
agtgaacgtaacaaacgagagccttagttc

SEQ ID NO: 194100 - DNA, 194 bp, Homo sapiens
  chr21:43699161-43699355
  hypo
ctccttcccatcccccggcctccctgctttcatggggtgtcggaagcacaatccaatctctttgtctcggatagccctccatcgaggtcccaaagacccctccagatgctggcctgcaagctgaggggcggctgtgggggctccaaggagagacggtggaagtggtcactgatgctcggcgtggaggaggagcc

SEQ ID NO: 194101 - DNA, 30 bp, Homo sapiens
  chr21:43699568-43699598
  hypo
cctcctggaacccaccggatggccttgggc

SEQ ID NO: 194102 - DNA, 115 bp, Homo sapiens
  chr21:43699803-43699918
  hypo
gtagctggtgaaagtcgctctccccatgggctgggcgcacagtgagtgctgctcagcaggctccgtgctgaagtcacagcaagccaggcccttggcctgccggagctggaagacc

SEQ ID NO: 194103 - DNA, 31 bp, Homo sapiens; identical to SEQ ID NO: 100180
  chr21:43707199-43707230
  hypo

SEQ ID NO: 194104 - DNA, 30 bp, Homo sapiens
  chr21:43717106-43717136
  hypo
ctttgtttagagaggcgaggggtttaaccg

SEQ ID NO: 194105 - DNA, 456 bp, Homo sapiens
  chr21:43725804-43726260
  hypo
gacccatcccctccactgctgggaaaaggctgggcaccgcccacactccatgcagctctctttccctggctcggaatcgctgcaggcgccacagaccagacgcgcactgttccccactcctgcttatcggccgcgcggcatccccttgtcgcagcactccagcatccatgcagccgcgcggcaccccgtcttcggagcactccagaatccatgcagagcgcagcaccccacatccagagcgctccagaatccatgaagcacgcggcaccccctcgtcagagtgctccagaatccatgaagtgcgcagcaccccttaatcggagcgctctagaacccgtgcagcgagcagcaccccacacccggagcgctccagaatccatgaagccagcagcaccccacacccggagtgctccagaatccacgcagcacgtggcatctcctcgtcatagcgttcta

SEQ ID NO: 194106 - DNA, 30 bp, Homo sapiens; identical to SEQ ID NO: 100182
  chr21:43729102-43729132
  hypo

SEQ ID NO: 194107 - DNA, 30 bp, Homo sapiens; identical to SEQ ID NO: 100183
  chr21:43729379-43729409
  hypo

SEQ ID NO: 194108 - DNA, 238 bp, Homo sapiens; identical to SEQ ID NO: 100184
  chr21:43736992-43737230
  hypo

SEQ ID NO: 194109 - DNA, 31 bp, Homo sapiens; identical to SEQ ID NO: 100185
  chr21:43738581-43738612
  hypo

SEQ ID NO: 194110 - DNA, 30 bp, Homo sapiens
  chr21:43741574-43741604
  hypo
cacatcgccaggcctcggcctttgtccttc

SEQ ID NO: 194111 - DNA, 30 bp, Homo sapiens
  chr21:43741804-43741834
  hypo
gggctgggctctgcccgatggagggcaggg

SEQ ID NO: 194112 - DNA, 33 bp, Homo sapiens
  chr21:43767095-43767128
  hypo
cccgttcacctctgccggcgggaccctcccggg

SEQ ID NO: 194113 - DNA, 425 bp, Homo sapiens
  chr21:43767523-43767948
  hypo
ccccacctctacggacggaggaggaatcatggtgtccgggaaccagacagagagtcccacagcgacgttaccttccacagacttcgggaagaagcaccagggcacttcaaagatgaagttggagaagcagcacttccgagaggcgcattcctcggggctgatgcccgggtagccacagtttcttcggtctgagacctccatgacgcactgatccgactctgccatgggacaggcacagcaccgagacccagtcaggcctgctgtgccctggaaagctccaccccttcctcctctgagagcagcgctgatttgcagcctccgtggatcatgaggtgctgcctggggcagcatcccccgggacggcctcccccggggactgtggaagtgtcggcccctgggaccgcctcccccggggactgtggaag

SEQ ID NO: 194114 - DNA, 30 bp, Homo sapiens
  chr21:43768181-43768211
  hypo
cattcagtgggcgctcgtgaacaatccacc

SEQ ID NO: 194115 - DNA, 198 bp, Homo sapiens; identical to SEQ ID NO: 100187
  chr21:43772763-43772961
  hypo

SEQ ID NO: 194116 - DNA, 30 bp, Homo sapiens; identical to SEQ ID NO: 57716
  chr21:43778879-43778909
  hypo

SEQ ID NO: 194117 - DNA, 51 bp, Homo sapiens; identical to SEQ ID NO: 100189
  chr21:43785261-43785312
  hypo

SEQ ID NO: 194118 - DNA, 258 bp, Homo sapiens; identical to SEQ ID NO: 33864
  chr21:43786490-43786748
  hypo

SEQ ID NO: 194119 - DNA, 29 bp, Homo sapiens
  chr21:43787134-43787163
  hypo
aaattgtaggcctggcgcagtggctcacg

SEQ ID NO: 194120 - DNA, 28 bp, Homo sapiens
  chr21:43787402-43787430
  hypo
cctgagcgacagattaagtctccttctg

SEQ ID NO: 194121 - DNA, 31 bp, Homo sapiens; identical to SEQ ID NO: 100192
  chr21:43790776-43790807
  hypo

SEQ ID NO: 194122 - DNA, 551 bp, Homo sapiens; identical to SEQ ID NO: 100193
  chr21:43791371-43791922
  hypo

SEQ ID NO: 194123 - DNA, 228 bp, Homo sapiens
  chr21:43815454-43815682
  hypo
caaatcatcaaggccaaaaagcgatcggaatgagaagggggcttcaacagcaggcggatcattttcccccatggtgactatttcaggacctctgacatccggctccgcctccacctctacctccttagccgaggaagaacagaaagcatttgttcccctatttatacttgtagcatcaggtgcatcttggtcatacggtaaatctttgaaattcgacagtccacacaa

SEQ ID NO: 194124 - DNA, 30 bp, Homo sapiens
  chr21:43817223-43817253
  hypo
catcagggagtgatcggaacacagccgctc

SEQ ID NO: 194125 - DNA, 30 bp, Homo sapiens
  chr21:43825348-43825378
  hypo
gcggccaccgggcaccgtccaggcattaca

SEQ ID NO: 194126 - DNA, 461 bp, Homo sapiens; identical to SEQ ID NO: 100195
  chr21:43825719-43826180
  hypo

SEQ ID NO: 194127 - DNA, 30 bp, Homo sapiens; identical to SEQ ID NO: 100196
  chr21:43826409-43826439
  hypo

SEQ ID NO: 194128 - DNA, 95 bp, Homo sapiens
  chr21:43864678-43864773
  hypo
ctggactcctgcacgcggccactgctcgggctgccgccccgggaatgtggggattttgcccaactcgtgagaaaggtacgcgcccactcttggct

SEQ ID NO: 194129 - DNA, 37 bp, Homo sapiens
  chr21:43867443-43867480
  hypo
cggaatatttccctccggctttcgcctttgtaactcc

SEQ ID NO: 194130 - DNA, 31 bp, Homo sapiens; identical to SEQ ID NO: 100198
  chr21:43962934-43962965
  hypo

SEQ ID NO: 194131 - DNA, 43 bp, Homo sapiens; identical to SEQ ID NO: 100199
  chr21:43968300-43968343
  hypo

SEQ ID NO: 194132 - DNA, 94 bp, Homo sapiens; identical to SEQ ID NO: 100200
  chr21:43969267-43969361
  hypo

SEQ ID NO: 194133 - DNA, 214 bp, Homo sapiens; identical to SEQ ID NO: 33865
  chr21:43981534-43981748
  hypo

SEQ ID NO: 194134 - DNA, 215 bp, Homo sapiens; identical to SEQ ID NO: 100202
  chr21:43983783-43983998
  hypo

SEQ ID NO: 194135 - DNA, 49 bp, Homo sapiens; identical to SEQ ID NO: 100203
  chr21:43986295-43986344
  hypo

SEQ ID NO: 194136 - DNA, 184 bp, Homo sapiens; identical to SEQ ID NO: 100204
  chr21:43988058-43988242
  hypo

SEQ ID NO: 194137 - DNA, 30 bp, Homo sapiens; identical to SEQ ID NO: 33866
  chr21:43988767-43988797
  hypo

SEQ ID NO: 194138 - DNA, 664 bp, Homo sapiens
  chr21:43991048-43991712
  hypo
agtcctgactgtccgcggagctgccgcgcccaccttgatggctgctgcgttacaccagaggcaggaccaggacctgactcctccaggctccactgcccatcagtgcctgctgcctgctcagtgaatggtcaccatggaaacggcgctcaggcctacccacccccaccaccacgccttggtcattgttccttccatgagtgagtgctgcccagcaagacaaagtacaggctccagtgggaaggccaccatgtcagccaagtcccttcccgaaggaggtgcccgcatgcttattcagtgtcactgtccactccttggcagtgactcgggtggaggcgaaacatgactaatcgtaaatcacccctgccttctcccaagtgccacacggtttgttgacacggtgtgcgcctggggcgttcacagtgcttagaatcgcagaggttgccgtttctgtacatttcatgcagagcaattaaatagggcactgcatttttcttcaagttaatttttatttattaaagtaaaacataatgtaccttagaagctagacagtcctacaagcttattatgttgtacagcggcgttccgtccccctccccagccctctctttctagaggcagccaatttcagctgcctctctctgcttacctacgtatttccatgttt

SEQ ID NO: 194139 - DNA, 30 bp, Homo sapiens
  chr21:43992012-43992042
  hypo
actccgcccactgcgcggcttggccccaga

SEQ ID NO: 194140 - DNA, 30 bp, Homo sapiens
  chr21:43999770-43999800
  hypo
cctcatggtgcccacggcgcgggccgccct

SEQ ID NO: 194141 - DNA, 134 bp, Homo sapiens; identical to SEQ ID NO: 100208
  chr21:44003046-44003180
  hypo

SEQ ID NO: 194142 - DNA, 30 bp, Homo sapiens; identical to SEQ ID NO: 100209
  chr21:44007535-44007565
  hypo

SEQ ID NO: 194143 - DNA, 31 bp, Homo sapiens; identical to SEQ ID NO: 13295
  chr21:44013673-44013704
  hypo

SEQ ID NO: 194144 - DNA, 31 bp, Homo sapiens; identical to SEQ ID NO: 33869
  chr21:44015499-44015530
  hypo

SEQ ID NO: 194145 - DNA, 30 bp, Homo sapiens
  chr21:44020835-44020865
  hypo
ttgatccaccttgaccgagatcccgcgcct

SEQ ID NO: 194146 - DNA, 30 bp, Homo sapiens
  chr21:44033428-44033458
  hypo
aagttgggggctggtcgtgctaggcacttt

SEQ ID NO: 194147 - DNA, 30 bp, Homo sapiens
  chr21:44033976-44034006
  hypo
gcaaagttggggaaccgatgtggaggcaac

SEQ ID NO: 194148 - DNA, 30 bp, Homo sapiens
  chr21:44041699-44041729
  hypo
ccgtgactgtacacccggcacatacccccg

SEQ ID NO: 194149 - DNA, 172 bp, Homo sapiens
  chr21:44042061-44042233
  hypo
ccacatacaaatcaccgcttgtttcccaggacatctcagtgccaacaactccctcgcagcacatgactcccccggcatcttccgaaggcttgtattttctccacgagccattacctcttgaaaaactttcacaaagaagacgtaagggcttaagtggcgtggaaagtgggtt

SEQ ID NO: 194150 - DNA, 161 bp, Homo sapiens
  chr21:44042440-44042601
  hypo
cggagaattcttgagcgcgtatacagacaaaaatctcaaactggtgtatgtacttactgagatttctgaaataggaaaaatctactcatacccctatgaggaataagccctcctcttgtccccattgctggcagggcacactgtctcgtgttctcttagga

SEQ ID NO: 194151 - DNA, 224 bp, Homo sapiens; identical to SEQ ID NO: 100212
  chr21:44046312-44046536
  hypo

SEQ ID NO: 194152 - DNA, 30 bp, Homo sapiens; identical to SEQ ID NO: 100213
  chr21:44046892-44046922
  hypo

SEQ ID NO: 194153 - DNA, 30 bp, Homo sapiens
  chr21:44052647-44052677
  hypo
cagcctgactcctcccggctactcaacacc

SEQ ID NO: 194154 - DNA, 135 bp, Homo sapiens
  chr21:44053074-44053209
  hypo
tcccacttcacccaccggtgcccttctctccaagcgaggttctccaccccacaccgggaccactgggccaggtcattctttgctgtggggccgtcctgtgcactgtagggtacttagcaccgtcctccatctctg

SEQ ID NO: 194155 - DNA, 29 bp, Homo sapiens
  chr21:44057376-44057405
  hypo
acacacacttacacatgcacacgcatgca

SEQ ID NO: 194156 - DNA, 148 bp, Homo sapiens; identical to SEQ ID NO: 33871
  chr21:44057644-44057792
  hypo

SEQ ID NO: 194157 - DNA, 25 bp, Homo sapiens
  chr21:44059406-44059431
  hypo
cacacacacacggaggccatatgtg

SEQ ID NO: 194158 - DNA, 110 bp, Homo sapiens
  chr21:44065363-44065473
  hypo
tctggcccaggtggccgtgctgatggcaaaacctcgtgaccaaaacaaggttatcttcccagctgcgctatccccagctcatgccgagaaggtcacgtgctacagcagag

SEQ ID NO: 194159 - DNA, 83 bp, Homo sapiens
  chr21:44065917-44066000
  hypo
cctcccaggaggccccgggctgagggatttgcagcacgctcccatcctcccagttaatcctcagctttcgggttgctcgttgt

SEQ ID NO: 194160 - DNA, 275 bp, Homo sapiens
  chr21:44069368-44069643
  hypo
ggcagatgatgcccacgggcaatggttcagtagctgccactgaccatggctctgacccgccaggccaggacggctagagcacatgctgggagctgctggccgtggcaggacacgctgcctggacaccttcttttgcctttgggaaccccctttagactttcccggggtgctcggactttccttcccagtattccaatctcgtgggaaggtgatcactcttcaaggataggccagacccttctcttctcctcatgtgccttcgcttgtccctttct

SEQ ID NO: 194161 - DNA, 30 bp, Homo sapiens
  chr21:44076599-44076629
  hypo
ccgggcagcaagtgccggtgtctcctggct

SEQ ID NO: 194162 - DNA, 299 bp, Homo sapiens; identical to SEQ ID NO: 100219
  chr21:44077993-44078292
  hypo

SEQ ID NO: 194163 - DNA, 30 bp, Homo sapiens
  chr21:44081613-44081643
  hypo
ctggcctccttcactcggatcatgccctca

SEQ ID NO: 194164 - DNA, 30 bp, Homo sapiens
  chr21:44082011-44082041
  hypo
ccaggttccgctccacggagctcagctacc

SEQ ID NO: 194165 - DNA, 206 bp, Homo sapiens
  chr21:44082372-44082578
  hypo
ctatcgtccccagcacggtgccgtgtccgggcgtgcgtgaagggccagctcacctcacagctctgcttcccaggttagctcccatccaccctccccctacctgtttcctcaccgaaggaaggggcagaaagatgccctccatgccccttccgactgttgcagagggatggaggactatggtacatacacacatatacacgcacaca

SEQ ID NO: 194166 - DNA, 30 bp, Homo sapiens; identical to SEQ ID NO: 100221
  chr21:44087114-44087144
  hypo

SEQ ID NO: 194167 - DNA, 309 bp, Homo sapiens
  chr21:44088801-44089110
  hypo
tcatgacaaatgagccctgtgcggaggcccgggatccgcgcagatgccggcgcgggggaaatgggccctgaaatcccaccgtcaggccaggcagctctgagcgtgacctggagggctgttcagacggtctgggtagccgtgtcctgcgcatgaacatcctccgtcgggagaggaattccccacggattatcagagctgctccctccaccccccgccacgtcccacgcgggccacatcaactccctctgcagcctctggccagcggctgagccctccgtgtctcccctcgttaatgcctccttcaccatc

SEQ ID NO: 194168 - DNA, 30 bp, Homo sapiens; identical to SEQ ID NO: 57719
  chr21:44095150-44095180
  hypo

SEQ ID NO: 194169 - DNA, 31 bp, Homo sapiens; identical to SEQ ID NO: 100223
  chr21:44095687-44095718
  hypo

SEQ ID NO: 194170 - DNA, 374 bp, Homo sapiens
  chr21:44099304-44099678
  hypo
ggtggaagaaccttccggaatgcctgcccgcaggctgctgctggcatcgagtctgtgtcctattttccattcactgcatgcatcctccaagtatgatttccactcggaaccctgagctgcctcatccctcgctccgtctcccctccctcccgcccagctcacactgaaatcacgcctcgcgttcagcggctggagtcctggtggattgctgcttcggggctctcagaaatccctttacttgagtcttggttttacaggaagaccatgaagcaccccccaggagctggagctcctccttctggacccagtgtctcttctcagcctcacgacgaggagacctgctcatggagctgctgcgccggcctgagctctga

SEQ ID NO: 194171 - DNA, 95 bp, Homo sapiens
  chr21:44102121-44102216
  hypo
caccagcgaagagcgcggctgtccaagcccccatccctagggctcacgcctcatgcccaaactcgcacccactttggcgccgctggagactaatg

SEQ ID NO: 194172 - DNA, 31 bp, Homo sapiens; identical to SEQ ID NO: 33876
  chr21:44109121-44109152
  hypo

SEQ ID NO: 194173 - DNA, 123 bp, Homo sapiens
  chr21:44110037-44110160
  hypo
ggatgaggatacaggcgaagaagatggagacacacgcggatgaggatacaggtgaagaagatggagacacacgcggatgaggatacaggtgaagaaggtggagacagacgcggatgaggatac

SEQ ID NO: 194174 - DNA, 129 bp, Homo sapiens
  chr21:44110391-44110520
  hypo
agaggaagttagacgcggatgaggatatagatagatgcatagggtgtggatctaaccgggtacaggtgatgcggaaacggatctagacagcgatgtggaaatggatctagacagcgatgtggatgtgat

SEQ ID NO: 194175 - DNA, 30 bp, Homo sapiens; identical to SEQ ID NO: 100225
  chr21:44112510-44112540
  hypo

SEQ ID NO: 194176 - DNA, 573 bp, Homo sapiens
  chr21:44112760-44113333
  hypo
ggctggcccgggacacgccactgatgctcttctgacccaggggcttttctctcccgcttccgtccctcttccctcgccggcaggtgacgttactggccttttcttttttggccctgcctcccccttggcttctcccctcttcctctcctccactcggtgcctggtgacatgcggccatcctcagagatgtgcttcggggcccgcacgccttgctcctcgcactcttcctgcaccggagccgcggtgcgaggcctcgggaatgctcaccgtttctctcccgccccccggccgcatgctgcagccattccctcaccacatgtccaggagggagccggcatcctttgctgactttcttgctgtgactatggtgctgcgtggaaaaggggccgtgggaaggctgggcaggtggctgctcagagccccacctgacacggtgacccacggggcctggaaattcactgccccgatttccacacaggtgcctgagctcctgcagagaatgcctgagagcgagacgcatgcccgtcaatttgtgctttcaggcgtcctaagcacacacgcctgctcttattt

SEQ ID NO: 194177 - DNA, 30 bp, Homo sapiens
  chr21:44115644-44115674
  hypo
ttttgttcccggtttcggccaagttgtgcc

SEQ ID NO: 194178 - DNA, 31 bp, Homo sapiens; identical to SEQ ID NO: 100227
  chr21:44123456-44123487
  hypo

SEQ ID NO: 194179 - DNA, 35 bp, Homo sapiens; identical to SEQ ID NO: 100228
  chr21:44129778-44129813
  hypo

SEQ ID NO: 194180 - DNA, 43 bp, Homo sapiens; identical to SEQ ID NO: 100229
  chr21:44156219-44156262
  hypo

SEQ ID NO: 194181 - DNA, 156 bp, Homo sapiens
  chr21:44159324-44159480
  hypo
gatgggcagagccgacgtccaggctccacggtagggccgtcctgctgctgtctgcagacctctcaggcttgaggccccccgccccacaggactggcccgctcctccctctggattgaggtggagcagggctggcagtgggtcgaagaggggagctg

SEQ ID NO: 194182 - DNA, 30 bp, Homo sapiens
  chr21:44163701-44163731
  hypo
tggctgagctaagcgcggaagtgcaggcaa

SEQ ID NO: 194183 - DNA, 151 bp, Homo sapiens
  chr21:44164004-44164155
  hypo
ctggggagggctccccgtaccagttgggctggggctgtgggctttgtttgcctaaaagaaaggctggtgcagttcggtacagttcaggcttgggagagtgcagtctggaggcagccaccctgcttgcgacctgcttgtcagtggtgtgact

SEQ ID NO: 194184 - DNA, 30 bp, Homo sapiens
  chr21:44172120-44172150
  hypo
aaagtgctgagccaccgcacccggcccggc

SEQ ID NO: 194185 - DNA, 30 bp, Homo sapiens
  chr21:44172642-44172672
  hypo
tgctgggattacaggcgtaagccagcccag

SEQ ID NO: 194186 - DNA, 137 bp, Homo sapiens
  chr21:44176665-44176802
  hypo
cccagggctgtggcccgtgagcgtggcctgcctctatcctccgagggcccagggctgtggcccgtgagcgtggcctgcctctatcctccgagggcccagggctgtggcccgtgagcatggcccgcctctatcaagtg

SEQ ID NO: 194187 - DNA, 474 bp, Homo sapiens
  chr21:44180219-44180693
  hypo
acctgccccgggtgccgtggtgtggcccgctggacgttctcagggtccctgtgtcacctcattggtacctgtggtaaacctggaacactgttgacctctggttgggatgagggtttggcagagaatgttcaaaccagcgcacagccttctgggtggctttgggaggagaggtgggcgggcccaggcacagggtgactcggaccccctgcctcccgcagttctgcgtccacgacaactacagaaacaaccccttccacaacttccggcactgcttctgcgtggcccagatgatgtacagcatggtctggctctgcagtctccaggtgggtcctgcccgctgcacacccagacctctactctcgggggtcagacggaggcccccttccagggagcggcagccccatcccaccaagagagccacaggcgtggggtccccagccgctccgcccctcctagggacgcacccctgcccac

SEQ ID NO: 194188 - DNA, 30 bp, Homo sapiens; identical to SEQ ID NO: 33878
  chr21:44184268-44184298
  hypo

SEQ ID NO: 194189 - DNA, 30 bp, Homo sapiens; identical to SEQ ID NO: 33879
  chr21:44184647-44184677
  hypo

SEQ ID NO: 194190 - DNA, 154 bp, Homo sapiens
  chr21:44188341-44188495
  hypo
ccgtccaatggaagtcgcagagccttgggtggactgtttattagaggaatattttatgcaggtaagagtcttgcagagcaatcaagcctccagccactcttattagccccacttagtaagggtttgcgttaaacgagcacgcctgggtggtccc

SEQ ID NO: 194191 - DNA, 30 bp, Homo sapiens
  chr21:44188842-44188872
  hypo
aaccctaggagaagtcgggaggctttctgc

SEQ ID NO: 194192 - DNA, 30 bp, Homo sapiens; identical to SEQ ID NO: 100233
  chr21:44189938-44189968
  hypo

SEQ ID NO: 194193 - DNA, 430 bp, Homo sapiens; identical to SEQ ID NO: 100234
  chr21:44190664-44191094
  hypo

SEQ ID NO: 194194 - DNA, 30 bp, Homo sapiens
  chr21:44191476-44191506
  hypo
cacgcagtctttctacggattccccacggc

SEQ ID NO: 194195 - DNA, 146 bp, Homo sapiens
  chr21:44191717-44191863
  hypo
ctgtgcccaccaccccgtcttttctgcctgggcgctcctgaagcccatgtggcccacaatgcccttttgagcactgagccattttccaggcgtagccttgggttggtctcatctccctcgactgacggccccgtgctccccatgcc

SEQ ID NO: 194196 - DNA, 338 bp, Homo sapiens
  chr21:44205100-44205438
  hypo
tcccggccccatgcgcgccacatggctggcttgttctgtctgtcattcccctactccttgttctgtccggggttcctccagccccacacctcagcatgcctgtgatgccaccctcagacagccgcaggccccgccctgtggtggtccccaaaattccaagtccgactccaatggcccgagaccggccaggctggcagtttcatctggttagggatgcgtgggctcctccacattccaccttttgagatgtgctgtaaccttctacctggaccccagacagacagggtcagccgaagccccaggcactcctggactcaggcacccgtgactggcagcag

SEQ ID NO: 194197 - DNA, 31 bp, Homo sapiens; identical to SEQ ID NO: 33880
  chr21:44215220-44215251
  hypo

SEQ ID NO: 194198 - DNA, 30 bp, Homo sapiens; identical to SEQ ID NO: 100236
  chr21:44269822-44269852
  hypo

SEQ ID NO: 194199 - DNA, 446 bp, Homo sapiens
  chr21:44275676-44276122
  hypo
aagtctggcattgagagcaaacgtttccaacggcgaagtgacttttccactcaagtcaggcgactgccggtgtctacaagcactcagtcgcccaggagtgaacagaagcagctacctggggggcctgggggtccaccagctcctgcagactggccaggtgacagcagtgcagctggcggccgctcctgtactcccagagcctcagggtgccgtcctgcacaaaccaaacacacaggttagcacatggttgtggggcttccgtcaggtagggtgacagagaggacagctgcgtgtggtcggggttccactccgtgacagccatgccacccaccctcaggaattaaaggctctctgctctgactgtgtaaatcgctcatgcaaatcatcaaggacaacggtggggaacggaaggtgaccgattccctgtttctcgagtgccaatatgc

SEQ ID NO: 194200 - DNA, 30 bp, Homo sapiens; identical to SEQ ID NO: 100237
  chr21:44280695-44280725
  hypo

SEQ ID NO: 194201 - DNA, 361 bp, Homo sapiens
  chr21:44283355-44283716
  hypo
cacagaccgggcagacgttgattcagcctgtaccccacataccatgtcccccacgtactgcgtctaacagcatggacaggtgcctgagccttgacagggtagacattgactcagcgtatgccccacgtgccacgtcccccatgtaccgtgtcccacacctgccatgtcccccacctaccacgtcccccacctaccacatctaacagcatagacaggtgccccagctctagacggccacacccgtgtggctccagcaccgaaaaggagtagacgtctccagacttgtcggccaccaagaccttctcctccgaggctatgaaagtcagggctgtacacctccttgccacggtcctagaaggcc

SEQ ID NO: 194202 - DNA, 31 bp, Homo sapiens; identical to SEQ ID NO: 33881
  chr21:44284396-44284427
  hypo

SEQ ID NO: 194203 - DNA, 30 bp, Homo sapiens
  chr21:44329735-44329765
  hypo
agcctagtcaatttcgcattaaactgatta

SEQ ID NO: 194204 - DNA, 27 bp, Homo sapiens
  chr21:44333162-44333189
  hypo
gactccgtctcaaaaaataaattaatt

SEQ ID NO: 194205 - DNA, 534 bp, Homo sapiens
  chr21:44338147-44338681
  hypo
tgttcctaggattgtcgcatagtacacttaggcggaggtatgcggcataagggttagtggtgttcgtacagtaccaggccttttttgacaagacacaattgaggtagcttaagttagaaggagaccaggctccagggggtaaccttggccaccactcagctatggaggcattgactgttagggtttggtgacgggttttcacctacggcgcgatgggttttatcagtccacttgcgggatatgcacaccgtccctcatactgggttggtaagtgtccaggactgcgggcattcctgaggagtgaaagtgagtctggggttttgggatgcctgtaagtaagggggaatgtctatcccgtcccacagccactgttcactcataaagctcccccgcatacccaacaattggacacattcatggtaagcacaatggttctcctagatctacaaacagattttttcctggcttaggaagggatgcatctgcttatagtttttgtataaaggaatggaaatgccgcgggcgattttcagg

SEQ ID NO: 194206 - DNA, 30 bp, Homo sapiens
  chr21:44339368-44339398
  hypo
gagggtcagtttggccgataaacacgtctg

SEQ ID NO: 194207 - DNA, 45 bp, Homo sapiens; identical to SEQ ID NO: 100240
  chr21:44390975-44391020
  hypo

SEQ ID NO: 194208 - DNA, 121 bp, Homo sapiens
  chr21:44439926-44440047
  hypo
caggcgtgagctactgcacccagctctcaagaaggttggtgttcttttttccaatcttttgtgtttttctcatcttttagaagcttctctttttttgcaggtgctctgatttttttttttt

SEQ ID NO: 194209 - DNA, 247 bp, Homo sapiens; identical to SEQ ID NO: 33883
  chr21:44440491-44440738
  hypo

SEQ ID NO: 194210 - DNA, 294 bp, Homo sapiens; identical to SEQ ID NO: 100242
  chr21:44441269-44441563
  hypo

SEQ ID NO: 194211 - DNA, 238 bp, Homo sapiens
  chr21:44444699-44444937
  hypo
tgctcctcatgatgtcgctgctgttatcgtcaccgctgaaccgttaaacgtggggggcggtctgccttggcctatgcactaaccagccactgcagcactaggacattcctgggacgaggagaaacactttgttcgtgagactacagttaggttttggctagaagcactgttgacgtgaccattattttctaatgattatgtaatgctcacattttgcctaaatcgtcttgatttcctt

SEQ ID NO: 194212 - DNA, 391 bp, Homo sapiens; identical to SEQ ID NO: 33885
  chr21:44448041-44448432
  hypo

SEQ ID NO: 194213 - DNA, 47 bp, Homo sapiens; identical to SEQ ID NO: 100245
  chr21:44448695-44448742
  hypo

SEQ ID NO: 194214 - DNA, 204 bp, Homo sapiens; identical to SEQ ID NO: 100246
  chr21:44448963-44449167
  hypo

SEQ ID NO: 194215 - DNA, 146 bp, Homo sapiens
  chr21:44451415-44451561
  hypo
ctggcgagggcacctcggcagcccccacgggttggctcctacgtttgcgtttgtggctggtctcctggtgtcagtgttctcttgtacgttgttgctttcgacttttcagagccctcctgctcacttgaccacgtgagatttggaat

SEQ ID NO: 194216 - DNA, 663 bp, Homo sapiens
  chr21:44479013-44479676
  hypo
tgatggtcgggagcacggtcagcggggctgacaggcccagctcctgaacacggaggtgccaccacctgagggaagagggcaggtcggggggatcaggataaggacaaacgctctcgcacccccgccggcagcacctcagcaggaggccacagggaccgctctcctgcctgtcacactgggcagggccagcacaggccacggggaccgctctcctgcctgtcacactgggcagggccagcacaggccacgggggagtgctctcctgcctgtcacactgggcagggccagcacaggcagcgggtctccggccgagcggtcttaccagggcttcttctccgtgaggtcctcctccttcagaaagcccttctgcagcatccacctgtcgctcaggaacttggtcctgcgggatgggggagtcaccgagtccccgcagggccccaccgggcccccgcccctgctgagtggcacgcactgcctgcccagcccctctcctggacctcactggtgcagcagagacccccaagtgctggctggaagccccagggggaagcctgggggctggacttcccgcccccatggccaacaagcgtgtgtgagcatgcacacagccatcgctcaggcactcagataaacacgtcctctcatgctcgctctctgcccctc

SEQ ID NO: 194217 - DNA, 30 bp, Homo sapiens
  chr21:44480320-44480350
  hypo
tcagggctgtcactgcgagtgtgcattgat

SEQ ID NO: 194218 - DNA, 117 bp, Homo sapiens; identical to SEQ ID NO: 100248
  chr21:44480609-44480726
  hypo

SEQ ID NO: 194219 - DNA, 583 bp, Homo sapiens
  chr21:44482536-44483119
  hypo
tgggagccgctcccacgtgaccaagagggtgaacagcctcatggtggaccccgtgtctaggcggtaggaccccagaggtctcaccccagcctctccccctgggatcggcacgtctgcagactttccagttccaacacgttttgcagacagcaaaactgcccgccagccccactgagcatccgtgtgacccacaccggcccttcggtctctgctctccctcaggccaaagtcagctttttggctcttaacagacttttccggggccttaattttcacacgttttccctgctccctgcctgtgccacctgggctacatcccttggtgaggtcaggccacgtgtgcggacatcgtcccccagtctactttgtctcgaccttcgagaccagcttctcaccatgcgtgcggggcttgcccttctgtttcagtggagaagctggttggggcccagggtcagccaggctccccagtgtgagggtgagttacaggctgcaccggcactgtggccgggctctggactcgacctaccgtcctgtccagcaccgtggggatgaagtcgtagccgatcccttccacctcgtaggt

SEQ ID NO: 194220 - DNA, 457 bp, Homo sapiens
  chr21:44483489-44483946
  hypo
agacagaccaccctgcggcggagcagcagagcctttggggacaaagggcattgctgggcagtgacgtctttttcaagggcaagcaacagggagagaacgcccttgtctcatcagcgggacctttctaggcacccgtcctcagacctgctcttaaccccgagtccaggaaccctctcccaactcccacaagccccagttgaggggcagactcaggaccagaggacttagagctcctggctgatcctcagaggcccccagttggaactccgaccccccactcagcgcaggaaggttctccaagacactggccggtgagcgagcacccagccccagctccttcgggtcacgagctgctggtcccttatgtgtcaagcacccttgtcttcccaaacacctcccaggcagcgcagaaataccgcgggagacagcgtgctgagcagaccgtgaggaatgacag

SEQ ID NO: 194221 - DNA, 30 bp, Homo sapiens; identical to SEQ ID NO: 33888
  chr21:44486366-44486396
  hypo

SEQ ID NO: 194222 - DNA, 1085 bp, Homo sapiens; identical to SEQ ID NO: 13298
  chr21:44494940-44496025
  hypo

SEQ ID NO: 194223 - DNA, 615 bp, Homo sapiens; identical to SEQ ID NO: 133633
  chr21:44496296-44496911
  hypo

SEQ ID NO: 194224 - DNA, 111 bp, Homo sapiens; identical to SEQ ID NO: 13299
  chr21:44513218-44513329
  hypo

SEQ ID NO: 194225 - DNA, 209 bp, Homo sapiens; identical to SEQ ID NO: 13300
  chr21:44514585-44514794
  hypo

SEQ ID NO: 194226 - DNA, 30 bp, Homo sapiens; identical to SEQ ID NO: 100256
  chr21:44515464-44515494
  hypo

SEQ ID NO: 194227 - DNA, 30 bp, Homo sapiens; identical to SEQ ID NO: 13301
  chr21:44515794-44515824
  hypo

SEQ ID NO: 194228 - DNA, 30 bp, Homo sapiens; identical to SEQ ID NO: 13302
  chr21:44524440-44524470
  hypo

SEQ ID NO: 194229 - DNA, 30 bp, Homo sapiens
  chr21:44555110-44555140
  hypo
ccatctctctgctgccgtgcatgtcggctg

SEQ ID NO: 194230 - DNA, 30 bp, Homo sapiens; identical to SEQ ID NO: 100259
  chr21:44561183-44561213
  hypo

SEQ ID NO: 194231 - DNA, 81 bp, Homo sapiens
  chr21:44562055-44562136
  hypo
tgtcagggcagggtgcgtctgtgcggcgtttgcatgtgtccaccgtcctgaccgggggcagggccacgtcccacacatctt

SEQ ID NO: 194232 - DNA, 79 bp, Homo sapiens
  chr21:44578930-44579009
  hypo
gtgagagggaatttgcgcttatagaaagaaatgttcgatttgtaggagaggtacctgaagtgcgcgggggtgaaatgac

SEQ ID NO: 194233 - DNA, 74 bp, Homo sapiens
  chr21:44579209-44579283
  hypo
gtaaaagtaataccccgtgatgggcgcaccaggtgctggcccgcagggggagggcgggacgtcactggctctgt

SEQ ID NO: 194234 - DNA, 230 bp, Homo sapiens
  chr21:44601205-44601435
  hypo
cctgggttctgggtgggggcacggcaggcaggctcttctggcagctgggtgatgcccgtgagcgctaaatgcaagacgtgtgaacacaggcggctcacagatgccagtgctgagtgcgactgtgcctccgcctggcctcgaggcatttgctgaacttccagcttacccggttctcctcctgtgctgactccagggcctccttgggccctgctaggcgcgggctgccgccg

SEQ ID NO: 194235 - DNA, 35 bp, Homo sapiens; identical to SEQ ID NO: 100261
  chr21:44617828-44617863
  hypo

SEQ ID NO: 194236 - DNA, 35 bp, Homo sapiens; identical to SEQ ID NO: 100262
  chr21:44618102-44618137
  hypo

SEQ ID NO: 194237 - DNA, 536 bp, Homo sapiens; identical to SEQ ID NO: 100263
  chr21:44630079-44630615
  hypo

SEQ ID NO: 194238 - DNA, 30 bp, Homo sapiens; identical to SEQ ID NO: 100264
  chr21:44722843-44722873
  hypo

SEQ ID NO: 194239 - DNA, 234 bp, Homo sapiens
  chr21:44725368-44725602
  hypo
caccgcagtggacttcgtggcattctctgcagcatcacgtggcctggggcagggagcccagctcgcctcctgccctgctcggccccgggcttgcagccacagcgcccctctgatctcggccttcggctgcgcgtggctctcccttgtgtgtctgtgtctctcttctcatggggacaccagtcacatcgggtcagggtttatcctattctagtggaagctcgtcttaatttaact

SEQ ID NO: 194240 - DNA, 30 bp, Homo sapiens
  chr21:44763655-44763685
  hypo
ctcccatagcagggccgggctggcactcct

SEQ ID NO: 194241 - DNA, 112 bp, Homo sapiens
  chr21:44764100-44764212
  hypo
tgcccccaccccacccgctggggaaggtgatggtcaggagggggctgatcgagggttgctcagtcaccccaagatgaggagcagtcgctggcacagccgcctcggccctcct

SEQ ID NO: 194242 - DNA, 83 bp, Homo sapiens
  chr21:44792953-44793036
  hypo
gacggctagaaagagcggccccagagccgcaccgtgggatgagccaatggcacgtcccggtcgccggccgggtgtggtgctgc

SEQ ID NO: 194243 - DNA, 202 bp, Homo sapiens; identical to SEQ ID NO: 100265
  chr21:44799063-44799265
  hypo

SEQ ID NO: 194244 - DNA, 323 bp, Homo sapiens
  chr21:44806800-44807123
  hypo
atgccccgttggtgccgctaggactgcccagccctcctgctgctccgtggacctccggggtctgggatgggtgggtggggcccttcctggtgactggcgtttactgggcttctgtggggccaccaagcaccgacacagggtcagagtgaggagcgaaagccctgacgcctgccctcatggggagtcggtctcctctggacacggccttgttccagtgaccacagaggctggcgagtgccacgtggtccccactgcatcacacacctcccacgccctgcccggcgtcagggacaggaggctcagggaagcgaaggacactgccc

SEQ ID NO: 194245 - DNA, 30 bp, Homo sapiens; identical to SEQ ID NO: 100266
  chr21:44813363-44813393
  hypo

SEQ ID NO: 194246 - DNA, 827 bp, Homo sapiens
  chr21:44816264-44817091
  hypo
ctcccagcagtgtgagggggacgcagaaccagtgtctcctcttaaaatccccgaaccctcccgctggctggccctgagcagcaaagaggacacctgcgcggccttcctctcccggcccctaactgagccacggctacatcccgctcctcccaccaaagctcttcggccagtcagccctcaggctccagcgcggctcggaggggcctgcccctggtatagcgcccatggtcactgtcggacactcttaaaacaacggccgtgtttctgttctgcgctgggccctgaagctcatgtcatcagccctgccggctgtggggctcccggattctctgaccttgacccatgctgcagccactccgcctgtttcctggggctggtttacaccccgagatgcagggaaggcccagctgcggagccccagggaggccaggagctgttcacaactccaggaagccacactgggcctcagttgacgaagaaggcgacaccttcgtgtgggccttgcctgctaatcggtgtcctcaacccaagggcacaggcgccgctcccaggccgcgcaggcagagtagagctggggtggatggcaggcttcagggacccagccccgatgagtcacttggaaggcatttgccccagagcttccctggccactgcgcctcctcccgccccaatccagccccatctgggtccgagcctctggagaggagctggcaggtcaggatgcggttcccgtgctcttgcctgtgtgtggggacccgaaagccaggctggtggccgaggatggcgagcacagccccagcccctcggcctagcgggagcttcacggg

SEQ ID NO: 194247 - DNA, 30 bp, Homo sapiens
  chr21:44817383-44817413
  hypo
ctccaagacagtgtgcgcattttgcccgag

SEQ ID NO: 194248 - DNA, 404 bp, Homo sapiens; identical to SEQ ID NO: 33897
  chr21:44830889-44831293
  hypo

SEQ ID NO: 194249 - DNA, 1172 bp, Homo sapiens
  chr21:44836809-44837981
  hypo
ccaccggggacgcgccggtctgcaggagtgggggcggcagcagcgggagccccgacgtgaggagggtgctggggagcggggcagccccagggccatcacagggggcgatcacaaacggggcaggggccggctggggggcctgggagcagccgggtgcagcggccgggtggtgctgtaactggagcagcctgtgggaacagaggacaggtggtcactgcgccggctcgcagggttctcgggtttccgagtgcccgtgtggcagggcccgcccgaggagctgccagccgcggctgccgagggcaggtgcgtggctgatccctgaccgcgccccacctttcattctccacccggtttctcagcagctcagagatgcggccacaaggcgccctcgctccccgccaccctcacccacccagggactttaaaggacacgcccgcctgctgcacccccatggctcagcacctaggacctacgccccacacatctccctggctgggagcgggggtgtgcactgggctacagagaggagggaaccacttagcagatgaggttcctcgaggagataacctgccgtgtgcccacccggggtcccagggcgggggcaggccctacctctgctgctctagcacctcctccagcaggctccagccctcccggctgccggctgcgccgccgtgcaggcctgggctctgtgcaggggcgtggaaggggctcaggccgcccctgctggcccggctggcgggggcctggcacacctggcgagccagccccttgattttgttcagtcccagaaaccctttggtccgcgtggtcttcctcagctgctgccgaaaggccttcagccctgcagggagaatgaatcaggaggtcaacggccacccggctctcagcccagcatccacggcccttggcttaaggggtttccaagcctcaggttgggggtaaggaaaggacgggtgacacaagcacgtctggacaggagtctggcacctaagccccaggatggcgtggaggcagccggcagccaggggccctccctcctccaagtcgggaggtgctgcccagcacagagtcgtctcctgtgctttcagaaccagccatggaggccgcgtgctcagggacccatgtgtgtctatcccagcaggccgtgacgccccgagccaccagagca

SEQ ID NO: 194250 - DNA, 393 bp, Homo sapiens
  chr21:44839041-44839434
  hypo
ccagcaggctgcttggggacacgggccggggccggaacactccgctgcagctggcatccaccgggaagaacaagggctgcgttggagagacacaagccagtgacttctcggactccaggtgacccgggcacaccgggggcaccagggctgggctgaggcgagccctctgcacacccgctgtgggcactcacccactgcagcgagctctggagctcacagtccatctcggcctggaggacggactgcaccaaggtctgcggctgcgggcacagcaaggcaggtcggaaagggtcggtggaaagaccttcctgaggcacctggggccggcagacgggaaagacgctgtcaggggagcgactccggaccaccagcgccatcaagagaagaaacaag

SEQ ID NO: 194251 - DNA, 49 bp, Homo sapiens
  chr21:44839754-44839803
  hypo
tccgagctccgaggccgcggctgcctggcaggcccggggcgggcgcact

SEQ ID NO: 194252 - DNA, 342 bp, Homo sapiens
  chr21:44840058-44840400
  hypo
gagacagctgcctagcccctgcgggtgaggccagggcaagtgtggccaggctcacctccaccgtcctctgccggtccacgcccagggtctgcatgatacccagcgcctgctcatcgtagtcgcccaggttggaggtgtagctgtgtgcggagaaggcggggcaggcgggtcccggcaagcagggctcagcccgcatccaccggtgctgccggatctgggcgatggtgatgcgcctggcggggtccaccaccagcatgcggcggatcaggctctcacagtctgtggaggggccaggaggctgagccagggcggccgggacctcggctgcgctcccacccaccg

SEQ ID NO: 194253 - DNA, 932 bp, Homo sapiens
  chr21:44840675-44841607
  hypo
ggcggggacggcaggcgcaaggcacaagcctgtgcagcaagggcacccgtccaccctcgaaatagggcactgagaaggcatccatgggctgggtttctcccgcagcccacagtaacctgggcctgattcccagactcaacaaggactcagaagccagccacgaaggggctgcaggagacacaggcccctgcccaggcgagaccacacgactcaccttgagacatgaagaaggggatgcggaagcggccctccagcacccgctgtctcagcgtcggcaggttaggcccatcgaaggggagagaaccgcagaccaggacgtacagcaccacgcccaggctctgttgaggaccacagagccacatcagcgccagggcggtgcccccgggaacacggcgccctcggggaacgcggcctcgggaagggggtctgcgcgcacagggctcctacccagatgtccagctgggggccttcatactccttcccctcaaagacttccggggcggcatacggggggctcccacaccacgtggacagaggctctcctgacttgtagaaattcccaaatccaaaatctgagcggcaaagaaacagatggatgaggttaaacggcaaatggcaaggggctgcggtttcggcacaggggctgtggtttcggcacatgccgggaagctggggctgcttgcgggcacactcccaccccggggcctccgtgcctgccagcttgatgtccctgctcccaccccggaccctccgtgcctgccagcttgatgtccctgctcccaccccagaccctccgtgcctgccagcttgatgtccctgctcccaccccggaccctccgtgcctgccagcttgatgtccatgttgccatccagcaggaggttctcggtcttgaggtcccggtggacgatgtgatggtcgtgacagtactcca

SEQ ID NO: 194254 - DNA, 451 bp, Homo sapiens; identical to SEQ ID NO: 133642
  chr21:44847472-44847923
  hypo

SEQ ID NO: 194255 - DNA, 229 bp, Homo sapiens
  chr21:44856273-44856502
  hypo
ctcagagcctctggccgctcctacctgaagggccggggctctgtgtgggtgaagaccggcagcttcctggagtaaccagagggctgagcctcctccttgacttgttcggagtgtttcttcactgaccggtttacctgggtgtgcatacggagggtgagccactggaacagtgaaagcgtccacccttcactgagtcagtccctctcccggaaggggccagggacagggc

SEQ ID NO: 194256 - DNA, 373 bp, Homo sapiens
  chr21:44865714-44866087
  hypo
gagcccacatggccccggggcattcatctcactgggcaggggcagcctccgacctcatcccagctcagtaggtgctcgcggtgccctcctaaacgccagccatgagcttgagcgaacgccagtgtgtcgtgaggctgagcacagcctggcccctccactccggctcctggtggctgtctgctgtgtcccctatcggggaagaggtttctctttggcccaagcccacctgcccctgcctgagggagccctcagccactacgctcagcccgtcagaaacctgagagctcatgtccacgacagggccagccagtggggagaggacccggggctcccttggaggcagggcactgctcgttcccgcggccgctcggcc

SEQ ID NO: 194257 - DNA, 30 bp, Homo sapiens
  chr21:44866347-44866377
  hypo
tgagcttggggcgggcggtgccggtggagg

SEQ ID NO: 194258 - DNA, 357 bp, Homo sapiens
  chr21:44866602-44866959
  hypo
tcttccctgccacagccggcccagcgggagccaggtcagggcctggagacacagcgccccccaccggagccactgcccggcccagcagcacctgcggagaatcccaccagctcccacgcctcccgccgcgccaccgccccggctttctgcaaatccaccttatggaagccggataaggtgaagtccacatataactaaaagcgagttactgagggttactttctttgcagagtggttcccctaaaggattcctttaaacatgatccggtcagccagtgctcacttacgttcaccaagtcacgtcggtttgtggcggcaggagcccagcgtgccaggcacctgcgggaggggaagatg

SEQ ID NO: 194259 - DNA, 194 bp, Homo sapiens
  chr21:44871135-44871329
  hypo
gggcccacacgccgccgacagcttccgcgtgtggccatctgtctttcagaaaccctctggcagagggacccagcagatgacacgggggccgttcacactctgaaacctgcctggagtcaaaacactgctggcgagcctccaccgcaaacccaatccagatggtcttccctggtggccctcggggtggcgggcac

SEQ ID NO: 194260 - DNA, 695 bp, Homo sapiens
  chr21:44871640-44872335
  hypo
ttgttgtgacctggggtcccccgtggtgggcccgccccttgagcctgggatccagcctcagcgaggctccagaagtgtcgtctccgccggccaggcgtcagcgcctccacccaggatcacacactcctatctctgcacttctgccctccatcctgctccacgccgcctctgcttgttattccagcacattccagggtgatgcctgctgaagccacgcagccagtgcctccaccctaccccccatctgacccaccggccccttccgcacgctggaagcctgcccggcctgaagtgtcctcacctgtcgccctatcctcccctccactccagcccaccggtgactcagccctcacagctctctcctccccgagggagccggtgacttggctctgatggtgccgggacccagccccggcatgttcagaatccttgtcctttaacctgcgtccacatgtagtcgcctccacctccctgcctgaacctccaggccctgcagagcaaacactgctgcctgcaggagacccctggggccttctccgtcccctcatcctcctaaggagcctcccctgccaccgtgccagaatgtgccggaggaacagaggcccgagcctcccgtggccccagcgaggcttcctctggggaagacagtgagcccaacgccctggctctcgaggggtggacggagtccagctggc

SEQ ID NO: 194261 - DNA, 30 bp, Homo sapiens; identical to SEQ ID NO: 57731
  chr21:44877374-44877404
  hypo

SEQ ID NO: 194262 - DNA, 49 bp, Homo sapiens
  chr21:44881156-44881205
  hypo
cagagtgcttccgggtcgcagtgtcctcatgttgcggaggcctgagctc

SEQ ID NO: 194263 - DNA, 112 bp, Homo sapiens; identical to SEQ ID NO: 100278
  chr21:44888676-44888788
  hypo

SEQ ID NO: 194264 - DNA, 30 bp, Homo sapiens; identical to SEQ ID NO: 100279
  chr21:44906657-44906687
  hypo

SEQ ID NO: 194265 - DNA, 81 bp, Homo sapiens
  chr21:44920330-44920411
  hypo
ggtctgcagaggagccgtgtgcaggagcagagatggaagggccagcgcgcaggcagccttcggactcggctgcccagctgg

SEQ ID NO: 194266 - DNA, 30 bp, Homo sapiens
  chr21:45020727-45020757
  hypo
tatttaaactagccacgcattgctaatact

SEQ ID NO: 194267 - DNA, 30 bp, Homo sapiens
  chr21:45021092-45021122
  hypo
ggccagctggctccacgtaccctccagcag

SEQ ID NO: 194268 - DNA, 468 bp, Homo sapiens; identical to SEQ ID NO: 100280
  chr21:45078406-45078874
  hypo

SEQ ID NO: 194269 - DNA, 30 bp, Homo sapiens; identical to SEQ ID NO: 100281
  chr21:45112947-45112977
  hypo

SEQ ID NO: 194270 - DNA, 457 bp, Homo sapiens; identical to SEQ ID NO: 100282
  chr21:45114159-45114616
  hypo

SEQ ID NO: 194271 - DNA, 295 bp, Homo sapiens
  chr21:45140245-45140540
  hypo
ggcggggcctgcggtgcgggctggcctgggaggaggacaggaagaggggagcagagcttcagtggaatttgagggctgacctaggcgtgcccccaggaggaccaagctgagcagagttgagcgtggaaaggcagggggttcgagtccgaagtaagtggaggtcctgttgggaaggatgcggtgcttcacaggtggtcttacttgagaccctgttccatccagctgcaggcagaccctgcctgggacagtcagggtgcaccggttctgtggctccggctcttaagcactgctctgg

SEQ ID NO: 194272 - DNA, 294 bp, Homo sapiens
  chr21:45140780-45141074
  hypo
tgtttccttctttggctcactcgggatcccccagcaatgtcctttgttctcgaactcccagtgactcgaggggtgtcctctgattgctcacctcaggtggagcctcgaaaggatggcgctgctgttcctacctcgggtctccccagtgcacggcatccttacctgtgggctccacagggttccatgcaggcattttgctcccataccccgatgtccaagcccggctggacaaggagaagcaatgtgatgaccgaggggctgagatggctggagacccagcgagcctggaccagc

SEQ ID NO: 194273 - DNA, 425 bp, Homo sapiens
  chr21:45167195-45167620
  hypo
aactcagccattcagcgcccaggcgatttcagtatctgccttctttgtcgttgtgtctagggtgtctgtttgcttgctgtatattcactgagcacagcgggcttctccactggcacagggcacgcctgggcctgtgccctccctgccccgctgggtcagtggttgaagtcaggatatctgtcactgggcatctaactgggtggggcgggctggtgtgctcagcgtctgtctgtccactttctcccatgcttgttctctggaaggttccctgtcctgcgcccagcctgcaggaccccagcttgcagctccctgccttcccttcatggtgctccctggtgtgggctctgctgaccctcggcagacacttgcgtttggatcacgaagagttggggccactgtccagttcagtgcggctacgggatctg

SEQ ID NO: 194274 - DNA, 566 bp, Homo sapiens
  chr21:45170074-45170640
  hypo
catgctgagaccctgcgctgtggcatgggccttaagtgggggccgtggctgctgtccatcaccacggttacgtataaacagcagccatgattgggccttacgtgactcctgtaatgtgagggtcccctttagaaccaaaccccacatgttgcaggggccccggcccagggtggccagtggacgaagagttagctgcctgtggggatggggatttccagagccgctgcggtttggggaatgtcaacacacaacccggagaggagaggctcacctgtccccacccgcctgtccccgcctgtcttccaggttactgagtggccggaagatccacagccaggaggaagccttgcgggtaaggaggccctctggggcctgtgcggggcacatgtgccgctcacggtggggacgggagacaggctgcctgagtggcaccactgtgtcatttctccccagcagtgactgaacagtctgtaccagtcggggcctccagagatcagcaggatatatgtgtgtgtgtacatgtgtggacatgtttgtgcatgtgtgtgtgtgtgtgcatgtgtgcg

SEQ ID NO: 194275 - DNA, 1447 bp, Homo sapiens
  chr21:45175373-45176820
  hypo
atctgctcagccctccgggctctccgtggtgggcagtccgcagcctgtcctccagggttcagcacgtgcattggcggagccggctccccggtggctcggagagcaggacggcccttgtgttccctggaaatcccctcctggcagcagtgggcacgtcgggtgttgtgagtgggccaggggcacagcaagtctgtcctccctgcaggtggcctgtgagaagaccgtgtctaccttgcaccacgttctgcagaggaccatccagtgtgcaaaaggtacggcggccgggctgcatgggctgcgtgggctcctggctcccgaagtgggtgggagagaagagctggcacgtgctggttttgaaggtgtgatcggtgtctcctgctgacctcacctctgggagtgggggcaacagcgggagcccctctgagatgggaactcagtgctctctgcctgccccgcagcccaggccggggaaggagtgaggcccagccccatgcagctggagctgcggatggtgcagagcaaaagggacatcgaggacccagagatcgtcgtccaggccacggtgctgtgagggccccgccgcttgcccgtgacacgcagcgcgttggtgtctccgtgtttgtccctgtgaaaacatgtaacgtctgccttagagccatgaccgaaacttgatatttttttctttcatgagtgtccggcatctgctggtcttcattgtgaaacgtgccagtcgtgctttgtgaaaaataacaaagtggtcacagaaatttgtgatctgaaaacccggctcccttccccacaaggctcctgggcctccgggaagacgggcccctgtttgccatctcgggggtgttccctgtgggagggtgagtgggtgaggccgagcctgctgcgtgtggagcctcgagtgggccctggctgccactaccgtacagaggccgtgtcgcgctgggctgggcctgggtggcctctgtctttgcatctctgagaaggagtcgggtggtaacggttggggtcaggaagaattctgccaagtatctttactgtcattctgaccatagcctctttgttcccgcattcgaacttttggttcttactttgctgctcgtttagtccctggggatttcagatcttaggctgttgtttcaccgtatgggagggttgatgtgagcttgcttggagacacacggtgcagcatcagggaccttcccaggccccagcaaattcaagtcggtctgcagacctctcagctacccgcgggacctcttgtaacccatcggcatcttccaggaatccgccgagtgacttgaggaagatgctaacgcagtaaggtctgtgctgggccaagagcagctttgaagctccagagaaccaccccgtcaggttccttgtggaagctcccctcatccgtggtgcagcaggctgagcactgcgcgtttgccacgtg

SEQ ID NO: 194276 - DNA, 180 bp, Homo sapiens; identical to SEQ ID NO: 133647
  chr21:45182011-45182191
  hypo

SEQ ID NO: 194277 - DNA, 157 bp, Homo sapiens; identical to SEQ ID NO: 133648
  chr21:45182668-45182825
  hypo

SEQ ID NO: 194278 - DNA, 101 bp, Homo sapiens
  chr21:45184713-45184814
  hypo
aggagattccctcacaaggtgcggactcaggctggccctgaaacagccgtcacctccacgaggccggcccaggcccctgcgcactgccctgctcatgcccc

SEQ ID NO: 194279 - DNA, 77 bp, Homo sapiens
  chr21:45187153-45187230
  hypo
ggacatgggaaccttgcgggcacacacatgcaaacacatgcgtacatgcgggcgcacacacacgcacacagggatgc

SEQ ID NO: 194280 - DNA, 546 bp, Homo sapiens
  chr21:45187449-45187995
  hypo
tcaggagcagcacagcgaccccgaggctggcctgactgtgtggcctctgagggtccagtcttcactttcccttgttggggggatggggcccccatgcacagtctgtgcctcagtgttctgagtgagggcaccctgtgctctgccccatgaccctccctgcctcggtgctacccttcctggaggcgggacacggcggctgatccctccctgagtgggagttgcgagtcctttgccttcttcccccgtctccggcttgtagccacaaaatgtgctgccctgggccctgcctcaggtttccctacggaaacggcacaggccacgctgcctcccctgctggcaccctagtctctgatggagaccgtggcctctccacccagaaagtgggccaggcctcaccatccctgagctctgtctgcctacgtctctggctgccactgaccccaccagcatcttggcctctcgacacaccccctccgccctgactctgtgtcatacccaggcctcacgacacactcctgggcaaggctgcgtcggcagcgccctggc

SEQ ID NO: 194281 - DNA, 422 bp, Homo sapiens; identical to SEQ ID NO: 100289
  chr21:45188554-45188976
  hypo

SEQ ID NO: 194282 - DNA, 34 bp, Homo sapiens; identical to SEQ ID NO: 100290
  chr21:45194487-45194521
  hypo

SEQ ID NO: 194283 - DNA, 206 bp, Homo sapiens
  chr21:45195122-45195328
  hypo
aggcctcagcatcgcctggacctgttcttgcttggggcatcccgtcggtcaccaaccatgacagcgaggcgggcctggcctgtgctccaccggagggggcttcttgcacagatgacctgctcatttcagcccctccagaatcttctggcaggcgcagagcaacaggacgtccattttacagacgaggaaaccgagacacagggaag

SEQ ID NO: 194284 - DNA, 31 bp, Homo sapiens; identical to SEQ ID NO: 33906
  chr21:45206422-45206453
  hypo

SEQ ID NO: 194285 - DNA, 41 bp, Homo sapiens
  chr21:45208438-45208479
  hypo
ggattacaggcgtgagccaccgcgcccggccaacgccacaa

SEQ ID NO: 194286 - DNA, 30 bp, Homo sapiens
  chr21:45213659-45213689
  hypo
gagtgcttagcctgcgaggctgggatggat

SEQ ID NO: 194287 - DNA, 30 bp, Homo sapiens; identical to SEQ ID NO: 100293
  chr21:45222212-45222242
  hypo

SEQ ID NO: 194288 - DNA, 470 bp, Homo sapiens; identical to SEQ ID NO: 100294
  chr21:45223509-45223979
  hypo

SEQ ID NO: 194289 - DNA, 599 bp, Homo sapiens; identical to SEQ ID NO: 100295
  chr21:45224194-45224793
  hypo

SEQ ID NO: 194290 - DNA, 31 bp, Homo sapiens; identical to SEQ ID NO: 100296
  chr21:45226070-45226101
  hypo

SEQ ID NO: 194291 - DNA, 31 bp, Homo sapiens
  chr21:45230171-45230202
  hypo
tgcctcggagtcttcccgcagggaccatctc

SEQ ID NO: 194292 - DNA, 220 bp, Homo sapiens
  chr21:45232929-45233149
  hypo
gtcaggccccgcactcgggcaggcacagcagggcgcaccccatgacgcacccagaacccgcccccacagccccggagtcctggccgctgtccccagccctacgcccctctcagagcttgagccaggggcagcgcaatgggcagctccttccctctcctgtccctggaaaactgctctgggtgatttggcggagagtgagaggattcgaaaacgctggtac

SEQ ID NO: 194293 - DNA, 107 bp, Homo sapiens; identical to SEQ ID NO: 100297
  chr21:45233493-45233600
  hypo

SEQ ID NO: 194294 - DNA, 138 bp, Homo sapiens
  chr21:45245439-45245577
  hypo
atggctgcagaccatcggctatgtctaaatccataaaagtcctaaatgagctaacaaaccattcatgagatcttttccatcctcctactggacacgcgtatttccacgaagacccggaaggcccgttagaactcggaa

SEQ ID NO: 194295 - DNA, 84 bp, Homo sapiens
  chr21:45249923-45250007
  hypo
gaaccccagtgtcagcggtgcctgtgaccctcaggcaacgtgaaacgcagctgcttccacatgccaggaaggctgttagaaaat

SEQ ID NO: 194296 - DNA, 283 bp, Homo sapiens
  chr21:45252133-45252416
  hypo
agctgtccaccctgccggacgtgggtaagtgtcctcacctctggcatgaccaggtgccaggcacactaggacctcaactgccccaccctggagctagccccttctccgaagagagtgtcccaccaacctgagtggcagggcgtgaaagcatggccctcctgcaggcacagaacgcagcctccctctgcctcaagctgtcctgtgtggccgtttccctctctctcatcgacccttccaggcccaggattttcggggggcctagagcgtacgcgctttccatttt

SEQ ID NO: 194297 - DNA, 176 bp, Homo sapiens
  chr21:45268736-45268912
  hypo
tgaggcacggcacctcgccctgcattctagcgggatcagctgggctccgctaggcagttcttcctctggttttgtctgaagtcagctggaggccggtggcctcactctcgtgcccggtggctggctggcagtcacctggtcacagggtaggctgtgcctctcgtcacccagcaggt

SEQ ID NO: 194298 - DNA, 239 bp, Homo sapiens
  chr21:45271699-45271938
  hypo
tgtgacaattgtccacgcctggggatctgtctactgaatccccaaggagaaagcttccttcgtggatggcaggaccgtttccacgcacacagccctggtcgggggagctggagtttgcctaggtccctccgtagtcacagtgataggtgcccaggcccctccgcagtcacagtgataggtgccaggtccctccgcagtcacagtgataggtgcccagttccctccgcagtcacagtgat

SEQ ID NO: 194299 - DNA, 43 bp, Homo sapiens; identical to SEQ ID NO: 100300
  chr21:45276199-45276242
  hypo

SEQ ID NO: 194300 - DNA, 101 bp, Homo sapiens; identical to SEQ ID NO: 100301
  chr21:45276618-45276719
  hypo

SEQ ID NO: 194301 - DNA, 31 bp, Homo sapiens; identical to SEQ ID NO: 100302
  chr21:45279018-45279049
  hypo

SEQ ID NO: 194302 - DNA, 43 bp, Homo sapiens; identical to SEQ ID NO: 33910
  chr21:45281600-45281643
  hypo

SEQ ID NO: 194303 - DNA, 197 bp, Homo sapiens; identical to SEQ ID NO: 100304
  chr21:45289937-45290134
  hypo

SEQ ID NO: 194304 - DNA, 51 bp, Homo sapiens; identical to SEQ ID NO: 100305
  chr21:45299400-45299451
  hypo

SEQ ID NO: 194305 - DNA, 187 bp, Homo sapiens
  chr21:45299786-45299973
  hypo
cttcccgtgagctcccgtgtccccgcatcctggcatgtgggcctctccctatgctcctggggtggaactgagaagacgtgggttctgcccgtctctgttactgtttattcttgaagaacagggcagcatgactccggggcggaggacgcagccctgcatcccttgcgtccccaggcatcttaggagc

SEQ ID NO: 194306 - DNA, 16 bp, Homo sapiens
  chr21:45317974-45317990
  hypo
tcggtaacagagggag

SEQ ID NO: 194307 - DNA, 318 bp, Homo sapiens
  chr21:45318872-45319190
  hypo
aggcgtgagccactctgcccggcctgattacattttgtgttagatttgcacacacttgccgctctctttcctttacgttttgcatctcagacttcccatctgggatctctttttctccttgaagtgcacgtacatgagaaattcctctggttagagtgtgctggtggcgaacccgccccttgtgtttgtccggaagcactagttttccctgccccttgggggatatgcttgctggttgcagaactcttggttggcagtgccgttctttcagcactttgatgtcagcctctgcttggcgtcagcatctttttgtgtgaa

SEQ ID NO: 194308 - DNA, 732 bp, Homo sapiens; identical to SEQ ID NO: 100309
  chr21:45345792-45346524
  hypo

SEQ ID NO: 194309 - DNA, 338 bp, Homo sapiens
  chr21:45349805-45350143
  hypo
aacctcataaatgcagcggacactgggctgcaggtgacagacgcgttctctggagcaccgacagcccaggcgtgccggagagagaggacttgagtgactgtcctcctggaacccagggtgccttgtcctggcacttctgtgtacatcatccagccccgttttcacgttcaggaagtcacgaatccacagtgtctttgaagaaagtggggaatagagttatcaaccgtcactccacggagagtctaaggcagagagaagttgggttccccttccacggttccctgcccccggggacacagttgtgggaggtctcagggcagagacgccgcacggtgggg

SEQ ID NO: 194310 - DNA, 1048 bp, Homo sapiens; identical to SEQ ID NO: 100310
  chr21:45352874-45353922
  hypo

SEQ ID NO: 194311 - DNA, 79 bp, Homo sapiens; identical to SEQ ID NO: 100311
  chr21:45354854-45354933
  hypo

SEQ ID NO: 194312 - DNA, 114 bp, Homo sapiens; identical to SEQ ID NO: 100312
  chr21:45355817-45355931
  hypo

SEQ ID NO: 194313 - DNA, 100 bp, Homo sapiens; identical to SEQ ID NO: 100313
  chr21:45358106-45358206
  hypo

SEQ ID NO: 194314 - DNA, 257 bp, Homo sapiens; identical to SEQ ID NO: 33917
  chr21:45360446-45360703
  hypo

SEQ ID NO: 194315 - DNA, 187 bp, Homo sapiens
  chr21:45364364-45364551
  hypo
ggccgcgggagtcatcgcggggcagatcctggaggccagcaaggccgcccctcctcctaagtggcactgattgacaggggagaaagacagaggcttgttccccagaaaagcacagaaaaccagccttgttcctcagacaggagatgcatgtgccgggaggcaggcagggggacggctgtgctcggcc

SEQ ID NO: 194316 - DNA, 247 bp, Homo sapiens
  chr21:45364875-45365122
  hypo
ttgacgccagcaagtcggaccctttctcagaagcccagagggagggcagagccgtagccacagtttggaggcatctgctgggctagtgcatgttttaacagcacctatgacaaggtgaggcagcatgggtggccctgcaggtggcggtttgcatatgtgcacatccagccagctccgttttccagtctggggactatggtgacaggaagtaaaaagcctgcgatttggcctacggggtcccagggtc

SEQ ID NO: 194317 - DNA, 31 bp, Homo sapiens; identical to SEQ ID NO: 33918
  chr21:45367128-45367159
  hypo

SEQ ID NO: 194318 - DNA, 190 bp, Homo sapiens
  chr21:45374889-45375079
  hypo
cacacagaggctgggacgtgaatgtgcatcacggctctatctgtggcccccaaaggctgggtgccagctgcctgtcggcagggagcgtatcaccgtggcacgtccatgccgtgggggtcactcagcagccacggatgcgccctgggtgctgtcccggggccgtctcagaagcaccgcgctggaccggctg

SEQ ID NO: 194319 - DNA, 370 bp, Homo sapiens
  chr21:45379436-45379806
  hypo
cagtgagcagtgccccggtgttcctgtgagggtgtgggcgtggccaccctgacgctgtccctgtccctgtctttgcaggacggctgtcctcagcgaggggccgtgcacccgctcctgagcagcgccatgggcctgctggccttcctgaagacccagttcgtgctgcacctgctggtcggctttgtcttcgtggtgagtggtctggtcatcaacttcgtccagctgtgcacgctggcgctctggccggtcagcaagcagctctaccgccgcctcaactgccgcctcgcctactcactctggagccgtgagtgtctgctgggccagtccctgccgcctggggctcccgtgggggtggcgcgcgaccatgcac

SEQ ID NO: 194320 - DNA, 430 bp, Homo sapiens; identical to SEQ ID NO: 133652
  chr21:45381211-45381641
  hypo

SEQ ID NO: 194321 - DNA, 206 bp, Homo sapiens; identical to SEQ ID NO: 100319
  chr21:45393401-45393607
  hypo

SEQ ID NO: 194322 - DNA, 222 bp, Homo sapiens; identical to SEQ ID NO: 33921
  chr21:45396664-45396886
  hypo

SEQ ID NO: 194323 - DNA, 220 bp, Homo sapiens
  chr21:45399688-45399908
  hypo
ggggtggccaggacacgatgacacctgcctttgcacggacacagtgtgtggctggcagggggcaccccaaccccagtttccagcaggaagctgagaaccatgaagagatcaaagagatcaactagaaaaaatatcttgaagccagtgagctcagtgataacagtctccaaccatctttaaaagagagcgggtcggccaggtgtggtggctcacatctgta

SEQ ID NO: 194324 - DNA, 999 bp, Homo sapiens; identical to SEQ ID NO: 33923
  chr21:45400147-45401146
  hypo

SEQ ID NO: 194325 - DNA, 72 bp, Homo sapiens
  chr21:45402470-45402542
  hypo
tcccagcatctccacgcgcgcccgtgggaggtgggtccggccggagaggcctcccgcggacgccgtctctcc

SEQ ID NO: 194326 - DNA, 811 bp, Homo sapiens
  chr21:45403409-45404220
  hypo
cccagctccctacctcctggacgtctctgagagtccaggcagagcagagggcagcgctcggccggtcatgctggctcccttggccttgcagcgagcccctggcccacgccgagcgagggatgcttctccctacagcatgtccactcccccggcatggccaggtggggcccctggggcaatggcagtggtagaacgctcaacttggttgcggtaccatcagcccacctgcatttggctttcgacttgcttgttctaagtcacagcgccctcatctttttagcaaggtaaaaaaaccaaaatgggtgttatctctgatatcttgaaaccagcgttctgaatagaggtaggttgagttttctaggggaaaacaaatggagaaaagaggcatgaagaaaagtaaaccgagaacataattaggcatcgggcctaagtgtcctggggagattggaggggacggcagcgttctgcatgatggaggcgctgccgggccccgggtctgtgggggccgtgctctcagggcgtgtgcgggacgccacctgtgcacacctgctcagagcacggctcctcgcaggggtgaaggggcagaccaacgaaaccagatgagaccaacgacaccatgcgagacacgcttgcagacactgttgttttggaaatgtgcttccctccatctgaaatctcatccctccacccgcccactcgggcagctgtgccgtgggcagggcatgcgctcccctggctgagcaccccagagattctcctgcaccttcctcatgccgcacgctgctcatccgtctccatgtgtgtttagatc

SEQ ID NO: 194327 - DNA, 30 bp, Homo sapiens
  chr21:45405336-45405366
  hypo
cccgactccctttcgcgcaccgtggcatga

SEQ ID NO: 194328 - DNA, 30 bp, Homo sapiens
  chr21:45411277-45411307
  hypo
cgtgtccctccacaccgctgtgacactgct

SEQ ID NO: 194329 - DNA, 226 bp, Homo sapiens
  chr21:45411684-45411910
  hypo
catgtttggggcccacgaagaccttgagctgccttcaggaaggattgtcacgcggggcagggtgtgtaagcagatgagctgcgctgtgccagcctgtgctcctctgcccacgcagcaggccgtacattccgcacccgggatgcctgggacgcccacaggccttggccaggctcggcttgtggagtgcagagcaagggctggtggagctcctcgggcgcttggagcc

SEQ ID NO: 194330 - DNA, 31 bp, Homo sapiens; identical to SEQ ID NO: 100325
  chr21:45422610-45422641
  hypo

SEQ ID NO: 194331 - DNA, 30 bp, Homo sapiens; identical to SEQ ID NO: 100326
  chr21:45429140-45429170
  hypo

SEQ ID NO: 194332 - DNA, 136 bp, Homo sapiens; identical to SEQ ID NO: 100327
  chr21:45446229-45446365
  hypo

SEQ ID NO: 194333 - DNA, 31 bp, Homo sapiens; identical to SEQ ID NO: 33926
  chr21:45470786-45470817
  hypo

SEQ ID NO: 194334 - DNA, 282 bp, Homo sapiens; identical to SEQ ID NO: 100329
  chr21:45478823-45479105
  hypo

SEQ ID NO: 194335 - DNA, 257 bp, Homo sapiens
  chr21:45479407-45479664
  hypo
tagaatcagagtggacgtccctttgccttccatccaggggttatctttggaatgctcgagtgctcattgctgtgaacttataaaatgcccttgggtgttcatctttcttttgcacttttaaataatatcttaagctcctttacaattaaagaattagcacagtgaaaccatacacagagagaaacattggttattgtcctcagtgtttttcgctgatacttattttgatgaaagtgataccacgttatatagctgtt

SEQ ID NO: 194336 - DNA, 30 bp, Homo sapiens
  chr21:45479987-45480017
  hypo
ggaactcatcagtggcgccgatggatactg

SEQ ID NO: 194337 - DNA, 31 bp, Homo sapiens; identical to SEQ ID NO: 33927
  chr21:45482526-45482557
  hypo

SEQ ID NO: 194338 - DNA, 65 bp, Homo sapiens
  chr21:45483496-45483561
  hypo
tggagaagcgggaatcgatccagaggcgagaagccaccctgttagatctgcgcagttacctgttc

SEQ ID NO: 194339 - DNA, 240 bp, Homo sapiens
  chr21:45494377-45494617
  hypo
ctcacgttgtctctgcggccatgcctgggtggcggaggaagtctgctgtttggaggagaggtgttgctcatttagatcacgatgcatccactttagtggccctagaaggtgtctgggtgcagccaaagaagtcatagttccctaccacatgtcgatgtagtcagcagacagcaagcacttgctgtgctcctgtgaaattgactctgtaccctgagtcgggggacacgagggtggtgctga

SEQ ID NO: 194340 - DNA, 134 bp, Homo sapiens; identical to SEQ ID NO: 100331
  chr21:45499831-45499965
  hypo

SEQ ID NO: 194341 - DNA, 369 bp, Homo sapiens
  chr21:45508564-45508933
  hypo
agctcagcaggagcgcgcagcactggtggcacctgtgctatgtgccgtgttatcccgctcttccctggcgctggtggcacctgtgctgtgtgccgtgttatcccactcttccctggcgctggcggcacctgtgctgtgtgccatgttatcccactcttccctgacactggcggcacctgtgctatgtgccgtgttatcctctcttccctggcgctggcggcacctgtgctgtgtgccgtgttatcccactcttctctggcgctggcggcacctgtgctgtgtgccgtgttatcctcttttccctggcactggcggcacctgtgctgtgtgccgtgttaccccgctcttccctggcgctggtggcacctg

SEQ ID NO: 194342 - DNA, 26 bp, Homo sapiens
  chr21:45510773-45510799
  hypo
attaaaaaattatttttcagccgggc

SEQ ID NO: 194343 - DNA, 163 bp, Homo sapiens
  chr21:45511962-45512125
  hypo
tcaacagagaaccagagtgtacggaaatgatgtagtatgtgttgcgactgagcctttagatagaacagctgcactgctgatgagtaaaggctcctgtgcagctcctccggctgccctgaggctggatcgaggcttgctcctgagtaagcgggtggctggatgg

SEQ ID NO: 194344 - DNA, 326 bp, Homo sapiens; identical to SEQ ID NO: 100335
  chr21:45513668-45513994
  hypo

SEQ ID NO: 194345 - DNA, 111 bp, Homo sapiens; identical to SEQ ID NO: 100336
  chr21:45516515-45516626
  hypo

SEQ ID NO: 194346 - DNA, 30 bp, Homo sapiens; identical to SEQ ID NO: 100337
  chr21:45517195-45517225
  hypo

SEQ ID NO: 194347 - DNA, 368 bp, Homo sapiens; identical to SEQ ID NO: 100338
  chr21:45518810-45519178
  hypo

SEQ ID NO: 194348 - DNA, 31 bp, Homo sapiens; identical to SEQ ID NO: 33931
  chr21:45536572-45536603
  hypo

SEQ ID NO: 194349 - DNA, 166 bp, Homo sapiens; identical to SEQ ID NO: 100340
  chr21:45546679-45546845
  hypo

SEQ ID NO: 194350 - DNA, 30 bp, Homo sapiens; identical to SEQ ID NO: 100341
  chr21:45551003-45551033
  hypo

SEQ ID NO: 194351 - DNA, 64 bp, Homo sapiens; identical to SEQ ID NO: 13307
  chr21:45553435-45553499
  hypo

SEQ ID NO: 194352 - DNA, 193 bp, Homo sapiens; identical to SEQ ID NO: 33934
  chr21:45558784-45558977
  hypo

SEQ ID NO: 194353 - DNA, 30 bp, Homo sapiens
  chr21:45575498-45575528
  hypo
aagcctgcagctggccgggtgctcccgctc

SEQ ID NO: 194354 - DNA, 30 bp, Homo sapiens; identical to SEQ ID NO: 100344
  chr21:45575743-45575773
  hypo

SEQ ID NO: 194355 - DNA, 102 bp, Homo sapiens; identical to SEQ ID NO: 100345
  chr21:45583676-45583778
  hypo

SEQ ID NO: 194356 - DNA, 30 bp, Homo sapiens; identical to SEQ ID NO: 100346
  chr21:45584127-45584157
  hypo

SEQ ID NO: 194357 - DNA, 30 bp, Homo sapiens; identical to SEQ ID NO: 33936
  chr21:45584417-45584447
  hypo

SEQ ID NO: 194358 - DNA, 31 bp, Homo sapiens; identical to SEQ ID NO: 33937
  chr21:45585662-45585693
  hypo

SEQ ID NO: 194359 - DNA, 77 bp, Homo sapiens
  chr21:45586572-45586649
  hypo
cagttggcccacagcgggcccctacgaggctgggcggtgaggggacggctcggaccgcccgcgccccaggacccctg

SEQ ID NO: 194360 - DNA, 30 bp, Homo sapiens
  chr21:45590406-45590436
  hypo
ggctacgggacggagcggagcgggttaggt

SEQ ID NO: 194361 - DNA, 30 bp, Homo sapiens
  chr21:45590772-45590802
  hypo
gggcagcctgagagccgaggcctcagtggt

SEQ ID NO: 194362 - DNA, 30 bp, Homo sapiens
  chr21:45593554-45593584
  hypo
gcgggaaaacaggtgcgggttcccatgact

SEQ ID NO: 194363 - DNA, 165 bp, Homo sapiens; identical to SEQ ID NO: 100350
  chr21:45605770-45605935
  hypo

SEQ ID NO: 194364 - DNA, 140 bp, Homo sapiens; identical to SEQ ID NO: 100351
  chr21:45617226-45617366
  hypo

SEQ ID NO: 194365 - DNA, 17 bp, Homo sapiens
  chr21:45621487-45621504
  hypo
atcttgttgcccaggct

SEQ ID NO: 194366 - DNA, 76 bp, Homo sapiens; identical to SEQ ID NO: 100353
  chr21:45621743-45621819
  hypo

SEQ ID NO: 194367 - DNA, 30 bp, Homo sapiens
  chr21:45622313-45622343
  hypo
acgtcggcacacgctcgaagcagcggacag

SEQ ID NO: 194368 - DNA, 357 bp, Homo sapiens
  chr21:45626012-45626369
  hypo
tccgacactagcacccgtgtggaaggaacgagagggagatttggggtccgcagaggcaaaccacaggaggacggagtcggagactggagcaccgcggccttgatcgggggacaccagggctgccggctgtgccagaaggggctgaggctggaccggattctctccgagttcccagaaggagccagtcctgccgacgccttgatgctggactctggcctccagaaatgtgcgaggacaaacatctgcggtttctaggccccgcctgtggtcctctgttgcagcagcctggacagtctggactgcctggacagcatgcagatgggctctgcccgcggctgcccacgagttcccaccgcc

SEQ ID NO: 194369 - DNA, 266 bp, Homo sapiens; identical to SEQ ID NO: 100355
  chr21:45628848-45629114
  hypo

SEQ ID NO: 194370 - DNA, 284 bp, Homo sapiens
  chr21:45653662-45653946
  hypo
cccacgaggaacactcgggtggttcctaccttctggctgccatgaacattcacggacaggcatttgtttgagtccctgttctgaatcctctggcctatatcgctaggagagaactgctgggtcctgcagtgcttccacgctgagcttttcgaggaactgccacaacgttccccatggcagctgcgcccttctgcttttccgccacgatgcacaaagctaacaatgcctctggtctctgtgtgcagtgcccttcagagagccgtcctcaccggcaaacaagcagc

SEQ ID NO: 194371 - DNA, 217 bp, Homo sapiens
  chr21:45656872-45657089
  hypo
cgccccgcagcatgccggccggtgacatcagggctcggttccggtagcggctgtccacgttttccaaggagctgttctgtgggatgtggtaggtcaccacggttttcgactcactggtttgccaatatacgtaaacatcatttaaatcaaaacggcttccttcagggcaagcgcagctgagctccacgtcgctgcctaccatcgctctgacttcctt

SEQ ID NO: 194372 - DNA, 165 bp, Homo sapiens; identical to SEQ ID NO: 13308
  chr21:45660234-45660399
  hypo

SEQ ID NO: 194373 - DNA, 541 bp, Homo sapiens; identical to SEQ ID NO: 133661
  chr21:45662514-45663055
  hypo

SEQ ID NO: 194374 - DNA, 101 bp, Homo sapiens
  chr21:45676495-45676596
  hypo
cagtttcaccatattggccaggctggtcttgctcatcctggcagcttccagaacctcggagaagagagccccaaggccagagatgccggggagaggtgagc

SEQ ID NO: 194375 - DNA, 133 bp, Homo sapiens; identical to SEQ ID NO: 100357
  chr21:45678288-45678421
  hypo

SEQ ID NO: 194376 - DNA, 31 bp, Homo sapiens; identical to SEQ ID NO: 100358
  chr21:45704769-45704800
  hypo

SEQ ID NO: 194377 - DNA, 111 bp, Homo sapiens; identical to SEQ ID NO: 100359
  chr21:45709580-45709691
  hypo

SEQ ID NO: 194378 - DNA, 30 bp, Homo sapiens
  chr21:45711059-45711089
  hypo
cctgcctgtcccctccgctccgggagatcc

SEQ ID NO: 194379 - DNA, 30 bp, Homo sapiens
  chr21:45711553-45711583
  hypo
tctgcgttcacatcccggtgctccttcccc

SEQ ID NO: 194380 - DNA, 30 bp, Homo sapiens; identical to SEQ ID NO: 33942
  chr21:45712923-45712953
  hypo

SEQ ID NO: 194381 - DNA, 278 bp, Homo sapiens; identical to SEQ ID NO: 133662
  chr21:45713495-45713773
  hypo

SEQ ID NO: 194382 - DNA, 42 bp, Homo sapiens
  chr21:45730209-45730251
  hypo
cccagtgtggccggcgtggcgggacgcggagcctggagcccc

SEQ ID NO: 194383 - DNA, 30 bp, Homo sapiens; identical to SEQ ID NO: 33944
  chr21:45730716-45730746
  hypo

SEQ ID NO: 194384 - DNA, 30 bp, Homo sapiens; identical to SEQ ID NO: 33945
  chr21:45735776-45735806
  hypo

SEQ ID NO: 194385 - DNA, 84 bp, Homo sapiens; identical to SEQ ID NO: 100365
  chr21:45736415-45736499
  hypo

SEQ ID NO: 194386 - DNA, 30 bp, Homo sapiens; identical to SEQ ID NO: 100366
  chr21:45744166-45744196
  hypo

SEQ ID NO: 194387 - DNA, 219 bp, Homo sapiens; identical to SEQ ID NO: 100367
  chr21:45744629-45744848
  hypo

SEQ ID NO: 194388 - DNA, 30 bp, Homo sapiens
  chr21:45745090-45745120
  hypo
tcagagggcaagggcgtcttcgactgcagg

SEQ ID NO: 194389 - DNA, 30 bp, Homo sapiens; identical to SEQ ID NO: 33948
  chr21:45746841-45746871
  hypo

SEQ ID NO: 194390 - DNA, 30 bp, Homo sapiens
  chr21:45749108-45749138
  hypo
agcggcctgcacacacggtcacgcatcacc

SEQ ID NO: 194391 - DNA, 503 bp, Homo sapiens
  chr21:45750032-45750535
  hypo
agacgctggggtccccgtggaggctggagcggcgttcaggtcctgcggtcactcggcgtgctcctgcacctcttccccacgcagggcctgcagccggctgcccacagtctgctgcacggcctccagcccctctgcatccagctcccgcagcagcagcaggatggcagtcaggacgttctgagggcagaggggtgcggactaagcccacccggcacggcgaggctgcttccctccacaagggctggggcctggccagcggtgccccaccacggagcgactggtcccgggggtgtgggccgtccaagtgactgaccggcacactcggagaatctgagcagaggagccccgcctgtggacgcgtgtgtggcacctcttccacgtgactcctgttgccctcagcccagcagggcccgggcccacattccacagaccaggacagcaggagaggctgaggggccaggacggctccgtgcggggcacgtgttacacgtgtgtgcgcattc

SEQ ID NO: 194392 - DNA, 30 bp, Homo sapiens
  chr21:45750860-45750890
  hypo
tgcaaaccctgtctgcgggtcgcatccaag

SEQ ID NO: 194393 - DNA, 30 bp, Homo sapiens; identical to SEQ ID NO: 100370
  chr21:45751130-45751160
  hypo

SEQ ID NO: 194394 - DNA, 211 bp, Homo sapiens; identical to SEQ ID NO: 100371
  chr21:45751582-45751793
  hypo

SEQ ID NO: 194395 - DNA, 30 bp, Homo sapiens; identical to SEQ ID NO: 100372
  chr21:45752445-45752475
  hypo

SEQ ID NO: 194396 - DNA, 856 bp, Homo sapiens
  chr21:45753622-45754478
  hypo
tttccattctacagaacgtggacgcgtcagagaagagaaacagcaggcctggagcggggacctgcaggctttaccctgcagcgtggggtccgtcccctccacaagcgaacacgcggagccgctcccgcaggccctcaaaggcgcggagccagggccccctgcctggagggctgcactcgcgtccggcaggcgcctcagaagggcggtcaccaggcccccatgggcagcctgccgtcctgagcccccctccccatgccatcccttcactcggggtttcccaggtctcatgcagctcctagctatgaggccgccccattttaccaagagcaaaactccggctgtgggactctttccaggatggggtctgcctcaggcacaggcagcagcgtgatgtaccgaccgcgtccgcggcctcgaggcttcctgctccgctccagtgcagtcaggcgtgcaggcaccacgcacctgagctcggtcaacacccctggggtcctgtccctcccgagatgtgacagaaatggccccacacacgagcggcctgatgctcggaggccctgtggcccctgggtgactcagtgagcggcagggatagggctggatccacagccccgccccaagcttcctgccaccgtgggaaccacaagctccacgtttccctgtcaggtaagcctttcggaggcaggcctgaaatcccagcctcactgtgtcgcctgactagtgaaacgagccccgcggcaggcacgcgcaccccccctcaacctctgggcgggcacgcgcaccccccccccccccccgctcaacctctgggcgggcacgcgcacccctgctcaacctctggactcgggctccatctcct

SEQ ID NO: 194397 - DNA, 242 bp, Homo sapiens
  chr21:45768304-45768546
  hypo
cgggttttatggtcgcgtgtcctctcttttatgggaagaatatcgtgtaattgctactgcagcagcgtccgggcagacagacgtgcagtgtgcggttcttctctagaaaggcaggagccgctcccagggcgatgtgggcccggctgtttcatcagagatggtcagcttggtacctacttcaccttaaatgatgttcccacagaggccccgggatacttggaaacaagcgcccagcccctctc

SEQ ID NO: 194398 - DNA, 300 bp, Homo sapiens; identical to SEQ ID NO: 100376
  chr21:45768769-45769069
  hypo

SEQ ID NO: 194399 - DNA, 31 bp, Homo sapiens; identical to SEQ ID NO: 100377
  chr21:45787688-45787719
  hypo

SEQ ID NO: 194400 - DNA, 624 bp, Homo sapiens
  chr21:45790609-45791233
  hypo
catgaatgtgtccggcggggtcggactggaccagctgttgggctttgtttgctctttttacgaattgaaaaactgaagccaggagcggctgggtgacgtcccaggtcactccttactttcctccccacgctgagctcagacgacttcccgtgacaccactgttggtggcggaatgggactgtggctgcttccgctcagccacgctccctctctgtggacggcggagggtgtgtgtcccagcccggctgccgccctcccttaggtctgtctcccggggctgctgtaacccaggctcacaaacctggtggcttaaagcagcagaaacttagtctatcagatctggaatccgcgtcgattggccatcatccagccatcggtgttggcggggccacctccctctagggcctaggggaagagcattccttgctgcctccagcgtctgggtgctgatggcattccctggccagtggccacctccctccagtcgctgcctccgtgtcccatggccgcctccctccagtctctgcctccgtgtcccgtggccgcctccctccagtgtctgcctccgtgtcccgtggccgcctccctccagtgtctgcctccgtgtcccgtggccgcctccct

SEQ ID NO: 194401 - DNA, 30 bp, Homo sapiens
  chr21:45814062-45814092
  hypo
ggttttatacattcacgatctgcacttctt

SEQ ID NO: 194402 - DNA, 644 bp, Homo sapiens
  chr21:45819155-45819799
  hypo
ggggctctcatatctccgcccaggggtcttcaccgagtgctaccggaaggacgaagagagagcccagaaactgctcacccgcgtgtccgaggcctgggggaagaccacctgcctgcagctcgccctggaggccaaggacatgaagtttgtgtctcacgggggcatccaggtgacctcccaagagccccttccagaaacagacgcctgtggtgcctgcagggcggacacagcctcctgttcgtgcagttggcacgcacactcacacaggcttcagggccctcagcagctcggggacagcgcctgacccctcggccacctgctccaggctctggcctcccattttgcagatggggggaagctaacatgaagcaaaagcaggagctggtggccatggagatcgcaattcacctccccatggatgttcctacctgggagcggcaggcagaagcccaggtggctctgggaacggcgtctgccctctctccctggagggataagcgggacacggcgtgtcctccctggagcagcaggggctcccaggcatggctgccctcagcatcgccctggaacccccggcagggcctggctcccagcgagtgccccttgcacgctgggcttccttggagcgccgagctattgccaag

SEQ ID NO: 194403 - DNA, 30 bp, Homo sapiens; identical to SEQ ID NO: 33953
  chr21:45820208-45820238
  hypo

SEQ ID NO: 194404 - DNA, 268 bp, Homo sapiens; identical to SEQ ID NO: 100382
  chr21:45834111-45834379
  hypo

SEQ ID NO: 194405 - DNA, 30 bp, Homo sapiens; identical to SEQ ID NO: 33954
  chr21:45844752-45844782
  hypo

SEQ ID NO: 194406 - DNA, 30 bp, Homo sapiens; identical to SEQ ID NO: 100384
  chr21:45847348-45847378
  hypo

SEQ ID NO: 194407 - DNA, 362 bp, Homo sapiens
  chr21:45847671-45848033
  hypo
tcctctgcctggagccggaggttgagtaaggaggtggtaggaggcgatggggcctgagagcagaggtcctggccaggtggctgcagctgcaggcggcccgctctggtgttgggggtatgtgggacgggcaagggcgggtgtttagggaggtgcatccggtggctatgggaagctgacgaggagagcagcaggtgcctggcatgggcaacaaggcgtgagcacctgctctcacgggtggctgccacacaggcaggtgtgtcaggacttggcaggacgtggtgtccatgcgggctttagtagtgcagaagagcactttctgtatgcaccatgcttctgttgtggacttgcgaatcatattttca

SEQ ID NO: 194408 - DNA, 31 bp, Homo sapiens; identical to SEQ ID NO: 100386
  chr21:45856840-45856871
  hypo

SEQ ID NO: 194409 - DNA, 143 bp, Homo sapiens
  chr21:45871120-45871263
  hypo
tgcggaggggccaggcggggaacacacacggaatcctaaggaaaacctgaggctggaagagaggacagaggaacagggctgtgtggagcggccagggaagaatcagcacacaccgggcccggccagagcgctcgtcacctcaa

SEQ ID NO: 194410 - DNA, 154 bp, Homo sapiens; identical to SEQ ID NO: 100387
  chr21:45895238-45895392
  hypo

SEQ ID NO: 194411 - DNA, 39 bp, Homo sapiens
  chr21:45895654-45895693
  hypo
cccggatggatccaccgctgctgacgtactttggtgctg

SEQ ID NO: 194412 - DNA, 213 bp, Homo sapiens
  chr21:45919120-45919333
  hypo
tcctctgtccgtgtccgtggtgaggggctgtgcccacccgctgcctagagaggagcaccggtgcttttgtaaagagcagtataaatacacttccgttcagataaaacacaataaataggtggcggcaatggcgggacggcaccacacctgctcaggcggccggacgcacactgcaggagtggctggcgagaggccagccgcagggacatgaac

SEQ ID NO: 194413 - DNA, 219 bp, Homo sapiens
  chr21:45922475-45922694
  hypo
aggatgtccacacgccgcatccctgacagaatccaaaggcagaagcaccagcactcgtgggttgtggctacacccggggcagggccccagctcagatcccacacgggtgcagccagcgccgggccatccactgggcccagccaatctcggaaatgacacctgacttgggactcgctgtgagccggtggcacctgcgagagaaggtgagcccccgggggg

SEQ ID NO: 194414 - DNA, 289 bp, Homo sapiens
  chr21:45929104-45929393
  hypo
cttgacaaaggcctgcgcggtcacgttcagctcgtagatgacggagttgatgacataggaatcattctggacttgcatctccacatcgtagctgtgactgtttgccacagcgaggaagatcctctccccgatctggaagacctcccagtctgcagcaccgaacgtctaggaccaaaggagagcaggtgcagaggtgtgggggagcgggcgcagaggtgtgggggagcgggcgcagaggtgtgggggagcgggcgcagaggtgtgggggagggggcgcagaggtgtgggg

SEQ ID NO: 194415 - DNA, 762 bp, Homo sapiens
  chr21:45939228-45939990
  hypo
gagccactgtccccgcgtatcgagccctccttgggagtcccaatttccagcccatatcacgctcttggccccagcttgcagctgctttcgcatctcaacctcaccagcctcaagtccaactccaggtcaatgattactggtcagaggggccattcctgctgagccctgtggtcaggctaacccatgaccgaaggctcctgaaccctccttcaggtccgctgtccgcacaccagcacgtggccaccagcccaggacacccttgtagtttcccagagtcttagcagcatgcgtgttgtggtgagaggactgtgcagggaccagtaagacaaggaacttatgctcagctctgtcccgtgccacatcaaaccaagtgacaggccgcattgcttggcttgatcccagttctgccacgggcaaagccctccaccgttctgagcctctgtgtccttgtggataacagggaccagtggcagcaagcccctctcaaggtgctgtgagggtgatgtgggcggatgcgggcagagctcttggcacaggtgctctacagagtcgaggctcagccagtgtgagccgctaccaccacctacctcctgaggctgttaccaaggccaatggctggaaggaatcttgctcacccccaatcccagtgcactgagcctcactctgcccccgtggcaggaggctcatcccgcctcttcctggctcccaggcacgctcacctgttccatccacagcactagcgagctcaaggtgtgttccttc

SEQ ID NO: 194416 - DNA, 267 bp, Homo sapiens
  chr21:45940259-45940526
  hypo
ctccctgacatctgctctcctcgtgccctgaacatccacgtaaagctgcccttccccactggaccatgagtgcccgaagggtggggcggtggtcacctggatgacgctgtgccccagcctgccagagggctgagcacgtgggagtcccggagcaattctctgcacgcattaaggcgtgtgattggtccctgtgagccgcggctcctggtccggcccctgcgggcttctcaaggtggtcacactcccggtttcctaagctgctcttac

SEQ ID NO: 194417 - DNA, 30 bp, Homo sapiens
  chr21:45941108-45941138
  hypo
ccgaggtgggagatgcgcccccacctgtct

SEQ ID NO: 194418 - DNA, 497 bp, Homo sapiens
  chr21:45941787-45942284
  hypo
aaggagcccaggagtcggatgtagaggtgcgagtgcaccttggtggaggtgccgttgaaggtgttggccaccaccaggaacgagtagggccccacactgaagaactcccagtcgtaggcgccggaggtggcgatggtctggttggcctcgaagagccgggttgccgggttccacttgtagatgacactgtcgatgttgtggttgtcgcctggaaccaagggactgtgctgggggcagggaggcagattccacagccccatggcagccccgacggaggcagagcccagtccaagtccctccccgaggaccgaagacccacgaggacaaggccaaccgctggggacatcctttcttaccttgagcctcccgccctcagccccttgctgactgcacctctgggccatcacaggtgctattcccatatggaaatgcttggtggcccccaccgcccttgggacaggtgtacatctccatggcctccccgtgtcctggaggtg

SEQ ID NO: 194419 - DNA, 30 bp, Homo sapiens
  chr21:45950877-45950907
  hypo
tcccatcccgcagcacgggtgttgggaagg

SEQ ID NO: 194420 - DNA, 92 bp, Homo sapiens
  chr21:45951199-45951291
  hypo
ggggcagggtttctccgaaggctccagaggaggacgcttcctcgactcatcagcttctggtggctgcacgtgctccccgtgacctgtggcca

SEQ ID NO: 194421 - DNA, 89 bp, Homo sapiens
  chr21:45951688-45951777
  hypo
agcaggcggtcttgacgagtgcgtggaggctgaactccggagatggagcaaggtgggtgcccgctgagggacagcgtggctagagctcc

SEQ ID NO: 194422 - DNA, 30 bp, Homo sapiens; identical to SEQ ID NO: 100389
  chr21:45992399-45992429
  hypo

SEQ ID NO: 194423 - DNA, 30 bp, Homo sapiens; identical to SEQ ID NO: 100390
  chr21:45999556-45999586
  hypo

SEQ ID NO: 194424 - DNA, 30 bp, Homo sapiens
  chr21:46021541-46021571
  hypo
caggccagctgctgccgcccagcctcctgt

SEQ ID NO: 194425 - DNA, 30 bp, Homo sapiens; identical to SEQ ID NO: 33956
  chr21:46032011-46032041
  hypo

SEQ ID NO: 194426 - DNA, 224 bp, Homo sapiens; identical to SEQ ID NO: 100392
  chr21:46035053-46035277
  hypo

SEQ ID NO: 194427 - DNA, 30 bp, Homo sapiens; identical to SEQ ID NO: 100393
  chr21:46035996-46036026
  hypo

SEQ ID NO: 194428 - DNA, 290 bp, Homo sapiens
  chr21:46036537-46036827
  hypo
tggctttgtttacctggaacccgagaccctgccctggtcagcacccaattcgagagctctgctcagcagtgagaatgagacaccgtgacaatgcggctgcgcaccggacacctggctcagcgcaggcagcgcacggacagagtctgcggtgtgaccacaccaagcagccctaaggcagcacgtgcccgcacaagcctcagcctctgctccggtcacgcctgcccacttgggtgtattttttgtctgacttttgcttctggggccgaacaacccagcgaattcaacacagc

SEQ ID NO: 194429 - DNA, 30 bp, Homo sapiens
  chr21:46063758-46063788
  hypo
cttagtgcggagttgcgggaagcatttctg

SEQ ID NO: 194430 - DNA, 223 bp, Homo sapiens
  chr21:46068600-46068823
  hypo
agacgcacccagggccgcagcctccagggcaccagagactttcagcctcccgatggctcccgaggggaaaggcagggacagccatggccgagcacagcttgtgacacccgggcccctgtgctctctgtggcagctgacatgcaggtctgctggtggccgtgtgtccatgcaactgtccaagcccacgcggtcaagctgccgtgccagacgcagaggagaaact

SEQ ID NO: 194431 - DNA, 30 bp, Homo sapiens
  chr21:46078015-46078045
  hypo
cacgcgcattgtgtgcgtggctccctcctg

SEQ ID NO: 194432 - DNA, 30 bp, Homo sapiens; identical to SEQ ID NO: 100395
  chr21:46101881-46101911
  hypo

SEQ ID NO: 194433 - DNA, 30 bp, Homo sapiens; identical to SEQ ID NO: 100396
  chr21:46121106-46121136
  hypo

SEQ ID NO: 194434 - DNA, 197 bp, Homo sapiens
  chr21:46144851-46145048
  hypo
aaaaaaaagaaaaaaaaaagtcttaaactaggactatgcttttggagcatgtcgcagggatctgaggcttggggtaagcgtcggagactggctcatttggagcttttggagcatgtcgcagggatctgaggcctggggtaagcctcggagactggctcatttggagcttttaaagcgtgtcgcggggacctgagtcc

SEQ ID NO: 194435 - DNA, 294 bp, Homo sapiens
  chr21:46155036-46155330
  hypo
gccagggctgcccggcggcaagtcacgagcagggcgtcactgtcccagcgcggcttcccagcctcctgcaggggccagggttggggtgcattctctgtcttctcagtgaggacgcgcaaatgttccaggatggaagataaatgttcaggaaaacgaggacccagaaattcttcatgggctgcatgagccctgaggcccgactggcaggccactgaggtcacctgaaaaactggtgacaacgggcgggctcagcggctacccggggacaatcacggcaggcggaagagcggcact

SEQ ID NO: 194436 - DNA, 327 bp, Homo sapiens
  chr21:46173264-46173591
  hypo
cttcgccgtcagtaccgctcagggccccagctacctgttctgcgtgtctgtggctgggctgtgtagtagaatcccgtgtcaaagcacccaccctcagaggctcctgggggaggcccggttctgtccagcagcatgggagagagatggtgctgatgaagaggacaacacggggctgtctgcagagcacctgccacgcgccaggctctgtgtccacaagcacggcggctgctcccacatgacggagctcgtgcggcagctccaggactgtctggtgccagagccccagctctccgccagccccaggccactgtgcgaggccctcagtga

SEQ ID NO: 194437 - DNA, 307 bp, Homo sapiens
  chr21:46183768-46184075
  hypo
gacacccagcacacccggggcaccctgcacacccaggcacccagcacactcaggcaccctgcacacccaggacacccagcacacccggggcacctacacacccggggcacctacacacccggggcacctacacacctggggcaccctgcacatccgggcacccagcacacccaggcaccctgcacacccaggacacccagcacacctggggcacctacacacccggggcacctacacaaccggggcaccctgcacacccaggcacccagcacacccgggcatccagcacacccggggcatctacaca

SEQ ID NO: 194438 - DNA, 201 bp, Homo sapiens
  chr21:46184286-46184487
  hypo
gggcacctacacacccggggcatccagcacacccaggacaccctgcacacctggggcacctacacacccagggcacccagcatacccgggcatccagcacaactggcacaactggggcacccgggacacctggcgcactcggggcacccacacacccagcacatgccgccccaggcccatggaactcgtgctctgatctga

SEQ ID NO: 194439 - DNA, 39 bp, Homo sapiens; identical to SEQ ID NO: 100397
  chr21:46186207-46186246
  hypo

SEQ ID NO: 194440 - DNA, 191 bp, Homo sapiens
  chr21:46187769-46187960
  hypo
tccatacagtggggacggccgtcctgaggcccgctggccgggctggcccttggctggcgtctgggaactgggatttccgaggggctccctgaaccccgcctcactgggcctgtgctatttgtacaaggtggtttaggcagaacactcacatccctgctgagagtctggaattgtagcgcagcccaggcaga

SEQ ID NO: 194441 - DNA, 213 bp, Homo sapiens; identical to SEQ ID NO: 33958
  chr21:46193372-46193585
  hypo

SEQ ID NO: 194442 - DNA, 168 bp, Homo sapiens; identical to SEQ ID NO: 100399
  chr21:46199321-46199489
  hypo

SEQ ID NO: 194443 - DNA, 111 bp, Homo sapiens; identical to SEQ ID NO: 100400
  chr21:46200861-46200972
  hypo

SEQ ID NO: 194444 - DNA, 30 bp, Homo sapiens
  chr21:46205515-46205545
  hypo
actagggtagagaggcggccctggaagcca

SEQ ID NO: 194445 - DNA, 300 bp, Homo sapiens
  chr21:46206037-46206337
  hypo
cacagacaggcctcccgccactctgggcccctgcagcaggcgtgctgccccgctggcatgagtgcaggtgcgcctgcattaacacatgaaacaagcaggttacacatcagttcatgtatatgatctcctgcttctacagaaataaaaagagctgccccgatacaagtatacagccgcacagtccactaatgaggacagcccagactgtgggactcgccatccatctcataactgccttgggggccacattacacacaaacacagattccagaaaccttcagacaccgaaaaaacatgtgc

SEQ ID NO: 194446 - DNA, 22 bp, Homo sapiens
  chr21:46206716-46206738
  hypo
aaagactgggcttggcgcggtg

SEQ ID NO: 194447 - DNA, 30 bp, Homo sapiens; identical to SEQ ID NO: 33960
  chr21:46232814-46232844
  hypo

SEQ ID NO: 194448 - DNA, 101 bp, Homo sapiens
  chr21:46238871-46238972
  hypo
gtccctcaggagtgcccgggtggtgccagccggggcgtggcggaggtctcatctgatggtgagcccggccgaaggcgggggaggccgcacttcaggctcag

SEQ ID NO: 194449 - DNA, 327 bp, Homo sapiens
  chr21:46256955-46257282
  hypo
cctccgtgcagtccccggcacccagggtgcagcccccagcacctccgtgtagcccccgacacccagggtgcagcccccggcacctccgtgtagcccccggcacccaggcagtccccggcacctccgtgtagctcccggcacccagggtgcagctcctggcccggcctctgctttgccggttgcttccagtcctagcagcaaagatcgcagagcctctgtcctcttggggtgcggggcagagcacgggcaccatctcctcagggctgggcccccgttcttgccctacgactctgcagagacaatcgtgtgactcgcagctcatgaatt

SEQ ID NO: 194450 - DNA, 308 bp, Homo sapiens
  chr21:46257708-46258016
  hypo
ctgggaacctgcctgcggtgcaggcgtctgcccttcctagaggaggcgctgggtgagaccctccagggtgtttggggccaagctgtgcgcacctctgatgccagctgttctcggtttggaaagcgctcactgtgcatgtggcgctgggggctgagctgcacgttccaggccccccccccaggccccccgcacacatcgtggcccacagccatgagcctcgcagcaccaccataaaggggaatcataaatagggaccaggtcccagaaggtgcacacagcgcgcagggcaccagcgcccgggtacgccc

SEQ ID NO: 194451 - DNA, 30 bp, Homo sapiens; identical to SEQ ID NO: 100407
  chr21:46270003-46270033
  hypo

SEQ ID NO: 194452 - DNA, 198 bp, Homo sapiens; identical to SEQ ID NO: 100408
  chr21:46270476-46270674
  hypo

SEQ ID NO: 194453 - DNA, 277 bp, Homo sapiens
  chr21:46277396-46277673
  hypo
atcttgaaacaaacaaaaaacacccagccagcctcctgaagatggctttataagcaaactcccctgggcagtagattaccgcatgattcactgtttttaactacagttaatagctgtgccaccaccacaggtgacaccgtctcacctccaggggctgggagttgaacacttgctgcatgcctgggccctggcaaggaggccgacggccaggcctctggggctcccgcagcctcacccctctgctgccccggacgctgagatccgcatttcttagttt

SEQ ID NO: 194454 - DNA, 43 bp, Homo sapiens; identical to SEQ ID NO: 100410
  chr21:46278608-46278651
  hypo

SEQ ID NO: 194455 - DNA, 30 bp, Homo sapiens; identical to SEQ ID NO: 100411
  chr21:46306214-46306244
  hypo

SEQ ID NO: 194456 - DNA, 404 bp, Homo sapiens
  chr21:46306496-46306900
  hypo
gctcacccacagcggcggacgcccagaggacaagctgcctggggaggccggggtgcagccacacacgggtgtccacggcctcccgcagcaggaggtcgcatagtgtgggacgcacgtgcccctctgcgtgggacccccaaggacggccacttacattgttccactgggacttgagcttctccttctcaaagcgcctgtactcccggaggtcgctcaggtggatcagagccttccagatgaccagcaggagaatgccgatcagcacgatgcctgccacggtgcccccgacgatggcggcgatgttggggcctgccacacactctagggaagaagcagcacacctgagcgtcagtccagccccatctcactgagccgtgtgcccacaggtccgaggtcaccccaca

SEQ ID NO: 194457 - DNA, 30 bp, Homo sapiens
  chr21:46307250-46307280
  hypo
ctcagcaggtgaggccggtgccaggatgag

SEQ ID NO: 194458 - DNA, 1471 bp, Homo sapiens
  chr21:46308526-46309997
  hypo
cttccgcaccaccctcgcctctgcggagaccccgcagccggagctctggagccggtccccgctgcaccccagcggcctcacctcggctctcatccacatagatgaggtagcggtccatcccgtcctgctgctccagcgtgtaggccacccagcagccctctgagtccctctccttgcaggtcctgcccttcacggggttgttcgacagctgcaggcccggacacgccgcgctgcagttcttcccaaaggggcccttttcgaacttcaggcactcggcgcaggagctgcggggagccaggtgtgagcatcggtgccagggtgtgcgggggctccggcaacgggggctcgggcttgggtgtgtgtccaccagggggggcaggtggggttggggcgccctcaggccaaggagggggcccaagtggggcagatgcgggtgcagcgggtgaactggaagcctgatcccagggcccgcggcaggtgcgcacaggagggaggagggacacaggggcacggcggccgcggagggcccctcagtccagacgcacccgcagagaaccccgcggtgcagaggtgctcactggggtccccgagtgagcccggctgctgggtaggtggccggggagtggggatccctgcccgccctgcctgctccgcctgcactcacatgtacttgccacagggtgaggggcagccggggcactcctggcacagaggcagctggtagcctgaatggcactcgcatacgttgcagcggcaccggccacgaccactacactcaacacgccgcgggttcaggcagccctcagtggtcctctcgcactggcacgctgagccctcaaagcccgggtggcagcggcacttcccgcagaagcagagccccctccctggaagacggggcagcacggctaagctcctgcttggcctgggaaccgagacccgcccgaaaccccactgcggttgctccctccggcccgcctgcctcctccagcctgggggatgttcctgagcaaaaggcatggggccactagccaggcccttctgcccccgccagccacgtggccgcctcctggccagtctggacctcccctgccctgctgtgaatgggacctcaatagggctatgaccgttcctcctgtgggccctccccacaaggacgccttgtcctcatggacacagaaactgaggcagggcggggtgcagggccatccaagttcctgctgacgcccggtggctgggcgagacttgcactgtctgtcctcaggatcccccctttctgttccactcgttgaatggtccagaacgcaccccccaacaccaagtctgtgccgcaggacggccgttgtccagcagggacccacgggctcacccgggccgccgcagacctggccgttgtagcgctcacagttgatggtgtcacactcgcagtactgcccgtatatcagcttgccggggacgtcgctggtgtggcaca

SEQ ID NO: 194459 - DNA, 384 bp, Homo sapiens
  chr21:46310422-46310806
  hypo
acatggcctgtgctgcgataccggtgctctgtgagtggctggtgtctgctcctgcgtgccccacatggtggccagtggggactcggcactgcctcctgccacagccccgccctccctcctgcgttcgtgcactgacaggccaggttgtgggagaatgcagggacaaggggtttttacagatgtggaagctggcatcaagccgctggcaggcaggagccacacacaccctgaggcatcctcagagacggcactgccacgggctctcctgctccccagaggaggaagctgcaggaccgagtgtctgagtacctgtggcagggcaccccccgacacctgccaagtgttccgactgagtcacccctacagtcccgtgaagaggccgcc

SEQ ID NO: 194460 - DNA, 179 bp, Homo sapiens
  chr21:46311696-46311875
  hypo
ttcaacagggacctgcgcccgcctcacctgcagatgccgcactccaagaagcccttgccatggcagaggctgcggtctctgctctggtcccggcaccggcactcacactggggaagaacctgcacggtcactatgtccgtgaagcccagcgcccggatgacaaacgactgctcctggat

SEQ ID NO: 194461 - DNA, 108 bp, Homo sapiens
  chr21:46315932-46316040
  hypo
gagtgatcccgcctgcggtgtgagtgctcccgcctgcggtgtgagtgatcccgcctgcagtgtgagtgatcctgcctgcggtgtgactgctcccgcctgtggtgtgag

SEQ ID NO: 194462 - DNA, 587 bp, Homo sapiens
  chr21:46316854-46317441
  hypo
ctggtgaggaggggaccgtcatggccacctacagatgggacacagggctgtgacatcctgaccagcaggtggtctctgtggatgtccggccccagccctgccctgcgctgacccactgtcccggcagcctgaccagctctgggtgcccactcggagggtcccccagacacctgcccccatcccgtgtctcccgcagggtcctgctcccactccagagcccggggaacctatggcaggaaccgctggtctcgctgtcggccccaacacaccacgaggttgagcttgtagctgggatacgggcctgacaatggatccctgtagttcagcaaatgttcactttacaaaagcagcggccctcccgggcactttccttccccaaaccccgagtatgtctcctcagcctaagcagcagggcaggggctgtgaggctgcccagctgggcagagccccaggcagggggaagagggggccctggtttcctgcgtgccattttgaagaagatggcggtgatggccctggaatggccagcaggtcggtcactgtccggatgaggataatcgggccctttagggcggctgctctgtgaa

SEQ ID NO: 194463 - DNA, 1059 bp, Homo sapiens
  chr21:46318785-46319844
  hypo
ctatcgacacgcaggcgtcctgtccccgacgggaagcctcgggctcctcacctagggggatccaggacctgggccggctggttgctcacgtgcccagcatgcagaggtggcgctcagacctgcagtggcgctgggtctggcctgtggctgaaacatgcccccacccaatggatgctcgggacccaacagcactcacctcgtaggtcttcaccatcctactggtcaccgcgaagatgggctggatgttgttttcagccagcttgtgcgccagctggcccaccgatgggtagtcctggagagaggaggtcctgctcagttggccccgagtccaggacaaggcttccaggtacccgcccctgtctgccccgctcagcgtcagccctgcccgtgcttcgaaccctctctggggaaggctggagaggcagaggctgccacgcaggagtgcagggcagagagctgccacgccctctgggcaatgtgtgcatagactcgggctttcagagtccaggcatgagcagcatttgaggcgtctcaccgtgggactggggatgtccacgggggcagaatcccagccttccccacacggtggacctgctttcgcactgagggacactcagtttcggtagaggccatgagtgtcaggtgcggctctccctacccgagttccgggacccgagggccgtccctcccgtctgtggctcccggcggaggacctgagtcttgtatctctaaagtcctttgcggcccccagagcctacaacgtcaggctgcaagagcgtcgcactacggccagcgaggacaagccccttgtgaccagtggttgcctctcggcccacggctgatcccagccagaagtcctggcccctctgagccattgagatgcctccgcagagaggctcatcctaacccgtgcatcctgggctccttctcgcctctgtccctccctgcatgttcctcatggtccccgcagccgctcacccagctcaggcaatgggggcagggaggggccacactggaggaggcggactcaggggcagcagggaacgtacagtggaggcc

SEQ ID NO: 194464 - DNA, 655 bp, Homo sapiens; identical to SEQ ID NO: 100419
  chr21:46320218-46320873
  hypo

SEQ ID NO: 194465 - DNA, 217 bp, Homo sapiens
  chr21:46321382-46321599
  hypo
cccaagcaggggcagcggcctcaccgggcaggcggcgacctgcatcatggcgtccagcccaccctcgggtgcatccaggtttccggaaatcagctgcttcccgacctcggtctgaaactggttggagttgttggtcagcttcagcacgtgcctgaaggcaaacgggggctggcactctttctccttgttggggcatgggtttcgcagcttatcaggg

SEQ ID NO: 194466 - DNA, 660 bp, Homo sapiens
  chr21:46323288-46323948
  hypo
cggactcggtgatctcgttgagggcccggagcaggtcgccacctagcttcttgacattcctgaggtcatcaagcatggagtaggagaggtccatcagatagtacaggtcgatggggtagcccttggcccgccggaaggtcacgttgaacgctgctgcctggcctgccggtggggacagaacaaaaggagccacacctcacatctcacacagggtgtctgggggcgtgtggccccgagcgggctgtgcactggcaccctctcctccagcccccaaatcctcctgacctcccctctccccgcctggcaggagagctgaggaccagacacaggacatccaggcaggctggagtttcagaggaaggacatgactcccggacgcaggcatgtgcctcgcagtgacactgaaacccgcctggggtgcttagagttgacgccagcgacattggggacgcctttcattgagagtggcagcggctcacctgggctcacacctaacccggccccatgcctgcagtcccacgggcgccctcatcagcagccacatagacaggcatcacacgaacctggcacttcccagcaaggcccacgcgggccgtccccaggaggcccctttctccatcccagccctggacttccgctcgcccgcgtctcagtcacacg

SEQ ID NO: 194467 - DNA, 89 bp, Homo sapiens
  chr21:46324431-46324520
  hypo
accaccacacatgcacgcatacacacacacctcacactcatacacaacaccagacacaaagcacacatactatatgtacttgttcatat

SEQ ID NO: 194468 - DNA, 29 bp, Homo sapiens
  chr21:46324579-46324608
  hypo
cacacatgcactcacgcacatacaccaca

SEQ ID NO: 194469 - DNA, 243 bp, Homo sapiens
  chr21:46324927-46325170
  hypo
gctttgggggccgtgcggcgtctgcagcgacatggaggaggcagccaagaccatgtccccacgagcaatgtggccatgctgcagtcaaagggcacagacataggcctttggtggctgaccaaggggccccgtcccttcccttccagagtagaggctcagcgaagggccagcaggctgcgggggtagggccaggaccccgcgagaggacagtcccttcccagatcctgccgccctgctctggga

SEQ ID NO: 194470 - DNA, 38 bp, Homo sapiens
  chr21:46325575-46325613
  hypo
gcttgtgcctgctcacggggcagcgaggggcaggcctg

SEQ ID NO: 194471 - DNA, 448 bp, Homo sapiens
  chr21:46326562-46327010
  hypo
aaaggtgcagaacgtcgggctgcgagagagtgcagacactgggcaccgatggtaagggctggggcagctccacctggggacagagcggaagggcactgaggagctcagctttccagcagccttggggcttcactggcccacacacccgtccgacccggacacatgccttctgggcagccctgacaccccagagcagggccggactcccagccagagccaataaccagcacagacggtgcctggcaccaccaccgaggccaagcctacctggtcgcaggtaaagcgtcactttttgtggggacagctgcttctggcccccattgtggtcttcctgggtttcagcgaggcttgtggggtccatgatgtcgtcagccgcacagcccctcatgagcagctgtggccgggtgtcgcagcgaatggagtcaggatcccccggccctgtgaagtt

SEQ ID NO: 194472 - DNA, 626 bp, Homo sapiens
  chr21:46328822-46329448
  hypo
cggatttgagcaactcggggaagaaaggacagccacagatcatgcactactgaacaaaataaaactgtgggtcacgctgatgagagagaggctgcagagaaggagagacccttccttaggttggcagccgtgagtggcaggcggggaccagcacggcaccaatctgcagccatcgcagtgatggcggcttcaggcggggacctccgcggatgctgagcctgcgggtgcgatttgatgagggcagaacctcaccagcccacagtggctgcgaggggatcatgcagcgggatggggaggccggggggatgccgtctcagcagagccgtccacgctgacctcatcaagactgggacggggccacagcagtgcctctcatgggcacttaggacaccgtcactgaggggctcctgccaaagcacacctgagtccaggcagaggaaactccagacaagacccccgagggtcatgctacaaagctgctctcctgacttcctcagaaacgcccaaggacaggaaagacaaagaaagctgaggacttgtccagattcaagaagcccaaggagacggctgagcgtagggcgagcctgggtgaggagattcagagcgttagacggctgagcgcagtg

SEQ ID NO: 194473 - DNA, 469 bp, Homo sapiens
  chr21:46330229-46330698
  hypo
gactcgatgcattcccggcagctgctgaccttgaacttcgtgcactcctgagagaggactgagggacgaggccggctggtgagtgggtgctctgggccgccctgcccacacccaagggggagtagagcaggaaggtcagaggaggcccaaaaagacagggaggcagcctccaggaggagaccccgcattcgccaccacccccaggtgcaaagaggggccctcgggaaacagcacagctacagcctcctggcacgtgcggagacgaggcctgagtccccgacctacccccagtggcaaggtccttccccagcctcccgggaacttctgtctatgggaaagtgagggcaggccctgttctccctgattggaatgtcacgcgtggagtcccctccgtggaacacagaactcaccgcacccgagggagagcagccccaccagggcgagcagtggggggcgcaggcccagcatg

SEQ ID NO: 194474 - DNA, 30 bp, Homo sapiens
  chr21:46335395-46335425
  hypo
tgactcggaggtgcgcgggaagtgatggac

SEQ ID NO: 194475 - DNA, 1579 bp, Homo sapiens; identical to SEQ ID NO: 133684
  chr21:46351314-46352893
  hypo

SEQ ID NO: 194476 - DNA, 171 bp, Homo sapiens; identical to SEQ ID NO: 33972
  chr21:46353948-46354119
  hypo

SEQ ID NO: 194477 - DNA, 30 bp, Homo sapiens; identical to SEQ ID NO: 100428
  chr21:46357091-46357121
  hypo

SEQ ID NO: 194478 - DNA, 141 bp, Homo sapiens
  chr21:46359114-46359255
  hypo
taacgccccccagtacgcccagcatagacagcacagggtgcaagcagtcagatgagcagggctcccgttcccagcacgggacccagcccgttacctcgctgctatgtttcccacgtaaacggagcaatacccaattctaaa

SEQ ID NO: 194479 - DNA, 97 bp, Homo sapiens; identical to SEQ ID NO: 33974
  chr21:46368231-46368328
  hypo

SEQ ID NO: 194480 - DNA, 30 bp, Homo sapiens
  chr21:46372569-46372599
  hypo
ggttgtgtggccccacgggaccctccctcg

SEQ ID NO: 194481 - DNA, 512 bp, Homo sapiens; identical to SEQ ID NO: 100431
  chr21:46372999-46373511
  hypo

SEQ ID NO: 194482 - DNA, 30 bp, Homo sapiens; identical to SEQ ID NO: 100432
  chr21:46376785-46376815
  hypo

SEQ ID NO: 194483 - DNA, 37 bp, Homo sapiens
  chr21:46383297-46383334
  hypo
ttttttttaaataaacgagagtttaattttgagaagt

SEQ ID NO: 194484 - DNA, 201 bp, Homo sapiens; identical to SEQ ID NO: 100433
  chr21:46392161-46392362
  hypo

SEQ ID NO: 194485 - DNA, 30 bp, Homo sapiens; identical to SEQ ID NO: 100434
  chr21:46396141-46396171
  hypo

SEQ ID NO: 194486 - DNA, 291 bp, Homo sapiens
  chr21:46397986-46398277
  hypo
cgccaaggatgcctggcgagtgggtggccgaggcaagttggagcctgtgtccctgctgttcagtgtcctggcccttccctgacacgagcagacacggcatccacagagacagcccggacaccctccaaggccccggccgatgggacagacgggcgtacaggagccataggcagcagatcccacgctccctcggccggggccagcttggctgcccagccccagctccttagagaacgggcttctcgcttcagaggagctggtcacaaaccagtggtcgcgacaaaaccattc

SEQ ID NO: 194487 - DNA, 30 bp, Homo sapiens
  chr21:46398735-46398765
  hypo
ggggcggatgtggggcgcgtgttgggaaca

SEQ ID NO: 194488 - DNA, 30 bp, Homo sapiens
  chr21:46410440-46410470
  hypo
gtcacactggcactcgctgtctgtgtcacg

SEQ ID NO: 194489 - DNA, 335 bp, Homo sapiens
  chr21:46411917-46412252
  hypo
aggagctttggggagcgtctccattgccagtcaagagccaggcgccacgcaccccagtccggagggaccgctcagcctcgggctaaaaaagggagagagcgcaagcagatggcgtccacagccgcgtctccaggccacagcgggcacctgcagggcagctgggaatgggaagggcagaggcggccagaagctcgtgccctcactgatgccggccctggcagttctttccaaaaatcttcccactcagctccctgagtcccacggatcaggcgcccttagcctgctgtgcagggggtgggggagactgaggcacagaaggccgggccccccaggca

SEQ ID NO: 194490 - DNA, 30 bp, Homo sapiens; identical to SEQ ID NO: 100436
  chr21:46422923-46422953
  hypo

SEQ ID NO: 194491 - DNA, 492 bp, Homo sapiens
  chr21:46424402-46424894
  hypo
ggtccacccccactgcggtgcagtgccagggtgagccagccacccccggcgggagaaacaccatccccacagccggcgctcctgtgccccctcctcccagccccgggcaggcctcgcctctgtgcgtttcccatggatgaggtcatagagcgcgtggccttccgtgcctgcctcttccgggcagcagcatggtgggtgtttctgaggctcctccgtgtcgctccacccgtcagcacttcatgcctctcggggctgggccacatttcgttgcagggatgggccacgtttttaacctgtccatcagcggacggacgtttgggctgattttatcttttggctatgatgaataacgcggtgatcaacattgattcacaagttttgtgcggacccgttttcagttgtcctgagtatcagcccgggcctagacttcccgggttatatggtgatacagtttaaacgcatgtccttgccaagcctcgtgttgaactgtca

SEQ ID NO: 194492 - DNA, 431 bp, Homo sapiens
  chr21:46452327-46452758
  hypo
tgctgggaaacgggccgggcaggcaggggcggggccgggcgggtgaggacatggcttctgtgcgcacggcccggcgcgatggctggtgtggacccctacctttggaacacgtggggccaggccgagggggttccgccacgtctcctgggcagagcgccagcctcagtcaccgtgtcactgtgtgtccctccacaccccgagtcctggcaaaccaaggcagtgcaggaggacgcctggtgcccagggtgatggacatgggtagcacatgggccccatgtgtccgggagcctggggcctggtgcaccaggtctcagctccttcccaccgtgggttctgggccagttgcaggcagagaacagagcgggtgcctggctcaagccggccagtgtctcccccatgtctcagctccttcccaccgtgggttctgggcc

SEQ ID NO: 194493 - DNA, 165 bp, Homo sapiens
  chr21:46462852-46463017
  hypo
cctgtgggtgctccccgaggctgcccaagggcagcctggaggaggggaaggccccgctccaggtggccacaaacgcaggtctgaggctcttgcacaaaccccacagcgcacacaggtaacacatcacggcatgcacgagtcacacaaacacggccgcaatgctgg

SEQ ID NO: 194494 - DNA, 1144 bp, Homo sapiens
  chr21:46492080-46493224
  hypo
gtcacaatagaaaccgtctctgtggagaggatggcacctgaagccatggaataggaagggagcatcagaggctgctggctggtcctgcagagccgcctgagaggcctgtgggagcagcagagggtcccggccttgggcgccatccgctctctgctgctctggagggagaaaaaggacaagttgaaacttgcacaagcagcctccattctggggagttcccttgtattccccacaccaacccgcacctcagcgaaggcctgtggaagacttctgcagtgacagccccgatgaaccatgcttgccgtgcccgtcccctgtgcggtgcctcacgtccactcaggccccggccatctcaccctcctggggagatggagggaagcaccatggggatttgctttttcttgctgccgacggagcccagccaccacgggagggaggcccggccagcctgcggtgggtgggtgacatgtggcccggatctgcccggggcgcctgcctgtaagtgggcccagcagacaccccatggagccgaggcaagccgtcccagctgaaccggcttaagctgcaggcccacagagtcatgagcagtgaagagaggttttcgccctctgaggtttggggtggcctgttacacagaaatacacacaacgtcctcaggcacgtatctctttaagaatgtgtcccgagaaggcgtcccaggagtcttgatttttatttagccgtccacggttgcccctttgggtgcttcgccttcagatggggtgaagggctcacttgttagctggctggccccaaagacaggcttgttttccaccaggcagtgactgaagccggcagcctgctgcataccgcgggccttcccctgacctgtccgggactgcgggctggcggctgacacctgcggagtgcttaccgcataccaggctcccaaacttccatctgtgttcgtcttttaagttttgttgttttccagagtcggagtctcagtgttgcccgggccagagcgcagcggccatttataggcgcggacctcggcctcgcacaccacagctccagctctgagacacaagcgacccgcacccccccaccgcccagccccagcctccagactggctgagatcacagtgtgcgccaccccatccct

SEQ ID NO: 194495 - DNA, 109 bp, Homo sapiens; identical to SEQ ID NO: 100439
  chr21:46549425-46549534
  hypo

SEQ ID NO: 194496 - DNA, 51 bp, Homo sapiens; identical to SEQ ID NO: 100440
  chr21:46549556-46549607
  hypo

SEQ ID NO: 194497 - DNA, 30 bp, Homo sapiens; identical to SEQ ID NO: 100441
  chr21:46553592-46553622
  hypo

SEQ ID NO: 194498 - DNA, 30 bp, Homo sapiens; identical to SEQ ID NO: 100442
  chr21:46554112-46554142
  hypo

SEQ ID NO: 194499 - DNA, 30 bp, Homo sapiens
  chr21:46640857-46640887
  hypo
gatgagctgggccgcgcgtcccgcctgtgt

SEQ ID NO: 194500 - DNA, 30 bp, Homo sapiens
  chr21:46645469-46645499
  hypo
aggaggggacggctccgtcttcacattgtg

SEQ ID NO: 194501 - DNA, 166 bp, Homo sapiens
  chr21:46645776-46645942
  hypo
gtctctgccccctagcgtgttttgtgacaatctccctgggtgaggagtgggtgcacccagccccgaggccagtggttgctcggggccttccgtgtgagttctagtgttcacttgatgccggggaatagaattagagaaaactctgacctgccgggttccagggact

SEQ ID NO: 194502 - DNA, 247 bp, Homo sapiens
  chr21:46673895-46674142
  hypo
gtctggatgagcccccggtctggtggagccccccggtctggtggagcccccggtctggtggagccccccggtctggtggagccccccggtctggtggagcccccggtctggatgagcctctggtctggtggagcccccggtctggtggcgtccccggtctggtggcgtccccggtctggtagagaacgttgaggtgagtgctcgaggggttgctcgctgctgctgggccccacggtgcccacctggc

SEQ ID NO: 194503 - DNA, 186 bp, Homo sapiens
  chr21:46677734-46677920
  hypo
caaggagcacaagtccgcagtgcccatgagatcctcatgctggccggcgcaggagccatcctcggcctctgcaggtcctcgtgggaaaccgcgggggcacgtggggcggctgcagggtccgcaaagccggctgtttgcgaagggcgcagctccacctggaacagccgaggccgcccacgcgcttcc

SEQ ID NO: 194504 - DNA, 118 bp, Homo sapiens; identical to SEQ ID NO: 133689
  chr21:46686338-46686456
  hypo

SEQ ID NO: 194505 - DNA, 30 bp, Homo sapiens; identical to SEQ ID NO: 33978
  chr21:46696611-46696641
  hypo

SEQ ID NO: 194506 - DNA, 30 bp, Homo sapiens
  chr21:46697198-46697228
  hypo
agcagcgccatccacggtggaggctcttgg

SEQ ID NO: 194507 - DNA, 30 bp, Homo sapiens
  chr21:46697833-46697863
  hypo
tggctctgcagccacgtgaggcttgggggt

SEQ ID NO: 194508 - DNA, 30 bp, Homo sapiens; identical to SEQ ID NO: 100446
  chr21:46703735-46703765
  hypo

SEQ ID NO: 194509 - DNA, 30 bp, Homo sapiens
  chr21:46705812-46705842
  hypo
ttccggggggttgacgtcatacagaagata

SEQ ID NO: 194510 - DNA, 30 bp, Homo sapiens
  chr21:46712506-46712536
  hypo
cgaaggaggggctggcggcccccacaggcc

SEQ ID NO: 194511 - DNA, 30 bp, Homo sapiens
  chr21:46713332-46713362
  hypo
ggactggccgaggaccgctgagctcaggac

SEQ ID NO: 194512 - DNA, 30 bp, Homo sapiens
  chr21:46720167-46720197
  hypo
cgaggaaggtgggccgggcacagggcggcc

SEQ ID NO: 194513 - DNA, 242 bp, Homo sapiens
  chr21:46723183-46723425
  hypo
ggtgtgtgggaggcccgggcctcgagccatgtcttggtgcgtgtcggggggacgtgttctgtgaagatgccgcagctgcctcacctcctttccatgtgcggggatgggtgggcagcgtccttgccaggggtgttcccggcagagggaggagagcatcacccttgggccaacaccgccaccagcagcggccggaccatggagctgagcatcagctggacccagggcagcgaggggctgtgggc

SEQ ID NO: 194514 - DNA, 30 bp, Homo sapiens
  chr21:46723837-46723867
  hypo
gggacgccaagcccccgttcatggtcctcc

SEQ ID NO: 194515 - DNA, 172 bp, Homo sapiens
  chr21:46726341-46726513
  hypo
aggtgaatctaataccgtgtgcgccgctgtggctgccgtcctctctacatcgcacctcccgtcagccccgccggcctccctgcatgtgctcacgtgctcggtctcctgtgcgtaaccggtcttctgacccttggggctcagaccggcctagaggctgcgtcccctaaagctg

SEQ ID NO: 194516 - DNA, 355 bp, Homo sapiens
  chr21:46727436-46727791
  hypo
ggagagtctggcccaggagggcggcgggcagagaggacgagaggaagacggagccggggtgcacaagcacacacatgcgtgcacgtgcaaatacacatcagggacacacgtgcacagacatgctccaggaacatgaacgcatgtgcaaatacacaccaggaacacacgtgcacagacacactccaggaatatgcatacttgtgcaaatacacaccaggaacacacgtgcacagacacactccaggaatatgcacgcatgtgcaaatacacaccagaaacacacgtgcacagacacactccaggaatatgcatacttgtgcaaatacacagcgggaacacacgtgcacagacacac

SEQ ID NO: 194517 - DNA, 287 bp, Homo sapiens
  chr21:46748049-46748336
  hypo
tgaacgccccggggtcggggtctcacagcaggagcttagctggtgtcggcatctcctggacccgtcctcagctccgagcgcccagtcctgccacctgtgtccaagtctgcactgtgcccacgaggccctcaaggccgcagacagccccacacttctcggacgccgccccagcacggtccttgtgtgaggtggacactccttctggacgccgccccagcacggtccttgtgtgaggtggacactccttctggacgccgccccagtacggtccttgtgtgaggtggaca

SEQ ID NO: 194518 - DNA, 30 bp, Homo sapiens
  chr21:46753267-46753297
  hypo
cagcgggttcctttccgtccccgcatcttc

SEQ ID NO: 194519 - DNA, 30 bp, Homo sapiens
  chr21:46753702-46753732
  hypo
gcgatgctgtttccccgaccacacaggcct

SEQ ID NO: 194520 - DNA, 71 bp, Homo sapiens; identical to SEQ ID NO: 100448
  chr21:46756060-46756131
  hypo

SEQ ID NO: 194521 - DNA, 30 bp, Homo sapiens
  chr21:46758728-46758758
  hypo
ggacgggagtcgcagcgcaagcttgcaggt

SEQ ID NO: 194522 - DNA, 256 bp, Homo sapiens; identical to SEQ ID NO: 33980
  chr21:46763203-46763459
  hypo

SEQ ID NO: 194523 - DNA, 83 bp, Homo sapiens
  chr21:46763921-46764004
  hypo
aaataaataatgaataaaataaaggtccggatgagtttggaatgtggaaggaaccacaccgggagtggcgctgggtgtgtccg

SEQ ID NO: 194524 - DNA, 501 bp, Homo sapiens; identical to SEQ ID NO: 100450
  chr21:46771044-46771545
  hypo

SEQ ID NO: 194525 - DNA, 412 bp, Homo sapiens; identical to SEQ ID NO: 100451
  chr21:46772698-46773110
  hypo

SEQ ID NO: 194526 - DNA, 30 bp, Homo sapiens
  chr21:46778999-46779029
  hypo
cgcagagcaggagagcggcatggagcgggg

SEQ ID NO: 194527 - DNA, 652 bp, Homo sapiens
  chr21:46779375-46780027
  hypo
ccctgacccctcacgcgtccatccctctgtcctcatgggcaccgggtgaggcctcggggacagggaaactggacgggccccactgctgtcctgggccttcctcccgtgcaggtgataaggaggtgagagcatcgtgacggctggcacaggcctgagagggaggggatgggggctgctctaggtggggtcgggaggccccactggggagattcctccaggagacccagaaagctggaagccgccagcctatgcagagggcgctccctcctcatggatacagtccccagagaacccccccgcaagggccttaaagcgaaggcttgttctgaggttcaccaggacaagcaagtgtggctttgccctcttgccatccacacccctgggacatccaatcaggaccagcgatcgtccactgcctagaccagacccagtcatccccgaattcattatgtgggaactgaggagggggctccaggcagggggatcgtgcaggtggtcttggtgtccaggaggcctcacagtatccactcaccgccgtctccaccccctcaggcacaggtccctgtcctcatcctcatcagtgcggtcccacaactcaggtgcggcccccactccccttcccgccaacccccttccccggccctgccgccct

SEQ ID NO: 194528 - DNA, 165 bp, Homo sapiens
  chr21:46785895-46786060
  hypo
cgtgacattcctcaccgcattcctcaccgcattcctctgtaaaccaggcggtgttggcacccatgagcctgtgtcttctatgacatcaggagttttatccctcacgtcagaaatcagggttccaggcgccttggtttttcttggcgccagcggcttggctataga

SEQ ID NO: 194529 - DNA, 30 bp, Homo sapiens
  chr21:46786427-46786457
  hypo
acacagggctcggctcgcgtcctctctgtc

SEQ ID NO: 194530 - DNA, 30 bp, Homo sapiens
  chr21:46790691-46790721
  hypo
cactggctcatgatacggagatcatctgga

SEQ ID NO: 194531 - DNA, 30 bp, Homo sapiens
  chr21:46790942-46790972
  hypo
ctctcccaggcctcccgctcagagcccagc

SEQ ID NO: 194532 - DNA, 200 bp, Homo sapiens
  chr21:46799932-46800132
  hypo
ctcgcacccagagtccgtccgtgcacacactcaccttgcacccagagtccatccatgcacacacgctcatctctcacccagcgttggtccgtgcacacacgctcacttcgcacccagcatccgtccgtgcacacacgctcacctcgcacccagtgtccatgcacacacactcacctcgcaaccagcgtccatccatgcac

SEQ ID NO: 194533 - DNA, 693 bp, Homo sapiens; identical to SEQ ID NO: 133692
  chr21:46800405-46801098
  hypo

SEQ ID NO: 194534 - DNA, 243 bp, Homo sapiens; identical to SEQ ID NO: 133693
  chr21:46801323-46801566
  hypo

SEQ ID NO: 194535 - DNA, 590 bp, Homo sapiens
  chr21:46801819-46802409
  hypo
gagtcctgtccaggccgaaaggtggtgggtgggtgctttaggggccagtggggagcgaggccgaagctatctctgtgcagctgccccctcacgctgctgtggccccagggtttggttcagatgctgagtgtccggtgacttccagacacttcctttccagtctcagggaacccaccccacaaagcgcctgccccaggacctgggtggcgcgtctgtgtcttctcagcatatccggttcttggagcagggagacgacccagatcctgctctctggctcctggcccgctgcccccaagctgtcaccaaggcaggtcatggatgttccgtgtcatggctgcgtgggccgttcgaccacggccacacacgcatagactgaggaagacagagcaaggggctgatcgctgccaagcagtggatgccagtgcaccgtgacaaggagcccagagcctttggtgggcgcctgactgtgtcttcaagttcccgggatctgtgtggacagctgccatcccagtcggccctttcttggttttcttggttttcagagaaggggcgaagaataagggggcagcgtcttctccaccagaagacac

SEQ ID NO: 194536 - DNA, 219 bp, Homo sapiens; identical to SEQ ID NO: 33985
  chr21:46802647-46802866
  hypo

SEQ ID NO: 194537 - DNA, 90 bp, Homo sapiens; identical to SEQ ID NO: 33986
  chr21:46804100-46804190
  hypo

SEQ ID NO: 194538 - DNA, 329 bp, Homo sapiens
  chr21:46804429-46804758
  hypo
ggattatagacgttagccaccgtacccagctggcaaaatttctaggtgaaataataaaataaaataaaaatagtggtcggaaatctgtctcctgagacagaagtgtctgattttctataactcagttaaaagtggtgccaatagaaacgcagttacgacgtcaataccggaaggccaggaatgccgcgtggtgaagaaagtgggtccagaggccctccctgaccttggtgtgctcggcctggacatgcctgtcactgttgatgaacagcaggtgcagatgtgtgtgccgccctgactggggtctcggggaggcgcggcgccgtcccact

SEQ ID NO: 194539 - DNA, 30 bp, Homo sapiens
  chr21:46804975-46805005
  hypo
agccgtgcgctaggtcgggctgtgtggctg

SEQ ID NO: 194540 - DNA, 71 bp, Homo sapiens
  chr21:46805774-46805845
  hypo
acgtggctgcctctccgtgagccgcacgggcagcgtgctaggcctgcgtgcctcgccggagggagggctga

SEQ ID NO: 194541 - DNA, 347 bp, Homo sapiens; identical to SEQ ID NO: 100461
  chr21:46808692-46809039
  hypo

SEQ ID NO: 194542 - DNA, 106 bp, Homo sapiens
  chr21:46810056-46810162
  hypo
cttctccaggggcttcgccgtaagggacaggcctgacaccaggattctccaagaactgcctgcgtctcttcctgctgagcactcacctcaccgaaaccacaacagg

SEQ ID NO: 194543 - DNA, 344 bp, Homo sapiens
  chr21:46811011-46811355
  hypo
acgtgtccccttcaccggcacctgaaggcagagcaggggagttgggtctggacgagcctcttcactgagaacatccccagaaagctcaacttcatcgtaaaaattcatccacatttgtagtcctggtcttaaggttttttattgactttgcttaccgtaagatacaccacgcatccacaagtgtgtgtgtgatgtgtttgcgtggtttacagaataacataaaaaccatccgaaacacaccactgtccacaagctgagtctgaggccaggctcccaggcaaggaggtggtccctggtggcacgggcagggtgcgtggagacggggacccagaggatgcacggga

SEQ ID NO: 194544 - DNA, 164 bp, Homo sapiens
  chr21:46811414-46811578
  hypo
ttatgggaggcacaattcgagatgagattcgggtggggacaaaccacatcacctggctacctactactgtaccacgcatacccggccaagatgagattcgggtggggacacagccaagccacatcacctggctacctactactgtaccacgcatacccggccag

SEQ ID NO: 194545 - DNA, 353 bp, Homo sapiens
  chr21:46811999-46812352
  hypo
gtgggagaggagctccgggctggctgatacactcgcctcctgacaggagcttgctttgcctccagtttgcagccctcacaaacaaggccgctatgaacatgtggcttcaggtcttgatgcggatgactgaggacctgaatatctggatcacgagacaggtgtgtgtttaactttttagcaagcggcaaaactgtttttcagaagggtcgtcctactgcggaagtgagtggccttccctgagtttccagtcggtgctgggagttccctgagtttccgcactcagggccgggagttctagctgctccacacctttgacgactcttgctacagtcggtcttgtaaattgtaacctt

SEQ ID NO: 194546 - DNA, 30 bp, Homo sapiens; identical to SEQ ID NO: 100465
  chr21:46812600-46812630
  hypo

SEQ ID NO: 194547 - DNA, 332 bp, Homo sapiens; identical to SEQ ID NO: 100466
  chr21:46812981-46813313
  hypo

SEQ ID NO: 194548 - DNA, 282 bp, Homo sapiens
  chr21:46813679-46813961
  hypo
agccggctgtggggccgggggctgagcctgggtgtcagccggctgtggggccgggggctgagcctgggtggcagccggctgtggggccgggggctgagcctgggtgtcagccggctgtggggccgggggctgagcctgggtggcagccggctgtggggccgggggctgagcctgggtggcagccggctgtggggccgggggctgagcctgggtcgcagtcggctgtggggtcgggggctgagcaggcactcttaggccgtctacctccgaacccagctcttc

SEQ ID NO: 194549 - DNA, 30 bp, Homo sapiens
  chr21:46814522-46814552
  hypo
gagggaacgaaggggcgctcacgtttatgg

SEQ ID NO: 194550 - DNA, 139 bp, Homo sapiens; identical to SEQ ID NO: 100467
  chr21:46827461-46827600
  hypo

SEQ ID NO: 194551 - DNA, 30 bp, Homo sapiens; identical to SEQ ID NO: 100468
  chr21:46827862-46827892
  hypo

SEQ ID NO: 194552 - DNA, 30 bp, Homo sapiens; identical to SEQ ID NO: 100469
  chr21:46828202-46828232
  hypo

SEQ ID NO: 194553 - DNA, 418 bp, Homo sapiens; identical to SEQ ID NO: 100470
  chr21:46834411-46834829
  hypo

SEQ ID NO: 194554 - DNA, 46 bp, Homo sapiens
  chr21:46835034-46835080
  hypo
gaggtgacagtgcggcgtggtgttggttcaccgaaggggtggcatt

SEQ ID NO: 194555 - DNA, 665 bp, Homo sapiens
  chr21:46835358-46836023
  hypo
ccagggctcagagctcaggaccggctgccacgggtggggcaggaggaggggcaggaccatgcgcaggggcggcggagcggggctgtgaatggagccccccttccggaagatggatgcaggtgggaaccagcgtggtgtggagttgagagcgggggtgcggcaggcggccggggcaggccccggacgggaaagtgcaggcggtgccattgatcagaccctggctgggggcctggggttcacgccttgcctggccttcagagaggtgcgagctctacttttggagaatgaggcaaaggcgcagaagcactcccggaaagtgccatccagcccagtgcctggcgctgcagccgggtggagccccaggtggtgctcacgcagccaggcgggcatggtgtgttgggggttttcataaagaaaagctgaccaggcacgtgccaagcaggccctcagccctgagggtacttgccgggggccgggagagtgtgggcccccgcttatccagaacactgcgtgggccctcggctatctggaatgcctcgccgggcctttcaattatccagaacacacagccagaccccttctgttatccggactgcccagcaacaccgggcaggtatgcctctgtgaccctgacccagctgagttgggaacgtggccacaccggc

SEQ ID NO: 194556 - DNA, 30 bp, Homo sapiens; identical to SEQ ID NO: 33993
  chr21:46836324-46836354
  hypo

SEQ ID NO: 194557 - DNA, 219 bp, Homo sapiens; identical to SEQ ID NO: 100474
  chr21:46837281-46837500
  hypo

SEQ ID NO: 194558 - DNA, 276 bp, Homo sapiens; identical to SEQ ID NO: 100475
  chr21:46837960-46838236
  hypo

SEQ ID NO: 194559 - DNA, 289 bp, Homo sapiens
  chr21:46838476-46838765
  hypo
cctcggggtgctcaccggcggttcccacctgctctgcacagcccgcctcgtgcacctgctgaccccaccgtgtccacagcccgccctccttggctcacatctcttcctggggtctcagggaagcggcacctcctcaggggcctcccagccacctcacgtcacttcctggggtctcagggcagcggcacctcctcaggggcctccaaggctgtctctgctttagcgttgggttcccgggtccctcccaccccgacctcctgtgcctgcggccctgcgaggcgtgatggcc

SEQ ID NO: 194560 - DNA, 491 bp, Homo sapiens; identical to SEQ ID NO: 100477
  chr21:46839033-46839524
  hypo

SEQ ID NO: 194561 - DNA, 30 bp, Homo sapiens
  chr21:46840415-46840445
  hypo
gtcccctcggggcaccgagaacagacccct

SEQ ID NO: 194562 - DNA, 440 bp, Homo sapiens
  chr21:46841006-46841446
  hypo
gtccctgcccggtaccgggtcagctggtgcctgcctgtcctgccctgcactcctcaggctcctcaaggacagacggacagacaggcactctagagaagggaccttggccagacggctttgccgcccccacccccataggtgcttgctttgagccccttgcaaaggtgaagccagatctgggatcccagggcctggtgcggctggacatgggaggagggccacggtcacgcttgcacggggcagagactcccagaaccacaggcctcaggagagctgggaagggaaggagagggcactgcggtgcctggagagccagagtccgcccgtgtggaagtgttgggggctgtgttgcagtgacagccctggcgtctcaggagcggagcaggacaccgcgtttctggctgtgcaaggctccacgcgggtcagcagcccatcctggc

SEQ ID NO: 194563 - DNA, 57 bp, Homo sapiens; identical to SEQ ID NO: 100479
  chr21:46841889-46841946
  hypo

SEQ ID NO: 194564 - DNA, 151 bp, Homo sapiens
  chr21:46842389-46842540
  hypo
gcagaagccaggagccggggcctttgcgtggctgcctggcctgacgcacctcgcgccgtgccaggacccgggcagggcagcaaaaggcatctgtgagtcgccgtcctgtgcgggtctcagggcacagtgggtggcacgggctctcccagcc

SEQ ID NO: 194565 - DNA, 39 bp, Homo sapiens
  chr21:46844057-46844096
  hypo
ggccaccccacctcccgcagtgcccggtccgccatccac

SEQ ID NO: 194566 - DNA, 974 bp, Homo sapiens
  chr21:46844298-46845272
  hypo
taaacacgcctggagcgcagctctgctgtgggttagccgtgggtctctgggcgagggttcccgggatacagacacctgccccaaggtgccccacagaggatgacccccagggcagccgtgcctgagcctgcgtggtcacctcccacagtgccaaggcgctcccccaaggcccctgcggcccacctgaccagtggagaactcgcgagcactcggccagtggtgcctccaatttgcagcctccaatccctggtcagaggtgtgacctgaccctggaccagagcgctgggccaggtcctggtggcttctgcccttcagcttggaagctcctgaaaaccggctcccttccggggcagcccttggcccccactgaccctccctcagtcctaggtgtgcagtggcgtggggaccctgggaggcccgtggcgcagccccttcccgcctcctgcccgtcggtttccattgctcaggcactgcctcgcccgcgcctctttctcccagacctgagccaccgctgccaggatccttccccagctggttttccttctctttgatgtgtttccactgagggtccaaaccggtccaggcgcgggttccagaactttcttcagatctctcgcacctgaaaatttcctctgtagccattcgcaggaggtttctcagatgccccgggctcgggggccagtcagtctcatgaggacggggtgggtctgacttgtggcatcgcggcctctccatcggtgctgctgggcctgtgagccaatgggtgggcagcaccacccaccgcctccttcctcacaccagtcttgggctgcgcagagccccagccatgtgtgtgctgagtgcagtgtgaccgcgtccgcccgtctccccggacacgcctgttggagccccggccgtgtgtgtgtgtgtgctgtgagtgcagtgtgaccgcgtccacctgtctccctggacacgcctgtcagagccccagactg

SEQ ID NO: 194567 - DNA, 30 bp, Homo sapiens; identical to SEQ ID NO: 100482
  chr21:46845709-46845739
  hypo

SEQ ID NO: 194568 - DNA, 323 bp, Homo sapiens
  chr21:46846291-46846614
  hypo
ttacaggtgtgagccaccgagcctggcctggagttattttgggagagggcagcccctggttcagcgtggcgaggctgcgcttgctctcccgggcgggcgtccacaccctcctcgccgagatggagaagcccaaacccctgcagcgctcccccatcacgtccggccctggaagcccccggaaaccctgccacgccctgagtgggagagcgcaggtccctttccggccctggaagcccccagaaacccttgggtgccaggcctggccgggacagcagcgacactgcatgctcagcccttgcgtgagaccacgggagtgtccgccc

SEQ ID NO: 194569 - DNA, 75 bp, Homo sapiens
  chr21:46846970-46847045
  hypo
aaggcgatgtctgtgcgtttgctttctgctgcagtttaaaaagccgggctctctccggagcgtgtgtagggcctg

SEQ ID NO: 194570 - DNA, 22 bp, Homo sapiens
  chr21:46848190-46848212
  hypo
cgctctgaggaaggtggggcca

SEQ ID NO: 194571 - DNA, 324 bp, Homo sapiens; identical to SEQ ID NO: 33999
  chr21:46848490-46848814
  hypo

SEQ ID NO: 194572 - DNA, 23 bp, Homo sapiens
  chr21:46849113-46849136
  hypo
ccgagactacagctttctttaac

SEQ ID NO: 194573 - DNA, 687 bp, Homo sapiens
  chr21:46849578-46850265
  hypo
gctgggagcctgactgcgggtgacggacaggctctggcagcccctgtcagcatcctctccagggcatgtgaaagccagtgtgtcctcagctgccagtgccccctccccacctcctctgggcccatgtgcacgggacctgggctcccccaaccaagcctgcccgccttggttcagcagaacggctcctgtctctacagcggtgccaggccaggagtgctgtgtctgtgaagcggggtcatggttttggggccctcatctccctcgcgccctctcattggggaccccccgtctccctagcgccctctcgtcctctcctgcatgtgctgtgtctgtgaagcggggtcatggttttggggccccccgtctccctagcgttctctcgccctctccagcatgtgaagtggggtcatggtttgggggcccccatctccctagcgccctctcgttggggaccccccgtctccctagcgccctctcgccctcgcctgcatgtgctgtgtccatgaagtggggtcatggtttgggggccccctatctttctagcaccctctcgccctctcctgtatgtgaagtggggtcatggtttgggggccgccatctttctagcgccctctcgccttctcctgagcgtgtggaactctgtggtggtcagagctaaggttctgaataggtcgaagcacctccccg

SEQ ID NO: 194574 - DNA, 30 bp, Homo sapiens
  chr21:46850558-46850588
  hypo
agaatgtggagatggcgcgtctcggcccgg

SEQ ID NO: 194575 - DNA, 33 bp, Homo sapiens; identical to SEQ ID NO: 100489
  chr21:46855681-46855714
  hypo

SEQ ID NO: 194576 - DNA, 30 bp, Homo sapiens; identical to SEQ ID NO: 34002
  chr21:46859968-46859998
  hypo

SEQ ID NO: 194577 - DNA, 30 bp, Homo sapiens; identical to SEQ ID NO: 34003
  chr21:46860944-46860974
  hypo

SEQ ID NO: 194578 - DNA, 821 bp, Homo sapiens
  chr21:46861362-46862183
  hypo
ccagcagctgcctccaggcctcgggacgcttgaacccacctcgagggctgccagctcctggcctggaggtgcccccaccgggtcctccagtcctgctgcccggtggctctggccatggttcccgtcccgggctgttcatgttccccctgctcctctccgtgatctgccatctctgcttcaccagccggcgccttctacagaacacggccgtgagcttcccatgttctgccgctggctcttcacgccaacaggtctcctctgagcagggccagcttatggcatggcgccgggtcagctctcacctgtccccctcagacgcccacctctgatatgcaactatttccagcagaaaatgtcccatgtccttaaaggatggagcacgctgctgggaacacggctctctccataaaggagggactccccatgccactcccaaggccacgggaggccgccctcagcacagggtccatggggtctcggggtctccctgccaaagcacaggcctggtgaccccctgggaccctcactccagggagaggactgtgcatcttgtgtgcttctcacagtcactgtgtggggttcagcccaggggaggtcacctcgccctcatccacgcagtcctgcggggaggcccatttgccctgactgcacagtcctgcagctcggctgtgcccttgagtgggtggcgctgccctgttgcccaccgtagctgctgtggggccacagccttgagcctggacactggccatgactggataccaccggtgcacagggtgcacgtgaggaaaccctgcccgttctgtgcccgtgccttgcttttt

SEQ ID NO: 194579 - DNA, 118 bp, Homo sapiens
  chr21:46862420-46862538
  hypo
cgtagtctctgtcgccgggtagtagcagggccggaccccttcggatgagcacgcccaggcccaagagtggcagtcctggtgtgggcggtggtgctggtgtgggcggcggtcctggtgt

SEQ ID NO: 194580 - DNA, 30 bp, Homo sapiens
  chr21:46862766-46862796
  hypo
aggtcctggtgtgggcggtggtggtgctgg

SEQ ID NO: 194581 - DNA, 30 bp, Homo sapiens
  chr21:46863018-46863048
  hypo
tgctggtgtgggcggcggtgctggtgtggg

SEQ ID NO: 194582 - DNA, 427 bp, Homo sapiens; identical to SEQ ID NO: 34006
  chr21:46863355-46863782
  hypo

SEQ ID NO: 194583 - DNA, 382 bp, Homo sapiens; identical to SEQ ID NO: 34007
  chr21:46864061-46864443
  hypo

SEQ ID NO: 194584 - DNA, 30 bp, Homo sapiens; identical to SEQ ID NO: 100496
  chr21:46865016-46865046
  hypo

SEQ ID NO: 194585 - DNA, 173 bp, Homo sapiens
  chr21:46866053-46866226
  hypo
ttgcgtgtatctgttcgttggcccagcaccgtttgttgaaggctgctctttcctcactgaacagtctcgacattcttgtcaaacatgagttgcccgtaggttatgagtttattccagaaccctcagttccactgcaccgatgcgtgtgtctgtccttgcgccactcccacact

SEQ ID NO: 194586 - DNA, 30 bp, Homo sapiens; identical to SEQ ID NO: 100497
  chr21:46868261-46868291
  hypo

SEQ ID NO: 194587 - DNA, 30 bp, Homo sapiens; identical to SEQ ID NO: 100498
  chr21:46868668-46868698
  hypo

SEQ ID NO: 194588 - DNA, 313 bp, Homo sapiens; identical to SEQ ID NO: 100499
  chr21:46870762-46871075
  hypo

SEQ ID NO: 194589 - DNA, 66 bp, Homo sapiens
  chr21:46885375-46885441
  hypo
ccgggcacttcactgcgtaagtgctatggtgtgatggagtgatgatggtggcgcactcttcaagct

SEQ ID NO: 194590 - DNA, 349 bp, Homo sapiens; identical to SEQ ID NO: 100501
  chr21:46885700-46886049
  hypo

SEQ ID NO: 194591 - DNA, 286 bp, Homo sapiens
  chr21:46886368-46886654
  hypo
ttgagctctcgcacccgggaaggctgagctctcgcacccgggaaggctgagctctcgaaatggggttcaggcatttgctgtttgattccaggacatctgagacagctgggcctgtacctcggggagtggaggctgcgccattctctgcccatccagcatcttagggccgggcatttggaagctggcttctgaagggagcccccaggagcttcgtggagaggagacgggacagctttggaaagggcgttgctgtcactggggtccctggggccgccggtgtagcgtg

SEQ ID NO: 194592 - DNA, 325 bp, Homo sapiens
  chr21:46888079-46888404
  hypo
tgcctctccaggccgcgtcggtggcccctggttccgtcctgcacagccacctcaccagctgtctttctttttgcagagcgcatcagcgaggaggtggggctgctgcagctccttggggaccccccgccccagcaggtcacccagacggatgaccccgacgtcgggctggcctacgtctttgggccagatgccaacagtggccaagtggcccggtaccacttccccagcctcttcttccgtgacttctcactgctgttccacatccggccagccacagagggcccaggggtgctgttcgccatcacggactcggcgcaggccatgg

SEQ ID NO: 194593 - DNA, 242 bp, Homo sapiens; identical to SEQ ID NO: 100503
  chr21:46893643-46893885
  hypo

SEQ ID NO: 194594 - DNA, 1846 bp, Homo sapiens; identical to SEQ ID NO: 100504
  chr21:46894479-46896325
  hypo

SEQ ID NO: 194595 - DNA, 895 bp, Homo sapiens
  chr21:46900276-46901171
  hypo
cttgtagaaacagctcgatatgcagcttgcggggcaggggccaggagtaggccaggcggggggccgagctcagggcaacgtgtctctccggctcttttcctcagaccttcattgacatggagggatctggcttcgggggcgatctggaggccctgcgggtgagtggcccttaaactgcagcgctgcccgatgtctgtgcccatgaggaacaggccatggacccccaagattcagctggggtcctgtggggggtggggatgaggcccgttctgggggtggtggtcatccctggtgggtgccacatgggctgtgactatctgtgttcgcccacgtccagggtcctcgaggcttccctggacctcccggaccccccggtgtcccaggcctgcccggcgagccaggccgctttggggtgaacagctccgacgtcccaggacccgccggccttcctggtgtgcctgggcgcgagggtccccccgggtttcctggcctcccggtaagtcctgcctccaccgtcagtgtcgggagccctgtctgctgggagtgaggggtgaacaccccacatgggagcccctgccccgcctcaggcctccccagtccccgcctcctcacctcatctcctctaggagctggcgggcagttgctgactcggggccaccctggggtgtgcggaagcacctgagtggccaccccatggttctaggggtgctgaccagtgggggtgaccgcaagcaaggcctccgacctctctggccctgtgggtccacggactgcacagagagcgtctccatgagcaattcccatgggtgggtgtgggagggccgaggtcagcattgctggagggccaggggagggaggagcctgcttggccaacgcggctcgtagggtctcaggt

SEQ ID NO: 194596 - DNA, 265 bp, Homo sapiens
  chr21:46901443-46901708
  hypo
gccagccaaccctaccgatgggcattcaccgtcaccatcggctctgaggcctctctgggtgccgcatggcaagtgctccccagaatccattctgaggggaatttgggcttaaagaacatgcctaatccatattcacgcatgtggccagactgcctctcagagggagcagcggctaccccagccctggtgtgcaagcatcttcccgccgtggtgctgtcggctctgccatctcatcctgccaatgtggccgcgaaactgcgggcta

SEQ ID NO: 194597 - DNA, 30 bp, Homo sapiens
  chr21:46902001-46902031
  hypo
gggggtgcctggtgacgcccgtgaagggga

SEQ ID NO: 194598 - DNA, 183 bp, Homo sapiens; identical to SEQ ID NO: 100507
  chr21:46905926-46906109
  hypo

SEQ ID NO: 194599 - DNA, 1263 bp, Homo sapiens; identical to SEQ ID NO: 100508
  chr21:46906440-46907703
  hypo

SEQ ID NO: 194600 - DNA, 31 bp, Homo sapiens; identical to SEQ ID NO: 100509
  chr21:46908632-46908663
  hypo

SEQ ID NO: 194601 - DNA, 520 bp, Homo sapiens
  chr21:46908935-46909455
  hypo
gtcctctgctgcgtgcggggccaagggcgcacggggcccaccctggggctgcactctcacgcgtcaccagcccctgccatggcacctgctcctttgagctttgctttcatttgcaagacatcgggacactcaaaaggctgacttatgggaagggccgtgtgtttgctttcttaaattgtttgaatgaggccgtctcagcggggttcctcttgcagtctgcagtcctagtgatggaatatgtccccaggttccgcagccgtcccggccgggtgccttcagccagcctgggcccacggggtccctgcacaagttgctcagtgtccctgggacccctcggctctgggctgggggagggcggtgagatgcatcctgggtaactcacccttcccttcacccggggtggacgctgcctgaggactgggctggccccagcaggtgctcacggagccccttttttcacttagggggatcctggcgtgcctgggctgccgggggcgaaggtaagcgctgtgcccgggtt

SEQ ID NO: 194602 - DNA, 324 bp, Homo sapiens
  chr21:46910337-46910661
  hypo
cgagatgtgccctcccgggtccctgggtctccatgtgccctcgtgggtccctgggcctccgtgtgccctcccgggtctctgggcctccgtgtgcccactcccgggtctctgggcctccgtgtgccctcctgggtctccgtgtgccctctcaggtccctgggcctccgtgtgccctcccgggtccctgggccttcgtgtgccctcccaggtctctgggcctccgtgtgcccactcccggagcgccaggagttaagtataagtctccgtcagggctcttggtggctgcctccctcccaggccccagccggtcgggaaataaagaac

SEQ ID NO: 194603 - DNA, 636 bp, Homo sapiens; identical to SEQ ID NO: 34015
  chr21:46911011-46911647
  hypo

SEQ ID NO: 194604 - DNA, 1588 bp, Homo sapiens; identical to SEQ ID NO: 100514
  chr21:46912094-46913682
  hypo

SEQ ID NO: 194605 - DNA, 30 bp, Homo sapiens; identical to SEQ ID NO: 34018
  chr21:46913901-46913931
  hypo

SEQ ID NO: 194606 - DNA, 30 bp, Homo sapiens; identical to SEQ ID NO: 34019
  chr21:46914210-46914240
  hypo

SEQ ID NO: 194607 - DNA, 477 bp, Homo sapiens; identical to SEQ ID NO: 34020
  chr21:46914468-46914945
  hypo

SEQ ID NO: 194608 - DNA, 139 bp, Homo sapiens
  chr21:46915150-46915289
  hypo
acgtgtgaggctgagcgtgggccggccgggcctggcgtggggctaacggcaggcaccctgcgggaaggtgtctggtaatcatcagtgcccagcagtccccaccccctgtgctccgccccagggtcgccccgggatgaac

SEQ ID NO: 194609 - DNA, 133 bp, Homo sapiens; identical to SEQ ID NO: 100519
  chr21:46915603-46915736
  hypo

SEQ ID NO: 194610 - DNA, 49 bp, Homo sapiens; identical to SEQ ID NO: 100520
  chr21:46916178-46916227
  hypo

SEQ ID NO: 194611 - DNA, 30 bp, Homo sapiens; identical to SEQ ID NO: 100521
  chr21:46916913-46916943
  hypo

SEQ ID NO: 194612 - DNA, 30 bp, Homo sapiens; identical to SEQ ID NO: 100522
  chr21:46917281-46917311
  hypo

SEQ ID NO: 194613 - DNA, 102 bp, Homo sapiens; identical to SEQ ID NO: 100523
  chr21:46917526-46917628
  hypo

SEQ ID NO: 194614 - DNA, 30 bp, Homo sapiens; identical to SEQ ID NO: 100524
  chr21:46917902-46917932
  hypo

SEQ ID NO: 194615 - DNA, 412 bp, Homo sapiens; identical to SEQ ID NO: 34021
  chr21:46918203-46918615
  hypo

SEQ ID NO: 194616 - DNA, 487 bp, Homo sapiens; identical to SEQ ID NO: 100526
  chr21:46918885-46919372
  hypo

SEQ ID NO: 194617 - DNA, 30 bp, Homo sapiens
  chr21:46919587-46919617
  hypo
ttcccgtggtctcagcgccctggggagtgg

SEQ ID NO: 194618 - DNA, 307 bp, Homo sapiens
  chr21:46924376-46924683
  hypo
ggagcccgggggcggcggtttcttcggctccagcctgcccggcccccccggccccccaggccccccaggcccacgtggctaccctgggattccagtaagtcccagcctgtgcaggcagagcccatgtcccaggggtctgggtgcaggagccgagggcaggtccagcccggccttcgacacccgcgaaggccggagctgcccctgcaagctcagcagccccgacatgtccctgtccccgtgtggggacgcagcaggccacatgggtgtgggtgcactgaccccggacaccccccgtccccctgcagcg

SEQ ID NO: 194619 - DNA, 30 bp, Homo sapiens
  chr21:46924935-46924965
  hypo
ctcagaggctgcgctcgccaagggggtctt

SEQ ID NO: 194620 - DNA, 599 bp, Homo sapiens
  chr21:46925366-46925965
  hypo
tgggcacctgcgtcccgtgccctggctggttctgcagcccctgcccctcagagacactctcccacggaccccacagggagatatacaggaggccaagatgcggtttccagggtggaagcggggccaggccatgggggaatcaggtggacccaggaggacgaccaccagccgggaagtgcccagggcctgtacattgtccacggaggcgcaggagctggcggcaggcaggggtccccatggtgctcatgggggcagccgcctcagtccacacctgtccaaagccctgcggcccctgcccagcaccctgaaacgggcattccttccttccgcccctgccccccgccctccccgccaagccccacacctctgcatttggtcccagcaggtgaggctctgggctacacgccaggccatgctgggccaggtgcacgaggttcccgagggctggctcatcttcgtggccgagcaggaggagctctacgtccgcgtgcagaacgggttccggaaggtccaggtgagcgctctgtgtgacgggttctggacccgtggaagggccgaagccgcctcctggggcttaaggaaggcgagaggctcaggcc

SEQ ID NO: 194621 - DNA, 342 bp, Homo sapiens
  chr21:46926183-46926525
  hypo
agacaaggcgcctgacgggacgaggcggcaggggggctcaggccctccagggccacgtgacgtccacagcacggccccggctggggggcaggctgtcccgtggctctgcaccccgcgttataaacaccaaggtgggatgaaatgcatcctctctgcttagcacgggccttgctcaccagcctggctcctcagacacacctgggattgccccttccaggacaggccagcccctttcctgctttcccaaaatggtctgggtggcaggagtggccgctctgatccaggtgggtgcggccatgcttgcagggccccgggaaggtttaccttcgtgtggcaaaggtg

SEQ ID NO: 194622 - DNA, 248 bp, Homo sapiens; identical to SEQ ID NO: 100529
  chr21:46929726-46929974
  hypo

SEQ ID NO: 194623 - DNA, 30 bp, Homo sapiens; identical to SEQ ID NO: 100530
  chr21:46931486-46931516
  hypo

SEQ ID NO: 194624 - DNA, 30 bp, Homo sapiens; identical to SEQ ID NO: 100531
  chr21:46932067-46932097
  hypo

SEQ ID NO: 194625 - DNA, 34 bp, Homo sapiens
  chr21:46933737-46933771
  hypo
gagtgtgcacaggcacgcacggttacatggggta

SEQ ID NO: 194626 - DNA, 163 bp, Homo sapiens
  chr21:46933997-46934160
  hypo
gcagtgagcaggctgcggagggagcaggccctcaggttggggaggcgctgggaggaggattctgatggcggtgtgggcctccccagtgacgctctagcccatggcacaggcccagcccacctccacccatcacatcctgctagatctacgagcccaggaaatg

SEQ ID NO: 194627 - DNA, 30 bp, Homo sapiens
  chr21:46934455-46934485
  hypo
cccacaggatagggccgttgactagggttg

SEQ ID NO: 194628 - DNA, 668 bp, Homo sapiens; identical to SEQ ID NO: 34024
  chr21:46935334-46936002
  hypo

SEQ ID NO: 194629 - DNA, 51 bp, Homo sapiens; identical to SEQ ID NO: 34025
  chr21:46937009-46937060
  hypo

SEQ ID NO: 194630 - DNA, 79 bp, Homo sapiens
  chr21:46942254-46942333
  hypo
acggcataccaaagacgctgtgactggatctctcaaagtctgctggtggtgatataaaacggtacgactgctatggaaa

SEQ ID NO: 194631 - DNA, 30 bp, Homo sapiens
  chr21:46942651-46942681
  hypo
tacacaatgcatagccgtgtttatacaaca

SEQ ID NO: 194632 - DNA, 105 bp, Homo sapiens; identical to SEQ ID NO: 57765
  chr21:46950777-46950882
  hypo

SEQ ID NO: 194633 - DNA, 31 bp, Homo sapiens; identical to SEQ ID NO: 100536
  chr21:46951699-46951730
  hypo

SEQ ID NO: 194634 - DNA, 30 bp, Homo sapiens; identical to SEQ ID NO: 100537
  chr21:46952270-46952300
  hypo

SEQ ID NO: 194635 - DNA, 137 bp, Homo sapiens
  chr21:46958786-46958923
  hypo
tcccgccagcacccccgccccacacggccagggcacgtggtggagcagcagcagcacgaagcacactcgagggcgtgtctctttcagtcctgattctgcccaggagaaaggctcctccggtgcgggcaagggcacgt

SEQ ID NO: 194636 - DNA, 30 bp, Homo sapiens; identical to SEQ ID NO: 100538
  chr21:46966074-46966104
  hypo

SEQ ID NO: 194637 - DNA, 31 bp, Homo sapiens
  chr21:46973124-46973155
  hypo
tggtccttccaggcaccgcgcatccctccca

SEQ ID NO: 194638 - DNA, 89 bp, Homo sapiens; identical to SEQ ID NO: 100539
  chr21:46998315-46998404
  hypo

SEQ ID NO: 194639 - DNA, 30 bp, Homo sapiens; identical to SEQ ID NO: 100540
  chr21:46999133-46999163
  hypo

SEQ ID NO: 194640 - DNA, 30 bp, Homo sapiens; identical to SEQ ID NO: 100541
  chr21:47013188-47013218
  hypo

SEQ ID NO: 194641 - DNA, 181 bp, Homo sapiens; identical to SEQ ID NO: 100542
  chr21:47026082-47026263
  hypo

SEQ ID NO: 194642 - DNA, 421 bp, Homo sapiens; identical to SEQ ID NO: 100543
  chr21:47026382-47026803
  hypo

SEQ ID NO: 194643 - DNA, 25 bp, Homo sapiens
  chr21:47026982-47027007
  hypo
ccacgttacagtggcctgcagtatt

SEQ ID NO: 194644 - DNA, 92 bp, Homo sapiens
  chr21:47027993-47028085
  hypo
ggtggcgggcgttcccgcggcagctgcagcctcgcagtgcctgcgtgagccgtgctccgctgcgccccgggcagctccgctccgacccacgc

SEQ ID NO: 194645 - DNA, 30 bp, Homo sapiens
  chr21:47036296-47036326
  hypo
ggcagaccccgtccccgctggcctccccag

SEQ ID NO: 194646 - DNA, 54 bp, Homo sapiens
  chr21:47036528-47036582
  hypo
ctgaaaatgccccctcgtcacctttcccacacaggatcccggtttcccaccagc

SEQ ID NO: 194647 - DNA, 174 bp, Homo sapiens; identical to SEQ ID NO: 133701
  chr21:47050916-47051090
  hypo

SEQ ID NO: 194648 - DNA, 200 bp, Homo sapiens; identical to SEQ ID NO: 57769
  chr21:47062752-47062952
  hypo

SEQ ID NO: 194649 - DNA, 1139 bp, Homo sapiens; identical to SEQ ID NO: 133703
  chr21:47063292-47064431
  hypo

SEQ ID NO: 194650 - DNA, 47 bp, Homo sapiens; identical to SEQ ID NO: 100547
  chr21:47167568-47167615
  hypo

SEQ ID NO: 194651 - DNA, 30 bp, Homo sapiens; identical to SEQ ID NO: 133705
  chr21:47188169-47188199
  hypo

SEQ ID NO: 194652 - DNA, 171 bp, Homo sapiens; identical to SEQ ID NO: 100548
  chr21:47209071-47209242
  hypo

SEQ ID NO: 194653 - DNA, 321 bp, Homo sapiens; identical to SEQ ID NO: 100549
  chr21:47254671-47254992
  hypo

SEQ ID NO: 194654 - DNA, 30 bp, Homo sapiens; identical to SEQ ID NO: 34031
  chr21:47269612-47269642
  hypo

SEQ ID NO: 194655 - DNA, 30 bp, Homo sapiens
  chr21:47283220-47283250
  hypo
cccatggcagactggcggcagcagcagcaa

SEQ ID NO: 194656 - DNA, 30 bp, Homo sapiens
  chr21:47283533-47283563
  hypo
tccctcggtggagagcgaagcaccactctc

SEQ ID NO: 194657 - DNA, 422 bp, Homo sapiens
  chr21:47285212-47285634
  hypo
atgtttaaaaaattacaaaatcgtagcccacccccagtcgcctttaggggagaatgcgtaccgctatctccaggaacaaagcatgccctgcgcggccggtgctactggatggatattccttcgcttctatcagtggaagatatcgctgttcctgcagaaataacgaaatggaacaatgcagaagcaacaaggtgatgtcccctttgtacttctcagaagaacctccgtgcctcccgccccatccgccactgagtatctcatgcagcggcgtgtcctctggcaccaggcagggactgatgttctccctcacattggcctcattcctctgggtcctgactcatttgggaactgaaagggctgctcggtggagctgggtttgaggatggtcttccacaaggccctgcagacgccacacagccttc

SEQ ID NO: 194658 - DNA, 611 bp, Homo sapiens; identical to SEQ ID NO: 100552
  chr21:47286940-47287551
  hypo

SEQ ID NO: 194659 - DNA, 207 bp, Homo sapiens
  chr21:47287810-47288017
  hypo
ggaacccagcgccgtcgcacacacagcggggaagagtctcagaaatgttactttgagtcaaaaagctggacaaaaaaaggcgcaagccagatggtgctgaagaggccacaggaggctggcagccagggggtctggcacctcactcggaggcgcagtgggcccgtccggaattagtggccatacggcaagtgccgagtggacatcaaa

SEQ ID NO: 194660 - DNA, 30 bp, Homo sapiens
  chr21:47288517-47288547
  hypo
ctgcttcagcctgggcgggtctggcgggca

SEQ ID NO: 194661 - DNA, 30 bp, Homo sapiens
  chr21:47292210-47292240
  hypo
aatgccccattttatcgtgtgtctaaaagg

SEQ ID NO: 194662 - DNA, 30 bp, Homo sapiens
  chr21:47292549-47292579
  hypo
cccgcgttggggctgcggtcccagtgcccc

SEQ ID NO: 194663 - DNA, 30 bp, Homo sapiens
  chr21:47292956-47292986
  hypo
cctcggtgatacgggcgagcggggcgggtc

SEQ ID NO: 194664 - DNA, 119 bp, Homo sapiens
  chr21:47316476-47316595
  hypo
tgtaggaaaggcggccgcggcacatagaactggagacgcactgcccgggccattgtctctgtaggaaaggcagacatggcacatagaaccggagatgcactgcccgggccattggcact

SEQ ID NO: 194665 - DNA, 30 bp, Homo sapiens
  chr21:47316904-47316934
  hypo
catggcacatagaaccggagatgcactgcc

SEQ ID NO: 194666 - DNA, 87 bp, Homo sapiens
  chr21:47328511-47328598
  hypo
ccgcgctgtccgccacgctctgcagcgagctccggagctgccctgtcactgcctctgccgcgctgtctgccacgctctgcagcgagc

SEQ ID NO: 194667 - DNA, 210 bp, Homo sapiens; identical to SEQ ID NO: 100554
  chr21:47330899-47331109
  hypo

SEQ ID NO: 194668 - DNA, 30 bp, Homo sapiens
  chr21:47331986-47332016
  hypo
cgtgggtctcgtcagcgtcacccagtgcct

SEQ ID NO: 194669 - DNA, 307 bp, Homo sapiens
  chr21:47367320-47367627
  hypo
acgcagcaggtgtaccgagctgtactgagcccgtggtcccagcagggtgtgtctgctccgtggagctgcaggtgtggccctccccacccactgcctgtgtgatggtgtgctcagcactaccggcccattccccggggagagggttctcctgtggccacagtgggaattccattgcttgctgacagaggcacatggctgaggactgagggaacttcccaccaaccggctttcgtgctgaaccgtttgaacttcattctcctccacgacccgcatatcctaaagccggcaaggccgctctttgcctatc

SEQ ID NO: 194670 - DNA, 30 bp, Homo sapiens
  chr21:47367980-47368010
  hypo
gtactccgggtccgccgccgcacctcacgg

SEQ ID NO: 194671 - DNA, 573 bp, Homo sapiens
  chr21:47369846-47370419
  hypo
ctgtgaggattcccgaaggcagcaccacccctgagcagacccgtctgcccctccgaccgtcatgcaccagcccctcccggtgccctgtgtcgtcacatgatgcttgttgaggagcccaggcgtccacccccgcgcctcctggcatgacgccgacctcactccttggcccccggaattcccacaggtgggaggtggtcacagaagctttgtcgattccgttctctttttggcaaggacacttccaggtgcctctgcacgggcactgacccacaggtgggcacagggccatgctcccagcctgggcctgacgggccggggtgcaaccaccgccagcatctaccatgctgtgagtgggcggcggtgacgcacccacctgggaatggcagcgagtgcccggagtgccggattccccccgagctttcacgtctaaggattacgaggaagacctggactacgtgcctttatgagatgcctcctgtgggtccctgaggccgtcaggtgccacctcacccctgcgtgtcctgcggaaactgtgacctgtgactccggggcggggtggccttgggggcacca

SEQ ID NO: 194672 - DNA, 128 bp, Homo sapiens; identical to SEQ ID NO: 100556
  chr21:47403600-47403728
  hypo

SEQ ID NO: 194673 - DNA, 266 bp, Homo sapiens; identical to SEQ ID NO: 100557
  chr21:47404059-47404325
  hypo

SEQ ID NO: 194674 - DNA, 30 bp, Homo sapiens; identical to SEQ ID NO: 100558
  chr21:47406791-47406821
  hypo

SEQ ID NO: 194675 - DNA, 294 bp, Homo sapiens
  chr21:47407168-47407462
  hypo
gtccctatgcatatccgcccatgtgcccgggacacatgtcccctgcgtgtctgcccgtgtgcccgggatgtgtgtccccctgcgtgtccacctgtgtgtctgcccatgtgcctgggacatgtgtccgcctgtgcgtccatccgtgtgtccgtctgcccatgtgcctgggtcgcatgtcaccctgtgtcccagccgtatgtccgtggctttcccactgactcgtctccatgctttccccccacagtgctgctccttcgaatgccaggtgagtgtgccccccgacccctgaccccg

SEQ ID NO: 194676 - DNA, 30 bp, Homo sapiens; identical to SEQ ID NO: 100559
  chr21:47411185-47411215
  hypo

SEQ ID NO: 194677 - DNA, 88 bp, Homo sapiens
  chr21:47412236-47412324
  hypo
ccaccagactaacgccggcgtctgtttctcttcatcccaggggaacccaggacctgacggtgcccccggggagcgggtgagtggggca

SEQ ID NO: 194678 - DNA, 76 bp, Homo sapiens
  chr21:47412918-47412994
  hypo
tgtttcatgtgaaggcgttgcccgtggacccggtgcccactttcccaccaggcggcttccacgtttctgcatccga

SEQ ID NO: 194679 - DNA, 140 bp, Homo sapiens
  chr21:47413399-47413539
  hypo
aggcctcagaggcagcgcccccgggtgcccccttgtccgagaatcaagacatgcgactgtcgtgtgctgtgacagacaggcggggctccagcagggccagagagctgagccggggccagagtcgccgccaccgagggatt

SEQ ID NO: 194680 - DNA, 598 bp, Homo sapiens
  chr21:47413776-47414374
  hypo
gctacaaacacttgccgggtccacggagcttgctggagaagcagggatgcacgcagggacgcctctggggccccaggaggagctgccggcctcctgaatgaagatagccatagccagccacgccgatggccacgcacgtgggccgaggaaacgcttggcgaggccaggaaggggctgtgcggggagggaaggccggaacagcccagtgaccacctggacagcatgctgtggctcccagcgtgcccgggcagccatcctccccaaggatggcccagctccacactcacggctcgtttctcttcagggtgaagctggcccgcagggtgatcagggaagagaaggccccgttggtgtccctggagacccggtaggaagcgctgtggggttggggggcgttggccaatttgggttttgggggtagaagtgctccagcagctcacgcactgggggtctgttcatttccgtttgagggcctctgtgtttccgtagatctcgggggtgtccctgcgtgggagccggctgcagggggtgaggcgcggcctgggccgggctggtgtggattgttgagagcaggcccagcgcccgggggcctgacgct

SEQ ID NO: 194681 - DNA, 222 bp, Homo sapiens
  chr21:47414703-47414925
  hypo
cagtgtggtgttgcccgcaggctgggctgggccgttgcatcctcccggagctcacctgccccacggggacaggaaggcctccacacggtcacgcccggagacagcaagtctgtgctcccgagcttgtctgcttctgtggacaaatcgaccttacggctccatgtgcgcagctgcccacacaccgagcacaaggccagaccctgggcacggcagctgtctcag

SEQ ID NO: 194682 - DNA, 809 bp, Homo sapiens
  chr21:47417618-47418427
  hypo
cagaggagccccaggacctgccggaccccctggagacccggggctgatgggtgaaagggtgagtgtccaacagctcgggccctagggcggaggcctggccgccagaggccctgggaagccccagccccgcactgtggagctgcctggggtccctgaccgggccgggagtgcccgcagcatcactggctcctggccacagtcggcacctgagccagaggccgcctcggcagggcccctcctgccccgagatccgggtcccagggtccacggggaccagcagggtggccccaggggagggagccggcttctgggctgacggaggggccctgcgggtgaggtgctcccgggcctgtgccagccagtgggtatcccaggccaggccgattcgcacggtgacggctactctgctcccccagggagaagacggccccgctggaaatggcaccgagggcttccccggcttccccgtaagtgtccggaggctgagcccacaggaacatgcccaagctgcctgcggcgccctctttagtggactgggcactcttgggtgggcgggctggccccaggaccgccggctggcccaggaattccatggccgggattctgtcagctcaggcccttccgctgtgcgcccctcacagcctcccctctcaaatcagaacccggtatcactgccctgcttttccatgacaggggtatccgggcaacaggggcgctcccgggataaacgtgagtacgccccctcctccatctggctgtgggcacacaaacattcacagtcacagggacacgcacgtgtgaacacacat

SEQ ID NO: 194683 - DNA, 30 bp, Homo sapiens
  chr21:47418965-47418995
  hypo
aggcctcatgggccccggctgctggatgct

SEQ ID NO: 194684 - DNA, 30 bp, Homo sapiens; identical to SEQ ID NO: 100564
  chr21:47420616-47420646
  hypo

SEQ ID NO: 194685 - DNA, 266 bp, Homo sapiens; identical to SEQ ID NO: 100565
  chr21:47421136-47421402
  hypo

SEQ ID NO: 194686 - DNA, 227 bp, Homo sapiens
  chr21:47421946-47422173
  hypo
cgcagccccagcatccggaacgtgcaggagctcaaggagtgagtgccccacgcggccaggaccctcccacccctcgccccgaccgctgttcccacggcaggtcggccctgacccctgatcccaggtgggctcggccccgcggcaggcctggccccaaccggcccttcctgccctttgctatgcagagccatcaagagcctgcagtggatggcgggcggcaccttcac

SEQ ID NO: 194687 - DNA, 244 bp, Homo sapiens
  chr21:47422522-47422766
  hypo
caccatcccagggccggcccggcctctcgctggtcaaggagaactatgcagagctgctggaggatgccttcctgaagaatgtcaccgcccagatctgcataggtgcgcatggggccacccgggcagtcccagatctgcgtaggtgcgcgcggggccgcccgggcagtcccagatctgcgtaggtgcacgcggggccgcccgggcagtcccagatctgcgtaggtgcacgcggggccgcccaggg

SEQ ID NO: 194688 - DNA, 705 bp, Homo sapiens
  chr21:47423059-47423764
  hypo
cccagtgagtacctcggcggccgggacacgtggggaggagggcaccgtggttggggcgagggctctgagaggacggggctctgggaggagggcctggcggtcacgagagtaggtgcatggctcactccggtggctgagcaccaccgtgccgtgccctctctggggagcttagacgctctctggccggcccactgcggctgcatcaccagggcctcatgctaacggctgcccaccccgccccgcagtcacgttctcctccccggctgacatcaccatcctgctggacggctccgccagcgtgggcagccacaactttgacaccaccaagcgcttcgccaagcgcctggccgagcgcttcctcacagcgggcaggacggaccccgcccacgacgtgcgggtggcggtggtgcagtacagcggcacgggccagcagcgcccagagcgggcgtcgctgcagttcctgcagaactacacggccctggccagtgccgtcgatgccatggactttatcaacgacgccaccgacgtcaacgatgccctgggctatgtgacccgcttctaccgcgaggcctcgtccggcgctgccaagaagaggctgctgctcttctcagatggcaactcgcagggcgccacgcccgctgccatcgagaaggccgtgcaggaagcccagcgggcaggcatcgagatcttcgtggtggtcgtggg

SEQ ID NO: 194689 - DNA, 358 bp, Homo sapiens; identical to SEQ ID NO: 34040
  chr21:47425490-47425848
  hypo

SEQ ID NO: 194690 - DNA, 337 bp, Homo sapiens
  chr21:47426309-47426646
  hypo
gcggtgggcggggcccggggcagacgcagtgaggcagttgccagcctctctcagctgcctcatgggattcgcactgcagctgcggccctggcgcgacaagggctggacttggccagcgggacggtccctcacggcgctgaggcccacactctgcgtggagcctccccgtgcccaggctaccctgcaaggtcctcggagaggcttcctccagccccagcccccacacagctccggcccaggcccgctcttccccatcccagttgctttgcgctgtatacggccaggtgaccccgagccggccctgagccctcgtcccggcttcctcccctgtaagctg

SEQ ID NO: 194691 - DNA, 253 bp, Homo sapiens
  chr21:47452998-47453251
  hypo
cccagtcccgggcctcggagagggcggctgacacccccagtcccgggcctcggagggggcggctgacacccccagtcccgggcctcggagggggcggctgacacccccagtcccgggcctcggagggggcggctgacacccccagtcccgggcctcggagggggcggctgacacccccagtccctttggcaaaccgcttcgcagtatccactgacgctaagtacccctctgacgatgacgcagtcccatgtct

SEQ ID NO: 194692 - DNA, 31 bp, Homo sapiens; identical to SEQ ID NO: 100571
  chr21:47455820-47455851
  hypo

SEQ ID NO: 194693 - DNA, 31 bp, Homo sapiens; identical to SEQ ID NO: 100572
  chr21:47456092-47456123
  hypo

SEQ ID NO: 194694 - DNA, 217 bp, Homo sapiens
  chr21:47457173-47457390
  hypo
cgtgtccacgtcagcgccctacatccacactgtgggcaccatgacctcacatgcggagcggagcagggccggcgcccggagagccaggctggtcacgaacgaggcctagagggcgtcaggccccaaagcactcacaggcttctcctctgtcctcggggccttcagacacctgcatgcgccgattcagccacccgcgcgcgccgattcccctggccat

SEQ ID NO: 194695 - DNA, 31 bp, Homo sapiens; identical to SEQ ID NO: 100574
  chr21:47457652-47457683
  hypo

SEQ ID NO: 194696 - DNA, 115 bp, Homo sapiens
  chr21:47459900-47460015
  hypo
ctcaccacaccccaccgctgccacccgcgagccagccacgtcccgccctccaccctccctccagcccttcccaggaccctctgcgtgtccctggtcctcgcggcctgcatctgag

SEQ ID NO: 194697 - DNA, 30 bp, Homo sapiens; identical to SEQ ID NO: 34042
  chr21:47460475-47460505
  hypo

SEQ ID NO: 194698 - DNA, 319 bp, Homo sapiens
  chr21:47475685-47476004
  hypo
tggtgggagctgggccgagggtcaggcctggaggtggtgcccatcactgggtcccgctcaagagagaagaggctgggaagccaggtgcagctgtgtgcccacaggcgggtgagacaggactgggcctggatcccgcacccgctcgccgcgcagctcagcgcaagcggcctccgggggcctcctctctgcaaggggagcgcgcgcccggccctgaccctgcctgctgattctctggaaggttcatgtccgggactcctcggtgaccctgggcagagccacccacatgcgctgcctcccctcccaccgcctgacaggtctg

SEQ ID NO: 194699 - DNA, 30 bp, Homo sapiens
  chr21:47476346-47476376
  hypo
ctgcaagcgcgcatccgagtccccagggag

SEQ ID NO: 194700 - DNA, 201 bp, Homo sapiens
  chr21:47484112-47484313
  hypo
tgatttcatcggactcgagagaaaggggggccacagcagcgttttcacaatagctaaaaggtggaagcaatccacgtgtccccagtggatgaatggataaagaaaacgtgtctatccatgcaacggagtatcattcagacgtgaaaaaggacgaagtcctgacgcgtgctacaacgtggatgagcccgagacgagttctgc

SEQ ID NO: 194701 - DNA, 100 bp, Homo sapiens
  chr21:47489506-47489606
  hypo
tgctgaacgtgccttcgcagtgacaactccaactctaagtcggtaccacagggctcattctcgccttccttccctgtgtgtctaacgcttcctctccagt

SEQ ID NO: 194702 - DNA, 189 bp, Homo sapiens
  chr21:47489806-47489995
  hypo
ccctcagaccctcagcgatggcactttctgtaggccgcagaggtaggggccgcagagccaagcttgctagcatccatgggacgctgaggccccaaataatagagaccagatggcagcgcttacccccagggccgagctgagggggcggccagaggcgcttggcctgcagggagccgtggaggctggcgg

SEQ ID NO: 194703 - DNA, 183 bp, Homo sapiens
  chr21:47497763-47497946
  hypo
cggtctggatgcccccgtgaagtcgtaaaggcccccaggtggacccaaggaaagcggggaggagagggcttcctcgtggggctccagaaaccaggcactcgggcccctgcctctgcgagacgtgttcactcattttgcggggtccccagtctctgcaaagcacagcaccgacgcaaggctggt

SEQ ID NO: 194704 - DNA, 30 bp, Homo sapiens
  chr21:47498263-47498293
  hypo
gcattgcagtgaggccggtgtggggcagcc

SEQ ID NO: 194705 - DNA, 25 bp, Homo sapiens
  chr21:47499833-47499858
  hypo
cgcacacacacgcacacgcacatcg

SEQ ID NO: 194706 - DNA, 85 bp, Homo sapiens; identical to SEQ ID NO: 100578
  chr21:47501021-47501106
  hypo

SEQ ID NO: 194707 - DNA, 30 bp, Homo sapiens; identical to SEQ ID NO: 100579
  chr21:47501326-47501356
  hypo

SEQ ID NO: 194708 - DNA, 484 bp, Homo sapiens; identical to SEQ ID NO: 100580
  chr21:47503499-47503983
  hypo

SEQ ID NO: 194709 - DNA, 30 bp, Homo sapiens
  chr21:47531039-47531069
  hypo
tcccttccatgccgacgcgcccagctaccc

SEQ ID NO: 194710 - DNA, 30 bp, Homo sapiens
  chr21:47531467-47531497
  hypo
ctcgccggacactaccgagagaaacaacaa

SEQ ID NO: 194711 - DNA, 252 bp, Homo sapiens; identical to SEQ ID NO: 100581
  chr21:47531930-47532182
  hypo

SEQ ID NO: 194712 - DNA, 30 bp, Homo sapiens; identical to SEQ ID NO: 100582
  chr21:47536632-47536662
  hypo

SEQ ID NO: 194713 - DNA, 30 bp, Homo sapiens; identical to SEQ ID NO: 100583
  chr21:47537236-47537266
  hypo

SEQ ID NO: 194714 - DNA, 30 bp, Homo sapiens; identical to SEQ ID NO: 100584
  chr21:47537506-47537536
  hypo

SEQ ID NO: 194715 - DNA, 30 bp, Homo sapiens; identical to SEQ ID NO: 100585
  chr21:47537814-47537844
  hypo

SEQ ID NO: 194716 - DNA, 158 bp, Homo sapiens; identical to SEQ ID NO: 34043
  chr21:47538428-47538586
  hypo

SEQ ID NO: 194717 - DNA, 30 bp, Homo sapiens
  chr21:47538999-47539029
  hypo
cgggcctgggccccgcggacccaaaggcga

SEQ ID NO: 194718 - DNA, 30 bp, Homo sapiens
  chr21:47539495-47539525
  hypo
gacgcagcagagggacgagggctggcagca

SEQ ID NO: 194719 - DNA, 66 bp, Homo sapiens; identical to SEQ ID NO: 100587
  chr21:47545573-47545639
  hypo

SEQ ID NO: 194720 - DNA, 30 bp, Homo sapiens
  chr21:47546015-47546045
  hypo
ttccacgagaagcacgagagtgaaaacctc

SEQ ID NO: 194721 - DNA, 30 bp, Homo sapiens
  chr21:47552097-47552127
  hypo
ctcacggccatccacgaggcgctggagacc

SEQ ID NO: 194722 - DNA, 31 bp, Homo sapiens; identical to SEQ ID NO: 100588
  chr21:47557369-47557400
  hypo

SEQ ID NO: 194723 - DNA, 550 bp, Homo sapiens
  chr21:47565065-47565615
  hypo
gcctgttcccttgtaccggctgccatggcctgtgaatgtggggtcaccctggccgaaccctcaaaccctgctgggcccaagcacttgccggggtgagggcggtgctggtggtcaaggtccagacagcggccagtggtgacgccctcaggcccctcctggtccccagcccctccccagccggaggctgacccgcttctcactggggccccagctgggggttcgctgttggtggggcccggggagccctgctgtggccgccactcaccaggtaggcggtgaaggcctcggcgtcggcatccaccagcgtggttagcttggccgaagcctcgcggaagggcgggatcaggcgccgcatcgtcgtgtccagggactggaattggcgccgcccgtaggtcatgaggcccaccatggagcccagcgccgcaccctgcgagaggggtggatgtgggggtcgcagggaccccagacggcccgggaccgaccccaggaagagccaggggcccgggtgatccctgcgggggtcccacccgtgtggcccccacgtctccac

SEQ ID NO: 194724 - DNA, 31 bp, Homo sapiens; identical to SEQ ID NO: 34044
  chr21:47569329-47569360
  hypo

SEQ ID NO: 194725 - DNA, 30 bp, Homo sapiens
  chr21:47601135-47601165
  hypo
cccagcaccgtaagcgcaggtctgcccagc

SEQ ID NO: 194726 - DNA, 660 bp, Homo sapiens
  chr21:47602443-47603103
  hypo
catcagggagctggccgccaccctcgactcccggggagcaggcgtcccgcgaccccctcatctaccaggccatctgagctgggcggcgcctcacctccgctcccgggggagccggcctcagggtaggcatgcgccctgggtgggagcaggtcgtggccgccgccctcctggcagctctggctgagcagccgccgcagcatctgattctccttcaggaggcgcacctgcttcttcaggtccgcgttctcgctcaggagccggctcatcagctcgccgccttcagccatggcgggtgcgtccctccttgtccctcacggctcctgcagccccatggaggtgggagcccagagcccgcaggcaccacagaaacagcccaggcacggagttccgtagccaccaccgccttccacgccttgtgatgtcactgccctagtgatgaggtgcccagcaccctgcctgcccccgcgatggctcatggccccgttgaggcagtgaagctggaggcccgtggcgtgcacaggcagccactcccacattatgaccagggcccgagaatgccaaggacattaggcagctacgggatgtagcgactgtactccaagaggggcgtccaagccactccccattgagcggcccagccagggtcgggtgtccaccctg

SEQ ID NO: 194727 - DNA, 29 bp, Homo sapiens
  chr21:47607262-47607291
  hypo
ttaagagcacagccgcgcaaccacagttc

SEQ ID NO: 194728 - DNA, 172 bp, Homo sapiens; identical to SEQ ID NO: 100593
  chr21:47627574-47627746
  hypo

SEQ ID NO: 194729 - DNA, 108 bp, Homo sapiens; identical to SEQ ID NO: 100594
  chr21:47634459-47634567
  hypo

SEQ ID NO: 194730 - DNA, 30 bp, Homo sapiens
  chr21:47639873-47639903
  hypo
gcgcacactcagcctcgccctctgagccaa

SEQ ID NO: 194731 - DNA, 318 bp, Homo sapiens; identical to SEQ ID NO: 100595
  chr21:47640129-47640447
  hypo

SEQ ID NO: 194732 - DNA, 282 bp, Homo sapiens; identical to SEQ ID NO: 133716
  chr21:47649461-47649743
  hypo

SEQ ID NO: 194733 - DNA, 293 bp, Homo sapiens; identical to SEQ ID NO: 34046
  chr21:47689550-47689843
  hypo

SEQ ID NO: 194734 - DNA, 82 bp, Homo sapiens; identical to SEQ ID NO: 100597
  chr21:47710423-47710505
  hypo

SEQ ID NO: 194735 - DNA, 108 bp, Homo sapiens; identical to SEQ ID NO: 57778
  chr21:47717278-47717386
  hypo

SEQ ID NO: 194736 - DNA, 239 bp, Homo sapiens; identical to SEQ ID NO: 13322
  chr21:47717433-47717672
  hypo

SEQ ID NO: 194737 - DNA, 162 bp, Homo sapiens; identical to SEQ ID NO: 57780
  chr21:47717748-47717910
  hypo

SEQ ID NO: 194738 - DNA, 30 bp, Homo sapiens; identical to SEQ ID NO: 100601
  chr21:47720539-47720569
  hypo

SEQ ID NO: 194739 - DNA, 136 bp, Homo sapiens; identical to SEQ ID NO: 100602
  chr21:47737836-47737972
  hypo

SEQ ID NO: 194740 - DNA, 221 bp, Homo sapiens; identical to SEQ ID NO: 100603
  chr21:47746264-47746485
  hypo

SEQ ID NO: 194741 - DNA, 30 bp, Homo sapiens; identical to SEQ ID NO: 100604
  chr21:47754563-47754593
  hypo

SEQ ID NO: 194742 - DNA, 30 bp, Homo sapiens; identical to SEQ ID NO: 100605
  chr21:47754841-47754871
  hypo

SEQ ID NO: 194743 - DNA, 155 bp, Homo sapiens; identical to SEQ ID NO: 100606
  chr21:47771656-47771811
  hypo

SEQ ID NO: 194744 - DNA, 99 bp, Homo sapiens; identical to SEQ ID NO: 34051
  chr21:47773780-47773879
  hypo

SEQ ID NO: 194745 - DNA, 1239 bp, Homo sapiens
  chr21:47774496-47775735
  hypo
gatgtgcagcatgagcaagcccggtgtcgggctccgggggacacacgggagggcagggaggagacgcaggggcagcaccgcgtggcttgttgcacggtggaaccagtggaggggaactcggggcatctgggctcagcggccaggagccctcactctggagcagggtccctgggcctgctggaggccacagggtgtccaggcagggtggcagcgggctgtgtgccagtttgagttccctgcaaagcggaccccaacacagaatttgctgcacaagaggctatgggggaaatgccagagaagggcaagggcccggctggaacaggcagccaggaccttcccacgagcaggccttgcaccagagagaacccaggaagggctggggtgggtagccccaccaggcattcgtgtatcacctgagagccaacccctgcctctgcgcgtgggtgtgacgaggacccagctgttagtgggcagtggtcacaggaggctggccttgagagcccagccctgagatgtgaggccaccaggggagacgcgaggggcacgtgccctaccgaccttgctgctgagagaattgaggagaggtctgcccggtccagggccctgccgccctgaggagcaccagtccctgtcagtgccaccaattcttgtatgtcttccggaggcctgactgagagacgggtgtgggcgggagagcatgtgagcacgccagtgggctggcggggttcaccagggcgcagcgtgtggtctcatgaacctagtgaggtttgagttttctttgtgcatagcaggaaacacctttgagggttatagctgcgagcgaggtagcttggctcactaacgtgcttgtcccacgtggtttctctgtaggagagcctgccacgcttccaggcggagttagaagaaagccacaggcaccagctggaagcgctggagtctcccctctgcatccagcacgaggggcatgtctcagacagatgctgcgtagagacttcagcattgggacacgagtggcgtctggaaccctctgaagggcacagccaaggtgggcccctcccgcctcgccatggtgtcggcaggtcccgggtctgggggacgttctcggggagcctgggtgcctgggttcgatccaagtcctccgtgaagcagctgagtgctccgacctcttcttctggggctgacacctcaacagagtgtgtcctgatgagggtttggcgttagaggcggggtcactggctg

SEQ ID NO: 194746 - DNA, 129 bp, Homo sapiens; identical to SEQ ID NO: 34054
  chr21:47797822-47797951
  hypo

SEQ ID NO: 194747 - DNA, 267 bp, Homo sapiens
  chr21:47798302-47798569
  hypo
gaacggcctctcttgcgctttggggccgttattaaatgaagtaaaggtgacttgaacacaggcactgtgatgctgtgacagttggtctgatcaccgagatgcctgcgtgtgggcaggtagtgcttgccacgtggataacgccggacagaaggatgacccccggcctggcctgcgagatttcctcacaccgttcagcttgggggcaggcagtttaacactcataagagttgtttacttctggaatttttcatacgatattttcaaaat

SEQ ID NO: 194748 - DNA, 30 bp, Homo sapiens
  chr21:47798788-47798818
  hypo
ctatctttttgtgctcgttactttatgcac

SEQ ID NO: 194749 - DNA, 141 bp, Homo sapiens; identical to SEQ ID NO: 133724
  chr21:47799136-47799277
  hypo

SEQ ID NO: 194750 - DNA, 233 bp, Homo sapiens
  chr21:47799605-47799838
  hypo
tgtcttctgcctgctcgagtctgctgccgaacccctctctagtgaatttttttttctgtgattgtatttttcagctccagatgtcaagggagctctatttcagtctttctctctgctgagggccctgcgtgcattgtgccctcagggctctggcgggcggtggacagcctggccctggccttcacccctgctgtgccaagccacatggtcactgcagccggcccaggacctct

SEQ ID NO: 194751 - DNA, 131 bp, Homo sapiens
  chr21:47805828-47805959
  hypo
gggagaaccgggaaggcgcaaacctcctctccatgctcaaggccgacgtcaacctgtcccacagcgaaaggtcagtgtgtcctcggcaccgaggctgccttgtggccgccagcacccgctgggtcatgcag

SEQ ID NO: 194752 - DNA, 265 bp, Homo sapiens; identical to SEQ ID NO: 34056
  chr21:47811197-47811462
  hypo

SEQ ID NO: 194753 - DNA, 225 bp, Homo sapiens
  chr21:47819670-47819895
  hypo
agtggaaaaacagaaaaacatcgtgaaagggctggaacaggtaaagcgtctccatgttgtggttgggcacgtggtgaggtgtcccgcaggcatggcttcatcgctgagctggcagggagtgggcagggcgtccttcttcactggcagccaccacgtctgcaccagaaacactggcgtcagggagaaacagaagtcattggtgacgggtagcaagagtactttgac

SEQ ID NO: 194754 - DNA, 30 bp, Homo sapiens; identical to SEQ ID NO: 100614
  chr21:47824060-47824090
  hypo

SEQ ID NO: 194755 - DNA, 30 bp, Homo sapiens; identical to SEQ ID NO: 100615
  chr21:47824379-47824409
  hypo

SEQ ID NO: 194756 - DNA, 21 bp, Homo sapiens
  chr21:47825322-47825343
  hypo
cttttatggccaggagcggtg

SEQ ID NO: 194757 - DNA, 30 bp, Homo sapiens; identical to SEQ ID NO: 100617
  chr21:47830937-47830967
  hypo

SEQ ID NO: 194758 - DNA, 30 bp, Homo sapiens; identical to SEQ ID NO: 34058
  chr21:47831519-47831549
  hypo

SEQ ID NO: 194759 - DNA, 30 bp, Homo sapiens; identical to SEQ ID NO: 100619
  chr21:47831912-47831942
  hypo

SEQ ID NO: 194760 - DNA, 754 bp, Homo sapiens; identical to SEQ ID NO: 34059
  chr21:47832835-47833589
  hypo

SEQ ID NO: 194761 - DNA, 30 bp, Homo sapiens; identical to SEQ ID NO: 100621
  chr21:47848201-47848231
  hypo

SEQ ID NO: 194762 - DNA, 302 bp, Homo sapiens
  chr21:47851455-47851757
  hypo
ctttggagacacagcgtgctcagagcagtcgactctgcgtggcactgaaacacgagcagacggccaaggacaacctgcagaaggagctgcgtatcgagcactcacgctgcgaggccttgctggctcaggagcggagccagctctctgagctccagaaggaccttgcggctgagaagagccgcaccctggagctgtcagaggccttgcggcacgagcggctcctgaccgagcagctgagccagaggacacaggaggcttgcgtgcaccaggacacacaggcccatcacgctctgctgcagaag

SEQ ID NO: 194763 - DNA, 30 bp, Homo sapiens; identical to SEQ ID NO: 100623
  chr21:47855034-47855064
  hypo

SEQ ID NO: 194764 - DNA, 225 bp, Homo sapiens; identical to SEQ ID NO: 100624
  chr21:47856005-47856230
  hypo

SEQ ID NO: 194765 - DNA, 30 bp, Homo sapiens; identical to SEQ ID NO: 34060
  chr21:47859911-47859941
  hypo

SEQ ID NO: 194766 - DNA, 250 bp, Homo sapiens
  chr21:47872855-47873105
  hypo
tcacctggtggcttacggtcaggcgttccatctctgtcagagacaagtggcataccagaagacagatctacacccgcccgccccccaaatgcatacaattctctgctccaggtggcatgacagaatctctacattgcatcattctgcaccattaataacaccaaaaaaacacctgttggactatatggcccaggcaatagcattacttcatcacaacccggatctactgtacagacgtttccagttctgg

SEQ ID NO: 194767 - DNA, 115 bp, Homo sapiens
  chr21:47897026-47897141
  hypo
tgtgggcacctccagtaggaccggtccgattgtttgggtaaatctagcaacattgacttaagcttactcctcccatggtaagtcaaggaagcacgtgccctttttcctaatagaa

SEQ ID NO: 194768 - DNA, 68 bp, Homo sapiens
  chr21:47918527-47918595
  hypo
tacggcgacccgggcgactcacctccactccgctccagagccattccagcgtcgagccctggctcgac

SEQ ID NO: 194769 - DNA, 337 bp, Homo sapiens; identical to SEQ ID NO: 34061
  chr21:47965679-47966016
  hypo

SEQ ID NO: 194770 - DNA, 30 bp, Homo sapiens
  chr21:47969872-47969902
  hypo
tggttggcttgtcccgcccggtcctccctg

SEQ ID NO: 194771 - DNA, 94 bp, Homo sapiens
  chr21:47979411-47979505
  hypo
ctcagacccttgtcacgcagcagaggagatcgggcgggagccttttgtgagctcgcttcctgtgtaggctgtggctgagcgtgggtgccggcct

SEQ ID NO: 194772 - DNA, 30 bp, Homo sapiens
  chr21:47980217-47980247
  hypo
agtgagtctcggctgcgagcagtccccggt

SEQ ID NO: 194773 - DNA, 31 bp, Homo sapiens; identical to SEQ ID NO: 100630
  chr21:48018213-48018244
  hypo

SEQ ID NO: 194774 - DNA, 31 bp, Homo sapiens; identical to SEQ ID NO: 100631
  chr21:48018510-48018541
  hypo

SEQ ID NO: 194775 - DNA, 31 bp, Homo sapiens; identical to SEQ ID NO: 34062
  chr21:48044003-48044034
  hypo

SEQ ID NO: 194776 - DNA, 30 bp, Homo sapiens; identical to SEQ ID NO: 34063
  chr21:48069214-48069244
  hypo

SEQ ID NO: 194777 - DNA, 30 bp, Homo sapiens; identical to SEQ ID NO: 100634
  chr21:48083299-48083329
  hypo

SEQ ID NO: 194778 - DNA, 73 bp, Homo sapiens; identical to SEQ ID NO: 100635
  chr21:48083838-48083911
  hypo

SEQ ID NO: 194779 - DNA, 134 bp, Homo sapiens
  chr21:48084395-48084529
  hypo
cttcacagacaaacacgcttgggctcggcaggagctgccgtggccacccccgctgcccagtgtctgccctctagaagtaggctgtgtttccaggtgttcacccgtggtgcccacagtgccgacccgtggctggg

SEQ ID NO: 194780 - DNA, 1115 bp, Homo sapiens; identical to SEQ ID NO: 57786
  chr21:48087088-48088203
  hypo

SEQ ID NO: 194781 - DNA, 79 bp, Homo sapiens; identical to SEQ ID NO: 100637
  chr22:16216477-16216556
  hypo

SEQ ID NO: 194782 - DNA, 30 bp, Homo sapiens; identical to SEQ ID NO: 100638
  chr22:17589496-17589526
  hypo

SEQ ID NO: 194783 - DNA, 30 bp, Homo sapiens
  chr22:17590076-17590106
  hypo
ccggggtcagccagcgccgcagcccctcca

SEQ ID NO: 194784 - DNA, 30 bp, Homo sapiens
  chr22:17592729-17592759
  hypo
gaagttgctagttgcggagttttttcttgc

SEQ ID NO: 194785 - DNA, 189 bp, Homo sapiens; identical to SEQ ID NO: 133736
  chr22:17600944-17601133
  hypo

SEQ ID NO: 194786 - DNA, 532 bp, Homo sapiens; identical to SEQ ID NO: 133737
  chr22:17601259-17601791
  hypo

SEQ ID NO: 194787 - DNA, 31 bp, Homo sapiens; identical to SEQ ID NO: 34066
  chr22:17619493-17619524
  hypo

SEQ ID NO: 194788 - DNA, 33 bp, Homo sapiens; identical to SEQ ID NO: 100642
  chr22:17674260-17674293
  hypo

SEQ ID NO: 194789 - DNA, 30 bp, Homo sapiens
  chr22:17711098-17711128
  hypo
tgctgcgggaaggcacgcatgattgaaagt

SEQ ID NO: 194790 - DNA, 42 bp, Homo sapiens; identical to SEQ ID NO: 100643
  chr22:17735249-17735291
  hypo

SEQ ID NO: 194791 - DNA, 30 bp, Homo sapiens
  chr22:17796193-17796223
  hypo
tcatgcgtgtgatcacggcttcttcaagtc

SEQ ID NO: 194792 - DNA, 268 bp, Homo sapiens
  chr22:17828552-17828820
  hypo
gagcgagactctgtctcaacaacaacaacaacaacaacaaaagtcttgaatccacgctatgcgaggaaggaacgagggaaggaccacagctctgtccttagttcttggcccccctcccttcccatgtcctccctggggagcctcccgaagggcttgctacaccctgctggctcccgcaccacgtccactgggacctccctgctggtcctgtgcatccggctggtcatcagctcatcgtgcctcagggttacaacgtgtatacctgctt

SEQ ID NO: 194793 - DNA, 1530 bp, Homo sapiens; identical to SEQ ID NO: 133740
  chr22:17849501-17851031
  hypo

SEQ ID NO: 194794 - DNA, 83 bp, Homo sapiens
  chr22:17882961-17883044
  hypo
tcaagatttgttcctgcattccacctgacatcgcatgtctccttaagtctgttgtcatcagcgtggactcattgatacttatc

SEQ ID NO: 194795 - DNA, 82 bp, Homo sapiens
  chr22:17891759-17891841
  hypo
agccattcttgagtctccatccgccttgtattgtgtctttgtgtggagacaggtggcgggcggccttctgggtgagggggat

SEQ ID NO: 194796 - DNA, 462 bp, Homo sapiens
  chr22:17897910-17898372
  hypo
ggagcccgggaggcgcgggccgaagccctgggccacttcatttccacaggtacatcctggactggtggagccagcgagaggctggagctggagcctatcggctgggccccgcctcgcctcaggggacactgctcggagacaaagcccggggccctggccaagggcaccgcggaggcgccttcccagacgcggatgacgtggctgtcctgactgacgggaaggaaaatggctgctcgcccagctccatcaccagcagcggcttgtggacaactcgcccacgcatccctggtggcggtccctgaagcccccgcggggtcaggagcacgagcacttgccaggggacgcctggggcgcccctcctcccagaagctcccgcggaagactggagcaggccacctggctgcggataatgggaaccacagagtgagagaactccacatcggcctgaaggaagagcatgtg

SEQ ID NO: 194797 - DNA, 79 bp, Homo sapiens
  chr22:17932150-17932229
  hypo
ggctgtatatttaggtcttttcgtgcaggctataaaaatatgtatgggccggtcacagtgacttacgcccgtagtccca

SEQ ID NO: 194798 - DNA, 19 bp, Homo sapiens
  chr22:17932468-17932487
  hypo
aattccatctcaaaaaaaa

SEQ ID NO: 194799 - DNA, 31 bp, Homo sapiens; identical to SEQ ID NO: 100647
  chr22:17970197-17970228
  hypo

SEQ ID NO: 194800 - DNA, 31 bp, Homo sapiens
  chr22:18009974-18010005
  hypo
gcagtggtgccgcgcccggcacatgactgca

SEQ ID NO: 194801 - DNA, 34 bp, Homo sapiens
  chr22:18038126-18038160
  hypo
cttgcgaagctggcccggccgtcagcatctcact

SEQ ID NO: 194802 - DNA, 30 bp, Homo sapiens; identical to SEQ ID NO: 100648
  chr22:18070414-18070444
  hypo

SEQ ID NO: 194803 - DNA, 92 bp, Homo sapiens; identical to SEQ ID NO: 100649
  chr22:18070744-18070836
  hypo

SEQ ID NO: 194804 - DNA, 36 bp, Homo sapiens; identical to SEQ ID NO: 34068
  chr22:18074667-18074703
  hypo

SEQ ID NO: 194805 - DNA, 162 bp, Homo sapiens; identical to SEQ ID NO: 34069
  chr22:18081584-18081746
  hypo

SEQ ID NO: 194806 - DNA, 136 bp, Homo sapiens
  chr22:18084141-18084277
  hypo
gctcccagggagtccacggcctagcagagaatagctcaggtaaccatcagttcagaaaccgacacaagtgactgacatggaaagatgcgcgcgatgtaactttgaaaagcaagctattaaacggttatacaagatt

SEQ ID NO: 194807 - DNA, 95 bp, Homo sapiens; identical to SEQ ID NO: 100653
  chr22:18110594-18110689
  hypo

SEQ ID NO: 194808 - DNA, 30 bp, Homo sapiens
  chr22:18115805-18115835
  hypo
cactgcgcctgaccacgatttacttatttt

SEQ ID NO: 194809 - DNA, 30 bp, Homo sapiens
  chr22:18190146-18190176
  hypo
tccattttgcgacttcgaggcctcagaaat

SEQ ID NO: 194810 - DNA, 17 bp, Homo sapiens
  chr22:18191697-18191714
  hypo
cattaattattaagaga

SEQ ID NO: 194811 - DNA, 86 bp, Homo sapiens
  chr22:18220795-18220881
  hypo
ctcctcacgtaggtgcgtaggttctggttaataaaattcactgttgtgtgaaagacatcacggagcaaggacggcgtgtgactggc

SEQ ID NO: 194812 - DNA, 294 bp, Homo sapiens
  chr22:18232880-18233174
  hypo
atggcctgggcagcgcggcagctccgactcactcctggttcacagtgtcccagtggcgacctggaaagggacacacagagtgggcggccgctcctgggaagccctggtcaggacccctcgggaggacgacgaagctggcctgtgctccagaaatggcggctgagccgaggtcctggcctgagccccgcatcctgagtttctttctccttggcgggagccaagctttgttttcctcattccagatactcacccaggcgctcagtgccctggggccgaccccgcacctgaattcag

SEQ ID NO: 194813 - DNA, 30 bp, Homo sapiens
  chr22:18235065-18235095
  hypo
ctcctggcacgtagcgggtagcagtggggg

SEQ ID NO: 194814 - DNA, 397 bp, Homo sapiens
  chr22:18265343-18265740
  hypo
aatctcccccacacacgatctgaccccgtggcatccttcctttcctacaaactgcactgagacccaggtgtcatcgtgaagttcatgccagccagaggagccactgtggcgtttccggccataggcctgggcaggagccgctcccaggcgtgccgtgggcagggccgggtcagccttcagggaagagatgcctgtatgggaccaactcaggcagccacagagggatggcccagcaccccacaaaacccaaagtgctcagcgtctaggatctgtttacggggcagagaagtggatgttcttttcctggttcaaaggtagaaacaggcttggagagccgcacccggcatcagccagccaggcagacgcctggtctagcgcttggttctcacaggcatgt

SEQ ID NO: 194815 - DNA, 30 bp, Homo sapiens; identical to SEQ ID NO: 100656
  chr22:18272318-18272348
  hypo

SEQ ID NO: 194816 - DNA, 30 bp, Homo sapiens
  chr22:18273787-18273817
  hypo
gctcctgctgcagtcgactctgccggtctt

SEQ ID NO: 194817 - DNA, 30 bp, Homo sapiens; identical to SEQ ID NO: 100657
  chr22:18275665-18275695
  hypo

SEQ ID NO: 194818 - DNA, 330 bp, Homo sapiens; identical to SEQ ID NO: 34071
  chr22:18286546-18286876
  hypo

SEQ ID NO: 194819 - DNA, 158 bp, Homo sapiens
  chr22:18287372-18287530
  hypo
gctatgtaatttccacgcctgagatgcagactgggcactgccgagaggctgggcttgagcaggcggtcctcatctccccagaatcataaagacacacagagcacagcactcggccgccatggtgttgccctctctccaaaccccgcattctgaatgca

SEQ ID NO: 194820 - DNA, 92 bp, Homo sapiens
  chr22:18287770-18287862
  hypo
tagacaaacggagaacgggatggcaggtccatgctagagcgcttctctggaaaggcagcttggctaacaaagtctgacgccctcagacggtg

SEQ ID NO: 194821 - DNA, 16 bp, Homo sapiens
  chr22:18288785-18288801
  hypo
gcgcccggcccaaatg

SEQ ID NO: 194822 - DNA, 97 bp, Homo sapiens; identical to SEQ ID NO: 34072
  chr22:18291184-18291281
  hypo

SEQ ID NO: 194823 - DNA, 316 bp, Homo sapiens
  chr22:18291532-18291848
  hypo
tgaagcaaaactagcctaccacggcgggagggagggcttcctccaggagcagagcttaggagggagcccggcagtacctgcttcgccccggagcgccttctccacagccacgcccctttcctccagccgccgctgcctctcctccacctgctgcagctgccgctggatgatctatgacagacagcacagactgagcacccggctctccagccctgcttcaggaggacacacaactccacacccacacgaggggaaacacaggagttgccgctctggaaagggctctagtctgtgggcggtgcgctcagggtgtggc

SEQ ID NO: 194824 - DNA, 164 bp, Homo sapiens
  chr22:18295060-18295224
  hypo
cacatgcactccagccggtgaggagcaggtgtctcatcctccttcccactcatgacgtggctaacggaagtactgctgccagtgtgtgccacagccccatgcacgcacaaacacagttagtgaggatgtggctggagggccggggccggcgccgggtggttaat

SEQ ID NO: 194825 - DNA, 264 bp, Homo sapiens
  chr22:18295542-18295806
  hypo
ggttttgaatacggccggggttcactcttttattgggaagaaacagcttcttcctcaccacccccaaaactcgcctcatctcactgtcccttgtgtaaagttaaagccgttaaaatatgtgattctagatgcttttctccttgagtgaccatgtgcttgtggaaattcagcccacttcttcctgctgaatgctccgggggagtagaagtggggtgcgggaggaaagggggtcctgctctcagagacagacgcagcaaaactggg

SEQ ID NO: 194826 - DNA, 31 bp, Homo sapiens; identical to SEQ ID NO: 100662
  chr22:18301739-18301770
  hypo

SEQ ID NO: 194827 - DNA, 31 bp, Homo sapiens; identical to SEQ ID NO: 100663
  chr22:18301995-18302026
  hypo

SEQ ID NO: 194828 - DNA, 30 bp, Homo sapiens
  chr22:18314515-18314545
  hypo
ggcacgtccgtgtgacgtcagccccagaaa

SEQ ID NO: 194829 - DNA, 31 bp, Homo sapiens; identical to SEQ ID NO: 34075
  chr22:18316174-18316205
  hypo

SEQ ID NO: 194830 - DNA, 247 bp, Homo sapiens; identical to SEQ ID NO: 34076
  chr22:18328028-18328275
  hypo

SEQ ID NO: 194831 - DNA, 99 bp, Homo sapiens; identical to SEQ ID NO: 34077
  chr22:18329914-18330013
  hypo

SEQ ID NO: 194832 - DNA, 610 bp, Homo sapiens; identical to SEQ ID NO: 34078
  chr22:18340816-18341426
  hypo

SEQ ID NO: 194833 - DNA, 45 bp, Homo sapiens; identical to SEQ ID NO: 100668
  chr22:18345291-18345336
  hypo

SEQ ID NO: 194834 - DNA, 300 bp, Homo sapiens; identical to SEQ ID NO: 100669
  chr22:18348547-18348847
  hypo

SEQ ID NO: 194835 - DNA, 55 bp, Homo sapiens
  chr22:18349166-18349221
  hypo
agtgcagggtggaggcgtggaggctgcaggggtggggcatcgcctggcattggct

SEQ ID NO: 194836 - DNA, 152 bp, Homo sapiens
  chr22:18349527-18349679
  hypo
tgtaacgtgcatccccgtggggggtgtcgtcagaaaaatctgaacaccactgaacttggcttttcccatgactctggtaatggaattaacccacgcagtcatttttttctgactcttttttactctcacttaaagagcgactgacgactttt

SEQ ID NO: 194837 - DNA, 752 bp, Homo sapiens
  chr22:18352968-18353720
  hypo
gcctctcactgccacccgatctcccaccaggtgcgcacctctgccctctactcagtcaccatacccttctctctcaaagtctagccaagggtcagggaggtcatcccaagatgctcttgaacttcacagatttcctcctcccctgtgcttctacaaagcgacaacctaggctgtgtaaccgagcctttcgctgcacacactcgtgtcgcctgctactcttcatgggtctcatccccataggacagtgagctcctggaggcacacattacacttctgcatctttcacagaatgcagcaaagatgcacacacacacccatgggcaaaagtacctgtagatcaattagctgcaccttgcgacatcttctttccgggcagactccacggtgagaggctaactagaacaccctgagcatcagggacagctcagcgaggttgggtggctccctctgccaggccccatccttgagatcaaatgagctatccagagagcaggtgtgtgtgagaggtggaacagaagacttgacagcaaacaatctgcctgccttatctaaacagcgtcctaattctttcattcttccccgactcgggagtgctttttaccaacatagcagaagggccaggcaccatgacaggagtcagcctttctcggctcacctctctgggctccttccttgctccttctaacagaggtgactgtttgttcaccctcaggacagctgaagtgactaggtcctaacggcatggcatccct

SEQ ID NO: 194838 - DNA, 411 bp, Homo sapiens; identical to SEQ ID NO: 100673
  chr22:18354731-18355142
  hypo

SEQ ID NO: 194839 - DNA, 280 bp, Homo sapiens; identical to SEQ ID NO: 100674
  chr22:18355584-18355864
  hypo

SEQ ID NO: 194840 - DNA, 83 bp, Homo sapiens; identical to SEQ ID NO: 34083
  chr22:18358158-18358241
  hypo

SEQ ID NO: 194841 - DNA, 147 bp, Homo sapiens; identical to SEQ ID NO: 34084
  chr22:18363712-18363859
  hypo

SEQ ID NO: 194842 - DNA, 349 bp, Homo sapiens
  chr22:18367812-18368161
  hypo
tcaaaatcccagccccgcctcttgtaagaagtcagagtgacttttagacaatcaaggggagagacacgccctaaccaagacaccccaagccacaagctgctgccatgcactcgcatgcatggcatgtgggagtgctgcttagcactcaatgctcatattcctaggaaaatatcccgggaaacagctgcaacacacaaaagaagctttatcataagaacgcttatccaaagatgagaaacaactcgaacatccaacactagagcaacagctaagagaagcctgatgcccacacattccaaaaggtgcttgtaaagagtcaggaacaacatgggaacgcctacggttaaat

SEQ ID NO: 194843 - DNA, 63 bp, Homo sapiens; identical to SEQ ID NO: 100677
  chr22:18371271-18371334
  hypo

SEQ ID NO: 194844 - DNA, 266 bp, Homo sapiens
  chr22:18376241-18376507
  hypo
ctcccctctgccccgcgtctgtacctggtttctctctgtgctctcgtaacacctcaggccaaggtaattccgtgtggtggaggcctgtctcgtgcactgcgggatgttcagcagcatccctggctcctgcccacccccaatcatgaccatcaaaaatgtccccagacaactaccaagtatcccctggagggcaaaatcaccctgggttgagagccactgtctcagacagtacttcggccactgcctcggaccgcaccttgtggctc

SEQ ID NO: 194845 - DNA, 106 bp, Homo sapiens; identical to SEQ ID NO: 34086
  chr22:18400897-18401003
  hypo

SEQ ID NO: 194846 - DNA, 30 bp, Homo sapiens
  chr22:18402914-18402944
  hypo
agagggaaagctgcacgcgtgaaacgccag

SEQ ID NO: 194847 - DNA, 23 bp, Homo sapiens
  chr22:18404541-18404564
  hypo
accgcgcccggctagctgtccct

SEQ ID NO: 194848 - DNA, 30 bp, Homo sapiens
  chr22:18407090-18407120
  hypo
gcacatctcacccctcggaccagttcaggt

SEQ ID NO: 194849 - DNA, 181 bp, Homo sapiens; identical to SEQ ID NO: 100679
  chr22:18427240-18427421
  hypo

SEQ ID NO: 194850 - DNA, 30 bp, Homo sapiens
  chr22:18428040-18428070
  hypo
ccagccgagggcctgcgtctccttcaccct

SEQ ID NO: 194851 - DNA, 30 bp, Homo sapiens; identical to SEQ ID NO: 34088
  chr22:18434476-18434506
  hypo

SEQ ID NO: 194852 - DNA, 30 bp, Homo sapiens; identical to SEQ ID NO: 34089
  chr22:18434745-18434775
  hypo

SEQ ID NO: 194853 - DNA, 31 bp, Homo sapiens
  chr22:18435777-18435808
  hypo
gacatcgggaaagtgacggcaacttcaacca

SEQ ID NO: 194854 - DNA, 135 bp, Homo sapiens; identical to SEQ ID NO: 100682
  chr22:18442885-18443020
  hypo

SEQ ID NO: 194855 - DNA, 566 bp, Homo sapiens; identical to SEQ ID NO: 100683
  chr22:18443244-18443810
  hypo

SEQ ID NO: 194856 - DNA, 263 bp, Homo sapiens
  chr22:18451006-18451269
  hypo
tagcgtgcccagtgccgagccctgcctctgtggaagcgttgggggagggagaaaagcctagcaaccttgccagagctcagacccgccctactgaggggacactcacaggtgagcaggtgttcacaggtgaggacactccacgggggagcagcacaggagccgggagctgctctgggaagagctgaggcgccagagctccacagtcgcagactcaaaccggagacctcaccagaccctggctcgggcaagcttcctcaggctac

SEQ ID NO: 194857 - DNA, 30 bp, Homo sapiens
  chr22:18473823-18473853
  hypo
ccacacggctcctggcgtgcagatgaatac

SEQ ID NO: 194858 - DNA, 30 bp, Homo sapiens
  chr22:18515425-18515455
  hypo
tggacataatgagcccgcatgcctggaaac

SEQ ID NO: 194859 - DNA, 31 bp, Homo sapiens; identical to SEQ ID NO: 100685
  chr22:18530298-18530329
  hypo

SEQ ID NO: 194860 - DNA, 30 bp, Homo sapiens
  chr22:18546198-18546228
  hypo
ctctgcggttttatccgggggtcctggtat

SEQ ID NO: 194861 - DNA, 30 bp, Homo sapiens
  chr22:18546646-18546676
  hypo
acgaggcctctaggacggcagcgtccaatc

SEQ ID NO: 194862 - DNA, 384 bp, Homo sapiens
  chr22:18553592-18553976
  hypo
tcacctctgtcatgagcgattaggggaagggtgtgtggagtctacctgtaatatatttccactgtcccgctacatttcagaaccagatgcacaaagaacaaacaagtttcccagcaggactcaaaatagaagggatggtgactgcatgccttaccattcgggatcctcttcttcccggagaactccgcgcaggcaggtctgtacctgcttagaggcagcctgtctgttgagcagcccatcctcagtgagggacgataagagactggggctggggggatgggcagaatctttgctgttgccacaaactgggagtgtccgcagaaaactgaatgtgtctggacttcgccatcaaaacccatgttagtgtggcgcaggaacaaggta

SEQ ID NO: 194863 - DNA, 20 bp, Homo sapiens
  chr22:18577250-18577270
  hypo
agccacggcacctggagaga

SEQ ID NO: 194864 - DNA, 136 bp, Homo sapiens; identical to SEQ ID NO: 100687
  chr22:18616596-18616732
  hypo

SEQ ID NO: 194865 - DNA, 451 bp, Homo sapiens; identical to SEQ ID NO: 34092
  chr22:18619402-18619853
  hypo

SEQ ID NO: 194866 - DNA, 31 bp, Homo sapiens; identical to SEQ ID NO: 100689
  chr22:18620943-18620974
  hypo

SEQ ID NO: 194867 - DNA, 39 bp, Homo sapiens; identical to SEQ ID NO: 100690
  chr22:18641800-18641839
  hypo

SEQ ID NO: 194868 - DNA, 98 bp, Homo sapiens; identical to SEQ ID NO: 100691
  chr22:18951682-18951780
  hypo

SEQ ID NO: 194869 - DNA, 272 bp, Homo sapiens
  chr22:18973382-18973654
  hypo
cggccaccagggcagcgtgggagcagatccagcggagcgagggtggcacggcacagctgctccggcgcctcgagggctacttcagcaatgtggcacgcaacgtgcagtggacgtacctgcagccctttgtcatcgtcaccaccaacatgagtaaggcactggctgcgttgggggtggaggcctgcaaccctcaggggtgcgcccaggagctgggtccccatgggtggagcaggtgggctcccggcccccacttggccatgctcttagaaaaa

SEQ ID NO: 194870 - DNA, 31 bp, Homo sapiens; identical to SEQ ID NO: 34093
  chr22:18977078-18977109
  hypo

SEQ ID NO: 194871 - DNA, 31 bp, Homo sapiens; identical to SEQ ID NO: 34094
  chr22:18977348-18977379
  hypo

SEQ ID NO: 194872 - DNA, 30 bp, Homo sapiens; identical to SEQ ID NO: 100694
  chr22:19004073-19004103
  hypo

SEQ ID NO: 194873 - DNA, 31 bp, Homo sapiens
  chr22:19011956-19011987
  hypo
gaagactgtccaggaccgtgtcactaggcat

SEQ ID NO: 194874 - DNA, 166 bp, Homo sapiens
  chr22:19020498-19020664
  hypo
tgctctctctcacctccgtgggagcactccggccaccccaccttgttcccgagtctacctccatagcctggcgctgcctgtccaggctgtgctccgagtctgctcgcctcgggcccccccaccgccggcagttgaagtgcagctgcagtgcgcggtagacaggcaa

SEQ ID NO: 194875 - DNA, 76 bp, Homo sapiens; identical to SEQ ID NO: 34095
  chr22:19039217-19039293
  hypo

SEQ ID NO: 194876 - DNA, 30 bp, Homo sapiens
  chr22:19047829-19047859
  hypo
agagaaagaagaagacggagaccataaagg

SEQ ID NO: 194877 - DNA, 37 bp, Homo sapiens
  chr22:19048113-19048150
  hypo
gccctgggagcagcacgtggggcggtgtggatgattc

SEQ ID NO: 194878 - DNA, 64 bp, Homo sapiens
  chr22:19048365-19048429
  hypo
ggaaccctgcggaaacgagctcccaacttcaaatgtgtgtgcagggtaccgacacatgggcata

SEQ ID NO: 194879 - DNA, 30 bp, Homo sapiens
  chr22:19048838-19048868
  hypo
atggagagaggagtgcgtgcacccgagcca

SEQ ID NO: 194880 - DNA, 194 bp, Homo sapiens; identical to SEQ ID NO: 34096
  chr22:19053068-19053262
  hypo

SEQ ID NO: 194881 - DNA, 29 bp, Homo sapiens
  chr22:19088602-19088631
  hypo
atcacagcgaaaccctgtctcaaaaaaaa

SEQ ID NO: 194882 - DNA, 30 bp, Homo sapiens; identical to SEQ ID NO: 100699
  chr22:19113940-19113970
  hypo

SEQ ID NO: 194883 - DNA, 30 bp, Homo sapiens
  chr22:19117591-19117621
  hypo
agcgactcacctgcccggctctctaccctg

SEQ ID NO: 194884 - DNA, 30 bp, Homo sapiens
  chr22:19118524-19118554
  hypo
gcaaacaggctggacgtgggccgcctcccc

SEQ ID NO: 194885 - DNA, 92 bp, Homo sapiens; identical to SEQ ID NO: 100700
  chr22:19120093-19120185
  hypo

SEQ ID NO: 194886 - DNA, 34 bp, Homo sapiens; identical to SEQ ID NO: 34097
  chr22:19130727-19130761
  hypo

SEQ ID NO: 194887 - DNA, 30 bp, Homo sapiens; identical to SEQ ID NO: 100702
  chr22:19132814-19132844
  hypo

SEQ ID NO: 194888 - DNA, 30 bp, Homo sapiens; identical to SEQ ID NO: 100703
  chr22:19346882-19346912
  hypo

SEQ ID NO: 194889 - DNA, 30 bp, Homo sapiens
  chr22:19401411-19401441
  hypo
ggtaatcccggccaccgtgcccggccagga

SEQ ID NO: 194890 - DNA, 30 bp, Homo sapiens
  chr22:19425881-19425911
  hypo
taatgttccattgtacgtacgccacatttt

SEQ ID NO: 194891 - DNA, 17 bp, Homo sapiens
  chr22:19426182-19426199
  hypo
ggagtctcactctgtcg

SEQ ID NO: 194892 - DNA, 37 bp, Homo sapiens; identical to SEQ ID NO: 100704
  chr22:19584222-19584259
  hypo

SEQ ID NO: 194893 - DNA, 109 bp, Homo sapiens
  chr22:19605267-19605376
  hypo
gccctttgcacagcccgcgaagggcacgtgggaatcctgctccattccaggtcccgggccagtagctccaggccgcgccagggtcggtgcagagcggcatttcccgccc

SEQ ID NO: 194894 - DNA, 220 bp, Homo sapiens; identical to SEQ ID NO: 34098
  chr22:19620237-19620457
  hypo

SEQ ID NO: 194895 - DNA, 68 bp, Homo sapiens; identical to SEQ ID NO: 34099
  chr22:19621108-19621176
  hypo

SEQ ID NO: 194896 - DNA, 31 bp, Homo sapiens; identical to SEQ ID NO: 100708
  chr22:19624102-19624133
  hypo

SEQ ID NO: 194897 - DNA, 232 bp, Homo sapiens; identical to SEQ ID NO: 100709
  chr22:19644022-19644254
  hypo

SEQ ID NO: 194898 - DNA, 31 bp, Homo sapiens; identical to SEQ ID NO: 100710
  chr22:19683861-19683892
  hypo

SEQ ID NO: 194899 - DNA, 31 bp, Homo sapiens; identical to SEQ ID NO: 100711
  chr22:19697756-19697787
  hypo

SEQ ID NO: 194900 - DNA, 665 bp, Homo sapiens; identical to SEQ ID NO: 57809
  chr22:19706042-19706707
  hypo

SEQ ID NO: 194901 - DNA, 17 bp, Homo sapiens
  chr22:19713505-19713522
  hypo
tggacgcggcgagggag

SEQ ID NO: 194902 - DNA, 121 bp, Homo sapiens; identical to SEQ ID NO: 100714
  chr22:19713941-19714062
  hypo

SEQ ID NO: 194903 - DNA, 121 bp, Homo sapiens; identical to SEQ ID NO: 100715
  chr22:19714361-19714482
  hypo

SEQ ID NO: 194904 - DNA, 17 bp, Homo sapiens
  chr22:19714721-19714738
  hypo
gacgctgtgggggcggt

SEQ ID NO: 194905 - DNA, 37 bp, Homo sapiens; identical to SEQ ID NO: 100717
  chr22:19725675-19725712
  hypo

SEQ ID NO: 194906 - DNA, 608 bp, Homo sapiens; identical to SEQ ID NO: 133780
  chr22:19748300-19748908
  hypo

SEQ ID NO: 194907 - DNA, 108 bp, Homo sapiens; identical to SEQ ID NO: 133781
  chr22:19748960-19749068
  hypo

SEQ ID NO: 194908 - DNA, 40 bp, Homo sapiens; identical to SEQ ID NO: 133782
  chr22:19749084-19749124
  hypo

SEQ ID NO: 194909 - DNA, 80 bp, Homo sapiens; identical to SEQ ID NO: 133783
  chr22:19753297-19753377
  hypo

SEQ ID NO: 194910 - DNA, 170 bp, Homo sapiens; identical to SEQ ID NO: 133784
  chr22:19753516-19753686
  hypo

SEQ ID NO: 194911 - DNA, 105 bp, Homo sapiens; identical to SEQ ID NO: 133785
  chr22:19753869-19753974
  hypo

SEQ ID NO: 194912 - DNA, 17 bp, Homo sapiens
  chr22:19754033-19754050
  hypo
ggcgccggcggcttagt

SEQ ID NO: 194913 - DNA, 639 bp, Homo sapiens
  chr22:19771480-19772119
  hypo
tgaaggttgagaccccgaggagaggcaggcctgggggaccgtgcagcagctgtgcccacctaggaccacagggctggtggggctggcagcttggtagagggcaggtgcacagcaaagttttcaccggtgccggcttgttgtcttccacgctgggatttcacatgaagttctagctaattgagtataagcatttctaaagaacccccggagggttgtttttctttgtgcaaacactccttttgtgcagagggtgttctgtggcttcttggcagagacacaggtgggaaacacctgattgaacatcattgcctggggagtggagacacgcacagcacgtcaacatggagcgcccagcagcggcggcgggtcctgggctgtgctccggagcccttcccgggatcatctcccggcatcggctgacccctcggtgtctacgtgccaagcccaatctgcctgcagggacacccactgccagaggcggaggcaggttctcctggtcccagacccagggccgtctgttggcctgcaggtaacacgcagggaggaaggaaaaggctctaggcacagctgcttgtctaagagggaccctgttggcggcgcaacgctgggtgagtgctgcccgcccgcggatggggtgct

SEQ ID NO: 194914 - DNA, 30 bp, Homo sapiens; identical to SEQ ID NO: 100721
  chr22:19777094-19777124
  hypo

SEQ ID NO: 194915 - DNA, 356 bp, Homo sapiens; identical to SEQ ID NO: 100722
  chr22:19787000-19787356
  hypo

SEQ ID NO: 194916 - DNA, 161 bp, Homo sapiens
  chr22:19789603-19789764
  hypo
agtcaaagtcaaggtccatgacgggctcctcatggcaggcgatgcggctgcacaccttctgctcagagacgtcccacaggaccaccgatccatcctcatagccggccagaaggagtgggcgggagctgcagtcggcctgcggggaacagcagagcagtcag

SEQ ID NO: 194917 - DNA, 171 bp, Homo sapiens
  chr22:19798778-19798949
  hypo
gccaagcccaactgtgcgtgggggccgtcctgcccagtaccagccccaaagactgcccgggcacagcgaatggggaggactcggcagtgggcatggacagtagcccccacgtgtgcgccccctattccatggtatgtcctccccatgccccgccctcgggccaccatgccc

SEQ ID NO: 194918 - DNA, 30 bp, Homo sapiens
  chr22:19799464-19799494
  hypo
ccctgccgttcctgccggcctcgggcctcc

SEQ ID NO: 194919 - DNA, 214 bp, Homo sapiens
  chr22:19799718-19799932
  hypo
gtgggtaggcgcaggcgcctcctaatcaaatgcagaggatgagcacaactgtttggagaacatggggcctcaggcaggctggctctcacctcgtcgctgcccctccctggcacggcaagcgtccagcgtggctggcccccggccaggatgctgctccggcagaagcccacactctccaagcacacggagtccacgacagcgctcctgccctccg

SEQ ID NO: 194920 - DNA, 93 bp, Homo sapiens; identical to SEQ ID NO: 100724
  chr22:19827947-19828040
  hypo

SEQ ID NO: 194921 - DNA, 428 bp, Homo sapiens
  chr22:19830501-19830929
  hypo
tggggctccgtttggcgattcggagtcaaaggcgcacttcatagctcctttccaaatcccgtgcattgtcaggccctgttcccctttgaagcctcgctgagtgattgaagcgtctactttctgaggggcagatagcaccgggctggtaatctgactctaagccacgggataaaggtagtttgtttcctctcagcccgtctgtcaacacctcctcagtaattagccctaattattacagagggccagcctcccattcggttattaaatcagaaatagtatcacggctgggcatctgtcaacgccccgactggcgaccttcgattcattgaatcctctgtcagtatccgcctttggaagcgcccaggcgggcagggaggcagcggcttcaaagatgcagatcccaggaagaattccggtgaggcagggag

SEQ ID NO: 194922 - DNA, 30 bp, Homo sapiens
  chr22:19837897-19837927
  hypo
aatccgcaatgcatgcgagtgcggagtgag

SEQ ID NO: 194923 - DNA, 76 bp, Homo sapiens; identical to SEQ ID NO: 100725
  chr22:19839317-19839393
  hypo

SEQ ID NO: 194924 - DNA, 412 bp, Homo sapiens; identical to SEQ ID NO: 100726
  chr22:19839603-19840015
  hypo

SEQ ID NO: 194925 - DNA, 150 bp, Homo sapiens; identical to SEQ ID NO: 100727
  chr22:19856432-19856582
  hypo

SEQ ID NO: 194926 - DNA, 30 bp, Homo sapiens
  chr22:19866399-19866429
  hypo
tggccacaccggagccggagctgttggaca

SEQ ID NO: 194927 - DNA, 124 bp, Homo sapiens
  chr22:19866815-19866939
  hypo
ccaggctgcaggctccggtttctctgggtgcctgcaagctgcagcggcagcaagatgaaaccgcaccgaaggcttccagctaccacggcccggcaggcttcagagcccccgcatccctccaggc

SEQ ID NO: 194928 - DNA, 30 bp, Homo sapiens; identical to SEQ ID NO: 34105
  chr22:19867650-19867680
  hypo

SEQ ID NO: 194929 - DNA, 133 bp, Homo sapiens; identical to SEQ ID NO: 100729
  chr22:19870366-19870499
  hypo

SEQ ID NO: 194930 - DNA, 56 bp, Homo sapiens; identical to SEQ ID NO: 100730
  chr22:19870814-19870870
  hypo

SEQ ID NO: 194931 - DNA, 420 bp, Homo sapiens
  chr22:19872850-19873270
  hypo
ccggtatgcgggtggcgcccacctaagcatctggaagctgaagctcccgtgagagggaacccttaagtctccagctgctgtcccggggcaggagtcaaaacataccaacttggctaagccagcttgcgggaggccggctccagcctctgtgctctgctcagccgcaggaattgggtgccgggagggctggcaccggtcggggatcagcccagacacaggggatgccagcccacatcagaggaaggagctgggccccatgggcagggctggggcacgaaggaggggctgtggtccctgcaggccgggggctcacgctcagccgtctggtccctctccaacctggtgtccagcccaccaggcccagcacttcctggtgcctgctccgtgccggaacagaacatctgacgctgcacccacact

SEQ ID NO: 194932 - DNA, 30 bp, Homo sapiens; identical to SEQ ID NO: 100732
  chr22:19875071-19875101
  hypo

SEQ ID NO: 194933 - DNA, 30 bp, Homo sapiens
  chr22:19878313-19878343
  hypo
acgggagccatcagccgagcacagctgagc

SEQ ID NO: 194934 - DNA, 30 bp, Homo sapiens; identical to SEQ ID NO: 100733
  chr22:19880244-19880274
  hypo

SEQ ID NO: 194935 - DNA, 30 bp, Homo sapiens; identical to SEQ ID NO: 100734
  chr22:19880497-19880527
  hypo

SEQ ID NO: 194936 - DNA, 160 bp, Homo sapiens
  chr22:19882773-19882933
  hypo
cttcacggttgctctcgaggtgcactggggagcggccaacccgcctggcagccagcaggatgggggagccctgggaggtgacaggaagtggggcaaagattctccatgcacctcggggagaccagagacagagcgtgtggctcgacgtgcccttacctat

SEQ ID NO: 194937 - DNA, 30 bp, Homo sapiens; identical to SEQ ID NO: 100736
  chr22:19890116-19890146
  hypo

SEQ ID NO: 194938 - DNA, 115 bp, Homo sapiens; identical to SEQ ID NO: 100737
  chr22:19891184-19891299
  hypo

SEQ ID NO: 194939 - DNA, 497 bp, Homo sapiens
  chr22:19892194-19892691
  hypo
aggcctcgtgcacgccgcagagcccaccgagggcctggggccagggggacagggagcctccttggtggaggagccaaccaggggacagagtgcccactgcaggaggggcactgtgatgccaggcaccgtgagttgcgcacctggcctccaggatgggaccaggtagaaatgtcccacccgactacgggaggcactcaggggccaggggagcagccccggggtccatattaatttcagctccattttaaaggcgagttaaaataaacatggggaatatttataaggcaaataaatctggcagaaacagcccctccaagtgtgagtggaggcctcccctcagccccagcccaagctgataaaatacagaaatgctactgtagaccctccgggcttattttgactgcagcagaggaatgtaacatgtaaacactgactcccatattacactgttacaacttgcattaacagcgccggacaaaagccgcattttcacagaa

SEQ ID NO: 194940 - DNA, 178 bp, Homo sapiens
  chr22:19892920-19893098
  hypo
ctgtgtcttcccggccgagccagctgcccccagcacagggttgcagaggagcgctccccaagccccagccaccttgctagggagacagcaaggccagggcacccagagcaccgggccccctccccaggcccaagcgggcagcctctgaggggaacaggcacaacgagggtggtgaaag

SEQ ID NO: 194941 - DNA, 30 bp, Homo sapiens
  chr22:19893321-19893351
  hypo
atgggcactggggcccgggcaacccatctc

SEQ ID NO: 194942 - DNA, 371 bp, Homo sapiens; identical to SEQ ID NO: 100740
  chr22:19899689-19900060
  hypo

SEQ ID NO: 194943 - DNA, 30 bp, Homo sapiens; identical to SEQ ID NO: 100741
  chr22:19900330-19900360
  hypo

SEQ ID NO: 194944 - DNA, 75 bp, Homo sapiens
  chr22:19903250-19903325
  hypo
gtccacaaggagccacgcgagtaagtcagatgctcacctctttcccacctttggcaacgccgcaaaccgtgtgct

SEQ ID NO: 194945 - DNA, 28 bp, Homo sapiens
  chr22:19923946-19923974
  hypo
cttgtagctcctgcggccccaactcaga

SEQ ID NO: 194946 - DNA, 103 bp, Homo sapiens; identical to SEQ ID NO: 34111
  chr22:19924378-19924481
  hypo

SEQ ID NO: 194947 - DNA, 30 bp, Homo sapiens
  chr22:19926304-19926334
  hypo
ttccagactcggtctcggtccaaaacgtga

SEQ ID NO: 194948 - DNA, 158 bp, Homo sapiens
  chr22:19938442-19938600
  hypo
agggctccagtaagacgctcccacgggaggagcaagaacacagaacagagggggcaagacagctccaccaggagtcaggagtgaatcccctctgggaacgaggcactaggaagaagaacttccagcccaggaggtaggtagcgttcagaagaagcctg

SEQ ID NO: 194949 - DNA, 143 bp, Homo sapiens; identical to SEQ ID NO: 100744
  chr22:19945257-19945400
  hypo

SEQ ID NO: 194950 - DNA, 30 bp, Homo sapiens; identical to SEQ ID NO: 100745
  chr22:19960510-19960540
  hypo

SEQ ID NO: 194951 - DNA, 258 bp, Homo sapiens
  chr22:19960817-19961075
  hypo
aagctcagccatggcgtagctccctgaggggcaggactaggtgtcagaacacacctctgccccacctctccaggaaggagcagggatcccgcgagggcgaggggcactgccaggagagcccctggagaccgcctgtgtgcaggcggtcacaggagcccctgtgagcagggcgctgagcttcagagacagggccggggggactggagctacctccagttgggacagcgcccaagcgagagggccggggcctggactccc

SEQ ID NO: 194952 - DNA, 333 bp, Homo sapiens
  chr22:19961469-19961802
  hypo
accgtccagggtgcacgcattgcccgcagcccatacacctcttggatcctggggtggtggtgtggcccctcctttccccgccagccgaggcaggagctgcaccagtgaggtgcctgggattccctctctcaggacttgcccaccctgcccgacctggtccctcaccatccagttgccggcactgaggttctgcagagcgccggcggcagcctccagggtgttgaagttccggctctccgtgaggagggagaggtagagacgtaccacctcgggctggtacagcagctcaaagcctaggtgcagggcaaccgccacccacggtcacccagaatc

SEQ ID NO: 194953 - DNA, 31 bp, Homo sapiens; identical to SEQ ID NO: 34112
  chr22:19963989-19964020
  hypo

SEQ ID NO: 194954 - DNA, 94 bp, Homo sapiens
  chr22:19964966-19965060
  hypo
gcatcatcccgcctccggcgctgggagcctacagcactgcccaggggcccgggctcggcctcctggtacctgtcggccccgggcacctccttgt

SEQ ID NO: 194955 - DNA, 58 bp, Homo sapiens
  chr22:19965519-19965577
  hypo
ggcatgcaggagcgcgtccaccagcccttcacactcccggagtcgccgccgggcctca

SEQ ID NO: 194956 - DNA, 301 bp, Homo sapiens; identical to SEQ ID NO: 100749
  chr22:19966358-19966659
  hypo

SEQ ID NO: 194957 - DNA, 311 bp, Homo sapiens; identical to SEQ ID NO: 100750
  chr22:19967263-19967574
  hypo

SEQ ID NO: 194958 - DNA, 417 bp, Homo sapiens; identical to SEQ ID NO: 100751
  chr22:19968733-19969150
  hypo

SEQ ID NO: 194959 - DNA, 31 bp, Homo sapiens; identical to SEQ ID NO: 100752
  chr22:19970585-19970616
  hypo

SEQ ID NO: 194960 - DNA, 38 bp, Homo sapiens
  chr22:19971873-19971911
  hypo
ggagagccacgcccccgcagcaagacctggcaaccctg

SEQ ID NO: 194961 - DNA, 157 bp, Homo sapiens; identical to SEQ ID NO: 100754
  chr22:19972130-19972287
  hypo

SEQ ID NO: 194962 - DNA, 76 bp, Homo sapiens; identical to SEQ ID NO: 100755
  chr22:19978173-19978249
  hypo

SEQ ID NO: 194963 - DNA, 31 bp, Homo sapiens; identical to SEQ ID NO: 100756
  chr22:20019038-20019069
  hypo

SEQ ID NO: 194964 - DNA, 30 bp, Homo sapiens
  chr22:20026135-20026165
  hypo
ctctggactattttccgaagccctaagcca

SEQ ID NO: 194965 - DNA, 30 bp, Homo sapiens
  chr22:20027402-20027432
  hypo
cccccggacagtacacgcactcaccctgcc

SEQ ID NO: 194966 - DNA, 30 bp, Homo sapiens
  chr22:20044356-20044386
  hypo
ccacagacactcctcgctggtggcatcgtg

SEQ ID NO: 194967 - DNA, 82 bp, Homo sapiens
  chr22:20050529-20050611
  hypo
tgacggctggagccccgatgctagctacaatggctggcttgagtggacttctgtcaggagaattgcttgaactcgggaggtg

SEQ ID NO: 194968 - DNA, 322 bp, Homo sapiens
  chr22:20050670-20050992
  hypo
ctcctcctcaaaaaaagaaaataagagaaaagagaagagaagaggaaaaagaaaagaagaaaagaaacaacccttgcagttccccggccactccccagagccagttaggccaccaggtgggctggggctagacccggctgcgggcgggccacagagggactaatggccaccacttctctccatcctgcaggcagctgccagacccggccatcgaggaccagggtggggagtacgtgcagcccatgctgagcaagtacgcggctgtgtgcgtgcgctgccctggctacggcaccaggtattgcagcaccgtgggtgcgccacc

SEQ ID NO: 194969 - DNA, 18 bp, Homo sapiens
  chr22:20060843-20060861
  hypo
aggcgtgagccaccgtgc

SEQ ID NO: 194970 - DNA, 273 bp, Homo sapiens; identical to SEQ ID NO: 34119
  chr22:20073378-20073651
  hypo

SEQ ID NO: 194971 - DNA, 30 bp, Homo sapiens
  chr22:20079052-20079082
  hypo
aatcgggaaatgaagcggaagcaggcggag

SEQ ID NO: 194972 - DNA, 203 bp, Homo sapiens
  chr22:20079435-20079638
  hypo
cacgagtacatgcagcgtgtcctcaaggtccgccctgtctataatttctttgaatgtggtaagtctaaccttccccatttcagtcctaaagaatcacaaggtgtaactttggtcagggctggggaggcaggcgctgaccgctagccctactctactggaacgggaggaaagggaagggtagagagcagcgtgctgcagatggg

SEQ ID NO: 194973 - DNA, 31 bp, Homo sapiens; identical to SEQ ID NO: 34120
  chr22:20087955-20087986
  hypo

SEQ ID NO: 194974 - DNA, 30 bp, Homo sapiens; identical to SEQ ID NO: 100759
  chr22:20101815-20101845
  hypo

SEQ ID NO: 194975 - DNA, 30 bp, Homo sapiens; identical to SEQ ID NO: 100760
  chr22:20109627-20109657
  hypo

SEQ ID NO: 194976 - DNA, 43 bp, Homo sapiens
  chr22:20120589-20120632
  hypo
ggcccccacgtgcatcgcaaggctgaatcgggtgcccgtggag

SEQ ID NO: 194977 - DNA, 175 bp, Homo sapiens; identical to SEQ ID NO: 100761
  chr22:20123201-20123376
  hypo

SEQ ID NO: 194978 - DNA, 345 bp, Homo sapiens
  chr22:20123632-20123977
  hypo
cccctggacctgccctccacccgtagcttggctggagccagccaggaggggctcagagggacatggcgggccagacactccacctccagcccaggcccagagcctgtctttgcctggccctccggcaggcgagcctggtgtgcaccatcaggtctgggtgggagtggagcctccccgagcctggacccagactactgcctgctaggccctgcctgtgggaatgcgtgtctttgagtgtccctgagcatccacacatggcctcccctgtccccatgtgtcctcatgcatccttgcatgtccttgtgtgtcctcccgtgttcttgcgcaccctgagagtgcttgtgt

SEQ ID NO: 194979 - DNA, 191 bp, Homo sapiens; identical to SEQ ID NO: 100763
  chr22:20126323-20126514
  hypo

SEQ ID NO: 194980 - DNA, 249 bp, Homo sapiens
  chr22:20130991-20131240
  hypo
gcccggcttcggtggcgcccgcaaccctgccctgcagacgtcactgtcctcgctgtccagctccgtgagccgtgcaccgcggacgtcgtcctcctccctgcaggctgatcaggccagcagcaacgccccggggccccggcccagcagtggctcacacaggtcacctgcacgccagggcctgccctccccgcccggcactccccactcaccatcctacgcgggccccaaagctgtcgccttcatccacac

SEQ ID NO: 194981 - DNA, 30 bp, Homo sapiens; identical to SEQ ID NO: 100764
  chr22:20133563-20133593
  hypo

SEQ ID NO: 194982 - DNA, 31 bp, Homo sapiens; identical to SEQ ID NO: 100765
  chr22:20200274-20200305
  hypo

SEQ ID NO: 194983 - DNA, 30 bp, Homo sapiens
  chr22:20213188-20213218
  hypo
gctcacacacgcacacgtgagcagcatgct

SEQ ID NO: 194984 - DNA, 30 bp, Homo sapiens
  chr22:20213809-20213839
  hypo
acggcccgtggggtgcgggactctgccatg

SEQ ID NO: 194985 - DNA, 447 bp, Homo sapiens
  chr22:20228946-20229393
  hypo
gagctctttattccacgtcgtccgatatttttacacaagtaaaataaaatgcatatctctatataccgcgatctgggtgggaggcggcgttctggaacaaacgctgccgccgaaccctgtaaacatgatggggtggagatgggggtggcgggcggcaggcgtccatcagggaggacctggcctggcctgccccacgggtcggccgcccggctggcttggcggcgtggagagagaccccgtatgtacacacacctggctgctgagcacgctcttgtgtccgctgggggtcagcagggcccaagcactgtccacagcaccagcgccaggcccaggggggtgaggctgcaggtgaggctgggtagggcacctgagccttctgagtcaccagtcccgccacccccgctgcctgcctggcccagacggcagtggctgcgggtgcggttcttg

SEQ ID NO: 194986 - DNA, 31 bp, Homo sapiens; identical to SEQ ID NO: 100767
  chr22:20243597-20243628
  hypo

SEQ ID NO: 194987 - DNA, 162 bp, Homo sapiens; identical to SEQ ID NO: 100768
  chr22:20248010-20248172
  hypo

SEQ ID NO: 194988 - DNA, 30 bp, Homo sapiens; identical to SEQ ID NO: 34126
  chr22:20254214-20254244
  hypo

SEQ ID NO: 194989 - DNA, 433 bp, Homo sapiens; identical to SEQ ID NO: 57823
  chr22:20255236-20255669
  hypo

SEQ ID NO: 194990 - DNA, 31 bp, Homo sapiens; identical to SEQ ID NO: 100771
  chr22:20258984-20259015
  hypo

SEQ ID NO: 194991 - DNA, 31 bp, Homo sapiens
  chr22:20285991-20286022
  hypo
ttgaggcaaaggggccgcgagagggtaggtg

SEQ ID NO: 194992 - DNA, 147 bp, Homo sapiens
  chr22:20302964-20303111
  hypo
gcccgctgctcctcacggatccggtgttccacggcctgccatggggccagggcgcggagggggagaggtgagggcagctctgccatcagggggcggggaggtgagggcagctcaaacacatgctcctgctgccgtccccagtggcag

SEQ ID NO: 194993 - DNA, 84 bp, Homo sapiens; identical to SEQ ID NO: 100772
  chr22:20308709-20308793
  hypo

SEQ ID NO: 194994 - DNA, 30 bp, Homo sapiens; identical to SEQ ID NO: 34128
  chr22:20745572-20745602
  hypo

SEQ ID NO: 194995 - DNA, 209 bp, Homo sapiens; identical to SEQ ID NO: 100774
  chr22:20760012-20760221
  hypo

SEQ ID NO: 194996 - DNA, 83 bp, Homo sapiens; identical to SEQ ID NO: 100775
  chr22:20765420-20765503
  hypo

SEQ ID NO: 194997 - DNA, 31 bp, Homo sapiens; identical to SEQ ID NO: 34130
  chr22:20788840-20788871
  hypo

SEQ ID NO: 194998 - DNA, 1488 bp, Homo sapiens; identical to SEQ ID NO: 133803
  chr22:20790617-20792105
  hypo

SEQ ID NO: 194999 - DNA, 61 bp, Homo sapiens; identical to SEQ ID NO: 57827
  chr22:20792308-20792369
  hypo

SEQ ID NO: 195000 - DNA, 116 bp, Homo sapiens; identical to SEQ ID NO: 133805
  chr22:20792481-20792597
  hypo

SEQ ID NO: 195001 - DNA, 30 bp, Homo sapiens; identical to SEQ ID NO: 100780
  chr22:20847159-20847189
  hypo

SEQ ID NO: 195002 - DNA, 20 bp, Homo sapiens
  chr22:20851557-20851577
  hypo
gactccgtctcaaaaaaaaa

SEQ ID NO: 195003 - DNA, 121 bp, Homo sapiens; identical to SEQ ID NO: 100781
  chr22:20857253-20857374
  hypo

SEQ ID NO: 195004 - DNA, 30 bp, Homo sapiens
  chr22:20861447-20861477
  hypo
gagagtccatctggtcgctcttcggatgcg

SEQ ID NO: 195005 - DNA, 102 bp, Homo sapiens; identical to SEQ ID NO: 34133
  chr22:20864297-20864399
  hypo

SEQ ID NO: 195006 - DNA, 132 bp, Homo sapiens; identical to SEQ ID NO: 34134
  chr22:20908749-20908881
  hypo

SEQ ID NO: 195007 - DNA, 30 bp, Homo sapiens; identical to SEQ ID NO: 100784
  chr22:20909370-20909400
  hypo

SEQ ID NO: 195008 - DNA, 112 bp, Homo sapiens
  chr22:20921972-20922084
  hypo
gtctaaggaagagcccgctgcatgttggaatgtgccctggcagggtttgccctggtgacttggagatgtctaaggaagagccccctgcatggtggcgcgggcctgtctcgtc

SEQ ID NO: 195009 - DNA, 224 bp, Homo sapiens; identical to SEQ ID NO: 100785
  chr22:20929348-20929572
  hypo

SEQ ID NO: 195010 - DNA, 30 bp, Homo sapiens; identical to SEQ ID NO: 100786
  chr22:20939335-20939365
  hypo

SEQ ID NO: 195011 - DNA, 615 bp, Homo sapiens
  chr22:20945799-20946414
  hypo
taggaaggcccagcccgaggacagtgtgggcacaggcgaagccgggggcatgcctgctcctgatccggcatgtttagttggagaaaattcactcagttgtgcaccggcactgggcatgttttccttctacgaagtttttaacagatgtgtacctgaccctgcctggagaggggagggctggcagggtcagcgtttgaaatgatgctgcccccggcgggacaggcagacaaggagggcaccgccccgggcctaggcgggtctccgtcctggggcaggggaagagctcagcatggcaggacctagcgtgggcttgctgccctgtgtcctccctgagcccaggcaggtgctggagttcatgtgctgcgtttctgctctgcgggccgccgccgtgttcaggcgcttggggaggcagggcaggcctagggccctgtggctgggctcacccttgttctcccacttcagatgctcgatcttctagtggagcttggccagcaactccaaggactgctgctgtaggaactgcaggcccaggtccaagtccaggatctgcctctgctggtcgatctggacacccacagaccggcggcactgcggggggtgcgacgtaacctgaga

SEQ ID NO: 195012 - DNA, 113 bp, Homo sapiens; identical to SEQ ID NO: 100787
  chr22:20958607-20958720
  hypo

SEQ ID NO: 195013 - DNA, 31 bp, Homo sapiens; identical to SEQ ID NO: 34136
  chr22:20976181-20976212
  hypo

SEQ ID NO: 195014 - DNA, 229 bp, Homo sapiens; identical to SEQ ID NO: 100789
  chr22:21011031-21011260
  hypo

SEQ ID NO: 195015 - DNA, 30 bp, Homo sapiens
  chr22:21011776-21011806
  hypo
cggctggcctctctgcgattggtggctgta

SEQ ID NO: 195016 - DNA, 177 bp, Homo sapiens
  chr22:21024824-21025001
  hypo
cgtagccggagtagtcgtagatgatgttgcagtggaggcgggagttcagcccagtatagaagctgctcatctggcccaggtccaccgcgttgccgtgcgagaagaagaccgtgtacctggcaccaggcacgcagcgaacatacatgcaggagacgcggttgccgtgggcgctcttag

SEQ ID NO: 195017 - DNA, 51 bp, Homo sapiens; identical to SEQ ID NO: 34137
  chr22:21058304-21058355
  hypo

SEQ ID NO: 195018 - DNA, 30 bp, Homo sapiens
  chr22:21098908-21098938
  hypo
gaagcacctcgcccgcgtagcggttgcgca

SEQ ID NO: 195019 - DNA, 61 bp, Homo sapiens
  chr22:21099330-21099391
  hypo
tctccttgagagttgcgtgtgcagcttataaatgtcacttacagaccgtaaaggggctgaa

SEQ ID NO: 195020 - DNA, 345 bp, Homo sapiens
  chr22:21101700-21102045
  hypo
tctttgggccaaggtgcggcttgcaccactaccattgtcaacagacatccacagcaccctgcatgtactcatgtgcgtcatgaaaagcgacagccgagctctaagccttcccctgcactgtggctcctatggtctaaggggtcactgctcttcagaaggctcgcacataccccaagagttgtgttctgcttgttgtagccagcaaagtgaaggatgctctcagtggccatggccagccccgtgtgctgggacagtcccgatacccagttctgatgtttgttcagatattcctgaaataggaaaaacacatggggtttcagttatttatctgatttttttagaggc

SEQ ID NO: 195021 - DNA, 175 bp, Homo sapiens; identical to SEQ ID NO: 100792
  chr22:21102481-21102656
  hypo

SEQ ID NO: 195022 - DNA, 396 bp, Homo sapiens
  chr22:21105243-21105639
  hypo
gaaaatcatgcttgtgcgacgcagactcgagaggctataaactggctggtagctgaagacctctttggcagctaaaccgagaacacagctgagtcaacatggctgaggtgggggagctgggcttggaagacagagcgacctgggggcagccagctccccttgcactcggtggagcctggcaatggcttggtctcctcactgggggatggggccagcaccacccacacctcaaattgctggggactgggtgagctcatgcaggttgaccatctcgtggaaatactcagggaattgtggtaaagatggcccttagtgcaggggatcgtgtcgggcctacctcacgggcttcgtacgtgtcaggaaccgtgatccggtagggggcgtcggggatgtcat

SEQ ID NO: 195023 - DNA, 30 bp, Homo sapiens
  chr22:21105890-21105920
  hypo
ggcggacagggccggcggggtggtggtaga

SEQ ID NO: 195024 - DNA, 30 bp, Homo sapiens
  chr22:21141644-21141674
  hypo
tcctaagcacctcccgctccggtgacccca

SEQ ID NO: 195025 - DNA, 148 bp, Homo sapiens
  chr22:21150527-21150675
  hypo
tcatccaccaggtgctcgtcttggatgttggccgcgatgttggccagggcattaatcactgccagggagcaatgcctgaagaagaaggagtgaaataacagccactgccaggccctcaaccgtccccaagggacggcactgcaggggt

SEQ ID NO: 195026 - DNA, 181 bp, Homo sapiens
  chr22:21153866-21154047
  hypo
gacagaggcatgcatacgcacaatgccaggtgccccacacgagcctgctgagaacaatgggctgcctctgagagacaggaataggggcgtacttgtcgctctcctgagagatgtagagccggttggacaggctggccaagaacgcctccacaatcactgggtccaccgtcaatccagcctt

SEQ ID NO: 195027 - DNA, 31 bp, Homo sapiens
  chr22:21214251-21214282
  hypo
ctagacaaatagtgtgcgggttaagagtttg

SEQ ID NO: 195028 - DNA, 34 bp, Homo sapiens; identical to SEQ ID NO: 100795
  chr22:21299563-21299597
  hypo

SEQ ID NO: 195029 - DNA, 30 bp, Homo sapiens
  chr22:21304219-21304249
  hypo
gtcacactgcattgccgaagtccagctttc

SEQ ID NO: 195030 - DNA, 36 bp, Homo sapiens; identical to SEQ ID NO: 34138
  chr22:21304978-21305014
  hypo

SEQ ID NO: 195031 - DNA, 31 bp, Homo sapiens; identical to SEQ ID NO: 34139
  chr22:21331193-21331224
  hypo

SEQ ID NO: 195032 - DNA, 31 bp, Homo sapiens; identical to SEQ ID NO: 100798
  chr22:21348153-21348184
  hypo

SEQ ID NO: 195033 - DNA, 468 bp, Homo sapiens
  chr22:21354049-21354517
  hypo
gacagcaggccctccgtctagaatccgctttattatggcacctggtgggtctggtgggatctgagggaggaagaggctgcagtcttgctgggcagcccctcggtcagtccagcagcccctcaggccatgctgctgctcagctgcatggcaaagtcctgcacatgctccttcagagtctggcgggcatctgcctgtgcccgcttctcccgtgcccgctcctgctgcagcttggtcagtctcaaccgcagccgctgctcccgccgcttgcaggcctgcagctggcgctgggccttgtcaagggcatcaagggctgcctcggctcgccgcttccagagtaaggcgctgcccacctggtagctgtgttcattctggatgtaggctccggcgggtgggggcaggcgcagcatatacgctgagggggagactggccgtggttcgagaggggagggctgccgctctggtgaaggc

SEQ ID NO: 195034 - DNA, 25 bp, Homo sapiens
  chr22:21359968-21359993
  hypo
gggtgcagtgactcacgcctgtgat

SEQ ID NO: 195035 - DNA, 315 bp, Homo sapiens; identical to SEQ ID NO: 100801
  chr22:21380145-21380460
  hypo

SEQ ID NO: 195036 - DNA, 30 bp, Homo sapiens
  chr22:21384500-21384530
  hypo
gaacgccagggtgcccgccacaggcacctg

SEQ ID NO: 195037 - DNA, 180 bp, Homo sapiens
  chr22:21385182-21385362
  hypo
ctgcaagcgctgagtcggggtccaggctgtgccagggcaccatgagggttagcacggtggagacaaggatgtaggcaccagctgcaatggcaagcgagatggcgatggccagaggcacagaccgccgtgggttctgggcctcctcactggaggcggcaatgacgtcgaagcccacgaaag

SEQ ID NO: 195038 - DNA, 252 bp, Homo sapiens; identical to SEQ ID NO: 133820
  chr22:21385763-21386015
  hypo

SEQ ID NO: 195039 - DNA, 376 bp, Homo sapiens; identical to SEQ ID NO: 57835
  chr22:21386500-21386876
  hypo

SEQ ID NO: 195040 - DNA, 110 bp, Homo sapiens; identical to SEQ ID NO: 57836
  chr22:21386893-21387003
  hypo

SEQ ID NO: 195041 - DNA, 31 bp, Homo sapiens; identical to SEQ ID NO: 34144
  chr22:21408212-21408243
  hypo

SEQ ID NO: 195042 - DNA, 30 bp, Homo sapiens; identical to SEQ ID NO: 34145
  chr22:21798779-21798809
  hypo

SEQ ID NO: 195043 - DNA, 30 bp, Homo sapiens; identical to SEQ ID NO: 100807
  chr22:21800817-21800847
  hypo

SEQ ID NO: 195044 - DNA, 31 bp, Homo sapiens; identical to SEQ ID NO: 34146
  chr22:21802141-21802172
  hypo

SEQ ID NO: 195045 - DNA, 297 bp, Homo sapiens
  chr22:21803346-21803643
  hypo
cccctcactcaacgacgtttgtgcgacatagtattgtatccaccttagtattgtatcgagccttttctgtgttttaatgagaaagcagaacactagtttcctatttaagactttaagggtttgtggggcggggcgggattaacacaacatttggctttgttttctttttcctttgatttccacatcaggtgtgtgcgagtgtgtgtgtgtggagatgttaagagcctcacaaggaaactgggttattggaggccaaggcggcttacagttctctgcgttcgtcacttaattcctgaa

SEQ ID NO: 195046 - DNA, 30 bp, Homo sapiens; identical to SEQ ID NO: 34148
  chr22:21804696-21804726
  hypo

SEQ ID NO: 195047 - DNA, 29 bp, Homo sapiens
  chr22:21941744-21941773
  hypo
ggtgtgagccaccgcgcctcgcctagatt

SEQ ID NO: 195048 - DNA, 30 bp, Homo sapiens; identical to SEQ ID NO: 100811
  chr22:21970018-21970048
  hypo

SEQ ID NO: 195049 - DNA, 32 bp, Homo sapiens; identical to SEQ ID NO: 34149
  chr22:21970643-21970675
  hypo

SEQ ID NO: 195050 - DNA, 224 bp, Homo sapiens
  chr22:21977475-21977699
  hypo
tccggggcctacaggcgtgtaagacagcttggtctggtctgtgcagaagtggggagtgatgggcaggttcggcagcctaacattgttcaggcgcatggcccctgcggtgtgtacacgaactcggcttcttttgtcctaggtacgccaagggcaggtttctggagactcccttgtgcccgggatggcaagggcaccgggctggcgtttccacatctgtcttcatt

SEQ ID NO: 195051 - DNA, 30 bp, Homo sapiens; identical to SEQ ID NO: 100814
  chr22:21977989-21978019
  hypo

SEQ ID NO: 195052 - DNA, 343 bp, Homo sapiens; identical to SEQ ID NO: 34151
  chr22:21982765-21983108
  hypo

SEQ ID NO: 195053 - DNA, 30 bp, Homo sapiens; identical to SEQ ID NO: 100816
  chr22:21988638-21988668
  hypo

SEQ ID NO: 195054 - DNA, 34 bp, Homo sapiens; identical to SEQ ID NO: 100817
  chr22:21993227-21993261
  hypo

SEQ ID NO: 195055 - DNA, 1166 bp, Homo sapiens; identical to SEQ ID NO: 133829
  chr22:22005758-22006924
  hypo

SEQ ID NO: 195056 - DNA, 148 bp, Homo sapiens; identical to SEQ ID NO: 34153
  chr22:22007500-22007648
  hypo

SEQ ID NO: 195057 - DNA, 23 bp, Homo sapiens
  chr22:22024069-22024092
  hypo
ttagccaccgtgcccgccccata

SEQ ID NO: 195058 - DNA, 82 bp, Homo sapiens; identical to SEQ ID NO: 100820
  chr22:22029109-22029191
  hypo

SEQ ID NO: 195059 - DNA, 30 bp, Homo sapiens; identical to SEQ ID NO: 100821
  chr22:22029538-22029568
  hypo

SEQ ID NO: 195060 - DNA, 290 bp, Homo sapiens
  chr22:22036109-22036399
  hypo
gagaggggagacagccgtgttcacacatgggtcctcctcttgggtgaggcggggcaggccccacatggcgggaaagccgacctttgcgccgttgtcaatcctgcacctggacgtttgtggggtgtaggtggccagcgctgctccaggggccttgggagccacttcttgccagaagcctgcacaaactggcatggtcagtcctcgttagtggagtgagggctctgctagaccgcaccgcaggagtgcaggcatcttgtgtgcacagcccctgcccacgggggcctggcacc

SEQ ID NO: 195061 - DNA, 193 bp, Homo sapiens
  chr22:22037089-22037282
  hypo
aggtgctggctggagcgtggcctgctgagtcaatcacctctgtggcttgtcccattctaaccagaggtcggcccacggctgcccacgttccggtccgatagctccctaacagcaatgaatgctcgttagccatgtgcctggaggaaggtcacagctcagccagcagctagcgaggctgcgtccccgtccctgc

SEQ ID NO: 195062 - DNA, 42 bp, Homo sapiens; identical to SEQ ID NO: 34154
  chr22:22044380-22044422
  hypo

SEQ ID NO: 195063 - DNA, 30 bp, Homo sapiens; identical to SEQ ID NO: 100823
  chr22:22057694-22057724
  hypo

SEQ ID NO: 195064 - DNA, 395 bp, Homo sapiens; identical to SEQ ID NO: 100824
  chr22:22057964-22058359
  hypo

SEQ ID NO: 195065 - DNA, 148 bp, Homo sapiens
  chr22:22062352-22062500
  hypo
cagtgcctctcgcctcgcaggtactggattctgttctgcgtggcaggtgttctcgatggtctcaatgaatcctcatcagaatcaccacggaagggagaaaagctcactctagtcgtcatcttgccacctcgcccggcccatcacccat

SEQ ID NO: 195066 - DNA, 25 bp, Homo sapiens
  chr22:22063243-22063268
  hypo
tgagccaccacgcccagctgataca

SEQ ID NO: 195067 - DNA, 293 bp, Homo sapiens; identical to SEQ ID NO: 100826
  chr22:22068419-22068712
  hypo

SEQ ID NO: 195068 - DNA, 42 bp, Homo sapiens; identical to SEQ ID NO: 133833
  chr22:22090485-22090527
  hypo

SEQ ID NO: 195069 - DNA, 43 bp, Homo sapiens; identical to SEQ ID NO: 100827
  chr22:22108626-22108669
  hypo

SEQ ID NO: 195070 - DNA, 36 bp, Homo sapiens; identical to SEQ ID NO: 34156
  chr22:22201293-22201329
  hypo

SEQ ID NO: 195071 - DNA, 332 bp, Homo sapiens; identical to SEQ ID NO: 57845
  chr22:22220989-22221321
  hypo

SEQ ID NO: 195072 - DNA, 373 bp, Homo sapiens; identical to SEQ ID NO: 133837
  chr22:22292759-22293132
  hypo

SEQ ID NO: 195073 - DNA, 217 bp, Homo sapiens; identical to SEQ ID NO: 133838
  chr22:22306475-22306692
  hypo

SEQ ID NO: 195074 - DNA, 312 bp, Homo sapiens; identical to SEQ ID NO: 133839
  chr22:22307055-22307367
  hypo

SEQ ID NO: 195075 - DNA, 31 bp, Homo sapiens; identical to SEQ ID NO: 34158
  chr22:22314882-22314913
  hypo

SEQ ID NO: 195076 - DNA, 234 bp, Homo sapiens; identical to SEQ ID NO: 100833
  chr22:22324544-22324778
  hypo

SEQ ID NO: 195077 - DNA, 30 bp, Homo sapiens
  chr22:22343902-22343932
  hypo
ccccagtgcatttctcggtatctcgatctt

SEQ ID NO: 195078 - DNA, 405 bp, Homo sapiens; identical to SEQ ID NO: 13352
  chr22:22862457-22862862
  hypo

SEQ ID NO: 195079 - DNA, 88 bp, Homo sapiens; identical to SEQ ID NO: 57851
  chr22:22863219-22863307
  hypo

SEQ ID NO: 195080 - DNA, 19 bp, Homo sapiens
  chr22:22899015-22899034
  hypo
ccaccgtgcccgaccctag

SEQ ID NO: 195081 - DNA, 34 bp, Homo sapiens
  chr22:22899307-22899341
  hypo
agtcacttgttgccacgcacgtctgagagtaata

SEQ ID NO: 195082 - DNA, 572 bp, Homo sapiens; identical to SEQ ID NO: 34163
  chr22:22899561-22900133
  hypo

SEQ ID NO: 195083 - DNA, 456 bp, Homo sapiens
  chr22:22901055-22901511
  hypo
gcagggtggaaaaagggggtgcggtgggcgaatggggaggcggggggctgactgggagtgtgggacggggtgttctgggatcacggagacgtccaagtctggactctgtcctgggtctgtgcttctggcgacctcccttttcttcagtgggatgcggggtgcaggggccggttccaggtcccctgagctcaagtctcgccccaccccgccccgcaagtctagaaaagatgcccctgcccttggctgggtaatctctggatttacctactgtctgtaaccccccgggctgaagagaccaccccccgggagtcaattaacttactctctggagcgcgcgttcctccctgctcccaggagtcggtttcccaaaactttctgaggcccgcgcatgctcccctcgactccccgtgtttccactctccacagaaatccacgcattcacgcccctcccctccc

SEQ ID NO: 195084 - DNA, 37 bp, Homo sapiens
  chr22:22939289-22939326
  hypo
taattcaaaatatgctacaaacggccgggcgcggtgg

SEQ ID NO: 195085 - DNA, 30 bp, Homo sapiens
  chr22:23070936-23070966
  hypo
tgcctctgcatgcctcgcttattacagcta

SEQ ID NO: 195086 - DNA, 166 bp, Homo sapiens; identical to SEQ ID NO: 100839
  chr22:23230278-23230444
  hypo

SEQ ID NO: 195087 - DNA, 30 bp, Homo sapiens
  chr22:23263563-23263593
  hypo
actgtgtgctgtgttcggaggaggcaccca

SEQ ID NO: 195088 - DNA, 30 bp, Homo sapiens
  chr22:23273887-23273917
  hypo
tctcacggggggcgacgtcccaggggctgg

SEQ ID NO: 195089 - DNA, 30 bp, Homo sapiens
  chr22:23286953-23286983
  hypo
acaagagggggccaccgggttgggtagtgc

SEQ ID NO: 195090 - DNA, 30 bp, Homo sapiens; identical to SEQ ID NO: 34165
  chr22:23415301-23415331
  hypo

SEQ ID NO: 195091 - DNA, 30 bp, Homo sapiens; identical to SEQ ID NO: 34166
  chr22:23415900-23415930
  hypo

SEQ ID NO: 195092 - DNA, 30 bp, Homo sapiens; identical to SEQ ID NO: 34167
  chr22:23435443-23435473
  hypo

SEQ ID NO: 195093 - DNA, 265 bp, Homo sapiens; identical to SEQ ID NO: 100843
  chr22:23437446-23437711
  hypo

SEQ ID NO: 195094 - DNA, 216 bp, Homo sapiens; identical to SEQ ID NO: 100844
  chr22:23437915-23438131
  hypo

SEQ ID NO: 195095 - DNA, 107 bp, Homo sapiens
  chr22:23438415-23438522
  hypo
ccgggacatgaccacgggcattgtggagaacaagttcaccttcaaggagctcaccttcaagatggtggacgtgggggggcagaggtcagagcgcaaaaagtggatcc

SEQ ID NO: 195096 - DNA, 31 bp, Homo sapiens; identical to SEQ ID NO: 100846
  chr22:23446549-23446580
  hypo

SEQ ID NO: 195097 - DNA, 104 bp, Homo sapiens
  chr22:23449789-23449893
  hypo
gagcagaagctggggcgggagcaggggtcccaagcacagtgttccagcaagaagcaccggaacccaccaagggagcgcagcagtggagtcgggtcctgggcctc

SEQ ID NO: 195098 - DNA, 30 bp, Homo sapiens
  chr22:23453191-23453221
  hypo
gcctcagagccacttcgaatgagggggtag

SEQ ID NO: 195099 - DNA, 102 bp, Homo sapiens
  chr22:23453479-23453581
  hypo
tggctggctctgtaccgagcagggggtgcggccacaaatctccaagcccaggccaggggagagaggcaagcgcactggactcggttccgcctagtggcaaag

SEQ ID NO: 195100 - DNA, 209 bp, Homo sapiens
  chr22:23456376-23456585
  hypo
ccatggtgaatggagcgcattcatgtctacaaccccgccccacagctctgctctcggcgtgaaaaagctgaattcacggttcggatgaacactcccagcttttctacagtgggctgacttgagcttctcagtctgtaacagaactgaggacttgctctacagatgaggaaactgaggcccagggtgggacagaccggccccggccccac

SEQ ID NO: 195101 - DNA, 30 bp, Homo sapiens; identical to SEQ ID NO: 13355
  chr22:23500537-23500567
  hypo

SEQ ID NO: 195102 - DNA, 28 bp, Homo sapiens
  chr22:23505690-23505718
  hypo
aggcctgagccaccgcgtccggcctcca

SEQ ID NO: 195103 - DNA, 442 bp, Homo sapiens; identical to SEQ ID NO: 57854
  chr22:23523109-23523551
  hypo

SEQ ID NO: 195104 - DNA, 31 bp, Homo sapiens; identical to SEQ ID NO: 13357
  chr22:23546141-23546172
  hypo

SEQ ID NO: 195105 - DNA, 30 bp, Homo sapiens
  chr22:23567605-23567635
  hypo
tgccaaaggcgagaccgctggctggagact

SEQ ID NO: 195106 - DNA, 43 bp, Homo sapiens; identical to SEQ ID NO: 100851
  chr22:23593617-23593660
  hypo

SEQ ID NO: 195107 - DNA, 30 bp, Homo sapiens; identical to SEQ ID NO: 100852
  chr22:23602750-23602780
  hypo

SEQ ID NO: 195108 - DNA, 296 bp, Homo sapiens
  chr22:23607402-23607698
  hypo
gtcagatgatgcagccggaagactcggaggagaggctggcgttgcagtgggaagttgttccccataacgacgagctgagtactcacgtgtgttcaacctgggctgggtgctggggactccccaaggacagataggcccggtgcctgcccttgtccccatgaccagctcagtagggttggcccagcatcgctctgtcaggtttccgggttggacaagtcttaggaccaaaggagcttgcagtgcccttcccagctccggtgcctcttccaagcccaggaactcgtgatccacgtcca

SEQ ID NO: 195109 - DNA, 114 bp, Homo sapiens
  chr22:23610354-23610468
  hypo
ttacctgcctggcgccgtgagtcacttctcagcatgtcattttgggagcgggaagtgtgctgggtgcgtggggaggggagcaggtgggagggagcagcacggaagcgccgaggc

SEQ ID NO: 195110 - DNA, 30 bp, Homo sapiens
  chr22:23610683-23610713
  hypo
gtttgcagaaatctccgaggtaatgccttg

SEQ ID NO: 195111 - DNA, 86 bp, Homo sapiens; identical to SEQ ID NO: 100854
  chr22:23624724-23624810
  hypo

SEQ ID NO: 195112 - DNA, 365 bp, Homo sapiens
  chr22:23626213-23626578
  hypo
ccgcaagctgcgccacgtcttcctgttcaccgacctgcttctctgcaccaagctcaagaagcagagcggagggtgagtgacgatgtggcccctgtcccagcagtgaccccaccctgactctccaggtcatggagggtcttgtcatggcggaggtcagtggtgatgtagctcgttacattccgtttctacttgggcacaatgccaggctccaggttaaagattgtcactagcaatctggagacgtcatggggcatcagggtgaccagctttgactcctgtagtgaggggtaaacccgaccgtggcttccggcactattgcagaaaggtcacctcaggacccatccgggaagcgtgagatcaggggc

SEQ ID NO: 195113 - DNA, 30 bp, Homo sapiens
  chr22:23731972-23732002
  hypo
ccctgcagcccgagacgagtgggagccggt

SEQ ID NO: 195114 - DNA, 100 bp, Homo sapiens; identical to SEQ ID NO: 34174
  chr22:23737248-23737348
  hypo

SEQ ID NO: 195115 - DNA, 127 bp, Homo sapiens
  chr22:23779038-23779165
  hypo
agccccactcggaagcgaacaggctggttccccgccccagtcccagcttctcctgcgggcagctggcctgagagccaagcactccccaggccatggcaccgggtgggcaggacgctttcctgccagg

SEQ ID NO: 195116 - DNA, 30 bp, Homo sapiens; identical to SEQ ID NO: 100856
  chr22:23779912-23779942
  hypo

SEQ ID NO: 195117 - DNA, 31 bp, Homo sapiens; identical to SEQ ID NO: 100857
  chr22:23793189-23793220
  hypo

SEQ ID NO: 195118 - DNA, 687 bp, Homo sapiens; identical to SEQ ID NO: 100858
  chr22:23800962-23801649
  hypo

SEQ ID NO: 195119 - DNA, 30 bp, Homo sapiens
  chr22:23849669-23849699
  hypo
tggaacatgttttctcgaagttccttcatc

SEQ ID NO: 195120 - DNA, 93 bp, Homo sapiens; identical to SEQ ID NO: 100859
  chr22:23877155-23877248
  hypo

SEQ ID NO: 195121 - DNA, 230 bp, Homo sapiens; identical to SEQ ID NO: 133853
  chr22:23908683-23908913
  hypo

SEQ ID NO: 195122 - DNA, 142 bp, Homo sapiens; identical to SEQ ID NO: 100860
  chr22:24016560-24016702
  hypo

SEQ ID NO: 195123 - DNA, 154 bp, Homo sapiens; identical to SEQ ID NO: 34176
  chr22:24054815-24054969
  hypo

SEQ ID NO: 195124 - DNA, 36 bp, Homo sapiens; identical to SEQ ID NO: 100862
  chr22:24061195-24061231
  hypo

SEQ ID NO: 195125 - DNA, 36 bp, Homo sapiens
  chr22:24061530-24061566
  hypo
acaggcgtgagccaccgcgcccggccgaccataaag

SEQ ID NO: 195126 - DNA, 30 bp, Homo sapiens; identical to SEQ ID NO: 100863
  chr22:24086717-24086747
  hypo

SEQ ID NO: 195127 - DNA, 21 bp, Homo sapiens
  chr22:24091912-24091933
  hypo
gcccagccctaaagtattttc

SEQ ID NO: 195128 - DNA, 30 bp, Homo sapiens; identical to SEQ ID NO: 57859
  chr22:24110100-24110130
  hypo

SEQ ID NO: 195129 - DNA, 719 bp, Homo sapiens; identical to SEQ ID NO: 133858
  chr22:24110158-24110877
  hypo

SEQ ID NO: 195130 - DNA, 31 bp, Homo sapiens
  chr22:24133890-24133921
  hypo
cttccctgtggtgctgcgacccttataatga

SEQ ID NO: 195131 - DNA, 219 bp, Homo sapiens; identical to SEQ ID NO: 100868
  chr22:24159809-24160028
  hypo

SEQ ID NO: 195132 - DNA, 30 bp, Homo sapiens; identical to SEQ ID NO: 100869
  chr22:24176434-24176464
  hypo

SEQ ID NO: 195133 - DNA, 461 bp, Homo sapiens; identical to SEQ ID NO: 100870
  chr22:24179768-24180229
  hypo

SEQ ID NO: 195134 - DNA, 201 bp, Homo sapiens; identical to SEQ ID NO: 100871
  chr22:24205104-24205305
  hypo

SEQ ID NO: 195135 - DNA, 31 bp, Homo sapiens; identical to SEQ ID NO: 100872
  chr22:24212828-24212859
  hypo

SEQ ID NO: 195136 - DNA, 113 bp, Homo sapiens
  chr22:24224723-24224836
  hypo
gctgccgtgcccggcgcccatgggagctgttccagcatcgggccctgaggagacaggtgacaagcctcgtggttctgggcagtgccatggagctctgcgggaatgactcggtg

SEQ ID NO: 195137 - DNA, 30 bp, Homo sapiens
  chr22:24225973-24226003
  hypo
agggtgggtcggcgcgtgctgctcatcggt

SEQ ID NO: 195138 - DNA, 30 bp, Homo sapiens
  chr22:24400444-24400474
  hypo
aggcagttgcagaaccggactgcgatcaga

SEQ ID NO: 195139 - DNA, 45 bp, Homo sapiens; identical to SEQ ID NO: 100874
  chr22:24409919-24409964
  hypo

SEQ ID NO: 195140 - DNA, 109 bp, Homo sapiens; identical to SEQ ID NO: 34178
  chr22:24459507-24459616
  hypo

SEQ ID NO: 195141 - DNA, 218 bp, Homo sapiens
  chr22:24530320-24530538
  hypo
aactgcagcacatgccggcacaggggctcttctgcgagaggaacaagaccaatttcttcaacgtgagtactttgccttgttgatttccaaggctgtttgttgccactgcttttcactgaaggcgcatgaattgaccccctaggtgggtgttcccagggcctcaagtttgcggcatcctcagagggcaggcagggtggtacagtcgagagtgagccaga

SEQ ID NO: 195142 - DNA, 27 bp, Homo sapiens
  chr22:24535237-24535264
  hypo
gctttttaaaaagtgcgtgtgtggctg

SEQ ID NO: 195143 - DNA, 27 bp, Homo sapiens
  chr22:24535563-24535590
  hypo
tttagcgactttgctttttccatgaca

SEQ ID NO: 195144 - DNA, 1397 bp, Homo sapiens; identical to SEQ ID NO: 133868
  chr22:24551714-24553111
  hypo

SEQ ID NO: 195145 - DNA, 157 bp, Homo sapiens
  chr22:24560369-24560526
  hypo
catctggcggatccccgtggacgagattgaccggccgggcagctttgcctggcacatgaaccgctccatcgtgctgctgctcaaggtgctggcccagctgcgggaccacagcaccctgctgaaggtgtcctccatgcttcagcggaccccagaccag

SEQ ID NO: 195146 - DNA, 132 bp, Homo sapiens
  chr22:24574385-24574517
  hypo
tgaaggtggattggtcgccatctgcacgccaggcggcatccttttctatgaagtgttgactttgtaaatctgcccacacccagctggccatatccacccctcgacgccgggatgagccggctctgcctgtgt

SEQ ID NO: 195147 - DNA, 30 bp, Homo sapiens; identical to SEQ ID NO: 100879
  chr22:24582959-24582989
  hypo

SEQ ID NO: 195148 - DNA, 30 bp, Homo sapiens
  chr22:24584164-24584194
  hypo
ccctcactgacactcgctccctcaccagga

SEQ ID NO: 195149 - DNA, 30 bp, Homo sapiens; identical to SEQ ID NO: 34180
  chr22:24584729-24584759
  hypo

SEQ ID NO: 195150 - DNA, 30 bp, Homo sapiens
  chr22:24697357-24697387
  hypo
atcctataaacccctcgtaagttgacaatg

SEQ ID NO: 195151 - DNA, 36 bp, Homo sapiens; identical to SEQ ID NO: 100881
  chr22:24697721-24697757
  hypo

SEQ ID NO: 195152 - DNA, 39 bp, Homo sapiens; identical to SEQ ID NO: 34181
  chr22:24763168-24763207
  hypo

SEQ ID NO: 195153 - DNA, 30 bp, Homo sapiens; identical to SEQ ID NO: 133872
  chr22:24819664-24819694
  hypo

SEQ ID NO: 195154 - DNA, 647 bp, Homo sapiens; identical to SEQ ID NO: 133873
  chr22:24819900-24820547
  hypo

SEQ ID NO: 195155 - DNA, 30 bp, Homo sapiens; identical to SEQ ID NO: 100884
  chr22:24829447-24829477
  hypo

SEQ ID NO: 195156 - DNA, 19 bp, Homo sapiens
  chr22:24945496-24945515
  hypo
ttcaacagggtcttgctct

SEQ ID NO: 195157 - DNA, 41 bp, Homo sapiens; identical to SEQ ID NO: 100886
  chr22:24976013-24976054
  hypo

SEQ ID NO: 195158 - DNA, 31 bp, Homo sapiens; identical to SEQ ID NO: 34182
  chr22:24983097-24983128
  hypo

SEQ ID NO: 195159 - DNA, 215 bp, Homo sapiens
  chr22:24988672-24988887
  hypo
cgcgccctcggaacccgcctgcgcgcgccagagaccagctccgcctcgcctcccggcggatacaggcccacaacccatagccccgcgcctcccagacccccagacccccagaccctccctggccgccagcccaggggcggacggctccttctctcgcctggcgcaggaggcgcagcagctgccgggcgcgctccggccgccgctcgcggagcgtg

SEQ ID NO: 195160 - DNA, 92 bp, Homo sapiens; identical to SEQ ID NO: 13367
  chr22:24989195-24989287
  hypo

SEQ ID NO: 195161 - DNA, 140 bp, Homo sapiens
  chr22:24995692-24995832
  hypo
agcagggcgcagactcgtcagtgagagcattcctgagcccagcatccaagaagcgagggaggtcgggaaggtgctgctatgaggcagggggaggtccccaaaagtccaggtgagagcatggcatgcgtggaaagtgctgc

SEQ ID NO: 195162 - DNA, 131 bp, Homo sapiens; identical to SEQ ID NO: 34184
  chr22:25016919-25017050
  hypo

SEQ ID NO: 195163 - DNA, 37 bp, Homo sapiens
  chr22:25091138-25091175
  hypo
gagggcatttgttcacgtgcagcggcctcttgccact

SEQ ID NO: 195164 - DNA, 31 bp, Homo sapiens; identical to SEQ ID NO: 100891
  chr22:25097060-25097091
  hypo

SEQ ID NO: 195165 - DNA, 255 bp, Homo sapiens
  chr22:25102500-25102755
  hypo
ctcatagatctcgagcgtgcaattaatcactatgaactacggtcaccatgctgcgtgtcaggtctccagaacgtactcatcgcatcactgaaactttgtgccctttcaccgtcttccccatctttttcattctccgacaccacccttctactctgtttccatgacttggacattttaggctaatggctgggcaaaaatctgtggtatgtacacagagagatgacatcagctatgtgagcacgggggccgcctttt

SEQ ID NO: 195166 - DNA, 104 bp, Homo sapiens
  chr22:25119951-25120055
  hypo
gatttctatgagtatctgaatttaacaagccttcccacagcaagacttgaaacaaagtaggaagattccctggaactttgtggtggaagcggtctgctactgcc

SEQ ID NO: 195167 - DNA, 28 bp, Homo sapiens
  chr22:25122533-25122561
  hypo
gagccgccgcacccggcggtattggcta

SEQ ID NO: 195168 - DNA, 31 bp, Homo sapiens; identical to SEQ ID NO: 34185
  chr22:25251163-25251194
  hypo

SEQ ID NO: 195169 - DNA, 24 bp, Homo sapiens
  chr22:25285212-25285236
  hypo
caccgtgcccggccctcatagtca

SEQ ID NO: 195170 - DNA, 327 bp, Homo sapiens; identical to SEQ ID NO: 100895
  chr22:25294114-25294441
  hypo

SEQ ID NO: 195171 - DNA, 121 bp, Homo sapiens; identical to SEQ ID NO: 34187
  chr22:25336183-25336304
  hypo

SEQ ID NO: 195172 - DNA, 31 bp, Homo sapiens; identical to SEQ ID NO: 100897
  chr22:25347731-25347762
  hypo

SEQ ID NO: 195173 - DNA, 1570 bp, Homo sapiens; identical to SEQ ID NO: 57875
  chr22:25348187-25349757
  hypo

SEQ ID NO: 195174 - DNA, 31 bp, Homo sapiens; identical to SEQ ID NO: 100899
  chr22:25388947-25388978
  hypo

SEQ ID NO: 195175 - DNA, 332 bp, Homo sapiens; identical to SEQ ID NO: 34189
  chr22:25461274-25461606
  hypo

SEQ ID NO: 195176 - DNA, 188 bp, Homo sapiens; identical to SEQ ID NO: 100901
  chr22:25462989-25463177
  hypo

SEQ ID NO: 195177 - DNA, 31 bp, Homo sapiens; identical to SEQ ID NO: 34191
  chr22:25463395-25463426
  hypo

SEQ ID NO: 195178 - DNA, 22 bp, Homo sapiens
  chr22:25464674-25464696
  hypo
ttacaggcgtgagccaccgtgc

SEQ ID NO: 195179 - DNA, 41 bp, Homo sapiens
  chr22:25464945-25464986
  hypo
ctgtcttgcatccggcgctcacttgccggagtctctgggtt

SEQ ID NO: 195180 - DNA, 30 bp, Homo sapiens; identical to SEQ ID NO: 100904
  chr22:25465547-25465577
  hypo

SEQ ID NO: 195181 - DNA, 92 bp, Homo sapiens
  chr22:25483555-25483647
  hypo
aaccaaccaaccaaccaaacaacaacaacaaaaacaactgcgtcaccttgttgattttgcagagcagtgtctcaggtcgggttcccagaagc

SEQ ID NO: 195182 - DNA, 102 bp, Homo sapiens; identical to SEQ ID NO: 34192
  chr22:25484762-25484864
  hypo

SEQ ID NO: 195183 - DNA, 42 bp, Homo sapiens; identical to SEQ ID NO: 34193
  chr22:25484923-25484965
  hypo

SEQ ID NO: 195184 - DNA, 31 bp, Homo sapiens; identical to SEQ ID NO: 34194
  chr22:25492972-25493003
  hypo

SEQ ID NO: 195185 - DNA, 86 bp, Homo sapiens; identical to SEQ ID NO: 34195
  chr22:25505389-25505475
  hypo

SEQ ID NO: 195186 - DNA, 45 bp, Homo sapiens; identical to SEQ ID NO: 100910
  chr22:25513767-25513812
  hypo

SEQ ID NO: 195187 - DNA, 31 bp, Homo sapiens; identical to SEQ ID NO: 100911
  chr22:25536599-25536630
  hypo

SEQ ID NO: 195188 - DNA, 26 bp, Homo sapiens
  chr22:25547084-25547110
  hypo
gccactgcgcccggcccctttgctta

SEQ ID NO: 195189 - DNA, 31 bp, Homo sapiens; identical to SEQ ID NO: 100913
  chr22:25548090-25548121
  hypo

SEQ ID NO: 195190 - DNA, 28 bp, Homo sapiens
  chr22:25559693-25559721
  hypo
cacgcccggccattccttggctgtattt

SEQ ID NO: 195191 - DNA, 328 bp, Homo sapiens; identical to SEQ ID NO: 100915
  chr22:25561923-25562251
  hypo

SEQ ID NO: 195192 - DNA, 126 bp, Homo sapiens
  chr22:25570289-25570415
  hypo
aaacggagcccacctcggcaggggaccagtatgactgctccagggaccagcggagcaccagcgtggaccactccagcactgacctggaatccaccgatgggatggaggggccgcctccaccggacg

SEQ ID NO: 195193 - DNA, 185 bp, Homo sapiens; identical to SEQ ID NO: 34198
  chr22:25573210-25573395
  hypo

SEQ ID NO: 195194 - DNA, 20 bp, Homo sapiens
  chr22:25578126-25578146
  hypo
cagagcgggactccatctca

SEQ ID NO: 195195 - DNA, 387 bp, Homo sapiens; identical to SEQ ID NO: 100918
  chr22:25602961-25603348
  hypo

SEQ ID NO: 195196 - DNA, 196 bp, Homo sapiens
  chr22:25615343-25615539
  hypo
gccctggcagccggacggctgatgcatgcaaagcgggcatctccttgcccagccgcctgaccgccctggcgcggccgaatctgaaagctaatgacattattgtgcagagacacaatgtctgtgggcatttgctgacccgagctttggtgagagcttaatccagcattctcaccctgcttttcgcaggagcacagcg

SEQ ID NO: 195197 - DNA, 683 bp, Homo sapiens; identical to SEQ ID NO: 133880
  chr22:25678185-25678868
  hypo

SEQ ID NO: 195198 - DNA, 207 bp, Homo sapiens; identical to SEQ ID NO: 57878
  chr22:25679042-25679249
  hypo

SEQ ID NO: 195199 - DNA, 170 bp, Homo sapiens; identical to SEQ ID NO: 133882
  chr22:25679267-25679437
  hypo

SEQ ID NO: 195200 - DNA, 30 bp, Homo sapiens; identical to SEQ ID NO: 34201
  chr22:25747673-25747703
  hypo

SEQ ID NO: 195201 - DNA, 156 bp, Homo sapiens; identical to SEQ ID NO: 34202
  chr22:25753157-25753313
  hypo

SEQ ID NO: 195202 - DNA, 30 bp, Homo sapiens; identical to SEQ ID NO: 34203
  chr22:25756141-25756171
  hypo

SEQ ID NO: 195203 - DNA, 43 bp, Homo sapiens; identical to SEQ ID NO: 100925
  chr22:25756561-25756604
  hypo

SEQ ID NO: 195204 - DNA, 30 bp, Homo sapiens; identical to SEQ ID NO: 100926
  chr22:25796199-25796229
  hypo

SEQ ID NO: 195205 - DNA, 662 bp, Homo sapiens; identical to SEQ ID NO: 13372
  chr22:25816891-25817553
  hypo

SEQ ID NO: 195206 - DNA, 31 bp, Homo sapiens; identical to SEQ ID NO: 100928
  chr22:25826675-25826706
  hypo

SEQ ID NO: 195207 - DNA, 30 bp, Homo sapiens; identical to SEQ ID NO: 100929
  chr22:25894166-25894196
  hypo

SEQ ID NO: 195208 - DNA, 30 bp, Homo sapiens; identical to SEQ ID NO: 100930
  chr22:26063650-26063680
  hypo

SEQ ID NO: 195209 - DNA, 34 bp, Homo sapiens
  chr22:26069298-26069332
  hypo
gattacaggcgtgagccaccgcgcccagcaggag

SEQ ID NO: 195210 - DNA, 156 bp, Homo sapiens
  chr22:26069539-26069695
  hypo
actctgagaatcaaacgtgaagtctgtggcccaaacgcaggtttctataggatgttttaaggttgtttgggggagcccttaaagaatcccacccttaatttgccaggatatgtaaagtagtaggtacttgctattgtcttacggcctcttacgtga

SEQ ID NO: 195211 - DNA, 38 bp, Homo sapiens
  chr22:26081887-26081925
  hypo
tgatttaaaaccagatctagccgggcacggtggctcac

SEQ ID NO: 195212 - DNA, 31 bp, Homo sapiens; identical to SEQ ID NO: 100931
  chr22:26118123-26118154
  hypo

SEQ ID NO: 195213 - DNA, 79 bp, Homo sapiens
  chr22:26150542-26150621
  hypo
ctttaaggggagactcgcgattttataccgtgaattccaaatgtctatggccacctcatgggcttaaaacagcagctga

SEQ ID NO: 195214 - DNA, 13 bp, Homo sapiens
  chr22:26150652-26150665
  hypo
gagtatggcgata

SEQ ID NO: 195215 - DNA, 30 bp, Homo sapiens
  chr22:26154495-26154525
  hypo
gtaatgaggggccgacgcacacaggagcgt

SEQ ID NO: 195216 - DNA, 31 bp, Homo sapiens; identical to SEQ ID NO: 100932
  chr22:26176160-26176191
  hypo

SEQ ID NO: 195217 - DNA, 153 bp, Homo sapiens
  chr22:26371251-26371404
  hypo
ggctgatataatttcagactccgtcaaaaggaagatcgcaaaagtgtacggaggtagcttcaacgtctttatgttccgccgctgtgagccccggcatcctaatatcatatagtctgagaggcatctgaaagcgaggcagagggcagcctgggg

SEQ ID NO: 195218 - DNA, 126 bp, Homo sapiens
  chr22:26422519-26422645
  hypo
ccccactttgtccgccggcaaaagtactgtcattttggggacggcgaagtgcttgccgtccagagaaagtccacagagagattagaacctgcttcctctcccctggcttctcggagtacaaataca

SEQ ID NO: 195219 - DNA, 762 bp, Homo sapiens
  chr22:26422872-26423634
  hypo
ggaaatcgaaggggccgctggtggtctcttgaggtccaccagcctcaaatgcatctcttcagacggtgttgggggcacaaccctactccccgaaaagtcgaaaacccaattcagttcctgcgagtccctcttagaatccagaccgagcatggggagaaaactgagctctccgaccacacccagggacatgctgttgtcgcccacactgcgtcctcggaggcggtgtctggagtcctctgtggacgatgcgggctgtccagaccttggaaaggagccgcttgttttccagaaccgccagtttgcccacctgatggaggaacctctaggcagtgacccattcagctggaaactcccaagcctcgactacgaacgcaagaccaaagtggacttcgatgacttcctcccagctatccggaagccccagacacctacctccttggctggatcagccaaaggtgggcaagacggttcacagcgttcaagcatccactttgaaacggaagaggctaaccgttcctttctctcggggatcaagaccattttgaagaagagcccggagcccaaggaggatcccgctcacctgtctgactcgtcctcatcctccggctccatcgtgtccttcaaaagtgctgacagcatcaaaagtcgaccaggaatcccacgacttgcgggtgacggtggcgagcgaacgtcccccgagcggagagagccagggacggggaggaaagacgacgatgttgcgagcataatgaagaaatacct

SEQ ID NO: 195220 - DNA, 30 bp, Homo sapiens
  chr22:26483945-26483975
  hypo
ctgagaaggggatttcgccagccgagaccg

SEQ ID NO: 195221 - DNA, 238 bp, Homo sapiens; identical to SEQ ID NO: 57885
  chr22:26565122-26565360
  hypo

SEQ ID NO: 195222 - DNA, 148 bp, Homo sapiens; identical to SEQ ID NO: 57886
  chr22:26565502-26565650
  hypo

SEQ ID NO: 195223 - DNA, 552 bp, Homo sapiens; identical to SEQ ID NO: 133890
  chr22:26565734-26566286
  hypo

SEQ ID NO: 195224 - DNA, 113 bp, Homo sapiens; identical to SEQ ID NO: 133894
  chr22:26824999-26825112
  hypo

SEQ ID NO: 195225 - DNA, 313 bp, Homo sapiens; identical to SEQ ID NO: 100938
  chr22:26829743-26830056
  hypo

SEQ ID NO: 195226 - DNA, 30 bp, Homo sapiens; identical to SEQ ID NO: 34210
  chr22:26848273-26848303
  hypo

SEQ ID NO: 195227 - DNA, 30 bp, Homo sapiens
  chr22:26856348-26856378
  hypo
gtgcatgtgccgacacgcacacgggcacac

SEQ ID NO: 195228 - DNA, 30 bp, Homo sapiens; identical to SEQ ID NO: 34211
  chr22:26857150-26857180
  hypo

SEQ ID NO: 195229 - DNA, 35 bp, Homo sapiens
  chr22:26867802-26867837
  hypo
agtgccaaccgcaaacggagcggctcagagataca

SEQ ID NO: 195230 - DNA, 30 bp, Homo sapiens; identical to SEQ ID NO: 100941
  chr22:26883625-26883655
  hypo

SEQ ID NO: 195231 - DNA, 202 bp, Homo sapiens; identical to SEQ ID NO: 100942
  chr22:26888175-26888377
  hypo

SEQ ID NO: 195232 - DNA, 30 bp, Homo sapiens
  chr22:26889747-26889777
  hypo
ccacactgtaagatgcgtcacctaagcagc

SEQ ID NO: 195233 - DNA, 30 bp, Homo sapiens
  chr22:26890109-26890139
  hypo
ttggaggacaccgcccggttcatgatatca

SEQ ID NO: 195234 - DNA, 30 bp, Homo sapiens
  chr22:26895563-26895593
  hypo
agaccttctgctcccggcctgtcatgtcta

SEQ ID NO: 195235 - DNA, 186 bp, Homo sapiens
  chr22:26930490-26930676
  hypo
agtcaggctttactccaggaacgtccgacccatagcctggggcaagccaggggcagcgagccaccttttaaggagaccccagaggagccactgctgggcccttggctgagaacagtgaagtaagcaacatccagcccactactgcagtgtccccagccggccctcgcctctgcttctgagaagcac

SEQ ID NO: 195236 - DNA, 220 bp, Homo sapiens; identical to SEQ ID NO: 34212
  chr22:26961222-26961442
  hypo

SEQ ID NO: 195237 - DNA, 91 bp, Homo sapiens; identical to SEQ ID NO: 100945
  chr22:26965194-26965285
  hypo

SEQ ID NO: 195238 - DNA, 77 bp, Homo sapiens
  chr22:26999515-26999592
  hypo
gggttactattgcttcgtgggattgtcatggctactcaactcacggttcagtccaactataaaacaggcctggccgg

SEQ ID NO: 195239 - DNA, 389 bp, Homo sapiens; identical to SEQ ID NO: 34214
  chr22:27007745-27008134
  hypo

SEQ ID NO: 195240 - DNA, 194 bp, Homo sapiens
  chr22:27019111-27019305
  hypo
ctgccagatcctggggcgagcccccaacctctcacccttcacgggactctgatgcggatctccaccttttttttttcctggcacagatggtggtgtgggatgaggacggcttccagggccggcggcacgagttcacggccgagtgccccagcgtgctggagcttggcttcgagactgtgcgatctttgaaagtg

SEQ ID NO: 195241 - DNA, 30 bp, Homo sapiens
  chr22:27020939-27020969
  hypo
agatggccatgcggtcgctccttgcaagac

SEQ ID NO: 195242 - DNA, 104 bp, Homo sapiens
  chr22:27045853-27045957
  hypo
caacagagcgagactccgtctcaaaaaaaaaagtgagtggaggagttccacgacatcctcgacctggggtaggacatgtcgggtgtgtccgacagtctcccaga

SEQ ID NO: 195243 - DNA, 646 bp, Homo sapiens; identical to SEQ ID NO: 133902
  chr22:27068607-27069253
  hypo

SEQ ID NO: 195244 - DNA, 36 bp, Homo sapiens
  chr22:27099773-27099809
  hypo
tggatttcggccgggcgcggtggctcacgcctgtaa

SEQ ID NO: 195245 - DNA, 30 bp, Homo sapiens
  chr22:27453050-27453080
  hypo
tttatcgacgaacaacgtgcatgtgggaaa

SEQ ID NO: 195246 - DNA, 233 bp, Homo sapiens
  chr22:27486748-27486981
  hypo
gaactcccccaccaccgcagggttgcaagagctctgatgggaaggcctgccaggggaggcgacgggcgcagggtggatgcctctgtagcaccccaggcagctctgcagacacacccgcctcactggcacgcaggccatgatctctctcccccactgccttgactcgttaatttatattttaacaatccgcaagagctgactctgcacgaggctgaaggcgtaagagatggagg

SEQ ID NO: 195247 - DNA, 23 bp, Homo sapiens
  chr22:27742254-27742277
  hypo
aacactggtcccataagaatacg

SEQ ID NO: 195248 - DNA, 31 bp, Homo sapiens; identical to SEQ ID NO: 100951
  chr22:27887474-27887505
  hypo

SEQ ID NO: 195249 - DNA, 30 bp, Homo sapiens
  chr22:27942783-27942813
  hypo
ggtagaaatgaaacacgggccgggcacagt

SEQ ID NO: 195250 - DNA, 31 bp, Homo sapiens; identical to SEQ ID NO: 100952
  chr22:27976916-27976947
  hypo

SEQ ID NO: 195251 - DNA, 30 bp, Homo sapiens
  chr22:28151999-28152029
  hypo
atgatccatgcaaaacgcttagcacgtggg

SEQ ID NO: 195252 - DNA, 30 bp, Homo sapiens
  chr22:28152356-28152386
  hypo
gcgtcgtgagccgggcggaggtggctgcca

SEQ ID NO: 195253 - DNA, 216 bp, Homo sapiens
  chr22:28187360-28187576
  hypo
tctgtccacccaagacgcgcctaaatatagacaccatcctaaaacaaacacatcgtcggcaagtcaaaatcctgacttgagtcaaaatgatgaggttgggcgatcctggcccctccagaccagagaactgggtggaacaagcagcgggtagtgagaaaaggacagaaggtgaaaccactggttgcagccccccaccccctccgacaaacagaggac

SEQ ID NO: 195254 - DNA, 175 bp, Homo sapiens; identical to SEQ ID NO: 100953
  chr22:28191121-28191296
  hypo

SEQ ID NO: 195255 - DNA, 1527 bp, Homo sapiens; identical to SEQ ID NO: 133906
  chr22:28196458-28197985
  hypo

SEQ ID NO: 195256 - DNA, 33 bp, Homo sapiens; identical to SEQ ID NO: 100955
  chr22:28361344-28361377
  hypo

SEQ ID NO: 195257 - DNA, 253 bp, Homo sapiens; identical to SEQ ID NO: 100956
  chr22:28371498-28371751
  hypo

SEQ ID NO: 195258 - DNA, 30 bp, Homo sapiens
  chr22:28602884-28602914
  hypo
cgtacctactccggacggaatcgggtgggg

SEQ ID NO: 195259 - DNA, 22 bp, Homo sapiens
  chr22:28991635-28991657
  hypo
aggcgcagtgactcacgcctgt

SEQ ID NO: 195260 - DNA, 22 bp, Homo sapiens
  chr22:28991896-28991918
  hypo
cgagactctgtctcaaaaaata

SEQ ID NO: 195261 - DNA, 839 bp, Homo sapiens; identical to SEQ ID NO: 133915
  chr22:29075343-29076182
  hypo

SEQ ID NO: 195262 - DNA, 92 bp, Homo sapiens; identical to SEQ ID NO: 100960
  chr22:29076603-29076695
  hypo

SEQ ID NO: 195263 - DNA, 30 bp, Homo sapiens; identical to SEQ ID NO: 13389
  chr22:29091825-29091855
  hypo

SEQ ID NO: 195264 - DNA, 30 bp, Homo sapiens
  chr22:29104102-29104132
  hypo
aggcgtgagccaccgcgcccaccgcatttg

SEQ ID NO: 195265 - DNA, 23 bp, Homo sapiens
  chr22:29104627-29104650
  hypo
gaagaaacctttttgctgtttcg

SEQ ID NO: 195266 - DNA, 26 bp, Homo sapiens
  chr22:29129586-29129612
  hypo
agggaatctatggccaattcacgcaa

SEQ ID NO: 195267 - DNA, 22 bp, Homo sapiens
  chr22:29167139-29167161
  hypo
ttacaggcgtgagccacggagc

SEQ ID NO: 195268 - DNA, 30 bp, Homo sapiens
  chr22:29167753-29167783
  hypo
actcctggcctcaagcgattctcccacctc

SEQ ID NO: 195269 - DNA, 30 bp, Homo sapiens
  chr22:29178845-29178875
  hypo
caccacgcccggccccgaagtatgtgcttt

SEQ ID NO: 195270 - DNA, 19 bp, Homo sapiens
  chr22:29273574-29273593
  hypo
cccttttttcctgaatatt

SEQ ID NO: 195271 - DNA, 30 bp, Homo sapiens; identical to SEQ ID NO: 34219
  chr22:29278215-29278245
  hypo

SEQ ID NO: 195272 - DNA, 31 bp, Homo sapiens; identical to SEQ ID NO: 57912
  chr22:29279216-29279247
  hypo

SEQ ID NO: 195273 - DNA, 30 bp, Homo sapiens; identical to SEQ ID NO: 57915
  chr22:29300290-29300320
  hypo

SEQ ID NO: 195274 - DNA, 31 bp, Homo sapiens; identical to SEQ ID NO: 34220
  chr22:29353884-29353915
  hypo

SEQ ID NO: 195275 - DNA, 190 bp, Homo sapiens
  chr22:29435188-29435378
  hypo
acctccacgttccgggcggagcagggaagcctgaactttaagaaggccacgtggctaaatggcttccctgaggcatgtctctcctgggaaggcattccctaccccagatcctgcagcctttcatcctgaggccattagactctccaggtgcacctgcatcaaagcgcacaggtaccgcgctcctgatctg

SEQ ID NO: 195276 - DNA, 30 bp, Homo sapiens; identical to SEQ ID NO: 100969
  chr22:29441745-29441775
  hypo

SEQ ID NO: 195277 - DNA, 30 bp, Homo sapiens; identical to SEQ ID NO: 100970
  chr22:29445355-29445385
  hypo

SEQ ID NO: 195278 - DNA, 1020 bp, Homo sapiens
  chr22:29445630-29446650
  hypo
cctagcctcgcaccccggggcccggcccgtgcctttcctccgagcggcagtggcagcctgctcttccccaccgtggtgcacgtggccccgccctcccacctggagagcggcagcacgtccagcttcagctgctatcacggccaccgctcggtgtgcagtggctacctggccgactgcccaggcagcgacagcagcagcagcagcagctccggccagtgccactgttcctccagtgactctgtggtagactgcactgaggtcagcaaccagggcgtgtacgggagctgctccaccttccgcagctccctcagcagcgactatgaccccttcatctaccgcagccggagcccctgtcgtgccagtgaggcggggggctcgggcagctcgggccggggacctgccctgtgcttcgagggctccccgcctcccgaggagctcccggcggtgcacagtcatggtgctgggcggggcgagccttggccgggccctgcctctccctcgggggatcaggtgtccacctgcagcctggagatgaactacagcagcaactcctccctggagcacagggggcccaatagctctacctcagaagtggggctcgaggcttctcctggggccgcccctgacctcaggaggacctggaaggggggccacgagttgccgtcgtgtgcctgctgctgcgagccccagccctccccagccgggcctagcgccggagcagctggcagcagcaccttgttcctggggccccacctctacgagggctctggcccggcgggtggggagccccagtcaggaagctcccagggcttgtacggccttcaccccgaccatttgcccaggacagatggggtgaaatacgagggtctgccctgctgcttctatgaagagaagcaggtggcccgcgggggcggagggggcagcggctgctacactgaggactactcggtgagtgtgcagtacacgctcaccgaggaaccaccgcccggctgctaccccggggcccgggacctgagccag

SEQ ID NO: 195279 - DNA, 425 bp, Homo sapiens; identical to SEQ ID NO: 57917
  chr22:29468747-29469172
  hypo

SEQ ID NO: 195280 - DNA, 201 bp, Homo sapiens; identical to SEQ ID NO: 57918
  chr22:29469213-29469414
  hypo

SEQ ID NO: 195281 - DNA, 137 bp, Homo sapiens; identical to SEQ ID NO: 100975
  chr22:29482647-29482784
  hypo

SEQ ID NO: 195282 - DNA, 21 bp, Homo sapiens
  chr22:29484600-29484621
  hypo
ggccaccgcacctggcctcag

SEQ ID NO: 195283 - DNA, 81 bp, Homo sapiens; identical to SEQ ID NO: 100977
  chr22:29525174-29525255
  hypo

SEQ ID NO: 195284 - DNA, 20 bp, Homo sapiens
  chr22:29525314-29525334
  hypo
acagagtgagactccatcta

SEQ ID NO: 195285 - DNA, 31 bp, Homo sapiens; identical to SEQ ID NO: 34223
  chr22:29533686-29533717
  hypo

SEQ ID NO: 195286 - DNA, 31 bp, Homo sapiens; identical to SEQ ID NO: 34224
  chr22:29534522-29534553
  hypo

SEQ ID NO: 195287 - DNA, 30 bp, Homo sapiens; identical to SEQ ID NO: 34225
  chr22:29542295-29542325
  hypo

SEQ ID NO: 195288 - DNA, 30 bp, Homo sapiens
  chr22:29568320-29568350
  hypo
agggtggggcagacgcgggtggtggtacag

SEQ ID NO: 195289 - DNA, 331 bp, Homo sapiens
  chr22:29580363-29580694
  hypo
ttggctcagagtaggcgctctgtaaacacatgtgggacgagtgaggacgttccctggacgatgcctggggtgcccaggccacagagctgccattgaatctcctgggggttaaggtccaccacgttccactcagcaggaaaaattcagagctgacattaattcagaccccacatacgtgattcttactgagttagacaccaagacaatctcgccttttgttggggctgtgggagccttacgtacgcctagagagaagccagtctaaaatcagtcgctttttgaaaccatcagctcgagaaattaaggattctgtcagcgtgccctgaatttc

SEQ ID NO: 195290 - DNA, 30 bp, Homo sapiens; identical to SEQ ID NO: 100983
  chr22:29581013-29581043
  hypo

SEQ ID NO: 195291 - DNA, 19 bp, Homo sapiens
  chr22:29587017-29587036
  hypo
tttcctattctgggtattt

SEQ ID NO: 195292 - DNA, 139 bp, Homo sapiens; identical to SEQ ID NO: 34227
  chr22:29587095-29587234
  hypo

SEQ ID NO: 195293 - DNA, 91 bp, Homo sapiens; identical to SEQ ID NO: 100986
  chr22:29594543-29594634
  hypo

SEQ ID NO: 195294 - DNA, 30 bp, Homo sapiens
  chr22:29607059-29607089
  hypo
atgcgagagggcatgcgtgtgtgtgtgcat

SEQ ID NO: 195295 - DNA, 622 bp, Homo sapiens
  chr22:29607379-29608001
  hypo
gtgcacacggaggcccgtgtgtccatgcgttgtgtgtacatatgcctatgtgtgtgtgcacgtgctcactgcagtgcgtatttgccctgtgtgcctgtgtgtgcatgtgtgtgcgtgtatctgtgtgtttgtgtggatctgtgtgcatatgcatgaacatgtgtgtccatgcattgtgtgtacatatgcctgtgtgtgtctgtgtgtacgtgctcactgccatgcatatttgctcctgtgtgcctgtgtgtgcatgtgtgtgcgtgcatttgcgtgtgcaggcactgtgtgtttgcgagcatctgctcactggcatagtgtattcattctgtgtccagggcccctttcctgtctccagagcttccgactgtcctctgcccagattgtcctcttcctccctccctccttcactcacgaagcccctgggccagcctggtgagtgtcacgtaggctccaaggagcctctgaacccccttaacctgtacaccaagttttatgcgtatttctggagaggagccacgattcaccgcaattttctaaaggggcttatgcccccactctccatattcaaccctaacaggttcaaaaccacacctttggttttttttgttttgagacagag

SEQ ID NO: 195296 - DNA, 30 bp, Homo sapiens; identical to SEQ ID NO: 57921
  chr22:29621461-29621491
  hypo

SEQ ID NO: 195297 - DNA, 42 bp, Homo sapiens; identical to SEQ ID NO: 100990
  chr22:29627463-29627505
  hypo

SEQ ID NO: 195298 - DNA, 35 bp, Homo sapiens
  chr22:29678066-29678101
  hypo
ggtagcacacaatatcgcaacgcacttttatagcg

SEQ ID NO: 195299 - DNA, 175 bp, Homo sapiens; identical to SEQ ID NO: 100992
  chr22:29686336-29686511
  hypo

SEQ ID NO: 195300 - DNA, 30 bp, Homo sapiens; identical to SEQ ID NO: 34231
  chr22:29686984-29687014
  hypo

SEQ ID NO: 195301 - DNA, 30 bp, Homo sapiens
  chr22:29687520-29687550
  hypo
aggccttcatttcttcgtttatccccccag

SEQ ID NO: 195302 - DNA, 18 bp, Homo sapiens
  chr22:29701035-29701053
  hypo
ggccgggaatgttaagac

SEQ ID NO: 195303 - DNA, 969 bp, Homo sapiens; identical to SEQ ID NO: 57923
  chr22:29702351-29703320
  hypo

SEQ ID NO: 195304 - DNA, 30 bp, Homo sapiens; identical to SEQ ID NO: 100996
  chr22:29708231-29708261
  hypo

SEQ ID NO: 195305 - DNA, 151 bp, Homo sapiens; identical to SEQ ID NO: 34235
  chr22:29714173-29714324
  hypo

SEQ ID NO: 195306 - DNA, 30 bp, Homo sapiens
  chr22:29733050-29733080
  hypo
tatgccgcgattctacgttcccgtggccct

SEQ ID NO: 195307 - DNA, 206 bp, Homo sapiens
  chr22:29733757-29733963
  hypo
gctctcaagtctggccgctgtttccacccacaagagcccccgtggtccagctgccccagcactcctcctccctgccacggaatcccccggggccggtgcttctgccccaccccttccctgcagacgcagccatctttctcaagtgcaaatcagactggttcatctctttgcttaaaactttccaatggctccggctgtgccaggat

SEQ ID NO: 195308 - DNA, 110 bp, Homo sapiens
  chr22:29735486-29735596
  hypo
ggctggcaatccccgcgatgacaaggcgacgtgtcatggggtggtgaggactgggcaagaatccatggctatggggcccagtggcagccggatgccaggtggtcaagaca

SEQ ID NO: 195309 - DNA, 28 bp, Homo sapiens
  chr22:29742576-29742604
  hypo
gccgctcacctcccgctgtgcagcccag

SEQ ID NO: 195310 - DNA, 355 bp, Homo sapiens; identical to SEQ ID NO: 100998
  chr22:29744976-29745331
  hypo

SEQ ID NO: 195311 - DNA, 160 bp, Homo sapiens; identical to SEQ ID NO: 34236
  chr22:29758098-29758258
  hypo

SEQ ID NO: 195312 - DNA, 22 bp, Homo sapiens
  chr22:29768138-29768160
  hypo
tggtggctcacgcctgtaatcc

SEQ ID NO: 195313 - DNA, 22 bp, Homo sapiens
  chr22:29768399-29768421
  hypo
cgaaactgggtctcaaaaaaaa

SEQ ID NO: 195314 - DNA, 21 bp, Homo sapiens
  chr22:29773786-29773807
  hypo
gagactctgtctcaaaaaaaa

SEQ ID NO: 195315 - DNA, 150 bp, Homo sapiens
  chr22:29845783-29845933
  hypo
agctcacgcaggcctccggagagtttacccacatggtccagccacacagcagatgggtatatgcctgaaatgcaaggatataaacatggtttactagcacgaagagatgttcgccacacatcgttgttaagaaaagaaaaaagggccggg

SEQ ID NO: 195316 - DNA, 181 bp, Homo sapiens
  chr22:29846232-29846413
  hypo
agaaaaaagtaggtttgaaaactttacatacaacatccaaaacgtggaaacaactcaaatacccgtcaactaataaatggacacaatgtggtctatccggacaaacagaggattattcagccttgcgaaggaataaagcactgacacatgtgacaacacggatgagcctagagggcattat

SEQ ID NO: 195317 - DNA, 30 bp, Homo sapiens
  chr22:29867460-29867490
  hypo
agtcaccgctgaatcgcatttattcattca

SEQ ID NO: 195318 - DNA, 23 bp, Homo sapiens
  chr22:29876271-29876294
  hypo
ggacgcgctgctgggcgccccgt

SEQ ID NO: 195319 - DNA, 198 bp, Homo sapiens; identical to SEQ ID NO: 133946
  chr22:29876677-29876875
  hypo

SEQ ID NO: 195320 - DNA, 30 bp, Homo sapiens; identical to SEQ ID NO: 13395
  chr22:29885579-29885609
  hypo

SEQ ID NO: 195321 - DNA, 34 bp, Homo sapiens
  chr22:29900364-29900398
  hypo
aaatacttagccaggcgcggtggctcacgcctgt

SEQ ID NO: 195322 - DNA, 30 bp, Homo sapiens
  chr22:29904422-29904452
  hypo
gaaacaacggtctgcgcgggagatcagcga

SEQ ID NO: 195323 - DNA, 121 bp, Homo sapiens; identical to SEQ ID NO: 34241
  chr22:29977661-29977782
  hypo

SEQ ID NO: 195324 - DNA, 46 bp, Homo sapiens; identical to SEQ ID NO: 34242
  chr22:29977961-29978007
  hypo

SEQ ID NO: 195325 - DNA, 32 bp, Homo sapiens; identical to SEQ ID NO: 101008
  chr22:29997159-29997191
  hypo

SEQ ID NO: 195326 - DNA, 121 bp, Homo sapiens; identical to SEQ ID NO: 101009
  chr22:30004163-30004284
  hypo

SEQ ID NO: 195327 - DNA, 81 bp, Homo sapiens; identical to SEQ ID NO: 101010
  chr22:30032864-30032945
  hypo

SEQ ID NO: 195328 - DNA, 40 bp, Homo sapiens; identical to SEQ ID NO: 101011
  chr22:30051626-30051666
  hypo

SEQ ID NO: 195329 - DNA, 20 bp, Homo sapiens
  chr22:30056598-30056618
  hypo
accaggctggagtgccgggg

SEQ ID NO: 195330 - DNA, 180 bp, Homo sapiens
  chr22:30073517-30073697
  hypo
cttcaggccctactccggttccattgtccaagcccaagcccctcggtgggccggtggggagccctttgtggtggtgcccatctcccaccccacctctccacactgcatggcagactcctggcaccctcactgggcactgccccacccattgccatacttcccgtccggcagaccttctcc

SEQ ID NO: 195331 - DNA, 162 bp, Homo sapiens
  chr22:30074059-30074221
  hypo
ttgggaggtgggacccgagttgtgcccattgcctctgtggctgctggaggatcggttgtcaacacagtagtgtccttctgtgcttgtatgacccaagctcctaatccgaaatttctcattaacagcccatgaacccaattccagcaccgttgcctcctgaca

SEQ ID NO: 195332 - DNA, 264 bp, Homo sapiens; identical to SEQ ID NO: 101012
  chr22:30084258-30084522
  hypo

SEQ ID NO: 195333 - DNA, 30 bp, Homo sapiens
  chr22:30086468-30086498
  hypo
gaaaagggaccctgccggggctgagtctcg

SEQ ID NO: 195334 - DNA, 210 bp, Homo sapiens
  chr22:30086756-30086966
  hypo
agcccatgcctggtgcggaggcttcatgttcttgtaggcatcttcagggaactggcaggagcgctttgggttggagactctgagcagggcccttgggtttatagcctgcccaaggaactgggcctggctgcgggactcccatggttggaccttgtctagattcagtgaaagttttgaaggacagtgcatgacagacgtcactggtcaggt

SEQ ID NO: 195335 - DNA, 30 bp, Homo sapiens; identical to SEQ ID NO: 101013
  chr22:30087744-30087774
  hypo

SEQ ID NO: 195336 - DNA, 30 bp, Homo sapiens; identical to SEQ ID NO: 101014
  chr22:30088068-30088098
  hypo

SEQ ID NO: 195337 - DNA, 590 bp, Homo sapiens; identical to SEQ ID NO: 101015
  chr22:30090267-30090857
  hypo

SEQ ID NO: 195338 - DNA, 690 bp, Homo sapiens; identical to SEQ ID NO: 101016
  chr22:30091059-30091749
  hypo

SEQ ID NO: 195339 - DNA, 1278 bp, Homo sapiens; identical to SEQ ID NO: 133950
  chr22:30115855-30117133
  hypo

SEQ ID NO: 195340 - DNA, 30 bp, Homo sapiens; identical to SEQ ID NO: 101018
  chr22:30125627-30125657
  hypo

SEQ ID NO: 195341 - DNA, 68 bp, Homo sapiens
  chr22:30141124-30141192
  hypo
ccctatggatgtaagcggggtaaacatctagcgtgtagccaaacgacctgacccgttctaggggtcgg

SEQ ID NO: 195342 - DNA, 40 bp, Homo sapiens; identical to SEQ ID NO: 101019
  chr22:30158324-30158364
  hypo

SEQ ID NO: 195343 - DNA, 36 bp, Homo sapiens; identical to SEQ ID NO: 34246
  chr22:30165505-30165541
  hypo

SEQ ID NO: 195344 - DNA, 271 bp, Homo sapiens; identical to SEQ ID NO: 34247
  chr22:30190729-30191000
  hypo

SEQ ID NO: 195345 - DNA, 30 bp, Homo sapiens
  chr22:30191708-30191738
  hypo
gctgcagcacagcttcggcagggactgagg

SEQ ID NO: 195346 - DNA, 41 bp, Homo sapiens
  chr22:30192060-30192101
  hypo
cagccttcagcatggcgggctagggtttgcctcccttcaca

SEQ ID NO: 195347 - DNA, 95 bp, Homo sapiens
  chr22:30215044-30215139
  hypo
ctcctggaggctccgcggtctcatcacagtaagagctcatgcttaccaatggctgagacatgccaggcacggtcctgagtactctactcatgcta

SEQ ID NO: 195348 - DNA, 30 bp, Homo sapiens
  chr22:30220796-30220826
  hypo
gttttttctctctgacgcacaagtcaaggc

SEQ ID NO: 195349 - DNA, 258 bp, Homo sapiens
  chr22:30221026-30221284
  hypo
agaggtgtcgagtatcgggtgatgacctgtcatgggatcagtggcttactttggattccttgtgagtggacatgcggaggaaggtgagaaaaacacttcgatggaggcgcttctgcatgtcaacaacctcaggggctgaggccaccccctcgtcgaatttgcgggggacatagcgcaggtaggagtccaggcacttctgtagagtctcgtcaaagatcacctaaaccaggagacagaggagagcgaggatttatccct

SEQ ID NO: 195350 - DNA, 24 bp, Homo sapiens
  chr22:30232284-30232308
  hypo
cttgaacccgggaggcgaaggttg

SEQ ID NO: 195351 - DNA, 22 bp, Homo sapiens
  chr22:30233131-30233153
  hypo
aggcagggctgggcgcgatggc

SEQ ID NO: 195352 - DNA, 22 bp, Homo sapiens
  chr22:30233392-30233414
  hypo
gcctgggcgacagagcaagacc

SEQ ID NO: 195353 - DNA, 19 bp, Homo sapiens
  chr22:30250833-30250852
  hypo
ttctgaggtagactctcgc

SEQ ID NO: 195354 - DNA, 30 bp, Homo sapiens
  chr22:30301303-30301333
  hypo
tggttaaaagaaatccgcacatgagtggac

SEQ ID NO: 195355 - DNA, 32 bp, Homo sapiens; identical to SEQ ID NO: 34249
  chr22:30309741-30309773
  hypo

SEQ ID NO: 195356 - DNA, 32 bp, Homo sapiens
  chr22:30310012-30310044
  hypo
acaggcatgagccaccacgcccggcccagttt

SEQ ID NO: 195357 - DNA, 30 bp, Homo sapiens
  chr22:30337498-30337528
  hypo
ttacactttacgagccgtgtatgaattcca

SEQ ID NO: 195358 - DNA, 81 bp, Homo sapiens; identical to SEQ ID NO: 101026
  chr22:30352152-30352233
  hypo

SEQ ID NO: 195359 - DNA, 31 bp, Homo sapiens; identical to SEQ ID NO: 34250
  chr22:30363112-30363143
  hypo

SEQ ID NO: 195360 - DNA, 27 bp, Homo sapiens
  chr22:30375185-30375212
  hypo
aggaacactggcttggccaggcgcggt

SEQ ID NO: 195361 - DNA, 28 bp, Homo sapiens
  chr22:30379310-30379338
  hypo
ctttgttttttggagacggagtttcact

SEQ ID NO: 195362 - DNA, 28 bp, Homo sapiens
  chr22:30379457-30379485
  hypo
ccacaccctgctgcgaaggaggttattg

SEQ ID NO: 195363 - DNA, 30 bp, Homo sapiens
  chr22:30405068-30405098
  hypo
agttttcagtctctgcggttgctgtgcact

SEQ ID NO: 195364 - DNA, 175 bp, Homo sapiens; identical to SEQ ID NO: 34251
  chr22:30422073-30422248
  hypo

SEQ ID NO: 195365 - DNA, 35 bp, Homo sapiens; identical to SEQ ID NO: 101030
  chr22:30431159-30431194
  hypo

SEQ ID NO: 195366 - DNA, 22 bp, Homo sapiens
  chr22:30455726-30455748
  hypo
acaaatgaaaataaaaaagatc

SEQ ID NO: 195367 - DNA, 186 bp, Homo sapiens; identical to SEQ ID NO: 34252
  chr22:30624612-30624798
  hypo

SEQ ID NO: 195368 - DNA, 30 bp, Homo sapiens
  chr22:30625052-30625082
  hypo
ccaccctccactacacgcctgggccgtcac

SEQ ID NO: 195369 - DNA, 206 bp, Homo sapiens
  chr22:30634182-30634388
  hypo
gaggagcgggattcacgaggcatttctatgtccctacttgtaattccttcggacaaccttgtgaagtagataagatggcattcatcactgatgattcttgcaattttcaagataagacagctgagctcatgaaaagggtcacgggactgcatcggggagcgccaggcccaggatcctggccggccgcaggggcagggccttcccag

SEQ ID NO: 195370 - DNA, 91 bp, Homo sapiens
  chr22:30647189-30647280
  hypo
tggccaaaaaggcaagagcaccgcactcttcaatgcttgaggagtgagagtgtgatgccaccagcggaccgtgcctccactgttctcaccc

SEQ ID NO: 195371 - DNA, 246 bp, Homo sapiens; identical to SEQ ID NO: 101034
  chr22:30653607-30653853
  hypo

SEQ ID NO: 195372 - DNA, 198 bp, Homo sapiens; identical to SEQ ID NO: 101035
  chr22:30656575-30656773
  hypo

SEQ ID NO: 195373 - DNA, 73 bp, Homo sapiens; identical to SEQ ID NO: 101036
  chr22:30681972-30682045
  hypo

SEQ ID NO: 195374 - DNA, 44 bp, Homo sapiens
  chr22:30708027-30708071
  hypo
tgcatcagcctcccaaagtgttaggattacgggtattagtgact

SEQ ID NO: 195375 - DNA, 193 bp, Homo sapiens; identical to SEQ ID NO: 133959
  chr22:30723110-30723303
  hypo

SEQ ID NO: 195376 - DNA, 43 bp, Homo sapiens
  chr22:30734440-30734483
  hypo
tcatctcaaaaaaaaaaaaaaaagaggccgagacctcgactaa

SEQ ID NO: 195377 - DNA, 30 bp, Homo sapiens
  chr22:30734798-30734828
  hypo
agtgatgggtggagccgagctggggatgtt

SEQ ID NO: 195378 - DNA, 182 bp, Homo sapiens
  chr22:30768083-30768265
  hypo
caggaggaaggtgagcgcagggcggcagcggagaggcaggtgcagcagctggaggagcaggtgcagcagttggaggcgcaggtgcagctgttggtgggtcggctggagggcgctggccagcaggtctgctgggccagcacggagctggataaggagaaggcccgtgtcgacagcatggtccg

SEQ ID NO: 195379 - DNA, 29 bp, Homo sapiens
  chr22:30783981-30784010
  hypo
accataggccgggcgcggtggctcacgcc

SEQ ID NO: 195380 - DNA, 29 bp, Homo sapiens
  chr22:30784249-30784278
  hypo
caagagtgaaactccgtctctaaataaat

SEQ ID NO: 195381 - DNA, 265 bp, Homo sapiens; identical to SEQ ID NO: 133961
  chr22:30792873-30793138
  hypo

SEQ ID NO: 195382 - DNA, 90 bp, Homo sapiens
  chr22:30843482-30843572
  hypo
agggtctgtgtcgatgttcatgttggtcagcttttcctgaattccgaaagggaggagggtatcatgacgcacgtccgaccccactccctt

SEQ ID NO: 195383 - DNA, 319 bp, Homo sapiens
  chr22:30857340-30857659
  hypo
atgtgggcgttatagcgctggctgggtagaacatctgtcatctcccctgcccgctgtcgctcccccatcttggtcttcaggaaaactccgaagccgatgtccgcaccatcagatgagaactgccacctgtcagggggagggggaggagacaggttgctgctcagcctgatgggtctctgaggggttagggcctgcccctacctgagaacgcagcctggaaataggatctcgtattccacttggtgtgatgagccgcggttgatctgcaccgagtgctcgtactgagtcttcacctggtcccgcacgtacatggacttgg

SEQ ID NO: 195384 - DNA, 121 bp, Homo sapiens
  chr22:30873892-30874013
  hypo
gtctcaaaaaaaagaaaaaaaaaaaaggcagcaggaatggggcaagaaaagaggtcaaaatgcacccagccacacaaaaattcgctcactcagccaggtgcggtggtttacccctgtaatc

SEQ ID NO: 195385 - DNA, 156 bp, Homo sapiens
  chr22:30888309-30888465
  hypo
acccaaggcattgcccgtgcgtgtggaggctcaccagggtcaggccaggggtagtgcccgagtagaggacgagccagggagaagcagggtctttagcattgacctctgcttcccaggcagatggacacaaccagggggccacgtcgctcacctccc

SEQ ID NO: 195386 - DNA, 30 bp, Homo sapiens
  chr22:30891368-30891398
  hypo
acacagggcagccttcgtagtcgtagccac

SEQ ID NO: 195387 - DNA, 31 bp, Homo sapiens; identical to SEQ ID NO: 101039
  chr22:30934840-30934871
  hypo

SEQ ID NO: 195388 - DNA, 214 bp, Homo sapiens
  chr22:30939012-30939226
  hypo
tatcgggccccgcagcgagggccacacctgaccacacagtgagcttcacctgcgagtctcatggcttctcacccagagacatcagcctgaaatggttcaaaaatgggaatcagctctcagacttccagaccaacgtggaccccgcaagagagagcgtgtcctacagcatccacagcacagccaatgtggtgctgacccgcggggacattcactc

SEQ ID NO: 195389 - DNA, 522 bp, Homo sapiens
  chr22:30939622-30940144
  hypo
gagctcaaataccgccgctgagaacactggacctaatgaacagaacatctatattgtggtgggcgtggtgtgcaccttgctggtggccctactgatggaggctctctacctcgtccgaatcagacagaagaaagcccagggctccacttcttctacaaggttgcatgaacccgagaagaatgccagaaaaataacccaggacacaaatgatatcacatatgcggacctgaacctgcccaaggggaagaagcctgctccccgggccgcggagcccaacaaccacacagagtatgccagcattcagaccagcctgcagcctgcgtcggaggacaccctcacctatgctgacctggacatggtgcacctcaaccggacccccaagcagctggcccccaagcccgagctgtccttctcagagtatgccagcatccaggtcccgaggaagtgaatgggaccgtggtttgctctagcacccatctccatgctcttccttgtcccacaaggagccgccatgatgagcac

SEQ ID NO: 195390 - DNA, 142 bp, Homo sapiens
  chr22:30940936-30941078
  hypo
actccagcgcccggtcgccacccttctttgccccgggaaccccatcccggcacctcccaccccgcatacaccacctaccccatgcaaaaccctatgatggcaggaatcgagacctccaaggacccgtcgttgcctccatgct

SEQ ID NO: 195391 - DNA, 1180 bp, Homo sapiens; identical to SEQ ID NO: 101041
  chr22:30950915-30952095
  hypo

SEQ ID NO: 195392 - DNA, 30 bp, Homo sapiens
  chr22:30953304-30953334
  hypo
gaaactagtgaagagcgcgcccagcaccag

SEQ ID NO: 195393 - DNA, 28 bp, Homo sapiens
  chr22:30958820-30958848
  hypo
aaagctcccatgggccaggcccggtgta

SEQ ID NO: 195394 - DNA, 354 bp, Homo sapiens
  chr22:30977856-30978210
  hypo
ggtcccaagggttagacgcatcctggaagtcagtgccagacccccataaaagagtgagaaaagggaccctggtccctgctgctccgaagactggctggccctcccctccctgctccggctctcccacttccttcaggtctagctcagactcggacagaccactttccgacctggccagagctcctgccttctacatcacctagtctacaatctttgctgcatgtctgctgctgggctagcgtgtgagcaccagagggtggtgctcccagcgctgtctctagcccagaggggctggcaaaaccttggctgactaaggtgccttgggaaggccaggcccagcgggggcgggggaag

SEQ ID NO: 195395 - DNA, 30 bp, Homo sapiens
  chr22:30978585-30978615
  hypo
cgcggcaggatgttccgagcaacgtgaaaa

SEQ ID NO: 195396 - DNA, 28 bp, Homo sapiens
  chr22:30992656-30992684
  hypo
ctgtagtactgagagatgatgcgtgctg

SEQ ID NO: 195397 - DNA, 26 bp, Homo sapiens
  chr22:30997773-30997799
  hypo
tttccagacacagtctcgctctgttt

SEQ ID NO: 195398 - DNA, 427 bp, Homo sapiens; identical to SEQ ID NO: 133970
  chr22:31002802-31003229
  hypo

SEQ ID NO: 195399 - DNA, 31 bp, Homo sapiens; identical to SEQ ID NO: 101046
  chr22:31049308-31049339
  hypo

SEQ ID NO: 195400 - DNA, 51 bp, Homo sapiens; identical to SEQ ID NO: 101047
  chr22:31059625-31059676
  hypo

SEQ ID NO: 195401 - DNA, 34 bp, Homo sapiens
  chr22:31062271-31062305
  hypo
tgagggtagtgatgcgaggagtcattttcatgct

SEQ ID NO: 195402 - DNA, 31 bp, Homo sapiens; identical to SEQ ID NO: 34260
  chr22:31069874-31069905
  hypo

SEQ ID NO: 195403 - DNA, 166 bp, Homo sapiens; identical to SEQ ID NO: 101050
  chr22:31078360-31078526
  hypo

SEQ ID NO: 195404 - DNA, 17 bp, Homo sapiens
  chr22:31088961-31088978
  hypo
accgtgcccagctctgg

SEQ ID NO: 195405 - DNA, 45 bp, Homo sapiens; identical to SEQ ID NO: 101052
  chr22:31126861-31126906
  hypo

SEQ ID NO: 195406 - DNA, 86 bp, Homo sapiens; identical to SEQ ID NO: 34261
  chr22:31169317-31169403
  hypo

SEQ ID NO: 195407 - DNA, 20 bp, Homo sapiens
  chr22:31176967-31176987
  hypo
atttttttttttgagacgga

SEQ ID NO: 195408 - DNA, 721 bp, Homo sapiens; identical to SEQ ID NO: 133975
  chr22:31198440-31199161
  hypo

SEQ ID NO: 195409 - DNA, 30 bp, Homo sapiens
  chr22:31199680-31199710
  hypo
atcagggcttcggggcgagggtcacttcag

SEQ ID NO: 195410 - DNA, 120 bp, Homo sapiens
  chr22:31220229-31220349
  hypo
aagcctggggaggaggcggctcaggaagttgtgtgttggtgggcactgtgcttagaacagggcctggagcagagcttgctgcaccggagggaggaggcccagcggcgagtgcagcagtca

SEQ ID NO: 195411 - DNA, 189 bp, Homo sapiens
  chr22:31220641-31220830
  hypo
ctcctgttttatacacgtcaaagggtattctggtgaggtgtcaccgcacacaaatttccccttaggaaagggttccaatgaaattgcatcatgcacctaagcccatctttgtgcaagttgaagagggagatgggcttgctgcctgctccgggatgccgagggatgaggtccaggcggtgcccatttcag

SEQ ID NO: 195412 - DNA, 31 bp, Homo sapiens; identical to SEQ ID NO: 34264
  chr22:31225040-31225071
  hypo

SEQ ID NO: 195413 - DNA, 46 bp, Homo sapiens; identical to SEQ ID NO: 101058
  chr22:31250070-31250116
  hypo

SEQ ID NO: 195414 - DNA, 31 bp, Homo sapiens; identical to SEQ ID NO: 34265
  chr22:31260513-31260544
  hypo

SEQ ID NO: 195415 - DNA, 129 bp, Homo sapiens; identical to SEQ ID NO: 34266
  chr22:31260801-31260930
  hypo

SEQ ID NO: 195416 - DNA, 30 bp, Homo sapiens
  chr22:31261670-31261700
  hypo
tcagtggaaggtgaccgggccaggggccta

SEQ ID NO: 195417 - DNA, 37 bp, Homo sapiens
  chr22:31261978-31262015
  hypo
gagagcatccagggacgagtcccgggcagtaaatcag

SEQ ID NO: 195418 - DNA, 238 bp, Homo sapiens; identical to SEQ ID NO: 34267
  chr22:31264324-31264562
  hypo

SEQ ID NO: 195419 - DNA, 710 bp, Homo sapiens; identical to SEQ ID NO: 101063
  chr22:31266248-31266958
  hypo

SEQ ID NO: 195420 - DNA, 30 bp, Homo sapiens; identical to SEQ ID NO: 101064
  chr22:31267164-31267194
  hypo

SEQ ID NO: 195421 - DNA, 31 bp, Homo sapiens; identical to SEQ ID NO: 101065
  chr22:31271735-31271766
  hypo

SEQ ID NO: 195422 - DNA, 30 bp, Homo sapiens
  chr22:31274289-31274319
  hypo
gcaggggcaagtgctcggagacccttcggg

SEQ ID NO: 195423 - DNA, 31 bp, Homo sapiens; identical to SEQ ID NO: 101066
  chr22:31276138-31276169
  hypo

SEQ ID NO: 195424 - DNA, 201 bp, Homo sapiens; identical to SEQ ID NO: 101067
  chr22:31279749-31279950
  hypo

SEQ ID NO: 195425 - DNA, 30 bp, Homo sapiens
  chr22:31283532-31283562
  hypo
cacaacagcctcgagcgggccttccacagt

SEQ ID NO: 195426 - DNA, 222 bp, Homo sapiens; identical to SEQ ID NO: 101068
  chr22:31301688-31301910
  hypo

SEQ ID NO: 195427 - DNA, 30 bp, Homo sapiens
  chr22:31302117-31302147
  hypo
gcagggacggattccgggggagcaggccac

SEQ ID NO: 195428 - DNA, 30 bp, Homo sapiens
  chr22:31302533-31302563
  hypo
tgcgccgggtcacccgtgccccttcattat

SEQ ID NO: 195429 - DNA, 30 bp, Homo sapiens
  chr22:31340224-31340254
  hypo
ctccaccacgggaaccgagttccatttgtg

SEQ ID NO: 195430 - DNA, 31 bp, Homo sapiens; identical to SEQ ID NO: 34270
  chr22:31365680-31365711
  hypo

SEQ ID NO: 195431 - DNA, 22 bp, Homo sapiens
  chr22:31397072-31397094
  hypo
gccaccacgcatggccaagttt

SEQ ID NO: 195432 - DNA, 216 bp, Homo sapiens; identical to SEQ ID NO: 101071
  chr22:31475551-31475767
  hypo

SEQ ID NO: 195433 - DNA, 433 bp, Homo sapiens
  chr22:31483867-31484300
  hypo
tgccctaggcagagccgtgggcagctggtgccagccctccgcccctggcagccaaaatgacctgcctctcgcacccactgcagctggaggtcacagcagatctggcagagcggcggcgcatccgctcagccatccgggaactgcagcggcaggagctggagcgcgaggaggaggccctggcatccaagcgtttccgtgccgagcggcaggacaacaaggagaactggctgcagtgagtagcggggggtggaacatgcgggtgagaaggtgagtgtgagccctggctcagctcatgtgtgcaggcaggcgtgagcacaagtgtatctgtggattgcatgtgctaatggcagtacgtccacacacgcttctggaaaaacagagatgtttgtgggcatggagcatgtactgattgtggcgtcgcggccgtgctgat

SEQ ID NO: 195434 - DNA, 228 bp, Homo sapiens
  chr22:31486792-31487020
  hypo
gacgtggctggaccccgaccctgccaacgctccctgtcggtgctcagcccccgccaaccagcccagaaccgaggtactacctattctcaccctgcctaggatctgtgcagaccctgtcccacccagttgctgacagccctcctgttccttctagagtccaccccccttgccagcggaccttcctcattccagcgggctggctctgtgcgggatcgtgtccacaagttc

SEQ ID NO: 195435 - DNA, 444 bp, Homo sapiens
  chr22:31487248-31487692
  hypo
gagggccccagggggcggggcttggctgctaggccccttgaaaacagagcaggggggcctgtggcacgttcagaggagcctggtgccccgctgcccgtggccgtcggcactgccgagccagggggcagtatgaagaccacattcaccatcgagatcaaggacggccgtggccaggcctccacaggccgggtgctgctgcccacaggcaaccagagggcaggtaggcgccccccactgcctccccaatggggatgagtgcctgcaaccgcacttctgcatgcaggacaggtgctgcggccaggactcagggtgtctccaaagggtgtgctgggagcgagggcattatcaaccttgtctggcactgccctcactccacctgatcctcctgacagccacctttctccccactcagaactgacactggggctgcgggcgcccccgacc

SEQ ID NO: 195436 - DNA, 342 bp, Homo sapiens
  chr22:31489496-31489838
  hypo
gcactggaggagctgcgggcggtggctgaagcaggccgggtggcagtgacccaggcagccgaggtagctgtagccaccgtggagccggtggcccgggcagctgaagagctgcgggcagagagagcagcactgagccggcggctggatgcactgagcaggcaggtggaggtgctgagcctacggctgggggtcccacttgtgtccggccttgagcctgagctggagcccagcgagctgctcctggctgccgccgaccccgaggccctctttcaggctgccgaggatgccgggacccccgtggcccacccacctgccttcagcacccgccgccgctcctccacc

SEQ ID NO: 195437 - DNA, 208 bp, Homo sapiens
  chr22:31494667-31494875
  hypo
ggaccaggccagcccacgggccggcagcctggcggcgctcgagaaacggcaggccgagaagaagaaagagctgatgaaggcgcagagtctgcccaagacctcagcctcccaggcgcgcaaggccatgattgagaagctggagaaggagggcgcggccgggtgagctgcagaagtgggctgggcagtggggggcggggcgtgataggca

SEQ ID NO: 195438 - DNA, 111 bp, Homo sapiens; identical to SEQ ID NO: 101073
  chr22:31495078-31495189
  hypo

SEQ ID NO: 195439 - DNA, 30 bp, Homo sapiens
  chr22:31496259-31496289
  hypo
ggaggctcctggcccgggcaccgtgcccgc

SEQ ID NO: 195440 - DNA, 568 bp, Homo sapiens; identical to SEQ ID NO: 101074
  chr22:31522436-31523004
  hypo

SEQ ID NO: 195441 - DNA, 30 bp, Homo sapiens; identical to SEQ ID NO: 101075
  chr22:31530035-31530065
  hypo

SEQ ID NO: 195442 - DNA, 31 bp, Homo sapiens; identical to SEQ ID NO: 34273
  chr22:31532734-31532765
  hypo

SEQ ID NO: 195443 - DNA, 31 bp, Homo sapiens; identical to SEQ ID NO: 101077
  chr22:31532982-31533013
  hypo

SEQ ID NO: 195444 - DNA, 31 bp, Homo sapiens; identical to SEQ ID NO: 101078
  chr22:31609769-31609800
  hypo

SEQ ID NO: 195445 - DNA, 30 bp, Homo sapiens; identical to SEQ ID NO: 101079
  chr22:31615844-31615874
  hypo

SEQ ID NO: 195446 - DNA, 267 bp, Homo sapiens
  chr22:31644626-31644893
  hypo
gtggccatctacagccggcctgaggcagtcacagacggatttgcagctgagcctgtctatctggtgtgggaagaagatggggagttacttgtcagtcccggcttacttcacctccagagacctgtttcggtgagttggtctccgagttcccctctccatctctcctggcccctggtcctgagaggagggtggtctccctaaatctccttctcacttagtcctttaccatcggttctgccgggcagaagccagcggaggttataccca

SEQ ID NO: 195447 - DNA, 119 bp, Homo sapiens; identical to SEQ ID NO: 101081
  chr22:31655942-31656061
  hypo

SEQ ID NO: 195448 - DNA, 30 bp, Homo sapiens; identical to SEQ ID NO: 34275
  chr22:31674515-31674545
  hypo

SEQ ID NO: 195449 - DNA, 140 bp, Homo sapiens
  chr22:31685461-31685601
  hypo
gcaggggtgggggaccgtcatacccagagttcccaggtcctttttctccttggagttcatccgcacccgctggctgatcccaatcactggctgcacagctgccgcctcactccgagcgggcagggcgttggcaggagcga

SEQ ID NO: 195450 - DNA, 30 bp, Homo sapiens
  chr22:31686040-31686070
  hypo
tcacatctaagcgtacgctctgtgccagtc

SEQ ID NO: 195451 - DNA, 30 bp, Homo sapiens; identical to SEQ ID NO: 101084
  chr22:31688937-31688967
  hypo

SEQ ID NO: 195452 - DNA, 30 bp, Homo sapiens; identical to SEQ ID NO: 101085
  chr22:31689315-31689345
  hypo

SEQ ID NO: 195453 - DNA, 22 bp, Homo sapiens
  chr22:31701868-31701890
  hypo
gccactgcgcctggactctttt

SEQ ID NO: 195454 - DNA, 45 bp, Homo sapiens; identical to SEQ ID NO: 101087
  chr22:31744072-31744117
  hypo

SEQ ID NO: 195455 - DNA, 19 bp, Homo sapiens
  chr22:31899872-31899891
  hypo
ccatgttttgtatttgatt

SEQ ID NO: 195456 - DNA, 18 bp, Homo sapiens
  chr22:31925244-31925262
  hypo
tttatcaggtcaggtacg

SEQ ID NO: 195457 - DNA, 144 bp, Homo sapiens; identical to SEQ ID NO: 34278
  chr22:31942753-31942897
  hypo

SEQ ID NO: 195458 - DNA, 35 bp, Homo sapiens; identical to SEQ ID NO: 101091
  chr22:31976810-31976845
  hypo

SEQ ID NO: 195459 - DNA, 30 bp, Homo sapiens; identical to SEQ ID NO: 34279
  chr22:31998238-31998268
  hypo

SEQ ID NO: 195460 - DNA, 155 bp, Homo sapiens; identical to SEQ ID NO: 101093
  chr22:31998582-31998737
  hypo

SEQ ID NO: 195461 - DNA, 31 bp, Homo sapiens; identical to SEQ ID NO: 101094
  chr22:32001194-32001225
  hypo

SEQ ID NO: 195462 - DNA, 347 bp, Homo sapiens
  chr22:32009373-32009720
  hypo
ggaggagaaagaaggcgcggctgcagtgggcgctccaggcctaccaggggcagctcctccaggagggtgccacgcggctcctgcgctttgcagccagcatgaaggcctcccggcagcagctgcaggcccagcagcaggtccaggtaggcccagggccccttcctgtggggagcaggcagggtgtggcatgagctgaccagaggctgtgttgtaggcggctcacagtctccatcgtgccgtccgccgctgtgccacgctctggaaacagaaagtgctgggccggggcgggaagcctcagcccctggcagccatcgcacccagcaggaaagtgacgtttgagggtcccc

SEQ ID NO: 195463 - DNA, 368 bp, Homo sapiens
  chr22:32014092-32014460
  hypo
cccctcaggtcctgtcggcggcaagcgagcagcctgcgcaggtggctggagctgaacagagaggagccggggcctgaggaccaggaagtagagcagcaggtgcagaaagagctggaacaggtgaggccccaggccatccccaggtgtccctggggacgccccgggctgtgctccctctcagccctgcctgtccctccatggccccaggtggaaatgcagatccagctgctggcagaggagctccaggctcagcgccagcccattggcgcctgcgttgcccgcatccaggccctgcggcaggccctgtgctagcgtgttcgcaccaggaacgcaggtgctgggctgtcggggaggcctcaggccacctc

SEQ ID NO: 195464 - DNA, 30 bp, Homo sapiens; identical to SEQ ID NO: 101097
  chr22:32015369-32015399
  hypo

SEQ ID NO: 195465 - DNA, 71 bp, Homo sapiens
  chr22:32019701-32019772
  hypo
gcggtctgagggcgccgaagggcaggaggtagtagaggacggtcaagggccaggagcgcagtttcagagcg

SEQ ID NO: 195466 - DNA, 305 bp, Homo sapiens
  chr22:32025195-32025500
  hypo
ggggcctgcaagattgttgtgcgtgaggggtaggtgcatgtaggtggaagtgtgtgtgcatggaggatacgtgtgcaggtgcaagggtatgtgcatggaggggtgcgtgtataggtgcgaggatgtgtggggtgtgtaggtgtgagggtgtgtgtagggggtgtgtaggtgtgagtgtgttatgcgtataggtggtgtgtgcgtaggtgtgaggttatgtgcctggagggggtgtgcacaggtgcaaggtgtgtgcatgtaggaggcatgtgcgtaggtgtgagggtgggcgcatataggggtgt

SEQ ID NO: 195467 - DNA, 30 bp, Homo sapiens
  chr22:32036079-32036109
  hypo
tgcgcacactccacgcgacggggctaaatg

SEQ ID NO: 195468 - DNA, 30 bp, Homo sapiens; identical to SEQ ID NO: 34282
  chr22:32055432-32055462
  hypo

SEQ ID NO: 195469 - DNA, 29 bp, Homo sapiens
  chr22:32059271-32059300
  hypo
gagccaccgcacctggcctaaacattctt

SEQ ID NO: 195470 - DNA, 384 bp, Homo sapiens
  chr22:32078007-32078391
  hypo
actgcctaaaagttggtctttcgcagatcttaatgtacatggcattgattatgagacggaattccagcctggagacggagcgacggccgtgcattcattggctgcaccgcggccttggatctgctgctcccgtcctgtacgctccctgctgctcttggctcagtgggcaaggaaggagccacgggggaggtctcacgcccagatagtgggatctggaatggacctcaggttggctctggagcccgtgccaaagaccctttcaggcaaaattgtgacaaagtatcatgattttcacagctcttgaggagcgctgagttttgggattcacagcatgggtttctgggctcctcaggctccgaataaggcaaacgctacatgtcttca

SEQ ID NO: 195471 - DNA, 30 bp, Homo sapiens
  chr22:32079611-32079641
  hypo
ggccttggaagcctccgtggatgaccaagt

SEQ ID NO: 195472 - DNA, 30 bp, Homo sapiens
  chr22:32079917-32079947
  hypo
tctgacggttcccatcggcggctgctccat

SEQ ID NO: 195473 - DNA, 121 bp, Homo sapiens
  chr22:32101965-32102086
  hypo
gacagagggagactctgtctcaaaaaccaaactaaacaaaacaacatagctatatagaagaaaattaatggccaatcgtagtgactcacacctgtaatcccagcactttggggaggctgag

SEQ ID NO: 195474 - DNA, 30 bp, Homo sapiens; identical to SEQ ID NO: 34285
  chr22:32152143-32152173
  hypo

SEQ ID NO: 195475 - DNA, 20 bp, Homo sapiens
  chr22:32172014-32172034
  hypo
agactacatctcaaaaaaaa

SEQ ID NO: 195476 - DNA, 31 bp, Homo sapiens
  chr22:32225239-32225270
  hypo
tggcgcggtgtctgacgcctgtaatcccagc

SEQ ID NO: 195477 - DNA, 30 bp, Homo sapiens
  chr22:32253537-32253567
  hypo
aggtaaaggaagccgcggtagcagggagct

SEQ ID NO: 195478 - DNA, 39 bp, Homo sapiens
  chr22:32275826-32275865
  hypo
aaccaggattagagtcgctgaggccgtcacacaggccac

SEQ ID NO: 195479 - DNA, 32 bp, Homo sapiens; identical to SEQ ID NO: 101105
  chr22:32276565-32276597
  hypo

SEQ ID NO: 195480 - DNA, 221 bp, Homo sapiens
  chr22:32352536-32352757
  hypo
cccacgcatcccatccggctgggcctggccctcaacttctccgtgttctactatgagatccagaatgcacctgagcaagcctgcctcttagccaaacaagccttcgatgatgccatagctgagctggacacactaaacgaggattcctataaggactccacgctgatcatgcagttgctgcgagacaacctcaccctctggacgagcgaccagcaggatga

SEQ ID NO: 195481 - DNA, 214 bp, Homo sapiens
  chr22:32354706-32354920
  hypo
cccccatgccggggccgatgaatacggctcaggaagcctgtttcaagttgacctaattttaagataaagtggttattgagtttcacttcagttagtaggtcaggtatttgaaagtcaacaagctttatatggctaatacttgcttttgataagcacgtagacaaaatgttgctgggccatggtggcgtgcgcctgtagtcccagctgcttggga

SEQ ID NO: 195482 - DNA, 42 bp, Homo sapiens; identical to SEQ ID NO: 34286
  chr22:32356771-32356813
  hypo

SEQ ID NO: 195483 - DNA, 96 bp, Homo sapiens
  chr22:32384070-32384166
  hypo
tcctgaatgatccggcggcatggcagaggtggtgcctactgatatggctccgatgactggaggaacaccagggtccttggtcttgcgccaatgtag

SEQ ID NO: 195484 - DNA, 30 bp, Homo sapiens
  chr22:32554833-32554863
  hypo
agccctgggaaagccggctatgggcaggag

SEQ ID NO: 195485 - DNA, 456 bp, Homo sapiens; identical to SEQ ID NO: 57957
  chr22:32571843-32572299
  hypo

SEQ ID NO: 195486 - DNA, 23 bp, Homo sapiens
  chr22:32647926-32647949
  hypo
acagatgtagctgggcgtggtgg

SEQ ID NO: 195487 - DNA, 30 bp, Homo sapiens
  chr22:32650982-32651012
  hypo
tggctgtgtgcacacgatggggttattagg

SEQ ID NO: 195488 - DNA, 431 bp, Homo sapiens; identical to SEQ ID NO: 101108
  chr22:32665357-32665788
  hypo

SEQ ID NO: 195489 - DNA, 30 bp, Homo sapiens
  chr22:32666857-32666887
  hypo
gcaccatcagcccaacgtgatcacgctgtg

SEQ ID NO: 195490 - DNA, 262 bp, Homo sapiens
  chr22:32667490-32667752
  hypo
tccgtgagaagaagccgaagccatccaagaagaaagcaggtggccgcacagaggagagggtcgggcccggggccgcgtggcgtgtttccactacttcgaggacatttatggctactcaggagtgttcatctgcggcccctcacctcactggctcctggcgacagactgaggggtgctgcggctgcaccccgtgggcatcaatggccctgtcaactctttcgctctgttccacaatgtcaactgtccccgcggcttcctgtac

SEQ ID NO: 195491 - DNA, 30 bp, Homo sapiens
  chr22:32668133-32668163
  hypo
aaggctacgcgtggccgccgggacctgcct

SEQ ID NO: 195492 - DNA, 57 bp, Homo sapiens
  chr22:32668362-32668419
  hypo
aagcctgcgggccagcgagctgacgggcatggccttcatggtcgacaggcagctcta

SEQ ID NO: 195493 - DNA, 176 bp, Homo sapiens
  chr22:32668772-32668948
  hypo
agaataagcatatcgcgtggttcgccacccaggatggtggcatcgggctgctgctgcccatgcaggagaaaacctactggaggctgctgatgctgctgaacgtgctgccacaccacacaggcctcaacctccgcaccttccggatgctgcgtgtggacctccgcaccctccagaat

SEQ ID NO: 195494 - DNA, 199 bp, Homo sapiens
  chr22:32792001-32792200
  hypo
tttaaagcacttaacatcatcatgaatgactcggaacagaagagcaacttctactgtacctgacgggttaagaaggtcatggaagagcggttgacccaggcatagttcccagcagctgccattcccttcagatagtcttgaccctctggggaagcgattcgagcacaagccaactgccgatcattgactataatcttgt

SEQ ID NO: 195495 - DNA, 161 bp, Homo sapiens; identical to SEQ ID NO: 34288
  chr22:32804845-32805006
  hypo

SEQ ID NO: 195496 - DNA, 30 bp, Homo sapiens
  chr22:32909521-32909551
  hypo
caaatatagataatcggttcctgggtcaaa

SEQ ID NO: 195497 - DNA, 213 bp, Homo sapiens; identical to SEQ ID NO: 101111
  chr22:32914021-32914234
  hypo

SEQ ID NO: 195498 - DNA, 30 bp, Homo sapiens
  chr22:32924226-32924256
  hypo
cccagccagcagccccgtcagtataataac

SEQ ID NO: 195499 - DNA, 30 bp, Homo sapiens
  chr22:32924501-32924531
  hypo
gtgtccatatgctctcgcacacgcacgcac

SEQ ID NO: 195500 - DNA, 30 bp, Homo sapiens
  chr22:32957165-32957195
  hypo
ccagaatgtcacctgcggccagcgtaggtc

SEQ ID NO: 195501 - DNA, 30 bp, Homo sapiens
  chr22:32957625-32957655
  hypo
ccactcacccgtccccggagcaggtgacat

SEQ ID NO: 195502 - DNA, 260 bp, Homo sapiens
  chr22:32960688-32960948
  hypo
cccaaacagtgctcccggactgcacccaaacagtgctcctgggctgcacccagtgctcccgcattgtacccaaacagtgctcctgggctgcacccaaacagtgctcccgcattgtacccaaacagtgctcccggactacacccaaacagtgctcccggactgcaccctaacagcgctcccggactgcaccctaacagtgctcccggattacacccaaacagtgctcccggattgtacccaaacagtgctcctggactgca

SEQ ID NO: 195503 - DNA, 30 bp, Homo sapiens; identical to SEQ ID NO: 101112
  chr22:32983716-32983746
  hypo

SEQ ID NO: 195504 - DNA, 213 bp, Homo sapiens
  chr22:32997560-32997773
  hypo
cctcctttgccattttttactttgacttgtgggaaacagcaatctttttagaaccacgtatgggctggcaagactccgggctagtgctggggacacagaagaggtaatttggggccagattattgggggcctttgaaaccaaagaggggagttcaggttgcttggatggacagtggggaagcaggatagttctggaaccggggagcgacctgc

SEQ ID NO: 195505 - DNA, 24 bp, Homo sapiens
  chr22:33038443-33038467
  hypo
tgagatggagtcttgctctgtcgc

SEQ ID NO: 195506 - DNA, 30 bp, Homo sapiens; identical to SEQ ID NO: 34290
  chr22:33195673-33195703
  hypo

SEQ ID NO: 195507 - DNA, 31 bp, Homo sapiens; identical to SEQ ID NO: 101115
  chr22:33215184-33215215
  hypo

SEQ ID NO: 195508 - DNA, 108 bp, Homo sapiens
  chr22:33250661-33250769
  hypo
agaagaagtcatcatcgtgactctacccaccccgcgcccccaccgcgtaattgaatgctgagtgtggacggcacttcttccagcacttggctgcgttaccgtgctcag

SEQ ID NO: 195509 - DNA, 30 bp, Homo sapiens
  chr22:33257254-33257284
  hypo
agagagtaccggcatcgggtttccttggga

SEQ ID NO: 195510 - DNA, 39 bp, Homo sapiens
  chr22:33305902-33305941
  hypo
agacgcacatacaagcggtgtgctcggagactgcgagaa

SEQ ID NO: 195511 - DNA, 44 bp, Homo sapiens; identical to SEQ ID NO: 101117
  chr22:33361653-33361697
  hypo

SEQ ID NO: 195512 - DNA, 43 bp, Homo sapiens; identical to SEQ ID NO: 101118
  chr22:33361996-33362039
  hypo

SEQ ID NO: 195513 - DNA, 203 bp, Homo sapiens; identical to SEQ ID NO: 13412
  chr22:33453871-33454074
  hypo

SEQ ID NO: 195514 - DNA, 65 bp, Homo sapiens; identical to SEQ ID NO: 13413
  chr22:33454193-33454258
  hypo

SEQ ID NO: 195515 - DNA, 154 bp, Homo sapiens; identical to SEQ ID NO: 134018
  chr22:33454345-33454499
  hypo

SEQ ID NO: 195516 - DNA, 31 bp, Homo sapiens; identical to SEQ ID NO: 101122
  chr22:34061439-34061470
  hypo

SEQ ID NO: 195517 - DNA, 30 bp, Homo sapiens; identical to SEQ ID NO: 101123
  chr22:34142214-34142244
  hypo

SEQ ID NO: 195518 - DNA, 17 bp, Homo sapiens
  chr22:34144136-34144153
  hypo
ttagacagagtctcagt

SEQ ID NO: 195519 - DNA, 76 bp, Homo sapiens
  chr22:34144332-34144408
  hypo
ggtctcaatctccagacctcgtgatgcacccatctccacttccacctcccatcccgtagctttaaatattcaactc

SEQ ID NO: 195520 - DNA, 152 bp, Homo sapiens; identical to SEQ ID NO: 101125
  chr22:34242011-34242163
  hypo

SEQ ID NO: 195521 - DNA, 51 bp, Homo sapiens; identical to SEQ ID NO: 101126
  chr22:34257536-34257587
  hypo

SEQ ID NO: 195522 - DNA, 30 bp, Homo sapiens; identical to SEQ ID NO: 134019
  chr22:34315629-34315659
  hypo

SEQ ID NO: 195523 - DNA, 1103 bp, Homo sapiens; identical to SEQ ID NO: 134020
  chr22:34315936-34317039
  hypo

SEQ ID NO: 195524 - DNA, 30 bp, Homo sapiens
  chr22:35406036-35406066
  hypo
catccacgaagaatgcggccccctacccag

SEQ ID NO: 195525 - DNA, 45 bp, Homo sapiens; identical to SEQ ID NO: 101128
  chr22:35526199-35526244
  hypo

SEQ ID NO: 195526 - DNA, 19 bp, Homo sapiens
  chr22:35707943-35707962
  hypo
gcttagaagatgaggggag

SEQ ID NO: 195527 - DNA, 30 bp, Homo sapiens
  chr22:35719038-35719068
  hypo
aagaactgcgggcaccgcttccacgtgctg

SEQ ID NO: 195528 - DNA, 244 bp, Homo sapiens
  chr22:35719272-35719516
  hypo
cttctcatttcggggcgtctcggttgtcggctggtgggatgttctgtggggagggaggcttgccaactgcgtgctttgctgtggagtgggcagggcagatgtagttaaaaaaaaaaaaaaagcagggaaagaatgtctgttctctgtctgagtgccaggtgggcaggctcacaggtgagctgtggttaccggctgtgtccccttgtcccctctcagtcctgggctgacgcgttccgcagctcgc

SEQ ID NO: 195529 - DNA, 184 bp, Homo sapiens; identical to SEQ ID NO: 101130
  chr22:35730461-35730645
  hypo

SEQ ID NO: 195530 - DNA, 30 bp, Homo sapiens
  chr22:35731077-35731107
  hypo
ggtctgaccccttgccgggacctgcgggag

SEQ ID NO: 195531 - DNA, 30 bp, Homo sapiens; identical to SEQ ID NO: 101131
  chr22:35741758-35741788
  hypo

SEQ ID NO: 195532 - DNA, 318 bp, Homo sapiens; identical to SEQ ID NO: 101132
  chr22:35742068-35742386
  hypo

SEQ ID NO: 195533 - DNA, 31 bp, Homo sapiens; identical to SEQ ID NO: 13417
  chr22:35746850-35746881
  hypo

SEQ ID NO: 195534 - DNA, 58 bp, Homo sapiens; identical to SEQ ID NO: 34298
  chr22:35758434-35758492
  hypo

SEQ ID NO: 195535 - DNA, 381 bp, Homo sapiens; identical to SEQ ID NO: 134030
  chr22:35767853-35768234
  hypo

SEQ ID NO: 195536 - DNA, 29 bp, Homo sapiens
  chr22:35768493-35768522
  hypo
cttcaaggccgggcgcggtggctcacgcc

SEQ ID NO: 195537 - DNA, 28 bp, Homo sapiens
  chr22:35768761-35768789
  hypo
aagagcaagactccgcctcaaaaaaaaa

SEQ ID NO: 195538 - DNA, 274 bp, Homo sapiens; identical to SEQ ID NO: 134031
  chr22:35776986-35777260
  hypo

SEQ ID NO: 195539 - DNA, 31 bp, Homo sapiens; identical to SEQ ID NO: 101138
  chr22:35804287-35804318
  hypo

SEQ ID NO: 195540 - DNA, 43 bp, Homo sapiens; identical to SEQ ID NO: 101139
  chr22:35806955-35806998
  hypo

SEQ ID NO: 195541 - DNA, 30 bp, Homo sapiens; identical to SEQ ID NO: 34301
  chr22:35817356-35817386
  hypo

SEQ ID NO: 195542 - DNA, 218 bp, Homo sapiens; identical to SEQ ID NO: 101141
  chr22:35820081-35820299
  hypo

SEQ ID NO: 195543 - DNA, 144 bp, Homo sapiens; identical to SEQ ID NO: 101142
  chr22:35821625-35821769
  hypo

SEQ ID NO: 195544 - DNA, 30 bp, Homo sapiens; identical to SEQ ID NO: 101143
  chr22:35822529-35822559
  hypo

SEQ ID NO: 195545 - DNA, 30 bp, Homo sapiens; identical to SEQ ID NO: 101144
  chr22:35822852-35822882
  hypo

SEQ ID NO: 195546 - DNA, 765 bp, Homo sapiens
  chr22:35842432-35843197
  hypo
gactttgtctagtacccccatcgctgtacctccagcacacagagctgctgcgcaccctggaagtgaatgagcgagtggacgagcagatgactcagaggccagctcacagtctcgtgggcgaggcagacaagaaacaaccaagcagaatgcccccagtgagcactacggcatgtggaggggaacaaccggggcgcctgcaggagggagtggctgcccgtccgcagtgggaggaaggagtgaggaatggaagcctccctcaactctgcccgcagaattttccagattggcttctcctctagtcctggactcaccgcaccccctcaccttcatatttctctcatctcggttccctgagcatcttcatcacccaaatcctttctgagagtcttttctgaatgggggggtttgttctagagattctagttccctccgcagagacaagtgctccggtcaccagtgtcctgccccaactgcccaggtgggtcacgaggcccctgcatgagccaagccctccgggggcctcagcatcacctgtaccctaaggcatcagtctgctctgccccgactccgggcagcggtccgcgcttctctaggacagaaccagctcagggacggcagctagaagaccaggggttcagccccaaggctggtcctgctggcccttcctggccgagggcgtgcagcatcagcctcgggcttcccggctctgggtgggaaacctgcgtccctctcggtgttgctgtgaggattcgacatgaagctgtg

SEQ ID NO: 195547 - DNA, 642 bp, Homo sapiens; identical to SEQ ID NO: 101146
  chr22:35848318-35848960
  hypo

SEQ ID NO: 195548 - DNA, 39 bp, Homo sapiens; identical to SEQ ID NO: 101147
  chr22:35875347-35875386
  hypo

SEQ ID NO: 195549 - DNA, 432 bp, Homo sapiens; identical to SEQ ID NO: 101148
  chr22:35947749-35948181
  hypo

SEQ ID NO: 195550 - DNA, 30 bp, Homo sapiens; identical to SEQ ID NO: 34304
  chr22:35949996-35950026
  hypo

SEQ ID NO: 195551 - DNA, 141 bp, Homo sapiens
  chr22:35951596-35951737
  hypo
agagacaggcctccacggtgtcccgctggagcccagcctgctgctgccactccctttctctatgtgggtctggaaataagtctcgtcccctcgcaggcctccttttcttcatgagtaaatgggaggcgggaggaaggcatc

SEQ ID NO: 195552 - DNA, 31 bp, Homo sapiens; identical to SEQ ID NO: 101150
  chr22:36003113-36003144
  hypo

SEQ ID NO: 195553 - DNA, 241 bp, Homo sapiens
  chr22:36089708-36089949
  hypo
tctttgatattgttcgtgatttctagaggtggagatgatattactcacaaaatcgtaaacacgctgtgtgtccaccgtggatcctaatatccagggagggatattactccccatatagggggcgggggtgcacccagcctgtcatattgtttcttatgtccggggaggagaggatgatattgctaccaatatcgaagaagtgtacacgccccctgtgatatggttcctaatatccgcgttg

SEQ ID NO: 195554 - DNA, 154 bp, Homo sapiens
  chr22:36123183-36123337
  hypo
acctgttccagctcccggggcagggctgttcgaggatcccgtgtggttaaaccagaaggtaggaaggcagcgaataacacggacgtggtcttgctcttctaaaagcttaccatgagggtggggggcgacgaatgctaaacggacacatcagtgc

SEQ ID NO: 195555 - DNA, 30 bp, Homo sapiens; identical to SEQ ID NO: 101151
  chr22:36135444-36135474
  hypo

SEQ ID NO: 195556 - DNA, 140 bp, Homo sapiens
  chr22:36246093-36246233
  hypo
atatgttccaggctttaagtgcgtcagagaatactcccaatccaggacacagaaaggcagatgggactggtattactactctattctttcttgggcggggagcatgtacccgtgtgcacgcatgcgcattctctgtctct

SEQ ID NO: 195557 - DNA, 20 bp, Homo sapiens
  chr22:36246292-36246312
  hypo
gtctccggcagagacaggtg

SEQ ID NO: 195558 - DNA, 23 bp, Homo sapiens
  chr22:36373004-36373027
  hypo
ccgtctcaaaaaaaaaaaaaaaa

SEQ ID NO: 195559 - DNA, 30 bp, Homo sapiens
  chr22:36375390-36375420
  hypo
ctggcaaaatgttaacgaagtctgtggatg

SEQ ID NO: 195560 - DNA, 58 bp, Homo sapiens; identical to SEQ ID NO: 57979
  chr22:36424336-36424394
  hypo

SEQ ID NO: 195561 - DNA, 78 bp, Homo sapiens; identical to SEQ ID NO: 57980
  chr22:36424418-36424496
  hypo

SEQ ID NO: 195562 - DNA, 187 bp, Homo sapiens; identical to SEQ ID NO: 57981
  chr22:36425194-36425381
  hypo

SEQ ID NO: 195563 - DNA, 30 bp, Homo sapiens
  chr22:36448589-36448619
  hypo
tttgtttcgcttctccgctcattggtctat

SEQ ID NO: 195564 - DNA, 316 bp, Homo sapiens; identical to SEQ ID NO: 134040
  chr22:36462013-36462329
  hypo

SEQ ID NO: 195565 - DNA, 90 bp, Homo sapiens
  chr22:36462714-36462804
  hypo
cttggcgatgtctcccggctagggatagcagaatgggatagaaacgcaggccacgcggtctggagcggtggctcacgcctttaatcccag

SEQ ID NO: 195566 - DNA, 31 bp, Homo sapiens; identical to SEQ ID NO: 101157
  chr22:36491796-36491827
  hypo

SEQ ID NO: 195567 - DNA, 164 bp, Homo sapiens; identical to SEQ ID NO: 101158
  chr22:36519453-36519617
  hypo

SEQ ID NO: 195568 - DNA, 30 bp, Homo sapiens; identical to SEQ ID NO: 34310
  chr22:36537258-36537288
  hypo

SEQ ID NO: 195569 - DNA, 30 bp, Homo sapiens
  chr22:36567878-36567908
  hypo
aggcgtgagctagcacgcccggctaattac

SEQ ID NO: 195570 - DNA, 30 bp, Homo sapiens
  chr22:36580143-36580173
  hypo
tatttcagtgacagacgccggtggaagccg

SEQ ID NO: 195571 - DNA, 33 bp, Homo sapiens
  chr22:36582595-36582628
  hypo
ttcgagacggagtttcgctctttcaccaggctg

SEQ ID NO: 195572 - DNA, 31 bp, Homo sapiens; identical to SEQ ID NO: 101160
  chr22:36588478-36588509
  hypo

SEQ ID NO: 195573 - DNA, 34 bp, Homo sapiens; identical to SEQ ID NO: 101161
  chr22:36646817-36646851
  hypo

SEQ ID NO: 195574 - DNA, 175 bp, Homo sapiens; identical to SEQ ID NO: 101162
  chr22:36677170-36677345
  hypo

SEQ ID NO: 195575 - DNA, 151 bp, Homo sapiens
  chr22:36683789-36683940
  hypo
acaaacaaacaaaaaaaaatttgttaaactaaggttattcttgttacatgatatggcgtatcagagctgtttttacgtgttaattattctttaattattagtgaggtgaagatttccaagtatgtgtcccacactccgggctgcttcttgg

SEQ ID NO: 195576 - DNA, 185 bp, Homo sapiens
  chr22:36684241-36684426
  hypo
tgtagttggctcagtcgggtgccgcccaccctcacctgggccccgcccacccttacctgcagcttccgcagctgtttgatggcttcgtcccggttcttgttggccgagtcgatgtgcgcctccaggtccttcaggtccatctccagcttcttccgggcggccactgccatcgagcgctgcttcct

SEQ ID NO: 195577 - DNA, 30 bp, Homo sapiens
  chr22:36685232-36685262
  hypo
cagggcccgggccagcgacagagccttggt

SEQ ID NO: 195578 - DNA, 30 bp, Homo sapiens
  chr22:36685559-36685589
  hypo
aacaccatgttgtaacgtctgtttaatttt

SEQ ID NO: 195579 - DNA, 279 bp, Homo sapiens; identical to SEQ ID NO: 101164
  chr22:36688046-36688325
  hypo

SEQ ID NO: 195580 - DNA, 30 bp, Homo sapiens; identical to SEQ ID NO: 34313
  chr22:36691001-36691031
  hypo

SEQ ID NO: 195581 - DNA, 172 bp, Homo sapiens; identical to SEQ ID NO: 101166
  chr22:36692852-36693024
  hypo

SEQ ID NO: 195582 - DNA, 130 bp, Homo sapiens; identical to SEQ ID NO: 34315
  chr22:36695462-36695592
  hypo

SEQ ID NO: 195583 - DNA, 72 bp, Homo sapiens
  chr22:36696998-36697070
  hypo
ttcctgcttcttggcggtcaggcgggcccggagctcctcagcctcggcacacagctcggtttctgcctggag

SEQ ID NO: 195584 - DNA, 313 bp, Homo sapiens
  chr22:36707807-36708120
  hypo
gcacctggcagacaggcccaacgataatgcatgatgacaaccagcctgggcaccgcggtggagtgccgcaggcttctaacagcatggagcaggtgaaggggctctgtaagctgtgtaaatgatgatgctgtcaccggccacattactgggtgagtcattgtgcaagaaccgtactcaggtcacacccctgcgtccccagcagctgcccggctcctggtcctagagagcctcgactccacctctcctgtgaagatctggccagcacctccccgtgagcgctcctcaccttgccggcatagtggataatgcagaa

SEQ ID NO: 195585 - DNA, 30 bp, Homo sapiens; identical to SEQ ID NO: 34317
  chr22:36713228-36713258
  hypo

SEQ ID NO: 195586 - DNA, 239 bp, Homo sapiens; identical to SEQ ID NO: 34318
  chr22:36713505-36713744
  hypo

SEQ ID NO: 195587 - DNA, 30 bp, Homo sapiens
  chr22:36714091-36714121
  hypo
tatgccacctctctccgggttgctgtgagg

SEQ ID NO: 195588 - DNA, 30 bp, Homo sapiens; identical to SEQ ID NO: 101172
  chr22:36718449-36718479
  hypo

SEQ ID NO: 195589 - DNA, 72 bp, Homo sapiens
  chr22:36721695-36721767
  hypo
gagcgtggagggctccgtgagagcggagtccccatccaccgtgccggggtcaggttccgcatgggacatgac

SEQ ID NO: 195590 - DNA, 30 bp, Homo sapiens
  chr22:36722030-36722060
  hypo
attcccagtgcagaacgtgcagtaaacgtg

SEQ ID NO: 195591 - DNA, 30 bp, Homo sapiens
  chr22:36722315-36722345
  hypo
gaggacacacagcaacgagctgcaaaagcc

SEQ ID NO: 195592 - DNA, 195 bp, Homo sapiens
  chr22:36722629-36722824
  hypo
tgtgcgaggacgccacgtacgccagatactggatgaccttcttggtgttctccgtcttgccagctccagattcaccactaccaagagaggcaaggaagtcccgggcttaggcatggccaagtccttgacctctgtcccttcccactgcacgctccactgcctcgcattctgttgggtgcccgtgaaggacccaac

SEQ ID NO: 195593 - DNA, 204 bp, Homo sapiens; identical to SEQ ID NO: 34319
  chr22:36732741-36732945
  hypo

SEQ ID NO: 195594 - DNA, 404 bp, Homo sapiens; identical to SEQ ID NO: 101174
  chr22:36740159-36740563
  hypo

SEQ ID NO: 195595 - DNA, 79 bp, Homo sapiens; identical to SEQ ID NO: 101175
  chr22:36741012-36741091
  hypo

SEQ ID NO: 195596 - DNA, 30 bp, Homo sapiens; identical to SEQ ID NO: 34320
  chr22:36791015-36791045
  hypo

SEQ ID NO: 195597 - DNA, 20 bp, Homo sapiens
  chr22:36805837-36805857
  hypo
acaggcgtgggccaccgcgc

SEQ ID NO: 195598 - DNA, 93 bp, Homo sapiens
  chr22:36838768-36838861
  hypo
gtgtcaaggtggcaccgagaagggaggtgcccacggtggaagcttatggtgatgtggaaagtgcaccaggcccaggctcgccacccactacct

SEQ ID NO: 195599 - DNA, 30 bp, Homo sapiens; identical to SEQ ID NO: 101177
  chr22:36850084-36850114
  hypo

SEQ ID NO: 195600 - DNA, 30 bp, Homo sapiens
  chr22:36851986-36852016
  hypo
cgcttcacagcctcccgatcacctgagtgt

SEQ ID NO: 195601 - DNA, 198 bp, Homo sapiens; identical to SEQ ID NO: 101178
  chr22:36855432-36855630
  hypo

SEQ ID NO: 195602 - DNA, 143 bp, Homo sapiens; identical to SEQ ID NO: 101179
  chr22:36860796-36860939
  hypo

SEQ ID NO: 195603 - DNA, 30 bp, Homo sapiens
  chr22:36862090-36862120
  hypo
agggcaacgccttcccgcggggctgtgctg

SEQ ID NO: 195604 - DNA, 37 bp, Homo sapiens
  chr22:36867727-36867764
  hypo
ggtgtaggacaggcgcggcagctcctgcctgtaatcc

SEQ ID NO: 195605 - DNA, 118 bp, Homo sapiens
  chr22:36868765-36868883
  hypo
ccgagggcggtggaacggttctgtatggcgctggaatggtggacacatgccattatacatttgtccatgaactttctcactggcaagcagtctgtgctgagagcggcagctgagacac

SEQ ID NO: 195606 - DNA, 30 bp, Homo sapiens
  chr22:36869891-36869921
  hypo
cccggggacggtcctcggcattcccgccac

SEQ ID NO: 195607 - DNA, 98 bp, Homo sapiens
  chr22:36871883-36871981
  hypo
ccatgtctttgtgcacgctgtttcctcagcccttcctcctcctctgcgcatccctcatggctcagctcagaggttctctctaacgtgaagcattccct

SEQ ID NO: 195608 - DNA, 30 bp, Homo sapiens
  chr22:36872341-36872371
  hypo
aagctctcgaaaaaccggctgggcgcagtg

SEQ ID NO: 195609 - DNA, 86 bp, Homo sapiens
  chr22:36880505-36880591
  hypo
gactctgtctcaaaaaaaaaaaaaaaaaaaatagctctaaggtcttgcactaaccggtatgacctgtctggcgtctttacaggcag

SEQ ID NO: 195610 - DNA, 172 bp, Homo sapiens; identical to SEQ ID NO: 101180
  chr22:36885621-36885793
  hypo

SEQ ID NO: 195611 - DNA, 30 bp, Homo sapiens
  chr22:36894054-36894084
  hypo
atcggccagcacaccgaacatctggtagag

SEQ ID NO: 195612 - DNA, 876 bp, Homo sapiens; identical to SEQ ID NO: 13425
  chr22:36901806-36902682
  hypo

SEQ ID NO: 195613 - DNA, 27 bp, Homo sapiens
  chr22:36906150-36906177
  hypo
cttacatagtttacatagcctcggctg

SEQ ID NO: 195614 - DNA, 51 bp, Homo sapiens; identical to SEQ ID NO: 101183
  chr22:36906968-36907019
  hypo

SEQ ID NO: 195615 - DNA, 126 bp, Homo sapiens
  chr22:36907686-36907812
  hypo
atgcagatgtcaatgacgcagcgtaaaatgccccaggcattctccacgctcaggttgatctggctggcaaactcattaggcttgaactgctgggtgcctaggatgacgtggcgtgaggagtctttc

SEQ ID NO: 195616 - DNA, 31 bp, Homo sapiens; identical to SEQ ID NO: 34323
  chr22:37007645-37007676
  hypo

SEQ ID NO: 195617 - DNA, 31 bp, Homo sapiens; identical to SEQ ID NO: 101185
  chr22:37121761-37121792
  hypo

SEQ ID NO: 195618 - DNA, 263 bp, Homo sapiens
  chr22:37159743-37160006
  hypo
gcgtgtcttcattcccgtttcctagactgggagaggtgtgtgtggtgactcaccgaggttggcatggctgctaagtggcagggccagtgtacgccttaggccatcaaagtccaagcccagggccccttctccacccacagctacctctgcaatgcccttgtgctcttgaaccaaaggacagagatgccgctgggaaacatgggtgtctgcagcccgtacctgggagagagatgcctggagcctgtgaccgagccttctccagc

SEQ ID NO: 195619 - DNA, 111 bp, Homo sapiens
  chr22:37160268-37160379
  hypo
gaggcagggctggggcggtgccgccaaggacaagagctcatgtctgggccaggctctgctgggcacttccgtgcctcactgtgaaacctcccaactcggtagagtgtctga

SEQ ID NO: 195620 - DNA, 178 bp, Homo sapiens
  chr22:37168632-37168810
  hypo
cattcactttgtgttcgctgtgttagaacgtatcacacgcatcttagttcttccttgagtgcaactgactcatgcttgcaggcccactgcaccttgcacggtgactctgacgtagtaggtgctcagcgagtatctgttcaatgcataaacacttgaactgaacgtcaggtccttcaat

SEQ ID NO: 195621 - DNA, 104 bp, Homo sapiens
  chr22:37234763-37234867
  hypo
acttttggccagcctcggtgtgctggccagttcaactcaggagccttcagcactgagggccagccccagtctgcggtgtctgcccaggacggccagtccctgcc

SEQ ID NO: 195622 - DNA, 30 bp, Homo sapiens
  chr22:37267725-37267755
  hypo
accgcatggcagctccgagagcagaggtaa

SEQ ID NO: 195623 - DNA, 24 bp, Homo sapiens
  chr22:37285259-37285283
  hypo
atgtataagtactattcatgccgg

SEQ ID NO: 195624 - DNA, 24 bp, Homo sapiens
  chr22:37285582-37285606
  hypo
tccgcctcaaaaaaaaaaaaatta

SEQ ID NO: 195625 - DNA, 359 bp, Homo sapiens
  chr22:37329774-37330133
  hypo
ggagctaggagccagcgaagccgagggtccaggtgggagggatttgcagctgctcccacgggcaccgggccaggcctcaccctcagtgccaacccacaggacagcaagaccgagaccctccagaacgcccacagcatggccctgccagccctggagccctccaccaggtactgggccagggtgagggtcaggacctcccgcaccggctacaacgggatctggagcgagtggagtgaggcgcgctcctgggacaccgagtcgggtaggtgaaggctggagtccagagcttctggccaggaccagctcatagtttctcactgccagaaaatccccaatgcagcagccgtagcaggcctgca

SEQ ID NO: 195626 - DNA, 148 bp, Homo sapiens
  chr22:37332530-37332678
  hypo
gccttgcccccacctcggacctcctgatgctcaccggcccaaatgtctctgctcttgcagaacgggagcgcagagctttggcccccaggcagcatgtcggccttcactagcgggagtcccccacaccaggggccgtggggcagccgct

SEQ ID NO: 195627 - DNA, 30 bp, Homo sapiens
  chr22:37334312-37334342
  hypo
ctattgcttcctccccggcctggggcccgg

SEQ ID NO: 195628 - DNA, 30 bp, Homo sapiens
  chr22:37343367-37343397
  hypo
tccccttaactgctccgtagataacaacgt

SEQ ID NO: 195629 - DNA, 85 bp, Homo sapiens
  chr22:37348946-37349031
  hypo
acagactcattcacccggcgaatgagggtcacgttgacgagccgctgggcatcctgggtgtctgcccacccgcaggtgatgtggc

SEQ ID NO: 195630 - DNA, 17 bp, Homo sapiens
  chr22:37351404-37351421
  hypo
tctgagagggagtttcg

SEQ ID NO: 195631 - DNA, 625 bp, Homo sapiens; identical to SEQ ID NO: 101191
  chr22:37367460-37368085
  hypo

SEQ ID NO: 195632 - DNA, 480 bp, Homo sapiens; identical to SEQ ID NO: 134059
  chr22:37414884-37415364
  hypo

SEQ ID NO: 195633 - DNA, 186 bp, Homo sapiens
  chr22:37507693-37507879
  hypo
tgggacagggccccgcgcccgggctttgccgtgaccgccggttttcagccctacctggctcccttttagttgtaggaacctgggcagattccctgacttctgagcggtgcttcttccatctgtcgaatgaaaaaaattcgccccttcttgatgaacgggaaacaacgtgtgcgaaggcccagcact

SEQ ID NO: 195634 - DNA, 143 bp, Homo sapiens; identical to SEQ ID NO: 101194
  chr22:37509139-37509282
  hypo

SEQ ID NO: 195635 - DNA, 201 bp, Homo sapiens
  chr22:37527572-37527773
  hypo
actttaaaaatgaatcggtgttttgtgactcaaagtgacgggaagacttgttagtatccacgctaagttatggagcctgctcaggaattttgagcagggacaggagaagcacagagcatgtctgcacagacagtggggtggagagagcttgtgctggcaggtcctgttcgttcagcacaccggcaacggtaataccagata

SEQ ID NO: 195636 - DNA, 30 bp, Homo sapiens
  chr22:37536738-37536768
  hypo
ggtgtccttggagcccgctgccgcccagga

SEQ ID NO: 195637 - DNA, 158 bp, Homo sapiens; identical to SEQ ID NO: 101196
  chr22:37562375-37562533
  hypo

SEQ ID NO: 195638 - DNA, 30 bp, Homo sapiens; identical to SEQ ID NO: 101197
  chr22:37562800-37562830
  hypo

SEQ ID NO: 195639 - DNA, 30 bp, Homo sapiens; identical to SEQ ID NO: 101198
  chr22:37599445-37599475
  hypo

SEQ ID NO: 195640 - DNA, 30 bp, Homo sapiens; identical to SEQ ID NO: 101199
  chr22:37602527-37602557
  hypo

SEQ ID NO: 195641 - DNA, 209 bp, Homo sapiens; identical to SEQ ID NO: 101200
  chr22:37622730-37622939
  hypo

SEQ ID NO: 195642 - DNA, 24 bp, Homo sapiens
  chr22:37643793-37643817
  hypo
atgcactttcggagccgaggcggg

SEQ ID NO: 195643 - DNA, 53 bp, Homo sapiens; identical to SEQ ID NO: 101201
  chr22:37683792-37683845
  hypo

SEQ ID NO: 195644 - DNA, 30 bp, Homo sapiens
  chr22:37708167-37708197
  hypo
ctcagccaccagtgccgaggaacgtgacca

SEQ ID NO: 195645 - DNA, 31 bp, Homo sapiens; identical to SEQ ID NO: 34328
  chr22:37733865-37733896
  hypo

SEQ ID NO: 195646 - DNA, 30 bp, Homo sapiens
  chr22:37750112-37750142
  hypo
atccaaccgctgctccgatccacatgaatg

SEQ ID NO: 195647 - DNA, 169 bp, Homo sapiens; identical to SEQ ID NO: 101203
  chr22:37769149-37769318
  hypo

SEQ ID NO: 195648 - DNA, 30 bp, Homo sapiens; identical to SEQ ID NO: 101204
  chr22:37769664-37769694
  hypo

SEQ ID NO: 195649 - DNA, 87 bp, Homo sapiens; identical to SEQ ID NO: 101205
  chr22:37770929-37771016
  hypo

SEQ ID NO: 195650 - DNA, 31 bp, Homo sapiens; identical to SEQ ID NO: 34329
  chr22:37790763-37790794
  hypo

SEQ ID NO: 195651 - DNA, 137 bp, Homo sapiens
  chr22:37875331-37875468
  hypo
ggcccttgggatcagcgggccaaggggcaaaggaggaggagagggacccaccgtgcggttgtggggctgtggctctgaggcatggatgggccggttcaggctgggccttcccacatagacgtcgcgggccagcggga

SEQ ID NO: 195652 - DNA, 30 bp, Homo sapiens
  chr22:37893143-37893173
  hypo
ccccctggggggctccggccagacacccga

SEQ ID NO: 195653 - DNA, 207 bp, Homo sapiens
  chr22:37893388-37893595
  hypo
tctcccctggacctgggcacacggtgcagtggagcctgcgtgccacagagcactccaactttgccttgccacggccctttcgtttcctccatcagaacgaacaccttcaggaccaaacttctatactgttccgctctgtagccctggcaccaaacccagtgtctggcacatagcagatgactaataaaagcttgttatatagccaag

SEQ ID NO: 195654 - DNA, 216 bp, Homo sapiens; identical to SEQ ID NO: 101209
  chr22:37902175-37902391
  hypo

SEQ ID NO: 195655 - DNA, 30 bp, Homo sapiens; identical to SEQ ID NO: 134075
  chr22:37914008-37914038
  hypo

SEQ ID NO: 195656 - DNA, 590 bp, Homo sapiens; identical to SEQ ID NO: 134076
  chr22:37914843-37915433
  hypo

SEQ ID NO: 195657 - DNA, 124 bp, Homo sapiens; identical to SEQ ID NO: 134077
  chr22:37915686-37915810
  hypo

SEQ ID NO: 195658 - DNA, 767 bp, Homo sapiens; identical to SEQ ID NO: 58008
  chr22:37956435-37957202
  hypo

SEQ ID NO: 195659 - DNA, 30 bp, Homo sapiens
  chr22:37964197-37964227
  hypo
tctgagcccgggcttcgccgctctgactct

SEQ ID NO: 195660 - DNA, 194 bp, Homo sapiens; identical to SEQ ID NO: 101212
  chr22:37964557-37964751
  hypo

SEQ ID NO: 195661 - DNA, 96 bp, Homo sapiens; identical to SEQ ID NO: 101213
  chr22:38002843-38002939
  hypo

SEQ ID NO: 195662 - DNA, 119 bp, Homo sapiens
  chr22:38014383-38014502
  hypo
caaggcgtgggagggaggccacggcctctgatgcacctgggcgtcccctcccatcccccctccctgcacaggtgctggaaacatgcatgaagagctgcggcaagcggttccacgacgaa

SEQ ID NO: 195663 - DNA, 110 bp, Homo sapiens
  chr22:38017616-38017726
  hypo
ctgcagatgctggcccgcctgctgaagagctcccatcccgaagacctccgcgcagccaataagctcatcaaagagatggtgcaggaggtagcggccgagcccagagcaca

SEQ ID NO: 195664 - DNA, 209 bp, Homo sapiens
  chr22:38019343-38019552
  hypo
ggatggagaagatctcgaagagggtgaatgccatcgaggaggtgaacaacaatgtgaaactgctcacggagatggtgatgagccacagccagggcggcgcagcagctggcagcagcgaggacctcatgaaggtgcacctgcctccctgcctaccccactccctgcccactccacagcccacgcggaccctgacccgcccatcctgctgc

SEQ ID NO: 195665 - DNA, 31 bp, Homo sapiens; identical to SEQ ID NO: 101216
  chr22:38021053-38021084
  hypo

SEQ ID NO: 195666 - DNA, 260 bp, Homo sapiens
  chr22:38037234-38037494
  hypo
gggccggggcggggacgccaggtaggggcctgggttgagtcattcctcaagctgttggccatggggtccccaggggacaggagaaagtttcctgctcagggggagacagcctctcttgatccttaacctccatacctccttcccaggtagaacagcggctggagccggccaagcgggcagcccacaacatccacaagcggctgcaggcctgtctgcagggccagagcggggcagacatggacaagcgggtggtgagtggg

SEQ ID NO: 195667 - DNA, 30 bp, Homo sapiens
  chr22:38037815-38037845
  hypo
cttttgagggatacacgtttattaatcaag

SEQ ID NO: 195668 - DNA, 319 bp, Homo sapiens
  chr22:38060990-38061309
  hypo
tgtgccagtttctaacgccagccgcgtgaattcctgcagcagtaaccacaactgctatttgttaagtgctgttccatttacaaagcacttgcccctgtgttgcccagcgcccgtttggaggtaggcattacttggattccgctttctcaggagtccggagaaacttggggtggttgagtggtttgtccaaaggtccacggctgtcagggtgaaatcgcgaacctcaggcaggactgaccgagccaggccctgtttacctgcagtagctccacgcatcctcacagtacccacatgagataagtgccgtagacatccccat

SEQ ID NO: 195669 - DNA, 181 bp, Homo sapiens
  chr22:38061510-38061691
  hypo
tgacgctgtccctgccgccctcctgctgactgcgtctccatctccctacaggcaccgggagcctggccgctgcagtggagacagcctcgggacgccaggccctggtggtgggcaagcccagcccctacatgttcgagtgcatcacggagaacttcagcatcgaccccgcacgcacgcttat

SEQ ID NO: 195670 - DNA, 30 bp, Homo sapiens; identical to SEQ ID NO: 34333
  chr22:38062913-38062943
  hypo

SEQ ID NO: 195671 - DNA, 81 bp, Homo sapiens
  chr22:38064609-38064690
  hypo
gcctcacttttaaaggacatagaggagggagtcacttttcctggctttgggtgtggtcctgggagccgttgcagccattct

SEQ ID NO: 195672 - DNA, 148 bp, Homo sapiens
  chr22:38081626-38081774
  hypo
aatagggtgaggcaccgcgaagaccattggtctgggaccacacagctgtaggtgtgatgccagtatacaaatccaggcagtttggctccctcttggagactaccaacgagttgacatcagcatctaaagtaggggccagcacggtggc

SEQ ID NO: 195673 - DNA, 30 bp, Homo sapiens
  chr22:38084921-38084951
  hypo
aaccacacagtcaccgtgaccaccatcagt

SEQ ID NO: 195674 - DNA, 20 bp, Homo sapiens
  chr22:38085750-38085770
  hypo
agggccaggcatggtggctc

SEQ ID NO: 195675 - DNA, 20 bp, Homo sapiens
  chr22:38086369-38086389
  hypo
cacaccggtctttcatttta

SEQ ID NO: 195676 - DNA, 779 bp, Homo sapiens
  chr22:38086593-38087372
  hypo
tgatgcagcagggcgcgccaccacttgccagagccatggtggctcggggtgcccagcccaggtccccccagctactgctccatgtaagtcattgtcttgtgcctctttagggaggggctggagacaggtctgaggaggaggcgtcatccacggagaaaccaaccaaagccttgcccaggaagtccagagaccccctgctctctcagcggtgagtcttggcctgctgcctccccggtcccacccctcctggctggcagtagtgacctggcccttagggtggtgtggagcaggtgtagggcccggagcagccctctgcctgtccagtgatcctctgcctctcctcattgccccgtcctgtcccacccacccctgatagtgtctgacctccagtgcttttcgtgcctgggtgaagggcctgtgtctctgagctgagttgctggcaggcactctggaggtagagcaggccaactctggcatgaacttggcggtcctggcattcgcaacctgtcctgacatcccctccgtgagccaggtggtgagtcaccccacaatgcaatcttaaactgaggctttctgccctcccctaggatctcctccctcacagcatcactacatgcacacagccgcaaaaaggtcaagaggaaacatccccgacgggcccaggactccaaaaagcccccaagggcccctcgtaccagcaaggcccagcgccgccgtctcacaggcaaagcacggcacagcggggagtgagaccgagaacgaagcggtgccccagtcta

SEQ ID NO: 195677 - DNA, 98 bp, Homo sapiens
  chr22:38095178-38095276
  hypo
cgaaaacacattaggatttctttttggctaagttctgccacaaacttgctgtgtgactttaggctgttcacgtttgtcaaagacgtcgtcctcaactc

SEQ ID NO: 195678 - DNA, 30 bp, Homo sapiens
  chr22:38138727-38138757
  hypo
aagtccttggtagagcgaaggaggagcgaa

SEQ ID NO: 195679 - DNA, 18 bp, Homo sapiens
  chr22:38141156-38141174
  hypo
caccgcgcccggcaaggg

SEQ ID NO: 195680 - DNA, 243 bp, Homo sapiens; identical to SEQ ID NO: 101221
  chr22:38146507-38146750
  hypo

SEQ ID NO: 195681 - DNA, 45 bp, Homo sapiens; identical to SEQ ID NO: 101222
  chr22:38149209-38149254
  hypo

SEQ ID NO: 195682 - DNA, 45 bp, Homo sapiens; identical to SEQ ID NO: 34335
  chr22:38149553-38149598
  hypo

SEQ ID NO: 195683 - DNA, 91 bp, Homo sapiens; identical to SEQ ID NO: 101224
  chr22:38150055-38150146
  hypo

SEQ ID NO: 195684 - DNA, 30 bp, Homo sapiens; identical to SEQ ID NO: 101225
  chr22:38155560-38155590
  hypo

SEQ ID NO: 195685 - DNA, 78 bp, Homo sapiens; identical to SEQ ID NO: 101226
  chr22:38182163-38182241
  hypo

SEQ ID NO: 195686 - DNA, 174 bp, Homo sapiens
  chr22:38199825-38199999
  hypo
atctcagcccagggccgctgccaagcggacccggcacgtgagtaggaggtcggccgcagacaaggggtcctagggtctctgaggtctctcctgctggcctctgggcccctaaagcccctcgagcttcagaactccctacagacagtggcgccccgtgtccgcctcgtctacacc

SEQ ID NO: 195687 - DNA, 87 bp, Homo sapiens; identical to SEQ ID NO: 101228
  chr22:38208854-38208941
  hypo

SEQ ID NO: 195688 - DNA, 389 bp, Homo sapiens; identical to SEQ ID NO: 101229
  chr22:38209274-38209663
  hypo

SEQ ID NO: 195689 - DNA, 66 bp, Homo sapiens; identical to SEQ ID NO: 101230
  chr22:38211828-38211894
  hypo

SEQ ID NO: 195690 - DNA, 31 bp, Homo sapiens; identical to SEQ ID NO: 101231
  chr22:38212284-38212315
  hypo

SEQ ID NO: 195691 - DNA, 39 bp, Homo sapiens
  chr22:38238231-38238270
  hypo
gcctgggtggtaaagcgagactctcgtctcaaaaaaaga

SEQ ID NO: 195692 - DNA, 30 bp, Homo sapiens
  chr22:38238711-38238741
  hypo
ttatggtcaatacaacgcttccaaattctt

SEQ ID NO: 195693 - DNA, 30 bp, Homo sapiens; identical to SEQ ID NO: 101232
  chr22:38244117-38244147
  hypo

SEQ ID NO: 195694 - DNA, 23 bp, Homo sapiens
  chr22:38256657-38256680
  hypo
gcgtgagccactgtgcctggcct

SEQ ID NO: 195695 - DNA, 21 bp, Homo sapiens
  chr22:38257396-38257417
  hypo
aagtaaagattcctggccagg

SEQ ID NO: 195696 - DNA, 30 bp, Homo sapiens; identical to SEQ ID NO: 34337
  chr22:38261623-38261653
  hypo

SEQ ID NO: 195697 - DNA, 50 bp, Homo sapiens
  chr22:38266334-38266384
  hypo
ggaggtatacacaagcggaggtgagtgcagcaggccgacagccgtggcct

SEQ ID NO: 195698 - DNA, 30 bp, Homo sapiens; identical to SEQ ID NO: 101236
  chr22:38280658-38280688
  hypo

SEQ ID NO: 195699 - DNA, 33 bp, Homo sapiens; identical to SEQ ID NO: 101237
  chr22:38285335-38285368
  hypo

SEQ ID NO: 195700 - DNA, 30 bp, Homo sapiens
  chr22:38294992-38295022
  hypo
caactgccactccagcgaccagcgccttcc

SEQ ID NO: 195701 - DNA, 324 bp, Homo sapiens; identical to SEQ ID NO: 101238
  chr22:38328788-38329112
  hypo

SEQ ID NO: 195702 - DNA, 30 bp, Homo sapiens; identical to SEQ ID NO: 34338
  chr22:38339957-38339987
  hypo

SEQ ID NO: 195703 - DNA, 267 bp, Homo sapiens; identical to SEQ ID NO: 34339
  chr22:38363620-38363887
  hypo

SEQ ID NO: 195704 - DNA, 30 bp, Homo sapiens; identical to SEQ ID NO: 34340
  chr22:38364188-38364218
  hypo

SEQ ID NO: 195705 - DNA, 68 bp, Homo sapiens; identical to SEQ ID NO: 34341
  chr22:38364988-38365056
  hypo

SEQ ID NO: 195706 - DNA, 338 bp, Homo sapiens; identical to SEQ ID NO: 101243
  chr22:38369806-38370144
  hypo

SEQ ID NO: 195707 - DNA, 131 bp, Homo sapiens
  chr22:38375997-38376128
  hypo
caggcacctcctagccggcagcagcattcctctgcggcttagcctccctgtctactccccccaccccggccctgagcccagccctagccccagctttctcagagggtccctccagccgagactctgtcaga

SEQ ID NO: 195708 - DNA, 30 bp, Homo sapiens
  chr22:38376512-38376542
  hypo
ggccactgccatccccgaccccagctccct

SEQ ID NO: 195709 - DNA, 1228 bp, Homo sapiens; identical to SEQ ID NO: 101244
  chr22:38378820-38380048
  hypo

SEQ ID NO: 195710 - DNA, 311 bp, Homo sapiens; identical to SEQ ID NO: 101245
  chr22:38380261-38380572
  hypo

SEQ ID NO: 195711 - DNA, 30 bp, Homo sapiens; identical to SEQ ID NO: 101246
  chr22:38380914-38380944
  hypo

SEQ ID NO: 195712 - DNA, 30 bp, Homo sapiens
  chr22:38381534-38381564
  hypo
aactgagggcagccccgccggggtgttgag

SEQ ID NO: 195713 - DNA, 252 bp, Homo sapiens
  chr22:38381979-38382231
  hypo
ccccccagttttcctcgacgccacccccggcgctgccaaccctcctccccccgcctcccttctcttccctgtgcccagactcttgttcggggccttgaaacagtgagctgtctttgttcgaaatacaggtgaacggcaatcatgtgattaacacacacacacataaaaagctttttaacagcgcccgctcggcctcagaaccgcccggagaggagccgccctggatggacagagggacgagggacgagcatc

SEQ ID NO: 195714 - DNA, 110 bp, Homo sapiens
  chr22:38415280-38415390
  hypo
cgcttcttcagcccccgggcttgacattccccaagggtcccggccatccccacatgactggcatctgtgccctgggcaaccatcagctgagagcccgtgactactgccca

SEQ ID NO: 195715 - DNA, 30 bp, Homo sapiens
  chr22:38423098-38423128
  hypo
gtgtgtcgtggagtgcgagatggcataggg

SEQ ID NO: 195716 - DNA, 197 bp, Homo sapiens; identical to SEQ ID NO: 101248
  chr22:38424122-38424319
  hypo

SEQ ID NO: 195717 - DNA, 802 bp, Homo sapiens; identical to SEQ ID NO: 101249
  chr22:38434364-38435166
  hypo

SEQ ID NO: 195718 - DNA, 172 bp, Homo sapiens
  chr22:38448307-38448479
  hypo
gcggtggctgcagagcggacagccaggcacaacgcgggcatgcacaagaccagctcacccgtccacaaagtatacagacccctgagctccacggcagccctgagtcagcaggtggcgacagtggcaggtgcggaaagctgggggctctgtggcgggccgcgtgctccaggag

SEQ ID NO: 195719 - DNA, 115 bp, Homo sapiens; identical to SEQ ID NO: 101250
  chr22:38470383-38470498
  hypo

SEQ ID NO: 195720 - DNA, 143 bp, Homo sapiens
  chr22:38474474-38474617
  hypo
gggcctccaggttgccgggttcctctgcaacaacaggcaggggctcagagtccccttcagcctcagcgtcctcagtgtcactggctccgccctcagtgcctgggcctgacggggcagctttagcacaacgcaggcagcagttg

SEQ ID NO: 195721 - DNA, 30 bp, Homo sapiens; identical to SEQ ID NO: 101251
  chr22:38479317-38479347
  hypo

SEQ ID NO: 195722 - DNA, 30 bp, Homo sapiens
  chr22:38483077-38483107
  hypo
tgacacccttgccggcgtcctcacccccgc

SEQ ID NO: 195723 - DNA, 30 bp, Homo sapiens; identical to SEQ ID NO: 101252
  chr22:38484007-38484037
  hypo

SEQ ID NO: 195724 - DNA, 35 bp, Homo sapiens; identical to SEQ ID NO: 101253
  chr22:38486387-38486422
  hypo

SEQ ID NO: 195725 - DNA, 327 bp, Homo sapiens
  chr22:38506276-38506603
  hypo
catctgggagttgggggttcccgctgtatggctgagtgctctcggggatccttacccccgtacccacccctggcccagcctggctccaggcttccctttccaggacatctgtagccccggctggccctccgtcctccagagcgggcctgatttctgtgccctgggaggaggggctcaggcctggcttggccacccatgtgctcaccttgtagatggccatggtggacctgtaaaactggtccatctcgggggccatggaggggctgtcccgggtctgagcaggaggctgggagctggtggcgatggcacagccgggagcagtggtag

SEQ ID NO: 195726 - DNA, 545 bp, Homo sapiens
  chr22:38506927-38507472
  hypo
gcccaccttactgggcgggcgctgcccgatgccctcccccaggactctctctgccagacccagcagcagcagcccctggaggggaacgccgctttacttctcactgtcctcaggcctgcggctcacagtggggccacgccctctgagcttggctcccacagccgctctggcccgcccagctcctccacttgccggagcaggagcagcacaaacgctggagttgcccagccctgggcagacctcggccctgcacacgcgctgcctgtccacgcggagtccccggcctctctgggtgacaaatggggctctccctggtcctccaagatgaagttgaagattgtggccctccttgggcctgccgggggtatgtgggcctggcagctgcctctgcataccctaagggccggtttaggggaggcctagaggaaagaggaggtgtccctgcccagggatcctggaaaacagagtgtccgggtacaaaggaaaagtccggtcaaggccaagggtcaaggccgaggggagccgggggtcaggggaacaggtgg

SEQ ID NO: 195727 - DNA, 30 bp, Homo sapiens; identical to SEQ ID NO: 34349
  chr22:38508132-38508162
  hypo

SEQ ID NO: 195728 - DNA, 322 bp, Homo sapiens; identical to SEQ ID NO: 101257
  chr22:38508431-38508753
  hypo

SEQ ID NO: 195729 - DNA, 122 bp, Homo sapiens; identical to SEQ ID NO: 101258
  chr22:38512226-38512348
  hypo

SEQ ID NO: 195730 - DNA, 200 bp, Homo sapiens
  chr22:38516843-38517043
  hypo
tagggcctggagccccggaacacctcatccttcatgcgaaagtacatgccgcgcatgtaggccatggacttacctaggaacaaaggggtcagaggcggggagatgcagcggccacacgcagggctcccgtagaacagcctgcagagcgcctgaacgcaggaggtggcaggaggaagcgggtttaccgaggcctaagcaaa

SEQ ID NO: 195731 - DNA, 30 bp, Homo sapiens; identical to SEQ ID NO: 101259
  chr22:38517541-38517571
  hypo

SEQ ID NO: 195732 - DNA, 86 bp, Homo sapiens
  chr22:38520280-38520366
  hypo
aggagccactgcgcctactctctgtgcatatttttgagtgacggagggagtgtagctcagaggttaggtgacgggaaccaagtcat

SEQ ID NO: 195733 - DNA, 256 bp, Homo sapiens; identical to SEQ ID NO: 101261
  chr22:38520659-38520915
  hypo

SEQ ID NO: 195734 - DNA, 127 bp, Homo sapiens
  chr22:38525494-38525621
  hypo
ctccccaaagtcattcggggtgtccacttctgctccgaacacgatgagggccttgatcatctccacgttgtctttctgttggagatggagagaggataagacgtgcaactgccggggaagtgaagaa

SEQ ID NO: 195735 - DNA, 30 bp, Homo sapiens; identical to SEQ ID NO: 101263
  chr22:38526041-38526071
  hypo

SEQ ID NO: 195736 - DNA, 257 bp, Homo sapiens; identical to SEQ ID NO: 101264
  chr22:38528841-38529098
  hypo

SEQ ID NO: 195737 - DNA, 30 bp, Homo sapiens
  chr22:38531122-38531152
  hypo
gaagctagggtctgcgtggcgtgggatgaa

SEQ ID NO: 195738 - DNA, 32 bp, Homo sapiens; identical to SEQ ID NO: 101265
  chr22:38531760-38531792
  hypo

SEQ ID NO: 195739 - DNA, 124 bp, Homo sapiens
  chr22:38541363-38541487
  hypo
gggaaccgaggcctgcggcccccactgcccacacaagcaggtacacacacgttgtccaaatggtcttgttcccttgctcacctgatgatacggctgtgatggaagcactcgcggatccctagct

SEQ ID NO: 195740 - DNA, 30 bp, Homo sapiens
  chr22:38541737-38541767
  hypo
aaggtccccaggctgcggcctggccagctc

SEQ ID NO: 195741 - DNA, 399 bp, Homo sapiens; identical to SEQ ID NO: 134108
  chr22:38577753-38578152
  hypo

SEQ ID NO: 195742 - DNA, 38 bp, Homo sapiens; identical to SEQ ID NO: 34355
  chr22:38578431-38578469
  hypo

SEQ ID NO: 195743 - DNA, 37 bp, Homo sapiens; identical to SEQ ID NO: 34356
  chr22:38578708-38578745
  hypo

SEQ ID NO: 195744 - DNA, 30 bp, Homo sapiens; identical to SEQ ID NO: 34357
  chr22:38580938-38580968
  hypo

SEQ ID NO: 195745 - DNA, 143 bp, Homo sapiens; identical to SEQ ID NO: 101270
  chr22:38592933-38593076
  hypo

SEQ ID NO: 195746 - DNA, 31 bp, Homo sapiens; identical to SEQ ID NO: 101271
  chr22:38595405-38595436
  hypo

SEQ ID NO: 195747 - DNA, 365 bp, Homo sapiens; identical to SEQ ID NO: 101272
  chr22:38618368-38618733
  hypo

SEQ ID NO: 195748 - DNA, 387 bp, Homo sapiens
  chr22:38633206-38633593
  hypo
ggaaggagttatccccgcttacagataaggaaattcaggcatggagcacctaagacacttaccccaagagcccccgggctttgagaaaagactcagtacttgccctctcacgtttctgcgtgcagctcccagggtcaggaggcagacacactcatataacttgctataacttcaatacacactcgctgtgtgcctactgtgtgccacacactgcgtgcgggaccccgatgaccctgggcacactgggccattctaagctcaccccctgtgcacaccttcagcgcctaaagctggcctcatggcccagccttctgctgcagagaaacactctggttacttggaaagactgggggcattctgtatttcagataacgggtggatgagcct

SEQ ID NO: 195749 - DNA, 115 bp, Homo sapiens; identical to SEQ ID NO: 101274
  chr22:38634942-38635057
  hypo

SEQ ID NO: 195750 - DNA, 90 bp, Homo sapiens
  chr22:38639962-38640052
  hypo
gtggcggggaacagacggatggaaaggagggaccccacgcagagcagaagagcttcccaggccggggacacagcacgtatcaagcccttg

SEQ ID NO: 195751 - DNA, 124 bp, Homo sapiens
  chr22:38687259-38687383
  hypo
gtagacacaggagaacgggaattcgggctggcaggcggggcgggccgtggcacctgctgtcttgggaaacacaggtcaatacatccacacacacacacacacacacacacgcaggggacgccgg

SEQ ID NO: 195752 - DNA, 559 bp, Homo sapiens
  chr22:38694439-38694998
  hypo
tgcagaacaggagcagcaggacggtgtaggcagcaatcagggcagcagggggcgccgccagcaccacccatgccctgctgcgggcacccaggagggaccccaggtgaagccagatcctccttgttccgacgggagacagcgccctgcctggccctgctgcccatggtggcacaagctgtcagcacggatgaggctggagggctctgggaccccagtgaggtcaaccacactgtccagctcgtacctcccgtctgtcgggagcccctcccgccaccagctcactctggccctctgagtcagggccttccccatccagtcccccaagcccgccttggcctccaggtgactcacgaatttcagcatgttccagtcaaagacgtagtcataggagaagccctgccggtggaagaggttgcggaagagctgacgtaggtaagagtagtcgggcttgtcgtcaaaccgcagggagcggcagaagttgaggtatgttgagaattcggctggagggtgttgcagaggatagagaaggccactgtgaggcccacgctcccagaccccc

SEQ ID NO: 195753 - DNA, 39 bp, Homo sapiens
  chr22:38695214-38695253
  hypo
tgcccacagctcttccgctgccctcgccaagcaccctgg

SEQ ID NO: 195754 - DNA, 16 bp, Homo sapiens
  chr22:38695802-38695818
  hypo
gcgcctagccccagcg

SEQ ID NO: 195755 - DNA, 31 bp, Homo sapiens; identical to SEQ ID NO: 101277
  chr22:38723520-38723551
  hypo

SEQ ID NO: 195756 - DNA, 128 bp, Homo sapiens
  chr22:38742146-38742274
  hypo
tcattttactggcgccggccttcttcagcgtcaactttctggtcgtttgaccaaagtggaccattgtttccccaaattacactttaataaaaaaaaaagaagaaaagctaagccgattgaatgatggt

SEQ ID NO: 195757 - DNA, 31 bp, Homo sapiens; identical to SEQ ID NO: 101278
  chr22:38776947-38776978
  hypo

SEQ ID NO: 195758 - DNA, 275 bp, Homo sapiens
  chr22:38795380-38795655
  hypo
cagattttcttcaagcgtgaggaaggtcgagaagataaagtttttaaatgagtatcttcagaaagctatttaattgttctgatttttttttttctgaaaggactgggcttgcgctattctaacttgagatttctaaacttagactaggttccaagaatctacttggttttgatagaaatccatttggaggaaaccggggacaaaaaaaaacaaaaaaccgctaccctttcccctcctccctacgcacaactcatttaaatcgtttcccaactgtt

SEQ ID NO: 195759 - DNA, 30 bp, Homo sapiens; identical to SEQ ID NO: 34361
  chr22:38812938-38812968
  hypo

SEQ ID NO: 195760 - DNA, 94 bp, Homo sapiens
  chr22:38818417-38818511
  hypo
atccatcaatacccagaaaagtcaatacctggaaaaaactgcaatgagaaaagctagacgcaggaagcagtcatctgatcgcagccatgggctc

SEQ ID NO: 195761 - DNA, 30 bp, Homo sapiens
  chr22:38823882-38823912
  hypo
accgtggaagaaggcgatacaccagaagag

SEQ ID NO: 195762 - DNA, 159 bp, Homo sapiens; identical to SEQ ID NO: 101280
  chr22:38827316-38827475
  hypo

SEQ ID NO: 195763 - DNA, 70 bp, Homo sapiens
  chr22:38845517-38845587
  hypo
cagccctcacgcatgcgcatgcgtgtgtgcctgtgtctgtgcctgagcatgcacgcgcaggctgaaaggg

SEQ ID NO: 195764 - DNA, 30 bp, Homo sapiens
  chr22:38845941-38845971
  hypo
ccaccaccccgtgagcgcccgtgtgcgcgc

SEQ ID NO: 195765 - DNA, 31 bp, Homo sapiens
  chr22:38864954-38864985
  hypo
aacagatccagagccacgaaaggctgccaga

SEQ ID NO: 195766 - DNA, 160 bp, Homo sapiens; identical to SEQ ID NO: 34362
  chr22:38874141-38874301
  hypo

SEQ ID NO: 195767 - DNA, 30 bp, Homo sapiens
  chr22:38882349-38882379
  hypo
catccttgactcctcgaagccttcggtcac

SEQ ID NO: 195768 - DNA, 140 bp, Homo sapiens
  chr22:38884001-38884141
  hypo
gaagaaggtataggcggtacccttgttggtgctacgggctgttcggccaatacggtgcacataatcctctgagctgtttggatagtcatagttgatcacaaacttgacatcttccacatcttccacgtcaatgatgagtc

SEQ ID NO: 195769 - DNA, 82 bp, Homo sapiens
  chr22:38885333-38885415
  hypo
cgggaccactggagcgcggggagcatgcatcaagggtccgtggcagtgagaagtccccacacacgctcgctctgtgaactgg

SEQ ID NO: 195770 - DNA, 31 bp, Homo sapiens; identical to SEQ ID NO: 34363
  chr22:38894491-38894522
  hypo

SEQ ID NO: 195771 - DNA, 149 bp, Homo sapiens
  chr22:38904741-38904890
  hypo
ttacttgttcaccaccgtgacccagtgcctacctggcacagtgcctgaccttttagccattcgaccacgccatacccttgtccagtgagtctgtgactgtccctttgtgtttctgggccaactgacatctcaacggcttttgttttttg

SEQ ID NO: 195772 - DNA, 176 bp, Homo sapiens; identical to SEQ ID NO: 134124
  chr22:38966005-38966181
  hypo

SEQ ID NO: 195773 - DNA, 30 bp, Homo sapiens
  chr22:38974258-38974288
  hypo
acgaaggctaagagtcgctaggtgatagga

SEQ ID NO: 195774 - DNA, 85 bp, Homo sapiens; identical to SEQ ID NO: 101285
  chr22:38995554-38995639
  hypo

SEQ ID NO: 195775 - DNA, 31 bp, Homo sapiens; identical to SEQ ID NO: 101286
  chr22:39026304-39026335
  hypo

SEQ ID NO: 195776 - DNA, 30 bp, Homo sapiens; identical to SEQ ID NO: 101287
  chr22:39041567-39041597
  hypo

SEQ ID NO: 195777 - DNA, 20 bp, Homo sapiens
  chr22:39095041-39095061
  hypo
tacttggccaaaacctgaac

SEQ ID NO: 195778 - DNA, 31 bp, Homo sapiens; identical to SEQ ID NO: 34365
  chr22:39105317-39105348
  hypo

SEQ ID NO: 195779 - DNA, 155 bp, Homo sapiens; identical to SEQ ID NO: 101290
  chr22:39122030-39122185
  hypo

SEQ ID NO: 195780 - DNA, 230 bp, Homo sapiens; identical to SEQ ID NO: 34366
  chr22:39132168-39132398
  hypo

SEQ ID NO: 195781 - DNA, 72 bp, Homo sapiens
  chr22:39144763-39144835
  hypo
gaacgtcttcagggacgagaagcgcctggaccacgcgggagggcaggacgggggaggcggaggtgtgagggg

SEQ ID NO: 195782 - DNA, 30 bp, Homo sapiens; identical to SEQ ID NO: 101293
  chr22:39145447-39145477
  hypo

SEQ ID NO: 195783 - DNA, 342 bp, Homo sapiens
  chr22:39148551-39148893
  hypo
ccaccgagctccctccgctgctgctgctgccgtcatcgtcaccctgggagtagcgcgtgaggcgctggcttcttcgggacatgatgaggtgggatgtggactcttcccctgaagagaatctaaggagagagaggaggaggactggatgtgaggcctggggctgtccccagctcctctctagaggaggtgggacagaggcatcgcctcacagccgagaacagaccacccccccggcccccggcccccggcgttcagtctaaacagccctgatggggggcaaggcagggatctgtgaagcacccctgcactgtgcagcggctggagtcacgcccggcctggggc

SEQ ID NO: 195784 - DNA, 98 bp, Homo sapiens
  chr22:39149135-39149233
  hypo
ttgctgacatgtgctcgttcatcgagggccccaacgaaccttgatggaaaacctttcccatgtagaccccacctatgttctttttttttttttttttt

SEQ ID NO: 195785 - DNA, 43 bp, Homo sapiens; identical to SEQ ID NO: 101294
  chr22:39175178-39175221
  hypo

SEQ ID NO: 195786 - DNA, 352 bp, Homo sapiens; identical to SEQ ID NO: 134137
  chr22:39239092-39239444
  hypo

SEQ ID NO: 195787 - DNA, 30 bp, Homo sapiens; identical to SEQ ID NO: 134138
  chr22:39239700-39239730
  hypo

SEQ ID NO: 195788 - DNA, 190 bp, Homo sapiens; identical to SEQ ID NO: 134139
  chr22:39239934-39240124
  hypo

SEQ ID NO: 195789 - DNA, 249 bp, Homo sapiens; identical to SEQ ID NO: 134143
  chr22:39268981-39269230
  hypo

SEQ ID NO: 195790 - DNA, 30 bp, Homo sapiens; identical to SEQ ID NO: 58044
  chr22:39332607-39332637
  hypo

SEQ ID NO: 195791 - DNA, 287 bp, Homo sapiens
  chr22:39411544-39411831
  hypo
ctgaggactccggtgcgggggtctctgcattggggtttctctcttgtgccttcagaaacccgatgaaggcaatgtatccaggcacattctacttccaatttaaaaacctatgggaagccaacgatcggaacgaaacttggctgtgcttcaccgtggaaggtataaagcgccgctcagttgtctcctggaagacgggcgtcttccgaaaccaggtagcaccaaagtcctagttacaccctaaataggagctaagcagctgggaatgcagaaaacgcaacaataagtga

SEQ ID NO: 195792 - DNA, 30 bp, Homo sapiens
  chr22:39424177-39424207
  hypo
cacaggctcctcctccgtgagcaccattca

SEQ ID NO: 195793 - DNA, 90 bp, Homo sapiens; identical to SEQ ID NO: 101297
  chr22:39424922-39425012
  hypo

SEQ ID NO: 195794 - DNA, 84 bp, Homo sapiens
  chr22:39425581-39425665
  hypo
aaacacaatacgtgacgtgccccgcgtgggctctgctatgtgtactttcctcttacatttctttcttttttttttttttaagac

SEQ ID NO: 195795 - DNA, 96 bp, Homo sapiens
  chr22:39444960-39445056
  hypo
gcctgggcagcagagggagactatgtcccaaacaaaaacaaaaacaaaaaaaacaaaaagagtagcctgggcctgggaattcggtgtgataccaac

SEQ ID NO: 195796 - DNA, 121 bp, Homo sapiens
  chr22:39449269-39449390
  hypo
ggattacaggcgtgagccactggcccggcggcacaaccaaatcttattaaactcaccctaggctggccgcggtgactcatgcctataatcccccagcaatttgggaggcagaggtgagaga

SEQ ID NO: 195797 - DNA, 30 bp, Homo sapiens
  chr22:39472240-39472270
  hypo
gtgagccactgtgcccgcctgggatcatat

SEQ ID NO: 195798 - DNA, 205 bp, Homo sapiens
  chr22:39474505-39474710
  hypo
ccctcctctgtaagacgggaatggcccctgccagcctagggcagcctcacatgagctcacccccgcgcagcacttagaagactggcctgggcctcagaattcggttctaccatgatttaacaataataatatacagaggtgaaatgtcaggaaggaactgagctgaaaggttaaaagctgttattttggggtgaagagttttatt

SEQ ID NO: 195799 - DNA, 25 bp, Homo sapiens
  chr22:39474769-39474794
  hypo
tgtagtggcgcgatcttggctcact

SEQ ID NO: 195800 - DNA, 121 bp, Homo sapiens
  chr22:39475633-39475754
  hypo
aatatttaattaatccaatgtggctaacatattacttcaacattaattaacataaaattcttgacaagataatgaagtttctttttcttgtcacaccgagtctttgaaatgagctgcgtgg

SEQ ID NO: 195801 - DNA, 124 bp, Homo sapiens; identical to SEQ ID NO: 101298
  chr22:39529108-39529232
  hypo

SEQ ID NO: 195802 - DNA, 141 bp, Homo sapiens
  chr22:39530872-39531013
  hypo
actccttcccatgccacggctggccatcaccccaccccaccccagcccagagagtgcgccccgggcaaccccagggtcggccagctcagccctgcctctgggccccacagagcactcgcgtcccagcgtttactcctttga

SEQ ID NO: 195803 - DNA, 30 bp, Homo sapiens; identical to SEQ ID NO: 34370
  chr22:39538288-39538318
  hypo

SEQ ID NO: 195804 - DNA, 566 bp, Homo sapiens; identical to SEQ ID NO: 134147
  chr22:39549057-39549623
  hypo

SEQ ID NO: 195805 - DNA, 30 bp, Homo sapiens; identical to SEQ ID NO: 101301
  chr22:39552209-39552239
  hypo

SEQ ID NO: 195806 - DNA, 40 bp, Homo sapiens; identical to SEQ ID NO: 34371
  chr22:39571320-39571360
  hypo

SEQ ID NO: 195807 - DNA, 48 bp, Homo sapiens; identical to SEQ ID NO: 58046
  chr22:39638592-39638640
  hypo

SEQ ID NO: 195808 - DNA, 134 bp, Homo sapiens; identical to SEQ ID NO: 101304
  chr22:39686244-39686378
  hypo

SEQ ID NO: 195809 - DNA, 312 bp, Homo sapiens
  chr22:39687859-39688171
  hypo
caagaccccattccacgaggagagaaagagggagagtgaaggaggtgaattgggcagcaagagatgttttaatccaaggaaaaccctacagggcgatcagagaccccttacacagacgaggccccgacggttggtggcacagggaaccgacgcctgcccccatcactcttccaaggccccacagaggttgctcaggcttgcagggggtggggacccaggaaggctcggtcagccagcgcctccctgggccattccaggctctgagctgccgtgtggcggggtgggcaggctgccagccgagggagcccacca

SEQ ID NO: 195810 - DNA, 357 bp, Homo sapiens
  chr22:39690524-39690881
  hypo
aggactcctcgctccgcactggacacccctgcactgccttctgggtgtgccaggttggcatggggaggctgggctcacacccaaatcaggacatagcctatcgtgagggtctgggtgagctgggaggtgttcagaatagaagagcaacccatgaaggctccccggaggaagcaggcctggcgctgagtcacaggagcctggggcagggtaacccccacctgaagtcactgtctccccagcagtgacatcattagcaagccagaatgcgcagggcatacagctggaggaccaggcaagctgaggcgggggccaagtgggtagttcggggccaacccccatcagcggccaatggcctct

SEQ ID NO: 195811 - DNA, 42 bp, Homo sapiens
  chr22:39744065-39744107
  hypo
agtgctgggattataggcgtgagccaccgcggatgctgggca

SEQ ID NO: 195812 - DNA, 155 bp, Homo sapiens; identical to SEQ ID NO: 34374
  chr22:39755184-39755339
  hypo

SEQ ID NO: 195813 - DNA, 238 bp, Homo sapiens; identical to SEQ ID NO: 101307
  chr22:39756396-39756634
  hypo

SEQ ID NO: 195814 - DNA, 30 bp, Homo sapiens
  chr22:39756990-39757020
  hypo
gggaactgcactgatcggtcgtccttctag

SEQ ID NO: 195815 - DNA, 230 bp, Homo sapiens; identical to SEQ ID NO: 101308
  chr22:39770341-39770571
  hypo

SEQ ID NO: 195816 - DNA, 30 bp, Homo sapiens
  chr22:39771480-39771510
  hypo
tctcagtgggcccctcgctaaacctggggc

SEQ ID NO: 195817 - DNA, 150 bp, Homo sapiens
  chr22:39772139-39772289
  hypo
aacgaagggacggacgcagcccgggccgccatcgccttctcctttttctccatcttcacctgggtgagtacagccaccgcgcaccagcccacactcgtcccctttccccactgagcccctggatgggtggcctttcgctagcctgggacc

SEQ ID NO: 195818 - DNA, 137 bp, Homo sapiens; identical to SEQ ID NO: 101310
  chr22:39773594-39773731
  hypo

SEQ ID NO: 195819 - DNA, 231 bp, Homo sapiens; identical to SEQ ID NO: 101311
  chr22:39777670-39777901
  hypo

SEQ ID NO: 195820 - DNA, 99 bp, Homo sapiens; identical to SEQ ID NO: 101312
  chr22:39778979-39779078
  hypo

SEQ ID NO: 195821 - DNA, 37 bp, Homo sapiens
  chr22:39785122-39785159
  hypo
tagggccgggcacggcgcctcacgctgtaatcccagc

SEQ ID NO: 195822 - DNA, 30 bp, Homo sapiens; identical to SEQ ID NO: 34378
  chr22:39794803-39794833
  hypo

SEQ ID NO: 195823 - DNA, 18 bp, Homo sapiens
  chr22:39809705-39809723
  hypo
gggcgtgagccactgcac

SEQ ID NO: 195824 - DNA, 713 bp, Homo sapiens; identical to SEQ ID NO: 58053
  chr22:39852943-39853656
  hypo

SEQ ID NO: 195825 - DNA, 375 bp, Homo sapiens; identical to SEQ ID NO: 58054
  chr22:39853690-39854065
  hypo

SEQ ID NO: 195826 - DNA, 50 bp, Homo sapiens
  chr22:39872955-39873005
  hypo
ccgggactccaggatcggccatgttctgcagccaccgcctctacctgtct

SEQ ID NO: 195827 - DNA, 211 bp, Homo sapiens; identical to SEQ ID NO: 101317
  chr22:39877225-39877436
  hypo

SEQ ID NO: 195828 - DNA, 30 bp, Homo sapiens; identical to SEQ ID NO: 34381
  chr22:39895718-39895748
  hypo

SEQ ID NO: 195829 - DNA, 364 bp, Homo sapiens; identical to SEQ ID NO: 101319
  chr22:39907958-39908322
  hypo

SEQ ID NO: 195830 - DNA, 30 bp, Homo sapiens; identical to SEQ ID NO: 101320
  chr22:39929926-39929956
  hypo

SEQ ID NO: 195831 - DNA, 38 bp, Homo sapiens
  chr22:39930312-39930350
  hypo
ttctaggcggagaccgctgtagcgaggacctatcccct

SEQ ID NO: 195832 - DNA, 30 bp, Homo sapiens; identical to SEQ ID NO: 101322
  chr22:39933196-39933226
  hypo

SEQ ID NO: 195833 - DNA, 31 bp, Homo sapiens; identical to SEQ ID NO: 101323
  chr22:39984783-39984814
  hypo

SEQ ID NO: 195834 - DNA, 30 bp, Homo sapiens
  chr22:40018187-40018217
  hypo
ggcgcgccaaagacacgtgtgaaatggaca

SEQ ID NO: 195835 - DNA, 132 bp, Homo sapiens
  chr22:40024708-40024840
  hypo
ctgattagttggcgccggcaatggcaggagcagcagacggcctctcccagccgcccagcccctttactgacctggccagtccagggagagtggcccccagtggccaggccacagcctcggctcccctcgccc

SEQ ID NO: 195836 - DNA, 142 bp, Homo sapiens
  chr22:40025210-40025352
  hypo
tccacatgacgctcccgggccagactgttctcccctgaactccagaccccaagatctggcaaagcgactccatggggatgtaccccggccatcccaagctccacatctccagatggagccccacccccgctgaaggccgctc

SEQ ID NO: 195837 - DNA, 136 bp, Homo sapiens
  chr22:40025721-40025857
  hypo
acccccgggaggcagcgaccacacagctgtggagcccacaggcctgaccccctttcagagatgtgtatgccgttcggggcgctgtccacaggggcgtctgcacaggatcctgcagactgtgcggctgatgctctct

SEQ ID NO: 195838 - DNA, 221 bp, Homo sapiens; identical to SEQ ID NO: 34383
  chr22:40026478-40026699
  hypo

SEQ ID NO: 195839 - DNA, 205 bp, Homo sapiens; identical to SEQ ID NO: 101325
  chr22:40033277-40033482
  hypo

SEQ ID NO: 195840 - DNA, 30 bp, Homo sapiens
  chr22:40042154-40042184
  hypo
ggagcgaggcctcagcgatcttttcctgtc

SEQ ID NO: 195841 - DNA, 327 bp, Homo sapiens
  chr22:40042591-40042918
  hypo
atcaacctgtgcctcgttgtcatagcgacccagttctcggagaccaagcaacgggagcaccggctgatgctggagcagcggcagcgctacctgtcctccagcacggtggccagctacgccgagcctggcgactgctacgaggagatcttccagtatgtctgccacatcctgcgcaaggccaagcgccgcgccctgggcctctaccaggccctgcagagccggcgccaggccctgggcccggaggccccggcccccgccaaacctgggccccacgccaaggagccccggcactaccgtaagtggccctgcatccgacgcggcactcag

SEQ ID NO: 195842 - DNA, 428 bp, Homo sapiens; identical to SEQ ID NO: 34385
  chr22:40045202-40045630
  hypo

SEQ ID NO: 195843 - DNA, 217 bp, Homo sapiens; identical to SEQ ID NO: 101328
  chr22:40045721-40045938
  hypo

SEQ ID NO: 195844 - DNA, 30 bp, Homo sapiens; identical to SEQ ID NO: 34387
  chr22:40048319-40048349
  hypo

SEQ ID NO: 195845 - DNA, 149 bp, Homo sapiens; identical to SEQ ID NO: 134172
  chr22:40060841-40060990
  hypo

SEQ ID NO: 195846 - DNA, 72 bp, Homo sapiens
  chr22:40061912-40061984
  hypo
ctgggcgtggacacccgcaacatcaccaaccgctcggactgcatggccgccaactaccgctgggtccatcac

SEQ ID NO: 195847 - DNA, 30 bp, Homo sapiens; identical to SEQ ID NO: 101330
  chr22:40073433-40073463
  hypo

SEQ ID NO: 195848 - DNA, 547 bp, Homo sapiens
  chr22:40074971-40075518
  hypo
tggggcagggcagcccggggccatctcgggggttgaatctcggtcttgctgcctccgagcgtggccctgggctggcctctgcctccagcagcctctgggatgtctccgtcctcatcctcaccgccctccctgccacgcaggacacgctgcgggactgcacccacgacgagcgcagctgcctgagcagcctgcagtttgtgtcgccgctgtacttcgtgagcttcgtgctcaccgcgcagttcgtgctcatcaacgtggtggtggctgtgctcatgaagcacctggacgacagcaacaaggaggcgcaggaggacgccgagatggatgccgagctcgagctggagatggcccatggcctgggccctggcccgaggctgcctaccggctccccgggcgcccctggccgagggccgggaggggcgggcggcgggggcgacaccgagggcggcttgtgccggcgctgctactcgcctgcccaggtgggcaggggctggagaggtgtgagggtcgccagagggggggcaccgcagggccagatgggcagcag

SEQ ID NO: 195849 - DNA, 181 bp, Homo sapiens; identical to SEQ ID NO: 134173
  chr22:40081594-40081775
  hypo

SEQ ID NO: 195850 - DNA, 337 bp, Homo sapiens; identical to SEQ ID NO: 134174
  chr22:40081791-40082128
  hypo

SEQ ID NO: 195851 - DNA, 103 bp, Homo sapiens; identical to SEQ ID NO: 134175
  chr22:40082159-40082262
  hypo

SEQ ID NO: 195852 - DNA, 13 bp, Homo sapiens
  chr22:40082282-40082295
  hypo
cggaccgcagcaa

SEQ ID NO: 195853 - DNA, 30 bp, Homo sapiens
  chr22:40083346-40083376
  hypo
gtacccgcctggtctcggctggctccagct

SEQ ID NO: 195854 - DNA, 30 bp, Homo sapiens
  chr22:40083594-40083624
  hypo
ccatgcccagcctttcgcgtcacctggagg

SEQ ID NO: 195855 - DNA, 167 bp, Homo sapiens; identical to SEQ ID NO: 101332
  chr22:40083964-40084131
  hypo

SEQ ID NO: 195856 - DNA, 314 bp, Homo sapiens; identical to SEQ ID NO: 34389
  chr22:40089235-40089549
  hypo

SEQ ID NO: 195857 - DNA, 88 bp, Homo sapiens
  chr22:40226343-40226431
  hypo
tgctggaattacaggtgcgagccactgtgcccggcccctaaaataatctgtcttttcagtcagtgagctattacgaaattaaagaaca

SEQ ID NO: 195858 - DNA, 40 bp, Homo sapiens; identical to SEQ ID NO: 34390
  chr22:40262907-40262947
  hypo

SEQ ID NO: 195859 - DNA, 31 bp, Homo sapiens; identical to SEQ ID NO: 13460
  chr22:40280490-40280521
  hypo

SEQ ID NO: 195860 - DNA, 30 bp, Homo sapiens
  chr22:40301463-40301493
  hypo
gcgaatgaactgggacgagttattcttttt

SEQ ID NO: 195861 - DNA, 30 bp, Homo sapiens; identical to SEQ ID NO: 34392
  chr22:40310793-40310823
  hypo

SEQ ID NO: 195862 - DNA, 99 bp, Homo sapiens
  chr22:40320323-40320422
  hypo
agggaaaaagaacttcgggcagtagcactgtgacaatcatcaccacggtcgtactttccatgagttttacgcagtaggctcacggaagtgacaatgcat

SEQ ID NO: 195863 - DNA, 201 bp, Homo sapiens
  chr22:40348319-40348520
  hypo
ggcacccggcctcaacgtgtggttcttacggtgacaaggtagtttccaaatggcctcttttacccctttctgtgtgacatttgctaccctggccaaacaccacattcccatgtgacgggagaaaggaattccaatgccatgaattcagaagcgatggatggagtgcagtgtgctcttgtgtttttacgtggctacgaggcg

SEQ ID NO: 195864 - DNA, 181 bp, Homo sapiens
  chr22:40360352-40360533
  hypo
ggtctggggaaggggcggcaggcgccatgtccagccacgaaggtggcaagaagaaggcactgaaacagcccaagaagcaggccaaggagatggacgaggaagagaaggctttcaagcagaaacaaaaagaggagcagaagaaactcgaggtgctaaaagcgaaggtcgtggggaaggggcc

SEQ ID NO: 195865 - DNA, 31 bp, Homo sapiens; identical to SEQ ID NO: 101337
  chr22:40367763-40367794
  hypo

SEQ ID NO: 195866 - DNA, 26 bp, Homo sapiens
  chr22:40380447-40380473
  hypo
aagagaagaaactcagctgggcgtgg

SEQ ID NO: 195867 - DNA, 85 bp, Homo sapiens; identical to SEQ ID NO: 101339
  chr22:40380592-40380677
  hypo

SEQ ID NO: 195868 - DNA, 30 bp, Homo sapiens
  chr22:40385120-40385150
  hypo
gcgagatgtgaaaggcgggaaggtcagggc

SEQ ID NO: 195869 - DNA, 30 bp, Homo sapiens
  chr22:40385442-40385472
  hypo
agacctcggtgtatgcgtattgtggagcag

SEQ ID NO: 195870 - DNA, 18 bp, Homo sapiens
  chr22:40401943-40401961
  hypo
ggaacaagaccctgttgt

SEQ ID NO: 195871 - DNA, 650 bp, Homo sapiens
  chr22:40417214-40417864
  hypo
aggggcaggtgggggcgggggcagggcaagagagaggcctgggcacatgtgtcttgcttttctgtccccacgttcccaggttcacctggagttcctcccatgtggacagaaacctcctcctgctcctgacaggacagaacgtagagccctttgacacggagttccgggagctgtacgccatctccgaggaggtggacttgtaccggcagctgagcctggcgggcagggttggcctccattactcctccactgtggctcgaaagcttatcaaccccaagtacgccttggtgtcaggctgccgccacccgcctggggagatgatgcgctgggctgcccggcaacagcgggaggcgggcggcaacccggaggggcaggaggagggcgccagcggtggcgagtcggcctggcgcctggagagcttcctgaaagacctggttacggtggagcaggtgctgccccccgtggagcccatccccttgggagagctgagccagaaggatggcaggatggtctctcacatgcacagagacctgaagcccaaatcccgagaggcacccagccgaaacggcatgggagaagcggcccggggggaggccgcccccgccaggcgcttcagcagcaggctcttcagtcgccgagccaagaggcct

SEQ ID NO: 195872 - DNA, 30 bp, Homo sapiens
  chr22:40427791-40427821
  hypo
ggtgtcggcaccccccgctccaaaaggctt

SEQ ID NO: 195873 - DNA, 144 bp, Homo sapiens
  chr22:40444153-40444297
  hypo
ctggctgcttccctttcttcacgtcttcactacacagtcattctttaaacttttgcagccagattgttccaaggttgccaattacctagtgggtaaatttcccacattggccgggcgtggtggctcacgcctgtaataccagca

SEQ ID NO: 195874 - DNA, 24 bp, Homo sapiens
  chr22:40444536-40444560
  hypo
tccgtctcaaaaaaaaaaaaaaaa

SEQ ID NO: 195875 - DNA, 18 bp, Homo sapiens
  chr22:40487229-40487247
  hypo
gcccgcctcagcctccca

SEQ ID NO: 195876 - DNA, 21 bp, Homo sapiens
  chr22:40515283-40515304
  hypo
acagaaattaaacacttgtgt

SEQ ID NO: 195877 - DNA, 31 bp, Homo sapiens; identical to SEQ ID NO: 34395
  chr22:40543468-40543499
  hypo

SEQ ID NO: 195878 - DNA, 80 bp, Homo sapiens; identical to SEQ ID NO: 101345
  chr22:40593307-40593387
  hypo

SEQ ID NO: 195879 - DNA, 31 bp, Homo sapiens; identical to SEQ ID NO: 101346
  chr22:40607392-40607423
  hypo

SEQ ID NO: 195880 - DNA, 31 bp, Homo sapiens
  chr22:40616086-40616117
  hypo
tccttgagaatcgctgcggtagtaggtgggg

SEQ ID NO: 195881 - DNA, 56 bp, Homo sapiens
  chr22:40620808-40620864
  hypo
ctgatcttatgaagtcgtgtgtggttcttgagtgccttctccgggcgccgtgtgcc

SEQ ID NO: 195882 - DNA, 40 bp, Homo sapiens; identical to SEQ ID NO: 34397
  chr22:40621437-40621477
  hypo

SEQ ID NO: 195883 - DNA, 41 bp, Homo sapiens; identical to SEQ ID NO: 34398
  chr22:40624791-40624832
  hypo

SEQ ID NO: 195884 - DNA, 199 bp, Homo sapiens; identical to SEQ ID NO: 101350
  chr22:40642783-40642982
  hypo

SEQ ID NO: 195885 - DNA, 31 bp, Homo sapiens; identical to SEQ ID NO: 34399
  chr22:40655975-40656006
  hypo

SEQ ID NO: 195886 - DNA, 30 bp, Homo sapiens
  chr22:40688669-40688699
  hypo
tgcagcccaggcgggcgtgagcaggtgttt

SEQ ID NO: 195887 - DNA, 283 bp, Homo sapiens; identical to SEQ ID NO: 101352
  chr22:40693255-40693538
  hypo

SEQ ID NO: 195888 - DNA, 31 bp, Homo sapiens; identical to SEQ ID NO: 34400
  chr22:40707968-40707999
  hypo

SEQ ID NO: 195889 - DNA, 30 bp, Homo sapiens; identical to SEQ ID NO: 34401
  chr22:40719898-40719928
  hypo

SEQ ID NO: 195890 - DNA, 30 bp, Homo sapiens; identical to SEQ ID NO: 34402
  chr22:40720350-40720380
  hypo

SEQ ID NO: 195891 - DNA, 23 bp, Homo sapiens
  chr22:40741043-40741066
  hypo
ctcaagcgatcttcccgcctcgg

SEQ ID NO: 195892 - DNA, 23 bp, Homo sapiens
  chr22:40741125-40741148
  hypo
attcctcacgtaaaaggcagaga

SEQ ID NO: 195893 - DNA, 30 bp, Homo sapiens; identical to SEQ ID NO: 101356
  chr22:40758240-40758270
  hypo

SEQ ID NO: 195894 - DNA, 38 bp, Homo sapiens
  chr22:40764627-40764665
  hypo
ctaaaaaatcttgaaaagggccgggtgcggtggtggct

SEQ ID NO: 195895 - DNA, 24 bp, Homo sapiens
  chr22:40767973-40767997
  hypo
gattacaggcgtgagccactgcgc

SEQ ID NO: 195896 - DNA, 339 bp, Homo sapiens
  chr22:40804023-40804362
  hypo
tctgtcctcggccctcgtggttgctccttacagggcctgtttttcccacaggctggtttccagccaagttcgtggaagtcctggatgagcgcagcaaagaggtgaggggggtgggcgggctaggcacggctggcacccttctagccagggcctgcgtgcctagcgagtcctggcctgtagcatggcagagaggacagaggagggtgactggctgcaggcgtcaggcagggctttctcagacccatccctcccatcagtactccatcgcgggggatgactcggtgacggagggggtcacagacctcgtgcgagggaccctctgcccggcccttaaggccc

SEQ ID NO: 195897 - DNA, 30 bp, Homo sapiens
  chr22:40804660-40804690
  hypo
gcctccgtgtattcccgtctggtgctctgt

SEQ ID NO: 195898 - DNA, 30 bp, Homo sapiens; identical to SEQ ID NO: 101357
  chr22:40805780-40805810
  hypo

SEQ ID NO: 195899 - DNA, 221 bp, Homo sapiens
  chr22:40812786-40813007
  hypo
cttccagctgaaggacggcaccttccctggtcctctcgcccaggccttggagacgggagggctcacagccaccactgcatccacagtgcttgcccaagactggtcacgcacggaagcattcaataaaaacaaaccaacccagggctagagacacctatgaacagagaaggccgtcagggaggcagcaggggacctggggttacctccgctctgaatgagaa

SEQ ID NO: 195900 - DNA, 30 bp, Homo sapiens
  chr22:40813231-40813261
  hypo
cctgaagctgggcttcgcctgccccctatt

SEQ ID NO: 195901 - DNA, 155 bp, Homo sapiens; identical to SEQ ID NO: 34403
  chr22:40815003-40815158
  hypo

SEQ ID NO: 195902 - DNA, 23 bp, Homo sapiens
  chr22:40844991-40845014
  hypo
gggcgcagtggctcacgcctgta

SEQ ID NO: 195903 - DNA, 30 bp, Homo sapiens; identical to SEQ ID NO: 58066
  chr22:40876218-40876248
  hypo

SEQ ID NO: 195904 - DNA, 28 bp, Homo sapiens
  chr22:40882673-40882701
  hypo
cgaacactttaagttcgtattaagaagg

SEQ ID NO: 195905 - DNA, 36 bp, Homo sapiens; identical to SEQ ID NO: 101360
  chr22:40896202-40896238
  hypo

SEQ ID NO: 195906 - DNA, 42 bp, Homo sapiens
  chr22:40911583-40911625
  hypo
ctacctgggtggctggggcacgagaatcgtttgaactcaggt

SEQ ID NO: 195907 - DNA, 35 bp, Homo sapiens; identical to SEQ ID NO: 34404
  chr22:40912132-40912167
  hypo

SEQ ID NO: 195908 - DNA, 30 bp, Homo sapiens
  chr22:40982009-40982039
  hypo
ttttgttttagatatcgatatacttacgtg

SEQ ID NO: 195909 - DNA, 30 bp, Homo sapiens; identical to SEQ ID NO: 101362
  chr22:40991408-40991438
  hypo

SEQ ID NO: 195910 - DNA, 257 bp, Homo sapiens
  chr22:41034282-41034539
  hypo
aatcttggagttagacgggatcctcgtgggctcttagtcacacacaccttccccaaggcaaaaattcttgcacaaaatacctgataaaattatttattcgataaatattttttgagtaagaacactgagggggtaagctagatgagatacagtcactaccctgggggtgcttacaccaaactggaggatgctaaggcacgtactgcggtgactgcaatgccaggccggtatcccaggtgactaaaacaggatgcagg

SEQ ID NO: 195911 - DNA, 204 bp, Homo sapiens; identical to SEQ ID NO: 101364
  chr22:41044523-41044727
  hypo

SEQ ID NO: 195912 - DNA, 209 bp, Homo sapiens
  chr22:41048753-41048962
  hypo
cttgagagttcaacgcggagaacctgctctgtgccaggcccccacctgggaggtgtgggcaaccttcctgccttccgggtgctcagagtctagtctggagacaataagaaaaatggttaatcaccatggaatgtgctagcgccttagcccgaagcaggggtctggttattgaggtttgttgaaggaagatgcctgtaagggctgggtgc

SEQ ID NO: 195913 - DNA, 150 bp, Homo sapiens
  chr22:41087988-41088138
  hypo
acacacaaagcaatgaaagaacgaagcaacaaaagaagaaacaagcaacgaaagcgcagatttattgacgtgaaagtacagagcgtgagccggctcaagcaagtgggttaaaagtcccgattacaatgttctttagggtttttattaagc

SEQ ID NO: 195914 - DNA, 28 bp, Homo sapiens
  chr22:41123152-41123180
  hypo
ctgggactacaggcgtgagccaccgcgc

SEQ ID NO: 195915 - DNA, 16 bp, Homo sapiens
  chr22:41132017-41132033
  hypo
gcgcgactctgactca

SEQ ID NO: 195916 - DNA, 97 bp, Homo sapiens; identical to SEQ ID NO: 34405
  chr22:41156759-41156856
  hypo

SEQ ID NO: 195917 - DNA, 36 bp, Homo sapiens; identical to SEQ ID NO: 101368
  chr22:41157095-41157131
  hypo

SEQ ID NO: 195918 - DNA, 20 bp, Homo sapiens
  chr22:41177532-41177552
  hypo
gccaccgcacccggcctaaa

SEQ ID NO: 195919 - DNA, 36 bp, Homo sapiens
  chr22:41177927-41177963
  hypo
ctcttctgccagttccggccgggtgcggttgctcac

SEQ ID NO: 195920 - DNA, 30 bp, Homo sapiens; identical to SEQ ID NO: 34406
  chr22:41185268-41185298
  hypo

SEQ ID NO: 195921 - DNA, 30 bp, Homo sapiens
  chr22:41257824-41257854
  hypo
atttgataatacctcgtatgcctcagctac

SEQ ID NO: 195922 - DNA, 26 bp, Homo sapiens
  chr22:41267748-41267774
  hypo
attactggggccaggcgcggtggctc

SEQ ID NO: 195923 - DNA, 17 bp, Homo sapiens
  chr22:41268477-41268494
  hypo
gaatttcgctcttgtcg

SEQ ID NO: 195924 - DNA, 17 bp, Homo sapiens
  chr22:41273931-41273948
  hypo
tgggtacagtggctcac

SEQ ID NO: 195925 - DNA, 30 bp, Homo sapiens; identical to SEQ ID NO: 34408
  chr22:41345963-41345993
  hypo

SEQ ID NO: 195926 - DNA, 25 bp, Homo sapiens
  chr22:41397259-41397284
  hypo
gctggaattacgggtgtgagccact

SEQ ID NO: 195927 - DNA, 121 bp, Homo sapiens
  chr22:41398408-41398529
  hypo
atccggcaaatctcccgatattaaatgagttttgaacactcctcagtatcaggcactggggatacatagatgagcatggcagataagggctcaggaagaactgtagattgttgaagagtca

SEQ ID NO: 195928 - DNA, 30 bp, Homo sapiens; identical to SEQ ID NO: 101373
  chr22:41422983-41423013
  hypo

SEQ ID NO: 195929 - DNA, 31 bp, Homo sapiens; identical to SEQ ID NO: 34409
  chr22:41464151-41464182
  hypo

SEQ ID NO: 195930 - DNA, 140 bp, Homo sapiens; identical to SEQ ID NO: 101375
  chr22:41486562-41486702
  hypo

SEQ ID NO: 195931 - DNA, 205 bp, Homo sapiens; identical to SEQ ID NO: 34411
  chr22:41536177-41536382
  hypo

SEQ ID NO: 195932 - DNA, 30 bp, Homo sapiens; identical to SEQ ID NO: 34412
  chr22:41536742-41536772
  hypo

SEQ ID NO: 195933 - DNA, 160 bp, Homo sapiens; identical to SEQ ID NO: 101378
  chr22:41573031-41573191
  hypo

SEQ ID NO: 195934 - DNA, 17 bp, Homo sapiens
  chr22:41578472-41578489
  hypo
ggaaaagctgccctttc

SEQ ID NO: 195935 - DNA, 572 bp, Homo sapiens; identical to SEQ ID NO: 101380
  chr22:41634410-41634982
  hypo

SEQ ID NO: 195936 - DNA, 421 bp, Homo sapiens
  chr22:41639281-41639702
  hypo
ctaggatttacaggtgtgagcccgcacccggcttcatctattttaattttttttttaaattcagcattccagccttccattctataaatatatgacaacagtggcatggggcaggggcgggaggcagtctgcccacaatgcaggcagtaagcgggtgtgctgtcagtggagaagtgagacacaatggaactgacttaaagttggtctctgctttttattatcatgtgctgacaagtctaaacaatgtcaatgctaaaatatttcttcttgggcagaccattcctaccttctcggtaccacaccgtaccacaagtagcttacccattcctctagtgatagacatttgggttgtttccagcatgggtttattagaaagagcactgtagccgggcatggtggttcatgcctgttaagtgagctg

SEQ ID NO: 195937 - DNA, 136 bp, Homo sapiens; identical to SEQ ID NO: 34416
  chr22:41641906-41642042
  hypo

SEQ ID NO: 195938 - DNA, 31 bp, Homo sapiens; identical to SEQ ID NO: 34417
  chr22:41649014-41649045
  hypo

SEQ ID NO: 195939 - DNA, 803 bp, Homo sapiens; identical to SEQ ID NO: 101385
  chr22:41656915-41657718
  hypo

SEQ ID NO: 195940 - DNA, 111 bp, Homo sapiens; identical to SEQ ID NO: 101386
  chr22:41658258-41658369
  hypo

SEQ ID NO: 195941 - DNA, 30 bp, Homo sapiens; identical to SEQ ID NO: 101387
  chr22:41658644-41658674
  hypo

SEQ ID NO: 195942 - DNA, 88 bp, Homo sapiens; identical to SEQ ID NO: 101388
  chr22:41664702-41664790
  hypo

SEQ ID NO: 195943 - DNA, 27 bp, Homo sapiens
  chr22:41664909-41664936
  hypo
ttagcatagtgacggggactttttaac

SEQ ID NO: 195944 - DNA, 225 bp, Homo sapiens
  chr22:41666685-41666910
  hypo
cacgtgatctgctcccaccgtacatactaaggaagctggtttttgcagaaaaatccgcatatccaccaataaagcagaccatgaacacacctggggcctcagctgtctgctctacaccagatctgcttagtagttccacctgcacgtgggtccacagggccaggaacaggcagccggagccggagcgccacagtccctcacaacagataccggcaggtcattcgg

SEQ ID NO: 195945 - DNA, 525 bp, Homo sapiens
  chr22:41667720-41668245
  hypo
gctgacacctggactccacctcagcctactcctagttgtgtgactctgggctacacttctctcgcccgtcaagacctcactcctcacttgcacactgctgcagcagcagagagaacccctctggcatcagcactacgcccggaacactgggccatcaagggcagatcccaccctgcccctgccctgggctgcttcctgcacagaggagggcctaggaggtggtgtgcagtgattcactcgagccactgcatctgtagcaggcgggaaggtgcatgcagcactcctaccggccaggctctcccaggacaacctctgaggaagaaggaagggctctatctcctatttcatataagagcccagcctcagagctgcacgcagggcaaggccacgtacggcaaacaaggtggtgctgttagggcttgatcccatgtgccgaaagcaagctcagctcctgctgagtcctgtagccttcaggcccatggctccttcattcctgttcttcacaggtctcggggagggctgagt

SEQ ID NO: 195946 - DNA, 45 bp, Homo sapiens
  chr22:41669064-41669109
  hypo
gctgggattatagctgtgagccatcgtgcccgactgatcgtggct

SEQ ID NO: 195947 - DNA, 165 bp, Homo sapiens
  chr22:41669351-41669516
  hypo
gcttttctcacagagcgtatcagaagactggtgtttaggagaacctgtttggggaacacggggctagaataacctgacttgccctttgcgttggccaaaaagggcaccacttggatctaaccttcaggagaacttgccagccgcacgcagtggctcacgcctgta

SEQ ID NO: 195948 - DNA, 104 bp, Homo sapiens
  chr22:41676090-41676194
  hypo
tccatctcaaaaaaaaaaagtgataaatgcacagggaggaagtctataaacgttagaccttatggagatgttaggaacatgcatcagcacgctcccagctaccc

SEQ ID NO: 195949 - DNA, 30 bp, Homo sapiens
  chr22:41742020-41742050
  hypo
caggactgtaagtacggggataactgcacc

SEQ ID NO: 195950 - DNA, 89 bp, Homo sapiens; identical to SEQ ID NO: 101394
  chr22:41768560-41768649
  hypo

SEQ ID NO: 195951 - DNA, 19 bp, Homo sapiens
  chr22:41776123-41776142
  hypo
tttttcctccttaccccgc

SEQ ID NO: 195952 - DNA, 161 bp, Homo sapiens
  chr22:41779336-41779497
  hypo
gtttgtttttgagacggtgctttgttccaaatctggggctgagacaagctgcagggacaggtgtacacatctgacagtttcttgtttgaaattaccaggtaataaccatccataacaagaattctacccgatattcgtagagtgctcgcaaagcacgctga

SEQ ID NO: 195953 - DNA, 266 bp, Homo sapiens
  chr22:41790056-41790322
  hypo
tccagtgggctgcttcgggaccacctgtctctgtgtcttttagaatcttccctggagaaggagagggagactcccagtcccatcgaccccaattgtgtggaagtggatgtgaacttcaatccggaccccgccgacctggtgctctccagtgtgccaggcggggagctcttcaaccctcggaagcacaagtttgctgaggaggacctgaagccccagcctatgatcaaaaaggccaagaaggtctttgtccccgacgagcagaaggt

SEQ ID NO: 195954 - DNA, 30 bp, Homo sapiens; identical to SEQ ID NO: 101396
  chr22:41833264-41833294
  hypo

SEQ ID NO: 195955 - DNA, 105 bp, Homo sapiens; identical to SEQ ID NO: 101397
  chr22:41839258-41839363
  hypo

SEQ ID NO: 195956 - DNA, 44 bp, Homo sapiens; identical to SEQ ID NO: 34427
  chr22:41839902-41839946
  hypo

SEQ ID NO: 195957 - DNA, 181 bp, Homo sapiens
  chr22:41871435-41871616
  hypo
agccactgtgcctggctagtgggaagagagtgttgagtcttccttggctccagctttctttgacttgcctcgttttcccagcacctggtttggaaggcagtggtgggctctgggcctctcagcatgaaggaaggaaggtattgtagagagacttcttgtagcctttaaaaagcagcaaatg

SEQ ID NO: 195958 - DNA, 173 bp, Homo sapiens
  chr22:41877560-41877733
  hypo
aagacctccgacctccgtcctttgggaagagagggcagcatgtctgactttggccgagtggggttgtggggagttctgagtgggtgtacatgtgatgtgccgtggggtgggcccttttcccatctgccacagctctgaacccgtgctgttgctcatcacggcttctgccagag

SEQ ID NO: 195959 - DNA, 30 bp, Homo sapiens; identical to SEQ ID NO: 101399
  chr22:41937237-41937267
  hypo

SEQ ID NO: 195960 - DNA, 568 bp, Homo sapiens; identical to SEQ ID NO: 101400
  chr22:41970754-41971322
  hypo

SEQ ID NO: 195961 - DNA, 179 bp, Homo sapiens; identical to SEQ ID NO: 101401
  chr22:41973277-41973456
  hypo

SEQ ID NO: 195962 - DNA, 30 bp, Homo sapiens; identical to SEQ ID NO: 101402
  chr22:41989312-41989342
  hypo

SEQ ID NO: 195963 - DNA, 41 bp, Homo sapiens; identical to SEQ ID NO: 34429
  chr22:41995508-41995549
  hypo

SEQ ID NO: 195964 - DNA, 30 bp, Homo sapiens; identical to SEQ ID NO: 101404
  chr22:41996936-41996966
  hypo

SEQ ID NO: 195965 - DNA, 30 bp, Homo sapiens; identical to SEQ ID NO: 101405
  chr22:42032749-42032779
  hypo

SEQ ID NO: 195966 - DNA, 98 bp, Homo sapiens; identical to SEQ ID NO: 34430
  chr22:42033730-42033828
  hypo

SEQ ID NO: 195967 - DNA, 32 bp, Homo sapiens; identical to SEQ ID NO: 34431
  chr22:42034494-42034526
  hypo

SEQ ID NO: 195968 - DNA, 21 bp, Homo sapiens
  chr22:42039127-42039148
  hypo
atagctggccgggtgcggtgg

SEQ ID NO: 195969 - DNA, 31 bp, Homo sapiens; identical to SEQ ID NO: 58086
  chr22:42084265-42084296
  hypo

SEQ ID NO: 195970 - DNA, 30 bp, Homo sapiens; identical to SEQ ID NO: 34432
  chr22:42093965-42093995
  hypo

SEQ ID NO: 195971 - DNA, 575 bp, Homo sapiens; identical to SEQ ID NO: 101410
  chr22:42095751-42096326
  hypo

SEQ ID NO: 195972 - DNA, 42 bp, Homo sapiens
  chr22:42109087-42109129
  hypo
catgcgtgagccaccgcgcccggctgggcattagaatttttt

SEQ ID NO: 195973 - DNA, 176 bp, Homo sapiens
  chr22:42228359-42228535
  hypo
tgcacttcagaatcccggtggaactttttcaaaaaactcgtgcccggggcccccctctcaggaggccgtcggtgggcctgggcactggcgtggttttcaggtcctcagtggttccgaggtgccagagattgaggaccactggagtaagcgcgaggtcacggcgggtgcaaagcaga

SEQ ID NO: 195974 - DNA, 234 bp, Homo sapiens; identical to SEQ ID NO: 134224
  chr22:42229857-42230091
  hypo

SEQ ID NO: 195975 - DNA, 37 bp, Homo sapiens; identical to SEQ ID NO: 101412
  chr22:42256092-42256129
  hypo

SEQ ID NO: 195976 - DNA, 30 bp, Homo sapiens; identical to SEQ ID NO: 34434
  chr22:42296538-42296568
  hypo

SEQ ID NO: 195977 - DNA, 30 bp, Homo sapiens; identical to SEQ ID NO: 101414
  chr22:42296811-42296841
  hypo

SEQ ID NO: 195978 - DNA, 1028 bp, Homo sapiens; identical to SEQ ID NO: 134227
  chr22:42310036-42311064
  hypo

SEQ ID NO: 195979 - DNA, 37 bp, Homo sapiens; identical to SEQ ID NO: 101416
  chr22:42329320-42329357
  hypo

SEQ ID NO: 195980 - DNA, 24 bp, Homo sapiens
  chr22:42344626-42344650
  hypo
aagaaaataaagtaagctgaacgc

SEQ ID NO: 195981 - DNA, 30 bp, Homo sapiens; identical to SEQ ID NO: 101418
  chr22:42352622-42352652
  hypo

SEQ ID NO: 195982 - DNA, 222 bp, Homo sapiens; identical to SEQ ID NO: 34436
  chr22:42395139-42395361
  hypo

SEQ ID NO: 195983 - DNA, 31 bp, Homo sapiens; identical to SEQ ID NO: 34437
  chr22:42473746-42473777
  hypo

SEQ ID NO: 195984 - DNA, 30 bp, Homo sapiens
  chr22:42666811-42666841
  hypo
gtcgaggctggcgcgcgccgggtagggatc

SEQ ID NO: 195985 - DNA, 292 bp, Homo sapiens
  chr22:42667140-42667432
  hypo
caagagccctctgggccgggggcagcccaagacctagctggtcccgcctgggtccctggcagcccccgcccatgggttccaggtgtccgtggaggaacgacttgggtcctctcagagcctcagtttccaccgcggaaaacgcgaggagggaggcccacctacctcacctgtaaaacggacgctccagctgccttctgctgcggcattaagaagctgcaatgccaggctgactgcgcccagggtcccgaattaatttgccgataaggcggaggatttgcggtgccaaggcctc

SEQ ID NO: 195986 - DNA, 401 bp, Homo sapiens; identical to SEQ ID NO: 13477
  chr22:42669779-42670180
  hypo

SEQ ID NO: 195987 - DNA, 30 bp, Homo sapiens; identical to SEQ ID NO: 34440
  chr22:42671394-42671424
  hypo

SEQ ID NO: 195988 - DNA, 59 bp, Homo sapiens; identical to SEQ ID NO: 101424
  chr22:42706986-42707045
  hypo

SEQ ID NO: 195989 - DNA, 94 bp, Homo sapiens
  chr22:42713565-42713659
  hypo
ggtggaaactgaggctcggagaggccaagtgactggcccaaggcagcaccctcagaggagggctctgctcctgcattcccgctgggggctgggg

SEQ ID NO: 195990 - DNA, 191 bp, Homo sapiens; identical to SEQ ID NO: 101425
  chr22:42733978-42734169
  hypo

SEQ ID NO: 195991 - DNA, 193 bp, Homo sapiens; identical to SEQ ID NO: 101426
  chr22:42744708-42744901
  hypo

SEQ ID NO: 195992 - DNA, 29 bp, Homo sapiens
  chr22:42752216-42752245
  hypo
caagatgcaggttgagcgcagggcctcac

SEQ ID NO: 195993 - DNA, 328 bp, Homo sapiens; identical to SEQ ID NO: 58102
  chr22:42765053-42765381
  hypo

SEQ ID NO: 195994 - DNA, 30 bp, Homo sapiens
  chr22:42769064-42769094
  hypo
ccagtaaatcttaacgcctctgatgctcta

SEQ ID NO: 195995 - DNA, 30 bp, Homo sapiens; identical to SEQ ID NO: 101429
  chr22:42776253-42776283
  hypo

SEQ ID NO: 195996 - DNA, 43 bp, Homo sapiens; identical to SEQ ID NO: 101430
  chr22:42796230-42796273
  hypo

SEQ ID NO: 195997 - DNA, 201 bp, Homo sapiens; identical to SEQ ID NO: 101431
  chr22:42822799-42823000
  hypo

SEQ ID NO: 195998 - DNA, 423 bp, Homo sapiens
  chr22:42829717-42830140
  hypo
ggagaagtttcctaccgcgcagggggcaggcggggaccccagtgttattgactgttgatccatcacagtgatacatgctcacatatgtcacagtgagatgcagacccgctgcttcacgctattcctggctcctgggagtagcaggttgtctaagcaccttgatgccatggtgatagacctcgtgtcaatgcctcagggtacacggggagcattggaaaagcatcggtctgtgcctctacaagtctcattacgacttggcactgggaggcagctgaatgccaaactgcctcggaacaagggagcctgctcttccagccctggtgccgcctccgctcctgcccctgtgccagctcactgaccctacctctcagcctgtcacggtgccccccacaccccaactctgtacctcggactcccgggagt

SEQ ID NO: 195999 - DNA, 83 bp, Homo sapiens; identical to SEQ ID NO: 34441
  chr22:42916272-42916355
  hypo

SEQ ID NO: 196000 - DNA, 22 bp, Homo sapiens
  chr22:42916594-42916616
  hypo
cgagactctgtctcaaaaaaaa

SEQ ID NO: 196001 - DNA, 31 bp, Homo sapiens; identical to SEQ ID NO: 101436
  chr22:42918548-42918579
  hypo

SEQ ID NO: 196002 - DNA, 121 bp, Homo sapiens
  chr22:42944612-42944733
  hypo
gagagagattacgtctcaaaaaaataaataaatgactgtacgtttcacagtacacatatttgctaaccccctgtgtatgtttgtctttaaatctaatgttcttcacagtgaaaccctgtct

SEQ ID NO: 196003 - DNA, 165 bp, Homo sapiens; identical to SEQ ID NO: 101437
  chr22:42956594-42956759
  hypo

SEQ ID NO: 196004 - DNA, 51 bp, Homo sapiens; identical to SEQ ID NO: 34443
  chr22:42972461-42972512
  hypo

SEQ ID NO: 196005 - DNA, 145 bp, Homo sapiens; identical to SEQ ID NO: 101439
  chr22:42995214-42995359
  hypo

SEQ ID NO: 196006 - DNA, 144 bp, Homo sapiens; identical to SEQ ID NO: 101440
  chr22:42995598-42995742
  hypo

SEQ ID NO: 196007 - DNA, 351 bp, Homo sapiens
  chr22:42998892-42999243
  hypo
gggcttctggggcaccgtggtctgctgcttgcgagagttcaacatctctctggcatcctgcactttccctttgattcgaaatcgggcatctttctgcaaaagcttctcccgggcatccttgactcccagtttgagccgggcatctgagaggccaatcttctgccgggcatcaaatctctgctggaaggtggctgtgcgtgttgactggctgagaaggccttgctggatcccaactcgagatcggacacctccaactcccggtctggcattaagcctgtaaatataaattgcaatcaatattaagtggatctgggtatctacagcagtctatgaaagcggaactgtggtaac

SEQ ID NO: 196008 - DNA, 193 bp, Homo sapiens; identical to SEQ ID NO: 101442
  chr22:43000040-43000233
  hypo

SEQ ID NO: 196009 - DNA, 18 bp, Homo sapiens
  chr22:43001430-43001448
  hypo
agtttctgttttttataa

SEQ ID NO: 196010 - DNA, 30 bp, Homo sapiens
  chr22:43004609-43004639
  hypo
tcatgcccagggatacggagcactctctag

SEQ ID NO: 196011 - DNA, 190 bp, Homo sapiens
  chr22:43005279-43005469
  hypo
gttttgactgagtctcgtaatgccccacctccatcgcaccgaaactacagctctgcaactgcttccagggcttcaccaggtattccgcgaggtcctggcaagagcgctgctggcaggtgagaaggcaaacgttccctggaccccaaattctctcctctataccccctacgggaacctggcataggtgtga

SEQ ID NO: 196012 - DNA, 31 bp, Homo sapiens
  chr22:43008439-43008470
  hypo
acctatgctccaggggcgttgtgtgcttcta

SEQ ID NO: 196013 - DNA, 249 bp, Homo sapiens; identical to SEQ ID NO: 134251
  chr22:43015552-43015801
  hypo

SEQ ID NO: 196014 - DNA, 31 bp, Homo sapiens; identical to SEQ ID NO: 34447
  chr22:43038393-43038424
  hypo

SEQ ID NO: 196015 - DNA, 26 bp, Homo sapiens
  chr22:43083134-43083160
  hypo
aataaccagcccgggcgcggtggctc

SEQ ID NO: 196016 - DNA, 31 bp, Homo sapiens; identical to SEQ ID NO: 101446
  chr22:43088995-43089026
  hypo

SEQ ID NO: 196017 - DNA, 30 bp, Homo sapiens; identical to SEQ ID NO: 101447
  chr22:43089324-43089354
  hypo

SEQ ID NO: 196018 - DNA, 35 bp, Homo sapiens; identical to SEQ ID NO: 101448
  chr22:43089900-43089935
  hypo

SEQ ID NO: 196019 - DNA, 30 bp, Homo sapiens
  chr22:43094530-43094560
  hypo
caacaaaacggagtccgcactgagccctcc

SEQ ID NO: 196020 - DNA, 31 bp, Homo sapiens; identical to SEQ ID NO: 34448
  chr22:43096260-43096291
  hypo

SEQ ID NO: 196021 - DNA, 31 bp, Homo sapiens; identical to SEQ ID NO: 34449
  chr22:43098230-43098261
  hypo

SEQ ID NO: 196022 - DNA, 35 bp, Homo sapiens; identical to SEQ ID NO: 34450
  chr22:43137118-43137153
  hypo

SEQ ID NO: 196023 - DNA, 35 bp, Homo sapiens; identical to SEQ ID NO: 101452
  chr22:43138067-43138102
  hypo

SEQ ID NO: 196024 - DNA, 84 bp, Homo sapiens
  chr22:43140872-43140956
  hypo
ccacctgcacgtaatcgctcattaaaacagcgtgttgcccccacattgcctcgtgctgtctgttggcgcgctctcggggttgga

SEQ ID NO: 196025 - DNA, 257 bp, Homo sapiens; identical to SEQ ID NO: 101453
  chr22:43149955-43150212
  hypo

SEQ ID NO: 196026 - DNA, 28 bp, Homo sapiens
  chr22:43159379-43159407
  hypo
aacacaaacgcaacgtacttcaggggtg

SEQ ID NO: 196027 - DNA, 743 bp, Homo sapiens
  chr22:43164500-43165243
  hypo
gaggactggacatgccgctgccggctccgagacgggggcccacgggcaaggacagagacaggcctctacttgctaaggctgggccctggctgacagccagccagggaacagggacttcagtcctatagccacagaaaccagatcccaccaaccacctgcgcggactcagaaggcaactcacttgcagagcctccggaagggacacccacccagcaggcactgggccccctccagccaccctcaggcatgcggggctgcagccagagaggggcacagggtcgggcttgggcctgtcagaccctcccctccacagtctgagtgacctggccagtggcaggatggaggcctgagaggtggcgccgttcacggaactgggagggccatgggaccggctggggcgctggctgacggtgacgggcgtgtgtgtgagaacctgaatggatgagggtgggtgggtgggtggtggggtggaggcagctccctccccgtttactggggtgtgacttgagcacctcgcaagcacaggcagtgcctcagccgcttactctgtgaggggccgaccgtgcccacctgcaggcccactgtgtgccgggcaccctgagccccgcgtttccagtggctccaactctcccacaggtgacccggtggatgctgctctcctctgtgtgagggaggaagcgaggggactgtcatggcccacgagcctgttcgcctccacaagcggctcccaaccccaggctcct

SEQ ID NO: 196028 - DNA, 273 bp, Homo sapiens; identical to SEQ ID NO: 101456
  chr22:43166964-43167237
  hypo

SEQ ID NO: 196029 - DNA, 110 bp, Homo sapiens
  chr22:43191427-43191537
  hypo
cctgcgacaataacccgtctgctccggcccccacagggaccagcctctgcatacactcttcagtggtccgcctgtgaagccaatttgctgaaagacgactcccaaaatgt

SEQ ID NO: 196030 - DNA, 30 bp, Homo sapiens; identical to SEQ ID NO: 34453
  chr22:43197156-43197186
  hypo

SEQ ID NO: 196031 - DNA, 30 bp, Homo sapiens; identical to SEQ ID NO: 34454
  chr22:43197564-43197594
  hypo

SEQ ID NO: 196032 - DNA, 172 bp, Homo sapiens
  chr22:43238822-43238994
  hypo
agcgttgcctttctacgccaacatcataaaaaggttctccccagtgtccaccgagcaggagcccagattctgccctggtcatcatcaacatgttctagggctcactatgtgccaggctgtatggggctctcttgctcgctcctgccaacaccctgtacggcaggtcctagta

SEQ ID NO: 196033 - DNA, 30 bp, Homo sapiens
  chr22:43239756-43239786
  hypo
taagctcatgaaatacgtaacggcaaactt

SEQ ID NO: 196034 - DNA, 23 bp, Homo sapiens
  chr22:43241247-43241270
  hypo
acattaaaaacaagctttagccg

SEQ ID NO: 196035 - DNA, 30 bp, Homo sapiens; identical to SEQ ID NO: 101460
  chr22:43246950-43246980
  hypo

SEQ ID NO: 196036 - DNA, 138 bp, Homo sapiens; identical to SEQ ID NO: 34455
  chr22:43253986-43254124
  hypo

SEQ ID NO: 196037 - DNA, 150 bp, Homo sapiens
  chr22:43266093-43266243
  hypo
ctcccgggcgactccgggcagcccgagacactcgtgctgcgggtaagacccagcttctgtttgtgcacaagtaacacgacgactgaaatctgcaactactgcaaagacgcgggcacttttacagtgttctgctacggagccaggacaaag

SEQ ID NO: 196038 - DNA, 52 bp, Homo sapiens; identical to SEQ ID NO: 34457
  chr22:43273689-43273741
  hypo

SEQ ID NO: 196039 - DNA, 142 bp, Homo sapiens
  chr22:43298920-43299062
  hypo
atttatcagttctcaatcctgcgagtcacacgagctctctccatggtagctaaaaggaatcaactcttagcacgtcatcagccagtaacttcatggccggcagaagagcaactcccggcgcttctgccgcattcctgagaga

SEQ ID NO: 196040 - DNA, 30 bp, Homo sapiens
  chr22:43300617-43300647
  hypo
atctagtggggaaacgccagctgggaaaag

SEQ ID NO: 196041 - DNA, 30 bp, Homo sapiens
  chr22:43343943-43343973
  hypo
ccattctcacagggtcgatggacacttgaa

SEQ ID NO: 196042 - DNA, 176 bp, Homo sapiens; identical to SEQ ID NO: 101465
  chr22:43351233-43351409
  hypo

SEQ ID NO: 196043 - DNA, 70 bp, Homo sapiens
  chr22:43363015-43363085
  hypo
aataattaacttaaacgaacttgtccgtaagcagcttcaagtctggtagggtagacggacgagtacccag

SEQ ID NO: 196044 - DNA, 94 bp, Homo sapiens
  chr22:43365552-43365646
  hypo
tgaccattgtaacaccggcattatccaagcaatatgggattgattatcgctgtagattggaaatagttttcccttctcctacgtagtttctacg

SEQ ID NO: 196045 - DNA, 164 bp, Homo sapiens; identical to SEQ ID NO: 101466
  chr22:43390390-43390554
  hypo

SEQ ID NO: 196046 - DNA, 93 bp, Homo sapiens; identical to SEQ ID NO: 101467
  chr22:43402809-43402902
  hypo

SEQ ID NO: 196047 - DNA, 22 bp, Homo sapiens
  chr22:43415870-43415892
  hypo
tttttttttttttttttgagac

SEQ ID NO: 196048 - DNA, 219 bp, Homo sapiens; identical to SEQ ID NO: 101469
  chr22:43434408-43434627
  hypo

SEQ ID NO: 196049 - DNA, 35 bp, Homo sapiens; identical to SEQ ID NO: 101470
  chr22:43437049-43437084
  hypo

SEQ ID NO: 196050 - DNA, 268 bp, Homo sapiens; identical to SEQ ID NO: 101471
  chr22:43465386-43465654
  hypo

SEQ ID NO: 196051 - DNA, 25 bp, Homo sapiens
  chr22:43486050-43486075
  hypo
aacaagactccgcctcaaaaaaaaa

SEQ ID NO: 196052 - DNA, 31 bp, Homo sapiens; identical to SEQ ID NO: 34460
  chr22:43517577-43517608
  hypo

SEQ ID NO: 196053 - DNA, 360 bp, Homo sapiens
  chr22:43524606-43524966
  hypo
gagatccccgaaccccgggtcctgggtaagagccttgagatccctgaccctgacttgcgctgcggccagtgggggctgtcagagccgctccttggggcgccacagtccccaccactccgtatcatcatctgtgtcacctgtgtccacatctgcctgatcccatgggcttttgggtttgagatgcctggttctgagtgcacaaaccagtgcatggtcctgggtctccctctggtccgagagccttcacctggcaggcaggactcccgtctcctggccagggcaggggcctccctgagcagccttcctggtagcctggtcccatggtgtccactcggcaccgcccaccacaagggcagctga

SEQ ID NO: 196054 - DNA, 20 bp, Homo sapiens
  chr22:43526639-43526659
  hypo
tttttgtttttgagatggag

SEQ ID NO: 196055 - DNA, 245 bp, Homo sapiens; identical to SEQ ID NO: 34461
  chr22:43529306-43529551
  hypo

SEQ ID NO: 196056 - DNA, 31 bp, Homo sapiens; identical to SEQ ID NO: 34462
  chr22:43537480-43537511
  hypo

SEQ ID NO: 196057 - DNA, 16 bp, Homo sapiens
  chr22:43549657-43549673
  hypo
atttgtgttttcttta

SEQ ID NO: 196058 - DNA, 227 bp, Homo sapiens; identical to SEQ ID NO: 101477
  chr22:43555230-43555457
  hypo

SEQ ID NO: 196059 - DNA, 144 bp, Homo sapiens; identical to SEQ ID NO: 101478
  chr22:43559029-43559173
  hypo

SEQ ID NO: 196060 - DNA, 203 bp, Homo sapiens; identical to SEQ ID NO: 34463
  chr22:43566411-43566614
  hypo

SEQ ID NO: 196061 - DNA, 329 bp, Homo sapiens; identical to SEQ ID NO: 101480
  chr22:43567651-43567980
  hypo

SEQ ID NO: 196062 - DNA, 579 bp, Homo sapiens
  chr22:43570047-43570626
  hypo
ctggagaggtcctgcggtccgtgaagacggccgtgacgttcggggcccacagctcggctcctgcaccacggtttccacagtgggtgctcatggaggagcaggcggacacagacgctgggccggggaaaagggccatggagcacaccgatgccgtgtctgggacttaccacctttcccgctgctggaagtagctgacaaactggggcagctcagtgcgcaggttgaaggttcggggcagccagggtgggccctcggggccacctgcccggcgcgcgatggaggccaggcagtccttgacagtcagcaggttctcgcaggggaactggttcagcagcacgcctggcctctcctggctgagtttcctgcagggcggaggcaggtgcgccagctcaaggggaggccggcagtgcctagaagccctgactgggagggcccctgcggccagaggtgccctcacctgtagtccttgaagtgtgagaagttgaagaggatgtcggcgtccgcctcactctgggtgagggtgaagcgcgggtgggtgaggctgctggccacctgctgcacgtccgtgtagaccctgtg

SEQ ID NO: 196063 - DNA, 30 bp, Homo sapiens
  chr22:43570850-43570880
  hypo
aggactggaccacaccgtccacctcacatt

SEQ ID NO: 196064 - DNA, 30 bp, Homo sapiens
  chr22:43571494-43571524
  hypo
tcgtatccaggtaagcggagcagccccatg

SEQ ID NO: 196065 - DNA, 349 bp, Homo sapiens
  chr22:43581408-43581757
  hypo
gctgctgctgctggcggcctcctccacacctgggccagtagcagcaggaggcttcactcaggaagagctgcaagtttgtgaatggtaaagcagtgattcagctctgtccttaacggctggggaagggtcacggaaaaacactggctgccccttagtagggcaacagcaggcaaggcggcctgggcaggggacgtggcacggtggcgaccaccctctgtgtgccaggcatatttctcatgccacctcccatccttccaatactgtgggagccagatggtgtctcaccatccccttcccagatggagaacaggtctcagacgggcgagtgaccgcccgagggagggcgtgc

SEQ ID NO: 196066 - DNA, 31 bp, Homo sapiens; identical to SEQ ID NO: 101484
  chr22:43596547-43596578
  hypo

SEQ ID NO: 196067 - DNA, 30 bp, Homo sapiens
  chr22:43603570-43603600
  hypo
tacaggcgcccatcgcgcacgatgtcctct

SEQ ID NO: 196068 - DNA, 30 bp, Homo sapiens; identical to SEQ ID NO: 101485
  chr22:43605992-43606022
  hypo

SEQ ID NO: 196069 - DNA, 419 bp, Homo sapiens
  chr22:43608343-43608762
  hypo
gagatgagaggggttcggggaagcctctcggagcagtgcagccctgcctctcggggtgggcgggcgtggtggggagggcatgctcacctttagcctcgcagtcctggaaggaggtggtgccttcgtgtttggtgagcaaaccccctccacaggggaagcagccggtgcgcccgggctcaggctggtacgtgcccacggggcaggcctggcagggcttgaagccatcggccgagaagaagcctggagaacactggcctgaaagtcagaggtcatggctcaggcgggcaggagggcaccgcagggccgaggctgtgggtggtctcaggccccgctcttggcccttgcccggccctggaaaaggtactgggcacccgaggcctggggtggggacggggtggggaaaacgcagcagccggggt

SEQ ID NO: 196070 - DNA, 231 bp, Homo sapiens
  chr22:43609894-43610125
  hypo
ctttgggatctgtcacgcactttgtaagtgatgactgcacagacatcgtgaagggttttggaaacgacaaggaactttagaaaataccacactctctggccacaccaggcacctgggccttcgacaggagggcctcatcagagacaggaggagcccccgcccaccccccacccccacctctccttctaggcccgcacttgcctccacattccgacacgttgcgggcaccag

SEQ ID NO: 196071 - DNA, 31 bp, Homo sapiens; identical to SEQ ID NO: 34467
  chr22:43655459-43655490
  hypo

SEQ ID NO: 196072 - DNA, 31 bp, Homo sapiens; identical to SEQ ID NO: 101487
  chr22:43665129-43665160
  hypo

SEQ ID NO: 196073 - DNA, 30 bp, Homo sapiens
  chr22:43665419-43665449
  hypo
ggcagtgcggcccagcgtgtttgtacttag

SEQ ID NO: 196074 - DNA, 266 bp, Homo sapiens
  chr22:43689260-43689526
  hypo
aggcgcaggcccacgcgatcctcacagctacctgggtgacaggtcatgttattgaccccattttacagatgaggacacggaggctccgggagctggagtagcttgagtagagtgacacagcacaccagagtgaaggcgggacccagccctgcggtctggctgcagaacacgcgcctttggccccaggctaagctggctgcgtcagcgcatgtgctcagaccaatgctgcgaagagccggctgctcctcacacgagctggagtccag

SEQ ID NO: 196075 - DNA, 30 bp, Homo sapiens
  chr22:43821068-43821098
  hypo
attctcccagtcccacgtgatggccgctcg

SEQ ID NO: 196076 - DNA, 30 bp, Homo sapiens
  chr22:43835908-43835938
  hypo
gccttgcggcgggggcgtgtctcctacctc

SEQ ID NO: 196077 - DNA, 51 bp, Homo sapiens
  chr22:43861118-43861169
  hypo
tcatggactcttgatgtctgccgagtgaacggagaccatgacagttgggag

SEQ ID NO: 196078 - DNA, 31 bp, Homo sapiens; identical to SEQ ID NO: 101489
  chr22:43874752-43874783
  hypo

SEQ ID NO: 196079 - DNA, 30 bp, Homo sapiens
  chr22:43896364-43896394
  hypo
cccttccagtccactcgctttacatcagca

SEQ ID NO: 196080 - DNA, 30 bp, Homo sapiens
  chr22:43896991-43897021
  hypo
cctcacaggtggaagcggaggcctgggccc

SEQ ID NO: 196081 - DNA, 30 bp, Homo sapiens
  chr22:43898617-43898647
  hypo
ctttggccacatccacgaaggtcagtacgt

SEQ ID NO: 196082 - DNA, 410 bp, Homo sapiens; identical to SEQ ID NO: 101490
  chr22:43926570-43926980
  hypo

SEQ ID NO: 196083 - DNA, 30 bp, Homo sapiens; identical to SEQ ID NO: 101491
  chr22:43935642-43935672
  hypo

SEQ ID NO: 196084 - DNA, 30 bp, Homo sapiens; identical to SEQ ID NO: 101492
  chr22:43936313-43936343
  hypo

SEQ ID NO: 196085 - DNA, 49 bp, Homo sapiens; identical to SEQ ID NO: 101493
  chr22:44026050-44026099
  hypo

SEQ ID NO: 196086 - DNA, 30 bp, Homo sapiens
  chr22:44032204-44032234
  hypo
cggctggggagggaacggagggaccaggta

SEQ ID NO: 196087 - DNA, 31 bp, Homo sapiens; identical to SEQ ID NO: 34470
  chr22:44232852-44232883
  hypo

SEQ ID NO: 196088 - DNA, 597 bp, Homo sapiens; identical to SEQ ID NO: 134277
  chr22:44287457-44288054
  hypo

SEQ ID NO: 196089 - DNA, 30 bp, Homo sapiens; identical to SEQ ID NO: 101496
  chr22:44300929-44300959
  hypo

SEQ ID NO: 196090 - DNA, 30 bp, Homo sapiens
  chr22:44301499-44301529
  hypo
cctcagtgcctacgacgtagcgtgctgtca

SEQ ID NO: 196091 - DNA, 43 bp, Homo sapiens; identical to SEQ ID NO: 101497
  chr22:44317773-44317816
  hypo

SEQ ID NO: 196092 - DNA, 208 bp, Homo sapiens; identical to SEQ ID NO: 101498
  chr22:44322830-44323038
  hypo

SEQ ID NO: 196093 - DNA, 30 bp, Homo sapiens
  chr22:44368848-44368878
  hypo
cttcaaaccacggcccggaaacttcgaaag

SEQ ID NO: 196094 - DNA, 30 bp, Homo sapiens
  chr22:44369274-44369304
  hypo
gcagcaagagggcagcgtggaaagcacagg

SEQ ID NO: 196095 - DNA, 30 bp, Homo sapiens
  chr22:44390094-44390124
  hypo
ggtgtgcgctgtcggcgggcaccgggcaga

SEQ ID NO: 196096 - DNA, 30 bp, Homo sapiens; identical to SEQ ID NO: 101499
  chr22:44390635-44390665
  hypo

SEQ ID NO: 196097 - DNA, 31 bp, Homo sapiens; identical to SEQ ID NO: 101500
  chr22:44402182-44402213
  hypo

SEQ ID NO: 196098 - DNA, 965 bp, Homo sapiens; identical to SEQ ID NO: 134281
  chr22:44419838-44420803
  hypo

SEQ ID NO: 196099 - DNA, 30 bp, Homo sapiens
  chr22:44441815-44441845
  hypo
tttctatttctgcaacgagccaccattgga

SEQ ID NO: 196100 - DNA, 82 bp, Homo sapiens
  chr22:44449270-44449352
  hypo
attttctagaagttctcagtgatgggcatttaaaggattcggctgctgctccctgtggctttcacagcgctgccctgaatgg

SEQ ID NO: 196101 - DNA, 30 bp, Homo sapiens
  chr22:44455724-44455754
  hypo
tcgtctttggcggggcgtgtttgctcagca

SEQ ID NO: 196102 - DNA, 30 bp, Homo sapiens
  chr22:44472182-44472212
  hypo
gaaagggcggccacccgcagccctgtgtcc

SEQ ID NO: 196103 - DNA, 75 bp, Homo sapiens; identical to SEQ ID NO: 101502
  chr22:44487740-44487815
  hypo

SEQ ID NO: 196104 - DNA, 30 bp, Homo sapiens
  chr22:44489395-44489425
  hypo
gtccgtggttcaggacgcagccccccggca

SEQ ID NO: 196105 - DNA, 843 bp, Homo sapiens
  chr22:44493263-44494106
  hypo
gccgcgtgagcagcccgtagcagactgagggccatgatgtgcagtggcctgcgggggtttcatgtccagggtccccggtcaaggctagcaggtcatgaatgctgacaggcagcaagggctgactgtgagctctggagcccccagatacagaggtgtttctcatctggagcaagcgcctgctctgaatcaggcccctgccccgtgagacgcagctgctccctggtctgtgcagagcctctgattctggcctactgtcaccatcaccaggtgaccaggagatcccggcgggatctgcagacatggacacactgccacacatagctgcctgcctggggcctgctgtccaccctctcaggcccactgttcccctctaggcggggtcaggaatgaaagctaccccacggggacaggtaaagaccggagatgcctctgagaaagtgtttggtaacagtaagcctcgaaacggcatctctgtcctccacctttcacagtctctgggtcagacgccccattcctctcagtggtcccgccgactgaggcaggacccctcaagaagcacacagtcctgggacatccgagccaccatggcatgctgcccagtctggggtcagacgtgggctcagagccttcaggagggagcagcgagttccctgtgggggccacatgagctgggcgggcccgaatcttgcttctcctcagttcagcgagagcaaggtgtggggacatgctagatagggcaatgctgagatttttagtgtgggttgaaggggatgtttccagaaacgggctctctgaaggctgggattgggtagtgacctgctcactctccgtcctgcaccccct

SEQ ID NO: 196106 - DNA, 147 bp, Homo sapiens
  chr22:44495149-44495296
  hypo
ttcagaggtgctcggcgcccgctggcttctgtgtggtgctgggcatttctgctgtggagcacgcctagccttggtgggtgccccctccgcagtcccgcctccccactgtctccacggcactgtcctccatgacgggctcagctggct

SEQ ID NO: 196107 - DNA, 132 bp, Homo sapiens
  chr22:44495596-44495728
  hypo
ccagattccggccagcggaggcatctcatgccctgtgaatgctgctctctccttatttctcctgaaaaatggaaatggtttggaccagctgctggcggagtctgggaggagcgaggccgggcagaatgatga

SEQ ID NO: 196108 - DNA, 30 bp, Homo sapiens
  chr22:44495931-44495961
  hypo
gaggagaacgaggagcgcacgatgattgac

SEQ ID NO: 196109 - DNA, 337 bp, Homo sapiens
  chr22:44496283-44496620
  hypo
aggaatgagtgctggcgtgagctagtgtagtaccttacagatggagttggaactccgtctggagcctggtggggtctagattcagatttaaccctgaaaagcaggaggggtcaccctggccactcctggccaggagccatctgatgccgatgcctgcgctgagtggacagtcagtttccaccacgtctggaggcgtgaatcccagctgggcgaggaacctggctgccccgctcccagaagtcagggaacagtgagggaaggggcccatggtgctggccttcttgggcagcggctgtccttctccagcgtggctcctgctcaccgtgaggcagtgctt

SEQ ID NO: 196110 - DNA, 187 bp, Homo sapiens; identical to SEQ ID NO: 101503
  chr22:44500127-44500314
  hypo

SEQ ID NO: 196111 - DNA, 30 bp, Homo sapiens
  chr22:44500916-44500946
  hypo
gcagcgttactctcccggtgatgtgggaca

SEQ ID NO: 196112 - DNA, 43 bp, Homo sapiens
  chr22:44527471-44527514
  hypo
ggccccgaggctgggcgctccggtggagcgtggactgtgagtt

SEQ ID NO: 196113 - DNA, 30 bp, Homo sapiens
  chr22:44532237-44532267
  hypo
ttctaagatgatctccggccccgcagcttc

SEQ ID NO: 196114 - DNA, 30 bp, Homo sapiens
  chr22:44538737-44538767
  hypo
tgctgcttctgctgacgcaggttccgaagt

SEQ ID NO: 196115 - DNA, 41 bp, Homo sapiens
  chr22:44545747-44545788
  hypo
tgggcaggctgggcgcggtggctcacgcctgtaatcctagc

SEQ ID NO: 196116 - DNA, 22 bp, Homo sapiens
  chr22:44559313-44559335
  hypo
cgccactgtgcactagcctgcg

SEQ ID NO: 196117 - DNA, 464 bp, Homo sapiens
  chr22:44559544-44560008
  hypo
gcgcacatggccctccgcagacttcctcacccgtgtctgcccaccctgtggcccgccccgggctcactgggtccttgtggacgtcagcgttgcagaggctcggtcctgtccatgccggctgtcctccagcagtgggccgtgtgtgggaacgactgttggaccctaacgctgacccaccccccttccttggcaggtccacaatgtgtccttcgcctttgagctgatgctggacggaggcctcaagaaacccaaggctcgtcctgaaggtaatgcccctggctcaggttcccccgggagaggtgcgcacggaggggaagaaaaacgggtcctagaagtggctggaaggctggcatgttgttccccagatgggccccacgtctctggctctggggcaagggtctgccaaccccagctcctcagtctcctcattttgggaaccaggaggacttcgctggtggagctgg

SEQ ID NO: 196118 - DNA, 30 bp, Homo sapiens
  chr22:44560255-44560285
  hypo
ccagcagagctggggcgggcggttgcttcc

SEQ ID NO: 196119 - DNA, 242 bp, Homo sapiens
  chr22:44564262-44564504
  hypo
cgcagggtgtcagcccgcgccaggagctctcacaaaacctgtgtgtctggggaggcactgcccagagcgtcctggacatggtggtggccagtctttaaggggaagcgctgtgtgtggatgcggcagctggtgtcatgctggagacgtggcttctgagagtacctaccgcaatgacaggaggatggcacgcctctgaagtttctctgtttccttctgcagacgtggttaacttggacctcaaa

SEQ ID NO: 196120 - DNA, 31 bp, Homo sapiens; identical to SEQ ID NO: 34475
  chr22:44601832-44601863
  hypo

SEQ ID NO: 196121 - DNA, 90 bp, Homo sapiens
  chr22:44612659-44612749
  hypo
tcttctccatcacgtcggtacagtcggccttcaatgtctgcgggttccacatcttcagattcaacaaccttggatcaagaatattcagag

SEQ ID NO: 196122 - DNA, 30 bp, Homo sapiens
  chr22:44673422-44673452
  hypo
gctggatcgctgggccgcacctcctaggca

SEQ ID NO: 196123 - DNA, 30 bp, Homo sapiens
  chr22:44673780-44673810
  hypo
cactgccctgatgaccggccaggctggagg

SEQ ID NO: 196124 - DNA, 189 bp, Homo sapiens
  chr22:44681356-44681545
  hypo
cccgcaatgtgtgcacggcctgtggggcttgtggcagcgggcctgggggaggctgcggctgtggggcccgctgacccggccgaggggcccgagcggggttcccccaccgccgggggtcctgtttcatccatcgtccttggatgccccaccgtgccaggtagaccttgcagatgtcgtagttcattgccg

SEQ ID NO: 196125 - DNA, 30 bp, Homo sapiens
  chr22:44741609-44741639
  hypo
tggacaactgaaggacgggctgggttgata

SEQ ID NO: 196126 - DNA, 122 bp, Homo sapiens
  chr22:44745293-44745415
  hypo
gcacagagtcctgagcggtcggcaaatcacagtgactgttttctccccccatggaccaactggaggggagcgctcaggtgtctgctgtccaggtgtccgttggctggcgcccctgacctgcg

SEQ ID NO: 196127 - DNA, 31 bp, Homo sapiens; identical to SEQ ID NO: 101506
  chr22:44755575-44755606
  hypo

SEQ ID NO: 196128 - DNA, 200 bp, Homo sapiens
  chr22:44790442-44790642
  hypo
gggcttccaaggcaacgcagagcagctgcgagacaagaagcaggtgaaaacgcctgtgcggcagtcgctgctgggtggattctcctaagcacaggttttcaggagctggaaccacatttcctagtctgtgggttcaatcacactctgaggttcctcagggaatgacccccacgcaatgctaacatcggcttctttgttaa

SEQ ID NO: 196129 - DNA, 241 bp, Homo sapiens
  chr22:44808387-44808628
  hypo
aatagctggcgaggccgggggagcacgtccctccagagcacccagcaccgccccatgccctgtctaagcaggtcacccctccctggttgtctctcacagtccctgattccggagcactagtcctggagaactgatgtgcttccgtgaccccaacttgcttgacctggtctctcccgtcgggatggacactccccgagcaggtccactgcttactccgggctcccagcgccctccgttcctg

SEQ ID NO: 196130 - DNA, 19 bp, Homo sapiens
  chr22:44813100-44813119
  hypo
agagcgagattccctctca

SEQ ID NO: 196131 - DNA, 30 bp, Homo sapiens
  chr22:44824089-44824119
  hypo
gggtcccgctccacgcgccactcaggaccc

SEQ ID NO: 196132 - DNA, 932 bp, Homo sapiens
  chr22:44892379-44893311
  hypo
aaggggtcagccctcgtggtccgtcagcgtgcggcggagtccctgtgcctaagtagcagagcggtagtcattgaaacaggccgggatgccagcaagagggaggcgagcatgcagtgagcgataggtacaaagctagcacgtaagaggaagcacggcaaggtgggcaaccagggcgccaggaaggacggaaggaagatctcctcggggaacacgtctggagaggcaagaagggaggtcttcaaacaggggcaaagctgtcgtatgggcatttcttctacacagcaaagagcgtatgctacctgggtggctgcagacgctaccaagtgctggcggattcttaaagattccgtgctcgggcaggcagggctggcgctggactagtcccgttggaagctggatgcactgggcaaggccccgtgcccgcagaggccagctggcggcagagcatctgcctctctcgcacagccctattagaggcagaagtcttcctgatttgggcgcgccgcgcatgccggagcggagacttgtaggttctccgcaactctgccaggaacccctgatagttgttgcgcaaggggctgtcaggttgcatgtgggggatagcccacttctccgcctccccagtcagtcgagacacaaggaaggccacacgctcggcctcacccgggaagcgggaggcctggaagatcatgaatctgtccatctgcatcaggaaccccgccaaccggcctgggtccccggaaaagggctcgggcagagaggttggaggtgtggtcatgggtcgagtcccgtttgaagtaattgaggagatgggcggggtgatctgcagagcccccgggatccgcgccctggtgcgtaacaaggtcagctctgccatcacgctctccagcatgttggtgagattggccttctccgcccgcagggtggaagcc

SEQ ID NO: 196133 - DNA, 22 bp, Homo sapiens
  chr22:44945916-44945938
  hypo
tttttttttgagaaggagtatc

SEQ ID NO: 196134 - DNA, 170 bp, Homo sapiens
  chr22:45004115-45004285
  hypo
gtgccggccctctcccgctgtgtggcctcggggaagcctcttcccctgtctgagcctctgcattctcatctgtagaatggggatgctctgtcctgccttccagagcgttgctgatatcagaatccaggtgtggaacttgggcagcagagtagcgccggtgccctccaggc

SEQ ID NO: 196135 - DNA, 526 bp, Homo sapiens; identical to SEQ ID NO: 134285
  chr22:45015982-45016508
  hypo

SEQ ID NO: 196136 - DNA, 30 bp, Homo sapiens
  chr22:45056209-45056239
  hypo
gctcagacacgatgacggaggggtcttgct

SEQ ID NO: 196137 - DNA, 30 bp, Homo sapiens
  chr22:45056448-45056478
  hypo
gggctcagctgtgggcgtggcggaggggcc

SEQ ID NO: 196138 - DNA, 87 bp, Homo sapiens; identical to SEQ ID NO: 134286
  chr22:45064149-45064236
  hypo

SEQ ID NO: 196139 - DNA, 781 bp, Homo sapiens; identical to SEQ ID NO: 134287
  chr22:45064286-45065067
  hypo

SEQ ID NO: 196140 - DNA, 31 bp, Homo sapiens; identical to SEQ ID NO: 101514
  chr22:45069631-45069662
  hypo

SEQ ID NO: 196141 - DNA, 339 bp, Homo sapiens; identical to SEQ ID NO: 101515
  chr22:45074486-45074825
  hypo

SEQ ID NO: 196142 - DNA, 270 bp, Homo sapiens
  chr22:45075604-45075874
  hypo
ataatagtaagactcagcctccccgctctgggacactcagtctgatggggcaggctggtcagaagacatagagccatggtgtgtttggaactttcacagagggaagcctggggctcgggaagcccggaaaagatgccggcgcagcctgagggcttgtacaggtgccactgtgccgaagggtggctacgagggaggcaggtgtatgggtgagggtgagtgcagtgtggctggaggcttagggaaaggtgagtaggacggcgagagacccac

SEQ ID NO: 196143 - DNA, 53 bp, Homo sapiens
  chr22:45085114-45085167
  hypo
gatcctgcccacctgcgtccagttagtctgctaactcacgggtcgtctttgga

SEQ ID NO: 196144 - DNA, 177 bp, Homo sapiens; identical to SEQ ID NO: 101517
  chr22:45088596-45088773
  hypo

SEQ ID NO: 196145 - DNA, 1239 bp, Homo sapiens; identical to SEQ ID NO: 134288
  chr22:45097772-45099011
  hypo

SEQ ID NO: 196146 - DNA, 33 bp, Homo sapiens; identical to SEQ ID NO: 101519
  chr22:45113076-45113109
  hypo

SEQ ID NO: 196147 - DNA, 33 bp, Homo sapiens; identical to SEQ ID NO: 34478
  chr22:45113348-45113381
  hypo

SEQ ID NO: 196148 - DNA, 31 bp, Homo sapiens; identical to SEQ ID NO: 34479
  chr22:45116348-45116379
  hypo

SEQ ID NO: 196149 - DNA, 263 bp, Homo sapiens
  chr22:45120587-45120850
  hypo
gtgtcttgacctctgcgagcctctcttgcctcccctgtaataaaaggggaaccccggtgaatgcctgcggctgggttggtgaagactgaatgagcttctctggaataaagagtaaacacttgggaagaagctctgcaggcggagagaggaggagcccgtggcatccgggatttggacaggtggaaggcaggagcaaaccaagtgttgcaggcccagccctgccaggtgtctctccagaaggtgtgagacgcagaggccactgt

SEQ ID NO: 196150 - DNA, 38 bp, Homo sapiens; identical to SEQ ID NO: 101523
  chr22:45121860-45121898
  hypo

SEQ ID NO: 196151 - DNA, 164 bp, Homo sapiens; identical to SEQ ID NO: 101524
  chr22:45122234-45122398
  hypo

SEQ ID NO: 196152 - DNA, 281 bp, Homo sapiens; identical to SEQ ID NO: 34481
  chr22:45123030-45123311
  hypo

SEQ ID NO: 196153 - DNA, 130 bp, Homo sapiens; identical to SEQ ID NO: 101526
  chr22:45123856-45123986
  hypo

SEQ ID NO: 196154 - DNA, 20 bp, Homo sapiens
  chr22:45128568-45128588
  hypo
cacatacttgtgcacacgca

SEQ ID NO: 196155 - DNA, 19 bp, Homo sapiens
  chr22:45128887-45128906
  hypo
cacacgtgcacatgcacat

SEQ ID NO: 196156 - DNA, 63 bp, Homo sapiens
  chr22:45135949-45136012
  hypo
ttaaacgagtgaaatcggtggttaattagttagtggttggtctaccatcggcatcaccggggt

SEQ ID NO: 196157 - DNA, 192 bp, Homo sapiens
  chr22:45136241-45136433
  hypo
cctgcactgtgacagcgtctggggtggaggtggcacttaggaaaacccagggtgggttacgataggcttcccagtgaccctgactgcacccctgctgagagctcagatttgtttgggcgtccgtgtgtgtgtgtgtgtgtgtgtgtgtaagtgggtaggtgtgtgtgtctgcacgcacgcacaagtgtttgg

SEQ ID NO: 196158 - DNA, 136 bp, Homo sapiens
  chr22:45137749-45137885
  hypo
gagactccgtctcagaaaaaaaaaaaaaaaaaaaaaacctgatgtgaggtgaaagaagccagccaggaaacaccacatactggatgattccattccgagatgttcagaataggcaaatccacggggacagaaagta

SEQ ID NO: 196159 - DNA, 43 bp, Homo sapiens; identical to SEQ ID NO: 101529
  chr22:45175292-45175335
  hypo

SEQ ID NO: 196160 - DNA, 31 bp, Homo sapiens; identical to SEQ ID NO: 34483
  chr22:45175810-45175841
  hypo

SEQ ID NO: 196161 - DNA, 200 bp, Homo sapiens; identical to SEQ ID NO: 101531
  chr22:45181175-45181375
  hypo

SEQ ID NO: 196162 - DNA, 30 bp, Homo sapiens; identical to SEQ ID NO: 101532
  chr22:45182002-45182032
  hypo

SEQ ID NO: 196163 - DNA, 31 bp, Homo sapiens; identical to SEQ ID NO: 34484
  chr22:45210719-45210750
  hypo

SEQ ID NO: 196164 - DNA, 86 bp, Homo sapiens; identical to SEQ ID NO: 101534
  chr22:45220425-45220511
  hypo

SEQ ID NO: 196165 - DNA, 31 bp, Homo sapiens; identical to SEQ ID NO: 101535
  chr22:45221873-45221904
  hypo

SEQ ID NO: 196166 - DNA, 184 bp, Homo sapiens; identical to SEQ ID NO: 101536
  chr22:45242865-45243049
  hypo

SEQ ID NO: 196167 - DNA, 30 bp, Homo sapiens
  chr22:45275277-45275307
  hypo
ggcactgcgaggaggcggtgctcagggtca

SEQ ID NO: 196168 - DNA, 339 bp, Homo sapiens
  chr22:45277447-45277786
  hypo
atcatacagcacagtttctcccggagtcgtgagaatgacaggagggaccgtggcagctgcgggatttgccggcctcctcgctctgcacctctgcgtgtgtgcatgcgtgtctgtggtcgtggccgcgtgcgatgcacacacgcgtgttcagtgcaattcggcaccatgtgatatgctcggggtgggagcccgtggctcctggacgcttatcctgttgtgctgagtccctcaggactgggatgtgggaatcgggcaagggtgacaagctgccactgcccaccctggatgcagaagcccttggcagcaagtctggtccccgaaggccggaacctcccgagc

SEQ ID NO: 196169 - DNA, 124 bp, Homo sapiens
  chr22:45288209-45288333
  hypo
gaagtagaggaaaggcgtggacaggctgatgaggccagaggacgccccatggtgggctctccccacagacagggcaattgcagagcctggaactggctgccgctctgcgcgaaacgcctccctc

SEQ ID NO: 196170 - DNA, 30 bp, Homo sapiens
  chr22:45288864-45288894
  hypo
gaagggcactggccacgcccacccagcccc

SEQ ID NO: 196171 - DNA, 269 bp, Homo sapiens
  chr22:45312206-45312475
  hypo
tgaccacagacacggcggtgctgggggccatggcggcggcattgctgggggaggtggagatgatggcgtaggccacccccgcactgctcagcggagaggcgagggcggcgggctcggcgagggcctggggctggctgccgggcgctggcacatggctgacagtgttgttggcggtggggagggctgggctggggttcttgacgctgaccacggtggccttctggaatgttgggggctgcttgggtggccggtcccggcccggggcaacg

SEQ ID NO: 196172 - DNA, 214 bp, Homo sapiens
  chr22:45312784-45312998
  hypo
aggcttggaaggcagcgcttgggcgcgaggggacagtctgtgcagtgtgacgccctgcagatcaagtcccaagcggcaaagccccctttggccttggaagtctggaaagcgctgcccctcggcagggactgggaggggcttcgagggctcctgggccttgcccagttctgcttctcagtctgggtgggggctgctgctgcgctcccgtgaaaac

SEQ ID NO: 196173 - DNA, 30 bp, Homo sapiens
  chr22:45322197-45322227
  hypo
gcatgaggggcaggccgtggggccccgggg

SEQ ID NO: 196174 - DNA, 49 bp, Homo sapiens
  chr22:45322690-45322739
  hypo
ggccgtgtctgtatccgggtgttgccatgtgggccgggagtgaccgtgt

SEQ ID NO: 196175 - DNA, 30 bp, Homo sapiens
  chr22:45322985-45323015
  hypo
gacggatggaggcggcggagaggcagaacc

SEQ ID NO: 196176 - DNA, 164 bp, Homo sapiens
  chr22:45389285-45389449
  hypo
ccaccacagcggcaccggctccatcctcccacccgccagggctctcccacagcctagaggatggggaggctgaaccagaccccagcttcccggtcaaccggagaacaggccacagccaagaacagcgagtccagaaccgctcccacacacggcaacgtgcagtt

SEQ ID NO: 196177 - DNA, 78 bp, Homo sapiens; identical to SEQ ID NO: 101538
  chr22:45392667-45392745
  hypo

SEQ ID NO: 196178 - DNA, 138 bp, Homo sapiens; identical to SEQ ID NO: 101539
  chr22:45392804-45392942
  hypo

SEQ ID NO: 196179 - DNA, 31 bp, Homo sapiens; identical to SEQ ID NO: 101540
  chr22:45395493-45395524
  hypo

SEQ ID NO: 196180 - DNA, 2110 bp, Homo sapiens; identical to SEQ ID NO: 58133
  chr22:45402900-45405010
  hypo

SEQ ID NO: 196181 - DNA, 385 bp, Homo sapiens; identical to SEQ ID NO: 58134
  chr22:45405046-45405431
  hypo

SEQ ID NO: 196182 - DNA, 482 bp, Homo sapiens; identical to SEQ ID NO: 58135
  chr22:45405476-45405958
  hypo

SEQ ID NO: 196183 - DNA, 521 bp, Homo sapiens; identical to SEQ ID NO: 58136
  chr22:45406039-45406560
  hypo

SEQ ID NO: 196184 - DNA, 104 bp, Homo sapiens
  chr22:45474744-45474848
  hypo
atacaaaagaacgctcgacggttgcatgcaaaaaactggatggatctcccagatgccgtgacaagcaaaagaaggcagctcaggccgggcgcggtggctcacac

SEQ ID NO: 196185 - DNA, 30 bp, Homo sapiens
  chr22:45581447-45581477
  hypo
ctttgacacacgagccgtgtgaattcacta

SEQ ID NO: 196186 - DNA, 147 bp, Homo sapiens
  chr22:45581808-45581955
  hypo
gcccaagggctcccgcgtgtgtgttctgatcttcagtgcgtagcacattctccatttagaaaagagtggtcagaataattgtggacggtacagtggctttttaaaactacagtctttaggtgtaaggtttggcgccgggagcaattt

SEQ ID NO: 196187 - DNA, 145 bp, Homo sapiens
  chr22:45584840-45584985
  hypo
ccgagttaagcccgctcccaccagctactctccgataaagatacgctgtttgagcagcacagaggaggttcgttgaaaccgctgttgccgtagatgatgcctgtgacgcgccgccgcccttccactgtttcgccccgaacatctg

SEQ ID NO: 196188 - DNA, 148 bp, Homo sapiens; identical to SEQ ID NO: 34490
  chr22:45591072-45591220
  hypo

SEQ ID NO: 196189 - DNA, 1079 bp, Homo sapiens
  chr22:45592908-45593987
  hypo
cccggccccgggagtcgagtggcctcgcctggctgcggctccagcactggcgtgccatcgcagaccccggtggcggtggacaggtaggcacttggcagcactccgagggctgggcccggccggggctctgcgcaggctccgcacgcggctaggtcatcaggatgggcttctgccgaacttccaggatgtctagggccggcaggagggaagcaggtgaaacagtaaccctcaacagcggtgagtgctatggtcacggcagtgccacttctgaaggaagcccgcctcagccactcatgcatctcctctccaggcctcacagactgcagaggagacgtgtctccaccatcctcaccctgcagactgggaaatgggctcgcagcaacggcacaccctgcagggcctcaggtgcaagctggtgtgggggccagagccactgcctgtcacagctgctgcaggcctgggtcagcgaggtggcctgagagcctcccctcgcccgtgagtaacacacacctgggcatctgtggccactcaagaggggacagcaggtgcgccagaaaggtgaacaaagggaggacttcagctctgggaaagctacggctccacccaaagtctgagacaaagaggccaagagccctgcaaagaaacccaaccaaccgacaggacagggcgggatgactccgggtggctcacaagtaccaaggccctggaggcagagctggctgtgagaaggtgcggctgcttccccacatccgccagcattacctgttaaaatccgatgcagcggcaacgtgacgtaggttaagtgtgcatagagaaggaagtttccatctgctctgttcagcttcagccaggacccgaccagggaccgtcctgtgcccgacagggaccgagaccgcaggttggttgcattgtgcagatcggctggaggaaagaaggccaggtcaaggcccccacagcatgggacgcggcgggagcagcaggaggccagctcccagtccaggctgaggccaaactctgctgaggccaggacgctccttaccaacacccccacaccagcacccacacgctccagagctgct

SEQ ID NO: 196190 - DNA, 387 bp, Homo sapiens
  chr22:45594189-45594576
  hypo
atgggagcagcaaggctgagccgacctgcaccattacccagtcctgcggtccaggctgggggaacctgccccagagaggcagactagggcagtgatcagtacttcttactgattcgggaacgggcccaggtggggaaggggcttgcccaagttcacacaagagcaggtcgaggccagtgctggagtccctgacccaggccagggccttgagcaggtgggacacccctgcttcttggtcccagtggtcaggacaaagactgccacctcttctgatcaatgctgcagccctgctccctgctgggggaggtgctcagtgggagttgtcagcgaatccttcacgtcgtttttttttgtttgttttgagatggaatctcactcttgcccagg

SEQ ID NO: 196191 - DNA, 86 bp, Homo sapiens; identical to SEQ ID NO: 34493
  chr22:45594815-45594901
  hypo

SEQ ID NO: 196192 - DNA, 160 bp, Homo sapiens; identical to SEQ ID NO: 101549
  chr22:45595257-45595417
  hypo

SEQ ID NO: 196193 - DNA, 30 bp, Homo sapiens; identical to SEQ ID NO: 101550
  chr22:45598871-45598901
  hypo

SEQ ID NO: 196194 - DNA, 573 bp, Homo sapiens
  chr22:45603890-45604463
  hypo
gatcacacggctgttcggggcagcaccacagcacaggcaggcgaaagagcaggttccccatcagaaaggtgtccgtgtgcgcaccaaagccaggcccaagaggacactgggagctgcccggtacccactgacaggagggtggccaggccgccatggtacactctgcaggcattacacagcagtgagaccagattacaaccacctgtgtcaacaggcatgactcacaaacatgacatgcggagaaagaagcctgaaacaacatatactgcccgattccaatgtatgagctgtgagaacaggcagaaccaccgactccacacacatgagctgtgagaacaggcagaaccaccgactccacatgcacgagctgtaagaacaggtagaacccgccaactccacacacacgagctgtgagaacaggcagaacccaactccacacgcaggagctgtgagaacaggcagaaccaccgactccacacgcacgagctgtaagaacaggcagaacccaccgactccacatgcaggagctgtgagaacaggcagaacccgcccgggaagtttgaggagacagag

SEQ ID NO: 196195 - DNA, 30 bp, Homo sapiens
  chr22:45606708-45606738
  hypo
ccactgaaactgctgcgccaaggccgccac

SEQ ID NO: 196196 - DNA, 324 bp, Homo sapiens
  chr22:45607124-45607448
  hypo
gaaggaaaacaaaagcgtttccatgtctggcatatggagttgattaaacattttacgaacagcaaaagcttgtgaaaaacagagaaggaagcatgcaaaatgtattttattagctcctcccacactgcgatttagtggatgaaatacgttaggcgaatcacttcatctccgagccctccgtttcctcatctgtaaaaggggtaagaacacccaccctgtcgagttgttgggacttcacaaggaggctaagaagaagagagctcagcactgtgtctagatgatggcgagggctcagtaagtggaaggcaccgtcatcatcaccac

SEQ ID NO: 196197 - DNA, 361 bp, Homo sapiens; identical to SEQ ID NO: 101553
  chr22:45607750-45608111
  hypo

SEQ ID NO: 196198 - DNA, 209 bp, Homo sapiens
  chr22:45613815-45614024
  hypo
agggactagcaggggagagggcgcgtgggaagtgagcactaagcctgggccgtccacaccccagtgcggtgtctgccacctctgaattgccactaactctcctcctggttctgcacgacgctggactggtggcatgacagcaccaagagctcaacagtgctggtttcaggagcgaggaacgtgatgacagctcgcgcgtgccctgcacc

SEQ ID NO: 196199 - DNA, 30 bp, Homo sapiens; identical to SEQ ID NO: 101555
  chr22:45639340-45639370
  hypo

SEQ ID NO: 196200 - DNA, 121 bp, Homo sapiens; identical to SEQ ID NO: 101556
  chr22:45653544-45653665
  hypo

SEQ ID NO: 196201 - DNA, 31 bp, Homo sapiens; identical to SEQ ID NO: 101557
  chr22:45695618-45695649
  hypo

SEQ ID NO: 196202 - DNA, 30 bp, Homo sapiens
  chr22:45707226-45707256
  hypo
acccagctttgctcccggaggcccaccgtg

SEQ ID NO: 196203 - DNA, 169 bp, Homo sapiens
  chr22:45717843-45718012
  hypo
ttcgctttgttgtgccgcttgctgtgttttgcttctctgataagtcatctgtgttcatgtgcactggaaattcttctagagcagtgtcccaagagacagcgaaaaccccagctcggagcccacagagcccatccttcatctgctcctgtgtgtgcgttttccttctgtg

SEQ ID NO: 196204 - DNA, 30 bp, Homo sapiens
  chr22:45718364-45718394
  hypo
gtgagtgtgcgcactcgttctttagtacct

SEQ ID NO: 196205 - DNA, 31 bp, Homo sapiens; identical to SEQ ID NO: 34498
  chr22:45734833-45734864
  hypo

SEQ ID NO: 196206 - DNA, 39 bp, Homo sapiens
  chr22:45741338-45741377
  hypo
cctcaggatagatgccgatcagcgcgtcggctctggaat

SEQ ID NO: 196207 - DNA, 618 bp, Homo sapiens; identical to SEQ ID NO: 101560
  chr22:45808542-45809160
  hypo

SEQ ID NO: 196208 - DNA, 185 bp, Homo sapiens
  chr22:45814421-45814606
  hypo
cgagcagcactgacccgcccagccacttctgtgccggaaagaccgggtaacgaagacgacaacatccctgctctcttggggtgtgtcagcgggtgatggaatagtgaggagctatgaggaagacaaaacagggaccaggcacagagaggaatgcactccgccttcttgagcgcctcctctctgct

SEQ ID NO: 196209 - DNA, 438 bp, Homo sapiens; identical to SEQ ID NO: 101562
  chr22:45821510-45821948
  hypo

SEQ ID NO: 196210 - DNA, 150 bp, Homo sapiens; identical to SEQ ID NO: 34501
  chr22:45822397-45822547
  hypo

SEQ ID NO: 196211 - DNA, 73 bp, Homo sapiens; identical to SEQ ID NO: 34502
  chr22:45826805-45826878
  hypo

SEQ ID NO: 196212 - DNA, 26 bp, Homo sapiens
  chr22:45837780-45837806
  hypo
gcatgagccaccgcgcccagcaagag

SEQ ID NO: 196213 - DNA, 30 bp, Homo sapiens
  chr22:45874013-45874043
  hypo
agagaaacactgtaacggagactccctgca

SEQ ID NO: 196214 - DNA, 31 bp, Homo sapiens; identical to SEQ ID NO: 34503
  chr22:45882359-45882390
  hypo

SEQ ID NO: 196215 - DNA, 210 bp, Homo sapiens
  chr22:45897737-45897947
  hypo
ccgttatgtgagttgcggatcattcactcctgttccgtttgtcgtgctcctaagcccgaatactccacgatattcatctgccttgatgacgctaggcttcccaattggaggaattatgaatgtgcggctacatgtctttctgtcttttggagcacatgttgtatgcgtttctgctgagtgtaaggctgggcggggcgtcggtggctcaag

SEQ ID NO: 196216 - DNA, 18 bp, Homo sapiens
  chr22:45901939-45901957
  hypo
tgccggctggcagccctg

SEQ ID NO: 196217 - DNA, 47 bp, Homo sapiens; identical to SEQ ID NO: 101567
  chr22:45914454-45914501
  hypo

SEQ ID NO: 196218 - DNA, 270 bp, Homo sapiens
  chr22:45929577-45929847
  hypo
ctaggatgtattaggatgggtcgttcttgctggtcacccccgcactgcctcggtctctcctagatgtcaatgaatgcatcacgggcagccacagctgccggcttggagaatcctgcatcaacacagtgggctctttccgctgccagcgggacagcagctgcgggactggctatgagctcacagaggacaatagctgcaaaggtacagcatgcgctccgagtctgcaaacctggtcttccaggcgtagatacggcgcggtgggaagggcag

SEQ ID NO: 196219 - DNA, 155 bp, Homo sapiens
  chr22:45932766-45932921
  hypo
tgtgtggggtgcggccggggagctggccggcctgggttactggttctggaaagacaggaggtgagtcctgctttccccagccgttgtcaggttaactgcctggctaggccgctgcagtcagcgcttaagtcctgatccaccggctctccctcggc

SEQ ID NO: 196220 - DNA, 79 bp, Homo sapiens
  chr22:45938765-45938844
  hypo
accaggcaggcacagcgcggcagtcccggctctcccactgacttcccgcatgctcgggacaagtcactttgcattcctt

SEQ ID NO: 196221 - DNA, 89 bp, Homo sapiens; identical to SEQ ID NO: 101570
  chr22:45940275-45940364
  hypo

SEQ ID NO: 196222 - DNA, 31 bp, Homo sapiens; identical to SEQ ID NO: 34506
  chr22:45948181-45948212
  hypo

SEQ ID NO: 196223 - DNA, 35 bp, Homo sapiens
  chr22:45949259-45949294
  hypo
cgtggcagggggggacggggcgggctcgcctatgc

SEQ ID NO: 196224 - DNA, 43 bp, Homo sapiens; identical to SEQ ID NO: 101572
  chr22:45958410-45958453
  hypo

SEQ ID NO: 196225 - DNA, 30 bp, Homo sapiens; identical to SEQ ID NO: 101573
  chr22:45958777-45958807
  hypo

SEQ ID NO: 196226 - DNA, 428 bp, Homo sapiens; identical to SEQ ID NO: 101574
  chr22:45959025-45959453
  hypo

SEQ ID NO: 196227 - DNA, 30 bp, Homo sapiens
  chr22:45959769-45959799
  hypo
cacgggatgcggttgcggctcctaggatgc

SEQ ID NO: 196228 - DNA, 18 bp, Homo sapiens
  chr22:45969095-45969113
  hypo
ctccgtctcaaataaata

SEQ ID NO: 196229 - DNA, 31 bp, Homo sapiens; identical to SEQ ID NO: 101576
  chr22:45971082-45971113
  hypo

SEQ ID NO: 196230 - DNA, 183 bp, Homo sapiens
  chr22:45975265-45975448
  hypo
gatgatcacaggtgccgtcccggcagcgggcttctgggaacggaatgtggatgaggccacaaggacccagcggcttcccccggcacagttggtcacgggtgccctggtctttggaattctgggctggggctgcgtgggggagggccccagcctggcccttggaattgtcgtgcctgtagccct

SEQ ID NO: 196231 - DNA, 30 bp, Homo sapiens
  chr22:45975853-45975883
  hypo
gggttgaacccttgccggctccttaccgtt

SEQ ID NO: 196232 - DNA, 126 bp, Homo sapiens; identical to SEQ ID NO: 34509
  chr22:45976303-45976429
  hypo

SEQ ID NO: 196233 - DNA, 30 bp, Homo sapiens
  chr22:45981735-45981765
  hypo
ccctgtgtgacggcgcgtagccccccgaaa

SEQ ID NO: 196234 - DNA, 408 bp, Homo sapiens
  chr22:45982089-45982497
  hypo
tgtccatgtgagtgccgcactgcacacccgagattggttttccagcccaggacctggctaggaagggtcggcggggtacagcccgctcagcaccccctgccgtggccgcctctgcaggaggagacagcatggtggggagaggggactgtcttgccctgctgaacccccaggggtcggctacacccctctctacaggcctttttggtgtagcgcaggtgagacaatgcagccagagaggttgggagattacacagctccacatctgcggtgtcaccgtggacgggaccgtcatggtcccagcgggagggtggaaggaagccaaacttgagacgtctgccttgcacaaaggcagtggtgctcgtcaaggtttgggctggaagacttagcacctggcgggcatctgaaaat

SEQ ID NO: 196235 - DNA, 360 bp, Homo sapiens; identical to SEQ ID NO: 101578
  chr22:45982907-45983267
  hypo

SEQ ID NO: 196236 - DNA, 31 bp, Homo sapiens; identical to SEQ ID NO: 101579
  chr22:45994947-45994978
  hypo

SEQ ID NO: 196237 - DNA, 393 bp, Homo sapiens; identical to SEQ ID NO: 101580
  chr22:46009355-46009748
  hypo

SEQ ID NO: 196238 - DNA, 31 bp, Homo sapiens; identical to SEQ ID NO: 101581
  chr22:46023052-46023083
  hypo

SEQ ID NO: 196239 - DNA, 30 bp, Homo sapiens; identical to SEQ ID NO: 101582
  chr22:46037471-46037501
  hypo

SEQ ID NO: 196240 - DNA, 88 bp, Homo sapiens; identical to SEQ ID NO: 101583
  chr22:46040671-46040759
  hypo

SEQ ID NO: 196241 - DNA, 210 bp, Homo sapiens
  chr22:46042934-46043144
  hypo
cacttaccagccactgtcctatgccctctcgttgaatgctcacaatgacccaatgggatgaccctgtcaccatcgtccatcccatctttcagaagtggacgctgagtcatgctgaagttatataatgcactcagctcacatggctggtagcacttgaggcagggatctggacacagacggcttgactccggagctcctctcaaccacaag

SEQ ID NO: 196242 - DNA, 160 bp, Homo sapiens; identical to SEQ ID NO: 101585
  chr22:46051558-46051718
  hypo

SEQ ID NO: 196243 - DNA, 30 bp, Homo sapiens
  chr22:46081319-46081349
  hypo
taagctttttaaagtcgctgtacatttttt

SEQ ID NO: 196244 - DNA, 120 bp, Homo sapiens; identical to SEQ ID NO: 101586
  chr22:46082800-46082920
  hypo

SEQ ID NO: 196245 - DNA, 30 bp, Homo sapiens; identical to SEQ ID NO: 101587
  chr22:46083305-46083335
  hypo

SEQ ID NO: 196246 - DNA, 215 bp, Homo sapiens
  chr22:46145005-46145220
  hypo
tgacctgtgcttcatcgtggaattcctaccactgcatattcctccctaggctttaagcgtgaaggcagacacatcatatttggcttaacacctgccgtaacactgggtacatagtgtagtgaaattaatggacgctggatgactttgcttgctttactggtgagtcaagcgtagagtagttacttgcttggagcgatagcaggccaaattctgac

SEQ ID NO: 196247 - DNA, 35 bp, Homo sapiens
  chr22:46153005-46153040
  hypo
gctggggctgtggaggcggacgactggggagtctg

SEQ ID NO: 196248 - DNA, 57 bp, Homo sapiens
  chr22:46158113-46158170
  hypo
cccctgaccagcgtgcgtttctttctggaggcgcagggacctcggcttatttttctc

SEQ ID NO: 196249 - DNA, 30 bp, Homo sapiens
  chr22:46201386-46201416
  hypo
ttcacgttactcagccgtgaaaagaaatga

SEQ ID NO: 196250 - DNA, 197 bp, Homo sapiens
  chr22:46229652-46229849
  hypo
gcagtcatagcaacccggaagaagaactgctctgccctccagaggtctctctggatggactggtcgcgagagcacacttagcagcgatacggcatcgcgatcaggggagcggatgccagagcctgactgcctacttccaaatccaccttgaacacatccagttgcgggaccttggccatgttcgcctctgtgtctaa

SEQ ID NO: 196251 - DNA, 495 bp, Homo sapiens; identical to SEQ ID NO: 101588
  chr22:46255143-46255638
  hypo

SEQ ID NO: 196252 - DNA, 489 bp, Homo sapiens; identical to SEQ ID NO: 101589
  chr22:46261683-46262172
  hypo

SEQ ID NO: 196253 - DNA, 162 bp, Homo sapiens; identical to SEQ ID NO: 101590
  chr22:46278022-46278184
  hypo

SEQ ID NO: 196254 - DNA, 203 bp, Homo sapiens; identical to SEQ ID NO: 101591
  chr22:46278407-46278610
  hypo

SEQ ID NO: 196255 - DNA, 30 bp, Homo sapiens
  chr22:46279203-46279233
  hypo
ccagcccagtcagatcgccagtggagagcc

SEQ ID NO: 196256 - DNA, 30 bp, Homo sapiens; identical to SEQ ID NO: 34513
  chr22:46283127-46283157
  hypo

SEQ ID NO: 196257 - DNA, 30 bp, Homo sapiens; identical to SEQ ID NO: 101593
  chr22:46284445-46284475
  hypo

SEQ ID NO: 196258 - DNA, 182 bp, Homo sapiens; identical to SEQ ID NO: 101594
  chr22:46312228-46312410
  hypo

SEQ ID NO: 196259 - DNA, 144 bp, Homo sapiens; identical to SEQ ID NO: 101595
  chr22:46318750-46318894
  hypo

SEQ ID NO: 196260 - DNA, 30 bp, Homo sapiens
  chr22:46321924-46321954
  hypo
gggataatcggctcccgcagggccaggccc

SEQ ID NO: 196261 - DNA, 59 bp, Homo sapiens
  chr22:46329874-46329933
  hypo
cggcaccagcaacagcgtagcccaccctcagggctctccacatgcgccgggcgcacacc

SEQ ID NO: 196262 - DNA, 135 bp, Homo sapiens
  chr22:46339129-46339264
  hypo
ctcgggctgagtcagcgtctccacactaagctcttccctgccgttgtcataaacagatcattggaaaaagtcatgccaggtccaaacacgccggcgcccgtgcgcccgaggcctttgttccgacccagcggaggc

SEQ ID NO: 196263 - DNA, 30 bp, Homo sapiens
  chr22:46395642-46395672
  hypo
ccaggctccggtgggcgcgtcccaggcacc

SEQ ID NO: 196264 - DNA, 31 bp, Homo sapiens; identical to SEQ ID NO: 101596
  chr22:46396013-46396044
  hypo

SEQ ID NO: 196265 - DNA, 31 bp, Homo sapiens; identical to SEQ ID NO: 101597
  chr22:46399902-46399933
  hypo

SEQ ID NO: 196266 - DNA, 270 bp, Homo sapiens
  chr22:46407788-46408058
  hypo
caactcagaggcctgccctcccggctcaggctcccgagacagagcccagggccaggcggtggctgactccactagcggagtgccctggactggccgaggccctccctcccggggccactcacatgaatctttgcttcagggccggcttctggggagacccagagcacgacaggagctcatagacaggcctctgcgggtgcgtgggttacaatggcgtctgcggtcctggaactcagaggcagaggaggcgggaccctgtcatcccaatca

SEQ ID NO: 196267 - DNA, 159 bp, Homo sapiens
  chr22:46410622-46410781
  hypo
gcacggctatcccttccaatatttccgaggccagctgcccagagaaggagggctgggtggagaggaccgtgccagcagcagtaggcctgggccaggagacaggcacgcacctccgcggtctctggcgagtctatgtccacacagcggcaggacctccac

SEQ ID NO: 196268 - DNA, 53 bp, Homo sapiens
  chr22:46437044-46437097
  hypo
ctctcccagtgctttcgtactgtaaacatcacagtccacggtccctgtgaaca

SEQ ID NO: 196269 - DNA, 121 bp, Homo sapiens; identical to SEQ ID NO: 34515
  chr22:46437982-46438103
  hypo

SEQ ID NO: 196270 - DNA, 30 bp, Homo sapiens
  chr22:46439260-46439290
  hypo
aaaacttcatcccgccgcctctgagaaagg

SEQ ID NO: 196271 - DNA, 37 bp, Homo sapiens; identical to SEQ ID NO: 101599
  chr22:46455648-46455685
  hypo

SEQ ID NO: 196272 - DNA, 96 bp, Homo sapiens; identical to SEQ ID NO: 101600
  chr22:46455924-46456020
  hypo

SEQ ID NO: 196273 - DNA, 369 bp, Homo sapiens; identical to SEQ ID NO: 134325
  chr22:46465892-46466261
  hypo

SEQ ID NO: 196274 - DNA, 360 bp, Homo sapiens; identical to SEQ ID NO: 134327
  chr22:46468169-46468529
  hypo

SEQ ID NO: 196275 - DNA, 30 bp, Homo sapiens
  chr22:46483293-46483323
  hypo
gaccacatcaggtcacggggcacaagaacc

SEQ ID NO: 196276 - DNA, 472 bp, Homo sapiens
  chr22:46498384-46498856
  hypo
gagcaggctcccagttcatcccgcagcctcgtgtcgctgctccagctgtcccgggtacgacgtgcccttctccaaaaacacctcacccacccagctgggctggcctcgagaactggggagtcagaggcccttggctgtccctgaaaaaggaaaacgggcctcctgatgggggcttcctgggctcacccaacacagaaggacctcctagtgcccgtgcgccggcaggtaaacctctttgggtccccgttccctcatccctgaaacatggggagcacagttgctcctgcgctggctgtggctgtgggggaaggaagagccgctccattcctgcgtttgatcaggttgtcacgaggactgagtgagtcaccaggtgtgaggggctttggtgggtgtgtcacagtggcaaagcattcacaccggccaggtccccagctgggagcatgtgcccaggagcctgcggtgtgcagctggt

SEQ ID NO: 196277 - DNA, 59 bp, Homo sapiens
  chr22:46499692-46499751
  hypo
gctgttgggggggtgccgtggaaggtggagcggggagcagcctccgatccctggagcag

SEQ ID NO: 196278 - DNA, 30 bp, Homo sapiens
  chr22:46500640-46500670
  hypo
gctcctggcctggcccggccgggagtgggt

SEQ ID NO: 196279 - DNA, 30 bp, Homo sapiens; identical to SEQ ID NO: 101603
  chr22:46501311-46501341
  hypo

SEQ ID NO: 196280 - DNA, 172 bp, Homo sapiens
  chr22:46505609-46505781
  hypo
cctgggctctgttgtgtgcaccgcctgtctgcagggcccagcctgcctcgagcactccctggggacagaagctcctgcgctggcctctcctgtcacctagccaccgggcatcctggagtgcagccctcatgccccgaggccacctgccatcgcccaggatgactcaagatgc

SEQ ID NO: 196281 - DNA, 30 bp, Homo sapiens; identical to SEQ ID NO: 101604
  chr22:46509600-46509630
  hypo

SEQ ID NO: 196282 - DNA, 31 bp, Homo sapiens; identical to SEQ ID NO: 34518
  chr22:46521304-46521335
  hypo

SEQ ID NO: 196283 - DNA, 334 bp, Homo sapiens
  chr22:46521744-46522078
  hypo
atcgcctgagagtggcgtcttccaccctctgaccgccatggctccacaggcagcccgcaagagcctccagcctctggcagccctggaccagaccttggtaacacctgccccattctacacagccgaaccaaggcactgagcgctcaggagcccagaggaagcctggtggctgtgagccgggccggctggctcattcagcccaggccccacccgccctgggatgatctggaccccggccctgctctcagctctcaatgctcccttcccagatgagccaagacgtcccatgcagacggacaccttccccaagtgcccgtcccggcgctgcacagcc

SEQ ID NO: 196284 - DNA, 152 bp, Homo sapiens
  chr22:46545586-46545738
  hypo
agtcccagcgccttgcgtaggcacaaagtcagcccctcaccccccagcgcatgaagtaggggcgggcatggctcttgggccgctggagaggggtggggttgtggggtcggagctggcggcgcctccccgagcccgtccgcgttgcccttcac

SEQ ID NO: 196285 - DNA, 133 bp, Homo sapiens; identical to SEQ ID NO: 101607
  chr22:46555873-46556006
  hypo

SEQ ID NO: 196286 - DNA, 160 bp, Homo sapiens; identical to SEQ ID NO: 101608
  chr22:46582356-46582516
  hypo

SEQ ID NO: 196287 - DNA, 44 bp, Homo sapiens; identical to SEQ ID NO: 34520
  chr22:46585894-46585938
  hypo

SEQ ID NO: 196288 - DNA, 182 bp, Homo sapiens
  chr22:46594235-46594417
  hypo
cagtagcttggagctcggcggcacaaccagcaccatctggtcgcgatggtggacacggaaagcccactctgccccctctccccactcgaggccggcgatctagagagcccgttatctgaagagttcctgcaagaaatgggaaacatccaagagatttcgcaatccatcggcgaggatagttc

SEQ ID NO: 196289 - DNA, 368 bp, Homo sapiens
  chr22:46597069-46597437
  hypo
agaaagacacagagccgggcctggaccccgcctctcagcttgctctagagggctattctctgcatgctggcatgatcgcgccttgtaaaaggtggcagtgttctcagcttagtcaatcaggaattgcaagaggcaagtgagcccctgaggactctggggggcctttgtgaccgagcagctttgggagtgaccctgacagacctttacaggtggtgcaagttttgactccctttctcctggcgcgttaagcagaggataagcgctgtggaaggagtgaaggtgtagggagatcatggcccccagagcagtggggaaggggacagggaggctggaggagagcaaggaaaaggctccgtgtcaggtggcgc

SEQ ID NO: 196290 - DNA, 121 bp, Homo sapiens
  chr22:46598478-46598599
  hypo
aaaaaaattagctgggcgtggaggcgtgcacctcttaagcttaaggacatatttcttatgatccaattaatgtaaaatattttattttttatttattttttgagacagagtttcactcttg

SEQ ID NO: 196291 - DNA, 218 bp, Homo sapiens; identical to SEQ ID NO: 101611
  chr22:46599514-46599732
  hypo

SEQ ID NO: 196292 - DNA, 30 bp, Homo sapiens
  chr22:46610298-46610328
  hypo
agtcccgagatgtgcggatcggagatgtgg

SEQ ID NO: 196293 - DNA, 30 bp, Homo sapiens; identical to SEQ ID NO: 101612
  chr22:46610687-46610717
  hypo

SEQ ID NO: 196294 - DNA, 30 bp, Homo sapiens
  chr22:46640887-46640917
  hypo
aaggccaggcatggcggctcccagctcagc

SEQ ID NO: 196295 - DNA, 112 bp, Homo sapiens; identical to SEQ ID NO: 58168
  chr22:46658171-46658283
  hypo

SEQ ID NO: 196296 - DNA, 109 bp, Homo sapiens; identical to SEQ ID NO: 134335
  chr22:46658633-46658742
  hypo

SEQ ID NO: 196297 - DNA, 30 bp, Homo sapiens
  chr22:46667068-46667098
  hypo
agggcagaagaagccgatgtggagcaggtc

SEQ ID NO: 196298 - DNA, 95 bp, Homo sapiens; identical to SEQ ID NO: 34522
  chr22:46678246-46678341
  hypo

SEQ ID NO: 196299 - DNA, 30 bp, Homo sapiens
  chr22:46690643-46690673
  hypo
tatttccagagaggcgccttctctacccaa

SEQ ID NO: 196300 - DNA, 635 bp, Homo sapiens; identical to SEQ ID NO: 101615
  chr22:46704065-46704700
  hypo

SEQ ID NO: 196301 - DNA, 30 bp, Homo sapiens; identical to SEQ ID NO: 101616
  chr22:46724050-46724080
  hypo

SEQ ID NO: 196302 - DNA, 30 bp, Homo sapiens; identical to SEQ ID NO: 34523
  chr22:46727402-46727432
  hypo

SEQ ID NO: 196303 - DNA, 30 bp, Homo sapiens; identical to SEQ ID NO: 101618
  chr22:46727673-46727703
  hypo

SEQ ID NO: 196304 - DNA, 318 bp, Homo sapiens
  chr22:46745022-46745340
  hypo
agactccatctcaaaaaaaaaaaaaaaagtggactctggaaagtgctctgcttccgtggcgactggtcggctgaacttggtctcacttgtcactcagttctgctgtttgtacctgccaagtaagggagggggactcgggaggctgggcagcctccagccccaccgcctccacctgcatcactttgggcgagtcatatgtgatgaactgggccggctccagtctcccctctgtaacgtggggagaattctccctctcacggctaacgtgggaatcggcagatggaaaacactagctacgcagagtgtgtactgtacacg

SEQ ID NO: 196305 - DNA, 352 bp, Homo sapiens
  chr22:46748628-46748980
  hypo
agcgatgggatcaggcgtccgcgctggccagagtgctgctcgctcatgtgcagacccttactgcggtgaggcctgcgtgagcctgtgctgtgcctggtgtcaggggacaggctccgagtcagtcacagtgtgcagtcctgctgtggggacagagtgcagccattgttgggttagtacagtggcggggatgtgcctgccggcgtgatgatcaggcaggtcttgacacagcacagacctgagctgtgggactggccaggagagccaggctgcagctcaggtgtagggcgtcttgcagtgaattgcacttggagatcttccacctcttgtggaggggagacggcaggcggagccg

SEQ ID NO: 196306 - DNA, 250 bp, Homo sapiens; identical to SEQ ID NO: 101620
  chr22:46750299-46750549
  hypo

SEQ ID NO: 196307 - DNA, 95 bp, Homo sapiens
  chr22:46751899-46751994
  hypo
gaccctcaatcaagatggcaccgtgtgggtgacagctgtgcaggctgtgcgtgcccttgccacaggacaggtgcgtggggtgtgggggtgagccc

SEQ ID NO: 196308 - DNA, 43 bp, Homo sapiens; identical to SEQ ID NO: 101621
  chr22:46755415-46755458
  hypo

SEQ ID NO: 196309 - DNA, 30 bp, Homo sapiens
  chr22:46759947-46759977
  hypo
cgttgaggtggtcacgccccggctccctcc

SEQ ID NO: 196310 - DNA, 445 bp, Homo sapiens; identical to SEQ ID NO: 101622
  chr22:46770691-46771136
  hypo

SEQ ID NO: 196311 - DNA, 30 bp, Homo sapiens; identical to SEQ ID NO: 101623
  chr22:46777692-46777722
  hypo

SEQ ID NO: 196312 - DNA, 111 bp, Homo sapiens; identical to SEQ ID NO: 101624
  chr22:46785284-46785395
  hypo

SEQ ID NO: 196313 - DNA, 142 bp, Homo sapiens; identical to SEQ ID NO: 101625
  chr22:46786061-46786203
  hypo

SEQ ID NO: 196314 - DNA, 403 bp, Homo sapiens
  chr22:46787965-46788368
  hypo
aacagtgggcaccttcgtatttgtcctaaaaagaatcagagatccaaatggaggcttacgtatggggatagcccttgggcgtttttttaaagttgttttgaaaaattagaagccacctgaacgtccaccattgggtgggtcagggtgacaatcaagagcttgtacttcgggttcagaaagtcctgggttcatgcctgacccttgccgtttaccagctacattgcctgggctggtcaccgggactccccaggcccaagtagcaccccctcaaccccgccccggaaaacggggcaggctgtgaccaggctgtgacttgggcagactcgtgagcaacgttcagacctgtgtgtcaggtggggactccgactgtgtgtaaaatgacagtgaacgacaggcccagaag

SEQ ID NO: 196315 - DNA, 99 bp, Homo sapiens; identical to SEQ ID NO: 101626
  chr22:46790966-46791065
  hypo

SEQ ID NO: 196316 - DNA, 31 bp, Homo sapiens; identical to SEQ ID NO: 101627
  chr22:46794794-46794825
  hypo

SEQ ID NO: 196317 - DNA, 30 bp, Homo sapiens
  chr22:46797486-46797516
  hypo
tatcagcaggtggtacgacgctccatcagt

SEQ ID NO: 196318 - DNA, 20 bp, Homo sapiens
  chr22:46797737-46797757
  hypo
ctttgggagaccaaggcggg

SEQ ID NO: 196319 - DNA, 246 bp, Homo sapiens; identical to SEQ ID NO: 101629
  chr22:46804735-46804981
  hypo

SEQ ID NO: 196320 - DNA, 408 bp, Homo sapiens; identical to SEQ ID NO: 101630
  chr22:46805658-46806066
  hypo

SEQ ID NO: 196321 - DNA, 30 bp, Homo sapiens
  chr22:46806348-46806378
  hypo
cgactgacaggttccgcatgcagcccacga

SEQ ID NO: 196322 - DNA, 31 bp, Homo sapiens; identical to SEQ ID NO: 101631
  chr22:46807447-46807478
  hypo

SEQ ID NO: 196323 - DNA, 605 bp, Homo sapiens; identical to SEQ ID NO: 101632
  chr22:46812242-46812847
  hypo

SEQ ID NO: 196324 - DNA, 223 bp, Homo sapiens
  chr22:46813167-46813390
  hypo
ggaaagtggtgggaagggtcacgaggagcaaattcacgcagatgcacgcagccttccagaattcaaactggcctcccaggagcctcggacaggactttgccagaatgcaaacctcagaccgagctgctacttcctggtggtcccaatacccctaggcaggtaacaggaccctgttccgccaggtagccaccctctacacaggggctgccggctgcttttgatg

SEQ ID NO: 196325 - DNA, 746 bp, Homo sapiens
  chr22:46815671-46816417
  hypo
actcacactcaaatgcgccctcacccatgcacatgcactcatactcgtgcacatttacccacgctcacgtgcatacccgcattcacacccacatgtgcactcccacacgtgccttctcacattcatgtgcatttattcatacgctcacacgtacacttacccaaactcatgcacactcacccacgcacacgtgcactcacccttatgtacactcacccacaatcatgtgcatactcaaaacccacgtgcacttaccgacactcacactcaaatgtgcactcacccacacgtgcgctcatactcacatgtgcacacctacccacactcgtgcatactcatccacattcacactcacatatacactcacccactcaaatgtgccctcacccacacgtgcactcattcatactcacatgtgcacacctacccacactcgtacatacccacattcacacccacatatgctcacccacactcaaatgcactcgcccacacacgtgcactcatatatgcacactcagccactcatgtgcactcacgtatgcactcacccactcgtgcactcatgtgcacatttacccacatgtgcatgctcacccactcaaatgtgcactcacccacacatttacacgtgtgcttcttcacacacgtgcacacacccacacacatgcatactcacccaggtgcactcacccactcacgtatgcactcacacgtgtgcacacgtggacacacccactcacatc

SEQ ID NO: 196326 - DNA, 271 bp, Homo sapiens; identical to SEQ ID NO: 34529
  chr22:46816770-46817041
  hypo

SEQ ID NO: 196327 - DNA, 30 bp, Homo sapiens; identical to SEQ ID NO: 34530
  chr22:46817740-46817770
  hypo

SEQ ID NO: 196328 - DNA, 30 bp, Homo sapiens
  chr22:46827592-46827622
  hypo
gctcacccaggtgaacgcgcttcacactgg

SEQ ID NO: 196329 - DNA, 197 bp, Homo sapiens; identical to SEQ ID NO: 34531
  chr22:46828034-46828231
  hypo

SEQ ID NO: 196330 - DNA, 26 bp, Homo sapiens
  chr22:46829866-46829892
  hypo
accgcgcctggccttgttccttttct

SEQ ID NO: 196331 - DNA, 87 bp, Homo sapiens; identical to SEQ ID NO: 101639
  chr22:46835120-46835207
  hypo

SEQ ID NO: 196332 - DNA, 192 bp, Homo sapiens; identical to SEQ ID NO: 101640
  chr22:46838111-46838303
  hypo

SEQ ID NO: 196333 - DNA, 204 bp, Homo sapiens
  chr22:46838990-46839194
  hypo
tctcttaagaaaaaaaaaaaaaagaatgtgtaactggctaagccaaggtgactccagattccagtatgaagccctctcgagaacgaggagggctgaaatcgctgacgttttgctgaatttcatgagcatgcacggcctccacgccagtaaccccgagggctcacaggcaccagagctgacgccgggtcagagccaggcacaggc

SEQ ID NO: 196334 - DNA, 176 bp, Homo sapiens
  chr22:46847859-46848035
  hypo
ctggagccaggcagccgcaagccaaggcctgcagccaccaggcgccggggaggcaggggggctcctcctagagcctccaggaagcgcagccggccctgccaacaccttgatttcggccttccagctgcagaactgagggaaggcatgtctgttattttcagcgccccggtttgtga

SEQ ID NO: 196335 - DNA, 284 bp, Homo sapiens; identical to SEQ ID NO: 101642
  chr22:46850524-46850808
  hypo

SEQ ID NO: 196336 - DNA, 31 bp, Homo sapiens; identical to SEQ ID NO: 101643
  chr22:46857660-46857691
  hypo

SEQ ID NO: 196337 - DNA, 30 bp, Homo sapiens
  chr22:46859088-46859118
  hypo
cggtcagggaagccccgagctggctaagaa

SEQ ID NO: 196338 - DNA, 30 bp, Homo sapiens; identical to SEQ ID NO: 101644
  chr22:46859601-46859631
  hypo

SEQ ID NO: 196339 - DNA, 236 bp, Homo sapiens; identical to SEQ ID NO: 101645
  chr22:46859884-46860120
  hypo

SEQ ID NO: 196340 - DNA, 103 bp, Homo sapiens
  chr22:46867878-46867981
  hypo
gggtctgcttgattccgggaggcacggcacccacccagcactctctctgcccgtgctccaggcattcctcccaggcctggagcggctccgcggcacctcaaaa

SEQ ID NO: 196341 - DNA, 30 bp, Homo sapiens; identical to SEQ ID NO: 101646
  chr22:46869880-46869910
  hypo

SEQ ID NO: 196342 - DNA, 26 bp, Homo sapiens
  chr22:46887825-46887851
  hypo
gtcgcgcctctctattctttttaata

SEQ ID NO: 196343 - DNA, 30 bp, Homo sapiens; identical to SEQ ID NO: 101648
  chr22:46888073-46888103
  hypo

SEQ ID NO: 196344 - DNA, 45 bp, Homo sapiens; identical to SEQ ID NO: 34534
  chr22:46888631-46888676
  hypo

SEQ ID NO: 196345 - DNA, 168 bp, Homo sapiens
  chr22:46905650-46905818
  hypo
gggaggaggggtttcacgaggggatggctgtgggggtcaacagggtagcaggtgcggcagggcagtacccatgcacaatgcaggggctcagtccagggacccggcacacaggtgagtccttctccaagatgtcatgatgcgtccagtgaggaacgaaagacacgaagt

SEQ ID NO: 196346 - DNA, 412 bp, Homo sapiens
  chr22:46921743-46922155
  hypo
gggacccttcagcagcgacactggggccagcgtggggttctggcacgcccagcaacatgggcccgctccaggcgtggccagcaccgcccctcctgccggctcctgcccagggctttgggaacttgcccggagtttcacctgcctgctacttcacctagacttttaaaaatggtctctcaacaccctggtcggtacatggggccagacatagacctcttgtccccgggcagctggtgctgaggtgggcgccctgccctggtgagtccatgtcccgtggacctgtggccccttccattctcccaggcccctttttcccgtccgcctcctgctcctccattccctccaggtctgatgactcagagagaggcagaagttactgtcctggcaaacccgtctacgaagcttggccaca

SEQ ID NO: 196347 - DNA, 1036 bp, Homo sapiens
  chr22:46929237-46930273
  hypo
ccactagcctgctgaggaaggcgctgatccccggtcttgaacttgggagaaccgcaggcctgctcccaggaaaatgctgacggaagcggcgcggtgcctctccccctcgctgggcctaggccgggcgcccacccccagcatccaaccggcggcaacaaatccttgcagagttgcccgggcccggcccaattgcgccccggcatgccaggcggagcccttggcgggttcctgaggctctccaggaggcccatcaggagctactcctcccaccccgacggccactcaccagacacagacacctccatgagcgcctccagcggccggttgttgtccaggtcgcggctgagctgcagttcgcccgtggcggggtccagcagcaacaggcgcagctcgttgccctgcacgaaggtgtagttgaggctgtctgacacgtcggggtcatgggccgggatgcagccgatcacgccggtggggaaactgttggacttgttggtgacatagttgttgaagaggatctggaagtcgggcagcacaggcgggttgtcattctggtccacgagaaggatgtgcaccgtggctcggctcaccagcggagccgacgtggcctgcaccaccagcacatactcccgccggacctcaaagtccagctccaccatggcacgcaggtccccgttgagcaggtccagctggaagaaatgccgcatgtccccttccacaatctgatacatgatctgggcattagggccttcatcagggtcgttagcacgaatctttgccaccaccgaccccactgggttgttctcctcaacaaacagctccagttcgtccttctcaaacatgggggcattgtcattaatgtccaagatggtcacctggatttctaccgaggcgctaaggggagtgggactgccccgatccacagccagagcccaaaggttgtacacggccacattctcccggtccagccggcgctgggtgcgaatcacaccggacgtgggctcgatgtagaagtccccatcgccgtcgtccccaccct

SEQ ID NO: 196348 - DNA, 31 bp, Homo sapiens
  chr22:46930768-46930799
  hypo
cgtcggatgctgtcaccgccagcacgtactg

SEQ ID NO: 196349 - DNA, 32 bp, Homo sapiens
  chr22:46931121-46931153
  hypo
tcctcgcggtccagctcggcacacactgtgat

SEQ ID NO: 196350 - DNA, 777 bp, Homo sapiens; identical to SEQ ID NO: 34536
  chr22:46931417-46932194
  hypo

SEQ ID NO: 196351 - DNA, 373 bp, Homo sapiens; identical to SEQ ID NO: 101654
  chr22:46979972-46980345
  hypo

SEQ ID NO: 196352 - DNA, 60 bp, Homo sapiens
  chr22:46992939-46992999
  hypo
ctccacgcctgctttcgataagtcctgccctcccctgggaatcggcggccagacctttgg

SEQ ID NO: 196353 - DNA, 88 bp, Homo sapiens; identical to SEQ ID NO: 101655
  chr22:47004838-47004926
  hypo

SEQ ID NO: 196354 - DNA, 268 bp, Homo sapiens; identical to SEQ ID NO: 101656
  chr22:47004985-47005253
  hypo

SEQ ID NO: 196355 - DNA, 364 bp, Homo sapiens
  chr22:47005521-47005885
  hypo
gtgtgctgggccccagggacacggcacgctgatggtcagagaggcccacgcacacactggattccgcattgtggagtgcgagtgctttggggatgtggaacagcagagcagggtctgcagagcatcccaccggggagggccgtggggccccaggcaggaggcggtgcttagggctggctcctggcttcaccagtcttcttcactgtgttgttgtttgtcactgggcagtaagaggcgcctctctgaaacctgaggggcggcccggctgctggtaggtgtggacgggggcctacactggtggctgttctgagtcggttcgccttccagcacccctgagtgtggcgccctccttgctggctcctct

SEQ ID NO: 196356 - DNA, 154 bp, Homo sapiens
  chr22:47014557-47014711
  hypo
gcttcgggaggcacgcggctgcctggaccaggctggggtggtggggagaggggaggcacgcggctgcctggaccaggctggggtcgtggggagaggtggacagatgtgcagccccgtctggaggcgtgcggccggcgtgcgctgcaggttggca

SEQ ID NO: 196357 - DNA, 30 bp, Homo sapiens
  chr22:47017341-47017371
  hypo
gggcacccctaccccggtgcaggcgcaggc

SEQ ID NO: 196358 - DNA, 30 bp, Homo sapiens
  chr22:47021979-47022009
  hypo
tggcgagtaggaacacgctttaggcagagg

SEQ ID NO: 196359 - DNA, 874 bp, Homo sapiens; identical to SEQ ID NO: 34539
  chr22:47022396-47023270
  hypo

SEQ ID NO: 196360 - DNA, 491 bp, Homo sapiens; identical to SEQ ID NO: 101659
  chr22:47023707-47024198
  hypo

SEQ ID NO: 196361 - DNA, 30 bp, Homo sapiens
  chr22:47027249-47027279
  hypo
cggcagcctgcattccgcctcctgtctctg

SEQ ID NO: 196362 - DNA, 198 bp, Homo sapiens
  chr22:47037418-47037616
  hypo
ccggtcttgaccctgcgggttctctgcgcgtcacactttttgtccttggtagaccaggtcacctgctggacagtctctgctctggactgtgctgaaggcggcctaacatggtccataccctgtgcttcctggtcgtggcggggttgggtgaccctcgggggactatccctctgttggtggtgccgtgtgcttccatga

SEQ ID NO: 196363 - DNA, 30 bp, Homo sapiens; identical to SEQ ID NO: 101660
  chr22:47050326-47050356
  hypo

SEQ ID NO: 196364 - DNA, 30 bp, Homo sapiens; identical to SEQ ID NO: 101661
  chr22:47052955-47052985
  hypo

SEQ ID NO: 196365 - DNA, 298 bp, Homo sapiens
  chr22:47054010-47054308
  hypo
cctgccccagcatcccagagtcggggtcgcgtggacatgagcgatggtcacctggccgttctctcccccatagaggaggagctccggaagctgcgagaagaaaccaacgcggagatgctgcggcaggagctggaccgcgagcggcagcggcggatggagctggagcagaaggtgcaggaggtgctgaaggccaggtaccgcgccttcctcggggccctggcctgtgtgcggctgccccaaccccccaccccacccgccccgccgtcctctgctgcacccatagcgtcttggcagcatc

SEQ ID NO: 196366 - DNA, 274 bp, Homo sapiens
  chr22:47054674-47054948
  hypo
tgtctgccccagccacgctgtggcccccgcccccctgcccccatcctagcagtatcatgtcctgggcgccagtgccgccctggctcctagagaggcatgtctgcacctgacatctttgctcttgtttgtgggtcccatgtgggaccctgagtgctcacagtctcctccctcaccctgccctgcgcctcacagtgccgccagcaggaagcaggtcattcaggaccccagcgcaagttacaaagccagtgccctcctgtctcgctaacaccacgag

SEQ ID NO: 196367 - DNA, 34 bp, Homo sapiens; identical to SEQ ID NO: 34541
  chr22:47056193-47056227
  hypo

SEQ ID NO: 196368 - DNA, 95 bp, Homo sapiens
  chr22:47058999-47059094
  hypo
acgtggaggacttccggttccagcccgaggagaacactgtggagacagaggaacccctgagcgcccgcaggtaggggttcgccgagctggggctg

SEQ ID NO: 196369 - DNA, 30 bp, Homo sapiens; identical to SEQ ID NO: 101666
  chr22:47059571-47059601
  hypo

SEQ ID NO: 196370 - DNA, 30 bp, Homo sapiens; identical to SEQ ID NO: 34542
  chr22:47062640-47062670
  hypo

SEQ ID NO: 196371 - DNA, 166 bp, Homo sapiens
  chr22:47064649-47064815
  hypo
cggccctgcggcgcccgcccggcctgagcctcccgtctccttccagcttgttcatgtgggtccagccggagatcacacagaagctgtatgtggcgctctgggctgccttcctggcctcctgcttcttcccctaccgcctggtggggcttgccgtgggtaagtagat

SEQ ID NO: 196372 - DNA, 30 bp, Homo sapiens; identical to SEQ ID NO: 101668
  chr22:47066419-47066449
  hypo

SEQ ID NO: 196373 - DNA, 90 bp, Homo sapiens; identical to SEQ ID NO: 101669
  chr22:47069563-47069653
  hypo

SEQ ID NO: 196374 - DNA, 62 bp, Homo sapiens
  chr22:47074763-47074825
  hypo
tgtcctatcccaggcggtggagcggagcccccgtggctctggactgcgcggacgttggcgtc

SEQ ID NO: 196375 - DNA, 235 bp, Homo sapiens
  chr22:47075160-47075395
  hypo
gggctttaccagcgtcgggtggtttagttcgagtcccttttgtggagaaagggagatgaaaactgaccacgtgccaggtgtggccgaagcccccagggagggccacattcggggagcggggggtcgggggagggccaccgactggctctgctgccagcacaggcccctccctggaagtcctcgggagcggagcgcggatcggcacgggctctgggctccccgtggagagaagctg

SEQ ID NO: 196376 - DNA, 30 bp, Homo sapiens; identical to SEQ ID NO: 101672
  chr22:47097551-47097581
  hypo

SEQ ID NO: 196377 - DNA, 30 bp, Homo sapiens
  chr22:47098579-47098609
  hypo
gtccctgcttcagcccgatgttccccgtga

SEQ ID NO: 196378 - DNA, 30 bp, Homo sapiens
  chr22:47098840-47098870
  hypo
ccgccacccgagtaacgaccaaccacatgc

SEQ ID NO: 196379 - DNA, 265 bp, Homo sapiens
  chr22:47107083-47107348
  hypo
atctgtgagtcctcacgtaaaaggcaaatcatccattcttttaaaatgagttcctgtaacaccttcaggcggatttcctagataaaattccctcttcaattctacatcgctcttatgggacgggatcaagctgacctcagggaacgtgaacatgaacctctctcgggccacagtctgcgcgatgacatgcagcgttcctggtatttaattgccggcaaataataatttctttgaaagagattacgtctcttttataatttttcct

SEQ ID NO: 196380 - DNA, 213 bp, Homo sapiens
  chr22:47113341-47113554
  hypo
tagagaatggacaaacggcagccccacgcgagagcgtggaaaatttatgcaagactactcgccaccacggtggaaaacagcgtggaaaacttcacaagtgtcatgttgagccgagagccaggcacaaaaggtttcatactgtatgatctgatttctatcaagtacaacagtgaacctagttgtttagaagtcgcagcagtggttcccctttgg

SEQ ID NO: 196381 - DNA, 30 bp, Homo sapiens; identical to SEQ ID NO: 101675
  chr22:47138819-47138849
  hypo

SEQ ID NO: 196382 - DNA, 96 bp, Homo sapiens
  chr22:47139210-47139306
  hypo
aaattgaaaataacaccgcctgaaggcatgtgcagagggtgctgaccccagcttaaagagagggtgtggttcgggcacactggttcacacctgtaa

SEQ ID NO: 196383 - DNA, 161 bp, Homo sapiens; identical to SEQ ID NO: 101676
  chr22:47163643-47163804
  hypo

SEQ ID NO: 196384 - DNA, 285 bp, Homo sapiens; identical to SEQ ID NO: 34544
  chr22:47172071-47172356
  hypo

SEQ ID NO: 196385 - DNA, 204 bp, Homo sapiens; identical to SEQ ID NO: 101678
  chr22:47187930-47188134
  hypo

SEQ ID NO: 196386 - DNA, 116 bp, Homo sapiens
  chr22:47189585-47189701
  hypo
gtaaccacagccagcggcaggggcggcccacgctgcaggaggggccagggcttcagcagaagcccaggcccgaggcagagccgccctcaccccccagcggcgacctccggctggtg

SEQ ID NO: 196387 - DNA, 30 bp, Homo sapiens; identical to SEQ ID NO: 101680
  chr22:47191925-47191955
  hypo

SEQ ID NO: 196388 - DNA, 120 bp, Homo sapiens; identical to SEQ ID NO: 34545
  chr22:47192835-47192955
  hypo

SEQ ID NO: 196389 - DNA, 172 bp, Homo sapiens
  chr22:47193288-47193460
  hypo
tgtagtcgggaggagcgccctcaccctcacccccattctctcacccctgcagaaagtgccagcgatgccgcccctctgcagaggtcccagtctctcccacactcggccaccgtcacgctgggtggcacatctgaccccagcactctcagcagctcagcgctgagcgaaagag

SEQ ID NO: 196390 - DNA, 886 bp, Homo sapiens
  chr22:47197332-47198218
  hypo
tctttgtttagcttacgctctgttatgagcctggggatgaaagtagcaaatagaacttaatagctcattttactcttagcattggctcaatatttactcacacaaagactgcctgctttgaagccccggaaaatgacactcaagttggtcacatgtatctggtgaatggtagtgcgatttggtaacatgtagaacacgcagtttcctgaggaccgtctagggcctgcctcgcagcagtggggcctcggagggcaaactgtgtgtggagctcagctctggccctcaaggctttcgaacggtaggacagaaggcacgacgacccgtccgtcaaggagtggggccaggccacggctgtgttccacttcccctgaggggtgaccatccagtctaggctttatgagagcgtgctgatagatggaggtcagcgggagagggtgttttgggggttgggagggcatgaacagaagtttggagccgtacaccttggcagcactaatacgagtagatgcccccttggtgtccgtggctctagggcagccgtgaaggggcctgggcccttggtgacaggaggaagcaggtgcggccttggagtaggccctcagtgtgatggctggccgtgtccttactcatgaagtggctcaacctacctgtttcgtcagctgtagagggagcatgagacctgccctgcagggtcctcgtgaaggtcagtgggaatttatgtagagtcactcatccaggctctgttgagcacctgctgtggttgtaggcactggggaggaatcggcggcgaggcttgcgagggccctgccctcaaggagctgacattctcgtgtgaggagacagagggagctcgctcagtacccccgcaaccatcagaaggcaggaa

SEQ ID NO: 196391 - DNA, 30 bp, Homo sapiens
  chr22:47223379-47223409
  hypo
gctttcctttctcacggacttaccttttga

SEQ ID NO: 196392 - DNA, 30 bp, Homo sapiens
  chr22:47243847-47243877
  hypo
gtgtgcgcgcgcgcacgcgctctacacagt

SEQ ID NO: 196393 - DNA, 30 bp, Homo sapiens
  chr22:47244101-47244131
  hypo
aaaaaaatggtatcgcggaggcggtgtcag

SEQ ID NO: 196394 - DNA, 1005 bp, Homo sapiens
  chr22:47298494-47299499
  hypo
cctgggacagagccccgctgtgtccgctaaaccagcccttccactgagctgactcttcgcctccactcagagtcccgttcaagtgggcacgttgttttcacctttcctgcgataactgcaagcaacacacctgcatttttgacacacaaagttgtaatggttgtgattcccgaagaacaccagcagacagacacccggtgggcacgtggggacacgaagactcagatgtctctgtcctcagcagcgcacagttgaagtgagggatgaagacagatgtgcgtgaaacccagagagatcatatacagttgtcaatgaaaccacagtttgtatcctgccgactgcattccagggtggctgaaagaattggagaagacagcccgaggaggggcagcgtatggggcagtccactctggagggtcatgcccaattgctggggccgcctcacgtctctgctctgtgatttcttctatttcctggcccggttgggccgtggatctctccctggtgcacctggagtctctgtggatctctttcctcaggggactctgcaacccagcctcacgccctgcagggggtcacagacctcagcctggtgggcgttcgggaccgagggctgagggccgagggttgaggtgaagtgcagtggcacagccatcccaggctgcaggcgaaggggctccccttcgagaacccacaggatggtagcagagcgaagttcagcctgcgggggcgtctgtactcggggaagctgtggaccaggcatggagccagcctgtttgccctccccgccctgatggctgctccggctggctaggcctcttctctgagattcttggcttagtacctctggcttttgccgcttgaatttggggacctgtcggctcttcctgtttcgcttcagtggacttccaccctagctctcgcctctggttgctgctctgagcgtgagtctagagggaccagcaaggtcctgagggagttgcgaggaatcgggccctgtccagg

SEQ ID NO: 196395 - DNA, 30 bp, Homo sapiens
  chr22:47299803-47299833
  hypo
tgctgccgagtgccccgctgcccgtggacg

SEQ ID NO: 196396 - DNA, 30 bp, Homo sapiens
  chr22:47306738-47306768
  hypo
tcgagacccagggtgcgggcgtggcaggct

SEQ ID NO: 196397 - DNA, 146 bp, Homo sapiens
  chr22:47307378-47307524
  hypo
ctgcacggtggcccgcggggtgtggaggagcagagcgcttctgctgggagagccagctcagggacggactgagccaggggctgctgaagtgctgcacattgcttgtgggacaataaataattttttttaaaatcaagtttcaattg

SEQ ID NO: 196398 - DNA, 30 bp, Homo sapiens
  chr22:47325676-47325706
  hypo
aattggattggaatccgtggactgcaggcc

SEQ ID NO: 196399 - DNA, 291 bp, Homo sapiens
  chr22:47327900-47328191
  hypo
cagattgattcattgtcgaggaatgccttattctgatgttacgcggtttctttcctggctcatgcatgcccccatttgtgcgtttatagaaagtgtaagtcctgtgctagtcagagcaagactctgtcagtgaagacgatggtgactagtggcgggttcaccgtgtcagacactgcgctaagcaggtcattacatgatcacctggaattcttaaatgccctctggcgacaccaccatacatgactgttgtgactcccccaggttgcccgtcaaggccgtgctgtgaccgtt

SEQ ID NO: 196400 - DNA, 199 bp, Homo sapiens
  chr22:47354377-47354576
  hypo
gggtgtccgtctcaccgttggagagctgggagtcctggccagttccacctgttcaatgtgtgatgcagagttaattctccagcccatcttcactcagccagcctccgtgtctacttggcacaaggattagctcttcatgcataagcgttttgtagcagggcgtctctagccctgtgcccagcgtcgggacttttccccc

SEQ ID NO: 196401 - DNA, 30 bp, Homo sapiens
  chr22:47354892-47354922
  hypo
cagtataaaatgaaacgggcattggctgtc

SEQ ID NO: 196402 - DNA, 111 bp, Homo sapiens; identical to SEQ ID NO: 101686
  chr22:47370211-47370322
  hypo

SEQ ID NO: 196403 - DNA, 306 bp, Homo sapiens
  chr22:47372442-47372748
  hypo
aaaaccacggcaacacgcagaccggcgtgtcagctcccggacgacctggccgcttctgcctcttagctccttttcctactcttggtcttactgtctccatttcattcttttggaactgctcgaaccatcttccttaagcaccctcttcaccacatcatcgccctgattgaaacccttggggaagctctctcttggttttctgaagtgcaggctctcagcccggcctccaccagttgttcccagcgttctttcaagggcgtgtttgttcatcggctctgtggcagccgtccacgccgttgctgcaga

SEQ ID NO: 196404 - DNA, 188 bp, Homo sapiens; identical to SEQ ID NO: 101688
  chr22:47380644-47380832
  hypo

SEQ ID NO: 196405 - DNA, 30 bp, Homo sapiens
  chr22:47381115-47381145
  hypo
gagtcttcacctggacggggcagtggagcg

SEQ ID NO: 196406 - DNA, 155 bp, Homo sapiens; identical to SEQ ID NO: 101689
  chr22:47381550-47381705
  hypo

SEQ ID NO: 196407 - DNA, 236 bp, Homo sapiens
  chr22:47393096-47393332
  hypo
tggtgctgtcagcaccgggcacctttgccgttggttcccggcagggctgagtgcttagggtccaggtggccagcgaggtggtcagttcccacagacggttctggtcaatgagctatgcccatggatgcctgtttttcaatttagatgtaagtgtcttacatttacaaatagaaatgtaccattcagtgttccctgagatgcacgtgcttatcacctgacatcgggaaatactggcc

SEQ ID NO: 196408 - DNA, 30 bp, Homo sapiens
  chr22:47393580-47393610
  hypo
gaagaactcgtgagccggattgatggtaag

SEQ ID NO: 196409 - DNA, 64 bp, Homo sapiens
  chr22:47405906-47405970
  hypo
aatgccaacaaaacgcggtactggagaatggttccacctgtgtgggaaacggctttatgtacct

SEQ ID NO: 196410 - DNA, 182 bp, Homo sapiens
  chr22:47406192-47406374
  hypo
gcagcgcagccaggccggggaacaggcagcgtggctccctccccctggctctcgtcctcattaggctccagaagggcagagctgagcgtttgaaatgatagtgatatttcatctgagacgtaaggacatgacaattggcaaggcacatgcgtaattgctgttatgtgcgacctaaggtgtgt

SEQ ID NO: 196411 - DNA, 365 bp, Homo sapiens
  chr22:47411014-47411379
  hypo
ggggcacagagccaccgtcggagtcacacatcgcacacacccagcaagtgatagtgtgtgaccggacatggtgctgaaggtggcctatgtcagccatgggcttggtgattttgagagccaggatgcggttcctggcgcaggtgcctgggggcgcctagaggagtgcgagactcccgagggtccctctgcctaagctgcctggggagggcggctcgctttatttaattcacacgctcaaagcatttcaggaacaatgaatgccttcggccctctgtttaaatgactgaattatagaggtgtgagggggccacgcccaccccgttttacacttggcgcctcccttctaatttcgaggaaacctgcaa

SEQ ID NO: 196412 - DNA, 31 bp, Homo sapiens; identical to SEQ ID NO: 34553
  chr22:47418700-47418731
  hypo

SEQ ID NO: 196413 - DNA, 30 bp, Homo sapiens; identical to SEQ ID NO: 101692
  chr22:47424430-47424460
  hypo

SEQ ID NO: 196414 - DNA, 30 bp, Homo sapiens; identical to SEQ ID NO: 34554
  chr22:47425581-47425611
  hypo

SEQ ID NO: 196415 - DNA, 273 bp, Homo sapiens; identical to SEQ ID NO: 101694
  chr22:47428636-47428909
  hypo

SEQ ID NO: 196416 - DNA, 361 bp, Homo sapiens; identical to SEQ ID NO: 101695
  chr22:47436578-47436939
  hypo

SEQ ID NO: 196417 - DNA, 215 bp, Homo sapiens; identical to SEQ ID NO: 101696
  chr22:47441098-47441313
  hypo

SEQ ID NO: 196418 - DNA, 30 bp, Homo sapiens; identical to SEQ ID NO: 101697
  chr22:47447898-47447928
  hypo

SEQ ID NO: 196419 - DNA, 215 bp, Homo sapiens; identical to SEQ ID NO: 101698
  chr22:47455003-47455218
  hypo

SEQ ID NO: 196420 - DNA, 93 bp, Homo sapiens
  chr22:47465506-47465599
  hypo
tgttgtttggttggacgctgttccctgtttggatggagtggagctgacttgacggttcccggctgttccctgttgtttggttggagcggggct

SEQ ID NO: 196421 - DNA, 121 bp, Homo sapiens; identical to SEQ ID NO: 34559
  chr22:47465778-47465899
  hypo

SEQ ID NO: 196422 - DNA, 121 bp, Homo sapiens; identical to SEQ ID NO: 34560
  chr22:47465958-47466079
  hypo

SEQ ID NO: 196423 - DNA, 121 bp, Homo sapiens
  chr22:47466258-47466379
  hypo
cctggctgttccctgttgtttggttggagcggagctgacctgacggttccaggttgttccctgttgtttggttggacgctgtcccctgttgtttggttggagcggagctgacctgacggtt

SEQ ID NO: 196424 - DNA, 30 bp, Homo sapiens
  chr22:47466816-47466846
  hypo
gcggagctgacctgacggtcccggcgctgt

SEQ ID NO: 196425 - DNA, 60 bp, Homo sapiens; identical to SEQ ID NO: 101703
  chr22:47486205-47486265
  hypo

SEQ ID NO: 196426 - DNA, 138 bp, Homo sapiens; identical to SEQ ID NO: 101704
  chr22:47489046-47489184
  hypo

SEQ ID NO: 196427 - DNA, 50 bp, Homo sapiens
  chr22:47511003-47511053
  hypo
cctggcccctggatggcggcaccttctggagtgaacgttggccctgtcct

SEQ ID NO: 196428 - DNA, 281 bp, Homo sapiens
  chr22:47525840-47526121
  hypo
cctccccaccagacaggttaccggagcgggcgtgtctggaggagcaggcagagcaggtgctgtacacctcgtgtcctctgggacccatcccttctaggcccctcctcaggacaccccctcctgccgggctccccccaagcgcagcccccttcccaaacccacgtttgcctcactgtcttccttgtccggtagagcacacccctcagcacttctctgtgtgaatgagcctggcagggacctaccttgagatctacatgtctggataccgctgccttctggcc

SEQ ID NO: 196429 - DNA, 228 bp, Homo sapiens
  chr22:47532465-47532693
  hypo
ccctcttgcaccctgttgcatcggtagggtggtggcagatgtgtactcgccccctctccagagcccccagacctgtcccggtgtcccatctcacggtaggtctcctcccagtcgccccggggctgtgggtgtcgccagcccatgctgtgcaggtggcgagtgtgagcaaacctggtcccgggccctggctacgtcttcactcggcgcgggcaaagaagaaagtaaaat

SEQ ID NO: 196430 - DNA, 412 bp, Homo sapiens
  chr22:47534595-47535007
  hypo
cgtgaggattttaaccgatggattgggggaaacacaaacgttccagccgtagcacgttatttggccgaaacccagaataccaggaggccagccctcgctctgcagccgtctcccctgagggcccagcctggattcaggccttttggcttggccaaagcccttctgagtcccaccctgagcctttgcgggagggtgacgtcatgtgctttattgctttgtttatgtgcttcagtcaccgttccgctcctgcagcgaccagtcaggcacagaacactgaggccgccaaagactggcccttggttccagttgcccgcacggaactgtgtgtctggggcccagttgctgaggaagtacctcagaggacaccgctgacacaagccacaggtgctgacgtggccgcacctcccagggc

SEQ ID NO: 196431 - DNA, 748 bp, Homo sapiens
  chr22:47540104-47540852
  hypo
ggtcgccacgcaaggcggtctgtgtgactgcaccagcgtccctccttggcccctgtgcttactgagcccctgtctgcctggcgtgcacacagtatacaagcacatacgcgcatgcacttagggcacactcaggggctctccagagtcagtgcccaccacctggaggcgcgtcggtgttactgtctccagtcagcactggcgggacttcacgggtgcagcccgtgaaggtgcctgctggctgagatcctgggactgggtgcagcccgtgaaggtgcctgctggctgagatcctgggactgggtgcagcccgtgaaggtgcctgctggctgagatcctgggactgggtgcagcccgtgaaggtgcctgctggctgagatcctgggactgggtgcagcccgtgaaggtgcctgctggctgagatcctgggactgggtgcagcccgtgaaggtgcctgctggctgagatcctgggtcttggggtctggaggcggctgagccgtttggtgccgctggaccagagccatgtagatgttgactgtaatcggaactaccttggtaatggtggcagacgttaataagcgcgcaccacgtgccggctgcagcgtttttctgtgcatctccccttattctcacagcagcctggcaagggcagggctgttcacacctgtttacatctggggcaggtgaggtgccaggaggtggatgacctagacctagccctggatccccacctgcgtcttctgccaaag

SEQ ID NO: 196432 - DNA, 547 bp, Homo sapiens; identical to SEQ ID NO: 101709
  chr22:47542708-47543255
  hypo

SEQ ID NO: 196433 - DNA, 31 bp, Homo sapiens; identical to SEQ ID NO: 101710
  chr22:47584841-47584872
  hypo

SEQ ID NO: 196434 - DNA, 30 bp, Homo sapiens
  chr22:47585091-47585121
  hypo
tcgcgtggcggggtgcgtacgatgcccggt

SEQ ID NO: 196435 - DNA, 90 bp, Homo sapiens
  chr22:47614608-47614698
  hypo
ggggtgcctctggtgcgtcacggcccagggaggtgtgggcgtccccgaaggaggcgtaggtatcactaagggaggcgcaggtgtcatgga

SEQ ID NO: 196436 - DNA, 239 bp, Homo sapiens
  chr22:47666572-47666811
  hypo
aagcattttaaaaagcgttcatgtgagtcatcatttattgaacactggctgtgtgccaggcattgggctaggcaggcgcctgcgttgtttttaatccttaccagtactgtgcctggcagtcacggttctgtctttgtcgtggccaaggagcatgaggcttagggaggctcgaactcgcctaagatctccagacaatgccgtgcaaagccagggtgcgaccagtccgtctggttccatgt

SEQ ID NO: 196437 - DNA, 30 bp, Homo sapiens
  chr22:47672965-47672995
  hypo
gctgcgagagtgggacgggtgccaagtctc

SEQ ID NO: 196438 - DNA, 30 bp, Homo sapiens
  chr22:47673423-47673453
  hypo
catgcttttgtaccccgtgctgttattagc

SEQ ID NO: 196439 - DNA, 30 bp, Homo sapiens
  chr22:47687245-47687275
  hypo
tgtgttcagaacattcgaaatcctcccttc

SEQ ID NO: 196440 - DNA, 30 bp, Homo sapiens
  chr22:47687646-47687676
  hypo
tcgcgtgattctgcacgggaagcttcattt

SEQ ID NO: 196441 - DNA, 30 bp, Homo sapiens
  chr22:47719450-47719480
  hypo
gcagaatagggccagcggctacgcagagaa

SEQ ID NO: 196442 - DNA, 30 bp, Homo sapiens
  chr22:47748485-47748515
  hypo
acaactggaatgggccgattattctgaggg

SEQ ID NO: 196443 - DNA, 30 bp, Homo sapiens
  chr22:47748855-47748885
  hypo
gacacgcagcactggcgagaagcagatcag

SEQ ID NO: 196444 - DNA, 30 bp, Homo sapiens
  chr22:47792924-47792954
  hypo
tctcaaagcccaccacgtgcgtctccatgt

SEQ ID NO: 196445 - DNA, 31 bp, Homo sapiens
  chr22:48025085-48025116
  hypo
ctgtgaggctgctgcacggctggctgtcccg

SEQ ID NO: 196446 - DNA, 471 bp, Homo sapiens
  chr22:48027377-48027848
  hypo
ctttttgtcctgttccggcttccacagattggacgaggcccacccaccttggggaggggccagctgctgtgttcagtccgccattgcaaacacgaagctcttccagaaacgccctcacagacaccccggaagtcacgtacccactctgtaggtgccccggggcacaggcaagcggacgagccagttatccctcagagctcctgctgcctcgcccgctttctctcggaaacgtgaagtgtggcctcagctgaaagtgaggtgagcgtgagtgtggacatgtgtcagtgtgcgtgtgcatgggaggagtgtgtgtgcgcttgatgacgatgatggagcccagtgagccaccgtccgtggagtgtcagagcctcctaggatggccacgccgaaggtgcggaaggaggcggctggcccagcgtcagacgtttccagcatccgcgggagtgaaacggaggctggtgggtggttgtg

SEQ ID NO: 196447 - DNA, 30 bp, Homo sapiens; identical to SEQ ID NO: 13516
  chr22:48137393-48137423
  hypo

SEQ ID NO: 196448 - DNA, 131 bp, Homo sapiens
  chr22:48280048-48280179
  hypo
ctttgctgtttcacacggggaagccgccgttcaaggtcacgtgtctagtaagtgatgacgcagatctccgttttctagtaactgtgcaacccgatgtttgttgatttaatacaattcgaatcatcgggatt

SEQ ID NO: 196449 - DNA, 30 bp, Homo sapiens
  chr22:48412638-48412668
  hypo
cagctccctcccccacgcctggctcagcgc

SEQ ID NO: 196450 - DNA, 30 bp, Homo sapiens
  chr22:48441848-48441878
  hypo
acaggcgtgagccaccgtgtcaggctacct

SEQ ID NO: 196451 - DNA, 31 bp, Homo sapiens; identical to SEQ ID NO: 34565
  chr22:48458712-48458743
  hypo

SEQ ID NO: 196452 - DNA, 37 bp, Homo sapiens
  chr22:48528662-48528699
  hypo
aaaaaatgaaaaattgccaggcgcggtggctcacgcc

SEQ ID NO: 196453 - DNA, 30 bp, Homo sapiens
  chr22:48613604-48613634
  hypo
cagtggtcctgtgggcgcctcgattcttga

SEQ ID NO: 196454 - DNA, 30 bp, Homo sapiens; identical to SEQ ID NO: 101714
  chr22:48646477-48646507
  hypo

SEQ ID NO: 196455 - DNA, 218 bp, Homo sapiens
  chr22:48723481-48723699
  hypo
tgccaggcttcactgcgccgctcatttgcgctcactgtaacaccgccgggagaatcctcagtcaaaatcaaagcctctttctcctctcacctgtaaattacagaaagtctctctgctttttccacgttcaacccagttgccgctgagcatccatttggattgagttagccttggtaatcgtcctctaaacagaagctcggggtcgcctgggcctgccc

SEQ ID NO: 196456 - DNA, 61 bp, Homo sapiens; identical to SEQ ID NO: 101715
  chr22:48727540-48727601
  hypo

SEQ ID NO: 196457 - DNA, 360 bp, Homo sapiens; identical to SEQ ID NO: 101716
  chr22:48728450-48728810
  hypo

SEQ ID NO: 196458 - DNA, 30 bp, Homo sapiens
  chr22:48743763-48743793
  hypo
gacccttgaacaacacggatttgaacggtg

SEQ ID NO: 196459 - DNA, 30 bp, Homo sapiens
  chr22:48744151-48744181
  hypo
acgggggttggcacccgtaaccctgtgtcg

SEQ ID NO: 196460 - DNA, 30 bp, Homo sapiens
  chr22:48792374-48792404
  hypo
agccagatgtacggacgcctccccttcccc

SEQ ID NO: 196461 - DNA, 219 bp, Homo sapiens; identical to SEQ ID NO: 101717
  chr22:48793076-48793295
  hypo

SEQ ID NO: 196462 - DNA, 30 bp, Homo sapiens
  chr22:48798434-48798464
  hypo
ccatcacactccgcacgccctcgagatgag

SEQ ID NO: 196463 - DNA, 44 bp, Homo sapiens
  chr22:48809223-48809267
  hypo
aaaaaaaagaaagaaaggctttgaggaaacgtaccatgcttcac

SEQ ID NO: 196464 - DNA, 30 bp, Homo sapiens
  chr22:48834138-48834168
  hypo
ggccatagaagaagacgggggaatgcctgt

SEQ ID NO: 196465 - DNA, 27 bp, Homo sapiens
  chr22:48863661-48863688
  hypo
gaatgtggccgggcgcgatggctcacg

SEQ ID NO: 196466 - DNA, 308 bp, Homo sapiens; identical to SEQ ID NO: 13517
  chr22:48885529-48885837
  hypo

SEQ ID NO: 196467 - DNA, 114 bp, Homo sapiens; identical to SEQ ID NO: 13518
  chr22:48885907-48886021
  hypo

SEQ ID NO: 196468 - DNA, 607 bp, Homo sapiens; identical to SEQ ID NO: 134350
  chr22:48886204-48886811
  hypo

SEQ ID NO: 196469 - DNA, 35 bp, Homo sapiens
  chr22:48917484-48917519
  hypo
ggccacagatggacccgatccgttaggtgtaaaag

SEQ ID NO: 196470 - DNA, 342 bp, Homo sapiens; identical to SEQ ID NO: 101722
  chr22:48918774-48919116
  hypo

SEQ ID NO: 196471 - DNA, 571 bp, Homo sapiens
  chr22:48921049-48921620
  hypo
tttggggacatccctcggcccaggggatgctccccatggggggtcccatcttaggccgatgcccttagggtcagggagcagcctggagacctccacacagggaccctgggatacgctgagggcttggtccacaccccaccctcaccccgacaggtgcccgctgcctgctccgcctgctggactccgattccagtgctcattcttgcctgccacctgctccgccttctggactctgcttccagtgctcattctcgcaaatgccccttccccctcccggctgaacctctgcccaggtggaggcccttcccactcggtggcccaggtccaccctctgcctcagcggtccccaggcttgagcatgcatccgaattccctgggggcttgtggaccaacagatcgctggactgaacccatggtttctgattcaggggtcaggccggggccccagaagctgctgctgctgctggcctggtaccccgcctaaagaagccctgcctacccgagccctcctgttcttccctgcctccaggcccctgcagaggcacggtggtgtgcacggctcattctcgcc

SEQ ID NO: 196472 - DNA, 30 bp, Homo sapiens
  chr22:48922222-48922252
  hypo
tcttccaggagctgtcgccccagacacatc

SEQ ID NO: 196473 - DNA, 378 bp, Homo sapiens; identical to SEQ ID NO: 101723
  chr22:48923828-48924206
  hypo

SEQ ID NO: 196474 - DNA, 30 bp, Homo sapiens; identical to SEQ ID NO: 58181
  chr22:48929553-48929583
  hypo

SEQ ID NO: 196475 - DNA, 160 bp, Homo sapiens; identical to SEQ ID NO: 101725
  chr22:48946284-48946444
  hypo

SEQ ID NO: 196476 - DNA, 30 bp, Homo sapiens
  chr22:48953167-48953197
  hypo
ggctgaggagggcggcgccgggaggaagca

SEQ ID NO: 196477 - DNA, 30 bp, Homo sapiens
  chr22:48953471-48953501
  hypo
ggccactgagcgccacggccactcgcaggt

SEQ ID NO: 196478 - DNA, 294 bp, Homo sapiens; identical to SEQ ID NO: 101726
  chr22:48955832-48956126
  hypo

SEQ ID NO: 196479 - DNA, 89 bp, Homo sapiens; identical to SEQ ID NO: 101727
  chr22:48959485-48959574
  hypo

SEQ ID NO: 196480 - DNA, 307 bp, Homo sapiens
  chr22:48965018-48965325
  hypo
aatctccggggaggacgatggatgcagggccacgggccgtggatactcagactaaagctctagaggagtgtgaggtgggtgcagtcatggaagtttctggaaactgaaaaacctggcccggccccgacatttgaaatgaccctttgcttctcaccatgtgcttggcatcgattcaataaaccgtgtgtttggggtgtctccggggggtctgggcgccttgctgttttgtgacctctgggatggctggtctgatagtggacttggaggctgccaaggacatggggagtgtggccgctacaatcaaggc

SEQ ID NO: 196481 - DNA, 23 bp, Homo sapiens
  chr22:48970900-48970923
  hypo
gccgctggtcgggcccggctggg

SEQ ID NO: 196482 - DNA, 147 bp, Homo sapiens; identical to SEQ ID NO: 58183
  chr22:48971532-48971679
  hypo

SEQ ID NO: 196483 - DNA, 377 bp, Homo sapiens; identical to SEQ ID NO: 134355
  chr22:48971758-48972135
  hypo

SEQ ID NO: 196484 - DNA, 246 bp, Homo sapiens; identical to SEQ ID NO: 134356
  chr22:48972219-48972465
  hypo

SEQ ID NO: 196485 - DNA, 105 bp, Homo sapiens; identical to SEQ ID NO: 134357
  chr22:48972766-48972871
  hypo

SEQ ID NO: 196486 - DNA, 315 bp, Homo sapiens
  chr22:48977758-48978073
  hypo
acatggagcgaagcacgcagctgtgggtctgcgtggaacatgggactgttcgctcacacacgcacccagtgagtggacagggctcctttgagaccaaccatgggacccggtagcctttgtactgtgggagccctgacctgcctgtcggggcaggcggccctttcctcgttctccttttacctgggctctgtgtgtgagcccacctctcccagagacacgcactgcggtgccccccaacagagacacaccacacactacacgatgcacacacccacaccacacaaaaaacacaacgcataccatacaccccacata

SEQ ID NO: 196487 - DNA, 30 bp, Homo sapiens
  chr22:48987684-48987714
  hypo
agccagcatcccgggcgcctgggcccggtg

SEQ ID NO: 196488 - DNA, 278 bp, Homo sapiens
  chr22:48996153-48996431
  hypo
tggcatcctgcctcctacttgcgcaggtccagcggggatcagagtggaggcctcgcaccagctctgggacatgaaggggcccgaggcagcccttgtggccacacgggccttgtcatggttcggcctttccactctgtgttccgaactgtgcagtgtgtatgtgtaggcacagatgtgtgcccgtgcccatgcctaggactttgcgtgtgtctgtacgtgtgatttcgtgtgtgtgtgcatcttcgttggcgacacacgtgtgcaatagttcttccatt

SEQ ID NO: 196489 - DNA, 108 bp, Homo sapiens
  chr22:48998394-48998502
  hypo
ccccgttttctgcgacgtgggccctgtgtctttgttgtaacatatatcgtatcctggaccatgtggcctctggtacagagacgcttggctcgccgcacatgtctgttg

SEQ ID NO: 196490 - DNA, 30 bp, Homo sapiens
  chr22:48998729-48998759
  hypo
cgatgcccctgaggccgagaggcccagaca

SEQ ID NO: 196491 - DNA, 415 bp, Homo sapiens
  chr22:49008039-49008454
  hypo
aacaaagtccttggccgccagcgtgggtgactccagtgcacacccccgcagcacagggcggctcacttgcatgttcaagtgtaatcaaggcgagcctgtgagatcacggcaggccacgcgtgtctcacagcctgtgcgcgtcttgggagactgcaaaggggttaaatggcccgtgtacctccctgcaacactgacattttgagcgtgtgtcaaggtgtccctatagcacgcccacctgttgccttccctggggccctgtccctgggcacaggtggcctcgtctctcctggaccctccagccctcccatccagtgggctcttccgacccccagcagccctcgcctaatgggaggtgcccccgccccacctgtctgctgttccccacgtgtctcccgttccccgcgtgtctcccttt

SEQ ID NO: 196492 - DNA, 257 bp, Homo sapiens
  chr22:49010564-49010821
  hypo
gttgaccgagagcttcgttcacaccttctgtgccgcacacgtccagcacttgtagtgtgtgagacagatgtgggggccggggtaggcactgggggtggcactggggctggccagctggagccggccctggagagaaggccgggcatggggtcagcagagcgggcctggcctcccagtcaccggggccagaagccactggctgcttggggagaagccacgcactgtaagaactcagcgctacctgggggattcatcct

SEQ ID NO: 196493 - DNA, 293 bp, Homo sapiens; identical to SEQ ID NO: 101733
  chr22:49013240-49013533
  hypo

SEQ ID NO: 196494 - DNA, 138 bp, Homo sapiens
  chr22:49014305-49014443
  hypo
tgggtaacggattggcgttgtttcatattcatcatctgtaatcaggtggcctcgtccgcacccgcagctccgtctgggaagtcctggaggcagcgtgcacagtgggcccttgctatctgtaatcgggtggccttgtcc

SEQ ID NO: 196495 - DNA, 30 bp, Homo sapiens
  chr22:49017346-49017376
  hypo
ttctcagagggcatcggcggttgtagcagg

SEQ ID NO: 196496 - DNA, 30 bp, Homo sapiens; identical to SEQ ID NO: 101734
  chr22:49019301-49019331
  hypo

SEQ ID NO: 196497 - DNA, 773 bp, Homo sapiens; identical to SEQ ID NO: 101735
  chr22:49026209-49026982
  hypo

SEQ ID NO: 196498 - DNA, 181 bp, Homo sapiens; identical to SEQ ID NO: 101736
  chr22:49038917-49039098
  hypo

SEQ ID NO: 196499 - DNA, 344 bp, Homo sapiens; identical to SEQ ID NO: 101737
  chr22:49042350-49042694
  hypo

SEQ ID NO: 196500 - DNA, 159 bp, Homo sapiens; identical to SEQ ID NO: 101738
  chr22:49045920-49046079
  hypo

SEQ ID NO: 196501 - DNA, 241 bp, Homo sapiens; identical to SEQ ID NO: 101739
  chr22:49046593-49046834
  hypo

SEQ ID NO: 196502 - DNA, 188 bp, Homo sapiens
  chr22:49047903-49048091
  hypo
aggctgggcacagcgcgtcatctccacctcgaggcgccaacggggcccccagggccagctgaaggcatgttgtggctgggactagggtgacgggaattttccaccaggagcgacgtgaatcacctgctctattgtacgcaagagactgggagtgcgccaaggtccctaagatgcggtgtctgtggccg

SEQ ID NO: 196503 - DNA, 43 bp, Homo sapiens
  chr22:49053746-49053789
  hypo
actacaccctgctaataatgccgcttgcctcatcttacatatg

SEQ ID NO: 196504 - DNA, 30 bp, Homo sapiens
  chr22:49054294-49054324
  hypo
atcttgcgtgagtgacggagcaccgtgaca

SEQ ID NO: 196505 - DNA, 338 bp, Homo sapiens; identical to SEQ ID NO: 101741
  chr22:49054730-49055068
  hypo

SEQ ID NO: 196506 - DNA, 169 bp, Homo sapiens
  chr22:49057066-49057235
  hypo
cccatgccccaccctcggccccgagccgcctcgggcacgtcttgcctgctggaaccttgccccagccctctctccttgtgcccttcccacgtttacagaagaaggctgggctgaatggtgtgcaggcctcgaaccccggccgcagaactcgccccgatgaggggaaact

SEQ ID NO: 196507 - DNA, 239 bp, Homo sapiens; identical to SEQ ID NO: 101742
  chr22:49063320-49063559
  hypo

SEQ ID NO: 196508 - DNA, 87 bp, Homo sapiens; identical to SEQ ID NO: 101743
  chr22:49070488-49070575
  hypo

SEQ ID NO: 196509 - DNA, 30 bp, Homo sapiens
  chr22:49086941-49086971
  hypo
aggcaagcctcagggcggcccggggaccat

SEQ ID NO: 196510 - DNA, 92 bp, Homo sapiens
  chr22:49087332-49087424
  hypo
gggcagatgcagcctcgcgaggaacgcagcctggagaggctcacagtcgcagtggcatggctgggcaacggaggacgcgccaggagcaggct

SEQ ID NO: 196511 - DNA, 30 bp, Homo sapiens
  chr22:49103619-49103649
  hypo
gtgcacgcagcccggcgggaggataaagac

SEQ ID NO: 196512 - DNA, 258 bp, Homo sapiens
  chr22:49104032-49104290
  hypo
tctgataactcccccagggcacggcgggggttctgtggagacagggccaggttcaggttccgtccaggtgtgctccttccgtccctgggcctggcctggtggctgctcacaccagagacccggagggcccttcagctcctctctgtccccctgagtggggcatgcagtgcaccccgccctcccaaagccacggctgacctgggtctctagagctgctcttcccaagggcgggagcttggggaacgccgggtggacatg

SEQ ID NO: 196513 - DNA, 30 bp, Homo sapiens
  chr22:49117138-49117168
  hypo
tcgtcccgcccgctgcgtgtgacctcagat

SEQ ID NO: 196514 - DNA, 844 bp, Homo sapiens
  chr22:49138230-49139074
  hypo
cagagcaggtggggcaggagacgggtggagcgggtggtgctgtgtggcggagctggcggcgcagtggagcgggcgttgtggtggacccggtggcgtggcagaccaggcgacgtggtggacccggccgcatggtggaccaggcaacgtggtagactgggcagcgtgatggaccaggcgacatggtggaccgggccgcatggtggaccaggcaacgtggtagaccgggccgcatggtggaccaggcaacgtggtagaccgggcagtgtgatggaccaggcgacgtggtgggccgggtggtgtggtgaagccggcagcacagtggagcaggcattatggtggactgggcagcatggtgtattagaagaggagagatggcctggggtgctcagcggggctgagtccccagctgggagctcaggtgcgatgaagcccaagggactgacggtgtgaggagggccctctgctgcctccatgcagcccacacgcggggcccccacagtgcggacatgttggggcaatgctgcctggccccgccctcagcccagccctgggacgcaggctcagcagcccccggattccagtcaacatccccaggactcactcgggtcaggcacagtgtccaagctgtgtgagtctccgggagccgctggaacaaaatgccacacacccggtggcttcaaaccatgaaacccgttctcactgttctgggtccagacgtctgtggtcacagtgtctgctgggccgtgctcccgcaggaggcagcagcagagggtcctccctgcctcctcctgccattcttccggttcgggggtccagacgtctgtggtcacggtgtctgctgggc

SEQ ID NO: 196515 - DNA, 30 bp, Homo sapiens
  chr22:49139472-49139502
  hypo
gggggagctgggccccgccgtgggcagccg

SEQ ID NO: 196516 - DNA, 116 bp, Homo sapiens; identical to SEQ ID NO: 101746
  chr22:49140370-49140486
  hypo

SEQ ID NO: 196517 - DNA, 30 bp, Homo sapiens
  chr22:49141269-49141299
  hypo
cacacacggctttgtcgttggcggctggcc

SEQ ID NO: 196518 - DNA, 30 bp, Homo sapiens
  chr22:49141692-49141722
  hypo
gcttcaccacacacgcgtcagaggagggcg

SEQ ID NO: 196519 - DNA, 785 bp, Homo sapiens; identical to SEQ ID NO: 101747
  chr22:49145661-49146446
  hypo

SEQ ID NO: 196520 - DNA, 316 bp, Homo sapiens; identical to SEQ ID NO: 101748
  chr22:49146941-49147257
  hypo

SEQ ID NO: 196521 - DNA, 43 bp, Homo sapiens; identical to SEQ ID NO: 101749
  chr22:49175462-49175505
  hypo

SEQ ID NO: 196522 - DNA, 202 bp, Homo sapiens; identical to SEQ ID NO: 101750
  chr22:49203054-49203256
  hypo

SEQ ID NO: 196523 - DNA, 116 bp, Homo sapiens
  chr22:49216175-49216291
  hypo
ctttaattctaattgcgccaactcacacctttttgagactttgcggtgatgtttgctttccttcaatctcagtaatttttcactagctccgtgttgataagcgtctgcatagttgc

SEQ ID NO: 196524 - DNA, 198 bp, Homo sapiens
  chr22:49231766-49231964
  hypo
tcaaagcccctaggagacagtcggcctcttgccagcccatcctctgcccagcacagcgtgttctcaaggttggagcaggctgcaggtgccacgccgaggcatcccaacggggattccaggctcctccagcctgcctgttgtcctgatcgctccctgcagccgctgctgcctgccagcgtggggggacctgtggggcaa

SEQ ID NO: 196525 - DNA, 190 bp, Homo sapiens; identical to SEQ ID NO: 101751
  chr22:49233006-49233196
  hypo

SEQ ID NO: 196526 - DNA, 69 bp, Homo sapiens
  chr22:49233426-49233495
  hypo
tcacacacatgcacacgtgtcctcccatgcacacacgtgcgcacacacaggctacgaggtggggctgtc

SEQ ID NO: 196527 - DNA, 282 bp, Homo sapiens
  chr22:49277151-49277433
  hypo
caccgggcccggcctgcgccctccttttttagaccagagctccggccagggaattcgtcctgaatccatcatgtcctggtggctgtgggtggtggcgttcctccgactcccagaccacccccgccgggatctgctgggaaacgcccagagccccactcctgctcgtccgctcatcctgggcctcgcctctttttagggtgagtgtggcctcctggggccgcctgtggctccgtgtgcccttccgaccaggctgcgtgtctcatgtgccgctgcccaggccca

SEQ ID NO: 196528 - DNA, 30 bp, Homo sapiens
  chr22:49278031-49278061
  hypo
tccacccaccacacacgtaggacacacacc

SEQ ID NO: 196529 - DNA, 85 bp, Homo sapiens; identical to SEQ ID NO: 101753
  chr22:49294316-49294401
  hypo

SEQ ID NO: 196530 - DNA, 267 bp, Homo sapiens; identical to SEQ ID NO: 101754
  chr22:49295889-49296156
  hypo

SEQ ID NO: 196531 - DNA, 283 bp, Homo sapiens
  chr22:49333181-49333464
  hypo
gtcctagaatcctgccgggtggactgccacagctcccgacctgggtgagcagctctgagaggagccccgtcctgctgtgtgaccggagccgccctgtgggtgattgctgcaccctgcttcactcctgggaatttcctcttcttaccttgtcctctcatacacactcagagtcccgggactggaaagtcttcacacactcctcagtgcaaggttggaagccaagggttgctgatgtttaacgaatgcctctaagacacacctgcaggcccgtatgcatcgctgt

SEQ ID NO: 196532 - DNA, 30 bp, Homo sapiens
  chr22:49337297-49337327
  hypo
cagcattcctgccaccgcccaccacaggca

SEQ ID NO: 196533 - DNA, 30 bp, Homo sapiens
  chr22:49337969-49337999
  hypo
tgggcaatgtggggccgacgccgacatcag

SEQ ID NO: 196534 - DNA, 30 bp, Homo sapiens; identical to SEQ ID NO: 58185
  chr22:49338722-49338752
  hypo

SEQ ID NO: 196535 - DNA, 30 bp, Homo sapiens
  chr22:49371152-49371182
  hypo
cccaccccctcgccacgtgtccccccagct

SEQ ID NO: 196536 - DNA, 30 bp, Homo sapiens
  chr22:49376502-49376532
  hypo
aggagcgtgtctccacggagcttgtagagt

SEQ ID NO: 196537 - DNA, 162 bp, Homo sapiens; identical to SEQ ID NO: 101756
  chr22:49380596-49380758
  hypo

SEQ ID NO: 196538 - DNA, 94 bp, Homo sapiens; identical to SEQ ID NO: 34574
  chr22:49387604-49387698
  hypo

SEQ ID NO: 196539 - DNA, 141 bp, Homo sapiens
  chr22:49389206-49389347
  hypo
tcccagagggaagcagacactcggatgtggacgcgtgtgctgcagccctgtgtgcatgtgggtggaacacgcacaggtggacggatataggaaccaagtgacatcagcctgccttcatgtttccgtcgttctgttgattcc

SEQ ID NO: 196540 - DNA, 143 bp, Homo sapiens; identical to SEQ ID NO: 101759
  chr22:49404567-49404710
  hypo

SEQ ID NO: 196541 - DNA, 30 bp, Homo sapiens
  chr22:49417972-49418002
  hypo
agaaagaaggccgggcgtgcagacgactcg

SEQ ID NO: 196542 - DNA, 32 bp, Homo sapiens
  chr22:49424883-49424915
  hypo
tgcagacatcctcaccgcgggctcttgtggag

SEQ ID NO: 196543 - DNA, 95 bp, Homo sapiens
  chr22:49430806-49430901
  hypo
ttgtgactcggacatcggggttgggggatgtgggtgatgttcacctgccgtggaagaacccggaggattagggtggcaggcggcagggccctgag

SEQ ID NO: 196544 - DNA, 276 bp, Homo sapiens
  chr22:49498248-49498524
  hypo
gccgggagataagcccgctaaccggcaccttagtgctccaggacgctgggctggcatgctgtccgtgtcggcaaatagtgccagcgcctgtgggcacggactcctcccacccgggactcctcccacccgggactcctcccacctgggattatggtcttggtcaccgtcatggttgagttatgttccctcaaattcaaatgttggagtaataacccccagcaccgcagaacgtgaccttattcaaagatagaatctttaccgaggaggccaagtaaa

SEQ ID NO: 196545 - DNA, 126 bp, Homo sapiens
  chr22:49504661-49504787
  hypo
agctggacatgctgtcgggatgcctgggtgggaacactgtgctcccagactcaggtcagcgtcagaggccggccaggagctggacgggagagccagtcagggcaacaccagcgtttcaggctttca

SEQ ID NO: 196546 - DNA, 52 bp, Homo sapiens
  chr22:49508030-49508082
  hypo
gaggatggcgagtcgcgcttgcaaatgtttgctcacccggcacgtgtcacga

SEQ ID NO: 196547 - DNA, 52 bp, Homo sapiens; identical to SEQ ID NO: 101760
  chr22:49512002-49512054
  hypo

SEQ ID NO: 196548 - DNA, 109 bp, Homo sapiens
  chr22:49535539-49535648
  hypo
gggtgggagtggtgacggccccagcaccggggagtcctgacacagggacctccaccctccacacggggctcagcccacagaggctgccgcaccccgaagctgcaccctg

SEQ ID NO: 196549 - DNA, 217 bp, Homo sapiens; identical to SEQ ID NO: 101761
  chr22:49538064-49538281
  hypo

SEQ ID NO: 196550 - DNA, 227 bp, Homo sapiens; identical to SEQ ID NO: 101762
  chr22:49546642-49546869
  hypo

SEQ ID NO: 196551 - DNA, 72 bp, Homo sapiens; identical to SEQ ID NO: 101763
  chr22:49558734-49558806
  hypo

SEQ ID NO: 196552 - DNA, 213 bp, Homo sapiens; identical to SEQ ID NO: 101764
  chr22:49559993-49560206
  hypo

SEQ ID NO: 196553 - DNA, 30 bp, Homo sapiens; identical to SEQ ID NO: 101765
  chr22:49562439-49562469
  hypo

SEQ ID NO: 196554 - DNA, 30 bp, Homo sapiens; identical to SEQ ID NO: 101766
  chr22:49562880-49562910
  hypo

SEQ ID NO: 196555 - DNA, 183 bp, Homo sapiens
  chr22:49579809-49579992
  hypo
cttgctccacggcggcgcgactccacgctgtatgcgtggtacgaggcgagggtggtaaggcaggaagtgggcagaggctttgtgatgagttaaccggctgggcgttaccctatggagcgggagagccatggtgcatccaggcagccagaagcatcctccggcgcctgccgcagaaggaactgg

SEQ ID NO: 196556 - DNA, 30 bp, Homo sapiens
  chr22:49580312-49580342
  hypo
gacacaggagcattccggcgcctgttcctt

SEQ ID NO: 196557 - DNA, 245 bp, Homo sapiens; identical to SEQ ID NO: 101767
  chr22:49580737-49580982
  hypo

SEQ ID NO: 196558 - DNA, 194 bp, Homo sapiens
  chr22:49582854-49583048
  hypo
tttggaaagggcagccgtcacgctcactctggccatcatgtgatgatcacgatgactgctatgaatggcatcaccgctgcagtgtaatcatcatgatcacggctgccactgtcagatgccacctggccagcctaaagcagacgctgtcactgcagctgtgactatcagtgctgctactgcgactgcaactctgt

SEQ ID NO: 196559 - DNA, 30 bp, Homo sapiens
  chr22:49609530-49609560
  hypo
ctagatgggactcaccgcgcagatctccag

SEQ ID NO: 196560 - DNA, 180 bp, Homo sapiens; identical to SEQ ID NO: 101768
  chr22:49610930-49611110
  hypo

SEQ ID NO: 196561 - DNA, 78 bp, Homo sapiens; identical to SEQ ID NO: 101769
  chr22:49629161-49629239
  hypo

SEQ ID NO: 196562 - DNA, 489 bp, Homo sapiens; identical to SEQ ID NO: 101770
  chr22:49637420-49637909
  hypo

SEQ ID NO: 196563 - DNA, 86 bp, Homo sapiens; identical to SEQ ID NO: 101771
  chr22:49678541-49678627
  hypo

SEQ ID NO: 196564 - DNA, 30 bp, Homo sapiens
  chr22:49682703-49682733
  hypo
tcttctctcagggaccgggccaagcttccg

SEQ ID NO: 196565 - DNA, 297 bp, Homo sapiens
  chr22:49693558-49693855
  hypo
gaaaccaacccaatcccagaacgccgaagacaccaggctccccggacgggcttccagggagccacttctagcttcacaacgtgaactgttttctcaacacatgacttcgcaagagtaaaagtccgtattctccctaaggcctcctgcgaacgctgtgtccaggccccgctgggggatccaggctctgagatgccccggccccatgccaggctgtggatggggagtgaccgtgcactcaccgtggtggcaacgcctgtatgcggcctgtagatgaacggggctcagcaggcattccag

SEQ ID NO: 196566 - DNA, 422 bp, Homo sapiens
  chr22:49698396-49698818
  hypo
ccagcacacaggacacccatgcgtgtttatcatccggcacacgggagacccacgcgtgtttactgtcgggcacaggggagacccacgcgtgtttactgttcggcacacgagagacccacgcgtgtttaccgtttggcacagggagacccacgcgtgtttactgtccggcacaggggagacccacgcgtgtttactgtccggcacagggagacccacgcgtgtttactgtccggcacaggggagacccacgtgtgtttactgtccggcacagggaagacccacgtgtgtttactgtccggcacacaggagacccacacggggcctgtttaccatccggcacacaggaggcccatgcatctttaccgtcaggcacacgggaaacccacgcgtgtttaccgtccggcacagggaagacccacatg

SEQ ID NO: 196567 - DNA, 148 bp, Homo sapiens; identical to SEQ ID NO: 101772
  chr22:49699807-49699955
  hypo

SEQ ID NO: 196568 - DNA, 43 bp, Homo sapiens; identical to SEQ ID NO: 101773
  chr22:49721830-49721873
  hypo

SEQ ID NO: 196569 - DNA, 317 bp, Homo sapiens
  chr22:49729096-49729413
  hypo
caagtcgccagcggccgctctgtagcaataattcatcgcttgggtccagcgttagaagcaggtctcggctctggtgctcagaagggacagcgtgtgcgggaagctttgctgccctggacgcggcgccaccacccaaccccggcccctgcggtcccagagtatcagccacgacttggtgcctcctgcctgggtttctctgtgcactttcaggcatgttgaagtcagaccattcacagttttgccgcaggtcgacacggagtgccccgtggcttagcaggtgtgagctctctctggggctggcccgctggagacacagg

SEQ ID NO: 196570 - DNA, 223 bp, Homo sapiens; identical to SEQ ID NO: 34575
  chr22:49729771-49729994
  hypo

SEQ ID NO: 196571 - DNA, 42 bp, Homo sapiens; identical to SEQ ID NO: 34576
  chr22:49730113-49730155
  hypo

SEQ ID NO: 196572 - DNA, 30 bp, Homo sapiens
  chr22:49745237-49745267
  hypo
gatatgggctcggcacgtcggcccacatgg

SEQ ID NO: 196573 - DNA, 167 bp, Homo sapiens
  chr22:49751420-49751587
  hypo
cagccactgaacaggcgctccctcccgcagggaggaatggaaggaggaaaggatgacaagtcccaagcgggtccaaatcccagcgaggcagtttccatgagaatttcctctttggcttgaaagtctgcctgccgggcccactatggtggcaacgccacctccaaagc

SEQ ID NO: 196574 - DNA, 212 bp, Homo sapiens
  chr22:49773231-49773443
  hypo
tgtgcaaagtcaggtcgaagcgaagaactctccccttattccctctactctccacaaagaaaacagagaatggccaacagctccaaccgtgtagagagctcaaaagacagtccttaaatgcagcctctgggccttgcaacaggaggttgacttcgccacgggagcttccagtggatgggacgggggtagatgttagtcggctctgggacttg

SEQ ID NO: 196575 - DNA, 30 bp, Homo sapiens
  chr22:49773806-49773836
  hypo
caagatgatgggatgcgtttctggggacaa

SEQ ID NO: 196576 - DNA, 329 bp, Homo sapiens; identical to SEQ ID NO: 101777
  chr22:49785181-49785510
  hypo

SEQ ID NO: 196577 - DNA, 30 bp, Homo sapiens
  chr22:49827590-49827620
  hypo
ctcagtcctcagcaccggccaggagtgagc

SEQ ID NO: 196578 - DNA, 139 bp, Homo sapiens; identical to SEQ ID NO: 101778
  chr22:49831759-49831898
  hypo

SEQ ID NO: 196579 - DNA, 80 bp, Homo sapiens
  chr22:49833906-49833986
  hypo
tctaagatagatgcattgaaatggcacgttggatttttctccggaccttcttctcgtgcgtacaacagttctcacttcat

SEQ ID NO: 196580 - DNA, 121 bp, Homo sapiens
  chr22:49834661-49834782
  hypo
ctccccatgattgggcggaatcgtagagcacgtatgtcaacgtcgctgggtaacttccacaggttttccaccgtgctagtaccgtctccttctcccaccagcaccgcgtctgcgctccttc

SEQ ID NO: 196581 - DNA, 98 bp, Homo sapiens
  chr22:49835736-49835834
  hypo
acatggcgctatgcccggcagcagagtcgtgggtgtaattgttgctgttgttggtgttggtgttgttttgagacagggttttgctctgtcacccgggc

SEQ ID NO: 196582 - DNA, 145 bp, Homo sapiens
  chr22:49852483-49852628
  hypo
atggacggaccaacccgggcgctgacatcactctgcatttgagggatgcaggtgcagcgtggggcacgggacgaccctggccagggcacctggtcagccctacactccctgaccccaggctgactgtccgcggtgggagagcact

SEQ ID NO: 196583 - DNA, 255 bp, Homo sapiens
  chr22:49855320-49855575
  hypo
tggaggaggcagcgacgcagaagcacggctatctgacaaactggggggacactgggccccaaagcagacattgccccgatacggatttggttccctttaatgactctccggaataaaataaaggtgtagactacggctcttcagaagaacgaggctcgtgtctctggggtggtgcctccaggtgggcggtgcgcaggagcgtgtggcggcggccgagacccagaggtgtttgtcggtgacatggccagagctgtc

SEQ ID NO: 196584 - DNA, 30 bp, Homo sapiens
  chr22:49856124-49856154
  hypo
atgtgcttattaagtcgtctgtggctctga

SEQ ID NO: 196585 - DNA, 30 bp, Homo sapiens
  chr22:49856514-49856544
  hypo
tctcccgtcacgcagcggctgcacgtcact

SEQ ID NO: 196586 - DNA, 139 bp, Homo sapiens; identical to SEQ ID NO: 101781
  chr22:49857252-49857391
  hypo

SEQ ID NO: 196587 - DNA, 43 bp, Homo sapiens; identical to SEQ ID NO: 101782
  chr22:49858315-49858358
  hypo

SEQ ID NO: 196588 - DNA, 334 bp, Homo sapiens
  chr22:49864170-49864504
  hypo
atgtgtgcacgtgctcgcctgcaaacctgccacgcgggagaggcttccaaacagcaggaaccccacaggccccaactgcggaaggaggacggagccagttcccctcgggcggtcatcattggtcttggtgacaagccagtgcagcaggtgtaaggaatgaacagacgtcaggggaaggcgggaattccaaacacctttcctctgacttcacccacgggaaccaaaggagagggaggtgcctggcgggatggtggaggccgagcccaggtcccaccccgtccatcacgggtgtccgcgccgtttcctgggctgctgtggctggatggctctgttg

SEQ ID NO: 196589 - DNA, 121 bp, Homo sapiens
  chr22:49880499-49880620
  hypo
tcaaaacaacaaacaaacaaacaaattctttattttctctctacatctgttgatatattgcatgatgttagattttttggtttctttttttttttttttttgcgatggagtctcgctgttt

SEQ ID NO: 196590 - DNA, 228 bp, Homo sapiens; identical to SEQ ID NO: 101783
  chr22:49901385-49901613
  hypo

SEQ ID NO: 196591 - DNA, 776 bp, Homo sapiens
  chr22:49911017-49911793
  hypo
ggagtaagggacaggaccagacgccatctgagggacaaagtccccgagccccgatgcctgggcgcagagctggagactcggcttcttcttcgacctccccggccacttcccaacaccacatcacctcaacgcaggtataaggcacgtcccgtcattgcccccgttttagagctgagaaacatgaggaccagagaatcaaggctgtctgagccagagggcgcctcgctggcccctaccccaaaacagcacccgccctgccctggtcattactgccccccaaccttaaccaccctccccactgccctacagaagacccttagaagggggctgactgatggaccatggtgaaggccagcctggcctccttcagccacagtgtgaagcgcagttcaccaaaactggaaactgccatgcatcccggtgtcatcaaacaccacagcaaaagagccaggtgaacgcacggaacatcaagccgcaaccctccacacctctctgtataaccttcgcggccactgcccccgtgcctgcagagcgggtttgcaggagacgtcatccgaatggataaatgtccgtcggagctggggatcatcctcccagagtttcagcagctcagagaaggccagcaactcaccgagccatgccacagcgtgcaagcacagcggcccggccctcctgcattctgtcatgcactgcgtgtcatcttattaaaggatccaacgcaggctcataaaatacttaatgaaaacatgccaccaggtgcacgtcctggaagagcc

SEQ ID NO: 196592 - DNA, 30 bp, Homo sapiens
  chr22:49914799-49914829
  hypo
ccctccactgcgatgcggggaaagccctga

SEQ ID NO: 196593 - DNA, 30 bp, Homo sapiens; identical to SEQ ID NO: 101785
  chr22:49934647-49934677
  hypo

SEQ ID NO: 196594 - DNA, 30 bp, Homo sapiens; identical to SEQ ID NO: 34580
  chr22:49935075-49935105
  hypo

SEQ ID NO: 196595 - DNA, 30 bp, Homo sapiens; identical to SEQ ID NO: 101787
  chr22:49935364-49935394
  hypo

SEQ ID NO: 196596 - DNA, 31 bp, Homo sapiens
  chr22:49941832-49941863
  hypo
gggcactcccttctgtcggcagagtcgtgct

SEQ ID NO: 196597 - DNA, 326 bp, Homo sapiens
  chr22:49943107-49943433
  hypo
tgacagacaaggcctcgcataggcagaggtggcttcacagcagcgggcaagtgggggaccctgcctgatgcagagtcgggggcggcttcctgcagaccgggcttccttggcccattccccctctccctttttcaaatctcagaactccagagcggtgctctcctccaaaaagagggctgctccccttaaggcactcgctctgactttgccatcctccagctgacctgagtgagctcagcagccggagttcgtgtggctctgtcaccagccagcatgtctgaaatcactgcagagatgctgctgagggaacacggacagcgttctga

SEQ ID NO: 196598 - DNA, 125 bp, Homo sapiens
  chr22:49945295-49945420
  hypo
gccttcctctgctcacgtcaggttttcgggaggagaaggcagagctggcaggcttgggtgatcacagcaatgacagaggccagggatgggctgtggccacccagcgcctgcgagcagggtcaccg

SEQ ID NO: 196599 - DNA, 253 bp, Homo sapiens
  chr22:49945705-49945958
  hypo
aggccccgggatgcccgggaagagcacctgccatgcatcctgacagctggggctctcacagccacccagaggacaccagcttggagggcacatttgcaactctcgggggctcattccgtttcacataatttagtttacattcaaaatataaagtctccttttgtgtgtattaagggacagatctctgcttgcgctcacttggagtgaggacagaggccctgctgtgcccagccccttccgcccgagctcactg

SEQ ID NO: 196600 - DNA, 535 bp, Homo sapiens; identical to SEQ ID NO: 101788
  chr22:49948170-49948705
  hypo

SEQ ID NO: 196601 - DNA, 203 bp, Homo sapiens; identical to SEQ ID NO: 101789
  chr22:49958406-49958609
  hypo

SEQ ID NO: 196602 - DNA, 30 bp, Homo sapiens
  chr22:49959026-49959056
  hypo
gcgcagaggcccggtcgacgcagcaactga

SEQ ID NO: 196603 - DNA, 30 bp, Homo sapiens; identical to SEQ ID NO: 101790
  chr22:49961570-49961600
  hypo

SEQ ID NO: 196604 - DNA, 201 bp, Homo sapiens
  chr22:49964996-49965197
  hypo
ccaccgcgcctggctgaaagcagggtttttaaaaagcaggagggtggatggtgcagaccctgacaggaagggacttagaaacgcaaactgcaggccctggagtgtgcccgacgcgcaggcagcttgttttcacaggtgcaaaggttcacaatctgcctcccacgtaagcctaaccctgcgggcaagcgctgggctccactg

SEQ ID NO: 196605 - DNA, 30 bp, Homo sapiens
  chr22:49965404-49965434
  hypo
cctgttccccaccgccggcccttcctgccc

SEQ ID NO: 196606 - DNA, 156 bp, Homo sapiens
  chr22:49967871-49968027
  hypo
acgctccccagacgccggagcacccacggccagcgggtggacacggtgtccacatggtgcacactcttgcccttgagcctgtgggagggaagccaggaagatatggacggagcaaggggagcacgggagcctcggggcctgcggggggccaggcag

SEQ ID NO: 196607 - DNA, 30 bp, Homo sapiens
  chr22:49968739-49968769
  hypo
aggacagcaatggcccgtgccaggggtcca

SEQ ID NO: 196608 - DNA, 30 bp, Homo sapiens
  chr22:49970171-49970201
  hypo
cccagcacacgtgtgcgtaccccaagccgt

SEQ ID NO: 196609 - DNA, 101 bp, Homo sapiens
  chr22:49970562-49970663
  hypo
ctgtcccatgggcagcgcagagctgtcctccttgctgagtgtccgccgggcctacagtgggacgatgtttcctcgcaggctgaccccgcactgccctggtc

SEQ ID NO: 196610 - DNA, 151 bp, Homo sapiens
  chr22:49971211-49971362
  hypo
ctgaatgggtcccaacggctctgacggctccccacacccctgccctgtgggccatgctgccctctcctctctggctctgtgagtcacgcacggcctctgtgattccacgtgctgttctatgctgcgccggctcccacgtgcctcacctgac

SEQ ID NO: 196611 - DNA, 85 bp, Homo sapiens
  chr22:49971681-49971766
  hypo
tcaacacgaacctctcgagctgatttttgtaggggtgcaaggtatggatccaggttcttttttttgcctacggaattcagtgcca

SEQ ID NO: 196612 - DNA, 53 bp, Homo sapiens
  chr22:49979623-49979676
  hypo
tgggccggggctgaccggtcatcagcgaaagcaccctccgtgctgtgagtccc

SEQ ID NO: 196613 - DNA, 280 bp, Homo sapiens
  chr22:49980096-49980376
  hypo
gatgacgcaggctctcgtgtcagggcgcacagccatgtgatgactccacattcactcagtgctcagcacagagtcactgcgaggcggcgtgagtctgtgtgacatcagcgtgtttagtgcatgacatcagcatgtttagcacagagtcactgggagacagtgtgagtctgtgtgacatcagcgtgcttagtgtatgacatcagcgtgtttagtgcatgacatcagcgtgcttggcacagagtcactggaaggtggcatgagtctgcgtgacgtcagcatg

SEQ ID NO: 196614 - DNA, 30 bp, Homo sapiens; identical to SEQ ID NO: 34581
  chr22:49982589-49982619
  hypo

SEQ ID NO: 196615 - DNA, 155 bp, Homo sapiens; identical to SEQ ID NO: 34582
  chr22:49983003-49983158
  hypo

SEQ ID NO: 196616 - DNA, 266 bp, Homo sapiens; identical to SEQ ID NO: 101794
  chr22:49983614-49983880
  hypo

SEQ ID NO: 196617 - DNA, 30 bp, Homo sapiens
  chr22:49988690-49988720
  hypo
gaagacggcctctgtcgcgaagaaacatgg

SEQ ID NO: 196618 - DNA, 43 bp, Homo sapiens
  chr22:50000855-50000898
  hypo
gtgtttctccaaaagcgtgtgctggagacggaatccccaaagc

SEQ ID NO: 196619 - DNA, 202 bp, Homo sapiens; identical to SEQ ID NO: 101796
  chr22:50001628-50001830
  hypo

SEQ ID NO: 196620 - DNA, 706 bp, Homo sapiens
  chr22:50002540-50003246
  hypo
aggcgcaagctcccccgatgacacgggaagctggagacattctcgtgttcacggtcacagctctgctcctttgagaaataagcggcacgatgtttttctagtgggtttgcctttttctcagtgatggtaaaagtgctgtgtatgttaaggtgagtgactcaggaccaaggtgagtcttgactcctcttggctttgcgctgagagcacctgggagagtcaagggagcacacaggacagtccctgcttcggctccccaggaacacgcggccaagtgcacgcagccggtgtcctcgggagccggtggtggggctccctgaaggtcctagaaatccggcggcacagggacgtgcaggcggatgagctggagggagattctgcttttctcagttcctagtgagaagtcagagcccctctgaaagacagacagtcatctaggtcccatctcaggagaaagtggaaccgcccgggccgtgcctgctagaatcaagtgcagttttcacaagaccttgctggaaactgggaagatggaccccgcgcctttcctgggaagagaagagtgtgttttacacacgtgctcccgccaggggagagcagaggggaggcaagccaggcacaaagctggcacgtgggatgagtgaatcagacacagctgcatttgtgttctcggttcctccaaacacgagacgcttggaacagggtctctgag

SEQ ID NO: 196621 - DNA, 30 bp, Homo sapiens; identical to SEQ ID NO: 101799
  chr22:50006978-50007008
  hypo

SEQ ID NO: 196622 - DNA, 795 bp, Homo sapiens; identical to SEQ ID NO: 34586
  chr22:50008937-50009732
  hypo

SEQ ID NO: 196623 - DNA, 370 bp, Homo sapiens; identical to SEQ ID NO: 101801
  chr22:50010153-50010523
  hypo

SEQ ID NO: 196624 - DNA, 188 bp, Homo sapiens
  chr22:50015945-50016133
  hypo
gcccagctcagcccacgccggggaccaaaggccctgagaagtgaccgtgctggtaggcgtggtgtaaggctggacactgccggctgacctgctcccgggggcccaggagaccctgcactggccactgggaagagtgggcagcagcagcctccctggaagctggggtggccgggcggtgtgggcagggc

SEQ ID NO: 196625 - DNA, 250 bp, Homo sapiens; identical to SEQ ID NO: 101802
  chr22:50025071-50025321
  hypo

SEQ ID NO: 196626 - DNA, 34 bp, Homo sapiens; identical to SEQ ID NO: 101803
  chr22:50047561-50047595
  hypo

SEQ ID NO: 196627 - DNA, 678 bp, Homo sapiens
  chr22:50054164-50054842
  hypo
gcggctgccgggtctcggggcccggtgggtccctcctcggtggcttgacccgtttgcctttgagcaatgactcggtgggcagcagagccccacccgtaaccagcctgcacagcgcagccccacaggaatctgttcaggcaaaggttctaattatcaagacatttttatttcaagcagagctcaatatttcaagttcattctgtgcctacgtttcagaaaaaaaatcttccagcaagaacgcaataaacaagactgagagcctcattaggagcctgtgagccccacatcaccagacgcgctgcagctccccgtgatgaccgctcctcctccgagccccgcacacggcgcgggttacatggaaaaggcaccgcagctccccgtgacgtcctctcctcctcggagccccgcacacggcgcgggttacatggaaaaggcactgcagctccccatgacgatcgctcctcctctgagcaccgcacacggcacgggttacatggaaaaggcactgagtgcggcccacaggagaggcggggatggaaccaggaccccaatgcataggctgggggacgcaccttggccacctcccgtggcgggatggttttcccaatcggagatcccagcagggcccatgctggcggctctgcctgtccctggcacggaccactcctcacctgtgga

SEQ ID NO: 196628 - DNA, 165 bp, Homo sapiens; identical to SEQ ID NO: 101805
  chr22:50056926-50057091
  hypo

SEQ ID NO: 196629 - DNA, 18 bp, Homo sapiens
  chr22:50075311-50075329
  hypo
tttttttttttaagacag

SEQ ID NO: 196630 - DNA, 30 bp, Homo sapiens
  chr22:50081493-50081523
  hypo
actcaccgcccaaaccggactcctttctgt

SEQ ID NO: 196631 - DNA, 30 bp, Homo sapiens
  chr22:50081960-50081990
  hypo
tgtcagatccgccggcgtccactggcaccc

SEQ ID NO: 196632 - DNA, 196 bp, Homo sapiens
  chr22:50085871-50086067
  hypo
ccgtaaaataaatagcgaccctattagatgatacccaaagaaaatgtatccaagagcccctattaatattaattagtgaatacataaatagataaatgggaaagaagagagaagtcttcgttatagaattccaaatcacccacatagaaggactgacggaaacggaaagtcggtgagagcacggagcaggaatggc

SEQ ID NO: 196633 - DNA, 80 bp, Homo sapiens
  chr22:50092132-50092212
  hypo
aactgagagatgttgcggttgcacaattgcacgtgcgttcctctgagcggctggaatgttgggcgcgtgtggccccatga

SEQ ID NO: 196634 - DNA, 354 bp, Homo sapiens; identical to SEQ ID NO: 101807
  chr22:50107837-50108191
  hypo

SEQ ID NO: 196635 - DNA, 96 bp, Homo sapiens
  chr22:50113601-50113697
  hypo
ggcgacagagcgagactccatttcaaaaaaaaagaagaagaaatgtcaataaatgtgttcaatgtgtgtgtttaacattgtcggcttgaacacgaa

SEQ ID NO: 196636 - DNA, 51 bp, Homo sapiens
  chr22:50114360-50114411
  hypo
atacaaggtccttcccggcagaatttcgcttttgtgcgatgagaagttctt

SEQ ID NO: 196637 - DNA, 30 bp, Homo sapiens
  chr22:50115267-50115297
  hypo
gatgcctcgctgccacgggggccacagagc

SEQ ID NO: 196638 - DNA, 198 bp, Homo sapiens; identical to SEQ ID NO: 134359
  chr22:50118498-50118696
  hypo

SEQ ID NO: 196639 - DNA, 66 bp, Homo sapiens; identical to SEQ ID NO: 134360
  chr22:50118722-50118788
  hypo

SEQ ID NO: 196640 - DNA, 295 bp, Homo sapiens
  chr22:50119261-50119556
  hypo
gtcactgggatgccccgtctccagctgagcaacagcactgtgtgtcccagacctgaacagcgagtggagacagtgccgctgtgccaccgcagggcacctcccgctgccttggccacccaggccctcctgggagggatccaaaccactgaccagaaataacacctgaaaaccggaacccgggtcctggggtcacacgcagccgaagggatgggctgggtgcacgaaggacgggcacggcagagctcggctgtgagggtgtcatctgggctcggagctcagccgccgtgtcacctga

SEQ ID NO: 196641 - DNA, 43 bp, Homo sapiens; identical to SEQ ID NO: 101810
  chr22:50131652-50131695
  hypo

SEQ ID NO: 196642 - DNA, 132 bp, Homo sapiens
  chr22:50156811-50156943
  hypo
aacagcccaagtgctcgtacgctgatgaatggacaagcaaactgtggaagccccatgcaacgcagtgtcgttcagccacggggagacgtgaagctctgacacctgatacagccaacgcgctgtaaaccattg

SEQ ID NO: 196643 - DNA, 30 bp, Homo sapiens; identical to SEQ ID NO: 101811
  chr22:50167351-50167381
  hypo

SEQ ID NO: 196644 - DNA, 129 bp, Homo sapiens; identical to SEQ ID NO: 101812
  chr22:50169706-50169835
  hypo

SEQ ID NO: 196645 - DNA, 462 bp, Homo sapiens; identical to SEQ ID NO: 134361
  chr22:50170509-50170971
  hypo

SEQ ID NO: 196646 - DNA, 773 bp, Homo sapiens
  chr22:50171290-50172063
  hypo
ctgcgtggtgggaagcgcagggccgcggtgcccacctcgagtcgcagagcgggctgttgctggaggagatgctggactcggaggcacagcgtcgtcggggtgtggccttcctccccaggccgccgcccggctcctgctcgctcctcgcacccccaaagccgttggtgagacctggaacacaggcgggcaggccctgagctcagcacaaccagggcacactgaagcatgactcaacgacgttacacttggaacacatcttacaaagcacgtttcacagacaggtaagacagcatcttccttttcactcccaagttcccgagcatagtccttacagtaagcagacaccaaagttactcgttaaatgaaatcaacttaacaaactgcagtcggctccgatcgtagtagtttgctgagcaccatgaagatgctcctcttgacaagcccgggtctttagacaggctctgtgaaggcaaagaaaggatgccgtgagcctgccatgggggcagatgtgcaacctgtgagtgcaaacacgggggcggcctgtccacgtgggcaccggccgcgtttgaacggaaacttcaccaggccgaaggggccaccaaagacacaaaaacatgttcacaggagcagagctccagggaataggaaatcaggttttaaaaagaaaaaaccttggttcaaaagacaagtgttaacatgaagtcaaaaatgctgacgaaacactttaaaacacaaaatccggggccatcgccgtgtctgagtgtgtctggcct

SEQ ID NO: 196647 - DNA, 30 bp, Homo sapiens; identical to SEQ ID NO: 34593
  chr22:50173709-50173739
  hypo

SEQ ID NO: 196648 - DNA, 30 bp, Homo sapiens; identical to SEQ ID NO: 34594
  chr22:50175235-50175265
  hypo

SEQ ID NO: 196649 - DNA, 30 bp, Homo sapiens; identical to SEQ ID NO: 34595
  chr22:50175965-50175995
  hypo

SEQ ID NO: 196650 - DNA, 72 bp, Homo sapiens
  chr22:50176845-50176917
  hypo
ctgcacaagatcccacgcacagatgccccaccccacgagcaggacttctcagttggccgcaggggcactcag

SEQ ID NO: 196651 - DNA, 239 bp, Homo sapiens
  chr22:50177124-50177363
  hypo
acagacacagcacaacgcgcctgggcatggccgtcacacccaaaccaccagtcactatgggacggctccgcacatgctcaggacagcctcagaatgctgtccactgtgtcgtcagctgcagcaggctcccagtcggtgccgggctctcctctgcgtccttcgtgactgtccagagggaaggctgaggtgccacgacatcccgccagctccaggcgtgcaccgggcgccagcaccattcc

SEQ ID NO: 196652 - DNA, 250 bp, Homo sapiens
  chr22:50177706-50177956
  hypo
actgaagacacccccgcgctctcacgccccagcacgtgcacatggagactcgcaacaggggtctccgcaacggcagcgagtggacaaagacatccccacactctcaagccccagcacatgcacacagagactcgcagcaggggtctccgcaacggcggtgagtggacaaagacacccccgcgctctcacgccccagcacgtgcacagggagactcgcggcaggggtctccgcaacggcggcgagtagaca

SEQ ID NO: 196653 - DNA, 30 bp, Homo sapiens; identical to SEQ ID NO: 34597
  chr22:50181275-50181305
  hypo

SEQ ID NO: 196654 - DNA, 163 bp, Homo sapiens
  chr22:50187008-50187171
  hypo
tctccttctagataggcggatttcttctcctacatttatttcttagtcataaaaacatctttgctgcctggacctttccccagacattctttggcaacgatcacggctgctacctaccaactctgcagaggagctggccggggaccctcggggcagacaaggc

SEQ ID NO: 196655 - DNA, 381 bp, Homo sapiens
  chr22:50191340-50191721
  hypo
gcatgctagtggctcccggaccatgctgatagggagctggcaacacagagcaggacagagtctgctagaaagagcgtcttccacctcctccggacacggcgccagttcttaccgtcttcccaggagaaaggccgccgcggtgccgcagcaggccgctcaggcaggtgcatccccgaggcctcttccaagccgatgctgtccacctcgcgccgggcctgcctcagaacaacacctccctgatcgcgcagcctcaccgcggctctatagaacacggtgtccctggcattgtacttcatgcagttatctataatgagatcaaaatcctcctcaaactcatggaggtttttatacccttgagcttctaaccgtttcctcattgtg

SEQ ID NO: 196656 - DNA, 114 bp, Homo sapiens; identical to SEQ ID NO: 34599
  chr22:50192074-50192188
  hypo

SEQ ID NO: 196657 - DNA, 30 bp, Homo sapiens
  chr22:50203791-50203821
  hypo
aagaaagaaagcgagcgagcaagcaagcaa

SEQ ID NO: 196658 - DNA, 721 bp, Homo sapiens
  chr22:50209202-50209923
  hypo
aaaaaaaaaactgtttccagatatagtaatgtccatttctgtagaggagaatccctcctgcctgtcagcctgcaccaggaagggctctgttgtgagctgccagctacaatctgcactaaaacccagaaaaccaacaaagtcacaggagggcaggaatgagtcagtgtctgaaacggcattcaggtctgttcctcatacaggagagcaggcgctcctgcaggctgcgtccacccaggtgccctcccgagctcccaggcactggctggacctgccctgcagctcctccttccaatgtgtcgtcctggcgcttccttcccgagtgcccgccactccagacccgatgcaggtcaagcacagggagctgccacctgtggcctcatggcccctgccatgcctcccagtgccacccgcagcagccaactcatgcacccacactgcccgggaggcacccacacagggcctcccggtgccacccgcagcagccaactcatgcacccacaccgcccgggaggtacccacacagggctctccccactgggcactgagccagtgtctcctgcttcaatccatgccagatacaaacttttataaaaaattaacagccagaaacatggaggaaaaaaagacttaaaaacacaagccaaagggggccgcggccggtggctctaatccgtaaccctagcactttgggaggctgaggaccacttgggcccaggagttc

SEQ ID NO: 196659 - DNA, 24 bp, Homo sapiens
  chr22:50209982-50210006
  hypo
cccgcctcaattaaaagaacaaaa

SEQ ID NO: 196660 - DNA, 30 bp, Homo sapiens; identical to SEQ ID NO: 101829
  chr22:50217647-50217677
  hypo

SEQ ID NO: 196661 - DNA, 30 bp, Homo sapiens; identical to SEQ ID NO: 101830
  chr22:50218908-50218938
  hypo

SEQ ID NO: 196662 - DNA, 163 bp, Homo sapiens
  chr22:50223385-50223548
  hypo
gaacaaagcctcgaacgtaggcatgtcacagggatactcaggaaggccttcggagaggatcttctttagaattcagactcatcctacagaggaggggttgccaaaatactaagagaattgaaccgtaactcatacacagtgaaactagcgttccagtgagaca

SEQ ID NO: 196663 - DNA, 31 bp, Homo sapiens; identical to SEQ ID NO: 101831
  chr22:50228902-50228933
  hypo

SEQ ID NO: 196664 - DNA, 158 bp, Homo sapiens
  chr22:50234238-50234396
  hypo
gtctggtgtttctcacgtgccgaaagaactatcagccacggattctatgtggagtgaaaatgtccttcgggaacaaagagaaataaaaaaaattcacagaccaaggcacatgaaaagaatttctcactagcagaactacccttaaagaacagctaaag

SEQ ID NO: 196665 - DNA, 30 bp, Homo sapiens; identical to SEQ ID NO: 101832
  chr22:50244533-50244563
  hypo

SEQ ID NO: 196666 - DNA, 442 bp, Homo sapiens; identical to SEQ ID NO: 134364
  chr22:50246432-50246874
  hypo

SEQ ID NO: 196667 - DNA, 434 bp, Homo sapiens
  chr22:50250092-50250526
  hypo
tgaagggtctgggggcgatggcggaagccccaggagagcattgtccatgaggtgcagaggcagcctcacggcatcccagtgcgtacctcctgcccggcccaagcgcctgctgctgaagccgcctcccagctcccccgggttgtttcggaattcaggggacatgcagcctaaatgacccacactggaatcccggccggcttcccatccctcgttctaggtgaaggccgcgctggaatcccggccggcttcccatccctcgttctaggtgaaggccgcgctggaatcccggccggcttcccacctctcgttctaggtgaaggccgcgctggaatcccggccggcttcccacccctcgttctaggtgaaggccgcgctggaatcccggccggcttcccacccctcgttctaggtgaaggccgcgctgcaatgccagc

SEQ ID NO: 196668 - DNA, 30 bp, Homo sapiens; identical to SEQ ID NO: 101835
  chr22:50251083-50251113
  hypo

SEQ ID NO: 196669 - DNA, 30 bp, Homo sapiens; identical to SEQ ID NO: 34603
  chr22:50252505-50252535
  hypo

SEQ ID NO: 196670 - DNA, 30 bp, Homo sapiens; identical to SEQ ID NO: 101837
  chr22:50280067-50280097
  hypo

SEQ ID NO: 196671 - DNA, 69 bp, Homo sapiens
  chr22:50282332-50282401
  hypo
ggggttgccttggccgcagcctctgtgcacgctcttcctggtgtcctcttacccggtagctgtgcgctt

SEQ ID NO: 196672 - DNA, 238 bp, Homo sapiens; identical to SEQ ID NO: 34604
  chr22:50296994-50297232
  hypo

SEQ ID NO: 196673 - DNA, 79 bp, Homo sapiens; identical to SEQ ID NO: 101840
  chr22:50305617-50305696
  hypo

SEQ ID NO: 196674 - DNA, 30 bp, Homo sapiens; identical to SEQ ID NO: 101841
  chr22:50307950-50307980
  hypo

SEQ ID NO: 196675 - DNA, 30 bp, Homo sapiens; identical to SEQ ID NO: 101842
  chr22:50313328-50313358
  hypo

SEQ ID NO: 196676 - DNA, 414 bp, Homo sapiens; identical to SEQ ID NO: 101843
  chr22:50316604-50317018
  hypo

SEQ ID NO: 196677 - DNA, 31 bp, Homo sapiens; identical to SEQ ID NO: 34605
  chr22:50324434-50324465
  hypo

SEQ ID NO: 196678 - DNA, 43 bp, Homo sapiens; identical to SEQ ID NO: 101845
  chr22:50340690-50340733
  hypo

SEQ ID NO: 196679 - DNA, 122 bp, Homo sapiens; identical to SEQ ID NO: 101846
  chr22:50341661-50341783
  hypo

SEQ ID NO: 196680 - DNA, 404 bp, Homo sapiens; identical to SEQ ID NO: 101847
  chr22:50343412-50343816
  hypo

SEQ ID NO: 196681 - DNA, 185 bp, Homo sapiens; identical to SEQ ID NO: 101848
  chr22:50344326-50344511
  hypo

SEQ ID NO: 196682 - DNA, 327 bp, Homo sapiens
  chr22:50345916-50346243
  hypo
ctgccaccggcagcccggcctcagcagagctgacacagaagagtgggttgcaggctgagctggtcctccggggcccaaaccaggcctggcacccacgaccctgaagagtgggaccccaaccaccccgacacctagtcggggcagggcagcagggacgggagggagctctgggccaccgaaggggccagggcgctggatggggaatttcctggaggtggaggagcccagcaagggtaaaagtgcagaattctttccattctttgcatttctctgagatgattctgcagagtgtgttgcctggaagacccgtggtgtctgtgtgtgtgt

SEQ ID NO: 196683 - DNA, 446 bp, Homo sapiens
  chr22:50346302-50346748
  hypo
cgtgtgtggtgtgtacttgtgtgtggttgtgtgtgtgtgtgcacgcagcctgcccctggtgcctcatcccccccttccccctgggagcggccccgctgtgctggcagttcggcccccacaggtctgcactggtgaaccctcatggtccctcagggagcccgggagaggtgaggaggacctggatagggcccaggcccagatgcctgcaggggagaaagctccacacaaggggtttgtgaggccttgccccagccccaacgagattcaggtgcccagctgtgggatatggggacaggcaggtgacggcccggctctcaggctccccatctggacgatggatggacacgcgtaagcaagaccctgaggccctgtccctcagcttccccaggcagggccgaagtgccctcctcctgagggctgggaggccacagcgcccagtgggagga

SEQ ID NO: 196684 - DNA, 30 bp, Homo sapiens; identical to SEQ ID NO: 34607
  chr22:50352369-50352399
  hypo

SEQ ID NO: 196685 - DNA, 305 bp, Homo sapiens; identical to SEQ ID NO: 134370
  chr22:50421920-50422225
  hypo

SEQ ID NO: 196686 - DNA, 190 bp, Homo sapiens; identical to SEQ ID NO: 101852
  chr22:50433173-50433363
  hypo

SEQ ID NO: 196687 - DNA, 30 bp, Homo sapiens; identical to SEQ ID NO: 34609
  chr22:50435398-50435428
  hypo

SEQ ID NO: 196688 - DNA, 30 bp, Homo sapiens; identical to SEQ ID NO: 101854
  chr22:50439212-50439242
  hypo

SEQ ID NO: 196689 - DNA, 408 bp, Homo sapiens; identical to SEQ ID NO: 134371
  chr22:50453233-50453641
  hypo

SEQ ID NO: 196690 - DNA, 30 bp, Homo sapiens
  chr22:50461045-50461075
  hypo
cattcctccatctgacgacgtgcactcctc

SEQ ID NO: 196691 - DNA, 30 bp, Homo sapiens; identical to SEQ ID NO: 34610
  chr22:50464993-50465023
  hypo

SEQ ID NO: 196692 - DNA, 90 bp, Homo sapiens; identical to SEQ ID NO: 101857
  chr22:50466961-50467051
  hypo

SEQ ID NO: 196693 - DNA, 30 bp, Homo sapiens; identical to SEQ ID NO: 34611
  chr22:50470007-50470037
  hypo

SEQ ID NO: 196694 - DNA, 30 bp, Homo sapiens
  chr22:50482207-50482237
  hypo
ctacgtggttctaaccgaatggcattctag

SEQ ID NO: 196695 - DNA, 50 bp, Homo sapiens; identical to SEQ ID NO: 101859
  chr22:50488451-50488501
  hypo

SEQ ID NO: 196696 - DNA, 211 bp, Homo sapiens; identical to SEQ ID NO: 58196
  chr22:50496971-50497182
  hypo

SEQ ID NO: 196697 - DNA, 49 bp, Homo sapiens
  chr22:50506924-50506973
  hypo
tccagaggctgtgaacagcagcggagacgtgaggctgcttatggcaatc

SEQ ID NO: 196698 - DNA, 32 bp, Homo sapiens
  chr22:50509792-50509824
  hypo
ttacaggcatgagccaccgcacctggccctgg

SEQ ID NO: 196699 - DNA, 145 bp, Homo sapiens
  chr22:50511771-50511916
  hypo
ggtgctgagaacctcgtggggtctgcgtccggaggcaggtgggtggtggctctgggtgggctacaggctgtgaggggatctggggtgtggaggggttgctctagactcactgttctgagggaacacacctgtaatcccagcactt

SEQ ID NO: 196700 - DNA, 30 bp, Homo sapiens
  chr22:50512604-50512634
  hypo
ggcccagagcggcggcgggcgggccagagg

SEQ ID NO: 196701 - DNA, 65 bp, Homo sapiens
  chr22:50515961-50516026
  hypo
ggcccgcctttctcacgccaccgcgcttcagcgtccaccggaccacctcacgggcaggctgcgca

SEQ ID NO: 196702 - DNA, 19 bp, Homo sapiens
  chr22:50516704-50516723
  hypo
ccaccgcgcccggcctgac

SEQ ID NO: 196703 - DNA, 30 bp, Homo sapiens
  chr22:50520100-50520130
  hypo
cagaagaagccccgtcggggcctgagcgag

SEQ ID NO: 196704 - DNA, 396 bp, Homo sapiens
  chr22:50520367-50520763
  hypo
ggcagcagagtgggacgggtcacctgccccaaagggctttgttctaagggagcagagacccaggacagcacggggcggggcatccactttgtttttaagacatttcgggggcgctgctggggacagtcaccaacagtgtccctagagaaagggcaggggccagagacccagcaggcatgtggaagcgagaggaggggagagctcgggaccagctgaagcaggaggggcgtggggtccgcggcttgcgggccagaggggcatggggtccgcggcttgcgggccagaggggcatggggtgcgcggcttgcgggccagaggggcatggggtccatggcttgcgggccagagcccaggggtcagccagcatggtgctctagctgccgggacgctggggag

SEQ ID NO: 196705 - DNA, 198 bp, Homo sapiens
  chr22:50521453-50521651
  hypo
aaccagagcacgtgccggcgagcttgggcactggcagaggcgtggaggaagctgcttacagagcctgcagcacagcgcaagtaatccatctcagccgggaacacgttccccaggtacagcgaaaaccccgaggtcaccaggaggcagctctgcaagacagcgacagaatcccaggttacaacgcgccccgtccccagg

SEQ ID NO: 196706 - DNA, 67 bp, Homo sapiens; identical to SEQ ID NO: 101863
  chr22:50529038-50529105
  hypo

SEQ ID NO: 196707 - DNA, 402 bp, Homo sapiens
  chr22:50529595-50529997
  hypo
ctggagcacttgctccgtggatctcttcggtagaacacgcgctcagcggtagctggagctccagctcttggcagcgctcagatcctatgcctgtactgtaaccgtcgccccaggttcctcccgtggctgggaagctgcagtaaaggcacgttcaggactcaggaccgtggctgcagcagtggccagacggctgagggcgtgcgctgctcctgggccagacttgtctgcccagccccgaaccttttccagcaccgtgtttgttgagattctccagtcttccgaggctgctgctgatggtaataaaaagataatcgatagtactaataaaaccgtgcatgctaatgactcccagatgctgatataagtggccatttacatagcacttaacgcgtgtcagccacg

SEQ ID NO: 196708 - DNA, 22 bp, Homo sapiens
  chr22:50553748-50553770
  hypo
ggtactcctttgtggcgggtgg

SEQ ID NO: 196709 - DNA, 18 bp, Homo sapiens
  chr22:50587384-50587402
  hypo
gcccgaccaaccccattt

SEQ ID NO: 196710 - DNA, 199 bp, Homo sapiens; identical to SEQ ID NO: 101865
  chr22:50601379-50601578
  hypo

SEQ ID NO: 196711 - DNA, 30 bp, Homo sapiens; identical to SEQ ID NO: 101866
  chr22:50610245-50610275
  hypo

SEQ ID NO: 196712 - DNA, 35 bp, Homo sapiens; identical to SEQ ID NO: 134376
  chr22:50623254-50623289
  hypo

SEQ ID NO: 196713 - DNA, 102 bp, Homo sapiens; identical to SEQ ID NO: 58199
  chr22:50623612-50623714
  hypo

SEQ ID NO: 196714 - DNA, 303 bp, Homo sapiens; identical to SEQ ID NO: 134378
  chr22:50623741-50624044
  hypo

SEQ ID NO: 196715 - DNA, 132 bp, Homo sapiens; identical to SEQ ID NO: 101869
  chr22:50626941-50627073
  hypo

SEQ ID NO: 196716 - DNA, 31 bp, Homo sapiens; identical to SEQ ID NO: 101870
  chr22:50628014-50628045
  hypo

SEQ ID NO: 196717 - DNA, 30 bp, Homo sapiens; identical to SEQ ID NO: 101871
  chr22:50632804-50632834
  hypo

SEQ ID NO: 196718 - DNA, 30 bp, Homo sapiens; identical to SEQ ID NO: 101872
  chr22:50647100-50647130
  hypo

SEQ ID NO: 196719 - DNA, 30 bp, Homo sapiens; identical to SEQ ID NO: 34613
  chr22:50654262-50654292
  hypo

SEQ ID NO: 196720 - DNA, 118 bp, Homo sapiens
  chr22:50656906-50657024
  hypo
ggggcctcacctgtgcgcttgaggtggaagcagacgtccttgagcgcccacatcatgagcttcagctgcagcaggaaggagaagacgccgctgtacttgctcacgcagccctcggtga

SEQ ID NO: 196721 - DNA, 30 bp, Homo sapiens; identical to SEQ ID NO: 34615
  chr22:50657583-50657613
  hypo

SEQ ID NO: 196722 - DNA, 249 bp, Homo sapiens; identical to SEQ ID NO: 101876
  chr22:50686571-50686820
  hypo

SEQ ID NO: 196723 - DNA, 30 bp, Homo sapiens; identical to SEQ ID NO: 101877
  chr22:50693839-50693869
  hypo

SEQ ID NO: 196724 - DNA, 31 bp, Homo sapiens
  chr22:50695380-50695411
  hypo
cagcgtggatatactgcggggggcagaggat

SEQ ID NO: 196725 - DNA, 40 bp, Homo sapiens; identical to SEQ ID NO: 101878
  chr22:50695753-50695793
  hypo

SEQ ID NO: 196726 - DNA, 30 bp, Homo sapiens
  chr22:50705392-50705422
  hypo
tgatctcaggtgcccggtaccagcgcgtgg

SEQ ID NO: 196727 - DNA, 35 bp, Homo sapiens; identical to SEQ ID NO: 34617
  chr22:50706160-50706195
  hypo

SEQ ID NO: 196728 - DNA, 197 bp, Homo sapiens; identical to SEQ ID NO: 101880
  chr22:50714228-50714425
  hypo

SEQ ID NO: 196729 - DNA, 30 bp, Homo sapiens; identical to SEQ ID NO: 101881
  chr22:50716388-50716418
  hypo

SEQ ID NO: 196730 - DNA, 30 bp, Homo sapiens
  chr22:50718337-50718367
  hypo
ccacctcaaggtgccgtacagataggggaa

SEQ ID NO: 196731 - DNA, 2094 bp, Homo sapiens
  chr22:50718697-50720791
  hypo
gacactgtgaccagctgaaaccgctggacaggaagggctagagtccggctttgagtttgtggccggggacaccacccctagaccgccccccaccaccagcgctggctggcacctgccggctcctgggggcccaacaggccgctgtgccacccgccaccagccccagagcccctgcggccgccccgcccgtggccccgctcgtggccccgcccatgtgcacctgcgcagcatcagcttggggttcttggccaccacgtactgctccaggagctccaggaagagcgtgtgcatgatgtccgtgtagtactccagtttcccgtgcagcgccaccgtcagcagggacgcgaagtagaccttggcgcgggccgagaactcccgctggttctccagggtgtggatgaactgtaggggccggcggtcaaagcctgcccggcgccacctgtgtgccctcccgcccgcccgacgcctggctcacattgatgaggaaagacttgctgttcagcaggttggagaactggtagagggcctgctccaccaccggccgccgcggctcagggatgtccagcttgccggtgatcatcacgtccttgtcgccgtccttggagggcaggaagaagacgcggtcggtgtaggtcttgtagtccagcacggggatgccggcctcgtgcacgtcgttggtctggtcctccatctcgatcatcaggtctggggggaggctggcgtgagacgtccctggccacgtggggccctgacccccacgctacacacagcatccccgccccaggaggcgccccagcaccagcccccaagcggtccctacctgtgaattccttcttgcagcggtcccgcacgctctcctccaggccctccagctgggacttgatcttctcatactctcgttcggcctgctggctcttcctcctgcaaggcacagcgggcctcctaggttctgccggggctggccgctcagctgcccggatgaggaggtggatctacacgcctgcctgtgcagggcggcggatgaggccagaggggccgaggcgggagggccgagggctcagggtgttggcacagccggggggcgggctcaccagtagcagtagacagacaccgcgatgacgaccaccatgggcacgatgaccagcggcaagatgaggctgagcggcacgtcgctcacccgtgtgtcgtactccacgcggcccagcacccactcgcgagagccgaacttcacctgtgtggggggccgggttcagcgcggtcccgtgggggcaccccccgccagtccccgctcacgcacaatgaactcgggcaggttgtgtgtggtgtctcgtttctgccgccgcttgggcgggggctgcacctccgggggctcacagtacaggtcggtctccgtcagcgtcttcatggtgcagcgctcggcacccacgaaggcctcggcctcctgcagcgtcatcgccttgttcagattggtgccctggggaggcggcagtggtcggggtgaggaggagggaaccagggacaggtggaccagctctcagcccagacccgagcaggacccagacacccggggctgcaccgtcctcacccgggcgtggatgagcttgttgacctgcttcttgacgccacctgtgaagttctcaaaggtggggtcaggcacgtactcgaaggccccggcctctgttctgagcagggcacggtgcccgtccatctcgatcagcaccgtgaggttgtaggcctctggctcctcaggcacagccggggacaggaagacgaccttggtgtcattgtggaacacgtagtctgtacccaccacctgcaggcaagtcccagctgtcagcccccgggcgcagaccccgcccttcctgggcacgatcccatgggccggtgccagagctgagcccacgccaggactgaccgtcatgggctgcagggattcagcctcccgcggcggctgccaggactgcaggggctccgcgatgaccaccatggcaaacctctggatcaggctgaagccctgacccgtgacgttgatgctgcggccaccactgcggagggcagtgccttcgtgggctcggctggcaggggtggtccctg

SEQ ID NO: 196732 - DNA, 1273 bp, Homo sapiens
  chr22:50721215-50722488
  hypo
gcacgggggaccccccgtaggagacctccagaagcatctggccccgtgtcgcctgggggccagtgacacactggagctgcgccccaaacttcgtcctgggggagggagggtgctggtctgcatcaacccctcccccgggaccagccccagcccgaccaggctggccccgccatcccctcagggccactcaggtctcagtaagtgcccccctccatacccagggccagggccaaccagactcagcagctggcggtgacacccacactttacacgggacgccgttgagggtcacccgcacgtcctcctgggagcccgtgtccaggtgggtgccgtggatggtcagtgtggtgccgcccgcctgcggtccctgctgcggctccacactgagaggcttgggctgctgaaagagccgcaggggcactcgggtgaggacggggcacaggacgccctcggtcctgggctggatggtaactgtcgtggggaggcggcgggcagagcccctcctcccggtcctcccgggttcggcaggtccccgaggccgggtgcttacttggaaggtgaactggacattgggaggcgaacggcccagtttcccgaagacgtccacctcgacaccccccgtgaaaggcgtctccgcagcctcgatcacacacacgatcctggcgggcgacaggcagtgtggcccaggcactccccgacccaccccacaccctgacaccctcaccccctcagcctccccacccacccagtcacccggaaccccagcgtgggtactgacccagctgacagggcccagaccagggccgtccactcaccgggtggacacggagtaacgttccggctgaaaggagcagttccggccggccacagagatcctctggatgtcccctgcttggacgcccaaattggaccccaggatggtgatgcggatgcccccacccagggggcccgtctcaggctggatctgaaaccacagagccgggtgagcagggaggggctcatgccagggacgagggaaggtgtaggccaggcttcgaggggctcaccctggtgatgacgggcggcgggcactcggaggtggtgttgcacagggcctcatacacgcacctgctctggcccccgcaccacgcacacctgtagtcggggttagcggcccggcacaggctgcagtcgctgcggccaaaggagcagttgtagagggtcactgcggggagagctgccgtcagtggtcaccccgtgcctgcccgcccccgacctgctccccactgcgccc

SEQ ID NO: 196733 - DNA, 30 bp, Homo sapiens
  chr22:50723659-50723689
  hypo
ctgcctgtcaccggccggcacccctccctc

SEQ ID NO: 196734 - DNA, 622 bp, Homo sapiens; identical to SEQ ID NO: 101885
  chr22:50724161-50724783
  hypo

SEQ ID NO: 196735 - DNA, 30 bp, Homo sapiens; identical to SEQ ID NO: 101886
  chr22:50725802-50725832
  hypo

SEQ ID NO: 196736 - DNA, 30 bp, Homo sapiens; identical to SEQ ID NO: 101887
  chr22:50728155-50728185
  hypo

SEQ ID NO: 196737 - DNA, 30 bp, Homo sapiens; identical to SEQ ID NO: 101888
  chr22:50728519-50728549
  hypo

SEQ ID NO: 196738 - DNA, 85 bp, Homo sapiens; identical to SEQ ID NO: 13527
  chr22:50745644-50745729
  hypo

SEQ ID NO: 196739 - DNA, 24 bp, Homo sapiens
  chr22:50749077-50749101
  hypo
aaaagaaaagtcccggccgggcgc

SEQ ID NO: 196740 - DNA, 30 bp, Homo sapiens
  chr22:50764864-50764894
  hypo
cccagagatgggatgcggagcggagggtaa

SEQ ID NO: 196741 - DNA, 184 bp, Homo sapiens; identical to SEQ ID NO: 134389
  chr22:50765109-50765293
  hypo

SEQ ID NO: 196742 - DNA, 45 bp, Homo sapiens; identical to SEQ ID NO: 134390
  chr22:50766077-50766122
  hypo

SEQ ID NO: 196743 - DNA, 30 bp, Homo sapiens; identical to SEQ ID NO: 101893
  chr22:50845144-50845174
  hypo

SEQ ID NO: 196744 - DNA, 77 bp, Homo sapiens; identical to SEQ ID NO: 34623
  chr22:50853284-50853361
  hypo

SEQ ID NO: 196745 - DNA, 222 bp, Homo sapiens
  chr22:50858127-50858349
  hypo
tggcgatgcatttgtcgatgtgcgtggaacaggtgtggttggcaggttttccccaaggactgttccgacaagtccccacagctcccgtgtgtgtttgtgtgtgtgtcgcagggtttccactctgatgcatggttacatatacatgtgtttatctcccatgcagactggccctcacagggcaggggtgtgacactcaccgctgtctcccgtgccctgtgcacc

SEQ ID NO: 196746 - DNA, 31 bp, Homo sapiens; identical to SEQ ID NO: 34624
  chr22:50861881-50861912
  hypo

SEQ ID NO: 196747 - DNA, 30 bp, Homo sapiens; identical to SEQ ID NO: 101896
  chr22:50862941-50862971
  hypo

SEQ ID NO: 196748 - DNA, 126 bp, Homo sapiens
  chr22:50864102-50864228
  hypo
ccttcttctgatgctcgtcatctgatgtgcgtgtggaacggtgtctccgtgtggctgatgctcgtcatctgatgtgcgtgtggaacagtgtctccgtgtgacaagtgatgtcgagcatcttctcgt

SEQ ID NO: 196749 - DNA, 150 bp, Homo sapiens; identical to SEQ ID NO: 101898
  chr22:50873265-50873415
  hypo

SEQ ID NO: 196750 - DNA, 635 bp, Homo sapiens; identical to SEQ ID NO: 134393
  chr22:50873754-50874389
  hypo

SEQ ID NO: 196751 - DNA, 73 bp, Homo sapiens; identical to SEQ ID NO: 34628
  chr22:50874674-50874747
  hypo

SEQ ID NO: 196752 - DNA, 30 bp, Homo sapiens
  chr22:50875737-50875767
  hypo
agatgtgaccgcagcgagcgcgcagcctga

SEQ ID NO: 196753 - DNA, 466 bp, Homo sapiens; identical to SEQ ID NO: 101901
  chr22:50877968-50878434
  hypo

SEQ ID NO: 196754 - DNA, 116 bp, Homo sapiens
  chr22:50882625-50882741
  hypo
aggaagacagatgccccgccagaaggagctgccttaaatggcccagtgtgatgctgctgccgcccggccacggcccaccctggtcaggctgcctccttaatcgagaaaactacctg

SEQ ID NO: 196755 - DNA, 198 bp, Homo sapiens; identical to SEQ ID NO: 101903
  chr22:50884058-50884256
  hypo

SEQ ID NO: 196756 - DNA, 551 bp, Homo sapiens; identical to SEQ ID NO: 101904
  chr22:50885390-50885941
  hypo

SEQ ID NO: 196757 - DNA, 30 bp, Homo sapiens
  chr22:50892822-50892852
  hypo
cccccaggggtaaccggacttacgtgcatg

SEQ ID NO: 196758 - DNA, 809 bp, Homo sapiens
  chr22:50894557-50895366
  hypo
caagcaaacctagacccgtccacttggctctacccaaggggagggcccagcaccaaggcgggcagagggacggggcagtgcagagacctggatcagccactctgagtcctccagtgagcgcaggaaggaggctgggctgggctcagcagcggggcagcctgggacacatgctttcagcagcttcttgaagctagccttcacctgccgtgcctcgaatacctcaatgggcaccagctcccactgctgcagggggtctgaccgcacaccctgaaaagaatccggacaagtcccgtgagacacatgaggccccaagccccctgccgagcccccaccctcaccccccaccccccgcaccccagtcaccttgagctgggctttgtccccaaggatatagagggctgctcgctgcggacgcaggaagcccgggtcgggagggcccccgttggcctggggtggggccagcgcgtctctgccagctagccgggagcccacatcggtgccaaggccactgctgcgtccactggtccggacactgccccacttacctgtgaaggagatgccaggtaagcacccaaagggggccagggcaccacttacctggggctggctgggcccggcctccagggagggggctgagctcccagggcaggggtggttggcaggaccccagcagggccgtgcgagaggagggctggaacacacagattctgagacgtggggtggcagccagtgttagtttctagggcaggactcacgggtcagggaggtaaggactggggctcgggagacgggtcgttagtgtcaggtgt

SEQ ID NO: 196759 - DNA, 30 bp, Homo sapiens
  chr22:50895723-50895753
  hypo
agggcagggcaggccgcagagcactccgtg

SEQ ID NO: 196760 - DNA, 159 bp, Homo sapiens
  chr22:50897896-50898055
  hypo
acctggagaaggtgcgttctgggccttgaagaggccgacgacacctttgccatgcaggcctccagagcgcagcagcaccgccttggaccgcccgctgcgccagcagaccacggggaagcggttctggcggtagcagcgggacacgcgctgcagggcgtt

SEQ ID NO: 196761 - DNA, 30 bp, Homo sapiens
  chr22:50898516-50898546
  hypo
tcatggtcatgcggtcggagggcttcaggg

SEQ ID NO: 196762 - DNA, 1250 bp, Homo sapiens
  chr22:50899049-50900299
  hypo
atgtccggcgggtaccgcagcttatgcagctgcttacggaagagctcggcgctgtcagaccccacctcctcgtcaaaggccattttcagcagctgtgtcagtaaaagcagcccttaggggtgtgggtggccccccagcccctcccccaactctgacactgccaggctccccttcccctcgcagccatgacagagagagaagcaggccccaggcaaaggcctgtatctgtgtcacacgaaggcaagcgcttgtgtaaactcgaaatctcagtggctgtgagctgaggcctgggtttgcaaggcacacccaagacacggacttgagggccggcgccccaaggaaaggacaaggacccaaagaccgcacatcaaacagtggacatcaactcaagagccacagtgagggccccagacatgcaagcgtaacaacagggccactgctggagactggcctaaaaatggttcatacaagaaagaccggtttgcaggagaaagaccagggcgggggatgagagccccacccgcgcaccgcgccccacctggaatgtgcaggagcgcagctggagcccgtcctgcaggagctggtccacaggggtctggacgctgatgcgcttctccttggtcagcgcagccaccgggaaggagcggaccaccacctgctccccaacttaggacaggccaggcagagtcagaagcaaggaaggtaagggggggggggtcccagaatctcagggtaccacagttatggggaatcccaagtgggtggggaaggagcagacaaaggcccgtttcccacgggcacccagaacccccgagaaaagggagagggaggcagggaaagcccatccatcccaaagacctgggggagagggggcgacagggccagagagtctgcaggctcacccagggggtccgtgggcatccccgtgaagatgacccggtacgtggtgaggaagacggcgccctcagctgggagcaatgctggtcccccagcactgccccccgcgccctcctcacgcccatccggcagcaggtagacgcgcaggccgtccagcacacactcctcacccggcagcaggcgcggccgcagcagcttgggctgctcgaaaacaagagcaggagctcaggatgcagcccgggccttgggcccccgcagccccaacggcccccgcaaaccttctggatgggcggcagcctccggctctcccgctgcacggcctccagggtctcgatgtgcatctggacaatgtc

SEQ ID NO: 196763 - DNA, 138 bp, Homo sapiens; identical to SEQ ID NO: 101910
  chr22:50918771-50918909
  hypo

SEQ ID NO: 196764 - DNA, 81 bp, Homo sapiens; identical to SEQ ID NO: 58211
  chr22:50920027-50920108
  hypo

SEQ ID NO: 196765 - DNA, 495 bp, Homo sapiens
  chr22:50921116-50921611
  hypo
atgggtcagcctctccgggatggtggccgccaacactcgggcccccgaagacactcgggcccccgcaggacccaagcccagctcctgcgagtgggctgtgtgctgggcacctgccaggtgcagaatctcagccaccgcctgtggcaactcatgggaccggccggccggcaggactcagctcctgtggaccccagcagcccccacagctatggctgaggtggggccgggccacacccctgcccatcccagccagggtgctgtgcccccgtccagagctgcagctgagccccatctgaagcccagtccctcggagctgcagacagcaggtcctgcagcaacaatacctgcacggctttgcacacgtaaacctaggctggtctacacgcagtgctggtacgtcaaggagcctaaacaccctgaaattgtgaccccctgggggacagctgccagacacagctggcggcagcaccagatgctaagcgcttcagagaggag

SEQ ID NO: 196766 - DNA, 477 bp, Homo sapiens
  chr22:50922302-50922779
  hypo
ccttccctggggggacgggggactcacatgtgcctgccactggagcctctcaaccgtccagcagaacacggggttcagaaagggctccttctgctatttagcgaacactgagcatttaatttacaaatgtttgctagggtcaccctctcggccatcccacgagggtcgccatgatcaccccaactctagaggccgcagcagagctcaggacattcccccacagagcttgcccctcagttcctacctccaagggggagggtcctggaagcgcccacccaggcgccgcccctgtgcttgctccccgagctcagggattgccgagtccacgtaactgacctgtactccacgaggccctgtgggaacggtccaggctggtcctgccctgtggaggcctccgtgcactgagagatgtactaggattgcagcaaaggtggtcagggtgatgggccgcacagcgaggcagtcaaggccagctcc

SEQ ID NO: 196767 - DNA, 30 bp, Homo sapiens
  chr22:50923026-50923056
  hypo
caggagctcagcgtccgctactcagcccag

SEQ ID NO: 196768 - DNA, 30 bp, Homo sapiens
  chr22:50923296-50923326
  hypo
tctggccaaaatctccgctcggccaggccc

SEQ ID NO: 196769 - DNA, 96 bp, Homo sapiens; identical to SEQ ID NO: 101913
  chr22:50925262-50925358
  hypo

SEQ ID NO: 196770 - DNA, 31 bp, Homo sapiens; identical to SEQ ID NO: 101914
  chr22:50926292-50926323
  hypo

SEQ ID NO: 196771 - DNA, 112 bp, Homo sapiens; identical to SEQ ID NO: 101915
  chr22:50927879-50927991
  hypo

SEQ ID NO: 196772 - DNA, 211 bp, Homo sapiens; identical to SEQ ID NO: 101916
  chr22:50938933-50939144
  hypo

SEQ ID NO: 196773 - DNA, 30 bp, Homo sapiens; identical to SEQ ID NO: 34636
  chr22:50941784-50941814
  hypo

SEQ ID NO: 196774 - DNA, 1017 bp, Homo sapiens; identical to SEQ ID NO: 101918
  chr22:50942718-50943735
  hypo

SEQ ID NO: 196775 - DNA, 699 bp, Homo sapiens; identical to SEQ ID NO: 101919
  chr22:50944141-50944840
  hypo

SEQ ID NO: 196776 - DNA, 30 bp, Homo sapiens; identical to SEQ ID NO: 101920
  chr22:50954367-50954397
  hypo

SEQ ID NO: 196777 - DNA, 238 bp, Homo sapiens
  chr22:50954808-50955046
  hypo
ctgccctggaagaagcgagtgcagactgggccttggattccccctgtctttgtgttgtttcttgcagctggatcagatctgcatttcttttgacgaaggcaagaccacaatgaacttcattgaggcagcgttgttgatccagggctctgcctgcgtctacagtaagaaggtgggccctgcttgacgctggtcttggcattttggtggccagtgggaccacagtcggctctccttctgg

SEQ ID NO: 196778 - DNA, 30 bp, Homo sapiens
  chr22:50955386-50955416
  hypo
ctgtcctgcaggccccgtggcggcaggagc

SEQ ID NO: 196779 - DNA, 31 bp, Homo sapiens; identical to SEQ ID NO: 34639
  chr22:50958186-50958217
  hypo

SEQ ID NO: 196780 - DNA, 252 bp, Homo sapiens; identical to SEQ ID NO: 101923
  chr22:50961987-50962239
  hypo

SEQ ID NO: 196781 - DNA, 640 bp, Homo sapiens; identical to SEQ ID NO: 13532
  chr22:50970391-50971031
  hypo

SEQ ID NO: 196782 - DNA, 30 bp, Homo sapiens; identical to SEQ ID NO: 101925
  chr22:50989617-50989647
  hypo

SEQ ID NO: 196783 - DNA, 96 bp, Homo sapiens; identical to SEQ ID NO: 101926
  chr22:51010438-51010534
  hypo

SEQ ID NO: 196784 - DNA, 79 bp, Homo sapiens; identical to SEQ ID NO: 34641
  chr22:51023315-51023394
  hypo

SEQ ID NO: 196785 - DNA, 30 bp, Homo sapiens; identical to SEQ ID NO: 34642
  chr22:51023881-51023911
  hypo

SEQ ID NO: 196786 - DNA, 30 bp, Homo sapiens; identical to SEQ ID NO: 101929
  chr22:51063665-51063695
  hypo

SEQ ID NO: 196787 - DNA, 14 bp, Homo sapiens
  chr22:51111995-51112009
  hypo
catcaccccctccc

SEQ ID NO: 196788 - DNA, 525 bp, Homo sapiens; identical to SEQ ID NO: 134416
  chr22:51112026-51112551
  hypo

SEQ ID NO: 196789 - DNA, 31 bp, Homo sapiens; identical to SEQ ID NO: 101932
  chr22:51117959-51117990
  hypo

SEQ ID NO: 196790 - DNA, 391 bp, Homo sapiens
  chr22:51144193-51144584
  hypo
agagccagccggcaccgtgacccccgccagcacccttgatcgtctcctgaggccctgattctgggggttcccagggcccctgaggccctgaccgcccgcccccccccccccgcactccctgagctccttgagccatgaagaagtttgcgtccagccgtaacctgaacaagatcctggcacagtgcgactcatcctcgcgggagtacgaggagatccaggcggtggagcgcaagtggcacctgcacctggccacgccgcgccgcctgctgctggacaggaggtccaaggcctccctcttctttgcagccccaccgccccccaagagggcccccagcaccacactgaccctgcgctccaagtccatgacagctgagctcgaggaacttggtga

SEQ ID NO: 196791 - DNA, 270 bp, Homo sapiens; identical to SEQ ID NO: 101933
  chr22:51149170-51149440
  hypo

SEQ ID NO: 196792 - DNA, 257 bp, Homo sapiens; identical to SEQ ID NO: 101934
  chr22:51160331-51160588
  hypo

SEQ ID NO: 196793 - DNA, 199 bp, Homo sapiens; identical to SEQ ID NO: 101935
  chr22:51171375-51171574
  hypo

SEQ ID NO: 196794 - DNA, 30 bp, Homo sapiens; identical to SEQ ID NO: 13536
  chrX:2647654-2647684
  hypo

SEQ ID NO: 196795 - DNA, 30 bp, Homo sapiens
  chrX:2730245-2730275
  hypo
gcctctctgaaattccgaaggtgcgctcag

SEQ ID NO: 196796 - DNA, 30 bp, Homo sapiens
  chrX:2730668-2730698
  hypo
tagctaatgaacctccgtttggggtgagcc

SEQ ID NO: 196797 - DNA, 30 bp, Homo sapiens; identical to SEQ ID NO: 101937
  chrX:2836220-2836250
  hypo

SEQ ID NO: 196798 - DNA, 30 bp, Homo sapiens; identical to SEQ ID NO: 134422
  chrX:2846408-2846438
  hypo

SEQ ID NO: 196799 - DNA, 848 bp, Homo sapiens; identical to SEQ ID NO: 134423
  chrX:2846677-2847525
  hypo

SEQ ID NO: 196800 - DNA, 247 bp, Homo sapiens; identical to SEQ ID NO: 101939
  chrX:2931092-2931339
  hypo

SEQ ID NO: 196801 - DNA, 30 bp, Homo sapiens
  chrX:2963310-2963340
  hypo
cacagaaatcgaggacgtggacacacagaa

SEQ ID NO: 196802 - DNA, 30 bp, Homo sapiens
  chrX:2992093-2992123
  hypo
agtcatcacagttttcgacaacggagctag

SEQ ID NO: 196803 - DNA, 239 bp, Homo sapiens
  chrX:3609053-3609292
  hypo
agagacggtagagaccgagcacagttaggagatgaccattataattataattattaaggtgatcaccagctcagtcggactagggtctagaaagtctgagccccgtacagagggatcaatcaccttttaagcagtttgtggcgggagttacgtgctgcagaaagcgtacttgcagaagcgagaacaaaggcagttaattactcttttgcatttgttacaccgtacgtcttacattcttg

SEQ ID NO: 196804 - DNA, 30 bp, Homo sapiens
  chrX:3640807-3640837
  hypo
cagcaccttaaaatacgagaaggcgtgcat

SEQ ID NO: 196805 - DNA, 29 bp, Homo sapiens
  chrX:3675259-3675288
  hypo
caggaaaatgggggtaatggccgggcgcg

SEQ ID NO: 196806 - DNA, 21 bp, Homo sapiens
  chrX:3694907-3694928
  hypo
gatgggggaagctgggattgt

SEQ ID NO: 196807 - DNA, 72 bp, Homo sapiens
  chrX:3746544-3746616
  hypo
acctgcaggccaccgcgtgctgactctctcaccaagcaggagcgggcccctccctcacgcggagccgctggc

SEQ ID NO: 196808 - DNA, 26 bp, Homo sapiens
  chrX:3899985-3900011
  hypo
gcctgaggaaccggggtccagatact

SEQ ID NO: 196809 - DNA, 39 bp, Homo sapiens; identical to SEQ ID NO: 101941
  chrX:4606592-4606631
  hypo

SEQ ID NO: 196810 - DNA, 38 bp, Homo sapiens; identical to SEQ ID NO: 101942
  chrX:4606870-4606908
  hypo

SEQ ID NO: 196811 - DNA, 43 bp, Homo sapiens; identical to SEQ ID NO: 101943
  chrX:4637571-4637614
  hypo

SEQ ID NO: 196812 - DNA, 28 bp, Homo sapiens
  chrX:4643044-4643072
  hypo
tggtcacaagtcttttttagccgattat

SEQ ID NO: 196813 - DNA, 121 bp, Homo sapiens; identical to SEQ ID NO: 101945
  chrX:4643431-4643552
  hypo

SEQ ID NO: 196814 - DNA, 140 bp, Homo sapiens; identical to SEQ ID NO: 101946
  chrX:6105439-6105579
  hypo

SEQ ID NO: 196815 - DNA, 30 bp, Homo sapiens
  chrX:6378372-6378402
  hypo
cagagaccacgtggccggcaaagacggaag

SEQ ID NO: 196816 - DNA, 37 bp, Homo sapiens; identical to SEQ ID NO: 101947
  chrX:6617023-6617060
  hypo

SEQ ID NO: 196817 - DNA, 31 bp, Homo sapiens; identical to SEQ ID NO: 101948
  chrX:7112969-7113000
  hypo

SEQ ID NO: 196818 - DNA, 30 bp, Homo sapiens; identical to SEQ ID NO: 101949
  chrX:8663331-8663361
  hypo

SEQ ID NO: 196819 - DNA, 36 bp, Homo sapiens; identical to SEQ ID NO: 134438
  chrX:8698480-8698516
  hypo

SEQ ID NO: 196820 - DNA, 221 bp, Homo sapiens; identical to SEQ ID NO: 58237
  chrX:8698836-8699057
  hypo

SEQ ID NO: 196821 - DNA, 651 bp, Homo sapiens; identical to SEQ ID NO: 13546
  chrX:8699110-8699761
  hypo

SEQ ID NO: 196822 - DNA, 30 bp, Homo sapiens
  chrX:8768099-8768129
  hypo
gaccatctccttgggcgtgcaccttctttc

SEQ ID NO: 196823 - DNA, 30 bp, Homo sapiens
  chrX:8768404-8768434
  hypo
ctatccttcgtggcccgtccagcccgtccc

SEQ ID NO: 196824 - DNA, 260 bp, Homo sapiens
  chrX:8769254-8769514
  hypo
ctgcctccctaccgcgagcgcttcacctgcgcttcacaccctggttgcgagagggccgcatgctcgacttcctgcctccccaccgcgagcgcttcacctgagggacccctgatgccgcttcctcacagaacctgcaggcactggcaccacgacgctctcttagaaaaatgggtcctcagttctcgcgagagcagctgccctggctatccacgctcctctctgattggtcagctaagtgcgcatgcgcatgcgggtgaagg

SEQ ID NO: 196825 - DNA, 31 bp, Homo sapiens; identical to SEQ ID NO: 34651
  chrX:9191714-9191745
  hypo

SEQ ID NO: 196826 - DNA, 157 bp, Homo sapiens
  chrX:9214924-9215081
  hypo
agagagtgcttagctcccctttgctcatggcattgttgaattatggtccctaattccagcgggacaaaccctaccgtactccaggctcaagtgattcgaatcaaagataaataaaaaggagtgtatagagagcagagcatgacggcagaggtgtcag

SEQ ID NO: 196827 - DNA, 31 bp, Homo sapiens; identical to SEQ ID NO: 13548
  chrX:9240652-9240683
  hypo

SEQ ID NO: 196828 - DNA, 30 bp, Homo sapiens
  chrX:9249886-9249916
  hypo
ctctgaagtcttgggcgtgctgaaaagaat

SEQ ID NO: 196829 - DNA, 30 bp, Homo sapiens
  chrX:9276455-9276485
  hypo
aggcaagtaagcactcgtgttaaaatagag

SEQ ID NO: 196830 - DNA, 34 bp, Homo sapiens; identical to SEQ ID NO: 101956
  chrX:9289522-9289556
  hypo

SEQ ID NO: 196831 - DNA, 1606 bp, Homo sapiens; identical to SEQ ID NO: 134444
  chrX:9432815-9434421
  hypo

SEQ ID NO: 196832 - DNA, 31 bp, Homo sapiens; identical to SEQ ID NO: 34654
  chrX:9571727-9571758
  hypo

SEQ ID NO: 196833 - DNA, 43 bp, Homo sapiens; identical to SEQ ID NO: 101961
  chrX:9656567-9656610
  hypo

SEQ ID NO: 196834 - DNA, 30 bp, Homo sapiens; identical to SEQ ID NO: 58245
  chrX:9751458-9751488
  hypo

SEQ ID NO: 196835 - DNA, 459 bp, Homo sapiens; identical to SEQ ID NO: 101963
  chrX:9863401-9863860
  hypo

SEQ ID NO: 196836 - DNA, 43 bp, Homo sapiens; identical to SEQ ID NO: 101964
  chrX:9874883-9874926
  hypo

SEQ ID NO: 196837 - DNA, 45 bp, Homo sapiens; identical to SEQ ID NO: 13550
  chrX:10023768-10023813
  hypo

SEQ ID NO: 196838 - DNA, 30 bp, Homo sapiens; identical to SEQ ID NO: 101966
  chrX:10079956-10079986
  hypo

SEQ ID NO: 196839 - DNA, 716 bp, Homo sapiens; identical to SEQ ID NO: 101967
  chrX:10085162-10085878
  hypo

SEQ ID NO: 196840 - DNA, 181 bp, Homo sapiens; identical to SEQ ID NO: 101968
  chrX:10092558-10092739
  hypo

SEQ ID NO: 196841 - DNA, 72 bp, Homo sapiens
  chrX:10102565-10102637
  hypo
ttgttcggagtggcacgattgtccgttcccagacattctcgcctggagcacgaagccagtatgtttgcagag

SEQ ID NO: 196842 - DNA, 162 bp, Homo sapiens; identical to SEQ ID NO: 134451
  chrX:11776189-11776351
  hypo

SEQ ID NO: 196843 - DNA, 116 bp, Homo sapiens; identical to SEQ ID NO: 34657
  chrX:11783709-11783825
  hypo

SEQ ID NO: 196844 - DNA, 30 bp, Homo sapiens; identical to SEQ ID NO: 13551
  chrX:11948897-11948927
  hypo

SEQ ID NO: 196845 - DNA, 30 bp, Homo sapiens
  chrX:12739885-12739915
  hypo
ctaatgttggactctcggcgcgacactcaa

SEQ ID NO: 196846 - DNA, 43 bp, Homo sapiens; identical to SEQ ID NO: 34659
  chrX:13062332-13062375
  hypo

SEQ ID NO: 196847 - DNA, 31 bp, Homo sapiens
  chrX:13740811-13740842
  hypo
tctatggaactttctgcgaggacagaaatgt

SEQ ID NO: 196848 - DNA, 44 bp, Homo sapiens
  chrX:14891333-14891377
  hypo
gctccgcgggggaagcgccggcgatctcgcggctggcgggggcg

SEQ ID NO: 196849 - DNA, 93 bp, Homo sapiens
  chrX:15766032-15766125
  hypo
cagctctttctcttgcgagaggagagcagctctctctcttgcaagagaggcgtccaaaaatgggacaagtggcggactgcagcagattttata

SEQ ID NO: 196850 - DNA, 33 bp, Homo sapiens
  chrX:15806007-15806040
  hypo
cggaggttgcagtgagccgagatttcttagaag

SEQ ID NO: 196851 - DNA, 135 bp, Homo sapiens; identical to SEQ ID NO: 134462
  chrX:15808572-15808707
  hypo

SEQ ID NO: 196852 - DNA, 100 bp, Homo sapiens; identical to SEQ ID NO: 13557
  chrX:15809045-15809145
  hypo

SEQ ID NO: 196853 - DNA, 83 bp, Homo sapiens; identical to SEQ ID NO: 13558
  chrX:15817993-15818076
  hypo

SEQ ID NO: 196854 - DNA, 123 bp, Homo sapiens; identical to SEQ ID NO: 13559
  chrX:15821796-15821919
  hypo

SEQ ID NO: 196855 - DNA, 88 bp, Homo sapiens; identical to SEQ ID NO: 13560
  chrX:15822232-15822320
  hypo

SEQ ID NO: 196856 - DNA, 40 bp, Homo sapiens; identical to SEQ ID NO: 13561
  chrX:15826354-15826394
  hypo

SEQ ID NO: 196857 - DNA, 123 bp, Homo sapiens; identical to SEQ ID NO: 13562
  chrX:15827321-15827444
  hypo

SEQ ID NO: 196858 - DNA, 215 bp, Homo sapiens; identical to SEQ ID NO: 13563
  chrX:15833798-15834013
  hypo

SEQ ID NO: 196859 - DNA, 57 bp, Homo sapiens; identical to SEQ ID NO: 13564
  chrX:15836708-15836765
  hypo

SEQ ID NO: 196860 - DNA, 111 bp, Homo sapiens; identical to SEQ ID NO: 13565
  chrX:15838328-15838439
  hypo

SEQ ID NO: 196861 - DNA, 536 bp, Homo sapiens; identical to SEQ ID NO: 13566
  chrX:15840847-15841383
  hypo

SEQ ID NO: 196862 - DNA, 30 bp, Homo sapiens
  chrX:16726889-16726919
  hypo
aaatggaaaaatgccgtagaggtatggtga

SEQ ID NO: 196863 - DNA, 183 bp, Homo sapiens; identical to SEQ ID NO: 58266
  chrX:16729956-16730139
  hypo

SEQ ID NO: 196864 - DNA, 806 bp, Homo sapiens; identical to SEQ ID NO: 58267
  chrX:16730152-16730958
  hypo

SEQ ID NO: 196865 - DNA, 30 bp, Homo sapiens; identical to SEQ ID NO: 101987
  chrX:16731852-16731882
  hypo

SEQ ID NO: 196866 - DNA, 37 bp, Homo sapiens; identical to SEQ ID NO: 34672
  chrX:16736863-16736900
  hypo

SEQ ID NO: 196867 - DNA, 19 bp, Homo sapiens
  chrX:17615241-17615260
  hypo
tttttttttttttttttga

SEQ ID NO: 196868 - DNA, 93 bp, Homo sapiens; identical to SEQ ID NO: 101990
  chrX:18239017-18239110
  hypo

SEQ ID NO: 196869 - DNA, 31 bp, Homo sapiens; identical to SEQ ID NO: 34674
  chrX:18247380-18247411
  hypo

SEQ ID NO: 196870 - DNA, 38 bp, Homo sapiens
  chrX:18516221-18516259
  hypo
cagccttccaaaatgccgggctgccatatgtcttttct

SEQ ID NO: 196871 - DNA, 31 bp, Homo sapiens; identical to SEQ ID NO: 34675
  chrX:18969304-18969335
  hypo

SEQ ID NO: 196872 - DNA, 30 bp, Homo sapiens; identical to SEQ ID NO: 101993
  chrX:19416315-19416345
  hypo

SEQ ID NO: 196873 - DNA, 30 bp, Homo sapiens
  chrX:19475110-19475140
  hypo
caccagcttcaccatcgcatcatagtcctg

SEQ ID NO: 196874 - DNA, 32 bp, Homo sapiens; identical to SEQ ID NO: 34676
  chrX:19530838-19530870
  hypo

SEQ ID NO: 196875 - DNA, 30 bp, Homo sapiens
  chrX:19908945-19908975
  hypo
acaggaatgcggtgtcgctcctccttgatc

SEQ ID NO: 196876 - DNA, 21 bp, Homo sapiens
  chrX:19909353-19909374
  hypo
agccatcgcaccgggacatgt

SEQ ID NO: 196877 - DNA, 222 bp, Homo sapiens
  chrX:20135283-20135505
  hypo
gcgtacgggcgtgcacgcgtccttacacgctgctgtacacagtgcacacacagaaggcgtgcgtacgcacacagttcttcatacgatgcttacatgcaacatgcacacacaacgtgcacacccagcgtaaatgcatcttctcacagtagcagatacacactcaaagcgtgtgtagatgtagggtgcagtttctcagacaccgtgcacacacatcctcactca

SEQ ID NO: 196878 - DNA, 95 bp, Homo sapiens; identical to SEQ ID NO: 34678
  chrX:20160883-20160978
  hypo

SEQ ID NO: 196879 - DNA, 31 bp, Homo sapiens; identical to SEQ ID NO: 34679
  chrX:21958399-21958430
  hypo

SEQ ID NO: 196880 - DNA, 30 bp, Homo sapiens
  chrX:22361431-22361461
  hypo
ttagcttaaagaagccgattgaaagtgcta

SEQ ID NO: 196881 - DNA, 30 bp, Homo sapiens
  chrX:23506457-23506487
  hypo
aactcataccgatttcggtgttagatggct

SEQ ID NO: 196882 - DNA, 202 bp, Homo sapiens; identical to SEQ ID NO: 134482
  chrX:23801080-23801282
  hypo

SEQ ID NO: 196883 - DNA, 31 bp, Homo sapiens
  chrX:23825265-23825296
  hypo
gacggcagagcaagaccgtctcctcccaaaa

SEQ ID NO: 196884 - DNA, 33 bp, Homo sapiens
  chrX:24062613-24062646
  hypo
aagtgctgcgattacaggcgtgagtcaccaagc

SEQ ID NO: 196885 - DNA, 34 bp, Homo sapiens; identical to SEQ ID NO: 101999
  chrX:24069673-24069707
  hypo

SEQ ID NO: 196886 - DNA, 19 bp, Homo sapiens
  chrX:24091505-24091524
  hypo
atgactttgaaaactatac

SEQ ID NO: 196887 - DNA, 34 bp, Homo sapiens; identical to SEQ ID NO: 102000
  chrX:24128930-24128964
  hypo

SEQ ID NO: 196888 - DNA, 30 bp, Homo sapiens
  chrX:27537451-27537481
  hypo
gagctgctgaagaggcgaagtctgccgtag

SEQ ID NO: 196889 - DNA, 71 bp, Homo sapiens; identical to SEQ ID NO: 13572
  chrX:27999797-27999868
  hypo

SEQ ID NO: 196890 - DNA, 30 bp, Homo sapiens; identical to SEQ ID NO: 102002
  chrX:31090089-31090119
  hypo

SEQ ID NO: 196891 - DNA, 30 bp, Homo sapiens
  chrX:31774221-31774251
  hypo
cctggggttcagatacgagactgcggtgag

SEQ ID NO: 196892 - DNA, 30 bp, Homo sapiens
  chrX:33017241-33017271
  hypo
aggaaacaaattgatcgcgatagcagtagg

SEQ ID NO: 196893 - DNA, 43 bp, Homo sapiens
  chrX:33133913-33133956
  hypo
ctgcgcccggccaaaagaaaacgtttctatgaacacagtatta

SEQ ID NO: 196894 - DNA, 299 bp, Homo sapiens
  chrX:34149207-34149506
  hypo
cacttcagtcttgggaggctccgggctgagatgggacactccagtcttggaaggctccgcgtggagactggacccccgacgagtcttgggaggcgctaggcggagacgggacactccagtctcggaaggctccgagcggagactggacccccgacgagtcttggaatgctctaggcggagatgggactctccagtctccggaggctccgggcggagactggacaccggagtcttgggaggctcctggcggagatgggacagtggagtctcgaaaggccgaggacagaatttcccacaag

SEQ ID NO: 196895 - DNA, 30 bp, Homo sapiens
  chrX:35644021-35644051
  hypo
ctgccggtgggacgcgggcttgaggactca

SEQ ID NO: 196896 - DNA, 30 bp, Homo sapiens; identical to SEQ ID NO: 13573
  chrX:36854169-36854199
  hypo

SEQ ID NO: 196897 - DNA, 219 bp, Homo sapiens
  chrX:39699843-39700062
  hypo
gggagcctctctgttcggccatccccagagccatcattgagccttcccctcgacagagatccctgccaaggaagtcggccagggaggtgccagcgctcagtccagacttcacatttccctcattctttctttaattggatttttggtcctgctgggcaaaataagctttccactggcaaaacactcttgcctcttcggaacgcgcggtggtgcccggcg

SEQ ID NO: 196898 - DNA, 30 bp, Homo sapiens; identical to SEQ ID NO: 13577
  chrX:39729507-39729537
  hypo

SEQ ID NO: 196899 - DNA, 1156 bp, Homo sapiens; identical to SEQ ID NO: 13578
  chrX:39910497-39911653
  hypo

SEQ ID NO: 196900 - DNA, 158 bp, Homo sapiens; identical to SEQ ID NO: 13579
  chrX:39913137-39913295
  hypo

SEQ ID NO: 196901 - DNA, 79 bp, Homo sapiens; identical to SEQ ID NO: 13580
  chrX:39913507-39913586
  hypo

SEQ ID NO: 196902 - DNA, 147 bp, Homo sapiens; identical to SEQ ID NO: 13581
  chrX:39914619-39914766
  hypo

SEQ ID NO: 196903 - DNA, 168 bp, Homo sapiens; identical to SEQ ID NO: 13582
  chrX:39916406-39916574
  hypo

SEQ ID NO: 196904 - DNA, 274 bp, Homo sapiens; identical to SEQ ID NO: 13583
  chrX:39921381-39921655
  hypo

SEQ ID NO: 196905 - DNA, 327 bp, Homo sapiens; identical to SEQ ID NO: 13584
  chrX:39921997-39922324
  hypo

SEQ ID NO: 196906 - DNA, 346 bp, Homo sapiens; identical to SEQ ID NO: 13585
  chrX:39922859-39923205
  hypo

SEQ ID NO: 196907 - DNA, 265 bp, Homo sapiens; identical to SEQ ID NO: 13586
  chrX:39923587-39923852
  hypo

SEQ ID NO: 196908 - DNA, 188 bp, Homo sapiens; identical to SEQ ID NO: 13587
  chrX:39930224-39930412
  hypo

SEQ ID NO: 196909 - DNA, 55 bp, Homo sapiens; identical to SEQ ID NO: 13588
  chrX:39930888-39930943
  hypo

SEQ ID NO: 196910 - DNA, 2833 bp, Homo sapiens; identical to SEQ ID NO: 13589
  chrX:39931600-39934433
  hypo

SEQ ID NO: 196911 - DNA, 80 bp, Homo sapiens; identical to SEQ ID NO: 13590
  chrX:39935705-39935785
  hypo

SEQ ID NO: 196912 - DNA, 127 bp, Homo sapiens; identical to SEQ ID NO: 13591
  chrX:39937095-39937222
  hypo

SEQ ID NO: 196913 - DNA, 1950 bp, Homo sapiens; identical to SEQ ID NO: 58296
  chrX:39954905-39956855
  hypo

SEQ ID NO: 196914 - DNA, 3153 bp, Homo sapiens; identical to SEQ ID NO: 134522
  chrX:40012142-40015295
  hypo

SEQ ID NO: 196915 - DNA, 1520 bp, Homo sapiens; identical to SEQ ID NO: 134527
  chrX:40034218-40035738
  hypo

SEQ ID NO: 196916 - DNA, 730 bp, Homo sapiens; identical to SEQ ID NO: 134528
  chrX:40035852-40036582
  hypo

SEQ ID NO: 196917 - DNA, 185 bp, Homo sapiens
  chrX:40247664-40247849
  hypo
ggtggtcatgagacagtagatcgccgcacccaccctccggaaaatatcctgtatttagcaagcttttatggcaaaatgtgtagctggtcacacctcagactttcttgtgagacttgtgactactgggttatatacgcatctttatgggatgttatctatgctacggaaacaccttggtatgcagg

SEQ ID NO: 196918 - DNA, 30 bp, Homo sapiens
  chrX:40308760-40308790
  hypo
tggcaagttctttagcgaggctgcagatga

SEQ ID NO: 196919 - DNA, 45 bp, Homo sapiens; identical to SEQ ID NO: 102024
  chrX:40631232-40631277
  hypo

SEQ ID NO: 196920 - DNA, 44 bp, Homo sapiens; identical to SEQ ID NO: 34700
  chrX:40631516-40631560
  hypo

SEQ ID NO: 196921 - DNA, 25 bp, Homo sapiens
  chrX:41097273-41097298
  hypo
ttggaaaggccgaagcgggtggatc

SEQ ID NO: 196922 - DNA, 292 bp, Homo sapiens; identical to SEQ ID NO: 134535
  chrX:41112859-41113151
  hypo

SEQ ID NO: 196923 - DNA, 30 bp, Homo sapiens; identical to SEQ ID NO: 102026
  chrX:41137558-41137588
  hypo

SEQ ID NO: 196924 - DNA, 462 bp, Homo sapiens
  chrX:41331599-41332061
  hypo
agaagttggccacatccatgtcggtggctccaaagtgggtggccacacgcacaccctcgtgcaatgtgaagctcacctgatgactcaccatggccagcaggccgcggaggtaacgatcccgaagggcggctcgggcccgctgcttctgggattccaaggattcttgagctatggaacactcctggatttcaagaacctctgactacaggggggctctgcgtccatcaggggcaaagccacggctgagaccatcagggcctcggggcagccggagcacaggcacaggaaaggtcactggagcctgcattgtcttggcgaggtccgtggctactgtgcgcgcccccacttccgccggcaccccgcagtagaggccagggcaggccccgagccgcggagcctgggttccgcctgcgccaccgccaccaacccacgtgtcacgggcaaatttatttatttatttat

SEQ ID NO: 196925 - DNA, 30 bp, Homo sapiens; identical to SEQ ID NO: 34702
  chrX:41332942-41332972
  hypo

SEQ ID NO: 196926 - DNA, 30 bp, Homo sapiens; identical to SEQ ID NO: 102029
  chrX:41333420-41333450
  hypo

SEQ ID NO: 196927 - DNA, 30 bp, Homo sapiens; identical to SEQ ID NO: 13608
  chrX:43379710-43379740
  hypo

SEQ ID NO: 196928 - DNA, 31 bp, Homo sapiens; identical to SEQ ID NO: 34704
  chrX:43773722-43773753
  hypo

SEQ ID NO: 196929 - DNA, 105 bp, Homo sapiens; identical to SEQ ID NO: 102032
  chrX:44224967-44225072
  hypo

SEQ ID NO: 196930 - DNA, 28 bp, Homo sapiens
  chrX:44420398-44420426
  hypo
cttaaaagtctatgccaaaaccgggcac

SEQ ID NO: 196931 - DNA, 31 bp, Homo sapiens; identical to SEQ ID NO: 102034
  chrX:44596042-44596073
  hypo

SEQ ID NO: 196932 - DNA, 99 bp, Homo sapiens; identical to SEQ ID NO: 102035
  chrX:44729940-44730039
  hypo

SEQ ID NO: 196933 - DNA, 44 bp, Homo sapiens; identical to SEQ ID NO: 102036
  chrX:44751498-44751542
  hypo

SEQ ID NO: 196934 - DNA, 39 bp, Homo sapiens; identical to SEQ ID NO: 102037
  chrX:44754636-44754675
  hypo

SEQ ID NO: 196935 - DNA, 37 bp, Homo sapiens; identical to SEQ ID NO: 34707
  chrX:44760626-44760663
  hypo

SEQ ID NO: 196936 - DNA, 43 bp, Homo sapiens; identical to SEQ ID NO: 102039
  chrX:44799976-44800019
  hypo

SEQ ID NO: 196937 - DNA, 100 bp, Homo sapiens
  chrX:44865331-44865431
  hypo
ggtctgtgtacagtcatcagtgtggtatgtgagaatcctttaagctaggttactggccagtcccccccagccctgcgcccccccccgccgccatgttgcc

SEQ ID NO: 196938 - DNA, 37 bp, Homo sapiens
  chrX:44909557-44909594
  hypo
ctgggcaacaagggcgacactccgtctcaaaaaaaca

SEQ ID NO: 196939 - DNA, 172 bp, Homo sapiens; identical to SEQ ID NO: 102040
  chrX:44922873-44923045
  hypo

SEQ ID NO: 196940 - DNA, 68 bp, Homo sapiens
  chrX:47181589-47181657
  hypo
ggcttcctctgtcctcgcgtagtgagccgcgagcagtggtcggcttctgcagtcggcttgggcggatc

SEQ ID NO: 196941 - DNA, 19 bp, Homo sapiens
  chrX:47317224-47317243
  hypo
gactccatctcaaaaacaa

SEQ ID NO: 196942 - DNA, 30 bp, Homo sapiens
  chrX:47438467-47438497
  hypo
ccagatccgctttgccgaggctggtagaca

SEQ ID NO: 196943 - DNA, 30 bp, Homo sapiens
  chrX:47439063-47439093
  hypo
gtttcaaagagttggcgtcagaaccagagt

SEQ ID NO: 196944 - DNA, 148 bp, Homo sapiens
  chrX:55115417-55115565
  hypo
ctgttgttgcgcaggcgccttgctgcccgtcttgtgtccgcacagaggtctgcaaggagagagagtgtcttcattctttccgccatcttgattctttctcactgaccaagactcagccggtaggtctgcagaacggtgttactgggaa

SEQ ID NO: 196945 - DNA, 30 bp, Homo sapiens
  chrX:56817316-56817346
  hypo
tgctggcagatcgtgcggatggggttgggg

SEQ ID NO: 196946 - DNA, 35 bp, Homo sapiens
  chrX:57609885-57609920
  hypo
ggattacaggcgcgagccaccgcgcccagccaaga

SEQ ID NO: 196947 - DNA, 83 bp, Homo sapiens; identical to SEQ ID NO: 102042
  chrX:57705239-57705322
  hypo

SEQ ID NO: 196948 - DNA, 22 bp, Homo sapiens
  chrX:57705441-57705463
  hypo
cgggtccttccccttctaacct

SEQ ID NO: 196949 - DNA, 31 bp, Homo sapiens; identical to SEQ ID NO: 34709
  chrX:58293596-58293627
  hypo

SEQ ID NO: 196950 - DNA, 699 bp, Homo sapiens
  chrX:64771577-64772276
  hypo
agtccagcttctccctcaggtcgcaggctgccggccagtcgggctggtaggtcacgagctgcacgcggcacaccagggcgcccagagcctcgcagtcctcaacgtcgcacaggtaccgtgcagccagcacgttgcccttggcctcctcatagagcagccgcaggacctcctcgtcggggatctggagctcccgcccctttgggaagaacacgttccttcggaactgcaggaaaggctcatccatggccacgtcgtcgtccggggcactggtgaagcgcagcagcagctccggccactggcgtcccagcttgtagggctggttcttgggtttcagctgcacctccagcagaggggagaccagccagagcgcgaagacatccagggcgatgtccggaagcttcaggacctcgcggacggcgcagtgcagctcatgggcacggagcgagggcaggttctccacagccaggggcaccaccgtgtcatctgccaggtataccagcacgtcagccgctcgggctcccacggaggacacgctgcttcggtgggaccgctcagtggggccgggctgcccgacactgccttccgtcccgtccatctcacagggtcgcagagcccgccacctgagaggcaaggctcctgcccggaatcctgcccctccaccaagcccacggaatcttgctctgtcacccaggctggagt

SEQ ID NO: 196951 - DNA, 198 bp, Homo sapiens
  chrX:65007841-65008039
  hypo
ggttctgccacaaaccgctgtcatttgcttcagcctgagtttctgctggggccctggtggggcccaggagctctcaggcctgtggagtctggagcagaggctggctccgggctctccccgccttggggtctgcccctcaaccccttctcagtcaccaagggtgaagttggcagttgtgagcaccgccgttccaattgc

SEQ ID NO: 196952 - DNA, 30 bp, Homo sapiens
  chrX:69502070-69502100
  hypo
tctgcctttggtcacgacgaggcctggatg

SEQ ID NO: 196953 - DNA, 34 bp, Homo sapiens
  chrX:70442912-70442946
  hypo
gtgcaggctgggtgtccggcgctgggacacaagt

SEQ ID NO: 196954 - DNA, 40 bp, Homo sapiens; identical to SEQ ID NO: 102045
  chrX:70532322-70532362
  hypo

SEQ ID NO: 196955 - DNA, 23 bp, Homo sapiens
  chrX:70773233-70773256
  hypo
gcgcccagcagatgaagtgttct

SEQ ID NO: 196956 - DNA, 30 bp, Homo sapiens; identical to SEQ ID NO: 102047
  chrX:70795382-70795412
  hypo

SEQ ID NO: 196957 - DNA, 318 bp, Homo sapiens; identical to SEQ ID NO: 102048
  chrX:70797824-70798142
  hypo

SEQ ID NO: 196958 - DNA, 77 bp, Homo sapiens; identical to SEQ ID NO: 34711
  chrX:71485134-71485211
  hypo

SEQ ID NO: 196959 - DNA, 31 bp, Homo sapiens; identical to SEQ ID NO: 34712
  chrX:71529505-71529536
  hypo

SEQ ID NO: 196960 - DNA, 563 bp, Homo sapiens; identical to SEQ ID NO: 58328
  chrX:73163982-73164545
  hypo

SEQ ID NO: 196961 - DNA, 31 bp, Homo sapiens; identical to SEQ ID NO: 34714
  chrX:73812147-73812178
  hypo

SEQ ID NO: 196962 - DNA, 20 bp, Homo sapiens
  chrX:77458034-77458054
  hypo
ggaaacttttaatcatacac

SEQ ID NO: 196963 - DNA, 30 bp, Homo sapiens; identical to SEQ ID NO: 13615
  chrX:80722921-80722951
  hypo

SEQ ID NO: 196964 - DNA, 197 bp, Homo sapiens; identical to SEQ ID NO: 34716
  chrX:82762196-82762393
  hypo

SEQ ID NO: 196965 - DNA, 31 bp, Homo sapiens; identical to SEQ ID NO: 34717
  chrX:87063732-87063763
  hypo

SEQ ID NO: 196966 - DNA, 30 bp, Homo sapiens; identical to SEQ ID NO: 13616
  chrX:87762080-87762110
  hypo

SEQ ID NO: 196967 - DNA, 30 bp, Homo sapiens; identical to SEQ ID NO: 13619
  chrX:93928298-93928328
  hypo

SEQ ID NO: 196968 - DNA, 19 bp, Homo sapiens
  chrX:94392602-94392621
  hypo
attataaaaatagaattag

SEQ ID NO: 196969 - DNA, 26 bp, Homo sapiens
  chrX:100228483-100228509
  hypo
tcgggcggcggcggctgccttctatg

SEQ ID NO: 196970 - DNA, 39 bp, Homo sapiens; identical to SEQ ID NO: 34720
  chrX:101014376-101014415
  hypo

SEQ ID NO: 196971 - DNA, 39 bp, Homo sapiens
  chrX:102232745-102232784
  hypo
actgctgaatgctgccgttgcagacccaccattgacttt

SEQ ID NO: 196972 - DNA, 18 bp, Homo sapiens
  chrX:102954521-102954539
  hypo
tttttttttttgagacga

SEQ ID NO: 196973 - DNA, 30 bp, Homo sapiens; identical to SEQ ID NO: 134566
  chrX:103087213-103087243
  hypo

SEQ ID NO: 196974 - DNA, 30 bp, Homo sapiens; identical to SEQ ID NO: 13623
  chrX:103731902-103731932
  hypo

SEQ ID NO: 196975 - DNA, 30 bp, Homo sapiens; identical to SEQ ID NO: 134568
  chrX:103810625-103810655
  hypo

SEQ ID NO: 196976 - DNA, 30 bp, Homo sapiens; identical to SEQ ID NO: 134569
  chrX:103810968-103810998
  hypo

SEQ ID NO: 196977 - DNA, 30 bp, Homo sapiens; identical to SEQ ID NO: 134570
  chrX:103811229-103811259
  hypo

SEQ ID NO: 196978 - DNA, 30 bp, Homo sapiens; identical to SEQ ID NO: 134571
  chrX:106515894-106515924
  hypo

SEQ ID NO: 196979 - DNA, 30 bp, Homo sapiens; identical to SEQ ID NO: 134572
  chrX:106516145-106516175
  hypo

SEQ ID NO: 196980 - DNA, 52 bp, Homo sapiens; identical to SEQ ID NO: 34722
  chrX:107070115-107070167
  hypo

SEQ ID NO: 196981 - DNA, 29 bp, Homo sapiens
  chrX:117634298-117634327
  hypo
ccgcgcccggccttcattgctttattaca

SEQ ID NO: 196982 - DNA, 30 bp, Homo sapiens
  chrX:118013139-118013169
  hypo
ccagcaccatggtgcgccgggccaggatgc

SEQ ID NO: 196983 - DNA, 19 bp, Homo sapiens
  chrX:118885581-118885600
  hypo
tgtagcatgtgtcagttat

SEQ ID NO: 196984 - DNA, 30 bp, Homo sapiens; identical to SEQ ID NO: 13627
  chrX:120184126-120184156
  hypo

SEQ ID NO: 196985 - DNA, 87 bp, Homo sapiens; identical to SEQ ID NO: 134581
  chrX:123094089-123094176
  hypo

SEQ ID NO: 196986 - DNA, 98 bp, Homo sapiens; identical to SEQ ID NO: 134582
  chrX:123094335-123094433
  hypo

SEQ ID NO: 196987 - DNA, 224 bp, Homo sapiens; identical to SEQ ID NO: 13629
  chrX:123094492-123094716
  hypo

SEQ ID NO: 196988 - DNA, 125 bp, Homo sapiens; identical to SEQ ID NO: 13630
  chrX:123095160-123095285
  hypo

SEQ ID NO: 196989 - DNA, 152 bp, Homo sapiens; identical to SEQ ID NO: 13631
  chrX:123095554-123095706
  hypo

SEQ ID NO: 196990 - DNA, 66 bp, Homo sapiens; identical to SEQ ID NO: 13632
  chrX:123155215-123155281
  hypo

SEQ ID NO: 196991 - DNA, 142 bp, Homo sapiens; identical to SEQ ID NO: 13633
  chrX:123156379-123156521
  hypo

SEQ ID NO: 196992 - DNA, 80 bp, Homo sapiens; identical to SEQ ID NO: 13634
  chrX:123159688-123159768
  hypo

SEQ ID NO: 196993 - DNA, 166 bp, Homo sapiens; identical to SEQ ID NO: 13635
  chrX:123164809-123164975
  hypo

SEQ ID NO: 196994 - DNA, 98 bp, Homo sapiens; identical to SEQ ID NO: 13636
  chrX:123171375-123171473
  hypo

SEQ ID NO: 196995 - DNA, 78 bp, Homo sapiens; identical to SEQ ID NO: 13637
  chrX:123176417-123176495
  hypo

SEQ ID NO: 196996 - DNA, 206 bp, Homo sapiens; identical to SEQ ID NO: 13638
  chrX:123179012-123179218
  hypo

SEQ ID NO: 196997 - DNA, 153 bp, Homo sapiens; identical to SEQ ID NO: 13639
  chrX:123181202-123181355
  hypo

SEQ ID NO: 196998 - DNA, 75 bp, Homo sapiens; identical to SEQ ID NO: 13640
  chrX:123182853-123182928
  hypo

SEQ ID NO: 196999 - DNA, 136 bp, Homo sapiens; identical to SEQ ID NO: 13641
  chrX:123184023-123184159
  hypo

SEQ ID NO: 197000 - DNA, 279 bp, Homo sapiens; identical to SEQ ID NO: 13642
  chrX:123184965-123185244
  hypo

SEQ ID NO: 197001 - DNA, 109 bp, Homo sapiens; identical to SEQ ID NO: 13643
  chrX:123189976-123190085
  hypo

SEQ ID NO: 197002 - DNA, 113 bp, Homo sapiens; identical to SEQ ID NO: 13644
  chrX:123191714-123191827
  hypo

SEQ ID NO: 197003 - DNA, 132 bp, Homo sapiens; identical to SEQ ID NO: 13645
  chrX:123195072-123195204
  hypo

SEQ ID NO: 197004 - DNA, 105 bp, Homo sapiens; identical to SEQ ID NO: 13646
  chrX:123195619-123195724
  hypo

SEQ ID NO: 197005 - DNA, 307 bp, Homo sapiens; identical to SEQ ID NO: 13647
  chrX:123196748-123197055
  hypo

SEQ ID NO: 197006 - DNA, 214 bp, Homo sapiens; identical to SEQ ID NO: 13648
  chrX:123197687-123197901
  hypo

SEQ ID NO: 197007 - DNA, 72 bp, Homo sapiens; identical to SEQ ID NO: 13649
  chrX:123199724-123199796
  hypo

SEQ ID NO: 197008 - DNA, 263 bp, Homo sapiens; identical to SEQ ID NO: 13650
  chrX:123200023-123200286
  hypo

SEQ ID NO: 197009 - DNA, 94 bp, Homo sapiens; identical to SEQ ID NO: 13651
  chrX:123202412-123202506
  hypo

SEQ ID NO: 197010 - DNA, 176 bp, Homo sapiens; identical to SEQ ID NO: 13652
  chrX:123204997-123205173
  hypo

SEQ ID NO: 197011 - DNA, 141 bp, Homo sapiens; identical to SEQ ID NO: 13653
  chrX:123210180-123210321
  hypo

SEQ ID NO: 197012 - DNA, 103 bp, Homo sapiens; identical to SEQ ID NO: 13654
  chrX:123211805-123211908
  hypo

SEQ ID NO: 197013 - DNA, 151 bp, Homo sapiens; identical to SEQ ID NO: 13655
  chrX:123215227-123215378
  hypo

SEQ ID NO: 197014 - DNA, 134 bp, Homo sapiens; identical to SEQ ID NO: 13656
  chrX:123217269-123217403
  hypo

SEQ ID NO: 197015 - DNA, 225 bp, Homo sapiens; identical to SEQ ID NO: 13657
  chrX:123220395-123220620
  hypo

SEQ ID NO: 197016 - DNA, 391 bp, Homo sapiens; identical to SEQ ID NO: 13658
  chrX:123224423-123224814
  hypo

SEQ ID NO: 197017 - DNA, 128 bp, Homo sapiens; identical to SEQ ID NO: 13659
  chrX:123227866-123227994
  hypo

SEQ ID NO: 197018 - DNA, 79 bp, Homo sapiens; identical to SEQ ID NO: 13660
  chrX:123229220-123229299
  hypo

SEQ ID NO: 197019 - DNA, 2084 bp, Homo sapiens; identical to SEQ ID NO: 13661
  chrX:123234422-123236506
  hypo

SEQ ID NO: 197020 - DNA, 30 bp, Homo sapiens
  chrX:128927720-128927750
  hypo
tgagggctcggagagcgggcgcgatgacgc

SEQ ID NO: 197021 - DNA, 137 bp, Homo sapiens; identical to SEQ ID NO: 13664
  chrX:129139162-129139299
  hypo

SEQ ID NO: 197022 - DNA, 92 bp, Homo sapiens; identical to SEQ ID NO: 13665
  chrX:129146552-129146644
  hypo

SEQ ID NO: 197023 - DNA, 3265 bp, Homo sapiens; identical to SEQ ID NO: 13666
  chrX:129146924-129150189
  hypo

SEQ ID NO: 197024 - DNA, 178 bp, Homo sapiens; identical to SEQ ID NO: 13667
  chrX:129154947-129155125
  hypo

SEQ ID NO: 197025 - DNA, 82 bp, Homo sapiens; identical to SEQ ID NO: 13668
  chrX:129156870-129156952
  hypo

SEQ ID NO: 197026 - DNA, 393 bp, Homo sapiens; identical to SEQ ID NO: 13669
  chrX:129158961-129159354
  hypo

SEQ ID NO: 197027 - DNA, 228 bp, Homo sapiens; identical to SEQ ID NO: 13670
  chrX:129162608-129162836
  hypo

SEQ ID NO: 197028 - DNA, 223 bp, Homo sapiens; identical to SEQ ID NO: 13671
  chrX:129168428-129168651
  hypo

SEQ ID NO: 197029 - DNA, 168 bp, Homo sapiens; identical to SEQ ID NO: 13672
  chrX:129171340-129171508
  hypo

SEQ ID NO: 197030 - DNA, 149 bp, Homo sapiens; identical to SEQ ID NO: 13673
  chrX:129173110-129173259
  hypo

SEQ ID NO: 197031 - DNA, 79 bp, Homo sapiens; identical to SEQ ID NO: 13674
  chrX:129184690-129184769
  hypo

SEQ ID NO: 197032 - DNA, 158 bp, Homo sapiens; identical to SEQ ID NO: 13675
  chrX:129185833-129185991
  hypo

SEQ ID NO: 197033 - DNA, 2231 bp, Homo sapiens; identical to SEQ ID NO: 13676
  chrX:129189827-129192058
  hypo

SEQ ID NO: 197034 - DNA, 30 bp, Homo sapiens
  chrX:130945132-130945162
  hypo
ttttaaaaatgccgacgttgtttaactata

SEQ ID NO: 197035 - DNA, 157 bp, Homo sapiens; identical to SEQ ID NO: 13678
  chrX:133507340-133507497
  hypo

SEQ ID NO: 197036 - DNA, 185 bp, Homo sapiens; identical to SEQ ID NO: 13679
  chrX:133511600-133511785
  hypo

SEQ ID NO: 197037 - DNA, 103 bp, Homo sapiens; identical to SEQ ID NO: 13680
  chrX:133512033-133512136
  hypo

SEQ ID NO: 197038 - DNA, 135 bp, Homo sapiens; identical to SEQ ID NO: 13681
  chrX:133527529-133527664
  hypo

SEQ ID NO: 197039 - DNA, 45 bp, Homo sapiens; identical to SEQ ID NO: 13682
  chrX:133527937-133527982
  hypo

SEQ ID NO: 197040 - DNA, 480 bp, Homo sapiens; identical to SEQ ID NO: 13683
  chrX:133547516-133547996
  hypo

SEQ ID NO: 197041 - DNA, 278 bp, Homo sapiens; identical to SEQ ID NO: 13684
  chrX:133549044-133549322
  hypo

SEQ ID NO: 197042 - DNA, 135 bp, Homo sapiens; identical to SEQ ID NO: 13685
  chrX:133551197-133551332
  hypo

SEQ ID NO: 197043 - DNA, 131 bp, Homo sapiens; identical to SEQ ID NO: 13686
  chrX:133559229-133559360
  hypo

SEQ ID NO: 197044 - DNA, 3133 bp, Homo sapiens; identical to SEQ ID NO: 13687
  chrX:133559689-133562822
  hypo

SEQ ID NO: 197045 - DNA, 158 bp, Homo sapiens
  chrX:133931201-133931359
  hypo
cagttcttccgcgtccgggcacccatcgggtcctgcgcacgcgtccagcggccactccaatgggcccgcgggcacggagcgtgcgtgggagccccgcctcgaaatccgcctccaaaggggaggagcgtttccagggggcccggcgccttcctcgatgg

SEQ ID NO: 197046 - DNA, 44 bp, Homo sapiens
  chrX:134059955-134059999
  hypo
cgcacctggggctcctgcacagtccaagccgccccctgctccgt

SEQ ID NO: 197047 - DNA, 30 bp, Homo sapiens; identical to SEQ ID NO: 34782
  chrX:135382443-135382473
  hypo

SEQ ID NO: 197048 - DNA, 30 bp, Homo sapiens; identical to SEQ ID NO: 102126
  chrX:135579018-135579048
  hypo

SEQ ID NO: 197049 - DNA, 30 bp, Homo sapiens; identical to SEQ ID NO: 102127
  chrX:135579376-135579406
  hypo

SEQ ID NO: 197050 - DNA, 30 bp, Homo sapiens
  chrX:138529195-138529225
  hypo
gctccgagtgccggcgcgggccacccgggt

SEQ ID NO: 197051 - DNA, 23 bp, Homo sapiens
  chrX:142200129-142200152
  hypo
gctggtctcgacaatgttgttca

SEQ ID NO: 197052 - DNA, 30 bp, Homo sapiens; identical to SEQ ID NO: 13689
  chrX:144475782-144475812
  hypo

SEQ ID NO: 197053 - DNA, 59 bp, Homo sapiens
  chrX:150560242-150560301
  hypo
cctgctgggtgcaaggcgctcagtctgcagccagctctaggtcccgcccctttgcgttg

SEQ ID NO: 197054 - DNA, 49 bp, Homo sapiens
  chrX:150560733-150560782
  hypo
cttgggggttggtaactggagcgctgccgcccctcatgggcaggagatc

SEQ ID NO: 197055 - DNA, 184 bp, Homo sapiens
  chrX:150571592-150571776
  hypo
gctggaggacagcaagctggtcgcttcccgtgacggaagctctgattccagcaaaagagggcgcgctgatccacccatggtgcctgctgcgttcccagctctggtgtctggtgctggtggacacggttgccgcatgggttgggcactggtgccgctgtccgccgtggcttccctgggtaaaagc

SEQ ID NO: 197056 - DNA, 30 bp, Homo sapiens
  chrX:151081281-151081311
  hypo
cccggttccgcccccgctttcaaccaagga

SEQ ID NO: 197057 - DNA, 394 bp, Homo sapiens; identical to SEQ ID NO: 102131
  chrX:151306511-151306905
  hypo

SEQ ID NO: 197058 - DNA, 154 bp, Homo sapiens; identical to SEQ ID NO: 102132
  chrX:151306964-151307118
  hypo

SEQ ID NO: 197059 - DNA, 41 bp, Homo sapiens; identical to SEQ ID NO: 102133
  chrY:5077816-5077857
  hypo

SEQ ID NO: 197060 - DNA, 40 bp, Homo sapiens; identical to SEQ ID NO: 34785
  chrY:5572739-5572779
  hypo

SEQ ID NO: 197061 - DNA, 62 bp, Homo sapiens; identical to SEQ ID NO: 102135
  chrY:6790936-6790998
  hypo

SEQ ID NO: 197062 - DNA, 31 bp, Homo sapiens; identical to SEQ ID NO: 34786
  chrY:7149235-7149266
  hypo

SEQ ID NO: 197063 - DNA, 33 bp, Homo sapiens; identical to SEQ ID NO: 102137
  chrY:7413995-7414028
  hypo

SEQ ID NO: 197064 - DNA, 80 bp, Homo sapiens; identical to SEQ ID NO: 102138
  chrY:7525417-7525497
  hypo

SEQ ID NO: 197065 - DNA, 169 bp, Homo sapiens; identical to SEQ ID NO: 102139
  chrY:8147741-8147910
  hypo

SEQ ID NO: 197066 - DNA, 30 bp, Homo sapiens; identical to SEQ ID NO: 34788
  chrY:9385571-9385601
  hypo

SEQ ID NO: 197067 - DNA, 31 bp, Homo sapiens; identical to SEQ ID NO: 102141
  chrY:10034277-10034308
  hypo

SEQ ID NO: 197068 - DNA, 30 bp, Homo sapiens; identical to SEQ ID NO: 34789
  chrY:10034536-10034566
  hypo

SEQ ID NO: 197069 - DNA, 31 bp, Homo sapiens; identical to SEQ ID NO: 34790
  chrY:14374844-14374875
  hypo

SEQ ID NO: 197070 - DNA, 30 bp, Homo sapiens
  chrY:14474644-14474674
  hypo
ggaaacctgcttccacgcccaggtcctgga

SEQ ID NO: 197071 - DNA, 56 bp, Homo sapiens
  chrY:14474918-14474974
  hypo
ctggggagggggtcgcgagcacgaagggtccctgtaaagggcgtggttatatccgg

SEQ ID NO: 197072 - DNA, 104 bp, Homo sapiens
  chrY:14488009-14488113
  hypo
agaatcttgcagcaccgcgactatgcaactggcctcataagtgtggatatgtgggagccttatattatatggtggttgagaagattcatgataaaaaagatccc

SEQ ID NO: 197073 - DNA, 93 bp, Homo sapiens
  chrY:14513074-14513167
  hypo
aggtctaaggggtacacgtgccggtttgtcactggggtatattctatggtagtgaggtatggggtatgcatgaaccccccacccacgtactca

SEQ ID NO: 197074 - DNA, 93 bp, Homo sapiens
  chrY:14513346-14513439
  hypo
tcaacatatacaagttgaacactggttcagtctggaaaggcaggacaaaaaaagaaaaaaagcaaaggcggggagactcgaagtggggagggg

SEQ ID NO: 197075 - DNA, 118 bp, Homo sapiens; identical to SEQ ID NO: 102145
  chrY:14532157-14532275
  hypo

SEQ ID NO: 197076 - DNA, 30 bp, Homo sapiens; identical to SEQ ID NO: 102146
  chrY:14532509-14532539
  hypo

SEQ ID NO: 197077 - DNA, 31 bp, Homo sapiens; identical to SEQ ID NO: 102147
  chrY:14656910-14656941
  hypo

SEQ ID NO: 197078 - DNA, 450 bp, Homo sapiens
  chrY:14776353-14776803
  hypo
tgtctaaaactataccgttaaactttaaaaatatacaccataaacttctacatttttcttagtttgctgctttaatcactgccattttcgtctctgcaaatgcgcaattgtttaaaagtgtaaggatttgtttttcaattagaaaactcattgatatgcttttaactttctcgcttcacatgcttttaacttctcgcttcaaactttattcttacagtttgggaagaaagaaaacctaaagtatttgccgttggtgattcaagggtgagttgggagtattttttatttcactgacttgaaaataagattgtgggattttaattatttcttgttgccgttttctgttaacggtgattgcgtgaatgtttactcttgtcaatcttgtcttactgttacaatatttctttttgtcggttggctttagtaatatatatgactgtgggtccgggt

SEQ ID NO: 197079 - DNA, 149 bp, Homo sapiens; identical to SEQ ID NO: 102149
  chrY:14777102-14777251
  hypo

SEQ ID NO: 197080 - DNA, 30 bp, Homo sapiens
  chrY:14865014-14865044
  hypo
atcctcctccctcagcgtcctgagtagcta

SEQ ID NO: 197081 - DNA, 136 bp, Homo sapiens; identical to SEQ ID NO: 34792
  chrY:15015980-15016116
  hypo

SEQ ID NO: 197082 - DNA, 30 bp, Homo sapiens
  chrY:15401566-15401596
  hypo
gagaagttttgtctgcggctcgtcctgcta

SEQ ID NO: 197083 - DNA, 30 bp, Homo sapiens
  chrY:15445948-15445978
  hypo
agattatgtgtatgacgcactgcctccctt

SEQ ID NO: 197084 - DNA, 181 bp, Homo sapiens
  chrY:15446037-15446218
  hypo
gagaccagagctctaagcctttgcagcctccacattttgcactggccccctggctcccacctttatgaactcttgtctcttctcatttctttgtcaccattgaacttcaggtacccacgggtggtgatgaggctggaccccaacacgcagcaaaagaaactatcatcggaccgaacaggca

SEQ ID NO: 197085 - DNA, 29 bp, Homo sapiens
  chrY:15446277-15446306
  hypo
gagactacaaggaacgtaaactcatttac

SEQ ID NO: 197086 - DNA, 31 bp, Homo sapiens; identical to SEQ ID NO: 34795
  chrY:15562413-15562444
  hypo

SEQ ID NO: 197087 - DNA, 19 bp, Homo sapiens
  chrY:15677133-15677152
  hypo
agaccggagctgttcctat

SEQ ID NO: 197088 - DNA, 30 bp, Homo sapiens
  chrY:15999227-15999257
  hypo
gtctccccgaggagccggacatccttgtgc

SEQ ID NO: 197089 - DNA, 46 bp, Homo sapiens
  chrY:16001308-16001354
  hypo
gagcagtgagacaatcgcctttcgccacgcagtgagtactgtaaga

SEQ ID NO: 197090 - DNA, 46 bp, Homo sapiens
  chrY:16001473-16001519
  hypo
gctttctgggaaagggctctctaatgacccccggactgttcggcgt

SEQ ID NO: 197091 - DNA, 1414 bp, Homo sapiens; identical to SEQ ID NO: 134666
  chrY:16635743-16637157
  hypo

SEQ ID NO: 197092 - DNA, 31 bp, Homo sapiens; identical to SEQ ID NO: 102155
  chrY:18547039-18547070
  hypo

SEQ ID NO: 197093 - DNA, 31 bp, Homo sapiens; identical to SEQ ID NO: 34799
  chrY:21186957-21186988
  hypo

SEQ ID NO: 197094 - DNA, 480 bp, Homo sapiens
  chrY:21204855-21205335
  hypo
ggccccagggttgggcgtgtttgcgtctccgggtgcacagagctatcacttctcactccctcctcactgggaagtccctcccattgtctagcctcagtacctcttgatactctcacagcgccccgctgccatccacagcgcctcccagcccgcggctctgggacgctaccctcgggaccccagctgcactcacctaggtcgggccggcacttgcccttgtccttttgcagctacagctcggcgcgtaaatcaccgacatcctcgcagcctccactggaacaatagtttcccttgttgaggctgctaccctggaagcgaggagaggcggggacgaaggaggagccgagtgtccatcttgcgcatctggcctcccgcatctaggcacatgtttaagatgcttacacagcaggtgccatgctaactgctggcagaaggaatcccgccttcttgcatgcaggcactcgccgggcttgggaaaga

SEQ ID NO: 197095 - DNA, 339 bp, Homo sapiens; identical to SEQ ID NO: 102157
  chrY:21208476-21208815
  hypo

SEQ ID NO: 197096 - DNA, 31 bp, Homo sapiens; identical to SEQ ID NO: 102158
  chrY:21210285-21210316
  hypo

SEQ ID NO: 197097 - DNA, 30 bp, Homo sapiens
  chrY:21222372-21222402
  hypo
gcgctttccaattaccgtcagaaataagcc

SEQ ID NO: 197098 - DNA, 153 bp, Homo sapiens; identical to SEQ ID NO: 34800
  chrY:21226201-21226354
  hypo

SEQ ID NO: 197099 - DNA, 31 bp, Homo sapiens; identical to SEQ ID NO: 34801
  chrY:21238027-21238058
  hypo

SEQ ID NO: 197100 - DNA, 23 bp, Homo sapiens
  chrY:21713314-21713337
  hypo
aagagatcccgggagcggtggct

SEQ ID NO: 197101 - DNA, 83 bp, Homo sapiens
  chrY:21713516-21713599
  hypo
gagcggagatggcgccactgcactccagcgtgggcgacagagagaccactgttgttgccaagagtggacggcttaatgcctgg

SEQ ID NO: 197102 - DNA, 30 bp, Homo sapiens; identical to SEQ ID NO: 34802
  chrY:21877668-21877698
  hypo

SEQ ID NO: 197103 - DNA, 219 bp, Homo sapiens
  chrY:22914871-22915090
  hypo
cgttcagtccggtcccgagggaagcgcctctgcttcccttttctctgtgcttcaagtgttcagaagcccaatccagccggagggtggtgcgccatcactcaggcaccgatctagttacaactcgactgccctatgtcctcacctgggcactgagcaggtcttaacccacagatggagcacacacttacctaggcagccaagcagcggcagcacccagga

SEQ ID NO: 197104 - DNA, 269 bp, Homo sapiens
  chrY:22918436-22918705
  hypo
gacgccagagagactcgtgaggttgtcaaaggtctgggagttttgcggggtttgttctggagtctggcaggaagtaatatttgctcaaaactgggcgtgaaatagcctggactgtcctttctcctccgatccggtattacccgttagcagttgttacagctgaagataaagacattttactgttaactgagacgagtttctctgaaaaagtttggtgtctttttcaggcccggggccccaagaagcacttgaagcgtgttgcagcgccg

SEQ ID NO: 197105 - DNA, 30 bp, Homo sapiens; identical to SEQ ID NO: 34803
  chrY:23566715-23566745
  hypo

SEQ ID NO: 197106 - DNA, 56 bp, Homo sapiens; identical to SEQ ID NO: 34804
  chrY:23568830-23568886
  hypo

SEQ ID NO: 197107 - DNA, 30 bp, Homo sapiens
  chrY:23834337-23834367
  hypo
cggagtgagccaccgcgcccggttcaaaag

SEQ ID NO: 197108 - DNA, 30 bp, Homo sapiens
  chrY:23978672-23978702
  hypo
tcctccagcacaacccgaccacagagatgg

SEQ ID NO: 197109 - DNA, 19 bp, Homo sapiens
  AC026273.7_55222-119630:48504-48523
  hypo
cccccggccccaggacaca

SEQ ID NO: 197110 - DNA, 31 bp, Homo sapiens; identical to SEQ ID NO: 102165
  AC133920.2_61082-76843:11716-11747
  hypo

SEQ ID NO: 197111 - DNA, 104 bp, Homo sapiens; identical to SEQ ID NO: 102166
  AC133920.2_81912-122260:1985-2089
  hypo

SEQ ID NO: 197112 - DNA, 167 bp, Homo sapiens; identical to SEQ ID NO: 102167
  AC153808.1_1-20788:1300-1467
  hypo

SEQ ID NO: 197113 - DNA, 31 bp, Homo sapiens; identical to SEQ ID NO: 102168
  AC153808.1_1-20788:9793-9824
  hypo

SEQ ID NO: 197114 - DNA, 259 bp, Homo sapiens; identical to SEQ ID NO: 102169
  AC153808.1_1-20788:20323-20582
  hypo

SEQ ID NO: 197115 - DNA, 19 bp, Homo sapiens
  AC208171.3_11673-19430:7279-7298
  hypo
gcctcgagtaaataatttt

SEQ ID NO: 197116 - DNA, 121 bp, Homo sapiens; identical to SEQ ID NO: 102171
  AC240459.2_22426-31906:3388-3509
  hypo

SEQ ID NO: 197117 - DNA, 31 bp, Homo sapiens; identical to SEQ ID NO: 34808
  AC242209.3_1-39555:31580-31611
  hypo

SEQ ID NO: 197118 - DNA, 181 bp, Homo sapiens; identical to SEQ ID NO: 102173
  AEKP01114215.1_1-7461:1443-1624
  hypo

SEQ ID NO: 197119 - DNA, 32 bp, Homo sapiens; identical to SEQ ID NO: 102174
  AEKP01114218.1_1-13684:9402-9434
  hypo

SEQ ID NO: 197120 - DNA, 43 bp, Homo sapiens
  AEKP01114218.1_1-13684:9681-9724
  hypo
ctcaccagagccccctcaagtcgtgtaatgcattggatgtccc

SEQ ID NO: 197121 - DNA, 34 bp, Homo sapiens; identical to SEQ ID NO: 102175
  AEKP01114218.1_1-13684:12131-12165
  hypo

SEQ ID NO: 197122 - DNA, 247 bp, Homo sapiens; identical to SEQ ID NO: 34809
  AEKP01149809.1_1-6354:1324-1571
  hypo

SEQ ID NO: 197123 - DNA, 171 bp, Homo sapiens; identical to SEQ ID NO: 34810
  AEKP01153556.1_1-5252:371-542
  hypo

SEQ ID NO: 197124 - DNA, 31 bp, Homo sapiens; identical to SEQ ID NO: 102178
  AEKP01153556.1_1-5252:1025-1056
  hypo

SEQ ID NO: 197125 - DNA, 75 bp, Homo sapiens; identical to SEQ ID NO: 102179
  AEKP01160137.1_1408-4031:1581-1656
  hypo

SEQ ID NO: 197126 - DNA, 117 bp, Homo sapiens; identical to SEQ ID NO: 34811
  AEKP01166227.1_44013-111583:41309-41426
  hypo

SEQ ID NO: 197127 - DNA, 167 bp, Homo sapiens; identical to SEQ ID NO: 102181
  AEKP01166227.1_44013-111583:53193-53360
  hypo

SEQ ID NO: 197128 - DNA, 83 bp, Homo sapiens; identical to SEQ ID NO: 102182
  AEKP01172922.1_98-3151:2029-2112
  hypo

SEQ ID NO: 197129 - DNA, 23 bp, Homo sapiens
  AEKP01172922.1_98-3151:2171-2194
  hypo
gtgtgtatcgtgagtggtgtgtg

SEQ ID NO: 197130 - DNA, 152 bp, Homo sapiens
  AEKP01184864.1_3582-5885:475-627
  hypo
aggacagtctgtctaccgtacgtatacatatacacgtaactatatgctgtgcaggtttttctagctaaggagtcatgggctgtcccagagagccgaagtgtggaggaggccattccatctaggtttgtgtaggtgcacgctgtgatgtttgc

SEQ ID NO: 197131 - DNA, 59 bp, Homo sapiens; identical to SEQ ID NO: 102184
  AEKP01188815.1_1-4777:3486-3545
  hypo

SEQ ID NO: 197132 - DNA, 36 bp, Homo sapiens; identical to SEQ ID NO: 102185
  AEKP01209288.1_3835-9918:5049-5085
  hypo

SEQ ID NO: 197133 - DNA, 121 bp, Homo sapiens; identical to SEQ ID NO: 102186
  AEKP01212943.1_1-3701:1909-2030
  hypo

SEQ ID NO: 197134 - DNA, 94 bp, Homo sapiens; identical to SEQ ID NO: 102187
  AEKP01213516.1_1-2586:270-364
  hypo

SEQ ID NO: 197135 - DNA, 81 bp, Homo sapiens; identical to SEQ ID NO: 34813
  AEKP01221093.1_87-1602:654-735
  hypo

SEQ ID NO: 197136 - DNA, 121 bp, Homo sapiens; identical to SEQ ID NO: 34814
  AEKP01221093.1_87-1602:854-975
  hypo

SEQ ID NO: 197137 - DNA, 44 bp, Homo sapiens; identical to SEQ ID NO: 34815
  AEKP01225640.1_1-1497:730-774
  hypo

SEQ ID NO: 197138 - DNA, 105 bp, Homo sapiens; identical to SEQ ID NO: 102191
  AL162252.17_162460-176678:8536-8641
  hypo

SEQ ID NO: 197139 - DNA, 31 bp, Homo sapiens
  CR856017.2_11887-39781:16722-16753
  hypo
tgtcagtgtgaatcatcgcagagacagcaaa

SEQ ID NO: 197140 - DNA, 113 bp, Homo sapiens
  FP565324.3_2001-29640:15326-15439
  hypo
tgtgtggccacccctccgcctgcccagggccgctgtgtggccgccgctcccgcctgcccagggccgctgtgtggctgccgctcccgcctgcccagggccgctgtgtggccgcc

SEQ ID NO: 197141 - DNA, 254 bp, Homo sapiens; identical to SEQ ID NO: 102193
  GL000194.1:58619-58873
  hypo

SEQ ID NO: 197142 - DNA, 33 bp, Homo sapiens; identical to SEQ ID NO: 34816
  GL000195.1:80191-80224
  hypo

SEQ ID NO: 197143 - DNA, 26 bp, Homo sapiens
  GL000204.1:44191-44217
  hypo
gcaatgcagagatgaccgtgcacatg

SEQ ID NO: 197144 - DNA, 25 bp, Homo sapiens
  GL000204.1:44336-44361
  hypo
acaccctcctcgttgttaaggacct

SEQ ID NO: 197145 - DNA, 28 bp, Homo sapiens
  GL000212.1:64461-64489
  hypo
ccaacgaggaagccgcccagggcatcgc

SEQ ID NO: 197146 - DNA, 31 bp, Homo sapiens; identical to SEQ ID NO: 102198
  GL000212.1:65199-65230
  hypo

SEQ ID NO: 197147 - DNA, 121 bp, Homo sapiens; identical to SEQ ID NO: 102199
  GL000225.1:79484-79605
  hypo

SEQ ID NO: 197148 - DNA, 23 bp, Homo sapiens
  GL000225.1:80182-80205
  hypo
ccagccagcggctcttataaagg

SEQ ID NO: 197149 - DNA, 31 bp, Homo sapiens; identical to SEQ ID NO: 102201
  GL339450.1:72631-72662
  hypo

SEQ ID NO: 197150 - DNA, 63 bp, Homo sapiens; identical to SEQ ID NO: 102202
  GL383535.1:198018-198081
  hypo

SEQ ID NO: 197151 - DNA, 7860 bp, Homo sapiens; identical to SEQ ID NO: 58444
  HPV16:0-7860
  hypo

SEQ ID NO: 197152 - DNA, 7800 bp, Homo sapiens; identical to SEQ ID NO: 58445
  HPV18:0-7800
  hypo

SEQ ID NO: 197153 - DNA, 25 bp, Homo sapiens
  JH636052.4:2022604-2022629
  hypo
ttttcaaacaataaaacaggccggg

SEQ ID NO: 197154 - DNA, 45 bp, Homo sapiens; identical to SEQ ID NO: 34818
  JH806600.1:5064465-5064510
  hypo

SEQ ID NO: 197155 - DNA, 31 bp, Homo sapiens; identical to SEQ ID NO: 102207
  KB021645.1:514668-514699
  hypo

SEQ ID NO: 197156 - DNA, 315 bp, Homo sapiens; identical to SEQ ID NO: 34819
  NW_001838014.1_249000-295694:3952-4267
  hypo

SEQ ID NO: 197157 - DNA, 292 bp, Homo sapiens; identical to SEQ ID NO: 34820
  NW_001838014.1_249000-295694:7051-7343
  hypo

SEQ ID NO: 197158 - DNA, 31 bp, Homo sapiens; identical to SEQ ID NO: 102210
  NW_001838014.1_249000-295694:12764-12795
  hypo

SEQ ID NO: 197159 - DNA, 31 bp, Homo sapiens
  NW_001838014.1_249000-295694:13776-13807
  hypo
aaaggcctccgtttcacgctgtgtgagccag

SEQ ID NO: 197160 - DNA, 241 bp, Homo sapiens; identical to SEQ ID NO: 34821
  NW_001838056.1_145425-224902:38580-38821
  hypo

SEQ ID NO: 197161 - DNA, 213 bp, Homo sapiens; identical to SEQ ID NO: 34822
  NW_001838286.2_1380778-1470498:80825-81038
  hypo

SEQ ID NO: 197162 - DNA, 1232 bp, Homo sapiens; identical to SEQ ID NO: 102213
  NW_001838286.2_1380778-1470498:81097-82329
  hypo

SEQ ID NO: 197163 - DNA, 113 bp, Homo sapiens; identical to SEQ ID NO: 58452
  NW_001838402.2_289580-297926:6068-6181
  hypo

SEQ ID NO: 197164 - DNA, 30 bp, Homo sapiens; identical to SEQ ID NO: 34825
  NW_001838715.2_220243-222386:1284-1314
  hypo

SEQ ID NO: 197165 - DNA, 98 bp, Homo sapiens; identical to SEQ ID NO: 34826
  NW_001838987.1_19978397-19979692:119-217
  hypo

SEQ ID NO: 197166 - DNA, 143 bp, Homo sapiens; identical to SEQ ID NO: 34827
  NW_001838993.2_42143-59442:15876-16019
  hypo

SEQ ID NO: 197167 - DNA, 114 bp, Homo sapiens; identical to SEQ ID NO: 102218
  NW_001838998.1_673882-674972:66-180
  hypo

SEQ ID NO: 197168 - DNA, 199 bp, Homo sapiens; identical to SEQ ID NO: 102219
  NW_001839317.1_1572-22707:16429-16628
  hypo

SEQ ID NO: 197169 - DNA, 89 bp, Homo sapiens; identical to SEQ ID NO: 102220
  NW_001839407.1_18933-24809:4219-4308
  hypo

SEQ ID NO: 197170 - DNA, 208 bp, Homo sapiens; identical to SEQ ID NO: 102221
  NW_001839407.1_18933-24809:5027-5235
  hypo

SEQ ID NO: 197171 - DNA, 257 bp, Homo sapiens; identical to SEQ ID NO: 102222
  NW_001839407.1_42766-49957:1425-1682
  hypo

SEQ ID NO: 197172 - DNA, 181 bp, Homo sapiens; identical to SEQ ID NO: 102223
  NW_001839407.1_50257-55859:1426-1607
  hypo

SEQ ID NO: 197173 - DNA, 121 bp, Homo sapiens; identical to SEQ ID NO: 102224
  NW_001839407.1_50257-55859:1666-1787
  hypo

SEQ ID NO: 197174 - DNA, 121 bp, Homo sapiens; identical to SEQ ID NO: 102225
  NW_001839407.1_56047-63507:6751-6872
  hypo

SEQ ID NO: 197175 - DNA, 121 bp, Homo sapiens; identical to SEQ ID NO: 102226
  NW_001839407.1_56047-63507:6991-7112
  hypo

SEQ ID NO: 197176 - DNA, 45 bp, Homo sapiens; identical to SEQ ID NO: 102227
  NW_001839407.1_56047-63507:7171-7216
  hypo

SEQ ID NO: 197177 - DNA, 31 bp, Homo sapiens; identical to SEQ ID NO: 102228
  NW_001839593.1_106153-129919:23228-23259
  hypo

SEQ ID NO: 197178 - DNA, 121 bp, Homo sapiens; identical to SEQ ID NO: 102229
  NW_001839595.1_33916-36793:2250-2371
  hypo

SEQ ID NO: 197179 - DNA, 121 bp, Homo sapiens; identical to SEQ ID NO: 102230
  NW_001839595.1_74059-77718:790-911
  hypo

SEQ ID NO: 197180 - DNA, 301 bp, Homo sapiens; identical to SEQ ID NO: 102231
  NW_001839603.1_36678-41438:2679-2980
  hypo

SEQ ID NO: 197181 - DNA, 39 bp, Homo sapiens; identical to SEQ ID NO: 102232
  NW_001839609.1_1-3470:1113-1152
  hypo

SEQ ID NO: 197182 - DNA, 34 bp, Homo sapiens; identical to SEQ ID NO: 102233
  NW_001839613.1_2341-3640:86-120
  hypo

SEQ ID NO: 197183 - DNA, 145 bp, Homo sapiens; identical to SEQ ID NO: 34828
  NW_001839646.1_1-5206:1403-1548
  hypo

SEQ ID NO: 197184 - DNA, 301 bp, Homo sapiens; identical to SEQ ID NO: 34829
  NW_001839646.1_1-5206:2127-2428
  hypo

SEQ ID NO: 197185 - DNA, 121 bp, Homo sapiens
  NW_001839647.1_1-2990:355-476
  hypo
ttcggatggcaccatacccgccgaagactagggacggtgacggcgaaggagactcgttaggaccccgggccaatgcgaggccctgcatgcctgctttgagaggaacctgtacccgggcatc

SEQ ID NO: 197186 - DNA, 121 bp, Homo sapiens; identical to SEQ ID NO: 102236
  NW_001839651.1_32960-37353:876-997
  hypo

SEQ ID NO: 197187 - DNA, 438 bp, Homo sapiens; identical to SEQ ID NO: 102237
  NW_001839668.1_21493-58548:14915-15353
  hypo

SEQ ID NO: 197188 - DNA, 377 bp, Homo sapiens
  NW_001839668.1_21493-58548:15412-15789
  hypo
cgcagctttttgtcgccgcagctgtttgcctcggccgccatggcttgttgcccccctcactgtggcttgttgcccccatcgccccggctttttccgccaccgccccgggtttttgaacccaccgtagcggctttttgtgcccaccgccgcacctttttgtggcttttcgcccccgctgccacggctttttgcccccatcaccgtggctttttccacgactccgcggctttttgccgacacggctttttactcccaccaccacaggtttttgccgctgtggctttttcacctcaccatcgcgggtttttgcctccaccgccgtggctttttgcccccactgctgcgggtctgagggcgggatcagcagactcagctgc

SEQ ID NO: 197189 - DNA, 145 bp, Homo sapiens; identical to SEQ ID NO: 34830
  NW_001839689.1_34352-41752:1477-1622
  hypo

SEQ ID NO: 197190 - DNA, 121 bp, Homo sapiens; identical to SEQ ID NO: 34831
  NW_001839689.1_34352-41752:1981-2102
  hypo

SEQ ID NO: 197191 - DNA, 121 bp, Homo sapiens; identical to SEQ ID NO: 102241
  NW_001839689.1_69962-76288:4518-4639
  hypo

SEQ ID NO: 197192 - DNA, 225 bp, Homo sapiens; identical to SEQ ID NO: 102242
  NW_001839792.1_1-3553:1227-1452
  hypo

SEQ ID NO: 197193 - DNA, 25 bp, Homo sapiens
  NW_001839824.1_1-1535:1385-1410
  hypo
cagcggctcttatacaggcccccag

SEQ ID NO: 197194 - DNA, 121 bp, Homo sapiens
  NW_001839859.1_35699-41775:4705-4826
  hypo
gcaggatgggagatcccctcttccggcgcggccaagctgggctggagcacggggatggcactcactccgtggctcacacaagccccttgtgggagagccccaggcacgcagggcacgtggg

SEQ ID NO: 197195 - DNA, 121 bp, Homo sapiens; identical to SEQ ID NO: 102244
  NW_001839864.1_130-4387:2038-2159
  hypo

SEQ ID NO: 197196 - DNA, 34 bp, Homo sapiens
  NW_001840146.1_14915-50612:25837-25871
  hypo
aaaaagggcccgcggggctgggctggctgttaga

SEQ ID NO: 197197 - DNA, 79 bp, Homo sapiens; identical to SEQ ID NO: 102245
  NW_001840273.1_1-3087:647-726
  hypo

SEQ ID NO: 197198 - DNA, 259 bp, Homo sapiens; identical to SEQ ID NO: 102246
  NW_001840273.1_1-3087:785-1044
  hypo

SEQ ID NO: 197199 - DNA, 209 bp, Homo sapiens; identical to SEQ ID NO: 102247
  NW_001840306.1_6328-82586:33361-33570
  hypo

SEQ ID NO: 197200 - DNA, 99 bp, Homo sapiens
  NW_001840669.1_1-3203:1829-1928
  hypo
acccgcgcgtgcacagtaggccgcccaccatctggtacctggcccggacctgggatcctcggaatgctcaggaaagaatggcagttctccgctgtgtgg

SEQ ID NO: 197201 - DNA, 36 bp, Homo sapiens; identical to SEQ ID NO: 102248
  NW_001840754.1_117-3691:2526-2562
  hypo

SEQ ID NO: 197202 - DNA, 121 bp, Homo sapiens; identical to SEQ ID NO: 34833
  NW_001840841.1_1-4205:1665-1786
  hypo

SEQ ID NO: 197203 - DNA, 104 bp, Homo sapiens; identical to SEQ ID NO: 34834
  NW_001840841.1_1-4205:2205-2309
  hypo

SEQ ID NO: 197204 - DNA, 106 bp, Homo sapiens; identical to SEQ ID NO: 102251
  NW_001840841.1_32027-40624:2465-2571
  hypo

SEQ ID NO: 197205 - DNA, 121 bp, Homo sapiens; identical to SEQ ID NO: 34835
  NW_001840859.1_1-2890:1477-1598
  hypo

SEQ ID NO: 197206 - DNA, 19 bp, Homo sapiens
  NW_001840859.1_78656-82292:1286-1305
  hypo
ggggtggagcctgcctgcc

SEQ ID NO: 197207 - DNA, 138 bp, Homo sapiens; identical to SEQ ID NO: 102254
  NW_001840859.1_78656-82292:1904-2042
  hypo

SEQ ID NO: 197208 - DNA, 31 bp, Homo sapiens; identical to SEQ ID NO: 102255
  NW_001840866.1_38854-140524:82622-82653
  hypo

SEQ ID NO: 197209 - DNA, 407 bp, Homo sapiens; identical to SEQ ID NO: 102256
  NW_001840867.1_34087-92528:38236-38643
  hypo

SEQ ID NO: 197210 - DNA, 31 bp, Homo sapiens; identical to SEQ ID NO: 102257
  NW_001840954.1_1-14936:6734-6765
  hypo

SEQ ID NO: 197211 - DNA, 25 bp, Homo sapiens
  NW_001841011.1_96346-168555:35644-35669
  hypo
gaccggtttctaagacaaccatggg

SEQ ID NO: 197212 - DNA, 121 bp, Homo sapiens; identical to SEQ ID NO: 34837
  NW_001841051.1_73730-82666:505-626
  hypo

SEQ ID NO: 197213 - DNA, 121 bp, Homo sapiens; identical to SEQ ID NO: 34838
  NW_001841051.1_73730-82666:745-866
  hypo

SEQ ID NO: 197214 - DNA, 121 bp, Homo sapiens; identical to SEQ ID NO: 102261
  NW_001841109.1_139-6923:1787-1908
  hypo

SEQ ID NO: 197215 - DNA, 59 bp, Homo sapiens; identical to SEQ ID NO: 102262
  NW_001841138.1_67124-102688:28425-28484
  hypo

SEQ ID NO: 197216 - DNA, 121 bp, Homo sapiens; identical to SEQ ID NO: 34839
  NW_001841145.1_129149-174453:6132-6253
  hypo

SEQ ID NO: 197217 - DNA, 85 bp, Homo sapiens; identical to SEQ ID NO: 102264
  NW_001841145.1_177495-186900:957-1042
  hypo

SEQ ID NO: 197218 - DNA, 181 bp, Homo sapiens; identical to SEQ ID NO: 102265
  NW_001841145.1_177495-186900:6332-6513
  hypo

SEQ ID NO: 197219 - DNA, 181 bp, Homo sapiens
  NW_001841145.1_40791-55171:239-420
  hypo
ttccgcggggagaatgccgtccgacggtgtcgggagggcgatcgcggtgtgacccagccggaatttcacggacggacacgggcagagagaagccgtccggctcccgtgcacatcagccggcctgtgccctgtggcagcggcagccaggtggcctgcccggagagccagccagcggctcttt

SEQ ID NO: 197220 - DNA, 121 bp, Homo sapiens; identical to SEQ ID NO: 34840
  NW_001841145.1_63352-67863:4021-4142
  hypo

SEQ ID NO: 197221 - DNA, 121 bp, Homo sapiens; identical to SEQ ID NO: 34841
  NW_001841145.1_63352-67863:4201-4322
  hypo

SEQ ID NO: 197222 - DNA, 121 bp, Homo sapiens; identical to SEQ ID NO: 102268
  NW_001841145.1_82-8803:5705-5826
  hypo

SEQ ID NO: 197223 - DNA, 142 bp, Homo sapiens; identical to SEQ ID NO: 34842
  NW_001841145.1_90215-97412:6816-6958
  hypo

SEQ ID NO: 197224 - DNA, 556 bp, Homo sapiens
  NW_001841157.1_1611084-1612812:897-1453
  hypo
tcccttggaagctcctgtagtcgatgagtggtttttctttacgggtgttttccaaaatggctaattcctggaacagatgaagccccgaactgctcagaacagcgcgcagacctcttgcctctctactccccaaacctgccggtggttcctcagtaatcccctgagcacccgcagctcccgggttccctgctgcgcccgcctggagcccaaattccatgtaaggcagggtcgccctcgtgtcccgctgtggctccggtgtccttcccccgtcagattcctacttagaggccctggggggacggagtcatatcgggggacaaacggcggctcaaggtgccttctccggggagattgtctcaagggcaggaggaggcctccccgggcaggtgtggacgggggccccgggcagaagcgtctctcacggtggcccttgtgtccccgcagccgagtggcaggtggcggaggccacagcgctggtgcacacgctggactgctggtccgtggtgcagacaatggtcgtgtccaccaaaacgccggacaggaagctcatctttgg

SEQ ID NO: 197225 - DNA, 266 bp, Homo sapiens
  NW_001841507.1_62-5931:3855-4121
  hypo
ggtctgtgaaccatgtgggtgaaaacctgacggcaacccgagtccaggtctttgtctccgaggaaaccgcccattccctgcgccacggaatcggggcgaatgagtgccccgccggcccacgcagcggctgtgggctgagccctcaccaggcgccggacacttacaattttcccggagggcgggggtcccgttcctcccggaggccgaagaccgctttccctctctgccttcctccctgtatccccgactccctccctcctgccccc

SEQ ID NO: 197226 - DNA, 166 bp, Homo sapiens; identical to SEQ ID NO: 102271
  NW_001841533.1_1-11450:7729-7895
  hypo

SEQ ID NO: 197227 - DNA, 121 bp, Homo sapiens; identical to SEQ ID NO: 34843
  NW_001842224.1_80-3146:1733-1854
  hypo

SEQ ID NO: 197228 - DNA, 17 bp, Homo sapiens
  NW_001842224.1_80-3146:2273-2290
  hypo
gcctccacacctgggaa

SEQ ID NO: 197229 - DNA, 179 bp, Homo sapiens; identical to SEQ ID NO: 102274
  NW_001842432.1_1-179261:39823-40002
  hypo

SEQ ID NO: 197230 - DNA, 322 bp, Homo sapiens; identical to SEQ ID NO: 102275
  NW_001842432.1_1-179261:102975-103297
  hypo

SEQ ID NO: 197231 - DNA, 64 bp, Homo sapiens
  chr1:859736-859800
  hyper
gacccaactccagcccgggccggaataagttgctgccgccggcggagagcggggctgcggagcc

SEQ ID NO: 197232 - DNA, 187 bp, Homo sapiens
  chr1:877475-877662
  hyper
ggggcgggggggacgccgctcattgcgctgccgtccacagggagctgcctcagccgccccccttgctgtcgccgcagaatgcccctcacgtcgccctgggcccccatctcaggccccccttcctgggggtgccctcggctctgtgccagaccccaggtgaggaggcgggtgcgcatcccctgggagc

SEQ ID NO: 197233 - DNA, 269 bp, Homo sapiens
  chr1:935362-935631
  hyper
cgcgcctccccgtgccgggtggagcgcgccgccacggaccacgggcgggctggcgggcgagcggcgagcgcgcggcgatccgagcccctagggcggatcccggctccaggcccgcgcgcgcctcaggccgtttccctatttaaggcctcgccgccgcggggtgtgtgaacccggctccgcattctttcccacactcgccccagccaatcgacggccgcgctcctcccccgctcgctgtcagtcacgcctcggctccgggcgcggcctcc

SEQ ID NO: 197234 - DNA, 360 bp, Homo sapiens
  chr1:935691-936051
  hyper
gggccgggtgatcccgcgctccccgatgcagccggggccgagcaacgcgccgggaggggccgctgggggcgaacggggcccgggacccccggggctgggcggagtctcggggctcactctcccgcccagggggccgggagccggggctggacggagctggggctgtggccgcgcgggaagtcgggaaggaaattcccccagtggcgcagggtccggcggcgccgaggggtgggcgagcctcggtctcgagcctcttggcttcctccgcccgtccccactccggtcccggtttgggccctgctcggtctccgagtttgatccgacaccggctcggcctccgggggtcccaccctcaggtgt

SEQ ID NO: 197235 - DNA, 392 bp, Homo sapiens
  chr1:955508-955900
  hyper
cccggcgcggcccgcgcgctcctccgccgcctctcgcctgcgccatggccggccggtcccacccgggcccgctgcggccgctgctgccgctccttgtggtggccgcgtgcgtcctgcccggagccggcgggacatgcccggagcgcgcgctggagcggcgcgaggaggaggcgaacgtggtgctcaccgggacggtggaggagatcctcaacgtggacccggtgcagcacacgtactcctgcaaggtgcgcccacccggaccccggcctcccctcgcgacgcctgccgccccgccgggacccccgccccaggccgtgggaaccagccccggtcgctccgcagcccccgctccggctcccttggcgaccgccaagccccgggagggggggtcg

SEQ ID NO: 197236 - DNA, 154 bp, Homo sapiens
  chr1:999585-999739
  hyper
gtggtaccacgggcgcctgtctggcaaggaggctgagaagctgctgctgcagaaggggcatccgggcagcttcctggtgcacatgagtcagagcgatcctgggggcttcccgctgtcagcgctgacgcaagggtgggacgaggcgcagggctca

SEQ ID NO: 197237 - DNA, 79 bp, Homo sapiens
  chr1:1014973-1015052
  hyper
ctcccggctgacactcgtgccggaggcaaaggtgaggaaaggccggaggaatgtgtggtctcggcgccaggccaggcct

SEQ ID NO: 197238 - DNA, 156 bp, Homo sapiens
  chr1:1072536-1072692
  hyper
cccctgccccctctgcggtgcgttgggagctcccgtcctcctgcgcacactcagggaaagaccggaggaaccgtggcgggggtcgaggccggcgtggggtgggggcgccaggggggcgggcggggcccagagcccgggacacgcgacgaggggccg

SEQ ID NO: 197239 - DNA, 71 bp, Homo sapiens
  chr1:1510423-1510494
  hyper
ggacgattttgtgcgttccctcggtccccgtggggcccatagtcctcacttctgccaccccagagtcgtcg

SEQ ID NO: 197240 - DNA, 54 bp, Homo sapiens; identical to SEQ ID NO: 34876
  chr1:1510559-1510613
  hyper

SEQ ID NO: 197241 - DNA, 76 bp, Homo sapiens
  chr1:1535610-1535686
  hyper
acgggtgcgggggatcgggggtgggggggaggagggggacgcagcgaggcggccggagtgccggtggggctggggt

SEQ ID NO: 197242 - DNA, 136 bp, Homo sapiens
  chr1:1550765-1550901
  hyper
taggcgacgcagacgctcccgcgtgacgcacttccggtgcttgccctgcccatccccgtggcgggggcgtggccatggcgggggcgctccggcgggggcgggccctgggctcccgcccttcgggtcccacagtttc

SEQ ID NO: 197243 - DNA, 209 bp, Homo sapiens
  chr1:1737747-1737956
  hyper
cgtgactcagcttctatctcacctgcgcaacttcactactaacaaacagagcttgccgctgctgccttccctatcctgtattacgtgatttaacaaaatgaatccagagcttaaaaccctgtttcctgggttggtttttcaaggaagggaatcctccagtccctaccttgttggtggtgtagctgtcccagatgataagtttaccatcc

SEQ ID NO: 197244 - DNA, 44 bp, Homo sapiens
  chr1:1747214-1747258
  hyper
catggcgtagatcttggccaggtgcccccgcagtgtcctcctcg

SEQ ID NO: 197245 - DNA, 143 bp, Homo sapiens
  chr1:1850719-1850862
  hyper
gagcaaagcccggcggcgcggctttatggggccccgcccaccacaggacacacccaccacatgacacgcccacagaacgcccgctcagagtaaaccccgcccaccgggccccgctggccgcaggccccgcccacaggcgcaca

SEQ ID NO: 197246 - DNA, 41 bp, Homo sapiens
  chr1:1935024-1935065
  hyper
ctggcacagctttccgggaaaggcgtttcatatgggacgga

SEQ ID NO: 197247 - DNA, 647 bp, Homo sapiens
  chr1:1981169-1981816
  hyper
aggggcctggagggcgattgtccagatcaagcccctcgagtaaggcccgagaggctgtggcttcagaaatgaaggtcatgggcgactcgggccaatgccgcgtccttgacctgggcgaagtgagcggttgcactcacgagtgtggacggcccttccctacaggggaccttggattcgctgggggcggagtgggggctggggcccagagaacccgagtccggacgctcccgtccgtgaccctggccgggttctccgctcctcgcagcttcagtccgcaagtgtgagatgtcaggggacccctggacggcggggccctcgggctggcagcgcgcgccgcaggagtttcgattcggagggtctgggcgaaggccgagaactcgcgtttccagcgagttcccgggggcgccgctccgtcccagaggccggggcccctccggttgccgggcagagccgcgccgcgcgcggtcccattggcgcaggtgcgccgcgccccgcccaacaggtagccccgcccgacaggtagccccgcccgcgcctcgccattgggccgcggccgggtgtcccccgaggattggcccaggtggcggccccgcctcgccctcattggccgcaggtgccaccgcccgccccgggaccgcccgccccgc

SEQ ID NO: 197248 - DNA, 290 bp, Homo sapiens
  chr1:1981817-1982107
  hyper
gattggccgctggctccacctcggtccgccatgttcggacaccgccccccgcccccgccggacggtcccgccccgcgcgccccccgctcccgccccgcgcgccgccggagttccgcggagttgaccgggtcggcgccgtcggtcctgagcgctgccttccgcgttccgccgcggccccacctggagcccccgccccgcgccatggccggagctcccggggcgcagcgctgacggcggcggggggagcgcgccatgcccagcaggaccggccccaagatggaagggagcgg

SEQ ID NO: 197249 - DNA, 204 bp, Homo sapiens
  chr1:2136135-2136339
  hyper
atggacttgtgctaaactggctacgacccctccggagcagggtcctgggtaaatcagcagtgagctgcaggctcagccagccgccgcctttggtttcctcccgccgccggctcaccccacctcagacccgagctagctctccagcctggttcctctgccggaccctcctcccgggcacctcccacgccccgccctcaagccccg

SEQ ID NO: 197250 - DNA, 109 bp, Homo sapiens
  chr1:2165786-2165895
  hyper
tgggctgggtccctcgccttctggggcagcagggtcacggtgggggggctagtcctctctttcagcatcttgtttctcagccgtccctgcggctatttgtgcaatgtct

SEQ ID NO: 197251 - DNA, 171 bp, Homo sapiens
  chr1:2165999-2166170
  hyper
acagccccagcttaggttaggccttcactgctgctggcagggcctccagagagaaggcggtggttccggggcctgggccctgactgtctggcaggaggtgtccacgccggcggcccggctctctgtggcaataatgtgtctctttctaaggattgcgaaagttgagggagg

SEQ ID NO: 197252 - DNA, 373 bp, Homo sapiens
  chr1:2457940-2458313
  hyper
cggaagatctcgtcggggggcagcgtgatgctcttgtccagactgtccccgctgctcccgctgccgctcgctccacactccgccattttgaaagtgcccggccagctcatcagccatggagatatatgcgcatatatttgactgccaaacgccccctcgcatagattatgttaatgaggcgccggccccgccccttccctcccccacccccggcctctgaggtctcggccgctacagggcgagctagggccagtgctgggcaggggtccgagaggcccggggctgcgggcgggcgggcggttatcctccagagatcgcgcatcagcacagaacatctggactgatgttcttttaccgcgctgtccacaggctt

SEQ ID NO: 197253 - DNA, 208 bp, Homo sapiens
  chr1:2460598-2460806
  hyper
atatcatagaaccccgggcggccggggacttcccagaagtcacttgcttaaatgcaaacacagaacaaccccatggggtcagacacttggcagaagatgggccctgattgtcctaaaacggcagggactctgcacacacattctctgagaatggggctcctgcgggccggccagcttggggccagagccttccggagaagggcgcgtc

SEQ ID NO: 197254 - DNA, 413 bp, Homo sapiens
  chr1:2460898-2461311
  hyper
cccgccgggtcaccagggccgccagaggccgcaggcgggctggtgcgcggcggcggcggcggcggtggccttggcggagagcgcgggcgggggcgcggcgcccggcgccttgggctccttggcgggcgcggcgggcgcggccgggggccgctggaagtggtacagcagcttcatctgcgtgtcgctggcggcgtggagcgtcaggaactgcacggcctcctgcaggcaccacgagtagccttcgctgtagtcctggtgcaggctcttggggccggcggcggcgacgaaggctgcggggagacgcggcggcggtgagcgggcggcggggcgcgggggagccggggcgcggtgggaactcggggcgcggggggcccgggcgcgctcacctttgctgtgcttcaggtagctgacag

SEQ ID NO: 197255 - DNA, 457 bp, Homo sapiens
  chr1:2461988-2462445
  hyper
ccttttcccaggccgccaaacgggaggggggcaggaaggagggccccctcccccgccctcccctccgctcccctcccctgcctctccccagcggcttcccactgctggctggcagaggccgtaggagcagataagggaaaaactgtagaatgaacaagtgccacggcttcctgggggatgggcaccttccctgactgggacctgctgcccctccaggggagggggacagagggggcgacgctcttaggatcagtcctacgtgcctatattacaagccccctgactgtcacctgggactcctgacttctccagacctagaaaatgggccttgtgccttcctggctgggctccgggcagctccaggaagctggggcccgtgctccacgtggagcccggcacccggcagctctccccgcggagccgggcacccggcagctctccccgcttcctgcaccct

SEQ ID NO: 197256 - DNA, 71 bp, Homo sapiens
  chr1:2477791-2477862
  hyper
caccactgcctggcgcccataaagacgcctccaccacctgcgccgccgccgcctcccggccgccctccgcc

SEQ ID NO: 197257 - DNA, 116 bp, Homo sapiens
  chr1:2517411-2517527
  hyper
ccccaaggtttggcgggttaaaagctgatatgcaaccggcacgacatgaacagtatttcatgattaaagacatcgcgtccatgtataattgagatgctgccgcatttgcggggatt

SEQ ID NO: 197258 - DNA, 360 bp, Homo sapiens
  chr1:2574297-2574657
  hyper
tgctgctgggctcccgcagggcacagtgtggcctcttctgccagctgtgagcggcgctgagcagggcaggggctcgaaaccccgtccctcgcctgcggtgcggcccgcgggaccgcccctctccgggcggaggcacctgaccccgacccgtagttcacggcccggggtggtagtgaagcctcggcccgcgcaggacccgcacatttgggccgggtccatggcagcaggagggcgaggccccgagcagctgtcggaccccgggagcccccaggccgccccagtggggaagggcgctcaatccgaccccagactcccctgagcccgcggctcgggccgcgcaggcgcagtgccacccggagg

SEQ ID NO: 197259 - DNA, 316 bp, Homo sapiens
  chr1:2984307-2984623
  hyper
gagggcaaggccaggagcctcgcggggcggcgcagagaccccgcatcgcgggcgcgacccctgcctcgggctcaggctgactctgcggcagctccaagtcccgttgccgggcaggacttcggtgctccggaagggtgcggggcagcaacctggccagggcagcgcctcggtttccttccaattcattctcgattcccagatactcagatgagaaatccgcactcaggccgtcaggctcctgggcccgggccaccctgcctgcgctcagcccggcccctccgccgcagcgcctcggagtttgggggctacaggggaa

SEQ ID NO: 197260 - DNA, 56 bp, Homo sapiens
  chr1:3325182-3325238
  hyper
catgagtgtgggtgcgtgagctggtgcctgtgttggcatgtgtgagagtgtgtgag

SEQ ID NO: 197261 - DNA, 320 bp, Homo sapiens
  chr1:3370942-3371262
  hyper
gcaggcgactcccgggccggcctcgagggggcgtgggcgcggggagggaaggcgcaggcaccgggcggcggcggctcggcgggaatcgagaggcgcgatccagtccgggcgatcacgtgggctccagccggcccaggtggggctgtgacctgtgacgcaggcggcgccgccacaggtgcccgggacgcgccccgccccctccccggccctccccgcccgggccctcggacccggagcagccccgcccgcccagcgcccacctgcggggccgcagccgccgccctccagccagaccgcgcaggaagcggaggaggcgcccc

SEQ ID NO: 197262 - DNA, 523 bp, Homo sapiens
  chr1:3447461-3447984
  hyper
actcctcagcgcccacggaccctgtcccagaagcaggcgcgcctgccgggcactgccccgccctgctccctccagcctagcaggcagcgccctggcgcaaactttaaaaacaggaaacaaagggagcgcgccggggagcgccctggccccgcccgccctgcccaggctcgcccggcgcccacctggcctctggtcaccggcgctcacggggtagccggcctggcccaggtgacatgggtagcagcccctccagaggtagcggtagtgcgtgcccgcgacgcgcgccaggccccccaggagcccaaggcaccagagcgcggccagcccgcggtcccgggacgcccccatggcctggtaggccggcgggcgggagggggcgaggaccaaccgcgctgcgccctaagccggcggccgggcgacggggcaggcggctcgggctggttctgggttccgggcgggcgcgcaatcccagccccgggatccgctccgctcggcgccgcccgggagccgctctgggccgggc

SEQ ID NO: 197263 - DNA, 35 bp, Homo sapiens
  chr1:3448359-3448394
  hyper
gtcctggccgggccgcggggcgggggaggggggcc

SEQ ID NO: 197264 - DNA, 139 bp, Homo sapiens; identical to SEQ ID NO: 102392
  chr1:3528466-3528605
  hyper

SEQ ID NO: 197265 - DNA, 48 bp, Homo sapiens
  chr1:3540867-3540915
  hyper
acacatgttccacctcgaactgcgagcgctgaccgggatctctgggca

SEQ ID NO: 197266 - DNA, 260 bp, Homo sapiens
  chr1:3541193-3541453
  hyper
acctgcgctccagaaggccgaagggggcatcccacttgcagggcgggtcacccgctttccccgcgggccaaggggctccaagattcccagcccctccttcccagccgctccgcgacaccctggcaaccggcttcggccccgccccttctcgttgtgtaaacaggaagtgagcctgcgcgtgacggtcgcttccggcccggcgaggggcgggagcgattgtgaacggcggcggggcagagccaatcgcggaaaacggcagg

SEQ ID NO: 197267 - DNA, 181 bp, Homo sapiens
  chr1:3663335-3663516
  hyper
cctcgacccccgaccgagggacccgtgggatctgcgctcaccgccctgcgagcagaggcgttcgtgtcggagcccccacacctggggagcggggagctgcggtccctggttgtcccacaggagaagggggagggaacggggcaggcggggaggatgagcgcttccgcgtgcagcgggggct

SEQ ID NO: 197268 - DNA, 116 bp, Homo sapiens
  chr1:3663983-3664099
  hyper
ggccttcggtgcagacccagggccaagtcgagggaggctccgggcgcggggcggggtcttgggcgtgggggcggagcctgcgcggggcgtagagatctgacgggtcccagatgcac

SEQ ID NO: 197269 - DNA, 144 bp, Homo sapiens
  chr1:3713029-3713173
  hyper
gccgccgccatggcgcctcagctgctggcaggcacccacccaccagggtgcttccggggcagcgcgcgccacttccgacctgtgccggaaaagcccatagagaagccacctggctgctagagtgccgccgcgcgtgccatagag

SEQ ID NO: 197270 - DNA, 203 bp, Homo sapiens
  chr1:3816828-3817031
  hyper
cgcgccgcggcggcgtccgacgtcagcacagccaatcacagtgcagcaccctcgtcatgtgattccccccccccccccccccgtgttggctctttcgtaagcggcgggcgaaggtcacaggccttgggccagtggtgggacactggagcaggaagtcggcctgtggccggccatgttcatgagggcgcgtcccttggcacccc

SEQ ID NO: 197271 - DNA, 272 bp, Homo sapiens
  chr1:3817822-3818094
  hyper
ggttttcgtcccccgttacgtgcaaggcgggaaatgacccctccgccgtcccgttactctccggggccaacgtggactcgcaggggccacgccttttccaatggccacgcccctagcaggcctgggtggacccgcagcggccacgcctcctccaatggccgcgccctatcaggtctggatggacacacggcggccacgcctcctccagcaaacacgcccctagcaggcctgggctgctgtgatgcgtcctctttggccgccgctgagggagg

SEQ ID NO: 197272 - DNA, 144 bp, Homo sapiens
  chr1:6052048-6052192
  hyper
ccaaacggcacccagcggccccgaccccaagtgtcccgacgaggggggacgcctgcgactaacgcggggacagcccccgccgcgcgccaccgccgcaccccaggcaccgggcccccacgcagggacggcgtggaccaccctacc

SEQ ID NO: 197273 - DNA, 55 bp, Homo sapiens
  chr1:6086204-6086259
  hyper
tgtctcctgccccatctggccgctgctcatccaggaaggtcggagatgtcgggcc

SEQ ID NO: 197274 - DNA, 109 bp, Homo sapiens
  chr1:6086291-6086400
  hyper
agagcaaaggccacgccccgacaccccacggggccctggcgcgccaggcttctcagccctgcggcggcagtgcatagctctggcacgcgctgcaccaacttcctgttgg

SEQ ID NO: 197275 - DNA, 83 bp, Homo sapiens
  chr1:6137223-6137306
  hyper
tgacagagcgacactccatctcaaaaaaaaaagaaaagcatgttttgaagaacagcatgggaaaggcccgtgacagccaatgg

SEQ ID NO: 197276 - DNA, 216 bp, Homo sapiens
  chr1:6265333-6265549
  hyper
gagctcacaaccagcgaaaggcagggctgggattacagggcgtctcactccgcctcccaagcgctggaaagtcggtggaggggcgtccgctgctctctggcgcccccaattggccgccgaggaaatgaggcggcgatgacctgttcagacccaaatgggatggaagagtggggattagcgggggtagggggtggggtttggactcttttttttttt

SEQ ID NO: 197277 - DNA, 695 bp, Homo sapiens
  chr1:6265789-6266484
  hyper
cgtgagccaccgcgcccggcctacccttgaagaccccgcagccaaggtcctccggccccgctctgcgcggcgctctggtcttggggctccggactctgtcatgccgggcaggggccagtccgatccttgcacccttgcctggcaccgtccctggagccttggcgtcctggcctctcctccccgcgggctggaggtggagtggccgggccggaaccagtgcgcaaagcagatggcgagcgcggaggtcggttcggccccgccgcgcctcaaggcagcagccaccctggggaaggtggatgccggaagaggcgtcgcctgcgggtcacccagaggacacccggcggggaattccgagggtgggagtgaggagaggtaggagaggccacggcagagggaggccccgcgcagagtgggaaccatcgcccggtgcgggcctgaacttccagggccggctactcctcggcagagcgaccgcgcggtgtctcagagcgcggcccggagccgcactaagagcgctggacggcgggagagaggctcggaggaccggtagctcccagcaaagcggcccagcgggtaggtacaaggccccgcccctcgccagtcctcactgcctgttctccctgcgccggggagctccaggccccagccctaacctgggccctagcggctccccactccatgacctctggacgccc

SEQ ID NO: 197278 - DNA, 72 bp, Homo sapiens
  chr1:6266713-6266785
  hyper
gtttccacgacttctgtgccggctgcctgcgtggccgcgcgaccgacggccgcctcacctgcccgctgtgcc

SEQ ID NO: 197279 - DNA, 161 bp, Homo sapiens
  chr1:6296163-6296324
  hyper
ccgcccgcccctccccgcccctcggggacatccgggctctgagccagactctgtgccgggcgggggccgggaagtggtgggagaagtcgccgcccgcgtctgtccaaacttagtcccaaactcaggaggttcctgtcccaagaagcaatgtaaagtttgaa

SEQ ID NO: 197280 - DNA, 215 bp, Homo sapiens
  chr1:6321178-6321393
  hyper
ggcgcatgtctccgccggggcctccgcaccgcccctcggcccgccccgcccccgcccgctcagaggcgcggccgtctgtcggtctgtcagcccgtccgtccttccgtcagtccgtccgtacgcagcccacccgtgtccccgcgtccgcccgcggccggcccgagcctccctgggctggtggcgcctcctgacagcgccgcgcccctggctcccag

SEQ ID NO: 197281 - DNA, 218 bp, Homo sapiens
  chr1:6474514-6474732
  hyper
cctggaccagctgccgagcccctgctccctgctgccccccaatggacctcgggtaacaagacaccacgtgtgtggggcgtgttctctagatccgttctcacgatcctgaaaccattattgagccttacagctgctttaagcgcccggggcttcatcagagcctttgaaaaccccaggtgaaactagttactcactgggaagcctcggtgtgtggctgc

SEQ ID NO: 197282 - DNA, 218 bp, Homo sapiens
  chr1:6479998-6480216
  hyper
gagctttaagggagcggctcgcccgccccgccccgccccgcggagtccggccgcccgctggtcccacctcctgcctttgttcctgcgcagggtggagccgggaggggagaccgcgacgcccccggggatcccgctccccgcctttgcgtcctgtctaccgcggggtggcggcccccagttttccccgagcacctgcgggagagtggtaaaggcgccat

SEQ ID NO: 197283 - DNA, 73 bp, Homo sapiens
  chr1:6507053-6507126
  hyper
ggcagagggggccctggaatcgctgagttcccaacgcagactgttggccccgcccaaatccacaggacaggtg

SEQ ID NO: 197284 - DNA, 108 bp, Homo sapiens
  chr1:6545271-6545379
  hyper
cgcggggcccatagtcacgggcaccccctccctggcctcccgcacaggactgggcggctgcaggcgagaactgggcacccagccccgttcccgccccgtcccggcccc

SEQ ID NO: 197285 - DNA, 246 bp, Homo sapiens
  chr1:6545639-6545885
  hyper
ccccccaggaaggcggacacctccctcccgcccgggccctcgccacccagccccggggatccccgcctccccgcccgggaacccctacacccccgcctccgcctgcccgggcgaccccccgcctccccgcctctgcccagacccggggactccacacccctacctctgcccggccgggggacccccacagccccgcctccgcccagtccccgggacccccaccttcccacctctgcctggcccggg

SEQ ID NO: 197286 - DNA, 236 bp, Homo sapiens
  chr1:6545931-6546167
  hyper
tctgactccctcctcaacaccaatgccgggctcagagggctcctcagaacttgctctttctcctggggagctccttgaatgctggaggcagggggcgctggtgacacccccccccaccttggagactgtggagcccctcccctgggtgactcgatccccgcccagccctgggggtgcccactctgctgtggtccccacctcaccctcagcgccaacacgcacggtccctcccagcc

SEQ ID NO: 197287 - DNA, 280 bp, Homo sapiens
  chr1:6546475-6546755
  hyper
ccagggacaccccctcacaccgactgctcactgcccaggtacggcagaggccgagagccaaaggccggtggcctctggaaagggccgtgggcagaaggcgggctgctctgagaggctatccttggcagcccccaggagctgggtgaggtggaggcatcaggaaaccctggcgacccacatggcacagcagcccaggtccctgcagttctaggccaggtccccaccgccagggggcactcagcaaagcctgagaggacgcaaacgcccagactctggtgct

SEQ ID NO: 197288 - DNA, 163 bp, Homo sapiens
  chr1:6663518-6663681
  hyper
gtttttttcttggcgcatttataagcgacccggggccggattccaggagtcggccccactcctgtgttcctgaaggagcttctgactcaatcacacaggcgttaactttagtcggcttcacgcgcagttgtagtttccgagtctgcgtcgcagctgcaggctc

SEQ ID NO: 197289 - DNA, 133 bp, Homo sapiens
  chr1:7831038-7831171
  hyper
cctcacttatccacgcagtccctcgccagtggctaatgcaccacgtttacagaccacgtccccaagcgccagcgcggacggcggtgcggacagggagctgtattgacctgcgttctgcgtttcagagcccgga

SEQ ID NO: 197290 - DNA, 123 bp, Homo sapiens
  chr1:7843509-7843632
  hyper
acgggcggtgaaaaccgtgggaacccagaaagacggccaaagcacgatgaggaccgctgccggcagcccgccccaccctgggctcctccccacacccgctcgggcagccgggagccacctaca

SEQ ID NO: 197291 - DNA, 40 bp, Homo sapiens
  chr1:7843653-7843693
  hyper
agcgctggcctgagccgcccctgctcgcccccagtccccg

SEQ ID NO: 197292 - DNA, 188 bp, Homo sapiens
  chr1:7844213-7844401
  hyper
cttatataacccgggcgcaccggctcgcgccccgccccagggccaatggaggcctgcggagtcggccccgacgaccaatcgcacggcccgggggcgggaccggtcacgcggcggcagggggcgcggcgccggctgctgaccggcacgcggcgagcctcgagactgcgcgagggcggccccgggggcga

SEQ ID NO: 197293 - DNA, 130 bp, Homo sapiens
  chr1:8085555-8085685
  hyper
ggcattaccatcgtcgctgtgagattaggcagagggagcggggctgaccgccagagaaccggtaccaaccaccgcaagcaatcgccgagcctcccaccccagctttcaagacaggatttacgggtacacg

SEQ ID NO: 197294 - DNA, 163 bp, Homo sapiens
  chr1:8085715-8085878
  hyper
acaaataaaaaaaaaatcaaacaagcccccaggcccgaagacgctcatccccgccgggcaaccccgcgagcgcaggctgcgggacgaggaccttcatgctcgccgctcccgaacccccgtccgctcctgcggtcccggtgctgcggggacgtatcccgggcgc

SEQ ID NO: 197295 - DNA, 154 bp, Homo sapiens
  chr1:8085938-8086092
  hyper
ggcggcgggcgccggcacttcgcggcgtccccaggcccgggctgcgccgccggggagggtcccgctctccacacctcaatggggagaagcccgcgagcgaccggccggcctctccctccatcccagagactccgcgtcgcggcgaccctccccg

SEQ ID NO: 197296 - DNA, 382 bp, Homo sapiens
  chr1:8086418-8086800
  hyper
tgaggtcgccgcgtcccgccccgcctcctcccgcagccaatcagggcgcgcgccgcttaaaggggcgatgccgtggccgaggcgttgcgccgggcccaccgtggcgtatcgcggcgctgcagggagccggctttgtctcccggagaggcgtctccgggctgaccgcggccgcagctccgctcctctgcctgagccgtgcggcagccctgggagcctctcaacgccgagctttcctcagaagcccgcggcgacccgggcctcggccgctgttcctgcccgaactgagggcacatcgcgcttcgcgcgggatttcccataaattcaggctccgggcaagattgtgtgttttttcctctccgcgggccgccgctggccgtgtggg

SEQ ID NO: 197297 - DNA, 255 bp, Homo sapiens
  chr1:9188651-9188906
  hyper
ggggtcggcctgtgtcgggggctcctggaaaagcagcgccaccgccacccacctgacgacatggaaggcccaaagcaggcgatctgtgcgaggcccgcgcgcggcgcggacgatgctgaggtacaagtagagcgcaatggccacggtccagaagaaggagctggtgttggcgaaggtggacagcgcgccctgcagcacgcagtcccacgacgggcccgcgaagttctgcagcactccgtagaagtaggaggcggc

SEQ ID NO: 197298 - DNA, 279 bp, Homo sapiens; identical to SEQ ID NO: 35016
  chr1:9188943-9189222
  hyper

SEQ ID NO: 197299 - DNA, 189 bp, Homo sapiens
  chr1:9352965-9353154
  hyper
gctcgggcagcctgcgcgctcgcagcaggaaccaggctccaggcgccggcgccggggccggggccgcggggaggaggcgacttcgctccctgcggcgggcgcggcccgggcgcccgagcctcctcggccttggagagcagcggcggcggcggcaccccgggcgcggtaggcggcgcggggcacctggga

SEQ ID NO: 197300 - DNA, 68 bp, Homo sapiens
  chr1:9353809-9353877
  hyper
ggcgtgtactgggctcggtggcgtccaggttccggtgaggacgggacggccccgagaggagggtgcgg

SEQ ID NO: 197301 - DNA, 165 bp, Homo sapiens
  chr1:9489050-9489215
  hyper
tctgagagcgccacgcgcggtcccgaaaacctgagcaccctctggctaaggcgttgctgtagagacggtgcgccagccccgcccccgaggcgggattggaggaaaactggacagctgacaagggtgacgtttcgaaagcgcgcgggaggccgtgctgggacgcag

SEQ ID NO: 197302 - DNA, 116 bp, Homo sapiens
  chr1:9600331-9600447
  hyper
gcttgcggccacacgcggggtggctaagccagggacccgaactcatatgaggtctggaaggtgtgttgagacacttctcgccggctggtagacgcttccaacgccagagaccgcag

SEQ ID NO: 197303 - DNA, 287 bp, Homo sapiens
  chr1:9711787-9712074
  hyper
cactcgcgcccagcgcagtcgctccgagcggccgcgagcagagccgcccagccctgccagctgcgccgggacggtaagcgatcgccgctggctgcgtcaggggaggtgggaagaggaccgcggccaggggctttgggagctgcggctgcgctcgggggcgcggggctggctggcgggcgtctctccggcacacacagcccgtgcgccctggccctgggcgcctccccgagtctagcgagccgggtcctgggagccccgggggccgggctgctgggacctgggcgggg

SEQ ID NO: 197304 - DNA, 154 bp, Homo sapiens
  chr1:9747557-9747711
  hyper
ggtcccagctgccctcggatgtctgctgcaccgctcccctccctcaggcgggggacggcaggaaggagggagagatgggagggcgtgggggcggggccgggggcggtctccagcccccggcccgggctccgccctctcccgggatctgtgaaag

SEQ ID NO: 197305 - DNA, 151 bp, Homo sapiens
  chr1:9749327-9749478
  hyper
ctggggctcagggtgcgaaccccaagggccccgcctggcagcgtcctgggcctccgggcgagaacagcgggggtcggggaggatttgcagcgtccactcctctctccgccgcccgtgtgagctcgggcgcttctcccggctgggggtgtga

SEQ ID NO: 197306 - DNA, 263 bp, Homo sapiens
  chr1:10057109-10057372
  hyper
gggggaagctgccgcgcggtgggcagagccaggagcaccgggctgaggcggccgggagcgcagcggcttctaggggtgagtgggacccacgcggccccacctgctcctcccgcgcgcggccccacccccctgccccgccccgcctggtttataggtcccggcccgagcctccggccgcccgccgggtttgtcccgcgatccccgaccatgcccgccgacctcagcggtacttggaccctgctcagcagcgacaacttcgaggg

SEQ ID NO: 197307 - DNA, 175 bp, Homo sapiens
  chr1:10271266-10271441
  hyper
tgcagcccggggggcggctgtgcttcgtttgaagccatcgtttctcattttccctctcccctttcctcctttgtggtgggcatcgggcttcggctgggaatgtggttatgccctttgccagatggcgataggaaaggtcatcgcttggcgctgggggagccgagggctcgaggcc

SEQ ID NO: 197308 - DNA, 264 bp, Homo sapiens
  chr1:10532637-10532901
  hyper
gtgagaccagggcacgccgggaaatgtagttctagttgccgctaatcacgtgtggcgtcgaagcatgccggaaactgtagtctctgggtttaaagccgctttcgttctatcgcgcgattcagcctaggagttgtttttaacttttaggagctgcattcgcgcgttcaaatataaggccaatagagacttattttgcatgacgatgcacacgcatgtatactgtattgaatttttagagcattcctattcgcatatgagatgcat

SEQ ID NO: 197309 - DNA, 502 bp, Homo sapiens
  chr1:10853673-10854175
  hyper
caggaggcataagatcgctggaaacctgattactgaagttcaacaatattccccataaactctccttaaccgcctctaaggtggctaacaagaagggggtgggtggcgggggggcggggcggcgatctctccaattcgccggactctggggacagagatggtggctacctcctggaaaggagaagttctccactctgccctgaagagggtccaggagctcccgcgaggggcacaccctaaaaaccgaagtttgggaagtgggaaagcggctgggggtcgggggagtggcgcgggcggccggagattgcgcaggtcgcgacgcccgcccgggacgcaccgcctggtcgccaccaggacgcaaacccggcgctttgcgctcgggcgccgaacggcccagcgccccctccgggcacgtggagcgcagccccggctcagcccccggggaacaactacccccctccccatgcccggcgcagctgctcctgctcagccgggacagctc

SEQ ID NO: 197310 - DNA, 79 bp, Homo sapiens
  chr1:10854295-10854374
  hyper
agattatccggcgatctgttttccagtcccctcgtgcgctctcaccgcgcgcctgtaccagctcggagacgtcctaaat

SEQ ID NO: 197311 - DNA, 1216 bp, Homo sapiens
  chr1:10854661-10855877
  hyper
aagctggggcagaggaacttgtgtggaggaagagggggtcccctgcctccctcagcgctccactagcctcccccaactccggacccgggtcggggatgacttggaagaagaatctgcgcccaccccttagagaaaaatctattattattatcttaatctacgcccccaaagtgtccctccagccgtgattgacggcgcatacacctgttcccttcgcggaggagcttccagcgccggggacagacattcgcccaaacgctccgcagcggcccagcaaccgcccgcccgcccgcgcccggccagcccccgccagcggccccagcgcgcctctgcccgcacctcgccaccccggcggccgccccctccccttccagacccggctgcccggcccgccagctcccggcagtgctggcttcggaaagagagagaaagaacagaaagcaaaacttcctggcggccgacggccatcagctgcacattctgcaaatgccaccgagtaaaaataaaccggccgccgctccgcccgtccggctcaccccgggcgcacgaatcggccccctgccccgggagatccctgactcggtctggcccgatcccccattcccgcgcgccccctggatccccgctccccgacgctcctccgtcagtcaccacgctctcctttgccgttaagccggaccctaagtgaccgggaaaccggctctctccctttggtgttccctgcgcccccacaaactacttttttctctgtccttcaccaggtgcctatttcagccctgtgcccttggattcagggctcctcctccccaattgttgagctccgaggtcaccctcagcccaccctgggggaacagaccccgaccgaccctctcccacgctgcagagcccccccggagcgcaccactctaccagcccgctagcccgccagcccagcgtcccacgtccccgggcgcaacttctcttctggcgcacacaacagccggcaacaactcgcccgaactttccccgggacccaggcgggctccagccgacagccgggcagctctgggccgatgccccggctccccgtgccctgtgttgccagcccttcagctggggaggcagggggtggggtggggaagggagtgaggaacgccacttgccgcgcctggagcagcgcacttgagataaacttcccaggcacagatgaaaaagggggcgccgctccccccatcta

SEQ ID NO: 197312 - DNA, 612 bp, Homo sapiens
  chr1:10856315-10856927
  hyper
cctcccccggagccgcgcgccgggcattcccctggccacggcaggcaacgcgccgccccgcgcccgggtgccagccctccgtgccccctgcctccgcacggccggagttgggtggcagccgccgatcgcaggctggctggctggctcgctcgctcgctcgctcgcccgctccctgctgcaagcggcagccccgggggtggggggggtgcaccgggacagggggagagacggggaggcgccccgggaggcccgcggagctgggggacgtgggggggccgcggcggagggagcgccgagtctcttacctgcacttggggcggctttgggtgactttccaagtccgggggaaaaatgtgtgtgtgtttgggatggagcgccgcgggcgcgcatgcgctgcccaaagttgccggatcccggatttttcgctcccagtctccgctctcgcccgctgtgattatggaattctccgcggccgggcgggcgagtgggtggcatgcaaaacccgggccggatcgcggggccgggctccgctccaccctcacacccccagacctgcccctcccggatccttcccacccaccgcccgggctgagctcagcgtgtgcgcgcggc

SEQ ID NO: 197313 - DNA, 116 bp, Homo sapiens
  chr1:11120532-11120648
  hyper
ttacgttgttgcacggggcgagtagaacgtatccttctttgcgtccaaaatctggttccttgttggatttgaacagattatgtggctcgtcggggcgaaccgagggtttttattta

SEQ ID NO: 197314 - DNA, 52 bp, Homo sapiens
  chr1:11538821-11538873
  hyper
tatcaggaaactcggaggcggggctggggggtggtgcctggcccggaccgtc

SEQ ID NO: 197315 - DNA, 35 bp, Homo sapiens
  chr1:11624042-11624077
  hyper
gactggctagggaaacggcccggcactccctctgt

SEQ ID NO: 197316 - DNA, 79 bp, Homo sapiens
  chr1:11715183-11715262
  hyper
ctggggtcgccatcgatgtacaggggtccgagcccagactttggggggcattttaaggcacagcgtgggaaggggaggc

SEQ ID NO: 197317 - DNA, 115 bp, Homo sapiens
  chr1:11740565-11740680
  hyper
gcccgccggcccagacgcccccgcccccgggcccgcaggtccagcctccctaccttggccaaagttgaggtcttgtcgtgtgagcgtggtcatccttcccgctacctgagtgttg

SEQ ID NO: 197318 - DNA, 37 bp, Homo sapiens
  chr1:11751778-11751815
  hyper
cccgggcacatcctccggctgcccgcgcacctctcca

SEQ ID NO: 197319 - DNA, 178 bp, Homo sapiens
  chr1:11866366-11866544
  hyper
ctgctgcggtgagcgtgagacccgcacccccgaggagctggtaagaagccggcggagtcggcctggggagggggcggttgctaagggactgagagaggcgttgccgggggtggggccgggccaatctgggcccgcaggtggcagcgggtggggcctggggaccgcagccagggctctc

SEQ ID NO: 197320 - DNA, 206 bp, Homo sapiens
  chr1:11994683-11994889
  hyper
cactaggcaggcgcgggggagggcgtggaggggcggggtggtgccgcccccggggcgggcccagtgcgtggcagcgggacctgcggccccgtcgcgaagtttccagccctgcgagcgccgccgggtcggccgatcgtcccccatacctcggccatgcggcccctgctgctactggccctgctgggctggctgctgctggccgaagc

SEQ ID NO: 197321 - DNA, 132 bp, Homo sapiens; identical to SEQ ID NO: 102580
  chr1:12079273-12079405
  hyper

SEQ ID NO: 197322 - DNA, 66 bp, Homo sapiens
  chr1:12123950-12124016
  hyper
attcattcattcagtgtgaattggactgagagcactgccatacgcgggaggcgctctttagcccgc

SEQ ID NO: 197323 - DNA, 518 bp, Homo sapiens
  chr1:12226890-12227408
  hyper
gacgctggaggtatcggcccagcgatgctggagtggtcgggtcggaggcccagcagcgtctggggaggggcgtgggggaggcgtgtccaaggccggctggccccgccccgccccgccgcctggcctctggcccgctggggcgcgggctttcgctttcagtcgagggctagcgagcgcagcggagcctggagagaaggcgctgggctgcgagggcgcgagggcgcgagggcagggggcaaccggaccccgcccgcacccatggcgcccgtcgccgtctgggccgcgctggccgtcggactggagctctgggctgcggcgcacgccttgcccgcccaggtgggtgactcgcgcggcccacgggggacagccgccccgcatgtccacccggctggtgcgcagccttcgggtgcccgggccgcgctctcccggggcgctgtcacgggctgggaggctgggagtcccagtcgccgccccccatccgcatcagacacgcgcgcctctggggacccgctggggac

SEQ ID NO: 197324 - DNA, 206 bp, Homo sapiens
  chr1:12227438-12227644
  hyper
caactctggcccccgaagcccctcttacccgcgtcgtgacaggggcgcaccctggttcctccgcgagcgcaggccggggcatttggggctgagcagcgggtcctgggcagacccccgctagacccgggacccctcttccctcaccccggcgactgccgcgacagcccttccctcccacgcggtggagaaggggctgtgccggggcg

SEQ ID NO: 197325 - DNA, 360 bp, Homo sapiens
  chr1:12677437-12677797
  hyper
gtaaaccgaataaggaggagagaggcgtcccacctggccactcttgaaatcacctcttcccaaatgcaaagcaccgggtgagaaaaagaaaaaaaaaaaaaaaaaaaaagataaattctcctctgggggagaaaaagcgtctcctaaggttgggacggtaaaagaggtggagggggaagccggaggtggaaagttctaacaagaagtttcttgccccagcagccgtttcggctggggaattctcaggtaatgtttacagactgacagaggagtttagggaggggaagaaaaaaaaaaaaaggcaccaaccacacgcgcgcaccctgcctcggtcccgcggtttcaaagtgcaagattaaa

SEQ ID NO: 197326 - DNA, 619 bp, Homo sapiens
  chr1:12678157-12678776
  hyper
gccttctttttgtcctttccaacttggagagggtccgggtgtggagcgcgcgtggatcggacgccttggtctgcgcggccctattcattcgctccccgggcagccgcgtcgcggagagggcggcccctttttcccccattttttcaataccccattaagtctgattgacagttaaagttgttgggaggcttcactaccgttcctctgagtggctgctgcggcctcccctccccctgcgccgtcgcggggagcgcgcataaggcgcgcactcgggctcgccgggactcgcgctctcccgggactggctcccctctctgcaagccgggacttgccgccggtgtccctgagggctcgcagctgtaactcgaacacgctggaaccgactccggcgagccggctgccttctcgagacgttcctccttgcccgggccgcccgcgggccaggtgatcaccccgagtgtggagcaggcccgggggagcttgcgtatgccttgatccaaccaggtcacccagggttttatttcaggtcatttggtcatcctcggcctccaggtaggatcaggaagccactcctcacctttgctcggacctcttctgtgttcacgtagagtggactttt

SEQ ID NO: 197327 - DNA, 304 bp, Homo sapiens
  chr1:12679083-12679387
  hyper
cctcctgcccttcccgaccggaatgtctcccctgctggagggtgggaccgagctatttagagttgtctgttgcaggaagtctgggaggtgagtcactaaaaagcagccccagttcaaagtgctgatgggacttgcctcccgcccccctgcacgttcccggggccggaggagcgagagcgaagcagggagctgccctgtaatctggggcagccgtttccagcccgcgacttgttcagacggcgattcctgggcctcacccccagagattctgattcagcagggctgggtgcgctgggatcggtac

SEQ ID NO: 197328 - DNA, 264 bp, Homo sapiens
  chr1:13840257-13840521
  hyper
cggactggggagccgggacagcagggatggagaggggaggggcggggagggaggggcgagggactcaccaaagggtttacccggacaggaaattaacccgctagaaaaatctcttgggagaggcgggagcggcaggggtggccgagtggccgtcgccaaaacgcggccccaccctggcagctgatttccgagatctggcagtaagacgccgcgcgcaccgggcgggctgcactcgacgtctaagttcagctaccaagcccagga

SEQ ID NO: 197329 - DNA, 108 bp, Homo sapiens
  chr1:13910927-13911035
  hyper
gtggctggggtttccttcccatagagcggtgtgttggaggaatacgcacgcctcgggagaagctggcctcgtagaatcaggagggacgttcaggagggcttgggccaa

SEQ ID NO: 197330 - DNA, 161 bp, Homo sapiens
  chr1:14075414-14075575
  hyper
tcttggtctggaacgcgcgctagtcgttgtctttcagcactccgctttccacaccgcacgcttttcagttatgctttacatttctcctcgacttagatttcgtgagcaaaatgggcccatgttttattttttctcgtgcgtgggccgtcgtgaggctttaa

SEQ ID NO: 197331 - DNA, 184 bp, Homo sapiens
  chr1:14926204-14926388
  hyper
ttggctcagttgcatctggactttattttcttctcatttgaggtctctcaggcattggaatctatagatgcaacagtagatgctcagctcagcagggagtttaaatttccgcaaatataaacaccgagagcactttccagggggatactgtagacctcaaaggttgagcggtagagaaatgaag

SEQ ID NO: 197332 - DNA, 507 bp, Homo sapiens
  chr1:15250613-15251120
  hyper
cgcgggactgagagccgttcccacgtgagaggctccgcggccgaattcctcgcgtgcagcaggcgcggaccgcccggcgtccggccggactgagagccctggtccggcgcgcgccgccggccgggcgggaggcgggggcgggctcggctgcgccccgatgcggcggcgacctccgggtctgtgagcccggcgcgcgccgtcggagcccctcgcgcagccgctggtagcgtccccccgggcacccggcatgcgggcggccgactcgggctcgtgggagcgcgtccgccagctcgcggcgcagggcgagccggcgccttcctgcggggcgggggccgggcccgcgcggcccccgggacccgcagcctgcgagcagtgcgtggacgcggcggggcccggcgatcggccccgcgccggggttccccgggtccgagcggatggcgactgcagccagcccggtaggtgcgcgcggggcggggcggggcgggcggcgcggacacaggcccagga

SEQ ID NO: 197333 - DNA, 225 bp, Homo sapiens
  chr1:15251274-15251499
  hyper
tcgggggctgcaccggggggccaggaccgcgcttgccggagccaggcgatcccgcggcgcctggagacccagctccgggctggaccccgcgtctgctgggggaagcgtgggaaaggggccagccctgcgcgaagttggttcggccccctgggaccgcacctgtgagccatgtggcggcccccgcggagtgccgaggggagcccccttcaccgccgcccctccgag

SEQ ID NO: 197334 - DNA, 94 bp, Homo sapiens
  chr1:15251580-15251674
  hyper
gagaaattgcagaggtggagacacaaacgcagtgatctaattgcgtttggttggcgaatccgccccaagtggagaacagcgttttactgttaaa

SEQ ID NO: 197335 - DNA, 810 bp, Homo sapiens
  chr1:15478882-15479692
  hyper
ctgcaggtgtacacacgtggacaccatatgtacccatgaattccgcctttggaagtgaacttgattgcagcctattttcgtctggaggcggtggattcccggtaggaggcgccttcagtcctcggctcgatcctgtgacgccagccagctgcctatcggcttctcagtgtttgaacttcaaagggctggacgctcacccaagaaggggaccccggcctgacctctctcggaattcaaaaaaatctaaggctcagagagggaatgggagctggctcttccctctgtgtttagcatccacgttttttggcggtctggctgaaaccagcccaccctagttcgggcgccagagcaacgcagttccgagggcagatctccaaggggcggaggcagagccgcgggtgagaggcttccgcgccgacttcgggtttgcactccccggagccagaactccgtggcggctccgggcctccgtggatccgagcagagactggctgcccgcctgccactcgcaggctgggaaaacgccagccggtgcctcgccgggaaagttctcggcaaagctggggatgagccctcagcagggcaggctcccggtgcagcgcgcccccatccattgcccgcgcgcaagaacccggaatgggccccacctgggccgggactcgggcgtgcgatcccgagggcgccctggggaccacgcatcgggtggggaccctggccgagggcgtgagctgactcagtttttaaaaactcgcttcctccttccctacttgtgccggtcactcacctcgctgggaaccagcccagggcaga

SEQ ID NO: 197336 - DNA, 206 bp, Homo sapiens
  chr1:15479777-15479983
  hyper
tgcctcggcgtctgcgcctggtgtgggaggaaagcgggtctcccagctccacttaaacccctaaaacctgggacttctagcttgagacattccccgaccaccacccgtcacacacacgcgcgtgcgcgcacacacgcatgcacaccgattctctgggccctagggaggaggggggatcagggctctattttctcccgaccccctct

SEQ ID NO: 197337 - DNA, 67 bp, Homo sapiens
  chr1:15480043-15480110
  hyper
gcgcgctccagcggcatacgctggggagtgggtgcccgcctcgctcagctgcgatccctcgcctcgg

SEQ ID NO: 197338 - DNA, 367 bp, Homo sapiens
  chr1:15480226-15480593
  hyper
gcacgccggcgctcccaggccgcgcttcctgcgtccccaacccggtccctgagagggcagtgcgccctctccaccactgcgttccctcggctaagaatcccccgaaccccagccccgcgatcgcggcgcccaccgaggaggccgcccgggtggggcgcgggggtcgcgaagcccgcagtcccggaccgcccagccgagacggagccggacccgccgcctcccgggtgagtctcagccgccgcgccttgcgcccgctgcttcccgcggcgcgctgtcggttccccacagggccgtgtaagggggccgaggcccgtttgggtctcctgtccgtccgtctgtccgccgagcgcttcccgcctggggtcga

SEQ ID NO: 197339 - DNA, 48 bp, Homo sapiens
  chr1:15480892-15480940
  hyper
atttagattcgtgtgtgtgtatgtgtgtgtgtcgctctacaagcaaac

SEQ ID NO: 197340 - DNA, 211 bp, Homo sapiens
  chr1:15853082-15853293
  hyper
tccttctggtatcccatcatgcatagcgacttcgcctcgctaggaggcacgttttggcctctttggtcacgatcagccttttggctgcaaccaaagagcgcgcctcgtttctatagcaaccaccccaggtccacgcctagacggcgagtggcaagggtcaaaatagattcgcccagtagacgccctcgacctgttcggtcctcgccttcag

SEQ ID NO: 197341 - DNA, 133 bp, Homo sapiens
  chr1:16085155-16085288
  hyper
cggggcgggaatcccgcgccccctccccccgagcctcaccttttatggtaaagcggcgcggggcggcggggcggagggagccgagggggcggggagggcggacgggcggaggggacgggaggcccagcggctc

SEQ ID NO: 197342 - DNA, 738 bp, Homo sapiens
  chr1:16481738-16482476
  hyper
gcccgggagtgcggcttgggaaggagggaaaggagtgtgtgagcagggattggcccgaacctatctccacgctctcccccgggactggaggtgaaggggggcgtggagaaaatctcagggaacaggggcttcgacagggggctcccgcccgcccgagccccctccccaaaatgcgaggcctgcacagtatgccttctccgcaaaacctcggcaagcgggttagtgaattcaggtcactaagaagctgagcccgcggaaagctgcccaaacacccccttctctaggggactccccacgccccccgccgggacgcgttcccgaagtcgccgcctggactgcaaccgcgtggcctgcgccgcgtcctcttctccgcagcctccgaggcccgtgcgaccaagctgaaaccgcttattctccggagcccctatgaccccgggtgggggccagggctcgcctcgatcgcagcccgtgcgccctccggactccagttcgccgggactgggcgacaccaggtaggttccaaagttgcgcgcgtcaaggagcgccgggctctagggggcactggggcccgggggccaggggtccagacgccgcgcgcactcaccttccttgccctgcgccgccgcggccgcggccagcgcacagccccacagcagggcgaagcaggcgcgggctgcctggagctccatgccgcgcttctcgctctcggtccgatccccccgagcccggctcccgcac

SEQ ID NO: 197343 - DNA, 251 bp, Homo sapiens
  chr1:16482544-16482795
  hyper
tcctgccccgagtccttaatggaagttgggtgagaaccgactcctgttcattcatgccctgcgtgacgtcaccaacgcccgccctcaggaatgtctttaaaggggccgggctggcacccggaggagagggaggggaagtccggaggggtttggaggaggaccttggggccctctggactcgcgggctccccgcaggccttccaaagtttgagcgtctcaaagcgccagcgcccctacggattagcccccag

SEQ ID NO: 197344 - DNA, 68 bp, Homo sapiens
  chr1:16514366-16514434
  hyper
gcaatgagcaggctgcgctcggaggaccccgctatcccagccctgggctctgccgccctctggtggct

SEQ ID NO: 197345 - DNA, 386 bp, Homo sapiens
  chr1:17445471-17445857
  hyper
ccccgggaggagaactggagagggccagacggagggttacgggtgaaagggagggtctgtgagggagctggggctgaggctgtgttagggggtctgggagagtctcagggtttctggaaggtggacacaaggttcgggggttgtcaggtttctggatgagattcttaggatttctgggctcgggggctcgggatgagggacaactcgggctggacaaaggctgtccacgtccccgagtctgagcgcgtctcaggatttctgggctcgagatctcggcccgggcatcacggtgggccggctcacctgtagacatcggtccagaggtaggtgcccagcacgtacaccgcctccacgcggctcccgtactgcagccgcacggtccgctc

SEQ ID NO: 197346 - DNA, 165 bp, Homo sapiens
  chr1:17445943-17446108
  hyper
cctgcgccccacggccccgcgcgcagccttatccagcggccggtgggcggggcggcccgccccagtcctctcgcagtgggctgcgggcctgtccgtcaagcgtggtcccgcccctaactcgtcccgccccgctgaggtcgtggcgaagtcatcagggaccagttt

SEQ ID NO: 197347 - DNA, 208 bp, Homo sapiens
  chr1:17591036-17591244
  hyper
gttttatctcttgaacgcaatacccaaataacatggtctcattttatcatctgattttctgtggatgcagtcatatcatgtatgttcttttgcgttgggcgtcttttgccctatgctatgtttgtgagatttatccacttgttgcatggtggttgagtatcttttcacatgtttaaaaatcatttcaggccacgcgtggtggctcatg

SEQ ID NO: 197348 - DNA, 731 bp, Homo sapiens
  chr1:17865970-17866701
  hyper
gccgggccccatccccgcgggcctcagtttcccccctgtactgtggggggccggtgggctgccgggaccgctgggggctcgcagcgggtcgggggaggccacgtctccctcgcggcgcgctgggagcagggagggggcgcggcggccgctgccccggccaccaggggttaagcggtgacctcagccgcggcgccccgggaccgggcgggcgggggcggcgccgcgtcgcgcacggcggcggcggcgggaccaggcctcggagcgcggcgggcgcgggcgcagtcccggcgggcccggacctcgcgggcgggcgggcggcgcggccattggctcgggtggcggcggctgcggcggtgggggcgccgtcccggccatgggcgcccgcggcggcctgcggagctggaggcgcggcgccggccgccaggcgcctttgtgagcggcgcggacgacaaaggcgcgggcccgggcagccgaggtgggtgagtgagcgcgggggccctgcctccgcgggatcctcgcgtgtgccggagtctgcgagtgcgcgggaggcgctccaggcgccagggtcctccgggtgtcctgggcgtgtcgccgtgggcgggcgggggccgtgtccgccgctgtgtccctgtgtctgggtgtgagagccccgagcccgcgtctcccctctgtgtgggtctctccttgtgtcactggagttctggtgttactagggcgagtggcctttgtgc

SEQ ID NO: 197349 - DNA, 199 bp, Homo sapiens
  chr1:18434092-18434291
  hyper
ccctgcaataaatcggcttagcggacgagagccgaacagcccagaaaggattaaagaaaagtctgtataatacgcggagagcgcggcgaggggagggcaaggagggcgggggggcggggagagggggagggacggagggagggcgagaggaggggggtgctcgcgccgccgggagaggcgagcgcgaggcagagagcgc

SEQ ID NO: 197350 - DNA, 34 bp, Homo sapiens
  chr1:18434816-18434850
  hyper
tctgtggagctggttggctcgatgagggagggag

SEQ ID NO: 197351 - DNA, 308 bp, Homo sapiens
  chr1:18435565-18435873
  hyper
ccgagcgggttctccggagccagtgagaggtggctccgcagccccagggtccgcggccggcctcccacccagtgccgccgcgtagtgggtcttaaatggagctgaaccctttcgcgcagtgagcagagagccaacgtgaggctaaaagccaggagggagggaggcgggaccagcgaagagccgcaggcaccgagactacaggctccgcgtccgggatcctcctcggagcctggtgccaacctcagcctggctggagtcagagcctggctccgcctcggaggggagcgggacgcgaggtgccaaaaagt

SEQ ID NO: 197352 - DNA, 130 bp, Homo sapiens
  chr1:18958429-18958559
  hyper
gggctgaaattctggtagatttggactcctagtaaatatcaggtcctggtgaatttcagctctttccactatttccagacacttcttccctgacagtttctcggctctcctggctcgctggctgccagct

SEQ ID NO: 197353 - DNA, 90 bp, Homo sapiens
  chr1:18958739-18958829
  hyper
taattagtaatgattttccccctaaaactttttactcgggcttccgcactctggaaatctcccgggagagaacctctaaacggcgaggtt

SEQ ID NO: 197354 - DNA, 140 bp, Homo sapiens
  chr1:18963947-18964087
  hyper
catgggaacccgcagactgatggctttggaaaaagtggcgagtgccctggaacctgaaagcttgcaaaaagccagtgttgtttcagtctcccttcagaggtttctcccagcacccctctcctcacgacccaagcactcct

SEQ ID NO: 197355 - DNA, 46 bp, Homo sapiens
  chr1:18964207-18964253
  hyper
ggaggaaggatgggtggccgggcagccccgtgtgacagcggcctgg

SEQ ID NO: 197356 - DNA, 222 bp, Homo sapiens
  chr1:18966813-18967035
  hyper
ttgattgtgtgtacaaggacctgccaaatttaattaggctccgggggagcgagtgaataggggaaggggggcacggctcccctcagcccacaccattttttcggcttcacacctggaagggacattgtttacgggatcttcgaaaaccaggaaggggcgggggcggagagggacaggagccttggaagcgggggcgagggaggggacgaggatagtccattt

SEQ ID NO: 197357 - DNA, 90 bp, Homo sapiens
  chr1:18971626-18971716
  hyper
tgtgtgtgcgcgcgcgcgcgtgcgtgcgcacgacagcagagtgtgtttgcggggctggggctgaatttggcagccagcccccaagctgac

SEQ ID NO: 197358 - DNA, 34 bp, Homo sapiens
  chr1:18972083-18972117
  hyper
gccgaggtctttcggtgactggagaaggtggaga

SEQ ID NO: 197359 - DNA, 31 bp, Homo sapiens
  chr1:18972422-18972453
  hyper
tttcccccgcctcccgcggtcctcaccctgc

SEQ ID NO: 197360 - DNA, 202 bp, Homo sapiens
  chr1:19229587-19229789
  hyper
gcagggccacagcgcggccagccccctgcttcttcccgggggctgcggcccctggaatgagcctgccttccagcttcttggccaggacccagccgctctccacctaccctccaggcgcggggccggccagcttcttagcttccttgcagattacgatcaatgcaagataaaacctgagctggccaacgcttagcttttcatt

SEQ ID NO: 197361 - DNA, 273 bp, Homo sapiens
  chr1:19283596-19283869
  hyper
tttctctgtcctctctgcccgcaatgcccctggccccaaattccttcggatgtgcgcgaccgcggctggaagggctgggggaccacagtatccgaaggtgcatcggcaccccacccccactctagcctggggaggcccagatcgacctttcggggataagagggcgcccgtgccccacgctgcggacccgggggtgggctcctcgaatgctagctgcgggccttgtcctctcgagatcggcccgggcacagctaagcccgctggttcccccgc

SEQ ID NO: 197362 - DNA, 325 bp, Homo sapiens
  chr1:19639187-19639512
  hyper
cccagcagctgtcctatcattatccctccaaacaggcggcccgcgccgggctgagtcaccaggagggagctgtggccgaggacgccgaggcctggagtgggtggtagccccgagctgggacgctcctccctccacaatctccccaggtctgcagggaccgagggcctacactgcctcctcccacgccgtgcttagggtaggtttccaaacgtgtaaatggagagtctgagtctggaagtgtgaggggtcccgggcctgggtcacaggtcatgtctaatcaacgcttactgaaggcgcctgtgtgcccggacgctggaggggctac

SEQ ID NO: 197363 - DNA, 167 bp, Homo sapiens
  chr1:20002971-20003138
  hyper
gaggggtggggattacgatgtgcttcgtctccctgccccagcaacctccttgccatttcagaattagaattccagcttctatgaaaagaccgcgtgtagttggggtttcagcaccatggacaagacaccaactctggaggcctagaaagagccggggctggaggaga

SEQ ID NO: 197364 - DNA, 215 bp, Homo sapiens
  chr1:20512799-20513014
  hyper
gagcctggagaaaagtctgctcccgaggcaaagcaagcctggccagagctcacctttaccaaaatagggtgactcccgggctctgcagaaaccgagggacctatgcaaccgctgggccatgccctccaggctgggatgtagcgacggggacacagacccagggagagaaaaggatgtcccagtctccggcagggcagagacgagaaccagagggc

SEQ ID NO: 197365 - DNA, 34 bp, Homo sapiens; identical to SEQ ID NO: 35179
  chr1:20692995-20693029
  hyper

SEQ ID NO: 197366 - DNA, 270 bp, Homo sapiens
  chr1:20810324-20810594
  hyper
cagggctcactgcgcggtgaaacagctccatcctccgtccctgccaggggtcccttccctgctttcctctgaaccacccaccaccctctatcctccagcctgcgtcccagctccattctgagaaaaggaaacagagggcgccaacccagccgctcctgctgcagccagggcgcgcactggcccgcgtcctccccgcaccaggcgcactaatttagacagaaatgtctggagctgggataggagagggagccaaagtctttgggtctcggg

SEQ ID NO: 197367 - DNA, 259 bp, Homo sapiens
  chr1:20810930-20811189
  hyper
gtctctgtctctccctgtctaaggtgtcggtcgcccttattgtttcggcggcttctgcgtcctccccaaacgcgcgtcctcggctctgtctctcccgcttcagctcccctctcgggagctttgtctcggtctctgccaccctcggtctcccgcgtaccccctcccctccatccctgcgtctcagtctctctctgcagccgtcggtccccctcattgtccccgcgtctctggagctcctctcggagcctctctgcgtctc

SEQ ID NO: 197368 - DNA, 67 bp, Homo sapiens
  chr1:20811219-20811286
  hyper
cggatcgcccaggcctggcaaaccccctcccaagccaagtaacaatgaaaagcccgtgcgacccgaa

SEQ ID NO: 197369 - DNA, 43 bp, Homo sapiens
  chr1:20811755-20811798
  hyper
cccggcgccgaagaagttgttggtgtcctgcaggcggcaggag

SEQ ID NO: 197370 - DNA, 334 bp, Homo sapiens
  chr1:20811978-20812312
  hyper
cgcgggctgctgcggcggtggcgccggcgagaggccgggggacgccgctagggcaagagcgcggcactcgcgcgagcggcccggagagcgcccgcggctgcgctgcgctgcgctccggctccgcgcgcgagtggctgctgctccgccagaggcgagcaggactcacatcctcggcgcgctggggctctgggcgggggccgggccgggcggggccgcgagccgggagggaggagacgtccctgcgagcccggagggcgcgggaccgaggagggcgcaccccgggagccgggcgggccggtcctgcggcgagtgcgggcggcggcgccggttcggg

SEQ ID NO: 197371 - DNA, 140 bp, Homo sapiens
  chr1:20812696-20812836
  hyper
gagaaatgccggccgcggcgccgaggcgaggcgcggggaggagggcgggaggaggcggggaggaggggacccgcgggcctcggggagagatccctgcgagcggagcgacgtcacggggccgcgccggccggcccgggctg

SEQ ID NO: 197372 - DNA, 70 bp, Homo sapiens
  chr1:20813127-20813197
  hyper
cctccccaccacacttgctccccaattcagaccctgagggcccagccactggggcctcacactctcctcc

SEQ ID NO: 197373 - DNA, 173 bp, Homo sapiens; identical to SEQ ID NO: 35188
  chr1:20813270-20813443
  hyper

SEQ ID NO: 197374 - DNA, 178 bp, Homo sapiens
  chr1:20878727-20878905
  hyper
caggaatcgtggggcgcgggggttcccgaatgcgccaaggggagcttggagaccagtagcgaggccaaataaattagcatggacgaagccctcctgtatatttcaggggattcctagtacttaacagccctctctacccccacccctccactaataatgattaaacccgttccaccgc

SEQ ID NO: 197375 - DNA, 77 bp, Homo sapiens
  chr1:20880637-20880714
  hyper
gggggtgttcctctctccccacacccggagtttcccgggcctgccattgtggacccgccccctatgctttacaccta

SEQ ID NO: 197376 - DNA, 92 bp, Homo sapiens
  chr1:20959849-20959941
  hyper
agtcactgctagaggcgccagtaccagcatagcgcccccacgcgccgagtcggggaactgccgcgggggccggccccgcccaccagcgcctg

SEQ ID NO: 197377 - DNA, 408 bp, Homo sapiens
  chr1:20987844-20988252
  hyper
ttcctcctcctgccgaaggacccagcacgtgcacaccggaagtaccccatctacggtagcccaatcgcggctcgtgcccgtggagcactacccggaagtgatcgggatacgccgcggctgggcgtccagagccgcagctttggcgataaggcgcggagagcgccgccggaagtgccctggtgggaggtggattccttgaaccctattggtgggagtgaatcaaggccccgtccccctaaagaaaaggctcaatcctagagagacagctctgcagccgcggccaatcaacgaggccgagcgccctttgctccgcccaggccggcctcccgccccctagtctggagcccacttccctctggagcttgcggggtcctccccgggcttgaccgtcgcgtcctggacagggtg

SEQ ID NO: 197378 - DNA, 370 bp, Homo sapiens
  chr1:21563147-21563517
  hyper
acaaacaaaaaaaccggcctctccttcccccaccctcctctatctgtgctggacgccgcagcaccccctccaagtgcctggccagcctcaccttttccttggctgattttcgggtttcctcatccatccacttcagggtgctcaggctttcctcaaatgccttcttaatctccaggatgatctcggtggcctgaggagatacacatcacagcagtaaggtctgcgcactggtctcaggtaaatgcaacaggcaccccgtgcagaacaatgatggccagagattaaactcaattttccaagcgtcaggctgggtgagaaggggagccacagctgtgcttccaaaccacgctcctaacgtgaacaccctgca

SEQ ID NO: 197379 - DNA, 140 bp, Homo sapiens
  chr1:21835775-21835915
  hyper
ggcgcggggctcgggccgggggcggggccggggccgggctggggaggggttggggccgggggcgggggagggggcgggctgcccgggcctcactcgggccccgcggccgcctttataaggcggcgggggtggtggcccgg

SEQ ID NO: 197380 - DNA, 50 bp, Homo sapiens
  chr1:22263555-22263605
  hyper
ccccagccaagttggcgggaggcggcgagcgggaccggggcgcccctagc

SEQ ID NO: 197381 - DNA, 575 bp, Homo sapiens
  chr1:23037602-23038177
  hyper
gcccacctccgctccgcggcccgcaaagtttgcccgggggccggcgccgggcgcaggtggccgcggggaggtgtgtccggccgcgccgggaggagcgggccccgcgggcgcccggggagcggcgggcgctgattgactgtgccaggaggaggcgaagggaccatcttgccgaggctttgtagccagcccggcgagcgccgcccagggctgggggctgcccacgcgcgctcgccgcccccggctcgggcagccgcctcgcgccggcctggtcttgctccgcacagggtggaggggcgcgggcccggccgtggcggggggcggggggggcgccggcgctcggtcggggctggaaagtttggcagggagcagagggagggaggcaccgcggccggccggggtgggggctcccggcccgcgcccccgagatggggcccggcgccccggagagcagggactggcagagtggaagggagcgcgccagcccccgcgtcggtgcctgcccatcgcccgcggcgtacaatggggtcccctccccgagaggactgcgcgggggatgggtctgtgggcatctctcc

SEQ ID NO: 197382 - DNA, 108 bp, Homo sapiens
  chr1:23038250-23038358
  hyper
cccgggaactctccagctgccgccggggccggaccagatgctcttgccatgtgttggccttggccagggtcgcgggccctctccccgtggcctcgtgtattggtacca

SEQ ID NO: 197383 - DNA, 135 bp, Homo sapiens
  chr1:23345695-23345830
  hyper
gtgaatgaacgaacgcacgcatgcaaacccgaaagtccctggaggaaatggtcaccttcggaggtttagtctggcccagaagccctaagaccacggactgtgccaggtcccactccaaacgccggggagacgctc

SEQ ID NO: 197384 - DNA, 181 bp, Homo sapiens
  chr1:23346189-23346370
  hyper
ggtctgaggtggccgcgcagcccgcgggcctgtcgggcccagccgaggtcgggccgggggcggtgggggagcgcacaccccgcaagaaagagcctccgcgggcctcgccccccgggggcctggcggaaccgccggggtccgcagggcctcaggccggccctactgtcgtgcctgggtctgc

SEQ ID NO: 197385 - DNA, 167 bp, Homo sapiens
  chr1:23495361-23495528
  hyper
ggccaaattgtgacgtcagcgttctggaaggcggggtctttgtgatgggcggggttgtctgtaggccccgccccctccgtcctttttttcccttcccaggacttagactccaccaagtttttattgcctccgtagctgggtcctgtgctaggcgccctgggaaatcg

SEQ ID NO: 197386 - DNA, 196 bp, Homo sapiens
  chr1:23695349-23695545
  hyper
gctggaactttgagccccgcccacgcactacatctcccaacagcgcctgcggcggcgcggctctgtacgcaatacaactcccgagaggccccgcgccgccccgcgccggggcgactcgggagtgcggtcggcagtagagcctggcggtgtcttggcttcggcgctttaaccctgtaggggcgtgcgactgcgtcct

SEQ ID NO: 197387 - DNA, 50 bp, Homo sapiens
  chr1:23749161-23749211
  hyper
aaactggctccatgctgcagggaccctgcggccagacttgcatcttttca

SEQ ID NO: 197388 - DNA, 197 bp, Homo sapiens
  chr1:23857853-23858050
  hyper
ccccccggaaagaacgcgtcctcgaggcggcgattgcaacactagcttcgctgcttaaaggggcagccacacctgctgttggtgccgccagccgccggccgcgctagttagcagccggcgagacggagacagagggtggttccgggattcacagtgcagaggcggccagagcagtgcacagcgccccgagaaatggg

SEQ ID NO: 197389 - DNA, 77 bp, Homo sapiens
  chr1:23884855-23884932
  hyper
gcaggagaggttcccggggtcccaggcagaacgggcgccagcacctgcgttctgggcgggggaggaaagaagaccaa

SEQ ID NO: 197390 - DNA, 66 bp, Homo sapiens
  chr1:23885004-23885070
  hyper
ttggtctgtacctccagctgataactccgcgccccacgctgcccccacccagttggcgccaaagac

SEQ ID NO: 197391 - DNA, 204 bp, Homo sapiens
  chr1:23885100-23885304
  hyper
ttggaattgacactagctgggagggggctgccgaagacagctccctatacaacatggaacagaaagacttgtatttagtcggacccatgtctactttgccagaccctcggccactgcgggagggcagggcccaggcgcatttaaggcttaaatgcacatcacatggaaactgactctgccattcatttgatgcaaccatgggca

SEQ ID NO: 197392 - DNA, 380 bp, Homo sapiens
  chr1:24126329-24126709
  hyper
ggacttggccaggtgcgcacctccaccctgaacaaactctgcgggtagtacggggaggaagccccagacactgaggcctttcattcccagcgaccgggcccgctgccgccttcctccacgctgcctctatccccttctgggctcacgcagctccaacccacttgaccaagagccctctgcgtgccaggctccgtaccaggcacttttgcatgattttcctgaattcccccagcatctcggtgagacaggtgttatcactggcactttacagatacagatactagggccagagaggtgaaacagttgcccttcggtcccacagctggcgacagcgggctggaatctggatcgccaggctcgcagcccggccctctccccag

SEQ ID NO: 197393 - DNA, 204 bp, Homo sapiens
  chr1:24513459-24513663
  hyper
aggaaactggattcgtttcctgcgggagaggaatatcaaagacccggttctgttcagtcctgggaagaagcaaactgggggcgcgtaggcagggccgattcgcacccggctcgggtggctgcggaccccgtgcctgtcccaggagctccgggtccgagggtaggcgcggcccggcccggggagccctcttccccctccctcccg

SEQ ID NO: 197394 - DNA, 490 bp, Homo sapiens
  chr1:24648342-24648832
  hyper
gtcgcagcgctctgggtgcctggagcccgcagccctgggcagccccgggctaccgcagggcgcaagggatcctgggctgcggccgagggcgccggaagtcgccgccgaccgcctgggtctcgcaggaaaacagccggcgcccgcgagctgcccagcgtcgggttttcctgaaggtgcgtcggggcccccggggagctggagccgcaggcgacctccccggtgacctgttgttcccctctggagggccggccggcgctccaggcaggccccgttgacagcccaggaagggagagtttcgccgcaaaggggcttggcacacagtaggtctaaggcaccgaggcaggagcgtcccccgcggcctcgctccctgctctctgggccccaccgctgccgcctggagtctcccctcagcctcgcagagacgcgactcggttgggggaaggggactagaaccgtcgcagtcctgaccgcggccgccgccgccgttcta

SEQ ID NO: 197395 - DNA, 334 bp, Homo sapiens
  chr1:25255277-25255611
  hyper
aatgggagcagggacggcctcagcttccagccacctcgggcagcaccacccccagccgccggcccttcctgccctgcccttttctcacggcagctgtgagaggtttaggggaaaaccgaggcgttttcgtttcatctcgctgcccccttaaaaaaatgaaaatgaaacagtcgcctactccctggcataaagaaaaaggtcctctaaatggctgggggctgccagggttaggggtcccccaatctcaactcgccattcgggacgcataatatccccgagcaaacgtctggagagcagtgccccgatcccggcctagcgccgtccggtaaaattt

SEQ ID NO: 197396 - DNA, 168 bp, Homo sapiens
  chr1:25870618-25870786
  hyper
ggggaggcaggcgctcgtcgtcggtgcctaggggaggaggagagggcgcaggggcttgggaagacgcccccgtcccgcacccctgcgccccagccagcagctgcggcggtcaggagcccactggcccgttctcccgccccctgcccgacccaccgggccaacttttga

SEQ ID NO: 197397 - DNA, 194 bp, Homo sapiens
  chr1:26232692-26232886
  hyper
aaaggcgaggctccgcccgagccacacacaaagcggagcgacccccgcccaccaacccctccgaggcccgcagccccgcccgccgccctgcagcagggggtcgctgccacggcccagcccctcccgccgaccgcgtccctcttgctggcctcagccagccgccgcctcctccgagccccgcacccacctgctca

SEQ ID NO: 197398 - DNA, 72 bp, Homo sapiens
  chr1:26248952-26249024
  hyper
tgaaattaaacatggtgattatcccaccatcagtggaagttatccagcagcagtggacatgactgcgaatcc

SEQ ID NO: 197399 - DNA, 209 bp, Homo sapiens
  chr1:26249626-26249835
  hyper
tagggcttccccgaagtggattcagtgactcgggagaggacccagcccctaggccccatccccggttaagggccagtcttggtctgggtgtttctctccgggagctggtcgcaggtttccgttttcctcttcaaggaaggaaagaccagcgagagaattcgagggaaagaacaaaagccgccggcaccgcccagcccaatttttggagc

SEQ ID NO: 197400 - DNA, 91 bp, Homo sapiens
  chr1:26560289-26560380
  hyper
agaactgatagaccggcgttggaatggaaggagggtgaggcaagctgagtgggattctcgtgtccccagccccgcccgcgggccgccagct

SEQ ID NO: 197401 - DNA, 841 bp, Homo sapiens
  chr1:26662518-26663359
  hyper
agactctcctcctgcagccccgcctctgccccagcgcccccagccctccgcccctccacgttctcacctgccgccgtggacccggcaggactgaggtcggaaggaggcgggcagagcggcctggtcatcttcgaaagagaagtggtcgcccagaaagtcggggcgggagaaaagctgaatctggaggcagagaggggagatgaggggaaggaggacgatggagtggggccgagaacagcggggaggggaaaggtccgaaatgaggggagagacgtgagcccagcggctccctgcggagtccctgccttacctttgagacgaagtgcagatcgtgctccccgacctgaaggtagggaccgaatcgagaattagggagggtgccggcccctagccttgtcttctctaggtttcagtaccgtccaccccgcggccgcgccctcggccccgcccccttctaaggccccgccccaagcgcccaggcaggtcctccagcccgctacctctgcgtgggggcggggcgcacccgaactccaggtcccgccaccggggaggccccgccccccgcggccggcacgcacctgtaggaccggctgcagcgaggcgagggtgctgttgccagcgccccagtcctcgcagttacgatacacgcccttctccagcacgtactgttccccggagaagcccacctcctggtaggccacccacctgcaggaagggcggggcgcgagtcagctgggacggagcctgcacctctcctggaaccgcccccggctcgcccgggcccgccccgctcccggagcccgggtcacttacacgccgctgagcacgtggatggcctgtg

SEQ ID NO: 197402 - DNA, 308 bp, Homo sapiens
  chr1:26735283-26735591
  hyper
cccacctagagaagccagagcgttcaactcccctttccctcccttttcttcagccagacctcagccacttgctcctgagtcttaggaacagaggtacacggagcgaatatattttaagggcgccactaacagcgggagataagacttttgggagaggagaattatgtaaataaaaatggctttggctgatgtactaggagaactcttgataattctaaattagagtcctcagatgggagtggggcactgctaataatatttgttaacgatatgtattttttaggcggagcagcaaagggccactcttg

SEQ ID NO: 197403 - DNA, 45 bp, Homo sapiens
  chr1:26737136-26737181
  hyper
gagctggagccggagggaaagggaggggaaaggagagggagggga

SEQ ID NO: 197404 - DNA, 327 bp, Homo sapiens
  chr1:26758410-26758737
  hyper
tgctctaatgaagcccggttctgcggcattccaaggtaaggacgctgccttacccagtctctcagcagtcctaagctgccttcgacggccgagaagcgcctcgattcttgcccctggctcatttccctggcgcgttttccagacgcctccgctcccaacgctgggctcaaccctgtcttccccagctggtctcccagcacgtggcctggagcccagcctcccgccccgctcggtcacgtgagcctggctctcacccgcgccggcttccacaccccgcgggactgagaaccgccctcccactagctcgcaggcgcaggcgcagggcag

SEQ ID NO: 197405 - DNA, 106 bp, Homo sapiens
  chr1:26855980-26856086
  hyper
tccaaaagagctgagcgggggagaacggtggccctggtgtggtgtgtccaggggtacaccactggaagggaaggagccagcagggcctctccggcggagccgagcg

SEQ ID NO: 197406 - DNA, 78 bp, Homo sapiens
  chr1:27113546-27113624
  hyper
ccagaggctaacccggcccctggcttcgtttggagggcagataactgaaaccacataaggctttggaatcctgagaaa

SEQ ID NO: 197407 - DNA, 537 bp, Homo sapiens
  chr1:27113714-27114251
  hyper
aactggccgctccccccaatagacggttttgttgagttcgcctctttttttttcttctttttttggccccacttcctatgagagaaactgcttgggtgagggaggtgaaaggagccctggagggtgttctctgaggttttcttcaccatcctcattagccacctgaggtggggctgaggactaaagtaggacagaaggtctctggtagatagaggaggggaaaatcagggggatcccccactttcttcacacccaggacgcagggtgccgctgccggccacagaaaccccaagaatgtttttctttggctattcagaggacatctattgtgtgtcaggccctgtgctgagctgttgttgcctgacagcaggaagagcgcggctctggtttctgtgaagaggctgcgggtcagcctccgactacaagagcctcggcccacaccgggaactcagtgaacgtcagcgggagctggggcaagagcactgactctgagacagcagcctccgctcactatttgaaggcggggtggcggggggc

SEQ ID NO: 197408 - DNA, 125 bp, Homo sapiens
  chr1:27286497-27286622
  hyper
gccctaccccgcgggcggacccagcctccctcccgtcccgacgctgttcctcggggtgagcaccagcgtttgtcccatcccgacgctgccccccggtgagtgcggcccccgcacccagccagtgc

SEQ ID NO: 197409 - DNA, 33 bp, Homo sapiens
  chr1:27320114-27320147
  hyper
tgattggctgtgccgcccgtcgctccgccccgt

SEQ ID NO: 197410 - DNA, 216 bp, Homo sapiens
  chr1:27719000-27719216
  hyper
gggggagcgggcggtgcgaggccttattactatgccgcgcaacgcgcgctgcgccccagcgcgccgcgcccattggctgatcggaccgctgacgtcaccgaaccggtggccgggggcggggcggggtgactcacgccgcttctcccgcggccgcgggggcttctcggggtccacgcacgccctgcgccgccaggacccgagcggagcctccccgcg

SEQ ID NO: 197411 - DNA, 81 bp, Homo sapiens
  chr1:27816286-27816367
  hyper
ccgaaggggacttcgggtcactccctccctccctgagggggtggggtggactaagacgccaccccgcgctgaccgctcgcc

SEQ ID NO: 197412 - DNA, 129 bp, Homo sapiens
  chr1:27816423-27816552
  hyper
cggctcgggaagagcggcccggccggggcccgcgcctcccagcggggtctacccaaggggacttgttgctcacctggcctcccgcagtcgccgtcagcgacaggaagggtcggccggccgcccagtctc

SEQ ID NO: 197413 - DNA, 261 bp, Homo sapiens; identical to SEQ ID NO: 102924
  chr1:27816581-27816842
  hyper

SEQ ID NO: 197414 - DNA, 420 bp, Homo sapiens
  chr1:27902249-27902669
  hyper
gccgccccttcccgcgccccgggcccggcggaatgcgtggcagccccgaccgggggctattttgagcgggaggggagcggcccggcctcggtgttttcggctttttcctggcccccggcccgccaggccgggccctctgctgcccgctgaatgggagggggggcggggtcacgtggcggggggaggggagggccgtcgcgatccgggtcgggctcgggctctgccccggcccggggactggaggcgcccggcagcggtccggacctgcgctctcggacgcggctgagtggcggggttattaatagcgtgcctggctcgggcagtggctccagggcgcccgctacctgcacgcccctcctgcagagagcactggcggcccggcgctccctccgcagcggcggactgaggcctaactggata

SEQ ID NO: 197415 - DNA, 95 bp, Homo sapiens
  chr1:27928761-27928856
  hyper
agaattcccgcccccgcttctctccctcctcccgctctgtgcccgctgcccgcctcagggacagccccagctcccgcctccggccagcaaggccc

SEQ ID NO: 197416 - DNA, 219 bp, Homo sapiens
  chr1:27929078-27929297
  hyper
cgccctcaagcagcgagcagagattcagcaattcaccccagctccctgcctagggggctgacagctgtcactcagcaccccaccccctggggaagagggggccgattcaatcagagccccagaggaaacgcattgataggcgattatttatttatttatgcaaaagtgagccgactttgttcgccaggtaaccgggcacgcggcccaacccctccagcc

SEQ ID NO: 197417 - DNA, 49 bp, Homo sapiens
  chr1:27960572-27960621
  hyper
tcgcctcctacctcggtcgggaagcccaccccccacccaccagaccgag

SEQ ID NO: 197418 - DNA, 183 bp, Homo sapiens
  chr1:27986361-27986544
  hyper
ccgccgcggggagcggtccagccgcagcgcacgagccctccgccgtcccactgccccccggaaccgcgcgagcctcgcaaaccgctcggcgcccagtctccacctcgccggcttcatgaacgtgccccgggagaccccgacgccctgaagccggcgcggccgccccaccgccccaccgcccca

SEQ ID NO: 197419 - DNA, 360 bp, Homo sapiens
  chr1:28286193-28286553
  hyper
ggtccaggctctagtctccccgccctctcgctttcttgggcctccgggcgcctcaaaggtaaaactaggccatttgaagcctgcgaagcgaagggcagtcggtcttcaggcctagcgggcttggctgggctgggtcggtggacccctgggctggcggcgggagcagagcatcgagcggcttttagctggggttcgggcggaggacctgggacaaccgcgggcctcgctcctccccggacggggcgggacggggaagtcccgcccaccaggcccaggccccgggccgccccgagggctgcgcccacctccttcctgcctcggcaaccccgggccctgagggcaggccccaaccgcggagga

SEQ ID NO: 197420 - DNA, 263 bp, Homo sapiens
  chr1:28286673-28286936
  hyper
tgggccgccgtccagtatgcgctcggcggccgctacctgtgggcggcgctggtgctggcgctgctgggcctggcctccgtggcgctgcagctcttcagctggctctggctgcgcgctgaccctgccggcctgcacgggtcgcagcccccgcgccgctgcctggcgctgctgcatctcctgcagctgggttacctgtacaggtgagtgcttcgccccgggaggggaggagtgtcggagcccagcacctccgtcagctgggtcac

SEQ ID NO: 197421 - DNA, 143 bp, Homo sapiens
  chr1:28414990-28415133
  hyper
gctcgcccggctgcgctcagaccctgttggcagctgagactcacccaaaggctgtaaaagccccacaacaggacatggagatcagtccagacccacagtagaaccaatcgagcggaggaaaccgcggcgttagcgtgacccgg

SEQ ID NO: 197422 - DNA, 240 bp, Homo sapiens
  chr1:28833083-28833323
  hyper
gaagtgggccatggagacctcgggacccgcagggctgccgcccgacccagcgagcctctgaaggtgcaccgccacccccactgtttatcttactgcctcatagtaggcacattgtcgttctcaatataattgcacacagttttattctggatcctcatttgcctttaagaattttctcaatttttctttttatttgatcgcaccactgcaacctccgcctgctgggctcaagcaattctc

SEQ ID NO: 197423 - DNA, 120 bp, Homo sapiens
  chr1:28879232-28879352
  hyper
tgtaattatatgtgtctgtgtgtgtgtggttttgttttctatataaagtcagacgagtgtgtgtgtgtagttttgtttgttttctaaatatataaagtcagaaataaacccaagtaaccc

SEQ ID NO: 197424 - DNA, 260 bp, Homo sapiens
  chr1:28879731-28879991
  hyper
acttgggatcccagaaaggggagacgtgtgacgggggttctttttggtgacacagaagcgggttccagcatctaagtgaagaggctgagtccgtgaggctaggggtcctggggccccacctgggttcgtgggagggaaaggtggtgctttggggacatagaatgggagcaatccaaggactgaggcgcgctgttctgggaccggaggagtggggtttctaggtccaaggggaggctccctaaagcggggcaagcttgaac

SEQ ID NO: 197425 - DNA, 333 bp, Homo sapiens
  chr1:29557216-29557549
  hyper
tccccggcttcggcgccgtctcttactcgacgaccttggctggatccccgtggtgcccatagacaagcgcccggacccgggcaggctcggcggatgcggagtaggaggaggcggcaggtccgtgacagccagaagctgggagcagcccccgccactgccgggcgggggttcgcacccgccacagggtactgcagacccacatgctcgctccaaccaacacagagcctgacgccccggctacgtcatcttccagcgaccgcgcgcctgcgccccgcccctgccccgccgggtgaccactcccccttggtccctttgaagggcgtttccttcctt

SEQ ID NO: 197426 - DNA, 168 bp, Homo sapiens
  chr1:29585832-29586000
  hyper
ctgcttctcagctacccctgcggtgagtcccagcccactgggggcgcaggggtaaggggtgtgggcggccgcggctcctgcctgcagggggtgcaggcccagctcacgatgcagctctaaccccgcagcaaaggccccacacttctcccgcctgggcgacgtggaggt

SEQ ID NO: 197427 - DNA, 81 bp, Homo sapiens
  chr1:31157913-31157994
  hyper
cggtgggcgcctcccgggcccagcagcctcttggctgggaaagagacagacgggggcccccttccccgggaactgactttc

SEQ ID NO: 197428 - DNA, 140 bp, Homo sapiens
  chr1:31192212-31192352
  hyper
tccacatggtgcagttctgcgctttggccaccagatggcagccgaagctaagggatggggctgccgtctcccgtcttgctgtccttgtcccggtaagaccggggaccctggaccagggaaccgacggagggccactccca

SEQ ID NO: 197429 - DNA, 155 bp, Homo sapiens
  chr1:31769777-31769932
  hyper
cgtcatgagagtgcgataccaggattggtggacggagctggcgaccgccctaggcgcgctgggtcttgtgggtggaaacgcgctggctgactggggtcggcgtttagttcagcgcagcgactcggggacctggagctgacgcctagtacgtatga

SEQ ID NO: 197430 - DNA, 204 bp, Homo sapiens
  chr1:32083748-32083952
  hyper
ttccccaggggtctccagggatccgcaaccctccggcacctggccggggtcgtcctagcccagccgggggaaggaggggctgagtgcgggaggaggggaggggcggggagctgggctggctggatttatgaatggagagcgacccgcgcgccggaacagcggctcctggcggccgtcggggagcgtcgcggccctggggaccca

SEQ ID NO: 197431 - DNA, 128 bp, Homo sapiens
  chr1:32110847-32110975
  hyper
gctcctgagtttccgcagatgagccgcgggaaaggagacgaggggcggtggccaggcggttgccctgacaacggggaaccgaccgactcttcccggtagggagaggcgatggcggaattactcctcta

SEQ ID NO: 197432 - DNA, 261 bp, Homo sapiens
  chr1:32180427-32180688
  hyper
gccggctctgggcctgagcgcagactgaagggaaggggggcctcgtggggggcgcaggcgcctgaccagctcctccagctcggggctcaagccccaggccctccagctgtctacttggaaaagggtggaagcacatggagggtgggtgtcagggtgtgcggcgcaggcccagagaatgcgccccccttccccacaaggcctggcagttccagagaactgggcgcggcctcccaaataacgacctctgttaagtgggaccag

SEQ ID NO: 197433 - DNA, 37 bp, Homo sapiens
  chr1:32181494-32181531
  hyper
ttctccttggaggtcccactggcgcctacccaccacc

SEQ ID NO: 197434 - DNA, 113 bp, Homo sapiens
  chr1:32410121-32410234
  hyper
ctggctccagctgtttgcatgaatcccccgcccctggcctctctgcctgtgcaggaagccctggtgtcgtaccccgagccgctgcagttcgcactctgcggcctcctcaggca

SEQ ID NO: 197435 - DNA, 174 bp, Homo sapiens
  chr1:32574075-32574249
  hyper
caggcctgggcggcgctaaggtagctttctcctgggttgtgtttggccaacgcgtgtcttgactagattcagtggctcccctgaactcagggaagtcctacctacgtagcgaggtggagtcctctagtgaggggacgtcaggcgagccagcactaggccggtaagcatgggcag

SEQ ID NO: 197436 - DNA, 206 bp, Homo sapiens
  chr1:32687916-32688122
  hyper
ccgccatggcaacgccgctgtcttctacttccgggaacgaaggggcggagacccataatccggaagtgacctcgaaaccttttccggtcttactcacgttgcggccttcctcgcgtcacagccgggatggtgagtttcagagttaggggtattgcagtgggggtcctgggctgaggctggggcccaattccgagcactgacgttac

SEQ ID NO: 197437 - DNA, 299 bp, Homo sapiens
  chr1:32757388-32757687
  hyper
gaaagttggcctccgatctccaagcacgcttttcacgacgaagtgggactgttaagtttacagagctgctttcctcccccgggactgatggtacggtccccgggcggctccccacccatctgtcgcagaccttggtacaggcccagggggccctcggcggcctctccgggctgcccttgccccctgccgagttccgggcccgtgtctgcgcaagctgattggctggagcggtgcccgggctgcgcggctataggtgagcccaggaggggacgggcggggcgggccggaggcccgccccc

SEQ ID NO: 197438 - DNA, 101 bp, Homo sapiens
  chr1:32852880-32852981
  hyper
atatgctttaaatcacgatattcataccaagtttcaaataacatgaaaaaaaggtatgtgatttttttttttttttcttgagacagagtctcgctctcgtt

SEQ ID NO: 197439 - DNA, 264 bp, Homo sapiens
  chr1:32930194-32930458
  hyper
cgattaaaccatttcccttatttccagatttttgcggaaagcgccagtaggtgaaatatgtgcggactgatgagtcaaagctcttattccctggactgcattaatacccacgacgtgcttttcgctctccagacaaagagaccggtacttggcaggtccctcaagtgggactcaaaagaccgaaccgagctgcagcctttcgctagcactggtcctcgccccttttggcatcttggtacttgtagttttgtccactctatcttt

SEQ ID NO: 197440 - DNA, 61 bp, Homo sapiens
  chr1:32930558-32930619
  hyper
tgctggccgaagggcccgccttcccgaggccaggcgctcccgcgattggccagccgccccg

SEQ ID NO: 197441 - DNA, 167 bp, Homo sapiens
  chr1:32931027-32931194
  hyper
agtgccagcggcagcgatggccactttgtccgcgggaggccatgggaggggctaggccttggggtcccaccctcgggggccgtgccctgtagctggttctggtggcctctctgcaggtcgtctgatgctggacgggggagggtctgtcttgcgagcagtttagatgc

SEQ ID NO: 197442 - DNA, 36 bp, Homo sapiens
  chr1:33005606-33005642
  hyper
gggcgcggccaggggcgctgccggggaacctggctc

SEQ ID NO: 197443 - DNA, 203 bp, Homo sapiens
  chr1:33116489-33116692
  hyper
actctgaaagggtcgtaagcttaatagccttcaagaaaatggctgccctcttgccgcgggagtgtgcggaccaaacctctctcacgtgaccctgaccgggcgcagtcccgtcaacgccggcgcgcgcaatcgctggaagtcggctcggggaggcgtggggggaggggcggagcgcgcgcctcggtccccgcggaaagctactc

SEQ ID NO: 197444 - DNA, 283 bp, Homo sapiens
  chr1:33207587-33207870
  hyper
ggccgaggagccggggaacccgggcggccccccgcgcaggaagaagtcccgctccggcgcgtccggcctccgccgcgccttcagctggctgcggggcaagcggcgcaagaagaaggcggcgggggccgagggcgccgaaccggccgccccccgggccaagaaggcggaggacaaggccaagagggccaagggcaaaggccgaggtaaggcggtcggcacctgggctgagcgcgggggggcgtcgagggtgcggccgagggggctctgccgggggtccgcgcgc

SEQ ID NO: 197445 - DNA, 193 bp, Homo sapiens
  chr1:33219374-33219567
  hyper
agagagtgggcaacccgcctgccccacctggactggccaggccttcccctgtgcgccctaggctgggcggctcagccggtctcccaggtcccgggaggggcggagccgacgggatgcgcgccaggccccgcccctcctccgggcccgcccccggcctggccattggccgcagagctcgggggcgtggtcgagc

SEQ ID NO: 197446 - DNA, 309 bp, Homo sapiens
  chr1:33219596-33219905
  hyper
cgcgagtctcgctgcctccctcccggggctgcgggcccggcggccgggctggctgggccgcgcttgggttcccgcgccggctcccgcacccgcaatggggaactcacaccacaagaggaaggcccccagcggtccccgggtccgcagcttctggcggttcgggcggtcggcgaagcggccggcaggtaggggccggggtgggggcggggcaggcagggaggagggtccctactgcggtcgtcgccaccgctgctgccccctcccggggcttggagggtgtgagtgtgggggggtcgggaatccccgcgc

SEQ ID NO: 197447 - DNA, 217 bp, Homo sapiens
  chr1:33282766-33282983
  hyper
atttccaacccccaggcctgacctgcaggttccgggtgataaggtgcagtttctcttcagggctgggagcgtcccccatggctccgctacccctgcttcccccgctcagcccggcaccagagccccttcctgggtcaccgtcgccgccgcgtgccgggaactgtcacgcgagtccagccaggttgcatcagctgggctcggcgctccgcttactcgg

SEQ ID NO: 197448 - DNA, 126 bp, Homo sapiens
  chr1:33283881-33284007
  hyper
tggaaggcgacaccgtcccgggccgttgcatttgtgagagagagccaaggcagtatcctccaaaggttgggcctgggccaccctttctccggctcctcaagggctggaggcggcgtcaccagttac

SEQ ID NO: 197449 - DNA, 256 bp, Homo sapiens
  chr1:33502514-33502770
  hyper
cccactcgccgctcacactggcccatagccgcgtccgtcagcccgttccgcccgcccctgagcacgacggactcttcaccttaccaactgcacggcgatactgaggaactttgcttttgattggacagaattggtgcgggataaggaaggggcgggccagcatgtactaagggtggcgggtgtgcggagtgggcgggaaaacgcgaaggaggacaggaggtcaggccggaaggtatacttcggcatttgacagttg

SEQ ID NO: 197450 - DNA, 498 bp, Homo sapiens
  chr1:33721208-33721706
  hyper
ctgaggtctggagccgggggacagccggtgccacctctgatagactctgcgagaggagccactgccagcttcgggccgccccatccgtcggggatccggcctagggctagggaggggtggctgggcctgtgcaaacttctactccccacccctatgtcctcgtcttaaaaaaaaaatcggcctggattttgagcaggtcgttatcaggggtgagggtccatcctgggggtcccctccaggcggccgtcttcgagggagacccccaggggcagcctggcaccgcgcgggctcggcctggtcagggccgtggcccgccaggcccaagtccccagcctgccatcacccaggagtggggtggcgaggcggccgccgggcctgggcaggacaatggccacggccgccggggccccgggagcccccgcgctggggaaggggctgtcctagggccgggcgccggtgccctccccgcgcggctcaggcgggcggaggggggcgagg

SEQ ID NO: 197451 - DNA, 444 bp, Homo sapiens
  chr1:33896380-33896824
  hyper
tcaggccgcctgccgcccgcctgtccgtgcccatggcaatgccccgccccgcgcggcccgtcccggccgagcgctccggcccgaccgtgacagctgggtgcccaaagggttaagccggcagcgcggcggccggtgtcccccgcgcgctgcccgtcagccgcgagctggccccagcgcgcacgcgcccgcccgttacctgcggtcgcctccgcgctcctcctccacctggccgctctctcccgggggccgcccctcagcccgccccctcggctcggcgccgcgcaccctgctggctgctcggacgctgcccgcggaggaggggcgagggcgctattaccatatattagcataccagcgcgcgtcacgtggccgctccagccaatggtcaccctagaagggcggggattgggcggaacacgccttagtgctgctcccagcctgaac

SEQ ID NO: 197452 - DNA, 422 bp, Homo sapiens
  chr1:33937919-33938341
  hyper
ctgaggctctcacttcgacccctcagtagaactgggcccccttctgctcgagtgccctcccattgggcggtgctgttatccggaagcctatggaaaaggccaggatcgcaacaggtcccgcccccatgtgtcgcgcccgttccgatttgttccagtgccagggtccgttagaagatgacatatctattggctgaagacgtctgaaaggcagcaaacggagggggccgcccccggcgctcgcgcggttccttctgggaattgtggtctcagacgttccattcccagggtggcgccgctcggactccgcgtcccagcattccccgcacgagcccgggagcacttccgccctgttgtgaagtgggtgtctcggtgggtgagtccgggtggcggggcgggggcagctgagacgcaggctctgggct

SEQ ID NO: 197453 - DNA, 224 bp, Homo sapiens
  chr1:34629913-34630137
  hyper
cctcctagctccgagcgccgagggaggggtagcatttgaggagggggatggcggccgcagtctgcagtcggttccagagggggcaccggtttcaattggagaaaatgggcgggggcagggaagggcagaccttgcagacgcagaaatggggagggggcgcacggttcctctccagcccccaggaccagcgtgcctggcagaatcaggagccgggggagtagggc

SEQ ID NO: 197454 - DNA, 61 bp, Homo sapiens
  chr1:35394790-35394851
  hyper
cccgcggccctgaccgggagcgtgggtccgcggtccgcgtggtcccctgcccgcccctcgg

SEQ ID NO: 197455 - DNA, 131 bp, Homo sapiens
  chr1:35394911-35395042
  hyper
ctcccccctcccggggccgggagccgagcgccggagcccggggcgtgggcggcgccggggccgcagccgggccgtgcctggggggcgctgcagagggagccgcgagcgcggccccgtccccactcctcccc

SEQ ID NO: 197456 - DNA, 40 bp, Homo sapiens
  chr1:35396131-35396171
  hyper
ggggagggggccacggtggggaagccgcagggggaggggc

SEQ ID NO: 197457 - DNA, 236 bp, Homo sapiens
  chr1:35544793-35545029
  hyper
ggctgccagccagcgacgacttcaagggtaagatcctatgcgggccgtaaggactcttcccctccccctctcccacttcttctatcccaaagtcgctcttcccaattcagggagctgggaccaccctgagccagcggccctgcgcatgctcaaccgcagagcacgacgggagaggggcggggtcggcggggccgtttcgcttcgaagattgtttcagaagcgttgggcggggcgtc

SEQ ID NO: 197458 - DNA, 285 bp, Homo sapiens
  chr1:36173411-36173696
  hyper
tcgcgcctgaggccaaagccctgggcggcgcgggcgctcccggcagctgaggtggcggggcgggggccgcgggggaggagacacaaaagggggaggggcccaggctgcagctgccccgtacccgcggggacaaagggcctgctggcgggccggccccagccgttttcatgcttgttgggattaggggcagtaaagggcgctcgggactgtgcggatcaacagtctgtgcggggcggcgcgtgggggcgggcttggccccgcccgcccctgctttgtgcgcagccc

SEQ ID NO: 197459 - DNA, 85 bp, Homo sapiens
  chr1:36235729-36235814
  hyper
cagctgctggtagcggagcctgggggagctggaggtgcacgggggcggggcagtcggtaccaggcgagccgtggtctttgacctt

SEQ ID NO: 197460 - DNA, 173 bp, Homo sapiens
  chr1:36615012-36615185
  hyper
cgggttagctcggcgacccctgcagacgccggagcctaagccgctgcccctcagcccacaagaccgaccggcactgactcactgcgcctgcgcggcctcccgcggggcaccacgggactagtggtccggccgacgtgggcaactcccgcccaacaaacgtcagactacaacac

SEQ ID NO: 197461 - DNA, 173 bp, Homo sapiens
  chr1:36863407-36863580
  hyper
cgaagctagcgggcgcctggactggctgcctcccgccggctgcagcaggacggagaaaccatgccggcgaccgggccgctctgtcctccgggcgcagagtgcgtcagtgctctgcaagtcaccgcgtcacggagaaactacaatccccagaatgcttcgcggcgcggggctcg

SEQ ID NO: 197462 - DNA, 866 bp, Homo sapiens
  chr1:36931643-36932509
  hyper
tacacccaagagtgtctataaacaacaacaaaaactgcaaaccaaaaactagtttacaatactgaagttataggaaacaagcacaaaaggccattgggtggggctggatggagcatgatctggtccttaaagtatgcagatcgcctgggaggcccagcctatggagattgggaggagagggagatgctggtgactggagatggtgagagcctgggctggggtagtttttagtcatgggcttatggaccctcccctcttctccagctagctcaggcctttaagaggcaggcccaagaagggaaccccaggaagccctagaagctccccagcgcctccatcccatggacccggatcccctgcaggagggggaagttgagcagtggcccaaagacacagtcgtcctcctggcttggggctggggttaccagggtccccaaggggctggcctggaaccagaggttctcataggacttggggctgggggtgaggcccgccaagaggggctgagtggagtcacagcggagatagtgccctggccctgggcttgtggggctgcccagcagctgcccataaaggacctgatcgctggtgccagactgggattggggctgggtggaaactgctcttgggtccccctggagcacataggtctggaccagagtggggaggccacaggtctctgagctgttatgggactcccagggcaccggcttcttttcatcctcctccagcactgtgagcttggtgatgggtggcgtgccaaggccgggcagctggaaggcatcctgcacacaaggatgtggggtgagagcacggctcatttcagatgtctgccccagccactgtccctgtctgggtccgggcag

SEQ ID NO: 197463 - DNA, 218 bp, Homo sapiens
  chr1:36933230-36933448
  hyper
atgatgtgtagctccgacccctctgcagtgagggcagggccggaagaagttagaatgcatgttgggaaggctgggtctcctccctccgaccaggggattcaaagtcagtccccagctactctcaaaatcagcatcctttgggtggggtaccctccaaacagccatctctgcccagcccccgtctccccttacctggggtcaaggtcatcagggtgagg

SEQ ID NO: 197464 - DNA, 261 bp, Homo sapiens
  chr1:36936980-36937241
  hyper
tttgaattgatgcgcttgacctctgtgctcttctggctgccagccccctttacctctgctttctgagaagaccaccggagtgggacgagaggtcccggctgagttataggccacaagggccacctcctgggcttctgaaggcaggtggaaggtgcagctgagctctgtggtgttgcagaggggcaggatggccccagcctggcctgagggtctccaagaaaccacataaccttggatccgtccgctgtcttcctccagggg

SEQ ID NO: 197465 - DNA, 77 bp, Homo sapiens
  chr1:36937669-36937746
  hyper
ccagaacagctgcactgtcctggggtccagctgcctctgccgccaccatgtgtccagtctgacagtgggggctgtgg

SEQ ID NO: 197466 - DNA, 77 bp, Homo sapiens
  chr1:37721195-37721272
  hyper
gagggggctgtccgtggtgctgaacccaagctatcctaggattgccaggcagtacgaatgaacgctggttaatggaa

SEQ ID NO: 197467 - DNA, 377 bp, Homo sapiens
  chr1:37940492-37940869
  hyper
cagcctcggcgtcaccagctcccggcagccaaccaaagttttccagcaacttttctccccacgggtcaccccagaaacttgccctccccggctccgggagtccggccatgggccttgcgctgcctgggcctgagctctgagtgccggacgggtgggcgaaagtggtggcctcagtggggaagccttgggccccgcaacgcacttccagccccaggattccatctgagagccccgtccctgccttctgggtcccctgggttggcgtgggggttcgaggctttacagctggggtagttccagtcttagttcagactaagttccgatcttcgagccaccagctaacagctggatgaccttgagcacgtttttaatgtctg

SEQ ID NO: 197468 - DNA, 105 bp, Homo sapiens
  chr1:38019907-38020012
  hyper
ggacttccgcttccggggtgcccaggctcccagaaatcctcgcggcaaaggttaaacacgtgactactccctagtgggtgtggccgcagcgacaggcttgggtgg

SEQ ID NO: 197469 - DNA, 135 bp, Homo sapiens
  chr1:38061487-38061622
  hyper
tcccaagcccggccgaagacacccgcctgaaccacgccggaccacgtgtgcacgacgtacgtcacttccgctcgcgtccctctcggcctcagagcgacttcctgtgaacgcgcggcgcgcgccgtcaccctcctg

SEQ ID NO: 197470 - DNA, 221 bp, Homo sapiens
  chr1:38100272-38100493
  hyper
gaggggcgagggcgcggcccgctcacccgcccgctgcgggactgtcctgggcgcccggctcgcctgcgctccgcccgcccgttcccaagttgctcaatctgcggacggctcacgccctcggggccagcgccccacccggcgcatcggtcctccggggcggctcggagctgccctcgttctccgcagcacccgagcggatgccctactctggccggtcgctc

SEQ ID NO: 197471 - DNA, 58 bp, Homo sapiens; identical to SEQ ID NO: 347
  chr1:38100533-38100591
  hyper

SEQ ID NO: 197472 - DNA, 218 bp, Homo sapiens
  chr1:38157992-38158210
  hyper
gaaacaagcctggaccacaactcccaggagtacccgcgacggcggcggcctcgctgtcgcactcaggctatagggggcgcattgggcggaagaccctgggccggcaggaacttgcttgtgattggatgttgtgggacggcggcttctcattcgtcagcctgtgactgtggagtttgaattgggtggcggttgactgtagagccgctctctctcactgg

SEQ ID NO: 197473 - DNA, 68 bp, Homo sapiens
  chr1:38230859-38230927
  hyper
atgggaaccaatcactaggcaccgccgcgggatgccaaccaatccccgccagcagagggtgggaaggt

SEQ ID NO: 197474 - DNA, 205 bp, Homo sapiens
  chr1:39338990-39339195
  hyper
gcggcgtagctggcgccggagaccgcgactggcgggttgggagcagcactgctcatgcgcggaagggggcgcgcgcctgcgcacttgcaaaccaccggccgggatcgccgaggtgtggcctgttttcatggcgaccaggacgctctgcatccccagtagcaggctgagccgagggaggctgcgtatgcccgcccctctggctgtc

SEQ ID NO: 197475 - DNA, 42 bp, Homo sapiens
  chr1:39874199-39874241
  hyper
gggaactcgagtggccgtcgccagagccggctagctggggga

SEQ ID NO: 197476 - DNA, 216 bp, Homo sapiens
  chr1:39874757-39874973
  hyper
gagctagcgagctagcgggtcgcgctgcgcgggggaggaggactcgccccccgcccgaccctagcggagccttttgttcccagccagaagtttgcatgccgggaccgtgacagctgcgggcggggaggacggcggggccgcggggccagcggcgtggtggagaatagaggcggctgcttgtcatgcagcccacggcgtggcggctgcgggccgggg

SEQ ID NO: 197477 - DNA, 56 bp, Homo sapiens
  chr1:40158183-40158239
  hyper
cttctaaggatctgtcgaaagtcggggcggacggctggggattggcctaatcggag

SEQ ID NO: 197478 - DNA, 112 bp, Homo sapiens
  chr1:40781096-40781208
  hyper
tgcagaacaaacggcgtccttgtggtgcgggccggcgccgcctattggcgacgaggggcactacatctccgggcaccccgaagtccccacccccaccacagcgctcacaaag

SEQ ID NO: 197479 - DNA, 203 bp, Homo sapiens
  chr1:40782311-40782514
  hyper
ctctgccctacccgcgcgcccgcagcccccggcggccctcggaagggagacgtgggtaggcgggcagggccgagaggccgcctcggggcgacagcggcgtctggttggagccggcgccccctgggaggcggcgggggcggaggctgcgcagcgggtgaatgagcaccattgtatgccccgccacctgggctccccgggctgcc

SEQ ID NO: 197480 - DNA, 241 bp, Homo sapiens
  chr1:41268046-41268287
  hyper
atttggaaacggaaaaagtagccggccgggcgggggaggccgcggggaggtaatcggagccgcagcaccgccccggcccctcccgctctcggggcctggcattggcaaagccccgcccctcccagggacgcaagagccccgcccaccattccccgcccccggcatgccccgcccatttccgtaagccccgccctcgccgaggcgggctgggggcacctgggagtgccgagcagtggcgccc

SEQ ID NO: 197481 - DNA, 239 bp, Homo sapiens
  chr1:41328054-41328293
  hyper
cgtattcttatacccagaggcggggcttccccgccctcggacgctcattggctgggcgagacgcttctgggcgggccgcgcacgcctgcatctaggtcttggccccgcccctcccactggaaccccgccccttgggactccggccacgccccaggctctgagcaccgccctggggcggggtatttggcactttcggagggattcggtctggccctcagggcttcggaatcggacttggc

SEQ ID NO: 197482 - DNA, 35 bp, Homo sapiens
  chr1:41446124-41446159
  hyper
agctcaccacgtttgcgtggcgcccttccgtccac

SEQ ID NO: 197483 - DNA, 475 bp, Homo sapiens
  chr1:41832018-41832493
  hyper
ttgctggcacgcccggcagactcccacgaccacctgctcacacccacccacgagcgctggcgcgcttcgggcccttccggcttcccgggcctcccggcgcccctcccccgccgccgtgcccagcccccccaccccgctctgctccccgcggaccccctcgctcccttccggccccacggcggccgcccccgccacaccccccgcgcaacttagggagctgaggaggcggggctcagggaggcccctggggcagccacgcggcgggagaggagggggcctggaggcagacagaccgacagacagggtgagggccccgcctgccacctggcgccgctccagcgggacgatggcgggcagcgccgtgccaggcggtaattgcagacagactaatttaaagagatgagacggttatttttaactcgcgttaaggtaatgaacggcgcggggggtttgcgggttcgaaagttcagcgccc

SEQ ID NO: 197484 - DNA, 295 bp, Homo sapiens
  chr1:41848318-41848613
  hyper
ccccgccccccaaccagagctgggtgccgggctgagggccgcctcccgcctccgggcgccccgtcccgtccccagggggcctctgtcttcccatcctgattcccgggtccctgcccccgactctagctccccaggaggcggccccagcccagctagggacccctctcggaggccggccgccggggaaggggagggaggggccggggcaccccactgctcctgcccacactcctgagatccacccccttctcctgggcaggaagcctgggagaggaggctgaattccaggctggct

SEQ ID NO: 197485 - DNA, 167 bp, Homo sapiens
  chr1:41848643-41848810
  hyper
ggtgtggacggtggtcggggaagccaactaggagatgggccagggagcgtttacaaatcttcagtttcatttgcggaggcctagccgtgaccccgcgcccaccccaaacacggatctgattcccacttgacacactttcccactggtcttagtctcacccacccgaa

SEQ ID NO: 197486 - DNA, 37 bp, Homo sapiens
  chr1:41848840-41848877
  hyper
tacctatatccatccaccctgagcagccctccacccc

SEQ ID NO: 197487 - DNA, 306 bp, Homo sapiens
  chr1:41848976-41849282
  hyper
tcttcaaccgcccccaccccctagtactggtctcagcttctgcagcgggcctcagccccgtccacccccaaccccgacgcccctttctccgcgccagttctggcccttctcccatatttataagtgtccggccgggacgggcggtgggcgcggcgtccccggcgcgtatcgtaggcagtgtaccgtggccgtgccgtcagagtgtgcgtgtgcgtgtgtgccgtgtcgaggctgtgtagagtgcattgtacagcatattttcatgaataaaattgttttaaatatttcccgcgccttgggctagag

SEQ ID NO: 197488 - DNA, 494 bp, Homo sapiens
  chr1:41981667-41982161
  hyper
agcagggagggctcctaaagatcctctttactaatgtggaagttgagacccagtgggggtaatggcccgtcctgggcactcagtgcatgaatgctggaagccaagagtcccctgcccagctcggggctggccggggcctccacatctgcgttcctgcagggcgctgagggaatgcccctggctgggcggccccgcccctgctgggatccaggccaacgctccacaaatgagagagcttgagcgcgcggcgggcgccgctgggagaggccacacggtggcgctagcgcccagcctggccagcaccatgggcagggccggggcgcctggctccttccaggcagttctcccacgcgccacctcgcgtcccacagacacgaactcctgccgctccccccggcatctgtctcgtcgcgggaagtggaaactccatccttcagtctcttgggccgtaatccttggagtcctccatggctccttttcgttcttccccctct

SEQ ID NO: 197489 - DNA, 456 bp, Homo sapiens
  chr1:42928782-42929238
  hyper
aatgagttgtactatcgatacggccgggacaactccgcccccgacccgaaggccaatggtgtgagacataataacagtctccacaagaaccacagtctctggttccactggcgtgcgtcgtctctatggttcccgccggaaggacgcgtctgcgtctctgcggcgagcgcggttgctatgacgcccaggtctccgtaggcacctgcagctagcagctgagcgcgtaggggccgagcgaccccgggacgctcgcggcaccctccgcaggaaaatttccgacttggttcttgaggttcctgcctcagccccaaggaggaaagcacccattctcccctcttttccgcattacgggccttttctgcttctccccagtatggtccgaaactacaggaggggaacccctcctggcccggcctttctattccctggctggagtgattccgcctgaaggagaat

SEQ ID NO: 197490 - DNA, 360 bp, Homo sapiens
  chr1:43232986-43233346
  hyper
aggacgccgccgcgccggggcggaccgagggggtccttgaaaggcaaggagcgccgccagctgcaggccagggaggtatgcggggcgggagtcagcagggggaagtcagctcccgcgaggcagccggtctcggggctccgcgggaggccgacggcgggagctcacggcttgtgttcctgggtgtgtgtcgcaggagccctggtggagctcaccccgacccccggcggcctggccctggtgagcccctaccacacccaccgggccggggaccccttagacctcgtggcgctcgcagagcaggtgcagaaggtgaggaggcgcggccggggcagcgaataaccatcttcgttcacgttgtac

SEQ ID NO: 197491 - DNA, 910 bp, Homo sapiens
  chr1:43389629-43390539
  hyper
acagcgtggagagcgctttgatggaggaaatacaagccgatgtagtgttcccgggaaaacctgatccagaaggcttccagggagaggagattttgcgcctaagatttcaaatgaaagatctcataacactgtcagtgaaacaactaagcactgctgggaaaagatggtggcctggagaacagtcccgttatctatttaccccttttcgtcagaaaccgtagacgtcaccttacgcgggataggaacccgggtgagctacgtccccagggatgcccagcgatacacaagtcaccgtcaccccctccagagtaaaccgcatcgcctggcaagcaggcgcccaggtcgtccccaagggccagcgcctggaaccgccagggtgtgattggtggagtcttggagcccgcccctcgtcgggcccaacaatgcgcctctgattggtggagaaaccacctggccccgcccatccccaatcgtgtccgtgcgccgccggtggcccggcttaggggaccgctgtgaggtctggagaggatgcgccatcgaccccggcagtaggcggccgaaccttggccccaaatcttctaccccggggtggattgcggcccctagaggaaaggcgtcaggggaccgaccggcagctgtgccgtcgcggcactctggaccacgctgagggcgggccggcttccctgcgcctgcgctgacattttgcagtttgggaaatggcggtgctcggggacgtcgatactgacccagggcgggaggcagctgcgagtggattgtcgggccttttcagaccggggtctgaacctctgggccggggcggggctcgggtgctgcctggctctgccaacgttctgggccctcgagtgtgaatgagctccgcccgccatccgccttgtagtcctcgcgtccg

SEQ ID NO: 197492 - DNA, 43 bp, Homo sapiens
  chr1:43803509-43803552
  hyper
ggcggagaagatgccctcctgggccctcttcatggtcacctcc

SEQ ID NO: 197493 - DNA, 208 bp, Homo sapiens
  chr1:43805020-43805228
  hyper
agctccagaaatcagtgatttcctgaggtacgaactccgctatggccccagagatcccaagaactccactggtcccacggtcatacagctgattgccacagaaacctgctgccctgctctgcagaggcctcactcagcctctgctctggaccagtctccatgtgctcagcccacaatgccctggcaagatggaccaaagcagacctcc

SEQ ID NO: 197494 - DNA, 67 bp, Homo sapiens
  chr1:43814927-43814994
  hyper
tcctagcctggatctccttggtgaccgctctgcatctagtgctgggcctcagcgccgtcctgggcct

SEQ ID NO: 197495 - DNA, 268 bp, Homo sapiens
  chr1:43818177-43818445
  hyper
atctctcccagcccaaggccacagtctcagatacctgtgaagaagtggaacccagcctccttgaaatcctccccaagtcctcagagaggactcctttgcccctgtgttcctcccaggcccagatggactaccgaagattgcagccttcttgcctggggaccatgcccctgtctgtgtgcccacccatggctgagtcagggtcctgctgtaccacccacattgccaaccattcctacctaccactaagctattggcagcagccttgagg

SEQ ID NO: 197496 - DNA, 154 bp, Homo sapiens
  chr1:43832812-43832966
  hyper
agcgaaggtgccacgccgagggctggcacacacgtctcctgcctgacacaccacgcaacacctccgtgggctgacacgcatggctcccggccctcacgcagctcggccaccgcccaggcacacgcacgggctcacccgcggggccactcacaca

SEQ ID NO: 197497 - DNA, 287 bp, Homo sapiens
  chr1:43919241-43919528
  hyper
cagccctcccggcccgcgacgcacccgggggcgtgttgatcagtacaagccgcagccccgcttctcgcgcggcgcgcgccagcgcctcaggcgtctccgcgtacggccaggccacctcgacggcctcgaagcccgagctgcccgcggcccgcacccgcgcggggaggccggagagctcggggaatagccaggacagattggcggagaagcgcagcggcgccatgcctggggaggccgggccgggcggagtccgcgggatccaaaggcggcgggcggcgggcggcggg

SEQ ID NO: 197498 - DNA, 119 bp, Homo sapiens; identical to SEQ ID NO: 391
  chr1:43919541-43919660
  hyper

SEQ ID NO: 197499 - DNA, 199 bp, Homo sapiens
  chr1:43997371-43997570
  hyper
tggggaggggccgaacgggctgtacccgcccccaaccgggtgcaacgccctggaggccctggagcgacctgtcccgtgaggacgtggccactcggaccctctccgaaagttcactcagtggccgccccgcgtcccgtcccgtcccgtcccggctccccatcgccgtgccggcgtctctgtctcggctgctttctgtttt

SEQ ID NO: 197500 - DNA, 120 bp, Homo sapiens
  chr1:44444589-44444709
  hyper
cgcagcctgagtccgcccaacctccaggtccccttcctggggagttcgcgctccaatgcaatccccactccccgctaagggactccacggtctgcacccgctcgccggtccgacctctaa

SEQ ID NO: 197501 - DNA, 202 bp, Homo sapiens
  chr1:44457110-44457312
  hyper
aggtgcccagggccgagcccaaagtgcttgggtcagggctcggtggagcgccgaggtgagtctgaactcccagccggcacgcgccgcccgccggaccaaacacgggagggggcggggccctagagtcgcggcgtggtttcccgggtgatggccacgcggaagaggtggggctagggccctggttcccactgcctggtttctg

SEQ ID NO: 197502 - DNA, 52 bp, Homo sapiens
  chr1:44872241-44872293
  hyper
cggtcgctgcggtcctgcggccactgccgccgcgcttgtcagcccgggccga

SEQ ID NO: 197503 - DNA, 42 bp, Homo sapiens
  chr1:45097400-45097442
  hyper
ggccgggcgatggggcggaaggagccccgcagcgggaggggt

SEQ ID NO: 197504 - DNA, 86 bp, Homo sapiens
  chr1:45097718-45097804
  hyper
gccgccctcgccggccgggcggccgtggggcccagagcgccggaggccagggctggggcggcaccgcgcagcggccacggggtccc

SEQ ID NO: 197505 - DNA, 40 bp, Homo sapiens
  chr1:45098109-45098149
  hyper
tccctcactgcctgccgctcctggcttgcctgggtctctt

SEQ ID NO: 197506 - DNA, 114 bp, Homo sapiens; identical to SEQ ID NO: 403
  chr1:45098213-45098327
  hyper

SEQ ID NO: 197507 - DNA, 80 bp, Homo sapiens
  chr1:45139911-45139991
  hyper
gccgcatgaggggcggggctacagctgcgctcgcaacccacaggttcatgaggtcacctccccgcgcctggacccaaccc

SEQ ID NO: 197508 - DNA, 360 bp, Homo sapiens
  chr1:45285646-45286006
  hyper
gctttgaagagaaacccgagtatattcgtgacttccgcttcgaacctcgcagggagaactaacacttaacacacttatggttgttggatgcctgcgtggtacgcactccctatatgtagtttatgcacacagatgcgtgtaagaggcatcatgctctaaaacagtgcagaaatgcgcgcacagagggagtgcaagcatcttgagggtatcttttcgtggtgcaccatgggtatgcaaatcacaggcggctccgggctgttccgcgccaccggggaagccatgggtcactgatctcctttgctctcctatgctcctctctgctggtcctcctgggacccgcaccccgtgggcggcgccggg

SEQ ID NO: 197509 - DNA, 208 bp, Homo sapiens
  chr1:46954656-46954864
  hyper
acacacaccttttgggaagccgagcctctgcctgattgagagccggccccagaacgtcctcttcctatgagccggttcccgcctggagggagcagagcgctggtaagagcaggaccatctcaggcccaggattttcccgaagtggaccggtcgccgagtgtgtttgttcccccagtcccggcgacaggtgcctgtgctgtgtgtgaag

SEQ ID NO: 197510 - DNA, 312 bp, Homo sapiens
  chr1:46954904-46955216
  hyper
catccaggtgctagacaggtgagcggctgctaggagcgcaaaccagcgcacccgcggggtgtgtgggcggcgagttcagagtactggctgtggcgctgcatggtggcgcgggggtggcagtgttgttgcaggtggtgtggaactgatgggaagaggtatgtgtgcgcgcgtgtgtgtgcgcacaaccttgaagggacagtggggacgggagtccgtcggggctcccccaggtcacctctacggactccagctgccaagcgtcggggtgggaccggcgagggggaggtttctcaagacctttcaacaccccag

SEQ ID NO: 197511 - DNA, 223 bp, Homo sapiens
  chr1:46956018-46956241
  hyper
ttacttcgcccctgaaaaaaaaaatacaaaaaaggtttggatattaagcggagacaaatccttctcagtttggaagggggcggcgcggggagggaggtggccggcgtaatgcggaccagatgcggcctggggagttgcggagccctgggcgggggctggggagggggcgcggccggcagcccagttcccagcctgcggagcgcagaggccgcccacgccctcc

SEQ ID NO: 197512 - DNA, 167 bp, Homo sapiens
  chr1:46957171-46957338
  hyper
agggctttattgacttgatggaccttggaggaaaggggctgtctgtaccgcaagggttgtgtgctccacagccgaggaaattgtgcaagttcctacctggctgtggcgatggcagggcgaccagagtcctttcccctctctagtgctagggattctgtgcgctgcag

SEQ ID NO: 197513 - DNA, 72 bp, Homo sapiens
  chr1:46957804-46957876
  hyper
gaggagtggaaacccgccccaggcgaaggccatggcgaaggacaagcactcgggcctcgggatgggctctgc

SEQ ID NO: 197514 - DNA, 31 bp, Homo sapiens
  chr1:47070162-47070193
  hyper
gtaggaggccgggcgcgacaggtgtaattaa

SEQ ID NO: 197515 - DNA, 198 bp, Homo sapiens
  chr1:47078538-47078736
  hyper
gctcccagtggctccctccccgccaggtgacactcaccaacacgcgtgggaaagacctcttcgtcgttgatgaggccttcgatccagtccatgagcaatgccatatagcgcggcgcagagagcttggcgggccgccggtactggcgctcgtcctgccagcggtactcgtagcggggcccgccggccatgaccgggcag

SEQ ID NO: 197516 - DNA, 45 bp, Homo sapiens
  chr1:47078782-47078827
  hyper
tgcggttgaagaagtccaccacgtgcacggcgatccagtcgtcga

SEQ ID NO: 197517 - DNA, 405 bp, Homo sapiens
  chr1:47903680-47904085
  hyper
cctgcctcagtcccccgccccctccccgcccgcgcgcaaaacgcactcgccccagaggcagcgcggccgagcccgagccgctgccggagcggagccggagagtggcggcggcggcggcagcggcaccatgaccctgggcagctgctgctgcgagatcatgtcctccgagagctccccggccgcgctgtccgaggccgacgcagacatagacgtggtgggcggcggcagcggcgggggggagctcccagctcgctccgggccccgcgccccccgggacgtgctcccccacggccacgagcctcccgcggaggaagccgaggcagacttagccgaggacgaggaggagtctggtggctgctcggacggcgagccccgcgctctggcgtcccggggggcggcggccgc

SEQ ID NO: 197518 - DNA, 208 bp, Homo sapiens
  chr1:47974085-47974293
  hyper
agatgctgcgggcgggcggcgcggggggccgtccctccctggggccgccgcggccgcaggcccggcacggattcctttcaggcagaggggaaacatttaaactcgctcacctttgaactgccagggacgctgtttaccttggctgcccgagtggcagttttacagatattaaataccgacccgaggctgagccggggctccttcgctc

SEQ ID NO: 197519 - DNA, 220 bp, Homo sapiens
  chr1:48174461-48174681
  hyper
ggtgaactggcccttgggagagggctggagggacgcggcgggaacgggctgagtacgcagcacccgggtcggcaagggctggggttctgagatcagagagaaaagaggacctgggagtcggaggcgatctccctggccccagccgaccctctgagctctagcgagcctgaatccggctctgggggtggcgccccccgcctgctgcggctcccggggccag

SEQ ID NO: 197520 - DNA, 379 bp, Homo sapiens
  chr1:48175431-48175810
  hyper
gacccgggaatcggggtgcgccgtcagtgcccagagccaccgagccccgaccacacacgcgggcgcgcgttgcggcccggcaatctcgggatggcgggttacagtcgggccagaggctgagcccagaactgggggccgaacacccgctgcccttcgctgcccttcagcggggaccgggcggggtggggctgagcattctggcccctaggcttctccgactgttttggcctccggagcaacccggtgtctgcggaagattggaagcgactctccagcaccccgccgccgaggcccgctctcccaggccatgccggctggcgccgaggccgcgggacctggaagggtcggagtctggtgctggtgccggaaggccagccag

SEQ ID NO: 197521 - DNA, 179 bp, Homo sapiens
  chr1:48190695-48190874
  hyper
tcccaagcacatctaccctgcggttcccctgggccaagccgagtcctccccagcacaacagcgcggcccctcggcctccgcttaacctgggcgcgcgggctggctgggccggggccattatgcgggcgcatggccggccgcgccggggcgcagagcaaacttaaccttcatttgggagc

SEQ ID NO: 197522 - DNA, 62 bp, Homo sapiens
  chr1:48191178-48191240
  hyper
gtctcccaggacccgacctggagtctcaggcctccttcctgtctcggcgctgtactccctgg

SEQ ID NO: 197523 - DNA, 59 bp, Homo sapiens
  chr1:48463406-48463465
  hyper
cctcctccttcccttcgccaggcgcgaccgggccgcagcttccccgtgcggccgccaga

SEQ ID NO: 197524 - DNA, 341 bp, Homo sapiens
  chr1:48937290-48937631
  hyper
gaatgaaaagcccccgcgccgcgcacatacactctctctcactggaaagttaggagcgaggaaagaactctgaagtgatttgggaacgatctgaaagcgcgcaagttggaagtcgggttgaagccagcatagcggagcaggggtcaggcctctgcgtggccggagtgggagagcgcttctgagaacaagatggggcaggaccgaaggggcgtgaggtcgacgctccctagggatgattcggagggtgaaggaggtttgggggtggttccgggctctcggaggtgactgagggagtccctgagccaatgcccgggggtgggaggcgctaccggtactcactg

SEQ ID NO: 197525 - DNA, 341 bp, Homo sapiens
  chr1:48937811-48938152
  hyper
gcccgcggtccagcctgggttccgccggagaagcagctgagcgcggggcgcagactcgttgtcatggcagccaggaggggcggggccggaagagaggccgcgcggggcactccagggctacccgcgctgggacgagcgctggaggcggagcttgacgaacgccgagcgaggcggagtcgggcagggggcggggcttccgaaggggcggggtgaggcaaggcagctcttctgtgacgtcaaactgcgcccaaagccggacgaaagggagctgctgtttgtataatgggacggtgctctgttcagggagttggagttcctgtaaggccgtcggagggaacccc

SEQ ID NO: 197526 - DNA, 100 bp, Homo sapiens
  chr1:49242199-49242299
  hyper
tccgcccgggcccccggcccctcccggggtcccagcccccgcccgggtcccaccgtccctccccgcccgcttgctcacctgccagcgccaggatctgggc

SEQ ID NO: 197527 - DNA, 86 bp, Homo sapiens
  chr1:49243013-49243099
  hyper
ggcaatcttgattgaatctcaaagtgtaaacttggaagccagcagaagtttggagtgttttaaatgtagccaccctacccgcgccc

SEQ ID NO: 197528 - DNA, 94 bp, Homo sapiens
  chr1:50489672-50489766
  hyper
ccccgcggcgcgagcccgggcctgagctgggacttgggccccggggcgctgctcctccgcaaccgatccaccgcatcctggcaactgagcaggc

SEQ ID NO: 197529 - DNA, 135 bp, Homo sapiens
  chr1:50893877-50894012
  hyper
tgcttggcacgcagtccttgggggaagatgcgatgttccacatttcagacacgaggtagccaaagttcaacaaggcgacataacttgcctggggccagagtgctgccgaacttcgaaaaagacagaaatccagat

SEQ ID NO: 197530 - DNA, 62 bp, Homo sapiens
  chr1:51425638-51425700
  hyper
gcagcgcgggaagcgctaggcgctcatgcactcggtaaccttcaggcgccccggccgcccgc

SEQ ID NO: 197531 - DNA, 171 bp, Homo sapiens
  chr1:51442806-51442977
  hyper
cctggctgccctaagcaaccttcatcaaaaggctacgggggaaagtccctgtctcggtctctggagactgttctgcttttatatggcagtcccatgaaaacagctccacgcaggaacctagtgagaggcaggaaacaaatttcccacctgagaccccgggtaaagctctgc

SEQ ID NO: 197532 - DNA, 203 bp, Homo sapiens
  chr1:52081941-52082144
  hyper
ccaccgcgcccagccaataaatgcttaaattgcccctgtaggctgttagtgatctatccctacttctttgaccttatctcccaccactttctccctggctcactgctccacgcacactgacctccttgttgatccctcaagatgccacgctcactcctaacatttggtctttgcatttgctattccttcgtcttggaaggctc

SEQ ID NO: 197533 - DNA, 34 bp, Homo sapiens
  chr1:52194844-52194878
  hyper
ccacgatgtctcaccggattaataaaaatatagg

SEQ ID NO: 197534 - DNA, 322 bp, Homo sapiens
  chr1:52194968-52195290
  hyper
tccgttatcaaggtgaaactccggggaccaggctccacagctgccataaactggatggcacgttagaagccggtgggtgtaggtgaggcacgctggcgcccgcgggcccttctccagccgctacccagtgggaatccgcggggctgaagccccgaaaccaggctgagcgtcccagagcgcaacctccctttcccccagcagcgccggcgccgcagaagccgcgtgtccccaggcgcactcccccaaggtgaacccccgccccccacggaggcggctgggtcgcgggtctgggcggggcgctccggacgccctcccgccgctg

SEQ ID NO: 197535 - DNA, 654 bp, Homo sapiens
  chr1:52195348-52196002
  hyper
cgccaatcgtctgcctctcacctcctacagcaggtgacccatggccaatcgccaggggtctctttgccaggagccgccagggccagccaatcggggcgacccctccgccggggaggggacgggaaaggggtggggggtgaagggggtgaagggggtgtcccgggggacgggctgaacctcagtcaggaccgcctgcaccgcagtccggggatcgggtcgaggggagaagaaaaaggggtgctcgggagcagcccccggctacctcccctggaggcacagagggcgggggccttggcgaatggctttcttgctggccacttgcggagtgagtagaccccgagggtctgggagaggggccggcccctacccctgagtccccggggtcccggccgccaggccggagcgcgaatgtcgtgctcaccctgcctccttcccgccgccccctggggtgagtaggacgacgtggctgcccgggcccctcttccttgggagttctcagttcctcagcctagatggggtggaggctgaggtcagggcctccagttccaccgagagggcattcgcccccaaatgagactttggaggaggtctctttttttctattcatttttgtggaactctgttttccttttgaaagctgtctcagaatatgat

SEQ ID NO: 197536 - DNA, 574 bp, Homo sapiens
  chr1:53017722-53018296
  hyper
aaaatgaagaagcagatatacggtatctaagatctcacgcaaaattcatctaagacttcgaaatcttctgaaaagaaaatgtgtaatcaacgttgttaatacaacagtaattcatcccattcaagtacgactagaaatcccgctgatgtgcttctttcaggtctaaacatctcattctttcgcaatccagataccaacaggagtctgaaacccttcgcagaggcgtgcaacacactaggagagcgctatctgtttacaaatacgaatctcagttacccacgtcaaaaccgcgcattaccacctttcgactggggggcgggggagagagaaggcgggcgagcaagaaacaaaatccacacagacacctctgccttctccctacaaggacgagcccggggaaacattcagtatgtattatatgcgtgtatacatttatatacattatgtagtcacctatgtctaagcaagggtgaaagaaaaaggtacacatgacagggaatcgtaactggacccaacagaaatgttcaaaccaatcccgttaactcaaaatccgccccgctggtctacaacaggt

SEQ ID NO: 197537 - DNA, 273 bp, Homo sapiens
  chr1:53387231-53387504
  hyper
cggacccgccagggcgcgcacttggatctctgagcccccggccgccccgtcggaagcgcagccgcgggcccgaaggggcctccaggggcgcaggaggcacagaacgcgcagcatcggggcgcaggctgggagtgaaggtgcttctccggccctgcaccgtctcggctcccgctgagagctcgcagttccggcgtcgggcgaagccttcgccaattgctccacctatgggccaagcgtctgttgcctccttccgcacctcccggggacagggag

SEQ ID NO: 197538 - DNA, 161 bp, Homo sapiens
  chr1:53527606-53527767
  hyper
ccgggtgggggttcggggggcgtggtgcggcggccggggctgagaggggtcggtgcggcggctctgcctccccgggaagtgggaaccggccaagtcccgagcggggaggggcaggctttctcctgcccgcgcctggggggaccctacgcctgtgtccgaag

SEQ ID NO: 197539 - DNA, 55 bp, Homo sapiens
  chr1:53686483-53686538
  hyper
tgactccaggattcggtggtgccacagacagttactgaacgccaattttgtgcct

SEQ ID NO: 197540 - DNA, 151 bp, Homo sapiens
  chr1:54665659-54665810
  hyper
cgcttcacctcacgtgaggattttccaggttcctcccagtctctgggtaggcggggagcgcttagcaggtatcacctataagaaaatgagaatgggttgggggccggtgcaagacaagaatatcctgactgtgattggttgaattggctgc

SEQ ID NO: 197541 - DNA, 148 bp, Homo sapiens
  chr1:54965082-54965230
  hyper
caaagcgtggctccgcagggcaagagggaggcaggcgttctggacctgcacccccaaccccgcccccgcccctgccataggcccagtgcgggtgggcgccgcggccccgcctcgccgagcggcggcggctgccgggctccgggagcgc

SEQ ID NO: 197542 - DNA, 360 bp, Homo sapiens
  chr1:55266582-55266942
  hyper
gcctcgtccagctcctccaggtagaatgcgaaagcgcccaggaggtgacgcacagcggggcgctgcggggcggccgccagctggagctcctgccgcagaccctcccgctgcagcttcaggtcccgggcgcgctgtggggccggcgagcgcggctcgaagttcaactgcatctccaggtgaaagtggcccgggaggtagtccaggtcgtcgatgagggcgtctagatcgtcggccacagcctccagctccgccatgactgctccctctgctcccctggcctcacccttgtccctgaggctgtggagggcagtggatgggggcgttccccgagcgagctccgtgcgggaggcgaggggcagc

SEQ ID NO: 197543 - DNA, 236 bp, Homo sapiens
  chr1:55352448-55352684
  hyper
ccaggaagtcctggccgcccccgcaccgcagctcccgtcgccacctcgcgtcccgctatccccgcgcacgccgcctccggccctgagtcccggccgcacccggcgccgctcacctgcttctggatgtcccgcacgcgctgctcgtgcaggcgcggagcgctgctgagcttgaacaccacccaggcgcgcacgtagtagtagatatcgaagataagcgagagcggcaggaggaagag

SEQ ID NO: 197544 - DNA, 193 bp, Homo sapiens
  chr1:55353149-55353342
  hyper
ggggctgcggggccgcctcttccaaacgcgccttaagcggttttgcagtggctttccgccggagggctgggaggcgccccggccctgagtcagtcaccctttggccggacaggcggttcccgggcgcggaggatggaaacctggcggtaacctctgcaggtcgtgccactcggtgtgcgcaaggtctccagag

SEQ ID NO: 197545 - DNA, 451 bp, Homo sapiens
  chr1:55462222-55462673
  hyper
ggatcccgaaagctggggttagcgcgccctctgctggacgatgaaagactccgcgcgctctgctccccagtcccccaggtggcccgggggaggtgaagtaaggcgggagggcggggggactacaggagaggagggggagctgctgcacccgaacatttccagcgcaccctacacacatgtccttacttaatccctagcccgactctgtggaagagcttaggtgagacccattttccagagttcctacctgtttcctacttgctactgaatttcttactcgtagttaccttattttttttttttttttttaagaggagaagcgactcagagagaaaaggggcgaagaaggctgggccgtgtagaggaaagaaaaggcgcgagagaagaagactgcccgggtgaccgcgaggcctctgaggaatggctgaagagcagatccatctacatgggg

SEQ ID NO: 197546 - DNA, 354 bp, Homo sapiens
  chr1:55505162-55505516
  hyper
tggtggcgtgatctgcgcgccccaggcgtcaagcacccacaccctagaaggtttccgcagcgacgtcgaggcgctcatggttgcaggcgggcgccgccgttcagttcagggtctgagcctggaggagtgagccaggcagtgagactggctcgggcgggccgggacgcgtcgttgcagcagcggctcccagctcccagccaggattccgcgcgccccttcacgcgccctgctcctgaacttcagctcctgcacagtcctccccaccgcaaggctcaaggcgccgccggcgtggaccgcgcacggcctctaggtctcctcgccaggacagcaacctctcccctggccctcatgggc

SEQ ID NO: 197547 - DNA, 360 bp, Homo sapiens
  chr1:57044295-57044655
  hyper
tgagctggtttaacagttgcccacgaacgcttaagcacgcccagacccactcaagtacaggccaagaagtcggtgggatcggggagggcgggggcttcgggcctgggcggcgcaaaggctccccaggaaggctgcgggggccccccggagctgacggcgcggcgcggcgcggcgctgcgcggccccggactgggctgggacgcgcgccgagggacgaggggccgaggggccgagggacagcggggctgggctcacccatgaagaggcagaagaggtcgaggcagatgagcagcacccgcttgctgccgctcctcctcgggttgttgttgagcgccgggctgccgccgttcttgctctccg

SEQ ID NO: 197548 - DNA, 207 bp, Homo sapiens
  chr1:57044835-57045042
  hyper
agccggggctgcctgcctccaactgcagaaggtggtgttttctgctcctcctgcgcgcctctgctttcctctgtcaaccctaaatcgttctaaagtccaaggggaagagagccagatcccgagcagaaacttttgcagagctgcgcagcttggggcgcgctgttgtggcgcgcgtctgagtgcgcgagcgagcgagtgggcagcgcg

SEQ ID NO: 197549 - DNA, 230 bp, Homo sapiens
  chr1:57888067-57888297
  hyper
cccaggcggagaaaggcgctctcgctaccgcaagccctacatcgcccctctttctaatggagctaaacacaggcgtgcgccgacatccaaacgcacacgcagacaccgacccacgcgggcgcgcaccccagactcggcgacacatacacaccggagcgcacagatgcccgcgtcgcggcgctctccactccgcccgccgccaagagcggagcggtagccaagcgcccccg

SEQ ID NO: 197550 - DNA, 435 bp, Homo sapiens
  chr1:59042557-59042992
  hyper
gcaccagcgtgcgggcgttcttgggggcgctcatgcgcgccttgagcagcagacacttggaggtcagcgtggagcagtcgaccgccatgcccgagcccagcgcgcggcactggcagcggccgccggggccgtcggggctgcacacggtcatcttgttggtgggacacgtgcagttgtcctgcgcggccgtgtggccggtcaccgccgccagcaccagcagcagcagcggcagccgcagcggtggcggcgcgaggccggggccccgagccatggtggggcggaggaacgcggaccggacgcgggcggatgaggcgcggggactcgtcggggctcgggctccggcgtctgggatggtctgcaggcgtctgccgcccggccgctccctccggctcttatactctacccgacctgcccggctggttccaccaccgaccg

SEQ ID NO: 197551 - DNA, 101 bp, Homo sapiens
  chr1:59249797-59249898
  hyper
tcccattggctcgcgtcgctctcaggggggcgggcccgcccgtcaccatggagactccaccctagaagattcttctctgggcccgcggaggctcacgggat

SEQ ID NO: 197552 - DNA, 377 bp, Homo sapiens
  chr1:59281467-59281844
  hyper
tctctccccaacccacctatcgtcaccgagattgtaaaacttctaaccgggaagaatcaaatacatgcacaacgggttacaggttaacagacagatgggagcggaaagggacattccagcgcttccctgggcgtgtcgcacagggcaactccaaccacaggcgaattttcctgggtgacagttaaactcctttttgcatgaaaaaatacagattcttattaaaacaataatcgattagactataaaactctcaaagttatttcggatcaaaattattttcggctgtttccacacctttttttctcgattgtgcagaaattcttcacaccgtctgcacagatgggcaaactgagacccggacgagtcccattgagaga

SEQ ID NO: 197553 - DNA, 121 bp, Homo sapiens
  chr1:59369443-59369564
  hyper
cgctcgccacgtcagcgcacgcccgccccggcgctccgcccggccctcctgggcctccccatagaaggttaacccgggccggatcccacgaggactggtgggggccgggcggcccgtgatt

SEQ ID NO: 197554 - DNA, 190 bp, Homo sapiens
  chr1:59762030-59762220
  hyper
tatttcttacagtcgcctacaacagtcctggtgtttagtaaacggtctgacacacacacccatcaggggctgcggagagtccgcctgggtaagctccgcaaggtgagtccccagagccgggaactcgcagcctgagcagacgcagcgtagccgatcttgggtccgcgctcctcccgccttgcccagccct

SEQ ID NO: 197555 - DNA, 245 bp, Homo sapiens
  chr1:60280812-60281057
  hyper
gcagcctaagctgcccctgtgcgacagcctcatgatctgggtgagtgcgaggaggcgagagggcgagggggccagggggccgaggcgaggagcctggggcgcccggttctcccaggtgagctggggctacctgcacagggtcccggcgcaccctgcccttctcacctcgtgcccttgaccgagagaatgccacctgcgggtcgacgggcaggtgtgtgggcgcgggttggtgtccgggggtgggg

SEQ ID NO: 197556 - DNA, 230 bp, Homo sapiens; identical to SEQ ID NO: 103568
  chr1:60539399-60539629
  hyper

SEQ ID NO: 197557 - DNA, 178 bp, Homo sapiens
  chr1:61508954-61509132
  hyper
cgatcagaaagtccggctcccctggccccagacagtggctcccgggggaaccagcgtggagggtgaggagggacctggccttcgaaggcaggaaggacagaacccccaagccacgacggcagcggggcgcggggacggccgggctccagccacagaggcccgaactcggcccgcactg

SEQ ID NO: 197558 - DNA, 40 bp, Homo sapiens
  chr1:61516034-61516074
  hyper
cgctggcccccactccgcttcctcccggcacccgcttcgc

SEQ ID NO: 197559 - DNA, 280 bp, Homo sapiens
  chr1:61519704-61519984
  hyper
cgcggtcgtgaccttgccgagcagctcctgcgcctcaggctcggtccctgcacccgccctcactccagtccctctcagggcctgcagtggaagatccccgtggtccgggtgggtggcgatggagagcagaattgaatttatttgctctcaaattcccctaaaagctctgaaactgggaaagtccgcgggctgccagggacagtaatcactgtgtccccacccggacgcaggaggtctcgggaggagctccgaggccaagcgcccgcgacttctgggtgcc

SEQ ID NO: 197560 - DNA, 359 bp, Homo sapiens
  chr1:61547845-61548204
  hyper
ttacccagtaatgcgctgatcgggggagggggcgggggggccggggagcgagcgggagagcgagcaagcgagcgagcaaggagcgagccacggagagagccggggagcgagcgagccagcctgcgagcgcgagcggccgcggaggctcgggacccggctggccgcgcggcgccgcagccgccccctcccccacaccccctcccccccgcggcggcggcgcgagcgggcggcggctgtgcggtgcggtgcagagcggaggcggaggcgggcgcgcgggcagctcgcgggcacccggccgggccggcgcgggagcgggaaagggtgcgctatgcctttaacacccgcgtacagtaggcatg

SEQ ID NO: 197561 - DNA, 621 bp, Homo sapiens
  chr1:61548587-61549208
  hyper
cccagggcgtgcgtctcggtgtgtgtctgtgtctgcgcgtgtttctgtgtgtgtgcgcgcgtgtgcccgcgggtggggggggggatcccgcttaaagaaagtaactttgtttccatgcgggtgcattcctcttgcacggccatttgtgtgggcacatggctaatggcgccctcttattaatgcgttaattaatatcggggcgacggactgcggaacagcagtgttttcggacaccccgcacgtgtttcggcggggttgcagtccatgacacgcagaaatctggctcagcgtttctgctgccgggagcagggattccgtagtgccgcagcgcccggggagggggccgccgacggagcccaccgctcaccccgcacgctcgggccggctgcagtcctcgggtgcggggagacctcgggtgcctgcgcccaacggcccgctccccgcagcctgcgctgccgcagccccccgccgtcttcccgaactcttacttttgtttattgtttgtcagccttcggggtccggccgcggaaaggacgcgggctcccgtcccggccccggcccggacagcgcccctcggacgcgggcaggctgcggctagccctcggctgagcggggctacgt

SEQ ID NO: 197562 - DNA, 177 bp, Homo sapiens
  chr1:61549310-61549487
  hyper
cccacgttgtgcagggcgccgaacgccggaggccgcgggccgcgggccgggtagcgccgggcagagttgggctcctagccgggagccggagcggcggcccgggccggacacggctccccccgccgccgccgccgccaccaccaccaccgccaccgcgcgactccggccgctccgcgc

SEQ ID NO: 197563 - DNA, 109 bp, Homo sapiens
  chr1:62207660-62207769
  hyper
actcccacatttacacgttttagaatattttattttgcgtcagcgaatagagaaaacaaaggagggatgagagaacaggaaaggaaaggggcaaaaagacaaagtgtta

SEQ ID NO: 197564 - DNA, 420 bp, Homo sapiens
  chr1:62207842-62208262
  hyper
cctccaaccacaccggtctgtccggatctccctccccgtcagtggcggctgtccccaccacgcgcggtctgatccgccaccccgcccccacagcccacttttcccaggcccttggccatcccgcgcccggtaggaattcacctgcacgtaaacagccagggcaaccgtcctccctccttggagcccgcctcccgcggccccgggctccctcccccgccccctgcgccaccccggtgccccgccccgggcggggagagtcggggcgaggggagggcctgccaggtgaggcgcggtcaccctgggcctctcacttccgcccaggtgaggcagggccgacaccgagcccgcccgacccgggctcccacctgctcctccagcgcaccaggtaaagcgtgaggtcccggctgtgcagtgcgcgct

SEQ ID NO: 197565 - DNA, 519 bp, Homo sapiens; identical to SEQ ID NO: 510
  chr1:62208291-62208810
  hyper

SEQ ID NO: 197566 - DNA, 99 bp, Homo sapiens
  chr1:63791878-63791977
  hyper
ctcggccctgcgcgcgtccttttggttaatcccggccagtccccggtgttgtcgtccactttgcctccctggtggtggagatgcctccccgtctcggat

SEQ ID NO: 197567 - DNA, 163 bp, Homo sapiens
  chr1:63792016-63792179
  hyper
gctttgaaagacacttccttgcaaatacccaatctgttttcctggtaaacggtaaacattattgtgtcttgagtaaacattccttcgggatcagggtcctaaaataaaacaagctgccgggggtgagatagtttaacttgataaacaagaacctgataaccac

SEQ ID NO: 197568 - DNA, 71 bp, Homo sapiens; identical to SEQ ID NO: 523
  chr1:63792231-63792302
  hyper

SEQ ID NO: 197569 - DNA, 266 bp, Homo sapiens
  chr1:63793072-63793338
  hyper
tcaacactactgatatccactttttattccacttaagaaaaaaaaactaaaggaaggggggcagatttatttgcaataaaagaagaaagcgggttgatttttatggggaagattttagctttcggctacacacgcatttagacgtttctactttctctagcactcattcctagaaaaatcaatccagccctgaggcctgtggcccctagagcgttctcaggaccaaggtctgagttgggaccgcccgtatctagttcctcggaggg

SEQ ID NO: 197570 - DNA, 338 bp, Homo sapiens
  chr1:64239452-64239790
  hyper
tgtcaagtagcctcgaaggtccccggcgctcggttcggtggcgagtttgaggagtgtgggggaggggaggggagggagcgtgcccgagacgcgggagccgcgaccgctttctgcgaagtcggggagggtgcgggcgttgagaggctgcagcagagggcgctgggtcgccagcctgggccgcgtctcccattggtcggggctggggcgctgggctggagagttggtggaaagtgacaagttgagcgagagagggagcgtggagagctggagcagccgccaccgccgccgccgagggagccccgggacggcagcccctgggcgcagggtgcgctgttctc

SEQ ID NO: 197571 - DNA, 201 bp, Homo sapiens
  chr1:64936233-64936434
  hyper
tggtggccgcccgcgctcccgcgctgtagccgggcgccccctaagtttgggagccttcgccaccgcggcgcggagcagagcctgcaacagaggaagaaacttttgcggggtgcgccgcgcttttgcggggggcacctcccgcggcccgcttccccgcgcccggagcccgtcggcggggagtggggggaggcagcatggccc

SEQ ID NO: 197572 - DNA, 419 bp, Homo sapiens; identical to SEQ ID NO: 35809
  chr1:65210939-65211358
  hyper

SEQ ID NO: 197573 - DNA, 60 bp, Homo sapiens
  chr1:65468242-65468302
  hyper
ccaagcctgcacccagggagcgctcagtaacgcagcgctgaggagtaggccaccccggag

SEQ ID NO: 197574 - DNA, 155 bp, Homo sapiens
  chr1:65468660-65468815
  hyper
cgccgtcgcgcctcgcacggcgtgagacaacctagctttttttttttttttttttttaagaaaagcattggcaccgcagcagcctcccccgcttcttccctactaggacgcccgcctgactcgccccattgcacaattcttaccgtggaacagcc

SEQ ID NO: 197575 - DNA, 43 bp, Homo sapiens
  chr1:65468816-65468859
  hyper
cgtgactcggcgggagcccaaaagtttcccaggtttcctcagc

SEQ ID NO: 197576 - DNA, 153 bp, Homo sapiens
  chr1:65534604-65534757
  hyper
ggggacgggactcacggaacatcgctatgtgcttattgtgaattatttttattagactcacagagttgaccactctcccctttgtgcatccactgtatggtttttacatttattttctggtgcctttcacagatcagcgtacggcacagttgc

SEQ ID NO: 197577 - DNA, 38 bp, Homo sapiens
  chr1:65614491-65614529
  hyper
ccgagccacccggccgagggaacgagaactaggcaggg

SEQ ID NO: 197578 - DNA, 295 bp, Homo sapiens
  chr1:65614752-65615047
  hyper
gcagcctcgggcctcggggcagagccctgggtggctttgaaaggcctgtctgttcgttgtcgccttctaaggtaaactctccccagcaactcccccccctcccgaagccgccgggcctggccgtcaggagactcggaggagactcgttctgataaattacattttgtaatgcagctttcctggaaatggcttcttgagctgcctcccttggcatgagatgcctcctttggctggcgtggtgaacttggggatatatagatcgcctgatttcttagtctgacggggttgagtgcgt

SEQ ID NO: 197579 - DNA, 39 bp, Homo sapiens
  chr1:65720329-65720368
  hyper
agggtgagtgtgggcgcggccggtcgggacctgttaccc

SEQ ID NO: 197580 - DNA, 443 bp, Homo sapiens
  chr1:65775344-65775787
  hyper
taattccttcttcagccctttccaccttccatctcccttttcgcttcccaggttgattattttctcttttctccgggcttgcccatgagcctcctcgggagctaccggaaaaagaccagcaacgatggttatgaatctttgcagctggtggacagtaacggggacttaagtgcgggaagcggcggggttggcggcaagcagagagtgaacgccggggcagcggcgcggagtcccgcccgacagcctccggaccgcgccagcaccatggacagctcaggtagcgctgcccgaggggagtgcagcgctgagccccgcgcggcctccggagcctcccagtcgcccggcccgaggcccccccgtggtcccccagccccggtttgcgagagagccgggctggaggcgaaggcttctaataccacctgggtgtcgagtctctaatttct

SEQ ID NO: 197581 - DNA, 81 bp, Homo sapiens
  chr1:66258064-66258145
  hyper
cgggcggccgggggagggtgtgtagtggcagacggccgctgggattatgaatgggggctggggggccggcgagtgtggggt

SEQ ID NO: 197582 - DNA, 230 bp, Homo sapiens
  chr1:66258847-66259077
  hyper
cggcgtccagagcgctgcggccgcggcggtgcagcagaggcgcctcgggcaggaggagggcggcttctgcgagggcagcctgaggtaagggctgcctaggaggctgcgggtttatttttcctcattctcttacttcatcacacactgaagcctcaatggagagtgtagggtgctgtggggctgatgtggggcaaagagggaatggggccgccgggcctggatggtcgtct

SEQ ID NO: 197583 - DNA, 60 bp, Homo sapiens
  chr1:66999412-66999472
  hyper
ggaattattaagtttttcttaaaaaaacaaaaaaagaaagaaagaaagaaaaagaaaaga

SEQ ID NO: 197584 - DNA, 50 bp, Homo sapiens
  chr1:66999673-66999723
  hyper
ggaatggggacgggaaataggttctgtgtgctctccgggggtattgtgtc

SEQ ID NO: 197585 - DNA, 138 bp, Homo sapiens
  chr1:68001181-68001319
  hyper
acactgtaaattagtcgagtttctccagttcaatacaggaaggctgagtgacttgcaggtggtgttcacacttttgccacatggggacgccaccaccgttggtagccggacatactggcactccgtcagggtggaata

SEQ ID NO: 197586 - DNA, 115 bp, Homo sapiens
  chr1:68297572-68297687
  hyper
cctaggtgagggccgccatcctgcgataatttacttcgagagctgcgaagcgctggcaagggtgcagtctggtgactagcacttttaaaaacaaagccaaactccgcttttaaaa

SEQ ID NO: 197587 - DNA, 606 bp, Homo sapiens
  chr1:68297773-68298379
  hyper
cccaggaaatataaactgtgtcggcaaagacagcaggggggagaggaagtaactgatgggaaggaagctaatcatgtgaagtttgtccaactccacacggtctaataaattcccgtttgtttccgctgggagcagccattaaacgcgccctgacacgtgggcgcaggaacctcccttctacctctggtgttcagagatttccttctcgacccacttgtttgtatacaaccacgcccggcaggatgaccaccagatgaccggccgcagcaatgcctccactcagtcccagttgggcaaagtttcactccactgcggcgacgtgaacaagaatcacggcttccttatcgtgagttatgaatgatttaagccaagtttacaggacacacaaagcgagggacgagtgagtgacgggaggtgctaagtgacagcgttttaaagttagctttaattgatatgccctaattaaaatgaaaaacagaattcaccctgccccacgggataactgtcggggcaataattaaaaaaaaaaaaatcacccaagactaagcctcaacctcccccttaccacttgcaaatacagtctgcagaaaagcagcctcgggtccc

SEQ ID NO: 197588 - DNA, 712 bp, Homo sapiens
  chr1:68298601-68299313
  hyper
ggggcctcccaacccggcgcggggcgcacggccgcaggctggcgaggaggcaagcgagctcaaggggagacctttccttccacccccagccctagccccagccacagccgtgggggcggcttcccgcaacctcgggcggccgcccgtcgagggcgcgcgcgccgtttctgcctctgggtctcggtgtcccttggccccttcctccccctccccccggtctccggcgcccagcgcccagaccagtccccgccctccagcaggacactcttccctccttccttccttcctccgctccctccctccatctcgcttcccagcacccgggactcggaggcggcccccgaactcgctggccgacgccccgcgccgcgccccgaccccgcggggacccgactcaccacccgcgcccgccgcttggtactcacccgcctgccggtgcgctgccccgccgtcgccgccgggactcggtctctaagggctcctggagacggctccgacctctcctcctcctcctcctcttgctcctccgggcgccggctccgcctcgctggggtgggcggggcggcggcggccccgggctccttcctccgcgccgggccctgcctcccgcccggacgccctggctgtgctgtcccgggccggggagcccgcgttgtggccccgcaggaggaggggcgaggcctggcctgtggaagctcggtggacgtctggt

SEQ ID NO: 197589 - DNA, 175 bp, Homo sapiens
  chr1:68696600-68696775
  hyper
tctggcagcgacgccgccggcgcccccgggcgttttccccgcaccccacatcgcgtgggcgcccgtaaaggcacgcgcggagaaagcccctccgtggactccccactccgcaaagtttaacaaagccgtgaagtaaggaaaccgaacctcccgtccgcgcccgctgcaaagttgg

SEQ ID NO: 197590 - DNA, 445 bp, Homo sapiens
  chr1:68697166-68697611
  hyper
gatacgcttttcccctccgacctctccaacttcccgcggcgctggtcaaggactccctcccaccccaccccatcccacccaacctcccggccgacaattcggacctgtccacggcagagcgtggggtggagtgcggcgggaaagcagagggcgcgaaggtcgggaccccaaattgcaaaccctcagcccctagcaaagacgaccaaatgcatttacaaccgtgcaagtatctcagccttgtaacagagctccgggtttgcgccgggcacagttccccgactcttctgttgttcctaataaagtcgattacgttgccctcccggagctgattggaagggaaccgagaggaaaagggggggaacgcgggaaaaagcgggggggggggggggcgagcaatcaactttgtaacccagcgcttcctcgcgcgatccgtcgccatgcttaa

SEQ ID NO: 197591 - DNA, 427 bp, Homo sapiens
  chr1:68698086-68698513
  hyper
cgctgcaaaacttcagaggtgctggagcgcggcgaggatgggaccgggacggaaggcgcccgcacggattcccccggcgcagccggctcgggttcccccaatgcccggagctgtgattgtggccgctccgccgcctgtggacgcttaaaggagcagggaagcggatcacatgacgccgcctccctccctttcttcctccctccctctcgcgcttcctccctccctccctccctctcttcctctaccccttgcccaccagttcggggctcagagctctggcgggtgctggcgcctggctcccgagtctggcctgcaacctgtctctccaaggtctgatgccatttaggggttgctgttgatgttaagcgggttccccctgcccagcttctcacaggtttccttttctggtttccgaagtgcgagattt

SEQ ID NO: 197592 - DNA, 231 bp, Homo sapiens
  chr1:70033272-70033503
  hyper
gagctcggcctctcgtcccgttctcgaaaagcagcctatcgtgacggagccgggagaaggctagcgtttcaatcctgtgcaggactgggatttttcttctcataatttgggggagccggagtagaggtcagagggacaggcgaggatctcaaaaagagaccgagggttgtgaacatggttaccccctcctatcattggaaaatctccttgacatttttcacactttgaagc

SEQ ID NO: 197593 - DNA, 83 bp, Homo sapiens
  chr1:70034574-70034657
  hyper
ggcaagagaccttaaagggttacatactgcgaaaaggaaaggtaaatgttgggcgctggtgctgggaccattggttccgctga

SEQ ID NO: 197594 - DNA, 58 bp, Homo sapiens
  chr1:70035030-70035088
  hyper
tcctttgtgtggcacgagaagctggtgaacctgcctattcccaatccagcgctgggtc

SEQ ID NO: 197595 - DNA, 106 bp, Homo sapiens
  chr1:70035537-70035643
  hyper
accatctgcgactcccacgttcctttcgaagttctccttcaaaaggaattacaaaaaaaaaaaaaaaaaaaaaagcgatgggggtggggatcggtaagacacaggg

SEQ ID NO: 197596 - DNA, 44 bp, Homo sapiens
  chr1:71512818-71512862
  hyper
cgatgaacaacgaggagagcccgaaaacagtcatggtcagcccg

SEQ ID NO: 197597 - DNA, 383 bp, Homo sapiens
  chr1:72748267-72748650
  hyper
cgccacaggatttttttttttttttttttttttttttttttttggtgggtgggtgggtttcttttctttctttcttccccccaccccagttgttgggtgttgtttctctctttttgtttttcggtgtttttgcctcccctcctcctcttcgctttccctccctccctcccctccctccccctggcaccacactacacctcctctcggttgcttttggccgcgtccggagtgtgtctaattctcgggcggctcgcacaccatctagcgaggaggcgagcgcgccggcgagtgagggaggaggcgcggcggcgggggaggaggcagggcgagcggcggcggcggcggctgcaatcccagcagcagcagcagcaacagcaacagca

SEQ ID NO: 197598 - DNA, 612 bp, Homo sapiens
  chr1:72749029-72749641
  hyper
ggcaccgtaagtttgaagtcctccaagttgtggtcggcgccatcatgacgccggcgactgtgagttgtttttttgtttattttcttctaatcttgcctgggtggctacgctgcagttagcgagcagccaactagttctctctgcgttttctcgggaataggtagggacggtggcggggcgctgcttttttgcggggacacgaggaggtgcaaggccttgcggcagagcagcttgcgtgtttgtggcggtcggcccgtatggattgcaggacgcccctcttttatctgtgggtgttgacactaagttgtgtgtgtgagtaggggattgtttatggtcaacatggagtgtgtgtgtgatagagagcgtgtcgtgcgcgcgggggcctgtgcacgcgcggcacgcaggcgcgctgggagggacggggcgggtcatgctgggatgtagagtcgggaaaagactgcaatcaagtgttttaattgtgtagagcccaggcggtccagttatgtaagaggcagtttaacccatttgagcctatcaggccgaataatcggcgcatccgagtcaaggcagggcagagttaaggggtttaacgagtcgcagggttgtatttct

SEQ ID NO: 197599 - DNA, 69 bp, Homo sapiens
  chr1:72750578-72750647
  hyper
ggaaataattgtgaaatgacagactctcactaatatcgatgccaaatacctaagtaacactgtcatctt

SEQ ID NO: 197600 - DNA, 59 bp, Homo sapiens
  chr1:76080219-76080278
  hyper
ttgtgtccccctagtgacctctagagcggagctaagctcccacaagccagacttgggag

SEQ ID NO: 197601 - DNA, 154 bp, Homo sapiens
  chr1:76540052-76540206
  hyper
gcccaaagtctccagaagggcgatgccaaacccactcaactttgacaaagtgtgaaacgtctgtaaaaaggagttctctgatgtgtgagaggagacggaaccgagaagaaaaggccgtactctgccccccgcgggacccaggtccccgcctgct

SEQ ID NO: 197602 - DNA, 200 bp, Homo sapiens
  chr1:76540250-76540450
  hyper
agaaaacaagagaaagaagtagcaggcactgaggagccgccggcgccggcgcccaggacggcacgtgacccgggggcggggccgcgcgggccgcgggccagtggatggggacgggggcggggccgcggctcggggggcggggtctgtggcggcgcagcttacaccgcggtccccttatttggatctgcgggaatgtgggc

SEQ ID NO: 197603 - DNA, 141 bp, Homo sapiens
  chr1:76540666-76540807
  hyper
gttgtcttttcctggcattgattttctttttgttcctttggcaaatgcatatggagggagattctgaaacatgcagctggcacagcttcttttcccaccattcctgcctcctgctcgcgcctgcattgaaggagctgcaga

SEQ ID NO: 197604 - DNA, 184 bp, Homo sapiens
  chr1:77333579-77333763
  hyper
cggggttgcctcgcctcctagatctccggcgagaggtccgagggggtggcggagagctgcaggagcgatggaggagtgggcagattgctcaagggatgggggtgcccaaaagcaacagcctgccaaaaactaagagggacggggaggggggacctttgcagactttcttcgttttcttagattt

SEQ ID NO: 197605 - DNA, 84 bp, Homo sapiens
  chr1:78444895-78444979
  hyper
aacagagacgtcgcgaggattaagtttaagacttcgcgagaacagaatttcttttggcacctcctctccgcgcgttcttggggt

SEQ ID NO: 197606 - DNA, 236 bp, Homo sapiens
  chr1:78956556-78956792
  hyper
gctctgatgcatccgagcacggtgccctcttctctcccagtactgctctgtgcccatggaaaagggggcggaggcgagagagaagaggaagaggcggaggtcactcgcgcgccccatccctcccaggctgccagcgcagctaggtgcagagggatcccaggagccgcgcgcgccccgcagtttccgcgctaagggaacgagtgcgcggaggggacgagcggctggaccacagccgg

SEQ ID NO: 197607 - DNA, 135 bp, Homo sapiens
  chr1:82267753-82267888
  hyper
ggggagctgcggcgctgcctcccgcgcggactcggcggccgaggacccgctcgcggccggcctcggccctctccggccggggtagccgctgccctccgcgcctgtccccgcgcggcccccacgccagacggccct

SEQ ID NO: 197608 - DNA, 33 bp, Homo sapiens
  chr1:82269508-82269541
  hyper
ggcatagatttaacggacgtagttgattcattc

SEQ ID NO: 197609 - DNA, 233 bp, Homo sapiens
  chr1:84543141-84543374
  hyper
aaccccgaggacaacgtggtgggctgagcgaatacctcaatgtgcgagagaacgaaaagctcgaaccacgaccgtgcctagggaccaggcttttcctgtggccgatgcggggcagatgcagacccagaggccacccttgcgcgcgatctccaacccgacggtgcggctcctctcggacctggagctgtggggagaaggcagccttttagtgaggagccgccgcgtggcgggac

SEQ ID NO: 197610 - DNA, 809 bp, Homo sapiens
  chr1:84543409-84544218
  hyper
cgcgactgcactccagggcaccgggaccgccagggtgaggagggactctgcgttctgcaaagctagcggttcccactccacctcccactatctcagcgatgggcacgcgagcgccagcccgggcgaccgcgggggaagaagcggtccacgccacctcaggcccccgccccaggctctgccagctgggggtccaccgcccgcccccggggtcccgggcctgcgcgtcacttccggcgcgcgcgcccgcctgcgaagatacagtcgggccagggcctggcctgggcgcgcggctgcccgggggcgcgcagagagggcggaccgcgcgaagggggagtgtctgcccgccgccgccactgctgctgccaccgccgtcgccgccgccgccgccgccgccgctgctgctgccggtgctaaggagttcgctggagccctttcctcagacccggcccggtcttcgcgcccggactcctggcgccagcgctaggcgcactcaccgctctgacgggtgcagacgcgggagttgtcccagactgtggagtggcgggcacggccccagccccccttcccttccctgaccccttcttgccatcgccccagacatggggaacgcggcgaccgccaagaaaggcagcgaggtggagagcggtgagttgaaggccgggtctgggtatccgctgggcgggccggcgcggggcaccgagcgccctccgggtcgcagcttctgaggccgcgggcacgggccaggcctagcagcggccgccgggagtcgttctggggggccgggagaccagctgcctttctcctccatt

SEQ ID NO: 197611 - DNA, 56 bp, Homo sapiens
  chr1:85040191-85040247
  hyper
aagggcggggaggggcgggaggggcggggctccggggcgggcgtgggaggtcgggc

SEQ ID NO: 197612 - DNA, 201 bp, Homo sapiens
  chr1:85358969-85359170
  hyper
ttcccactggagagcgtccccaacctgcaaggccgcgagctgcgctcaaaggggcccgtgcgagccgcgggagggcagcgctcttgcagacgcgttcctgcctgggatcgtccccaggtgggtggtcggccggccccgagagggaaaagcgcccactaaaggaccgctagtacccacaagcctcacggagccatacctcgg

SEQ ID NO: 197613 - DNA, 358 bp, Homo sapiens
  chr1:85462924-85463282
  hyper
attccacgcttcagcggaccagcctccccgcgctcccggagaagggggtcggcgacgcggaggcggggtgggggccgtaggggatggaaccgaggcgcgcgcgagaagagccgaggaagtaagcagtcccaaaagggggcggcggtggggcccccagggaggcgtggggcacgccaagggcgccgtggggcactgacctgtggtgcggcccccaggacaggcccgaggcgcggttgcacaccggcaggtccagcacctccatgcctcgaggcatggcgcggccagggagcggcaggaggacacctagcgtgggacggctacacctgtctgggcgcaggcccgccgcccttgcactctc

SEQ ID NO: 197614 - DNA, 166 bp, Homo sapiens
  chr1:85527761-85527927
  hyper
gtgaggcatggaccgagcctgttagacctggggtcaggccgggccactgtcattaatatacttaagacacaaaactctttccttggtagtggaaagctgctggcctcacccggttcgcgttgagtgacgtcacatagtggcaaccaatcacaagtctgctttgaaa

SEQ ID NO: 197615 - DNA, 161 bp, Homo sapiens
  chr1:85666112-85666273
  hyper
cttgactgtcactgccggcggcctgaggaaggaggggccttcctggcggtctcctttgccactgcgtatcacagaggaccccgctggatccctgaaagggcttcccgaggagcagccgtggtccttgcagcctggaggctggaggccggtgggtgcagccg

SEQ ID NO: 197616 - DNA, 218 bp, Homo sapiens
  chr1:85666945-85667163
  hyper
gagcgagcccatggctctggggggcggcctcctgcccgccgcgcggccgaggcccgagcgcccccaactgctccgggtgccctccggggacccgcgccccgggaccccacgcctcaggtgacggcgagggctgctgtaggctccgcccgtgtcccccggcgtgctcacgtgggagggtgtctgcggcaccccaggcgtctcccgcggctgccgaagag

SEQ ID NO: 197617 - DNA, 168 bp, Homo sapiens
  chr1:85774093-85774261
  hyper
aaaagctaaggtcggcaaacatggatattcggatttccattgtttttgaggctaaatcaaaagatgcctctggggaaaaggggcaacatgcactgtcggatcggcattcatatggaaaaacagaggtaggaaacattttatacattttgaagatactttgatgtgcag

SEQ ID NO: 197618 - DNA, 1168 bp, Homo sapiens
  chr1:85929935-85931103
  hyper
ggcaccgacaccccgttaattcatccagcttgtcctgctccgagcgccaggcaggacttgggggcttcggtgtcacgactggcgctgccccctggagggacgcccagcctccacccgccctaccggagcggcacccctcgcggccctcgctccctgggaaacactcagagttgcactgtcgtcgctgccgtttaattttcacaaataaaaatgcccgtgagacggaatcccccgcccacccacctgcccgagaccgtacaaccacattgaatcggatcctccagaaggctgccggcagccgggaggtgtgaacaatgaacttctctctgactctctgacacacacacacacacacacactcgccccccgacgggaagttgtgaactactagcccgagggccaatggcgcgactccccaggcaacacggcggccggcggcgggggagggcctggcgcgcgccccggccgcgcccctcgagtcggcagttacctccttcctccggctcggcgccccgggtcgggtgatgagggccgtctcctcgcacaccacggccacgtcctccacgaagacgcagtccggaaggctctcgtcggccggcagctccaccacctgcagccccagcttgctgcccagcacgcccacgtagagctggtgctgccgttccgcgcgggcgacgtccacctcctcgcccttggcgcttctcagcgcgtgctggccgagcgactcgggtagcgcccgcaccacggcgtgggtggcccggccgaaggcggcggggtggccgagcccggccatggcttcgggaggcttaggggcggcggcggcggcggaggcggccgggtcctgccgcgggcagcgcgcgctgagcctgcgagcgcccgtcggctcctcttggcagccgctgaatgtggtgcagaaggagcccagctcgcgcccggagccctgcccgcgcgactgagcatgcccagagctccgggcgccggcccgcgcgcatcccgcgcgcccactccggcgctcgcgggtctcgcgccagcccaggcgggagttgtagcggcgagcgccgggcgaggagtggggccaggagaggcggccggggaagcagcgagggcaagaagtatgcggaggcgggggacctcggcgaaaagccaccgctacccggacctggcggta

SEQ ID NO: 197619 - DNA, 753 bp, Homo sapiens
  chr1:86046271-86047024
  hyper
acacacacacaaaggtgcaatggagccaggggaggcgcttggcagcagcccgcgccaaccagcattcctgagatgtttgagaattctggaacgcgcagacagagccgacgtcactgcaacacgcggcgcctccgccggcccgtataaaaggcgggctccggggcgcctgggcagaccgcgagcgagagcgcccccgagcagcgcccgcgccctccgcgccttctccgccgggacctcgagcgaaagacgcccgcccgccgcccagccctcgcctccctgcccaccgggcccaccgcgccgccaccccgaccccgctgcgcacggcctgtccgctgcacaccagcttgttggcgtcttcgtcgccgcgctcgccccgggctactcctgcgcgccacaatgagctcccgcatcgccagggcgctcgccttagtcgtcacccttctccacttgaccaggctggtgagttggactctccttttgccacctattccccgtccgctctccagccccttcccctggtcccagattgcccacggcaggaaaagttaaaaagttcgcgatcgtttgcgggtagccgtttctttaagcactctccccctccccccgaagacgtgtcgggacctcttggtgggagcagccttccgaggtggccgggctggacgagatcagaggctccccgtcgatagggtcggagacccccgtccctcactgcggcagccgcggcgcccctcctgcgcaccgcgccgagtctca

SEQ ID NO: 197620 - DNA, 190 bp, Homo sapiens; identical to SEQ ID NO: 600
  chr1:86047064-86047254
  hyper

SEQ ID NO: 197621 - DNA, 101 bp, Homo sapiens
  chr1:87617583-87617684
  hyper
tgcagttgtgaaatttcactcggttgattcttgtgagaaccgaagtttgttttaattgtcaattaaagcgaatggtgcttgggtccctgggatccagggaa

SEQ ID NO: 197622 - DNA, 49 bp, Homo sapiens
  chr1:87617858-87617907
  hyper
aggcctgtcggagaagttgatgaaagatgcaccttaggtgtccccgagc

SEQ ID NO: 197623 - DNA, 127 bp, Homo sapiens
  chr1:87793799-87793926
  hyper
ccccgaggggcgagcgggcgcgggtcctcagggtccccgtgcgctgagaaggcaggtgaggccccgccctgcgtctcgactccggatcccgggtcgcgaagggcagcccaagcgggtccccggcccc

SEQ ID NO: 197624 - DNA, 105 bp, Homo sapiens
  chr1:88928502-88928607
  hyper
tcgccgctgcctttcgtcggggccgcgagcggggcgacggccgcccagcgcccctggcacccctgatctccagccggggctcccggcccgcgccttggtggctgg

SEQ ID NO: 197625 - DNA, 805 bp, Homo sapiens
  chr1:90098532-90099337
  hyper
gtcgactcggcgggcggtggcgaccccggggccgggcgctgggcggcgctggctgccgctagccgggctgcgtgcggggcggcgctggaggcggctccgtccgcggccggggaggcggaggggaggagggcttgcggggctggggcgttagctgcgtcccggctggaagcccgcgaagagaagtaggaggaaggcgccgccgtggccgcggccgcagtgctcgggcgcgacaagccatgagcagcgaccccgcgggcgacgccgccgtccctggcagccgctgagcccgacccccaggcagctcgccgctccctagcaccttctccagtcgacactctcgcgcccggaggtaagggcgggggatccgcggagggatggagaggggcagcccgcagagggccacccgctcggtccgctgtgcgcgccggaccgggactcgccccgcctcactcgcgtccttgcttccccccggctctcagacaggcagaatgtggttgcccgcccggcgtgtggtgctgggaaccttccgctactgcggctcaggagcccgccaacccctaccccacccaatccgcgctagcccgagcggccgcgcgaggatctcagcctggcgcccaacgccgcgccgcagcggcaggtcctgcagactgggcgcgggggtgggggggcggtccgcgaggggaaatgcgtccgtggccggggcgatcgttgttctttcctacctcgaaaatctctgagaccccggggccagtcctttccggtctatcacccccctgccacctccgaacccttgaagttagcactt

SEQ ID NO: 197626 - DNA, 172 bp, Homo sapiens
  chr1:90286176-90286348
  hyper
tcagagttttagtcgacgggacagcctccttcgcccaggacgggtgaaggctcctgaccatgcctcgcagctaactggcagctgcgcctgcccggcaccgagccctgcccaggtggacgcttgcgagagcattacggcgatggttatgtaggctgccgttcttcccctccca

SEQ ID NO: 197627 - DNA, 45 bp, Homo sapiens
  chr1:90287493-90287538
  hyper
gcttgtttggaggcgtgggctcttgggagcgggacttctgctcaa

SEQ ID NO: 197628 - DNA, 439 bp, Homo sapiens
  chr1:90308853-90309292
  hyper
accggcggaggaagcgtggagtccattgatctaggtacttgtggggaggggagaacccgagcagcagctgcaaacggaagggctgtgagcgagcgggcgggcgggtggctggcagcgaggccaccagcagggggggcccgggccgaggccgcgccacctcggcaccacgcgggcagccggtgcggcggggtcgccacggccaggggagcgctgggtgcccaccatggcagttatgcaagcggtgaccccctggtcttgcctccccgccgccctgcactccttcctccccgctgccgacacttggatctctctagctctttctctcccctgtgttttcaaacaggaagtgcacggctgtctataacgtgctgccgggtctcaggatggaggagtgaagtctcctgtcgccgtggttccagcctccggagctcgcccaagc

SEQ ID NO: 197629 - DNA, 130 bp, Homo sapiens
  chr1:90309490-90309620
  hyper
actctggctgctgccgccctgggttcgggccggcggaaggccctgggcgtgcgctgcggagccgcctgcgaggactccactagggcgctttccaggctggactgccccgggctgcgctggagctgccagt

SEQ ID NO: 197630 - DNA, 55 bp, Homo sapiens
  chr1:91172715-91172770
  hyper
agccgcggcgcaaggtcttggagccgcagacctgaggcccggctcctccctcctc

SEQ ID NO: 197631 - DNA, 149 bp, Homo sapiens
  chr1:91172771-91172920
  hyper
gcttccactaagaacttattaaatagggacgattcacagttgatctgtcactgagcactacttaccccgagatctttgggtttttgaattactttattgatctgaagattttgttctttggaatgtgaccctgtttggacttagagcta

SEQ ID NO: 197632 - DNA, 166 bp, Homo sapiens
  chr1:91173081-91173247
  hyper
ctgtggtgctagcacacagaaaccgggagcgggagacccagtggacaaggagaggagagaggagacaaactgagaatgtaaggttaaccgagacggtccacccagcaacactcaaactgacaaagaccttcaaaattcagccggaaggaccgggggaaatagtccc

SEQ ID NO: 197633 - DNA, 112 bp, Homo sapiens
  chr1:91184082-91184194
  hyper
agccttgcataagcgggcgggtcggctctgggctctgatttctcgcccgacgaacccaggcgctcgggctcagcccggcgggaggcggatccctgagagggacacagccggg

SEQ ID NO: 197634 - DNA, 35 bp, Homo sapiens
  chr1:91316202-91316237
  hyper
ggactaacagcatgtattagcgtgacagagactaa

SEQ ID NO: 197635 - DNA, 140 bp, Homo sapiens
  chr1:91966293-91966433
  hyper
ctggccaaggcggcgggaagaaaccccaccctcttgcgcaaacgcccagtagcggaatccgcggggtcgagggctttagtgtgcgcatgtgcaaccagagcggcggcgggaagtgttgcgcaggcgcatccgatcgactc

SEQ ID NO: 197636 - DNA, 170 bp, Homo sapiens
  chr1:92350554-92350724
  hyper
gctaacctccgtgcggtgcttactcggtgccaagcactgttgtagcacctcacacacattaaatcattagatgctcacagcaactttacggggcaagtactactatcctcacttcacagctagggaaatggaacggttttcttcttccagcttttcgtgaggacaccaaa

SEQ ID NO: 197637 - DNA, 331 bp, Homo sapiens
  chr1:92351379-92351710
  hyper
gcagagcccacagcccgggcgggctgcagcgccgcggggctgggccggcacgtacctcggaggcggtgtgtccagcggagatccacccgcagcaagttggaggaaagcggcggcaagtttccccgcccagcgctcggcggcggcgagctccggcagctgctgcgccgcggcaaaactacgccatccggacccgctggggactctcacctcctgcagggagctccgggaatcgcgcagggaaagtggccggggcgcgagagccgccgactgccctccttcactcgctgggaagaggaaagtgccgctcggcgtccccgaaaccctcgattac

SEQ ID NO: 197638 - DNA, 304 bp, Homo sapiens
  chr1:92495400-92495704
  hyper
gacagccaagctctgcaccccggcctggcccgccgcaccccgcaggcccggctctcccctgcgcgctccgggctgggcgcggcgcgtgtgcggagccgccgcggtgacacggaacgccggccgccccgggccgggggaggcgcgcgtcgagaggcgacggcgggctggcctggcgcgctgcggcgctcgctcacccgctcccgaggaagggcagtgggccccgccgccgcctcccaatggcgaggctgcgggattgcctgccccgcctgatgctcacgctccggtccctgctcttctggtccct

SEQ ID NO: 197639 - DNA, 70 bp, Homo sapiens
  chr1:92495832-92495902
  hyper
cctccttgggcacccactgctacgtgcggatcaaggtgaagggccgcgcgggcctggcgggagcgggagg

SEQ ID NO: 197640 - DNA, 184 bp, Homo sapiens
  chr1:92764405-92764589
  hyper
gcagcaccaagtccgccgcggctcacggccaaccgcgagccctggccaccctgaacctctccacaactccacttaccggccagaaccctcgcctctcccagccgccgccacctcctccggcgtcttagcccgctcttctggccccgccccgcgctacgcgtagggaggcggggcctcggggcga

SEQ ID NO: 197641 - DNA, 225 bp, Homo sapiens
  chr1:92949466-92949691
  hyper
ctggagagctgtagttcccatcgggtgggttaccccaactcagctactcatcgcctgcctggctgtgctttacggctggcgagggagggcggggacacgcggatcggtttaggggccggggatgcccagtggtcgaggacccggaaggggcaaggagccaagacctccaagagccagctaccaactggagtgaaaggaccggggggaggggggaacagaacacaa

SEQ ID NO: 197642 - DNA, 227 bp, Homo sapiens
  chr1:92950207-92950434
  hyper
ccaatcagttcacctaataccaggtcgaaatctgagcgcagcgggagggcgtggctgcgcctgccgctaggctccagccggctccgggggcggtaccccacagtcgaggtggtctggagtaaacgaatctgccttcctcccggggtgaaggcgatggtgaccgggttcacacgtgagctgcagtacagcagttctccgtggcctcggctggttcagaaacgagggtg

SEQ ID NO: 197643 - DNA, 328 bp, Homo sapiens
  chr1:93250604-93250932
  hyper
ccccttgccagctggccagctggttcctccggggtccggcccggccgcgtcaggagagcccaaggcgcaggcgcgggagggccttaaagagacccggcagcctctaccgcagaatgggttggagcaggttaggggccgggcgggccggccgagaaaaggagaaggcgaagggattggacggagtgcagaggaggcggggaaatcgctctcgccctccgcctctctttcaaagcaccagccttcagtcctgcaagtcgccgacttccccggccactggaaccgccccttccatgttaaaacggtagaagacacaccccctcgggggccc

SEQ ID NO: 197644 - DNA, 701 bp, Homo sapiens
  chr1:93645817-93646518
  hyper
gggctgaaagaggcgtcaggtactgttgtctccgctccgcgtttcctctctggactcctcgtggttgacagggaaatctggagtctgaagaaactccaggtggcggccgcggcggcggcgaacactccctccgaaagagaagcgcagttctccaaagggtagggactctgggcggggctagcagtcctattccgcaaccgcctcagtctcggccccctcaggccaggcgtgagcgccgcccgcctctccccctgacggcctccggttcccatggcttcccccaccaatgggcatcatggcggtaattgtgggaaatgtagtcccgggcgggctccgctagtgggctcgggcgcgctcgccgaccacgatccccggcaagccccgcgccttcggcggcgcctcacgcagtctgcgccggggcggggcagtgaccgggtaggcgcgtcccaacggctcccgcggcggttcgaattctgtgctgccggggttcgctggttctccgagttgtgtccgaggcttccacgcgcaggggcccgggaaagggtcagaggcttcctaacgcagactcgagtgcgaagcgcgcagtcgccgggtgggtctctccccagcgacgatttgggtggtgagcgactgcgccttggcgtggggaaaccggcttacctgggggagttctgttcctttccctcccggcaccttggatg

SEQ ID NO: 197645 - DNA, 1055 bp, Homo sapiens
  chr1:93913410-93914465
  hyper
gtccgactggcagcggagtgggggcagtccaagctccggggtacctgcaggaggagactcgaccagcgagaggggccagcgagggtgaccaggtgcccgcttggggaccccgccggcggtggccaggctagcccaggtcctccccgatcccaggatgcactgcgccccgccccctccccgcgccgcgttccgcctcccctcggccccggccccctcccgcccagcgcggggaggcggggacgcgtcggcggcggaggcttctccagtcgcgtctttctcactcactggggagcccggcggtggcggcacctttcgaggtagacccgctgagctgctagcccgccggccagcgagtgagaggtcggacagactgtggagccgacagactgaaggacagcggcaccgccagacggccagaaagttccgccatgagctggggcacggagctgtgggtgagtcggggagaggggcgccccgcacggaccccggcccctgagaagcgcgggttgggcgggcgccgcggaccctcggcggtgaaagcgcgctccgccgtcctcggtccggcgctggcggagggtgagggtcccgctcgtctttgtgtgcagactcctcttcccttctcggccgggggtctagggggccgctagtccgtgctcccgcctttgccgccgtggtgcagctcgggcggcgcccgggacggccgggggagcagcccgcgggctcctgcgtgcgccgtgatcccctcttgttccttctccctcctccaccttcacttttcccgacgcctggcttcgcgcccggcggctcctctcttcctttgtatctctcctcccggaggcgggggagggggcccattgtccccaaggggcgctgttcgagggcggggaggggaccggccgcgattcctcgcccgggccaggtccgcggggctagggcgtcgcccgtctggggcggcgccgcccagagccctcgccccaggtatggggacccaggcggctttgttcggagcccggcctcgggccagccaggcccagcccacacgcacatttctctct

SEQ ID NO: 197646 - DNA, 143 bp, Homo sapiens
  chr1:93914736-93914879
  hyper
tgtctggccaaggtacgggcggagggtaataggtcggagaatttgctcctggcgccggcgcggaagggtcgaggtgtggagggcagtgatttctcaggtgcggagggcagtgatttctcaggtgcggccgggagaactggggg

SEQ ID NO: 197647 - DNA, 202 bp, Homo sapiens
  chr1:94312192-94312394
  hyper
gcgctcgagcgcgcgccctccgaccacatgcacccgcatacgcatgctcccagcgctcccacgcgtgctgacaccctcccggcttccgcccacgcagtcgcgggccccgggcgcgcgggctcggggcagctgcgcggcgtccttggaggcaggtgctggcggcaagacgagctctcggaggatgctgcggcgcggggcgcgt

SEQ ID NO: 197648 - DNA, 131 bp, Homo sapiens
  chr1:94374254-94374385
  hyper
gagagagacggagcgacgtcctggccctctgtgacctccgtgccaggaagagggacccaggatgtttgagagttttgctaccagccttaagcaccgagagaggtgtcactcagtgcgcagctgcaccggct

SEQ ID NO: 197649 - DNA, 514 bp, Homo sapiens
  chr1:94702421-94702935
  hyper
gggcaggtgggagcgggaatagaatccaggcaagaacacagacccatagtgatcaggagcacggattccggagcaaaagcgcctgggtttaggtcctgacgctgccaaccactagtctgtgtgcttgggcaggtttttaacctcggtttccccgtgtgaaccgagtcgaacaatcatggagtgttctgaacattaaaagagttaaaatgtgcaaaggcttcagaacagcaggcggacccgttgtacgcgctgtgtgctaactttaattacgatcgtcaccgtctgctcccggccaccgctggcgtcctccccagctcgtccgcgcctccctcgccgggcgcgcccctagccccggccggacccttcccgtggactccagtcctggctcgaggacacccgtccctagcgcagcctgccaccgcttccactcggggccgccccgcgggcctcccggaccctggacggcaattcgcgggcgctcgcgcgggcaaccccagcccggagccacgaccgc

SEQ ID NO: 197650 - DNA, 88 bp, Homo sapiens
  chr1:94702990-94703078
  hyper
gccggacgcggacgcccgccccacacctacggccgccgccaccgccgagggctggagctcgctgcccccatcccccacggcctgcgga

SEQ ID NO: 197651 - DNA, 221 bp, Homo sapiens
  chr1:94703103-94703324
  hyper
cgcagccgcagccacagccacaggcaccaccaccactgcagccgccaccgcccctgcagctaccgccacggccgcaccgcccgcccgccagccccgccccctggagcccagcccattggcccgcgctcccgggggcggggccggcgaccgcggcaggtacgggaggcaactagctcgcgcgcagaacgcgaccgtcagttgcgcgcggccggacgctgtcc

SEQ ID NO: 197652 - DNA, 171 bp, Homo sapiens
  chr1:94703357-94703528
  hyper
cttgcaggggacaggcagagcgactcagagaaaagtcacctgaggactagatgcggctaatggccagatgagcagctacatttcttatgagacacttctgtggatcgcctttttcctccctcttccaggggttagggcctggggaagggcgccacacgtctgaatgaagaa

SEQ ID NO: 197653 - DNA, 286 bp, Homo sapiens
  chr1:94713018-94713304
  hyper
ctgccggaccctggacggcaactagccggcgcccgcgcgggcgaccccagcccggagccaccaccgccgcggccgaagcgagcgccacctcctcacactcaccacggcgctccatcccgcgtcccggacgcggacggccgccccacacctacggccgccgccaccgccgagggctggagctcgccgcccccatcccccacggcccgcagacgcccggccaagtggcagccgcagccacagacaccaccaccaccaccaccacagcggccgccgcctttgcagctac

SEQ ID NO: 197654 - DNA, 120 bp, Homo sapiens
  chr1:94884615-94884735
  hyper
tctaagtcacttggacgaggtttggctcgattcccgactaactgctattgaaagtcgcgagggtggcttctatgaaactattcccggtccacttggcaggattgccgtctaaagtggtga

SEQ ID NO: 197655 - DNA, 765 bp, Homo sapiens
  chr1:95006902-95007667
  hyper
tgcaactcccgccggcgcccgacggactcggttcattcaagccgggctgggtgagcgcagccgagtcccgtaggcgcgggggacaacatgggcgccccggggaaccagggcgagcccgctgccagccaggactgtcgcctccctcctgcgtgtggcgcgccccgggcttccaggggctggtgccactcacctgaagcgccggccacctgggcgaagacccagccgagcaggagcgtccgagcgacggcggtctcggggcgcgggacccggggccaggcaggggtctccatgtctaccagttggcggcgagatcgagcgggttccgtggcgcccgtggggctggggaggttgggctgaaggcgccctgggccggccagagggagtgcgagggggtgcggggagctcgcagtcttggggagccggtgccccgcgcgctataaagggccggcggcgcgctctcccgcgcctctgcccgcccccggcgcccgcccccgccgctcctcccgactccccgcccccggcccgggtcacttgccgtcgcggtgggcggcccccggcgagtccacacccctgccccgcctcctcccggtaggaaactccgggaccctgcaagggatgactcaccccagtgattcaaccgcgccaccgagcgcggagctgccctggaggacgcaggcgggtctagttgcccgggtcccccaaggcccccggattcacccaggcccgcgactccgacgtgcagcttaggtgggttgcaggtctatg

SEQ ID NO: 197656 - DNA, 204 bp, Homo sapiens
  chr1:95007928-95008132
  hyper
acctcgcggggcccttagcgggtcgcacaggagaaaggcggtgggaatgccggtgtcagccacggtgtgaccggctcggctcacaggtctgagggtcagttggctcaggcatcgcccggtacgaccagagatagtgactgaggaagagcagcctcacatctggcagtttgcctctgggagaattccagcgtgacatctgcagct

SEQ ID NO: 197657 - DNA, 636 bp, Homo sapiens
  chr1:95285587-95286223
  hyper
gctcagggcagaggccgaccacccgcccaaggtcgtggcggcgccggctcagctttagtcgtcaaagtgcacatcctgggagccgctgcctcgaggtggttgaggcgagagggcagggaagcgtctgagcctcttcctcccaccagagcaggaccccagctgacagcgggtgagctgggcagaaacccatgccgggaagaggcggacccagtggaccgcagcgcccgcagtcgccgggccaggcgcagaggcgaacgggaggcggcgctgcaccgtgcccgcccctccccggcccggccccggctccagccccagccccagccccagccccggccccggccccggctcgcgggcgctgcgtctccgcgtacaggaggcggcggcggctcccagtcaccggcccccgccggcgagcgcacgatgcactgcctgggcgccgagtacctggtaagcgctcgcagcctcggccctcgggggaggagccccggggaagggtcgagtcccccgccttcacgcaccttccctgccggacgcttccgcctttcccgcgcctcggggatcccgcccccgcttagtaccttggggccacctggcggggaggaacctggaccctgctccagtgctggggcggaggcg

SEQ ID NO: 197658 - DNA, 345 bp, Homo sapiens
  chr1:95391395-95391740
  hyper
ttctgtgcacagttccgcgccgattggctggtctctccccccagaaacccctgatgtcatgggcttggaatgcagggagggaggaaggaaggagaggatttggggagggggacgcctctcatctctttcccaggccaaaagtcctaaagataaacctaacgcattcttgggctcagtggcaaagctgagcgtcaccaaatcccaatcgctccaaactataagccgcctcagcaaacaagccccaaacaaaagcaacccacaaaaataatcctttatgtcgtgaaagtctaatgtacttcaaacttctcagtgtttcataaaaagtctcaagcctaagcagatatc

SEQ ID NO: 197659 - DNA, 73 bp, Homo sapiens
  chr1:95392624-95392697
  hyper
gggtgctacagagcctcgagctccgctgcgaagcacccggctgcctcgctcgccgcccgcacctcggttcccc

SEQ ID NO: 197660 - DNA, 86 bp, Homo sapiens
  chr1:95392757-95392843
  hyper
agggccgcctcctcccgcctctgcgccgaggggcggtgcggccaattgaagggccgcgggggccgctttccctcccgctccctccc

SEQ ID NO: 197661 - DNA, 108 bp, Homo sapiens
  chr1:95392887-95392995
  hyper
cggcggctaggcggccccgcccccgggctaggcagggcgcctgggggcttcccagccacaggccattcacgtcaacctccaggcatcctccgcggcgggccggaccgg

SEQ ID NO: 197662 - DNA, 32 bp, Homo sapiens
  chr1:95393067-95393099
  hyper
gggctctgggcccagcgcgcccagatgccggg

SEQ ID NO: 197663 - DNA, 169 bp, Homo sapiens
  chr1:95428574-95428743
  hyper
actgaactgcagcaaacccaggggatccaaggctacgttgaaaagcctttgaccacagtgcagggagcagaagacattaatgacgtgatgtcgacacagcccgcactcaggatcctccaggaaaagaacacagagataaccccggatcgatggtactttttgaaaatgc

SEQ ID NO: 197664 - DNA, 257 bp, Homo sapiens
  chr1:95583311-95583568
  hyper
cctgcgcctggaggctgggtgggcgtccggcgcgcgggaggcggcccggggctcccgggcgggctccggcaggtgtgtgcggaaggctcagcatcgtccccgcccggcgggccacggcgtcgctccgggagcaaatggtgtcccggggcccgcggcccccgcgccgcccgggcgccccgcattcctctcgcgtttctcgggctgcacgattccggctgccctgtctgcctggcggtgcctctcgggtctgagcttaa

SEQ ID NO: 197665 - DNA, 213 bp, Homo sapiens
  chr1:95699851-95700064
  hyper
ggaggtgctgagccgctcaggtgactacccgcgcgcgggagggacagggcgccctcaggggccacccgcgttcgctttgcgtctcctccccaccacggagcctgggcaccccgcctgggcccacgtatggggaccgggttagttgaatgatggaatgacacgcccggaggccggagtggtgtcgcagcgggcgggagtgtgaggcgaccccag

SEQ ID NO: 197666 - DNA, 197 bp, Homo sapiens
  chr1:98386370-98386567
  hyper
cccggcacctacccgcagagcactccccaccaccccgccaccaccgacgagccggcgcgaagtccgtacctcgatgtccgccgagtccttactgagcacaggggccatggcagtgcctacagtctcgagtctgccagtgacaaaccctccttgcgtcctcaagctccagccagagagccaagtgacagcagccggag

SEQ ID NO: 197667 - DNA, 154 bp, Homo sapiens
  chr1:98386618-98386772
  hyper
cgcggggcggcaacgcccccggggcggggctgcgctctcggtcctgcggctcccgcgccaggcacggcagccgcagcccggccttcccagttcagcccgctccgcgccccagcctgcaagcagaagggagggagggagtagagcacccgctctg

SEQ ID NO: 197668 - DNA, 190 bp, Homo sapiens
  chr1:98514255-98514445
  hyper
agatactgctagcggaacaatatcagcggaggcttaggtccgcattaagtacctttgttcatcgactcctgcaagccatgtttattagaatctacatttctctcgcgccccaataactagaggtgtgttttgcgggcagggggctttcagcaccttttgatctctcaaggccaccgcgactgattgacgg

SEQ ID NO: 197669 - DNA, 728 bp, Homo sapiens
  chr1:99126903-99127631
  hyper
cgaagtggacggttcgcttcgtggcttcttcccagaccccgccactgcggaaaccgtcactcggtggcccccgactgggtcaatgcgaggacgcccacctcctacctttgagtctctcctcttctccagggtacagccaaccctttctccaacgtagccggagtccgagagtcccagttccgcccctccagcccgccccaggccaggtggggatgcgcccggcccgggccagcgctggtcccggcagttccgcgtctgcgcagcgggcgaggggctggagcggggccggccggggaggtgcaggagacgtgggagccaatgggcacgctcgggggagccgggctggcggcggcggtggcggccggctgggcgcgcactctcgggatggagggcgagcgccgggcatcgcaggcgccctcctcgggcctcccggccgggggcgccaacggggagagcccggggggcggcgccccctttccgggcagcagtggctcttccgccctgctgcaggcggaggtgctggatctggacgaggacgaggacgacctggaggtgttcagcaaggtgagggcggcggcggcgagtcccgggaaacttccaaggcaactccgggcgttgccagcattgcgccgacggctgcctctggcgcgcttgccctcccggggcggtggctctgagctggggacgagtgaggtcccccgggctgctggaccccgcctgccagctct

SEQ ID NO: 197670 - DNA, 192 bp, Homo sapiens
  chr1:99127671-99127863
  hyper
cagccgctccctcctccgcactttgaccttccgttcggcggggctgtggcttagtggagtctgcaaagttgtgatttgttttccctttctgcttctctgacacagacatcttcctcgcggcagctcccgaacctgggaggctggtggctcaaaaccgctcccgccagctgcttttcgggcgaggccagccct

SEQ ID NO: 197671 - DNA, 116 bp, Homo sapiens
  chr1:99470847-99470963
  hyper
aagcccaccaaggcgcaaagtgccgatgcggcgcccagagtttcaaccggtgcgttcagcctgcatccctcgaattccttgacccagcccggggctggagcctggcggtggtttct

SEQ ID NO: 197672 - DNA, 40 bp, Homo sapiens
  chr1:100316318-100316358
  hyper
acagcatttttatttcggtcttattcgttgtgctcaaagg

SEQ ID NO: 197673 - DNA, 216 bp, Homo sapiens
  chr1:100503350-100503566
  hyper
taatagcttaggacgtctgtttccgtgagcaggtaacaactttttgaaacaaattccctcatctgctgaagaagggggacaaaaacggcccctatcgcccagaaccgttgcgaggatttagctagctggtgacgccggagcacgaagttgtacaggtagccagcagcacccacgcgagcccgcggttaccctggccgcgcggctactgtagagtgg

SEQ ID NO: 197674 - DNA, 272 bp, Homo sapiens
  chr1:100731335-100731607
  hyper
ccgcaaggaaccaaaggccaagagtatcaatgtaccagggcgcacacacttcgagagacaggttcggtgcatcgcaggatcccaatctttcttgcatcttcagctctaaaagtcggcacctcggggtatgccaggatcctcgagaaaacagatataaacacatatttacccacaaaacagagataaagcacaagcctgcgggataactggaggagttatcttacagttgagactttctgcaacctgcagattttgccgtgcccagggcacaa

SEQ ID NO: 197675 - DNA, 90 bp, Homo sapiens
  chr1:101702279-101702369
  hyper
gggttcttttttttttttttttttttttttttgcttctgccccagatctttcctggacagtgcgtctcagcagttcagatccgggggccc

SEQ ID NO: 197676 - DNA, 207 bp, Homo sapiens
  chr1:101702796-101703003
  hyper
tctctgggctactaaggagcccatctcgatcagattgttcttgggcacttgtgatttatggagttcagaaaaaaggttaattcccaactgtggaacctacgggtgtaggggcagtgaaaattgcagttggtcggaggaataggagggaaggcgttaaattttggaaatcctatagacaaagaatatggtgggtggtgtggagcgtgg

SEQ ID NO: 197677 - DNA, 88 bp, Homo sapiens
  chr1:101775006-101775094
  hyper
cgcagtagagcccaactagagggtaaacagcagccacagtaagttctagctgttgcagaaataaattacaaatacatgtaggaaaaag

SEQ ID NO: 197678 - DNA, 39 bp, Homo sapiens
  chr1:101775488-101775527
  hyper
ctcttgtgttgcacttgtgtcccccgtttctcctccagc

SEQ ID NO: 197679 - DNA, 108 bp, Homo sapiens
  chr1:102462482-102462590
  hyper
ggaagcagaggcggcggcagcagcagtagcaataacagcagcagcggcagcggcggcagccgccctggggggcgatcattccgcaggcattctcagagctaggagtcc

SEQ ID NO: 197680 - DNA, 106 bp, Homo sapiens
  chr1:102462591-102462697
  hyper
ggagctctagagagtgggttgggctgcagtgggcgctggccgcggtgctgaagcgcctccaacccgcgcgccccagtttaccctctcccccgctgctatatagcta

SEQ ID NO: 197681 - DNA, 97 bp, Homo sapiens
  chr1:103574168-103574265
  hyper
ggctgagggtcagacccaatcacacgactctggggcggccccaagcccgcccccgcctccctcagcccaagaatgaggactccgagcaggcccagcc

SEQ ID NO: 197682 - DNA, 390 bp, Homo sapiens
  chr1:104068329-104068719
  hyper
agtcctcttgtccttgagcgtcaaccttctttccctgaagtggctggggttcctgtttccttctttgattgacaacttgtgttaaccctcgcacatctctgggccaatttttgcttgtaagtctttccggagacccctggaatttaaatcattagcaccgcgcccttccccgaagagtcttcgaagggttgccgcttttcggtggcgcagttctcgcgagaaggtgactttctttctcggtatttcctggtttccagaatccttagcgcgaggcggaaaaaatatttctcccagcttgtgttgatgccgcgattttgactgagacttcttcccacgatttctgtttttgcttctccaaggaaaatggcagctcccgagcagccgcttgcg

SEQ ID NO: 197683 - DNA, 165 bp, Homo sapiens
  chr1:108506277-108506442
  hyper
agctgaggctctgcgtcatagaggattagtgctgaaatgtgtcagggagagggctctgtcctctcccttttaagttgaaagcagtttggttttttgttttgttttaacattctgaaagagaaagaggctctgaaccgagtttaacatccttctgtacaaaaattt

SEQ ID NO: 197684 - DNA, 93 bp, Homo sapiens
  chr1:108506502-108506595
  hyper
tgcacccaaccttccagaggtgtctggcttaaccctcaaagaggcagctccagccccaggagccgaccggcaccacagcacctgagcagggca

SEQ ID NO: 197685 - DNA, 202 bp, Homo sapiens
  chr1:108742393-108742595
  hyper
ctgttaccggggtcgccggtcgcggccccacgcccgagtttctgaagccaccggagcgctgggcgccacagttcctccttcctctcctggcaacgcctcaagccgccgccctcctcggtcctcgcagtgtccccagcgcccgcagccctccctacgctcaggcggcgccccggcggcgacccacctcctcggcgtcctggcc

SEQ ID NO: 197686 - DNA, 118 bp, Homo sapiens
  chr1:109204221-109204339
  hyper
tcagcctccgctttcatcccagagcagtccacgggggccttaaaggaatgtaggctgggtgaagttggcccagtgacacctgcgttcagaaaaacgttctttccgctcccaacgcccc

SEQ ID NO: 197687 - DNA, 257 bp, Homo sapiens
  chr1:109632945-109633202
  hyper
tcatttcatttgcaacgttcagacgcagtctgactagatttccatccggagtaaggaagagcagctcaagggcagtcacggaggccgcaggtgcggcttcttcacccgcggtgctggagttctctcaagtggaagcccaggacgatgaaaacctcataggtaggctgctgcttacacacagcagccgccacggcgcaaaataaactacaaaactacaagcctttaccttttcaaacacactgacgcgggccagcccc

SEQ ID NO: 197688 - DNA, 203 bp, Homo sapiens
  chr1:109656291-109656494
  hyper
ctctccatcttctttctctcggttcacacgccacgtgtgcaacatcggagatgctcataaaataacccctggcccgaaagggcagtagaaaacggaaatttgttggctggcttggaggatgcttccactgtgttcttcacacgagccccgggcctgcctgttgggccggttgcgcaccccgggcgcgcgctctcccgcgccca

SEQ ID NO: 197689 - DNA, 137 bp, Homo sapiens
  chr1:109657070-109657207
  hyper
tttggggatgaggcgtggggggagggaagaggagccagtctggcgtcatgaggaggccagcacattggaggactcacggatagatcatcctcacagattgggatgctgagctcagcgagaaaggtcccagccccaag

SEQ ID NO: 197690 - DNA, 474 bp, Homo sapiens
  chr1:109940219-109940693
  hyper
tgttggccagcttggcgacgaagtcccggacccggccgcactcctcgtcctcgcccggcgcgctgcgacgccaacggccgccgcggggaaacgcgcccccggctgcggccgcccgcagcccccagctcaccccgatggggccagaccagcgcggcagcggcgcagcgggcggcggcggcgcgtccagccggtcctggctgagggtcgacggcggcagcagctgcaggaggaggaggaggccgaggccatggggccagcgcgagaggccgtccgcagctccccagggccgctccatcgccgccgaatgccgccgacgccgacacctgccgcccggcgcgcccgcccacccccgccggcgcgcgccacacccccgagccgagcgcggcgctccttggatacgcgcggccgggcctctccgccccataggctggccgcctgtccctcttccccggcccactcctcattggctcgcgt

SEQ ID NO: 197691 - DNA, 206 bp, Homo sapiens
  chr1:110052079-110052285
  hyper
gggagctccgtcgcggcctctcccggcggcgcctcaccggccggcctgtcactgcgcccaccttacgcaggggcccgcgcccggcaccgtcgcctcccggggacttgcggggccccgctccgctcaccctgccaccgcctcgaccgctgagcccgccggagcccaccgaccgcggtcgctgcctccaggtccgcaggcctggcgcg

SEQ ID NO: 197692 - DNA, 157 bp, Homo sapiens
  chr1:110185990-110186147
  hyper
actgtggtcagagccgtgccccttgcaggtgggtagcgctgagagcagagcagcgcccgcgggactggcctgaggatcccgcaggcaggagggaccccgcgggcctttccctacctgggaggtgcacggttggccaccagggcgcgctgctggactc

SEQ ID NO: 197693 - DNA, 49 bp, Homo sapiens
  chr1:110186177-110186226
  hyper
cagagtcacttaaacttgtaaccctaccggtagccgtggagtctagtaa

SEQ ID NO: 197694 - DNA, 147 bp, Homo sapiens
  chr1:110453160-110453307
  hyper
ggtccgcagagggcgcggggaaggcagggtggggacgcggtggagcccgcgctcgtttgctgaaggcttggaagtgcagcgcagaagacagagggtgactaggaagacgcgcgagcggggctggccggccggcgggtgggggagggg

SEQ ID NO: 197695 - DNA, 421 bp, Homo sapiens
  chr1:110453531-110453952
  hyper
cgcatcccaggacagcggtgcggccctcggccggggcgcccactccgcagcagccagcgagcgagcgagcgagcgagggcggccgacgcgcccggccgggacccagctgcccgtatgaccgcgccgggcgccgccgggcgctgccctcccacggtaagcgacggccgcggcgctgggcccgggacgggctggggcgggggctcggcggccaggcggccgggagcggcccctcggagccgacagcctgggcgcgccggctgcactggcccggcgttcccgccgcggacgaaccgcctttgcgcacggactgggccctggcgccagggcggaggccggtggcggccctgcagctgcaccgggactgccaggcttccctgggaaacggagggctgctcaccccattgcacggaggggaacactg

SEQ ID NO: 197696 - DNA, 70 bp, Homo sapiens
  chr1:110672763-110672833
  hyper
cttcccggctcccacgcctcttgctggggagggtggctcatttttcacgggtgccgcgtgactttccaga

SEQ ID NO: 197697 - DNA, 384 bp, Homo sapiens
  chr1:110753510-110753894
  hyper
ggggggaagaggccacatgccgccgccgccgcctcgtgttgaccgcaagcagcccgggcccacggagctccggctgccgtgagagtgtcggcctggccccggcagccgctcggaggacttgttgctgctgcgctgccgccgctgcggggaagccggctattccggggcttggtgcggtcttggagccggagggtggcccgtgtgagcgcgagcgccccggaccttcgcggtgcgcgtggactgtgcgcttcctcgtctttggtcggggtgaaggcgggggcgtgtccccggcccagagcgtttgtgtgtcccgtcgtagcgggggaccgcgtgtgtgcttgcttctacttccccgggtcctccctctctgcgcctccctctctc

SEQ ID NO: 197698 - DNA, 46 bp, Homo sapiens
  chr1:110753957-110754003
  hyper
cgtcctagggggataggcaggggcaagcccaagccgcagagggggc

SEQ ID NO: 197699 - DNA, 600 bp, Homo sapiens
  chr1:111148988-111149588
  hyper
cgcctgcctagctgcgaggcggcttggcagcagcgagagggggagcctggaggaagccggcttccggactggccccctgccgacccaatcccgccggccccagggcggggaggggtctgggccctctccccatcgccccgggctccggccgggattccgttcggcgcactcagcgctcgcctccgcgcagaggaccagaccctcccgctggccgcggccgctagcgccaccttaaccccctcctgcccgcgcggtcggctcctgctgcgggcccaagcgcagttcagctcttaagcccccggcgtccagccgagggaccgccgaggctcagtgtccaacccaaaatcccggaacctgatctctgggggtggggagtagcctgcgccaggctgccgccccagatctcagcttccttttaagcgcgggggctcggcggcagcccacggccccagcgaaggggaaagccctctctgcagcaaagccgtttgttattctgtgccgaagaggcgaatgcagcccggccgtcccaagtggttcaggtcctaccaacccgcgctatttaccagacatggttatgctgccagctgcacttcccaccac

SEQ ID NO: 197700 - DNA, 40 bp, Homo sapiens
  chr1:111289414-111289454
  hyper
gcaatcttaaattccgtccccaagccgtggtcaacttcta

SEQ ID NO: 197701 - DNA, 369 bp, Homo sapiens
  chr1:111506646-111507015
  hyper
cttggtggcaccacccccaacagagcctggtcagtgctgaagactgcgtcagtctggctctgccgccccgcccactgaagccgatagctggagcaaagctcggtcgggcgtcttccggggtcgtcacgtccggttgccaaggtgactggctcgctaaagcccaacccttatgatgcaatccaatggcaagtgatatttgctatcttttcttccggatcaaggaacaaatcgcaaaagaaagctctcccgacacctacgcaaaataaaatgtttccggggtcaatcataaattttctgcttctgtgctcgccgctagcgtacgtttttctctcccgtcagtgcattaaaagacatcggcgcgcttttttg

SEQ ID NO: 197702 - DNA, 220 bp, Homo sapiens
  chr1:111683221-111683441
  hyper
gagcccaaggtaggggtgggaagaaccgtggagggccagcgctgagcgggccgagggctgggagcgctacccgtgccgaacggaccttgcttgtcaggtccacaccctcctgcccgaatgctggcaagtccacacaccgtgtggcatcctctgccgggtttgtctccccttaggaatgcggtgctgatgtttgtggctgggacgcgcttctggtcagcaa

SEQ ID NO: 197703 - DNA, 524 bp, Homo sapiens
  chr1:111746815-111747339
  hyper
cgacgccccgtgccgccctccaccgggccccagccgccagccctagccccggctccccggtgcccacgccgtccccccgcgctctccccggccggcactaacccccatggccgcgcttcagtctcaggctggctcgaaggcggcggccgagcccatccatggcccctggagtgcccggctcccgctcccagctccgcgctggccccgcccccctatccttgacctccgcgggtccgacactttcactttcacgcggggggaggcctaggggacaggttcggggcggcgcggcgcaccttccggactccggcccaacccccgggcgcacctgggcgggcccgctctgccctcgccctgggcagggcagcgtggggtggaagagggcgctcgacgcgcgtccgggactgggcggcgccacctcgttcccaccctccgtggggctcccggggaggcttgacttagcgaacaccctgcagtccgcaaaagcgcatgtcctggctgaaatcaccgtcttccaggtggcc

SEQ ID NO: 197704 - DNA, 155 bp, Homo sapiens
  chr1:112532952-112533107
  hyper
cggagtgtaccgacgcgggtgtgagcgcgtgtgccagcgagggtgggcacgggggtgagcgtggcaaggtgagctgggtttgggggtgggggaggagcagggagtacggcgtgagcgtaagttcgggggcgtgtgtggctggggacccacggaga

SEQ ID NO: 197705 - DNA, 35 bp, Homo sapiens
  chr1:112938562-112938597
  hyper
gaaagttgcagaccccgagccgggaggggcgcgag

SEQ ID NO: 197706 - DNA, 88 bp, Homo sapiens
  chr1:113051495-113051583
  hyper
cgggcggagccgccctaagggccgcgcgtgtccccggcctcggccccgccccgtcccgtccaatgagagcccgcggccgaaggggctg

SEQ ID NO: 197707 - DNA, 42 bp, Homo sapiens
  chr1:113052113-113052155
  hyper
gccggaggcgcctggagggactggctgctcacgggaccaggc

SEQ ID NO: 197708 - DNA, 190 bp, Homo sapiens
  chr1:113249226-113249416
  hyper
cgtccagaccctgccgagcagtggcaggccccaatggtcacatcccgcccctattcccgccatacctccctcctggcctggaggaattcccaccccatcccactctaggtcccctgcggccgcccaccctgggggctggggcgtctgagttgaagttccctcgcccctcgcccggcggggcaggttccgg

SEQ ID NO: 197709 - DNA, 629 bp, Homo sapiens
  chr1:113256960-113257589
  hyper
ccagccggccgctccgggcagggggtccgcttctttgccaggccagcacgagttggcaggctgaagggcatctaaatgggaccctcctctaccccgggcgtccccctccccgctcctggggaagctggcggcctcctggtgtcgcgggctatttctgggtgtggagggggaggggaactacggtaagagggacagggaactggggcgctggagccgggaagcgggtgagcgagtcttcccaaccgctatgtcccctattaaaaagaaccccgctccttcgtgaaaccccttttcccttagcctttaagctgccgggccgcgacggggaactggccaactcatccttcgccgggctctccgccctccgggctctggggcagaacagggtcctgaggcggcgtgggcgagggcagtcaatgagcgggaaggacgtgaagaaggtgacacaggctgccccccactggaaaatgggttgggagggggtgcggcccgaagaccagaggatagcaaaggtccacggaaaagggagctcctggcccggacgcggcgtggggaacgcgtcctagcgccggggatgcggagctggggagaggggtgggagccccatcctggtttgggtgccccagggg

SEQ ID NO: 197710 - DNA, 140 bp, Homo sapiens
  chr1:113258352-113258492
  hyper
ggcgcttgggagccgctgggtatgaggcgccaggtgtgacaccacctctggatggggctgctggagcgagagcgggcaagctggtaccgggtggggttgcgggattaatgacgcaggctgcagccgaccaccccggaatc

SEQ ID NO: 197711 - DNA, 122 bp, Homo sapiens
  chr1:113497849-113497971
  hyper
aaagtaataaaatgttaaaacgcatgctggaaaaaaaaaaagacgtacttggaacaaaaaacttgcatcggaccaagtgtaacgctatcctccagatttctctcaacagggccgccttaagt

SEQ ID NO: 197712 - DNA, 237 bp, Homo sapiens
  chr1:113498188-113498425
  hyper
ggggcggacaatgtcacgaatcataaataacttctgccccgagtcccttcccttggggcagaagcggccaggagagtctggaggtaccacatgcagcagcctcatgttatcccttttccagatcaaagcatctctcgaggagcctattgaagacttaggggggaagggacttccccaccgtcaccgggcaccacgacccaactcctcggccaggcctgggaccggcatcttagcacg

SEQ ID NO: 197713 - DNA, 360 bp, Homo sapiens
  chr1:113498605-113498965
  hyper
gagggcaccgtggggtccgcgccgcgtgccgccggctgttacccaactaaccgttatatgcgcggatcgcagcgccgagcgtgtgcgtgacgtggtggcgcaggctggagttccacggggcccagggtccggctcccgtccttcgctcgctgcctcgtttgcttgttccagtacccacgcagctagccagtcacgtcgcagctcaccactttgtctggccgggccagcgaggctgccttataacccgccggggccggagcatgcgcgcagggggcggagtcgtctctcccggccgccgccccctccccgccacacagacatccgaactgcagcccgcgcctccacacgctttcagccgcg

SEQ ID NO: 197714 - DNA, 706 bp, Homo sapiens
  chr1:113932573-113933279
  hyper
aaggccccggaacctcggccggctcaggactccgcacgttgtcttccaatctaagcacaccggcccctctctgcgccccgcacaggctcagaggctccgcccgcgtctccgcctaactcgccggccacgcccccacttcggggagctcggtccctctcggattcgagttttcctcggctccagccgccgcgcagagggcctctcccggccctgcgacctacagccccttccactcccctgcccctcctctgcgccctccctcactctccaaacttcttttttccaccctctctaaacttcagtcattctagtgcccgcctcctccactcgcaccgaccaaccagtggtccccattctcgttggcggtccgcctcctgcccgccgggggccaatccctggcgcgagagtccagggccggggctcgttcccaagcgcccagcctgtgacggcagcgcgccgggcgccgcgcggcgggagggggcggggctctggatgagggatgggcgagggccgggggaagggaaaagggaggaggaggaggttgcggctggtttgaaagcggcagtttcctggcagcttgggcaggcgttggtctccgcgctacagctccgcagcggccacgatcgatcccgcgacgggtctacgcgcgcttctgcgcgccccccacggatttttcccgttcccggctcttcccccttcacctccc

SEQ ID NO: 197715 - DNA, 778 bp, Homo sapiens; identical to SEQ ID NO: 36142
  chr1:113933305-113934083
  hyper

SEQ ID NO: 197716 - DNA, 217 bp, Homo sapiens
  chr1:114354486-114354703
  hyper
ggcccggccgcgctcaccgtcagaggcgagaaggtgaagagggccgaggtgcttggggccgggagaggggcagcgacagcgggcccggcgggtgccagcgaaggtggcggcggaggcggcaggagaagaggctcaacagggcctgggacagttggggctgcattcgttggcggcagcggcccaggatgttggcggctgcgacgccgccggtgagggg

SEQ ID NO: 197717 - DNA, 84 bp, Homo sapiens
  chr1:114355230-114355314
  hyper
ggcggtgagttgccgccaaccgccctaacggccgaaacaatgttaatggctttcagagtctggcggcgcgttcccattatcatc

SEQ ID NO: 197718 - DNA, 107 bp, Homo sapiens
  chr1:114697918-114698025
  hyper
tgttgaaggttcgcagcttccaccctgacccctgtgcctgtgatagcagaaggctaggaactcaggcagggaccaagcagacacgacgcaggcgatactgtgcaatc

SEQ ID NO: 197719 - DNA, 275 bp, Homo sapiens
  chr1:115124231-115124506
  hyper
cctgcgttttctgcgtctgcgtaaactcagttatatttaattacgccggcgcctgacactgatgtaatcacgttccctccgtattgacgttagtgcatgctcagttgctaattttgaaggcgggtccgcccggtatctagaaattgccgggctggtttgttttgggcggacgtgacgtaacgtcttggcttgtctgcgtcagcgaaaggcctcaatttcctgtcctctgcttactgcccctttttttgcctgcgaatggcggcgatttgaagttg

SEQ ID NO: 197720 - DNA, 224 bp, Homo sapiens
  chr1:115213050-115213274
  hyper
agggaatccaagcactgtttcctaggctgacctcagtgagcaaacaattgcactacggtgccaacttgaaacgtcaagagaagcaaataactctcgcggcacctcaggcttggaatctcagaacgggggtgccttgatactcccagtgcgtgaggtcagcccccacgccctgttgagacacacatgcctaagcgctccgcctgcaacacgctcttgcttaggta

SEQ ID NO: 197721 - DNA, 61 bp, Homo sapiens
  chr1:115258668-115258729
  hyper
acctctatggtgggatcatattcatctacaaagtggttctggattagctggattgtcagtg

SEQ ID NO: 197722 - DNA, 31 bp, Homo sapiens
  chr1:115631836-115631867
  hyper
gtttgccttctcctcgcctccgcgtttgagc

SEQ ID NO: 197723 - DNA, 49 bp, Homo sapiens; identical to SEQ ID NO: 104068
  chr1:115632692-115632741
  hyper

SEQ ID NO: 197724 - DNA, 1147 bp, Homo sapiens
  chr1:116184427-116185574
  hyper
acgaggtgagggggacgccggccgagccccgccctccgctgcaggtgggccggccccgcggcggggccggcagcgctagctgttcttggctcgcggccgcgccgggctcgcagggctgggctcgggctgcggggcggcgccgggacaggaagcggaaagcagcagtgcagcggcggcggcggcggggctctgcctctccaggagcccagcgcaggccgcagagccggggccgctgtgagccgagaccgcgggccgcggagctcgggcggccggcgcggaggtgagtcccgcgagaggccgagcgctgcgcggcggcggtccccggggcagaccgttggctgggagacgcccccacctcggaccccgcgtgcccctgcgccctcctcccgcattcgccccgccggacttcgaccccgggtggccggctcccgcctcgggccgggggctccctcccctcctccggagcgctccgggtagtgcttcctctgactccactcttctccccatgcgttgcgcccctcctggccctgccgtgcgatctccgccgcaccccactccttggggtcccggggttccctgctcacacctcggacgtccctttctccccgggctggcctttggagtgcgccccttcggtgcgcgtgccggggcggcgggcaggccggcagggagtggccgagcgttggaggcaccgggcggctgcagcagccgtgcagggcgggagccgggcgcgcaccggggttcccacccctggcggggctcgacccgggcgccgcctggcccttcgccaggaaccgggacagagctggtctgtgtgcacacctcgctcacaaaaaattgagccggccctggaggcctggggggcgagtccggttgcgcctcggagagcgcaacaggcaggtaggagtttactttcaaaaacgccggggtggagcagaggcgcctggcgggtctctgcccaaggtgtccctgctggaggaaatctcaccgcgccggggcagccttcgccaccggcaggacctcatttccttctgcagtctttgaactgccccaagcatcgcgcctagagaagtgtgaagctttataaaaatttaaacgcgtccgtggtggcggcagcagtggggcggagccgcggcctggctgctgt

SEQ ID NO: 197725 - DNA, 116 bp, Homo sapiens
  chr1:116381944-116382060
  hyper
ttgtcccggcgggagctgcatctctgccggcaaagttcgggcgctcccggaaccggagctcggcaggctgcagctgtccccgggtggcctggccaagtccgggcatgtcggtgctt

SEQ ID NO: 197726 - DNA, 207 bp, Homo sapiens
  chr1:116382180-116382387
  hyper
ggcttccgggtaattcgggcttcgagaaagggcccggcaggaggagaaaggcccctgcaggggctgcacgcaccgcccctgggcgtcgggagtgaggaccaggctgagaactcggggccccggcgtgggcagcctccacgacgctcggcacgggagaaatccgcgtcggcgacgtataggagcgtttgcttctagagaaacaaaagc

SEQ ID NO: 197727 - DNA, 62 bp, Homo sapiens
  chr1:116711292-116711354
  hyper
ggcggcattggtttcactatttccttcctggagctgtggttgaggccgactgtcccagctag

SEQ ID NO: 197728 - DNA, 59 bp, Homo sapiens
  chr1:116961169-116961228
  hyper
ggccctgaggatgcgccgctcaggtgggagcttccggggagctcgcgcgacagcctggg

SEQ ID NO: 197729 - DNA, 338 bp, Homo sapiens
  chr1:117209809-117210147
  hyper
actcctgggaattcccgtcacctcctaccgagcccgggcgccgcaggtagccccaccctccgccagggcaaatcgggaaggggctccgcggtggggccgcgactcccggcccccgccccaaccgtgggagctctgcgcgcgacgcgtcccaggtggccccgctattgttttaccttgcagggtgtttatatctcgctgattggaaagaaaagaaaccggggaagaagggagtccggagctccgctttcagctgccggagcgcgctcgcagcgcgcccgcccagccaggggaggggtctcgggcccgacccggagctcagccggcgcgggcccgctccc

SEQ ID NO: 197730 - DNA, 480 bp, Homo sapiens
  chr1:117452364-117452844
  hyper
cgtggggtgggggcccagaggggatggcagggtgggctccgacgcctcctcgcctttaagcgggtggccccggctcttcctccgttacctggagcggggaggggcttgggaaagtttgtgtttgttgctggcaaagcgccggatgggaggcgcgggcgggcgctgcggttcttcccttctgctttcgggaagcggtcggggctgcacactcggatcggcggggccggctcccgggcccggccggctggaggagggagggaaggaggcgggagggagcgagcggagccaggggcgcacgtacgccccagcgctgggatttatcggctcgcgaggagagcggagcaggcgcgcggcccaggcggaggagcgccgactctggagcagccggagctggaagaggaggaggaggagaggcggcggggaaggaggaggagggggagagtcgctcccgccgggcgagcatggggcgcctggcctcga

SEQ ID NO: 197731 - DNA, 218 bp, Homo sapiens
  chr1:117453203-117453421
  hyper
tcaccttgaactcccggcccggaaggtgctgcggtcccggcccgggtcctcggctcgagagcggaaatgtgagcctttgatatgccccgccatagccgccgccggccgggtcgctcttcacccaacccgcgcggagttgcctttccagggaagcgagagaatcctccaacttccttccacgaaggtcacagggtggcccggagcgttacaatggaaat

SEQ ID NO: 197732 - DNA, 206 bp, Homo sapiens
  chr1:118148828-118149034
  hyper
gggagccgcgagctcacttagtgggggtccgcccccactaagtggtgctcaggtctttgcccagcctggtagggggcaggcggacccgaggggagctgcggacaggtgccgagacccggtgctcctttcccctcctgctccctcgaggacccccgcccctgacacacccgtcccaaagggccagaagagacgctccgaaagggagc

SEQ ID NO: 197733 - DNA, 80 bp, Homo sapiens
  chr1:119544707-119544787
  hyper
tgtgggtagattcccgagagggtcagggaatctcttatttttctcacagccttgggtgagaaaccggctacctcctctca

SEQ ID NO: 197734 - DNA, 141 bp, Homo sapiens
  chr1:119548917-119549058
  hyper
tcttctaaggatgaagaggacattataaaactgcacactacctccctaatggcccattcgtcctagctctgtctagtgaagtagagagcagaaaaaaacatctagctctatcaagttgaaaacattttcacattcacctta

SEQ ID NO: 197735 - DNA, 360 bp, Homo sapiens
  chr1:119870289-119870649
  hyper
tatatttcttgcaggggatcctctctggctcttgccagcgcctctcccccgtggctggcagccgccctagccgggcctgcaaacagcggatgccccaggtcgctatccctccgccctgccccggagcgccgggccctcacgttctcgctccagcctggggtctctcacgtggcatctggccctggggacggtgcagcggaggagttaattgctgtcactcctgacttcagcgaaagaggtcgatcgtggggtgagatattgaagctggggattgacctgtggaccaagagtttgatggggcaactcaatagcaaactcaatgttcccagagatgaaccaagtaatcagttatttattcag

SEQ ID NO: 197736 - DNA, 293 bp, Homo sapiens
  chr1:120190872-120191165
  hyper
ccggctgactcctcactggggcttcctgtagggctggacaaaggacatttcctgggaggagcgggagaatgttcccagcatgcctcgatttgtagttcccggggacttcctgccaccgcagcagcgggcgccctggaggtagctcgggccaggctaggactccgggacaggaggaaaggcgctcgctgcttctctaagcgctgtggggaagggagcggccggcgggtcttgccccacgccccgccccgcggcgctcaaggagcccgctgtcccggagcacgcgagatcccagc

SEQ ID NO: 197737 - DNA, 68 bp, Homo sapiens
  chr1:120191312-120191380
  hyper
aatctaaaaacacaaaatctatcttttaaaatagattttctttttgtcttttacgccgttgacatcct

SEQ ID NO: 197738 - DNA, 61 bp, Homo sapiens
  chr1:150601697-150601758
  hyper
actgagtgacaaacgacccaactaaccagcgccaaagcagcatgtcgtgttgaagctcacc

SEQ ID NO: 197739 - DNA, 458 bp, Homo sapiens
  chr1:150669481-150669939
  hyper
gggttatggctggacgcaggctgtagcttgtgctgtattttagaaggacacctgttctccccaccccacccccgtcctagtaggtgaaaaacttagccacgcagagagcacaaacttcctgatccttcgatgcagagaaggaataacacatcagcttcctcaggatcactaggcaacctaccttggtgtttcttcattgcgccaatcagaaatcaccaaggttgagtcccgccaatcggagctcacagggggaggctctcccccagctattctgttgcgatccagacaaacaccaccaaaaggaggcaggtttgcgttcaacctgacagctggtcaatccaatgaaggaaccttggtggaagagaggaaagagggctgcgctccccacccccattaaaccagccaatcaaagcgctgagtgagctaacatgggctgccaatctcgaaaggtttctgtg

SEQ ID NO: 197740 - DNA, 48 bp, Homo sapiens
  chr1:150947649-150947697
  hyper
cccccaactgctgtgcggcccccggtccccgccagggtgggcacattc

SEQ ID NO: 197741 - DNA, 33 bp, Homo sapiens
  chr1:150980783-150980816
  hyper
cattgcggagttgcgggactacgtttcccacgt

SEQ ID NO: 197742 - DNA, 126 bp, Homo sapiens
  chr1:150980853-150980979
  hyper
cgtcccaggagcctctgggcgtagagccccgcctccgccgctgggggcggggcgacgccggactccggagcgcccgcttacgcagttcctcccggggtcggaggccgattcgccgtgtggcgggtt

SEQ ID NO: 197743 - DNA, 360 bp, Homo sapiens
  chr1:151020386-151020746
  hyper
ggggcccaaggcctgacccagactccgaccgaaatgcagcgggtcagtttacgctttgggggccccatgacccgcagctaccggagcaccgcccggactggtcttccccggaagacaaggataatcctagaggacgagaatgatgccatggccgacgccgaccgcctggctggaccagcggctgccgagctcttggccgccacggtgtccaccggctttagccggtcgtccgccattaacgaggaggatgggtcttcagaagagggggttgtgattaatgccggaaaggatagcaccagcagagagcttcccagtgcgactcccaatacagcggggagttccagcacgaggtttatagcc

SEQ ID NO: 197744 - DNA, 55 bp, Homo sapiens
  chr1:151031281-151031336
  hyper
ctcccggtcccaccgcctctggccctaaggcctccaacccgcggcctgacaagcc

SEQ ID NO: 197745 - DNA, 238 bp, Homo sapiens
  chr1:151043249-151043487
  hyper
ctctgtttctccacgagggggggttaaaggcccccaaaacatgcacacatgaaaagggcaaaaagtaaccgtccttgacagggagtcttaactagagaaggaaacgggactaaactggcgggctccgtggaagcgtggccggcagcgtcccggacgaggaggtgaggaggaaagaagagatgtgtggactccggggggcgtcagggctggaaaggaaagtgccgtgagaagtcacacc

SEQ ID NO: 197746 - DNA, 565 bp, Homo sapiens
  chr1:151512578-151513143
  hyper
agcagccccatgtcgctcccaagccccacctttgtgtaaatctatgcgagcaccgatggggcatgtcccagacccattggctccgcccacctcacctcctcgcctatcgttagttctctgcgaaaccgcgaactgggggcgcggcctatcttcagccccgcccctgatgggcctatacaagggggcggttccgcgcgcgcccgcccagttggagccagacagcggggtggacaagtggcgtgtgtgctgcgaccccgagggaagatgaacgggacgcggaactggtgtaccctggtggacgtgcacccagaggaccaggcggcggtaagaaaaagcgctctcgctgtcttctccgttttgtattcccggtttctaagtccgccccttccgtgccccgcgccgtgttggctgacatcacctggtgcccggctcgcgcggtcagccctgcgcggcgcttctctctttttattcttttgcctgcgacgggcagtgggagtcgcggggtgaagactcctttgaggctggagggttcggggcgtccctgccctttggtaggacactgcgg

SEQ ID NO: 197747 - DNA, 259 bp, Homo sapiens
  chr1:151513212-151513471
  hyper
cacattgggtcataagagaatgagctcaagcgactgggtccctgagcgcctttggacgttgtgtcctgccgaggaggcttaggctttcccgtgggtcgagggtcctggtgacctccgaggccctccaaagaatttcatcatggtgctttggatgatcagtaacaagaaaaatggtagagtaaattacagggcttggactggagggcggggggcaagtaggggacggtaggactcaaactattccgagattggctaggga

SEQ ID NO: 197748 - DNA, 211 bp, Homo sapiens
  chr1:151566653-151566864
  hyper
ggggatggactaagttcccttttagctctaaaattccatgggtcttcggaggggaagacaatgctttcagagcacgtttagccggtgaacctgaaaacgaggatttttttcatttgcgaagtggaggtactcctgcgcgcccaggatgcagccactagagggcagcaagtcttccagcacctgtgcaggtggccgccgccgggccccacag

SEQ ID NO: 197749 - DNA, 34 bp, Homo sapiens
  chr1:151584888-151584922
  hyper
acggggagctgtacgcgccgctgcagcatgtgag

SEQ ID NO: 197750 - DNA, 119 bp, Homo sapiens
  chr1:151689216-151689335
  hyper
gctttcccggtcacctgggtcccggagctctgctctccggccgcgctctcctcaacaaaaacctcccccctccacacccccctccccactcccacctcctttcccctgacatcagtgat

SEQ ID NO: 197751 - DNA, 40 bp, Homo sapiens
  chr1:151693822-151693862
  hyper
atcagtcccccaatccgggaaaggcgatcctttagagacc

SEQ ID NO: 197752 - DNA, 79 bp, Homo sapiens
  chr1:151694406-151694485
  hyper
ttatctgtaagaagatgggtggcttaaactttcaagcatcctggggaaagacttgggttaaatgcgcacgccgtttccc

SEQ ID NO: 197753 - DNA, 110 bp, Homo sapiens
  chr1:151762601-151762711
  hyper
aaacgctcccgcaccgggtccgttgtggcgtaagcgggtgactggagcatcttcctcagatacagttacgagttcccagtgggtcaagttgcccccgagcggcgtctcac

SEQ ID NO: 197754 - DNA, 45 bp, Homo sapiens
  chr1:151966778-151966823
  hyper
gccctaggaggtccgtctgggggtctcggcggcctgcgccagtgg

SEQ ID NO: 197755 - DNA, 420 bp, Homo sapiens
  chr1:153651023-153651443
  hyper
taaagatcctggattggctcttctgtcactgagtctgggaggggaagcggctgggagggagggttcggagcttggctcgggtcctccacggttccctccggatagccggagacttgggccggccggacgccccttctggcacactccctggggcaggcgctcacgcacgctacaaacacacactcctctttcctccctcgcgcgccctctctcatccttcttcacgaagcgctcactcgcaccctttctctctctctctctctctctctaacacgcacgcacactcccagttgttcacactcgggtcctctccagcccgacgttctcctggcacccacctgctccgcggcgccctgcgcgcccccctcggtcgcgccccttgcgctctcggcccagaccgtcgcagctacagggggcctc

SEQ ID NO: 197756 - DNA, 176 bp, Homo sapiens
  chr1:153936615-153936791
  hyper
ccaggtgggtggggacgtggtgggaccggaatgcggggtgctgaagccgcgcccagggaagagcccccagcgcattccaggatatctgcgtaccgcgcctgcgggcgtctggccggttctcccacctgatttccagcccagctcccgccaccctcgccggtcggtttgctgtttgc

SEQ ID NO: 197757 - DNA, 156 bp, Homo sapiens
  chr1:153940532-153940688
  hyper
tgcagcagaaagggcgcggctacctacttcttaaattccgtttgtggaccctcagactcttagtcccctactcccagatacagcggccctaccgtggctcctggcaaggtggcatccacttttgtagtgtaaggctgggggcggggtttggctggc

SEQ ID NO: 197758 - DNA, 330 bp, Homo sapiens
  chr1:153958647-153958977
  hyper
gtcttgcccacccccgagtccccgatcagcagcaacttgaagaggtggtcgtaggctttggccatggcggacaccgggggagccgggggaggggtggggagcgcccggcactggtaggcgggactggacggttggcaaacagagcggcacggagcccaggccaggaagaagttttcctccctctccgcccaggctccgggaaagaggagaggcggcacccctccgggctccaccccctgcccgcccacccttttgagcaggccaaggctgccagcccggcctctgttctctcggttttcccttcctagcttaggccggcctgtctctctc

SEQ ID NO: 197759 - DNA, 147 bp, Homo sapiens
  chr1:153963300-153963447
  hyper
cggcggagatctcgctgttctgtccgaactctcccctcacgctgatttcggatcgtagagggtcctcatttaccctctgcacttcttaggacattaactccagggaccgcagcggcccacgggccacccgcatagacgggagcggag

SEQ ID NO: 197760 - DNA, 303 bp, Homo sapiens
  chr1:154297687-154297990
  hyper
tattcaccacttctacagctctcctgccgctccctgcagaggatgctcgttttgcagagaaggcagtgttcctctattcccttcttccgaattaaaaataccccctcagagcgatctagcctcccgaattgttttttcttttaagatgcggatggacgtacgtgtgggggcatcccagcccagccacgccgaggctcggaagggctaagaccctcccactgccccgcacaaagatggctgctccctcctccccgctccttctcccctccccaaaaccccctcccgccccccggcccccgccgc

SEQ ID NO: 197761 - DNA, 36 bp, Homo sapiens
  chr1:154298038-154298074
  hyper
cgggccgaggccccgggggagcggggccgcagctgg

SEQ ID NO: 197762 - DNA, 79 bp, Homo sapiens
  chr1:154842703-154842782
  hyper
ggtcctctaggagcgtgtgaggccaggctcagcttcactcctcgctggctcaatagcttcgctcgcctcctcctgccac

SEQ ID NO: 197763 - DNA, 360 bp, Homo sapiens
  chr1:154909324-154909684
  hyper
cctcagctcatgtccaaacagatatggggagaaaagggtgagacacgcggagagaaaggcggttccttcacagagcagcctcccctcgtgaagctcccccacccgaactcacttagaacagtccagccccgcccagaaccttcgctcacagcctggcctgcttaactgacacccggggaggaaccggacgcgactaccttcctccgaggggggtgacgtctgaaatttcctgaggtgaaccccatgttcccttccgcgcagccctaaaactttaggaaaaaaaatctctggagtgagatcacgttggagacgttttggaaactgcccttttgcctgtgcgttatagtacatgtgccacag

SEQ ID NO: 197764 - DNA, 195 bp, Homo sapiens
  chr1:154955613-154955808
  hyper
aaggtccggcccccgtatttccgggcgagaagtgaccacgtggttgtcgcctataacaatccggccctgctcccatccactggctaaagcctgagagcgacagttgaatacaccaatgggaccctggaagagtctaagcgacagccaaaatcaccattcaatgtcagctaggtgcaaggcgggactttaagtacg

SEQ ID NO: 197765 - DNA, 360 bp, Homo sapiens
  chr1:154971938-154972298
  hyper
cccggaataggcgcggagttataaatagtgccacccgcaggtgttggggggagtcggcgggaggggggtacccctggcggccacggccccttcaggtgggttgggcggtcgcggtgggagcgctggggggcggggggcgtggggggtctgcggtctgagcgcccccagcggtttcctgggcggcgggtttttcgagggaagcggaggcagcggaggatgggggggagcagcggagaagaggtgggcgcctggcgcatgctgacgctccgcttgcagctcagccccccacattccgaaacaggcccccagacccactcacgcaggaccccgcccaggcaaagcctcgcctttcttaacacc

SEQ ID NO: 197766 - DNA, 436 bp, Homo sapiens
  chr1:155036381-155036817
  hyper
acgtagtctactggaactccagtaaccccaggtagccgggccgaaccgggcgagcgcacagccaagtctgcgcgctcccgggctttgcgcgcgcccgccacccgctctttgcgcggcgccgcctgagcctggccgcgcgccggggctcctttgtttgagccggcgggggaggggggaggggcgaggggcgaggcgcgccctgggtctccccacagcccgcatgtgttggggggcaggcagaagaccccagccccaagggttgtctagggggtcttggagcatggagctgggggggcctttgcccgcactccgggctccgcccccctcgctgctctcctggcgatccccagcctcccgcaggctggagctgtggctgacgaacttgagagcgagggagggggctttactcttatgaaagagcgtgggttactctcct

SEQ ID NO: 197767 - DNA, 165 bp, Homo sapiens
  chr1:155043706-155043871
  hyper
acttaggcccgcccagccacaggcgctcaggcccagccggccttccctatacaactttcctcatagcatgcgcgggcggctgattcagtcccggggcgcgtccccatggaaagccagggctgagtccactcatggggccgagacgggctgcaggcgctgggaggt

SEQ ID NO: 197768 - DNA, 449 bp, Homo sapiens
  chr1:155099556-155100005
  hyper
attcaagagcctgttcgcacggtgtacgcgtgtgttgttacatatactcaggttattagcgctctttgacttatctaaaataagaacggccccctctcgagcccagggtcccgcgtgtcgctcctgcgggcaggcactgatgtgatggacagaggcgtccttagccccggccgcacacgttacacactcgatcacacaaagcgttgcactttattcccggcatctaggcgatgacacaatctccagaacaaagacaacattgacaaacccaacaaaaacaaacagccgcgtgtgtgtggggaggggcagtcaagcgcagagtccgggaaggggatgggggaggaggagagtgtgggaacgcgggcgcccgagcctgggcatgcgaggctcagaaaggtgcggggcatgtcaacaacctcgcaccctgcaaggtccgcgcgcggagcagc

SEQ ID NO: 197769 - DNA, 225 bp, Homo sapiens
  chr1:155100352-155100577
  hyper
gatctgtgagcccagcgctgactgcgccgcggagaaagccagtgggaacccagacccataggagacccgcgtccccgctcggcctggccaggccccgcgctatggagttcctctgggcccctctcttgggtctgtgctgcagtctggccgctgctgatcgccacaccgtcttctggaacagttcaaatcccaagtaagcctcgagactcccgctggcagcctggg

SEQ ID NO: 197770 - DNA, 114 bp, Homo sapiens; identical to SEQ ID NO: 36305
  chr1:155147320-155147434
  hyper

SEQ ID NO: 197771 - DNA, 295 bp, Homo sapiens
  chr1:155164120-155164415
  hyper
taggtggggtgacagaatgggatttacggacacagaactatcctttggggagcagagtggtattggggacaggtaggcacgtagcggggggcaaaagcacacgtgaggtgcgtaatgcgcgacagccaagaggtgtgtgcggcagcagtgcacgaggggaggaagctatcccaggccgcggcagcacgtggaacttgggtcccgcagtcgcaggctgcgctctaggccgacggaagcagttccgcctgtattcagaaaacagttctcagccccaaagacacaggttggaaagaac

SEQ ID NO: 197772 - DNA, 597 bp, Homo sapiens
  chr1:155164455-155165052
  hyper
tcagatcagcaggcgagagaccaccgctctcgcccgcgcgccgcgcggcgcccgaggcgcagctttgtgtgcggcgagaccctggggcaggcgctgggcggggtggggacatctgacgtcagcgcgcccgggagcgcgggccggggaggcggggagccccccaactcgcaggccggagaaaacacgagtagctaggtgggcggccccaaacctcaactcccggcattgccaagcaacagccattcagttcggttgctgggacacgcgtcaccatggcgacggctccgcgccgcgcagtctgagtacttaaagagcaagcgcgcgcaacgcccgggcgtcggaaagcggccttctgggactccgcaaactcccgttctccctcccccctcccccttgccattccctttgccttccgggcgccaagtctctctggcctccaaggtgaacccaactccccagcgcgccccgggttcccgggtcgggccggcttcaggcggtggggagcgggatcccgggccccgggcgggcgggagggacgggacgcggtgcagtgttgttttttcccccgccaatattgcactcgtcccggcctccggc

SEQ ID NO: 197773 - DNA, 182 bp, Homo sapiens
  chr1:155178388-155178570
  hyper
gggtactagcggacgggccgtgacccggatgaagcagaggggcgcctgagttcccgtcacctaagcgacagcctgcgagcctctcttcccctcccccacccaagccccagcccggcctccgctccggccgccgccaccgcccctgttttgtttccatggcgacaggcggcgcagggcccgct

SEQ ID NO: 197774 - DNA, 220 bp, Homo sapiens
  chr1:155830104-155830324
  hyper
gcggggtggggagcaaaaaggaagccactccttaagccggtcagctggatgctggggctaggaggaaacgtgagccctgcaagctccattccgcatcgtaatggtggggtccctccgatgctaccaaatggcgcttggcgctgctgggctgggggatgacgtgatgtctatttctgggcctcctggcagcgccgacgctctccttccggggcctttgttc

SEQ ID NO: 197775 - DNA, 127 bp, Homo sapiens
  chr1:155830382-155830509
  hyper
gggcgcgatccaggccggagggggaggggcgaaagaggcccagcccgggggaggccgctttgtgtaccgcagaaagcattacgtcatttcagagcggctggtccccgacccagccctgtgggctcca

SEQ ID NO: 197776 - DNA, 201 bp, Homo sapiens
  chr1:155946472-155946673
  hyper
gaaccaaatttctgcggtttcaaaaaacctcccccgccccccttggctctactccagggtctcagctcaaacggttgaaaaaataaacagacttttggagctggggcctgggctggcgcaggctgtgaagagcctgtctgccaccccactgttccaccacacttcagccacctcaccccggccctctgtttgtcttaggcc

SEQ ID NO: 197777 - DNA, 65 bp, Homo sapiens
  chr1:156036261-156036326
  hyper
gagctaggatgggggcgagctgcacggatcgagagcgccccctcacttccgcacaatgctctgca

SEQ ID NO: 197778 - DNA, 157 bp, Homo sapiens
  chr1:156084256-156084413
  hyper
ggcaagcttggagccgacagtgctgagcaggcaggagccaagagaggggaagcttgagcctcacgcagttaggggtgcgctggagagggtggggcccgactccgccacaccccaacggtccttccccctcctcaccactcccgcccccacccccaat

SEQ ID NO: 197779 - DNA, 116 bp, Homo sapiens
  chr1:156215213-156215329
  hyper
aagtcctcagtacatggtcccgatgcctccagtgctgttcgagagcagtgaggtgtgtcctctcctgtgcctccgccttccccgtccccactggaggggcctgggaacccaccggg

SEQ ID NO: 197780 - DNA, 48 bp, Homo sapiens
  chr1:156215871-156215919
  hyper
tctgagctcaaggccgcggcctggggcggagcctcccctcaccaggtg

SEQ ID NO: 197781 - DNA, 56 bp, Homo sapiens
  chr1:156390040-156390096
  hyper
tgctggtcagtcctcgcggctctagcccctcgctcaagcctctccctcccgcccgt

SEQ ID NO: 197782 - DNA, 442 bp, Homo sapiens
  chr1:156593618-156594060
  hyper
tacctcctgccccccatccacgaggtcattcactctcatcgtggggccacggccacgctgccctgcgtcctgggcaccacgcctcccagctacaaggtgcgctggagcaaggtggagcctggggagctccgggaaacgctgatcctcatcaccaacggactgcacgcccgggggtatgggcccctgggagggcgcgccaggatgcggagggggcatcgactagacgcctccctggtcatcgcgggcgtgcgcctggaggacgagggccggtaccgctgcgagctcatcaacggcatcgaggacgagagcgtggcgctgaccttgagcttggagggtgaggcccttccgctcccgccccattcctgtgtagcagcgggtccgcctcgcctgggtctcccagggctccttcccagtatctcctccgcacccctggggaccccag

SEQ ID NO: 197783 - DNA, 202 bp, Homo sapiens
  chr1:156594227-156594429
  hyper
acgcctggccacctactcccagctctaccagggtgagcggccgaacccagcacttcccaagccccgcggagctgtctcaggggcccgagagagggcgccaggcgagctcagtctggctcctgcctatgacgcctcttatccccgacctccgccgtctcccgccagcttggaccgagggtctggactggtgtaacgcgggctg

SEQ ID NO: 197784 - DNA, 38 bp, Homo sapiens
  chr1:156595265-156595303
  hyper
ccctccagacccggagcggcctctccagacctgccttc

SEQ ID NO: 197785 - DNA, 50 bp, Homo sapiens
  chr1:156627098-156627148
  hyper
cgcgcagtagagtgcgcctgtgtgggccgggccgccgtgcagggggccgc

SEQ ID NO: 197786 - DNA, 164 bp, Homo sapiens
  chr1:156627423-156627587
  hyper
atctgctggcggctgcgctcactgcacgccttcgtctccctagaccggtaccgggagtaccagtggatcggactcaacgacaggaccatcgaaggcgacttcttgtggtcggatggcgtccccctggtgagaggccccagtcgaaccccgccgtctagctcact

SEQ ID NO: 197787 - DNA, 62 bp, Homo sapiens
  chr1:156647957-156648019
  hyper
gggccccttctcccgcaccccctgccagggaatgttgggtagtggacgccctctggcggctt

SEQ ID NO: 197788 - DNA, 126 bp, Homo sapiens
  chr1:156675374-156675500
  hyper
tggcctgggctcccgcgcggacagcttttataccctgtacggaaccgcccctgcccaggattgaagtggccccgcctcccgctccgcccccccccacctggggggccctgcgcccccgccaccaac

SEQ ID NO: 197789 - DNA, 586 bp, Homo sapiens
  chr1:156675863-156676449
  hyper
ggggcttgggagctgcggggttccgggggttagggatctaagtgaggcaacggcgccccctgctggaacaactcggagaggctgggcgggggcggcacggtccccccacccctccaccctgcttcgggctcacgtaatgcctggggactctggaagtagtcgccaggcgactcgctccccttaatgcgctgggcggacattgaagggttaagcaggagcccagggcgcgaggctgggagggcagaggtcacagccaatcacttgacgcaaggtctttattaaaacgctttctctgtcgcttcactcccgagaccccgagggggtctcagtagggggaagggagggaggcggggacagaggcgcggagccctggcgagctgcgccaccacctagataggcgggaggatgggtgccgggggagaaggcggagcagggtctcaggtgtcaccatcctgagctgtaaaacgggcggaaggagcgacctcccctcccttggagagcggctttgaaacgggagatcaaagagggtgggaggagggcacggcttcctgcagagacccgagtgggagtgggcgagaccccagtg

SEQ ID NO: 197790 - DNA, 135 bp, Homo sapiens
  chr1:156676539-156676674
  hyper
agcgaagcctggcgggatgcagtgattggagccaaaggaaccgtcccggcctgtccaacgcgggggggccttcggcccggtggccctgagcgaaccgatgcacgtggccccgccgcatcccatcccccaccctcc

SEQ ID NO: 197791 - DNA, 45 bp, Homo sapiens
  chr1:156716455-156716500
  hyper
gatcaggcctggaagcccaggccaagctgagccaggggtgggtcg

SEQ ID NO: 197792 - DNA, 60 bp, Homo sapiens
  chr1:156716530-156716590
  hyper
actcccagcagcacttgcagcagccccagcagccaggcttcccgccggacagaggccagg

SEQ ID NO: 197793 - DNA, 177 bp, Homo sapiens
  chr1:156897224-156897401
  hyper
catattccggcggacgccctgtaccttttccagcgacccacattctccctccggctgccccaggattgcgcacttgtctctgcggaacaataacatcgacgaccgcggggcgcaactcctgggccaggcgctgtccacgctgcacagctgcaaccggaccctcgtctcgctcaacct

SEQ ID NO: 197794 - DNA, 222 bp, Homo sapiens
  chr1:156897431-156897653
  hyper
aggctacatcgcggacgtgagtgcacggcggggagggacctgctgggagcaggggcggcttgggcggctcacgcgtccctgcccgcctcttagggcctccggctgaaccgttccctgctctggctgtccctggcccacaaccgcatccaggacaagggcgccctgaagctggctgaggtgggtgtgccgatcaggtggggcaggggcgtgggcgggccgagg

SEQ ID NO: 197795 - DNA, 126 bp, Homo sapiens
  chr1:157108692-157108818
  hyper
gaaatgggccctgcgacctcccagagtggggatccctcacaatgggaagacgggacccgcagacttcagacgcaatttccctaccctttaagaaagggccctttcatatacgtatgaaagaaaccg

SEQ ID NO: 197796 - DNA, 201 bp, Homo sapiens
  chr1:157963009-157963210
  hyper
gggtatgtgtgtgcgcgcgttgtgggggggcagggggagggctcgtggagggaggcgccgtcggagggagagtagacgtcaggcggagggagggaggcaggcaggcagggaggcagggagggagagagggaaggaagagaaggggagagaaagggggagcaaagaccgaaagagacccagagagatacagcttgagaggag

SEQ ID NO: 197797 - DNA, 221 bp, Homo sapiens
  chr1:157963516-157963737
  hyper
aggtaagggcccccagcccacccccggacgctcggcttccccccggggccggggcactgcttccccggtgggagagtgctggagtgccccgcggcccgcggccagtccccgggtccggacgccacgaggcgggggctcggtccgggcgcagagccctgggggagggggcgcggagtaacgaggggctggggagaatgagtttgccgttgatttgcccaagt

SEQ ID NO: 197798 - DNA, 117 bp, Homo sapiens
  chr1:158083065-158083182
  hyper
gaagaaaggcatcccgggcaaaggcaccgagctcttggtgtggttctcctgggataagcccacagtcacaaacttgtgcaggaatgggggtaccgggaagcagcccggtgttccaag

SEQ ID NO: 197799 - DNA, 170 bp, Homo sapiens
  chr1:159141761-159141931
  hyper
cagccgctgctaatacccttgtgtctgtctctgagcatccgtgtctctgtggactgtgggtgtgccggtgtgtgcacccttctgtgtacaccactgagcgtgtgtctgcgtgtgcaccggggtttggctctcggggctgatgtccgttaggagcagcccggggtctggat

SEQ ID NO: 197800 - DNA, 271 bp, Homo sapiens
  chr1:159824753-159825024
  hyper
aggaggtgggtgacgcggctgccgcgcccgctggccttgcacccgggcgccacggcgtcctctctgtggaaaacaacaggcgggcgggtgagcgggctgctccgcagcggggcgtgggcacggcctgggcagagccgggggctcttggcaacctcttgtctcccgcgcctccctccacctgccctcgtctctctccctcggcctcgacctactgtcctttgtgacccttcctgggtcggcgaccctgcagcggtcccggagccagcatccc

SEQ ID NO: 197801 - DNA, 929 bp, Homo sapiens
  chr1:159894400-159895329
  hyper
gaccacaccctgggccgttacaacagatgagtcacccaccgccctcccgccgctggggtgacgcagtggtctgggcagcccgcccgtccgcccgcggccaccaccggctttcccagcagcagggggcacccggtgggggcagcggcgctcgggcagggtaaaagcagccaccaccacccccacaacctcacacagggcaccccggggcgcagtcagggctgcagcacccagacccccgaggtcaggggaccgtcatagagatgactggagcttcacagaaggtcaccgtgcgacccatgcagagccccctagccccagcccgtgacctcaagtccccagaatagcaagctagcaggaacaggaatgaaaagggcggcctcggggactcagagggcacgcagtgctcacacgtgctcctggaaccaggaagtgaagggtcgcgcgggaaagcccaggagcacgagctggcccagggccggcgccacgacccggggtcactcggggccagccagctaaagtccgacgcccttttttcccctcgccccagtgaggactcagcgatggagcccgcgggtggggctcagtccctgagtccctgctccagacggacgccctgtctatgcatgggctaacctcgcctgacctcatcgtccaacaatgtcgggtcagggcttggggacaggacctgacagcacggggcggggtaaagtagtcaccggacccttgcctggtaccagcccttgatccccgagctcgctggagcaagttcaaagcgctggcttcttgctttctacacagcacgcacatgtccccgacccccgtacccccgacctgctcaccgttcaagcgggctggagagcggcgcactgactcaaggcaagggctgcagctgcaagtggtgcgccctgcccagccggggattttcagga

SEQ ID NO: 197802 - DNA, 215 bp, Homo sapiens
  chr1:159915360-159915575
  hyper
acctgctccgcaccgctcggctccactctcgccgctacacaatagggggcggacccgcctccccgcctcggatgccccgagcgcctcccgtcgccctggagaccgccaatccccctcccgcggcggccaattggagccgccagaggcacggcgaggcgggcgggacccctgagcggcctgggagttgtagtttcaggagggaagagctcggctgc

SEQ ID NO: 197803 - DNA, 49 bp, Homo sapiens
  chr1:160039928-160039977
  hyper
aaacccggagctgggatcagataagggcttgtccgggggccggggccgg

SEQ ID NO: 197804 - DNA, 152 bp, Homo sapiens
  chr1:160040181-160040333
  hyper
cggggcaaggaagcggagacccagacagctgcaggcgcagagagaaatatccaaagacagagacccagacagacccggggagaaagagagatgaagagacgatatgcgaaacgataggagctgagctggcagggtgacaggggaagggagaa

SEQ ID NO: 197805 - DNA, 51 bp, Homo sapiens
  chr1:160040504-160040555
  hyper
ctccctgagccacaggactgtatctttgggcacaattcccgtgttgttcac

SEQ ID NO: 197806 - DNA, 103 bp, Homo sapiens
  chr1:160040585-160040688
  hyper
tgagagacgcgcagcacacggtgcccacctgcagcggctttctctgtaaggaaagataaggccggaaccctcagcgaagtgcgggaggtactgaaggctgtaa

SEQ ID NO: 197807 - DNA, 252 bp, Homo sapiens
  chr1:160370270-160370522
  hyper
ccgggaggcggcacccgggagctcgcgctcccccgccccctgcaccccccaccctcatcccctccccctccgccccctcccccctgcgccgccggctcccgatctgattcctgatccttgattccttgatccttggtcccgccatgggagcctgagcgccccctattcccccctggcccccagcccccggggccttgagggggaagaggcagcggtctgggacggagcagggggtgaccagactcaagaacc

SEQ ID NO: 197808 - DNA, 216 bp, Homo sapiens
  chr1:160370642-160370858
  hyper
gcagttcgcagcggcgggtgagtgccgggccgcgggggcgcgggcaaagtttgaaaaaaaaagaagaaagaaagagagagaaaaaaagaaatggaaaaggaggaaaatcatgcaaggggccagggggtgcccgaccccagagcgagcggggtggcttatgggggaaggggggctggactccgggcaacccccttccggtccgcttccccactgcac

SEQ ID NO: 197809 - DNA, 188 bp, Homo sapiens
  chr1:160526915-160527103
  hyper
taataccatcaattacgatctacattctataagtgaggaaactttggaacagagaggttaaacaacttgcccaagatcatacagctggcaaagtatgcctaatcccaacattagcgttctttccgctatgctgtccatcggtatagaaactgattcaatcatcttatattaatcgaacattcacaatt

SEQ ID NO: 197810 - DNA, 424 bp, Homo sapiens
  chr1:160983485-160983909
  hyper
actttcagtgatgtcgatcagctggctcgggtcctctgaggatggcagaaagtggtaatggcagggtaagacaggctcgctttcactccctggctccctcccgccctctctgcagaatttccggttctacctgctcagctcccccgccaccccatcttcccagtgcaagggaaggtcgagccttccagcgcaggacttacttcaggggcccagcacccacttcctgccagccagctgcttcctcctgttccgcccctacattgtgaaacaaatgacgcagccggactttagacagaaaccctgcttatcagggagtccaggcagatgaactctgggttctcaatgccaggaaaaccctagtgtgtatccactctcacagtatgtgttcactcatactgctttccacaaccgtcacacaatagtg

SEQ ID NO: 197811 - DNA, 947 bp, Homo sapiens
  chr1:160990370-160991317
  hyper
ggagccaaggctcccggctgcgcagcggggttcgtggatgctgggtggccgttggaggggcaggctggcccttcccaggtgcgtgtggagcgcgcgctgggtagatgagtgtggaagggtccttggcccgacggccctctccagtgaggacgaggagtgtacctctggtgtgtgcagatgggtcagctccctcctggtggccgtgaggggtgcggtcacaactcaccagtgtgggggaggggagccagccactcacccagctgtgagagtggtgaaagagggaccagccaggggtggaaaagataattcgcagaacgatataggaaggtttctgagctcctcccctcccgcgggctaggggcgtggggagagccttcctccaacctctgacccgaccaaccgattcctcccgaaactctgggaacttacacaacaggatcgccaatatgaagaggcacaacagtttcctctcgacttgcgcctttgtccccatcgcgatcaggctcccgacacaacagccgccgaaggactcctgggaacagacacagctccgcgactacagcgaggggactgagagccagccgccaggtggaaccccgcccggccccgccctccgcgcctgattggccagctccccacccctgcacgttccgattggtgtaaggaaccgctgctcttcagaacgagtcacctcggccaggtgttaccccgccgccactccccgcctcggcgcactggcgcctttccccacaggagctgcctcagattggcccaggagactgtcgcgtcaggagacgaattccgcaccttcagcaggtgacggccccctgattggttggtgttcccgaagtagcgacttcctgactggctgggttctcagttggagctagagggctgagaagtacctctaaggaggaagtaggaaaggcagtcgtggtgtgggattt

SEQ ID NO: 197812 - DNA, 99 bp, Homo sapiens
  chr1:161171825-161171924
  hyper
gagtagggaaggaagcgccgcgcgtttccaagatacgcaggcgggctcggcgagagagcacgaagtatctgccccacgcaggaacggcaattttccctt

SEQ ID NO: 197813 - DNA, 95 bp, Homo sapiens
  chr1:161276123-161276218
  hyper
cctcctctgcagggccgcctgcctgcgtagccagcagtaccgaaccacgtagaaaagcagcagcagcaacagcaccaccccgaggacacccccga

SEQ ID NO: 197814 - DNA, 69 bp, Homo sapiens
  chr1:161368924-161368993
  hyper
gataccggcaatcagcgcaaagcgagataatcaccagcgcactcttggatctgtatacaggtttgtaaa

SEQ ID NO: 197815 - DNA, 96 bp, Homo sapiens
  chr1:161369405-161369501
  hyper
gggatctcactgcgatctgggcgaattcttacgtagaattcgaaaggatatggggaaggaaaaaaacaaaaacgggaaccactttgtttccgcccg

SEQ ID NO: 197816 - DNA, 298 bp, Homo sapiens
  chr1:161369561-161369859
  hyper
ccaggcggtggcaggttttccacaaatgactctgaaaagtcagaggctcaccactgtgtctctgacccacgagaaaagtacccgggcgggccacccacagcttcgggatcggggcgcgcagggaagtagccagcaaagcaggtaagtcccgggctgctcgcggcggggtcatgactgagggcacaggggtgaactccatggtgcttcctcaggaaacttccggcgcagtcagggctgcagccagagcccggagatagttgggcagggctccaggcgtccccgaatgctcgtcgtggag

SEQ ID NO: 197817 - DNA, 313 bp, Homo sapiens
  chr1:161369945-161370258
  hyper
acccccccggaaactggagaaaaacggagtagaagagacctaggggacagacttggccgggtcaagggaaaccagctcatatttggaacaaaatacgccttatgtttgcccagcactgaatttagaagcattttcacattctcgagtttaactagttttgcaacagtgccacgagcaaattattaaacgtgttttaaagatgaagagactgaagctaggtaaattggacttgggtaagatggaagcgctacttaacgttaaggagagtctgcgaccctgatgttctcaggctgtatctcgcttagtgggacta

SEQ ID NO: 197818 - DNA, 208 bp, Homo sapiens
  chr1:161410496-161410704
  hyper
ccaaagggccaggcaggccaggcccgagatggcaccctgcgactagctggagggcggaggaaggagaaggagggcccacaggctgggtccgaggcggcggcccaaaaagcacggctgcctccccgtcggggaatcgaaccccggtctcccgcgtgacaggcggggatactcaccactatactaacgaggacgacggcgacggtcgccg

SEQ ID NO: 197819 - DNA, 108 bp, Homo sapiens
  chr1:161591364-161591472
  hyper
gtcactggtttcaaatcaacttcaaattttttggagacgtaagagtgctgagcattttttcttcagtgaagtgacttggcagcccaggtcgccaacgcccgtttctgt

SEQ ID NO: 197820 - DNA, 82 bp, Homo sapiens
  chr1:161591546-161591628
  hyper
acttttgtgaaccttgagtttttgaaactttcactgaaaaaaaccgcgtgcgatgctatccgccgggagcgctggagccttg

SEQ ID NO: 197821 - DNA, 35 bp, Homo sapiens
  chr1:161736084-161736119
  hyper
tttgtccgcctgccgccgccgtcccagatattaat

SEQ ID NO: 197822 - DNA, 930 bp, Homo sapiens
  chr1:162039135-162040065
  hyper
tcctggtaaaacacgaaaacaaaacaataaacacggcccctcccccctctccaaaaacaaaaacaaaaacttcaaggccatgccgccgcggccatcagtagctccggctcagaatttgaccgttaaaaaaaggaaactaggctgagctagggcacctcagatcccggcagtctggggccggggcgaagttgccggcgtcgcgcggccgggggcgcgggcagggccgggcgcgactctcccggggactttcacctgctcggctggcagcgcgggcagcgcgggggcggacccggcggcgggcggggcctctgagcccggcgggaggagccggcctgggcccgccccacaggaggagccgctcgctggcggctgatccagcgtctccgtgacaggcaccctgctccgccgccaccgccaccgccaccgccaccgtcgccttttcttcttcgtcccgggcggtgcgttccactgctctggggccggcgccgcgcccagtcccgcttcgggccgcaagccccaccgctcccctccccgggcaggggcgccgcgcagcccgctcccgccgccacctcctcccctgccgccctcctagccggcaggaattgcgcgaccacagcgccgctcgcgtcgcccgcatcagctcagcccgctgccgctcggccctcggcaccgctccgggtccggccgccgcgcggccagggctccccctgcccagcgctcccaggccccgccacgcgtcgccgcgcccagctccagtctcccctccccggggtctcgccagccccttcctgcagccgccgcctccgaaggagcgggtccgccgcgggtaaccatgcctagcaaaaccaagtacaaccttgtggacgatgggcacgacctgcggatccccttgcacaacgaggacgccttccagcacggcatctgctttga

SEQ ID NO: 197823 - DNA, 202 bp, Homo sapiens
  chr1:162530845-162531047
  hyper
aggtcagagagcgcgccaggcccgccctgaaagtttctccgcaggaaaatccaccgccctttcccaaccacccgcgtgggtggctcggaaatccgccaccctggggacacagctccctgcccatctctgtggcccgcttgtgccccgtgccgctgggccgactaagagcctcgggctcgcacctcccagtacaacctaggga

SEQ ID NO: 197824 - DNA, 74 bp, Homo sapiens
  chr1:162792553-162792627
  hyper
actcacaactctgacgccccgtgactgcatcccctagctgggcagagacgcatttggctcgccaccagccacct

SEQ ID NO: 197825 - DNA, 89 bp, Homo sapiens
  chr1:163378351-163378440
  hyper
acacccacacacacgcacgcacacacgcacacacacgctttttaaaaaacagaaatggctcggaaagcgcatgttgtttttaactcttg

SEQ ID NO: 197826 - DNA, 216 bp, Homo sapiens
  chr1:164529156-164529372
  hyper
ccgagggggagggcgggaggaagcaggacattggagacattttacagcaaattatgaccatcacagaccagagtttggatgaggcgcaggccaggtgagatggaggcttttcttttcctttcttggggttttttgtttttcttcctcttgcagggggaaacaatgggaaccgaatcaccacagcgctttttttgaaaaatgttatttcttttctca

SEQ ID NO: 197827 - DNA, 181 bp, Homo sapiens
  chr1:165086779-165086960
  hyper
gcccggcccctgcctccgagtgcgcctcgcggagcgcaaagcgctgtcacgactcggtggccgaggtgattaattagcggcgtggccgtgcgggggacgcgtgctggcctccacatctgccccgtgccagcaggggtcaatatgcggtgtcactgctttccctctcactccctccaaagcc

SEQ ID NO: 197828 - DNA, 81 bp, Homo sapiens
  chr1:165087027-165087108
  hyper
aggctgagggcaggttgacgggcctgtggagaatgtgtgctgcttcctgcaggcgaccacgtctttgttccaaggctaggg

SEQ ID NO: 197829 - DNA, 106 bp, Homo sapiens; identical to SEQ ID NO: 104504
  chr1:165322515-165322621
  hyper

SEQ ID NO: 197830 - DNA, 42 bp, Homo sapiens
  chr1:165323109-165323151
  hyper
tgataactaagaagcgtcaaaacagagggagggaaaaaaata

SEQ ID NO: 197831 - DNA, 66 bp, Homo sapiens
  chr1:165323181-165323247
  hyper
ccgggattcccgatgccaggcgcgttcggcagcagtgcttgagggcgaaacgggcctcaaagtgac

SEQ ID NO: 197832 - DNA, 38 bp, Homo sapiens
  chr1:165323481-165323519
  hyper
ccttccgagaggcccggccaccggctcgggagctgggc

SEQ ID NO: 197833 - DNA, 60 bp, Homo sapiens
  chr1:165414131-165414191
  hyper
tttactcgtcagttcatgttcctctcctgtgcagcttctaaatattaccgcctctctcgg

SEQ ID NO: 197834 - DNA, 55 bp, Homo sapiens
  chr1:165599887-165599942
  hyper
gtacggcccaccacgagggcagggctcggcgccagctctcggcaaaactaacaat

SEQ ID NO: 197835 - DNA, 826 bp, Homo sapiens
  chr1:165737818-165738644
  hyper
aagcaagtaaggctcgcgatctttcccctggtggcacaggggaccccggggcccttcctcccggggactgatcaaacgtctgagaaatacccgctctcaccctctgcgagcagagccgtgcacacagagataaaaacgatgaggagagtgtccgcgaacatagtgctcatctcgcaccttcgtctctgcactctcacccgccagggggaaagcgctctacagccaggaaaagtgaagcgaaaacggcttccgtagactccgccaccaccgagtaacagaccaactctgacagcccgaagatcgcacttccgcttccggggcatagcaccggaaaggctcgtatcggagaacggtgtggccacgagagtctagaggaaaccaacccgcaactcactggagctgaagggctggtagtcaggccgaatctcgcgagaattggaactatttcagagccagaggaggatagtggcggcggcgaactttgcccggtagattttactgactggggtgctggcgcgcgcctttttctcggccagaatccagttattgggatagtcttgacttctacctcagcccaacttctgtggtcgtaatattagtttagcttgggtttgccgtgaagtaagaagactgacttccgcaaaggtactgaacgactgggtgtaggtgccagggcatggacgtgaagctggaaccgcgaaatgagttagttgtgggccgctggcctcaaggagcgaacgtcagcgcgaagaggagaagcttgtgcatacgctctgataagggttttaatagaggtattaccacagtgctgcgtgacacggttgag

SEQ ID NO: 197836 - DNA, 239 bp, Homo sapiens
  chr1:166135586-166135825
  hyper
tcccggtcagactcagctcgcacctaggagcggggagccgccgggcatccttggggaagccccctcctcttgcagccgcgcggggtccccgctgccccgacgtccgcccacgcccgccccctcgctccggcagggcgcgcggagggtgcactcctaggaggcggcgggtgccctcgccggctccagcgcccgggcggagggcagggaggggagcggcgctgcgaggaatggtgcccacc

SEQ ID NO: 197837 - DNA, 208 bp, Homo sapiens
  chr1:166944964-166945172
  hyper
aggcgcgggggaggccgccccgcgggccgcgccgagcggggagcgaccatcgcggcttctcccagggacgcccgcgctcgggaacccgggcgagaacgctggctggggactcgagcaggggagcctgtgtctgcgggcagccacagccaacctgaacggggagagagtgacagcggcgagggtgggggacggcggggacttggcgtaa

SEQ ID NO: 197838 - DNA, 41 bp, Homo sapiens
  chr1:167028536-167028577
  hyper
gaaaactaatgtttccgctgcagtggcgacaccttgtggtc

SEQ ID NO: 197839 - DNA, 237 bp, Homo sapiens
  chr1:167190164-167190401
  hyper
gagagttcagccgcggcggcagcagcagcaggtaatcattacagcattttacatattcatattcatactcaaccccggctcccgctgcccccccccgcgacttagcataatttattagtactcaggattattataattaacggcggggagatggggggccggggagcattgagcccccgccgggcgctgagcggagggggaaagaggctcggagcggccaggcggagggggaagaca

SEQ ID NO: 197840 - DNA, 165 bp, Homo sapiens
  chr1:167423949-167424114
  hyper
cgagtgagatgaaagcgcttttccgatccaccgaatcagtcccactgcaactgtaagctggagaccctctgggccttgggagctcaggctgcctgggcaacgcaagggaggacaggggcggagggggagccaggagggccgcacctgcctcgctcgctggtcgcc

SEQ ID NO: 197841 - DNA, 77 bp, Homo sapiens
  chr1:167522408-167522485
  hyper
cgtggcccagtggcggaggcttgtgggaaattcctggtacccagctgcccaacatctgggacgctgcaacgcccacc

SEQ ID NO: 197842 - DNA, 212 bp, Homo sapiens
  chr1:168194875-168195087
  hyper
tcctgtgtaggcacgatcgcaatatggatgaaccacagcctttgttcccgtctgcacaaggcttctcccccgtctttgtgtctccggagccttgcacgtggtaggtgctcggcattcgttgactggatcaagtagggcgagggagcgcggcccgttccggtttgaaactgctctggacgccgaattagtgtttggcagcgcctggtggtctt

SEQ ID NO: 197843 - DNA, 282 bp, Homo sapiens
  chr1:168311897-168312179
  hyper
tggtcccacccctttcgtcctggtgatggggtgggacggcaggcgccagcctccgtttttctgcccgtgggtatgtgtggttgacctccttaaatcagagccaagcgcgtgacccagaactctgcacaatcacccacgcccacggcaaagcagatgaggctctagagcttgcaagtctttatctagggaactgcgtcatcctcctcggtcggacaccaggtggcagcaaagctccaactcatcagtcaccccaccctccgtccaggccgtcttctgacgcag

SEQ ID NO: 197844 - DNA, 334 bp, Homo sapiens
  chr1:169074762-169075096
  hyper
tacccgccgccgaccgggcaccaagaaagtcctcggtggctgggtcacgtgcagatattgttgcctggggtctagactggcctgagtctcaattggtttctacgggacaactcactgcgggctaccgccctgggtgggtttggcaattgtcctgctcgaggtggttcaggccgcccacaaggggcacagccgggcagtcaggaaccggggctgccggctgggctggcctgcaaagaagagggaagggccggaactgcaaccgcagtggcggggagtgcgagggggcggcaggtgcaggagcgggaggcggggcggagctgggcagagtcctcgc

SEQ ID NO: 197845 - DNA, 332 bp, Homo sapiens
  chr1:169076042-169076374
  hyper
cggcagctgctgacccgccatcgccatggcccgcgggaaagccaaggaggagggcagctggaagaaattcatctggaactcagagaagaaggagtttctgggcaggaccggtggcagttggtgtaagtacggggtccgcagctcccggccgccgcgtctgatctttcccgggcggcgcatcccctgcgcagggtccgcggccggttccgcacccaccgcgctggccggggtggcgggggcgagggtggtggacgctgctgggtcgcgccggcctgggcttgcagtcctgtgcggaatgcggtgtccccagagtggggcgcagggtcggggct

SEQ ID NO: 197846 - DNA, 150 bp, Homo sapiens
  chr1:169454465-169454615
  hyper
aaaatattgccccctcgcccccagcaggaactgctggaccagtctgggcagtcacgctaagccacattacaacacgatcagcatactgcctgacgcacaaggcacggggcctctggacgcgtgttctgagcccttcgcaggagactcgtc

SEQ ID NO: 197847 - DNA, 37 bp, Homo sapiens
  chr1:170043654-170043691
  hyper
aggcgcggttatttccggggacggtggccaaagtacc

SEQ ID NO: 197848 - DNA, 255 bp, Homo sapiens
  chr1:170633637-170633892
  hyper
gggacagagggcggggacccgtgtagggcagctagagcccgtccgcggccagaaagacaaggtcctgggaccaggagaggtgatggcagacttcaaaggaagggccagtcacaggggaaaccagatgagaaaagcgggtctcggccgagggcatagccaaggaggacgctggagagaggctccaaggtccggggacactccgaggccctgcggtctcaggcagggactctgtccgcggcggactctctttacttc

SEQ ID NO: 197849 - DNA, 398 bp, Homo sapiens
  chr1:171220522-171220920
  hyper
tctgcaagggacaggctccccgcagctggtgccccctcgagaggggcgctgccgcagttggtaccccgtgtgagaggcgctgccgcagtaatgacttactgataactcactgacttgaccgcgcgggttcttttcttaccttcgttttcgggcggttcgtcgcgtttccttcacagcattcctcacacagttcctcacacagcgcctcacatggggcaccagctgggggcagggctcctctcgaggggtcaccagctgtggggagtctgtcccttgcagacccctgacccaatgaccggtgaataaagtacgctgacacacagatattctgagggtcccaggtgcttacaggctccctgccgagtcgcaactgtttacagggctcagcagggagcctg

SEQ ID NO: 197850 - DNA, 97 bp, Homo sapiens
  chr1:171220980-171221077
  hyper
tattcattcatcgcgtggtcaggggtctgcaaggaacagacttcccgcagctggtgccccctcgaggagcgctgccgcatatgcacataaggagcaa

SEQ ID NO: 197851 - DNA, 153 bp, Homo sapiens
  chr1:171455049-171455202
  hyper
tgtctggggaagtcggcctccagcttggggagcgggaaaccggagtcagacccgccccatgtggtctgcagcgggagttctggaccggtctgtcttgctcccacctagaccccagtcctggccctgcgaggggattacgcatgttgccgggta

SEQ ID NO: 197852 - DNA, 343 bp, Homo sapiens
  chr1:171750962-171751305
  hyper
gggggaacaaatcaatgtggctgtttttccgtggaaagaattcccactgcagtgtcccggagcctgcgtgtggtgggcaagctcctcaaatggtatctcacagggaataggggagtcttgaaaacgcagcttcggcagtaggaacatgaacctcttacctaaaagttccagggagtttggctccgttgactattgggagaagttcttccagcagcgaggaaagaaagctttcgagtggtatggaacctacctggaactgtgcggggtgctacataaatatatcaagcccagggaaaaggtgaggagcgcgggttggtagcccttcgtacgtgctccggaaggt

SEQ ID NO: 197853 - DNA, 94 bp, Homo sapiens
  chr1:171811643-171811737
  hyper
acagcttcaggcaattgtgagagagcccgaggcacagacttggcagggggtggacgtggacttatgttgtccaggtgccatgtcattcctgcat

SEQ ID NO: 197854 - DNA, 54 bp, Homo sapiens
  chr1:173793622-173793676
  hyper
ctgagggcaaggccgagccacttaaccactatcgtcaacctttccaatcgtgct

SEQ ID NO: 197855 - DNA, 89 bp, Homo sapiens
  chr1:173793729-173793818
  hyper
cgtagtaggcatggcggcggcacctcaccactgattcgttgaattccttcccggtaatcttgggcactagcgggcggagttgaagggcg

SEQ ID NO: 197856 - DNA, 95 bp, Homo sapiens
  chr1:173836713-173836808
  hyper
cgtggactaccaccgacagcctttcatgagagcggacggctgatggaggctcgggtcacggcccttaacaatagcttactcgggtgactcggcat

SEQ ID NO: 197857 - DNA, 93 bp, Homo sapiens
  chr1:177133352-177133445
  hyper
cacagaggcgctagtatgcaagtgggtgtggagaatggtccgggagtggggcggatccgggaggtaggagtgggggaggggaggtcgtcggcg

SEQ ID NO: 197858 - DNA, 113 bp, Homo sapiens
  chr1:177140714-177140827
  hyper
gaaagaaccacaagaaatcatgaagtaaaaactttggaaagctgccactggagatgttgcacaaaaacctggaatcttttaggagtctcctcccagtcgttgaaggtttgggg

SEQ ID NO: 197859 - DNA, 45 bp, Homo sapiens
  chr1:177150728-177150773
  hyper
gaaataactaagcacgcagtgaggactgtgggggcagctaatgtc

SEQ ID NO: 197860 - DNA, 612 bp, Homo sapiens
  chr1:178062500-178063112
  hyper
ggcgctcccccttgggtgactgtaagataaagcagcttcttcgatctctttgtccaataagaaagaaacgttggcccataaagaaagaaagaaacaaataaataggaaaggtgtgagaaggaagggaagctcctttcttttctgtttaaatttcccgcacccttttacctccccgccttctcaaacggtctttactttgagcagcagagacccggaccgctcaatacccggctatccctgggagggtacttggaaagtaggcgggacaggccggatgaataattcggtgtccgacttttcctgcctgcggcgcagtccctccccggcttcgttactcgagtgcacacgcggccgggctctcggccctcgattgcttcagcctatcaccctgggatgccgcctgccgctgccgccgccgccgccgccgccaccgccaccgccaccgccaccgccaccgccgtggctgccgggtttgtgggatccgccgcggagcaggagccagagctgtggccggagctgtggcctgagagtcagggggcgggcaggctcattccagaagtgggggccgaggacaggcgggctagaacccggggccaccgccccctacccctc

SEQ ID NO: 197861 - DNA, 475 bp, Homo sapiens
  chr1:178063150-178063625
  hyper
ggcggcggcgggagccggtcagagggggcggcccctggcggcgacgcccccaagcccagccctgcccggccccgctccatccccagccagagcctggtctgaccgcgagagacgccggcggggctgaagaaggcggctccgaggaggtgggagggcgagcctcccctcccgggttcttctgcgtcctctcccgggagggacccacacacacctgagcccggacccacccttggtcggggccacgctggatcctcctcccggcctgggtcccgcccgccgactgcaggtgggctgcatcgcccgagcctcgggcagtgggcgacggggaaggaggtgagaggtgtccgcgccggctgccgctcgggtccctgccctcgctgcgcgctctcctcctccccttaccgcaggcagggcgcggagccgcgcgccagcccgccccgaagccgccgcctcgtccccctcccgcctcggggca

SEQ ID NO: 197862 - DNA, 110 bp, Homo sapiens
  chr1:178063733-178063843
  hyper
cggttgtcccagtcagtggagccgtcgccggtggcatgttggatcggatccttctggagtccgtgtgccagcaacagagctgggtccgggtgtacggtaaggaccacagg

SEQ ID NO: 197863 - DNA, 42 bp, Homo sapiens
  chr1:179711890-179711932
  hyper
ctcttcctgccagacttcaccgtcacagctctaatcacaccc

SEQ ID NO: 197864 - DNA, 214 bp, Homo sapiens
  chr1:180123473-180123687
  hyper
atcagcaggggtgggtgcatcgatcctgtggggtcttggtggtcgcagaccaagcgtccctcttctcacatctaattcacaacgtctcatcgctccgcgggagcccaggaactgccctacaacagccgaaatccgggtcgtctattccaacggactcctcttccgttggatacgggggccgtgagaggccaaacaacctccgcgaggctacccc

SEQ ID NO: 197865 - DNA, 890 bp, Homo sapiens; identical to SEQ ID NO: 975
  chr1:180123700-180124590
  hyper

SEQ ID NO: 197866 - DNA, 91 bp, Homo sapiens
  chr1:180472131-180472222
  hyper
taatgaaaaactgcgagatggggctgtcccgtcttactgtgtgactgatgagtggaatcactgctctgcgtgtttcgctctccacaccttc

SEQ ID NO: 197867 - DNA, 45 bp, Homo sapiens
  chr1:180881296-180881341
  hyper
tggaaggagaaagcaagctccgtcggtttgggccgcggctgcagg

SEQ ID NO: 197868 - DNA, 255 bp, Homo sapiens
  chr1:180881580-180881835
  hyper
ggcggccggctcctctggaaaacttgtccacacaaaaggcattcctcagcttccaccccgaaaggcgagccctgggtgtagggttaccagcggcgcgcggagcccgccgagaacgtggtgcgcccccagctcctgcccgcgctccccggcctccgtgcgccccgcgcgcctccgctcttgcgcccgctttcccgcggggaaggggccaccgccctgcgaggctggcggccgccccgtcgtccccaagctcggggc

SEQ ID NO: 197869 - DNA, 115 bp, Homo sapiens
  chr1:180881864-180881979
  hyper
cggccggggacactcgctccctgggccgcggctcaggagaggcggccccgcggggctccgggcggggtgggaggccgaggcccggctcctccagcccctcccgcggccccacctc

SEQ ID NO: 197870 - DNA, 669 bp, Homo sapiens
  chr1:181058994-181059663
  hyper
ctggagcacagccatcgtggccttctgagcccttggcccccctgcggggaggaggtggagcagcgggcgtccccgaagtgagggccaggcccttcccggctgcgaggacgcccagagaccgcgggcgctgagcgcgttgggcagactggttgcctctgggcatcgcaaactgcccccgggcgcatctggcttatctggagacctgggagcttgaggctcattggaagaggacgatcgttaacttttgtgtttgtgtatgtctgtgtatgtaagtttgtcttgtggcattaagactattttgctcttctggaatgcaccactccttccccagggtttaagagattgggggcagacagggactttcctctgccggctgcgtggagaaggaagcggctaaaaggtttgggccggggagttccccattcgttctccggggagggagggactttacacctacccctcaccggaaagctagacccgcttcagggccaggagtggcgtttccgcacaggatttcctaagacgagagggatttagccaagagcacagacttggattccttctgtccctccccacctttctctcccaatgaagaaacgtttatatcctgtgattactctaggaaaggggcgtattaacggtcctttgcttccccgcaggggagaaaaa

SEQ ID NO: 197871 - DNA, 38 bp, Homo sapiens
  chr1:181287267-181287305
  hyper
cgggtttttactgccagagatgtgtctgtcttgcgccc

SEQ ID NO: 197872 - DNA, 57 bp, Homo sapiens
  chr1:182360260-182360317
  hyper
aggcccccgggaccccgaggcgggagccggccgcccaaacaacgctcaccgttacac

SEQ ID NO: 197873 - DNA, 71 bp, Homo sapiens
  chr1:182360888-182360959
  hyper
tgctcacacgctccgctcttctcccactctcgactctgcagagccgccagcagccccgcaccctttatccg

SEQ ID NO: 197874 - DNA, 251 bp, Homo sapiens
  chr1:182583797-182584048
  hyper
tccgtctccaaaaaaaaaataaaataaaataaaaggaaagtgtttgaaaagtgcttaagtgctctgaaaagtctgagatgctgtgcaaatagtgcggcattatccttatttttgttattaaaatgagcgagacttgccctgaccagcgacgaattgactcactcagttttgggggagggggcggaggagtgggaggagcgggaggagaggggccacgcttgtcttctccgagggatgggaatttccaccca

SEQ ID NO: 197875 - DNA, 61 bp, Homo sapiens
  chr1:182584613-182584674
  hyper
cttgaagactgggcccttggctctgtgacccagcagacccgaaattccaatctggcaaact

SEQ ID NO: 197876 - DNA, 343 bp, Homo sapiens
  chr1:182992844-182993187
  hyper
cggcgggatgagagggagccatcgggccgcgccggccctgcggccccgggggcggctctggcccgtgctggccgtgctggcggcggccgccgcggcgggctgtgcccaggcagccatggacgagtgcacggacgagggcgggcggccgcagcgctgcatgcccgagttcgtcaacgccgccttcaacgtgactgtggtggccaccaacacgtgtgggactccgcccgaggaatactgtgtgcagaccggggtgaccggggtcaccaagtcctgtcacctgtgcgacgccgggcagccccacctgcagcacggggcagccttcctgaccgactacaacaaccag

SEQ ID NO: 197877 - DNA, 332 bp, Homo sapiens
  chr1:183774429-183774761
  hyper
gaatgaaattgctttggcaagctaaaatggtaacgagagctctctgccttctcccgaggcttctctggtggggaatcttctcccgctttcgctgggcgtgttttggactccctcggagtgaacggagcaatccgattccatacttgtgagctaaagctctctcactccgctttgtattcctctctctctgcgtgtcttctccctttcaaccgtacctactttctcagcaattgcctgtggtgtgtctggggcagatgcatgtcaggaggggagaactttgaaggaaaaagaactgttagtgtgggtgaaccgcggagcgcttctgcgtccca

SEQ ID NO: 197878 - DNA, 507 bp, Homo sapiens
  chr1:184355381-184355888
  hyper
tgcagtggtggatggcgatctctctggaccactccggacgcgcccagcagacgcagcctacgcctttaggtcctaggaggctgagaagggtggggagaggggggcagcacgatcttgtgtctttcctccccgtgccgcctctaccgaatcgcggatgcttcattaatcttgcaggcgccgcagctcgggtcagtatggaggcggatcggtggcagagcccgggcctctgggctgcgcccgcccgttcagcctggcccgggaggggagcggccgcgcggtgggccaaagacgcccggccttccctccgtctgcttccagcaggcacagccgggaggctgggctcaggggctgacccgaatctcccctagagctgggcccacccggctgccccccgagcagcctcgccgctcccacgccaccgcccaagtgacaggcccgggaaggccggacgggacgcagtcttcccgccggggtcttccctccggctggccggccgctgcagggcgc

SEQ ID NO: 197879 - DNA, 278 bp, Homo sapiens
  chr1:184355936-184356214
  hyper
acacacacacacacacactgccgcctccttcccgccccgcagccctagcagcccccaacccgctccccagcgcgctgcgccccggcggcctccgcaggccccgccccggggaggagagccaggcgcgcgcgggagctaggctcggggaggggccggcggtgggggagtgtctgctgcccccgcccctcgagtgagtgactgagcgaggagctcccctccctcgctcgctcctcgcaagctcccgctcgctccctgcccactcccggggggacgttccg

SEQ ID NO: 197880 - DNA, 146 bp, Homo sapiens
  chr1:184356541-184356687
  hyper
tggcggtgcagcccgccccggctcggctacccgggcatccccgggtgggcagggagggaggcctgcggggtgtctgccgcacggaagggatgggagccgcggtcgtggcgctgcctgcgcggggcccgggccggggctgctgctgg

SEQ ID NO: 197881 - DNA, 225 bp, Homo sapiens
  chr1:184722805-184723030
  hyper
accagctagctcctcgttttaatctgcatctcctacgtttatggaggttgagtaacttttcatgtttatttaccacttccatttcctcttctggcttaaccgttcatgcctttctcccatttcctactggttcttcgcttttttcttattcatgtgtaggacctcgtgtatgtattactctgaattaaatggtgtaaatagaattgataattttaacacacttcc

SEQ ID NO: 197882 - DNA, 333 bp, Homo sapiens
  chr1:184724517-184724850
  hyper
ctgctgcgttagggaatagtgttggagtagtcgtctaccctcagggaaattccaaaacacagtaacagcaaaatgaattgagcctttgaaggcattgcgctaaggtttttactcgcaatcatctcatgcactcttctcaactctgatagagtaagtaccaccatcccccttttgcagacgagaaaacagaggcttagaaaagttggttaacaagagctcgtcacactgctgtattagaatccatccagcctctgattcggaagcccttgcatttaaccaccgcgcagtactacaaggatgaaggagcacgtgggtcctcgtacatgattaata

SEQ ID NO: 197883 - DNA, 217 bp, Homo sapiens
  chr1:185125989-185126206
  hyper
atgaagaaccagtgaccaaatcctgttagtagaaaacagaaagccagaggcagcgattccagatgcccgtccgcttccctttccccgaggcgttacgacgccaccacaaactgcgcagaagcgtactggggacggcgtccaattgggtaagagggttcggtttctacggtgcgtctccggcccaccggccaaccaccaaaccgaacaaagactacag

SEQ ID NO: 197884 - DNA, 500 bp, Homo sapiens
  chr1:185703184-185703684
  hyper
gaggtgtctaaagccgcgttgtacacaatagaaaaacaaaattccctttgtgctagtgtggtgtccctcggtttgggtctttgccacacattcttgaaagccattgtttacactagcgttttgcaggttaggaacggtgccggtgggaaccgagctgacaccgtaagcgcttccctgggactgaattgaccctacaatcagtggagggaaaagtcaccctccgggggggcctccagagcaaaggagggaggacggcaactggccaatcaggaggcgaggccgagccaggcttcccctcgtcgctcgtgagctgcaaacagtggaaagttgggaacctcagtcgctggcccaggcggagagcagcggcggcggcgagggcagcgggattcgggccgcggcgccgcaggctcagagctgcccccggggcatggacccgacgcgccgcccgcactccgccacaggctgtccagggcccgcgggcagatagcagtccaggagga

SEQ ID NO: 197885 - DNA, 409 bp, Homo sapiens
  chr1:186649187-186649596
  hyper
tgggaaagctggaatatccacggagttctttcgaactctagcggtccaagctctttcccaagtcacgtagcttctctattcggagagaagtcggagtactgggatagacccaggaggtcagagcggaaactctgcccgggtgcgtggaaccggagtccccggtgcgcggcgccaggtactcacctgtatggctgagcgccaggaccgcgcacagcagcagggcgcgggcgagcatcgcagcggcgggcagggcgcggcgcgggggtaggctttgctgtctgagggcgtctggctgtggagctgaaggaggcgctgctgaggagttcctggacgtgctcctgacgctcactgcaagtcgtatgacaattggtcgctaaccgagagaaccttcctttttataagactgaaa

SEQ ID NO: 197886 - DNA, 258 bp, Homo sapiens
  chr1:186649698-186649956
  hyper
ggcagggttttttacccacggaaatgagaaaatcggaaacccaggaagctgccccaatttgggagcagagggggtagtccccactctcctgtctgatccctccctctcctccccgagttccaccgccccaggcgcacaggtttccgccagatgtcttttcttcttcgcagtctttgcccgagcgcttccgagagccagttctggactgatcgccttggatgggataccgggggagggcagaaggacacttggcttcct

SEQ ID NO: 197887 - DNA, 43 bp, Homo sapiens
  chr1:190444812-190444855
  hyper
ctccagttaaaacgttcttggcagcgggagcccctcagatgta

SEQ ID NO: 197888 - DNA, 92 bp, Homo sapiens
  chr1:196577279-196577371
  hyper
ggccctcccatttccgtctctttttcagcaatatttacagaacaatcctccaccacaccactcacctgtcgtcgttttgccatccttggtcc

SEQ ID NO: 197889 - DNA, 193 bp, Homo sapiens
  chr1:196577435-196577628
  hyper
ccatccttcctcaaagagtgggaaacatcaaacaacaaatggaggagaggagggagaaagaaagaaaatattgcggagtacagggagaggactaacaagacgctgtggccgagagagggatgggagaaggggaaggggacagggagggggagggggtccgcttggagccggaagctaaggcttgaaagggggc

SEQ ID NO: 197890 - DNA, 59 bp, Homo sapiens
  chr1:197744743-197744802
  hyper
ggtgcagggggagcgctagtgcctgctgggatggcccacgtaccgctttgccacctagc

SEQ ID NO: 197891 - DNA, 62 bp, Homo sapiens
  chr1:197881990-197882052
  hyper
tggctccagggacgcgctcctgaccctccggggagctgctgggggtgtctctttcttggaag

SEQ ID NO: 197892 - DNA, 219 bp, Homo sapiens
  chr1:197882208-197882427
  hyper
tatttctgcagagctgagggcaggcggcgcaacaaatctcaggtaaaagagcatcagatttcagaagagctgtattctagacttggcgcaggcccctttggggagaagagcccaggggctatagagaacagaggtttgaaggaagcaaaagctggcgagaggttttttttttgtcgcgaagggtgagggtaggcagagaacgcgcgaaagggcagggcc

SEQ ID NO: 197893 - DNA, 120 bp, Homo sapiens
  chr1:197882611-197882731
  hyper
gtatggatctgccaacctcagtgtagggggaaattttccacatggagtatctcagtctccactgtctggagaaaggccccagcgtgtcccggcaatccgctcaccttccatccagcgcag

SEQ ID NO: 197894 - DNA, 87 bp, Homo sapiens
  chr1:197889656-197889743
  hyper
gggcaagttctgcgccttgaaactgaactagtggctcgggcagcagcaacagagtgttaggttttcgtaggtggcaggagactctgt

SEQ ID NO: 197895 - DNA, 219 bp, Homo sapiens
  chr1:199998439-199998658
  hyper
gttgagctgggtcgggagaccacgcacgccgatccctcacagtctcccccacaccccatgggtgaattaaagagggtaaggtaggggaaagagacgctgttgcacttttctctgcaaccctggaagaactgtgtttccagctaccgcacgcgcaactcacatcgcaagggaccgaggcggtacactctgagcgtaaacagagaacacctgcagctctgg

SEQ ID NO: 197896 - DNA, 82 bp, Homo sapiens
  chr1:200009450-200009532
  hyper
tttggacaattcaacattgctggcagaactgaagggaacaagttaccccaaccccatcccctgtacgcgtagtgctgagtga

SEQ ID NO: 197897 - DNA, 73 bp, Homo sapiens
  chr1:200012227-200012300
  hyper
ttttccttctttttattttcacagattttcaaacgtaaggagatgaaagtatccagaatagaaaagtactgtc

SEQ ID NO: 197898 - DNA, 283 bp, Homo sapiens
  chr1:200379703-200379986
  hyper
gcactaataatgggcgcatatcctttgcatttatgggaggagcctgctttgaaaccgcaattagtggtaccgttgcaacaaaaaaaaaaaaaagaaaaagaaaaaaacttgtcttactgccaaccttcctgaaggctactggaagaggaaaccgagcgtaatccaggtgcagcagtcctgtaaaacacgcccacacacatacttcattatcattacatcttatttaaatgcccccgtaccttagcctggctaatcagtctgtttgccacgttatgaatgcctg

SEQ ID NO: 197899 - DNA, 235 bp, Homo sapiens
  chr1:200708632-200708867
  hyper
cggcctcgctcacacgcgggctcgcggggcgggtggctcggaggggcgcgggcacggggcggacctcgcgcggacggacggacggagacggcgccgccacattcctatgcccgggagcggcggcggcggcggcggcggctcccgcgggaggcggcaggcgcgcggcgcggacagctgagcttctcctccgtcggcgcccgggcggacatcgcccgggccccgatggtttgagctt

SEQ ID NO: 197900 - DNA, 438 bp, Homo sapiens
  chr1:201083266-201083704
  hyper
caggaagccagagaacgccaccggggcacacaggtcgcctctgctgagtctgtaggttcggtctgggctgagcgccagcagcaatctggcctcccatcccttcctctgggttcctttctcgaggagtaagcgtgctcccaaagaagtcgctagtatctgaggccatctggtggagagcagtggcatggtaaccgagggctcaaagtcgggctcgcatcccggggactcgcagagactggactgcgcctgcggcaaggaaggacggagcagagccacctgaggccgagcgggagccagacccagggatgaccgtcctggggagcccctctgcaccccggaggggacgcaggacgcccggagcagtcccaggccctgcccctcgcttcacccacggagctcctaggtctctatcgtgcccatcgtacccgctgccctgca

SEQ ID NO: 197901 - DNA, 207 bp, Homo sapiens
  chr1:201368375-201368582
  hyper
ccggctccctccggcgctcacctggacagcgcggaccagtccttcctgctgacagccatgctgcaggagccccgcgtggccgcccgcgccccgccggccgccgcctcacctggcgcccctccccttccagcccaggtgggatcacatggccgcttatctcacccccgcgcgccccggccgcgctccgatttgccgacccgggaatgg

SEQ ID NO: 197902 - DNA, 121 bp, Homo sapiens
  chr1:201368727-201368848
  hyper
ctgcccggggcgagggcgggagacttcctgctcagaaccagtccgaccagcttggcgctgggacgcctccccgcgctgtgccgcggcccggggtgccgaggagctgggctgggggcgggga

SEQ ID NO: 197903 - DNA, 233 bp, Homo sapiens
  chr1:201437933-201438166
  hyper
gaaagctccaggctgcggcgggcgcggcgcccctctcggccccgcagcgcaggattctggcgccccgggctggcaggccgtgcgcgctgcccacctgcgccctgactgctccgcgcacccacaccgcggccctcagcacccggctgccggtgaggtggtgtcggtgcccccagcgcgctccgcgcccaccgccccgcttcagccggcacccgctcctccgctctaccccagct

SEQ ID NO: 197904 - DNA, 126 bp, Homo sapiens
  chr1:201476375-201476501
  hyper
gtgctgccctcctaggccccgggaaggccggccggcaggggcgggggcaggagtcgccgactctgggggtgctccgagctcgtgctgcggtcccactgtgcgccctgtcgccgccaccgcggaaaa

SEQ ID NO: 197905 - DNA, 453 bp, Homo sapiens
  chr1:201857901-201858354
  hyper
gaggctaggtgggcgtcgctggtgggtggactcctgggcgctgcgcggagccgcgccggctgggttagcgcgggcggggcgcttagtcccacccccagaggaggcggaagaggagcccgagcctggccgcgggctgggccccgccgcagctccagctggccggcttggtcctgcggtcccttctctgggaggcccgaccccggccgcgcccagcccccaccatgccacccgcggggctccgccgggccgcgccgctcaccgcaatcgctctgttggtgctgggggctcccctgggtaaggggatggggagagatgcggcaggagtgggatgggggcggaggaaggggagggaccgatccgaggggcttgggctcggggcttctccgagaccctccggctgccacgggagccttgggtgttgctgggtcctcaagaagcgggaagagggagctc

SEQ ID NO: 197906 - DNA, 42 bp, Homo sapiens
  chr1:201915621-201915663
  hyper
gtgctgaagtgttcactggacgcagcagcctccctgaagccc

SEQ ID NO: 197907 - DNA, 216 bp, Homo sapiens
  chr1:201915739-201915955
  hyper
aatccccaagctgggggcgggcctacctcgctgtcagagctgtttgaaacttgaggacattccagggaatcttggagcgctgcgtgaccaaatttagtacagagcagtttagccttttaaagacaaggggccacgcaatgagaaaaagatacaaaaatgcgtaggctggcagaagcagatcacagccacggagagccagacaagcagggacgaggc

SEQ ID NO: 197908 - DNA, 188 bp, Homo sapiens
  chr1:202112266-202112454
  hyper
aggagacactgggtcgagaaagggcagaggtcatttgcagagcatgtttgggaaaggaagccagtgttcaattgtgtaaccacaggatgcccgcccctcgagctttccatctgccttcatgcctcaggtccaatgaagtgacgtcccctgccttctaggacgctgagaactgtcgaggaggcccatct

SEQ ID NO: 197909 - DNA, 360 bp, Homo sapiens
  chr1:202612380-202612740
  hyper
tgccccgcctggggttccctcttaccctgggacgttccgggcgcgttcagcctgagctggtggagagggcgggggcgggggcgggggcggggacagctggggtcccgaagtccaggtccctcttcccacttccccgccggccctgccgctgcggccctcgctcccgcgctcgctcgctctcgagtctctccctctctctattctcttcctctctctctctctgcagtagtaacaacctgatcccgcttcccccgcccgcctattgatatgctcctcacattcgcctgcacacagcgcgtgcggcccctccgagggcgatccccgcaaaccacgacgcagggcccccgccccaggcaatcc

SEQ ID NO: 197910 - DNA, 51 bp, Homo sapiens
  chr1:202830113-202830164
  hyper
ctctttgtccaggaccgcagcgggagaaatacggggcgggccctagatccc

SEQ ID NO: 197911 - DNA, 64 bp, Homo sapiens
  chr1:202858344-202858408
  hyper
gtctctgcgcaggcgcccgcttccccgctctggactctactgcgcaagcgccttcattcattgc

SEQ ID NO: 197912 - DNA, 87 bp, Homo sapiens
  chr1:203242476-203242563
  hyper
tcaccattgctcacccgtctgacttactctgggtgtgtgtggacgggcgtgcatgtgaccgcgtctgtgcaccggggctgtgctgtg

SEQ ID NO: 197913 - DNA, 412 bp, Homo sapiens
  chr1:203595793-203596205
  hyper
cattcccccttaagacgaaccaggaagtaaccgcaagaatcgggccaccttaacagtagagtaatggtttggcctcgcgccaagtcccacctctgttccagctcctgctcctcccctctctcttcccgcactgcttggggagagctggtgagcaagagtctggcccgagttagctagagctgttgccatgacaagcattttcttaagaaagctctgctgttgagatcgtccaaagctgggggctgggagggggggcacgaacttcgtggggcaccatccctccgaagagagcaagatcagagacacccgcccagctctcctgcaccctttttctttcaggaacctgagaggtccttcccattggaggggcagggggaggagacccagcccactccccggccttagccagaaa

SEQ ID NO: 197914 - DNA, 159 bp, Homo sapiens
  chr1:203596926-203597085
  hyper
gaaggagagtgcacgaattaaatttctttagctttgcagagaaacctcagcagtttctctgtgctgcttgcaaaacatcctcagactttcacatgtataattagctgtggaaaaagctgggagttacctcgtaccgctgttgtttgagtgtgtgtgagc

SEQ ID NO: 197915 - DNA, 373 bp, Homo sapiens
  chr1:204042251-204042624
  hyper
gcagcagcgagccgcgagcgcccttctccagtcccggcttggaactgaactgtgtgagcacgggtcctggaacccgggcccagaaccggcgagcccaggtctgagcccagagctcagcggtcagcctcgtaggccctgactcggaatcgagccgaggcgctgaggttggagccggagagcgtgagagccgaagagcagggagggcgggccggctgcgcgtccgacgagtcgcagagcaggaccgcggaaggcagggagacggccgcaagcccagggcagagggcagagggcagagagcggcctggctcggcggagagggcgccgcccggccggaaccaagctcgccgcccgggacggcgggccccgtggggcg

SEQ ID NO: 197916 - DNA, 244 bp, Homo sapiens
  chr1:204042692-204042936
  hyper
cccagcctccccaacccggcccgcccgccgcgtcgcgggggcatgtgagcgggaagcctaggctgccagccgcgaggaccgcacggaggaggagcaggagcgcggagccgcgagccccgagccccgagcccggcgcctggctgagtagtaagtgcacccctccccgccatgatcgcgccgtcgcgcccatttccccagctctctgaagtttgacacttgcgcccctacgtttctgggcacccac

SEQ ID NO: 197917 - DNA, 108 bp, Homo sapiens
  chr1:204042966-204043074
  hyper
tgcaaagtttttcgaggagagacggaccctcacctacccccaacaacgctgggcagtggcggctcctccctggccgacttgggtccttgtggagagggatggcagcct

SEQ ID NO: 197918 - DNA, 1003 bp, Homo sapiens
  chr1:204043134-204044137
  hyper
gcgcgcgcgcgcgttcaccacgcgggtcgagcttagggtgcacccccaacccgctcctcgccgaccgcagaggactaggtctttctcatcagcccgactatgcgcctagtttaaggatttctcagcgggaagccgaagcgacctgcgcgcgtcctgcgtggggctcaggtgcctgcgacgaggcgcagagctcctccaccatggttgcgtggggtgctgggggacagacgcgctccccttgccacggtttcagggtcgttccccagcggaccagaccagcgcggcatcctgtttgttttctgctccggctgctcctgtcccacccccacccccaccgcaggctgcttcttgctacccccacctcccgccctgggatatcgtaggtgagccttttcatcccgattccgctgcaaacgctgatcgcgcctaggggtagggagatgcggagcgggtagtcgttcagttcccagcggctcgccattgttttcccaccccgcgcgttccgtacgtaaacacacacgcacacacaaggttgtgtgtgtgcgccggctctggctgcttcccgtccccaggcgcgcagggatcgcccgcgggattcgctcagctgcccgcatgggtcttcaggctggaggcgctccaggacttaactggagctggagaggacaagagacgtgggggttgccggacagtaccgggcggggcggtgagccgggcctgggcgggaagtgaattttgaacttcagccctggacctttccgggaggaccccgagcgctggagcggcggctcccgccctggagggcccgcggcagctgcaaagactccgctggcgctcttggcagccgcctcggtgacagaggcttggaggaagccgaagagttttcctgggaagtttgctttgactctctgggaatttccgggcaggacgcctcggcgctggcgctggcgctggcgctggtgaaggggtctggccaaagacggccagagacgatgctgctggctct

SEQ ID NO: 197919 - DNA, 188 bp, Homo sapiens
  chr1:204332591-204332779
  hyper
ccagcttgggaaccgggttatcaggggtgtggctctgcagaaagcgtcctgccacgtctccctccctgtcaaccttggggaaggagagaggcacccttggggacagaactggccagtttcaccggcggcggcttccgcaggaacgcggaggagggagacaagggggcgggggaacacttcctgttggg

SEQ ID NO: 197920 - DNA, 281 bp, Homo sapiens
  chr1:204347106-204347387
  hyper
gacgggcaattagcgcggtgagtaattacgatgcctctcctgccgggactgttaacgggcagcgctgggtctccgttcctcctggctctgctgccctccagcctggcggagcccggagagcagaagctggagcggggaggatccctccccgaagggagcaggttgcagtgcgagcaggggtgttgcctctccgctcccagctccgatcttgcacttgaaccaccggcggggccgggggcggagccgcgccgccgcctcggaaggtaattcacagccccgag

SEQ ID NO: 197921 - DNA, 178 bp, Homo sapiens
  chr1:204380935-204381113
  hyper
agcccaaaatggccgcagggcccgcgcgccggcaggacacccccctagacgccggaagagacgcaggactgttgggcgtctacgtccctagcgccgcgccgcccaacgtcactcgcaaaatccccggggggcgggcctttccgcccacttccgtgtggccgccgattggttttgccag

SEQ ID NO: 197922 - DNA, 105 bp, Homo sapiens
  chr1:204487763-204487868
  hyper
ggtcagcctactccacgtgttttctttccaccccaacctttcactcagatggctttagcatcccctacccctgccactggagtgaagtggtatgatcttggctca

SEQ ID NO: 197923 - DNA, 115 bp, Homo sapiens
  chr1:204654218-204654333
  hyper
agtctccggctcccccgcaggcgtctcggcggaaggcagcggccggccctcctctggcccccacccgggtcaggcggagctgcggtgccggggcaggagccaggagccctgaggc

SEQ ID NO: 197924 - DNA, 77 bp, Homo sapiens
  chr1:205400134-205400211
  hyper
ccctaaaatgcagcaggaggaagagacttgtcctagagagcccagcgagcttgggggtggggcggaggacccccagc

SEQ ID NO: 197925 - DNA, 60 bp, Homo sapiens
  chr1:205425836-205425896
  hyper
acacatatgcaggcatttgcacacacgcgcgcacacacatgcacgcacatgcacacacac

SEQ ID NO: 197926 - DNA, 240 bp, Homo sapiens
  chr1:205425997-205426237
  hyper
gtctctcttctctcttttgcagccccccagccccggggccggcgtgcccggcccaccccgccctccgcgccccccgacggccgcggtcagccggcattccggagcagcgcgtcggagctgcaacttcgcgcctaagcgcccgcacctcgcagcccggcgggcgggagacaaaagctgcggcgccgccgccggaggccgcgcggccaaggtgtgttcgctaattgtcaggaaatgtgtgtg

SEQ ID NO: 197927 - DNA, 115 bp, Homo sapiens
  chr1:205561301-205561416
  hyper
ttttctcctacaacgtcgtcttcctgttcgtggggacggcaagcctgggcctgtttctcagcagcaccttccccagcatgctggcctacacggaggactcgctgcagtacaaagg

SEQ ID NO: 197928 - DNA, 139 bp, Homo sapiens
  chr1:205721778-205721917
  hyper
tttttgaagaattgccgtatggattctccatcagctgtatcattttacactcctaccagcaatgtgcaagtgttccaatttccccatgtccttgccaacagtaagttttttacaatagccatcctaatgagtgtccata

SEQ ID NO: 197929 - DNA, 167 bp, Homo sapiens
  chr1:207628133-207628300
  hyper
gcaggtgctcatcgctctctggccggcggtcagcgctaccgctcgccacgggaaacctacccactgcatgaggcaccagctagccacgtgaggctgtttctgtacacccgaaccgcgctcttgcccagcaaaagcggcagaacctcggctcccttccctaaataaga

SEQ ID NO: 197930 - DNA, 105 bp, Homo sapiens
  chr1:207995292-207995397
  hyper
ccccctccccacaaacgtgagacctgcgacaaagacaggttagagagccgggaccctgatttttcgaggcctccctcccccaaccaaaggcggacagcctgctgc

SEQ ID NO: 197931 - DNA, 530 bp, Homo sapiens
  chr1:208416772-208417302
  hyper
gctccagtgagcctgcgatcgcgcgcacgccgcgctccagcccgcgaaagtggccgagcccacgcggggactcgcccgccgcggccaagccgggtcttctggggccgggaccccaaagaggcgggcgcgggagaagccgccacgggtgtgcgcgcctgtggggagagggcggagggcgctgccgactccgagcgcccggcccagccgccgcttacccagctcggcgacgtcggtctgtccttccgtccccgctcggtctacctcggccgccgccggctgctgagggcggcgcgaggcccctctccctgcccgcagctcggaatcagggagacgaccaaatccacatggagtccaaattcattaaaatccacgtcaagccaccagacacttatctgtattcctgaagtcgctcctcggtctccgctccgcgcgcccctcagtcctccgtcgccccgcagcagcccggctgggcgctgtcgccggctctcagggggcacccggaggcgccgagggggcgtgtgggggcggcc

SEQ ID NO: 197932 - DNA, 150 bp, Homo sapiens
  chr1:208418636-208418786
  hyper
acggctttccggaagcggcctgcaagctggaccccagcgagttcgcaggatctgcgtagtccctgctcgcgattagagcgcacacgagtttactcctgtccaagtattctgataagcttcctctactgccctctcgtggccacagtcctc

SEQ ID NO: 197933 - DNA, 199 bp, Homo sapiens
  chr1:209364167-209364366
  hyper
tctagtgtcatcaacggtcttgtgcagttctttgtgggaaagggaacaaggcttagagttattcaaagcctaacctccagcgattttcctttctggactccttggttcatagagagcgccctcaggggtcatggcagaggggagccctgggtatcctgtgtatccgtgtgtatacccaggaattcgggtcacttaaaat

SEQ ID NO: 197934 - DNA, 603 bp, Homo sapiens
  chr1:209957603-209958206
  hyper
cttccctttctgtccgacatcaaggaccctcggaagatgagatttctccgatccacacaccccacaccagagcatgttatagtgatttgctaaatgaggcataagtctgtctcacatacgttctttttccacgtccgctacaggttcgggggctcagaaactttttgcggcttcctgcctgctgccagaaaggcagctagtcccccacgcccagccgcaagtaacactggaaaacccgcctgcgctgggaagaccctcgcagcccgctctgctccagtcccgcaggcaccttcttgcgcatgcgcacccactcgagtgccgccctctttccccccattccgtgacgtcatccagccgctcgcgcgcctcgcgttagaatcactagctaggcagccttactgcgcgccggaagtttgggccaccgtgcggcccgccctttccggccagactgaacgcggccccatctgtcggcttaggaactgggaagggcggaagtaaacgagaaaaggcggaacctggtgaaactggtttcccgctgctgccctcattttgcttcgccgaacgtcctccctgtgttatgacgtctggtgtcccacttgactg

SEQ ID NO: 197935 - DNA, 144 bp, Homo sapiens
  chr1:210407459-210407603
  hyper
ttactttctcctgcggccagcggccgaccgggcgctgctggctacccggggaggggctgagggctgcggcaccgacaccccgggggtgtgtctgtgcgggagccaggatgtggttggtggctgccgcccgccttcaagaggtcg

SEQ ID NO: 197936 - DNA, 254 bp, Homo sapiens
  chr1:210465689-210465943
  hyper
gagacaaagaggcctgttcccgaggtgtccgacctcctgcccccttggcgggccccgcccgggttcctccagcaggaatcgccccaggcgctgggagccagagctggccgggtctgacacccgccccagactttccacgatcaggtttcagctcgactaacgagggggaaagaaagaacgcgcgacttccgcgggccggagccgcgcgggggcccgggggaaacgccggcctggtctgggtgggaggggacgcg

SEQ ID NO: 197937 - DNA, 133 bp, Homo sapiens
  chr1:210466012-210466145
  hyper
ccaggagggggcgccctgacttgacgcgaacgggccacctgtccctcccacgcctgcgctgccacccgccctgctccgccatcgcctcctccaaagctccccggatcctccgaggcgtcgtcgtccgagttgt

SEQ ID NO: 197938 - DNA, 767 bp, Homo sapiens
  chr1:212003416-212004183
  hyper
ggggcagagaagaggcgaccgcagcgcggggagccggtggagcctgcagcggtttccgcggatgtggaagggtcgtggcggcgggcgcggcccgcgcgccgggctcacctcggcgggcgcggacggcgggcggctgcggagagcgggggcgggtgtcccccgccgaggggtcgcggtcatggacgcggtggcggcccaagcggcccgaggcgctgcgcgagcgggcgcgctggcgccctactcccctcgcggctgcctgcggacagagggacggcggggactcagaggccggacctgtcacccgggcgggtcccggggaggcgggcggatgccccgcgcccccgcctcctccccggggcctaccgcgccctcgtccctcaggccgctgccgcctccccgggccacgcgacgacgacacccccttccccgcccccagcgcctcccctggcccggctccgctgccgctctggggcctgcgaccgcggagccggaggttacctcgggctggccgggccccagccggggctttgggagtcagaggagccggaagaatgcatggccggcggcggggccggcggaagaaggcggtggcggggccctgccccgctccggctgtggcgcggcccgcgcccgttccccggcggcgccgagactcggtccccaagggcccggccgcgttcgcccggactggcggggaggggcggcgggaggaagcggcgggagtcgggactgcggcggagccgctcccacagcgccctctaatgaaa

SEQ ID NO: 197939 - DNA, 174 bp, Homo sapiens
  chr1:212873550-212873724
  hyper
ttcggcggctgccggggaactcaggttgagaaacacagtgggtgttttggggtcggtgttttttcccggtcccatcgcggcatcttcctgcgcctcagccacgccctgcgtccgccccccggcgcgggggtcacagtcccgggggactttctccgcggcgatcagtcatccggg

SEQ ID NO: 197940 - DNA, 224 bp, Homo sapiens
  chr1:212873750-212873974
  hyper
cgaagccgcggctctggggtgaagacgccggcttcaccgagtcccaccgcgcaccccgagccacgggcgccccagggactctgcagggagtgcctgcccttcccgtctcgggtccgccgggctgtgggagggaacgaggcggggcggccccgagggtgaattcccggagcggagggtgggcatggggaggatgtcccggacaaaaacggtgacgggcttccctg

SEQ ID NO: 197941 - DNA, 184 bp, Homo sapiens
  chr1:212874266-212874450
  hyper
ggaaccagaccagaagggcagaagtgcctaccaagtgtggtcgcttgggtcttcaggtttgtgggcagcagtgggcatggggacagtcatttccgattcctttttaagtcttaaatgagtgcacgtgccccccgccaggatttaagacccactcttgcaaaagctttgagagagcttgagtgaa

SEQ ID NO: 197942 - DNA, 43 bp, Homo sapiens
  chr1:213189228-213189271
  hyper
ctcaaggagcatgcgcagagcgtgggacgcgcgtgcaaccatt

SEQ ID NO: 197943 - DNA, 115 bp, Homo sapiens
  chr1:214156950-214157065
  hyper
tgtggatttgaaccaaagatggtgggcaagagtgttgtaaattgtgtaaattccactcgcgggaacccccagatacgtagggagagcacccctttctcgccgaaggcatcccctc

SEQ ID NO: 197944 - DNA, 68 bp, Homo sapiens
  chr1:214158712-214158780
  hyper
gagcctggcctgtacgcctccccgacagtagaggacaggacacgggacagggctgcgccgaggcagct

SEQ ID NO: 197945 - DNA, 79 bp, Homo sapiens
  chr1:214159483-214159562
  hyper
cagcctcaactgtcacatcccggttagaacacctgatacaacagtcaatagttggaggtgtgagtggtgcgtgtgcgct

SEQ ID NO: 197946 - DNA, 410 bp, Homo sapiens
  chr1:214159697-214160107
  hyper
tctccttttcactgtttgaaattcgtgccaaaagtttcctgccgggatagactcggacatactaacatcgctattcttattcaaagggagggcttaatatcctctttacggtttggtgaatttgaggctgaaattgtaaattccctaggaaggagtgtgtgtgtgtgtgtgtcgcagaagacattggtagtgtttggccagtgtacttgtaacacacctcataaataccctgttgtcacgacacagcatgattcaacctttgatctgattaaatttgagggacacacgaagactacttgtcctcctcctacttacaaaaatgagtgtctaatagactatgtatgaatgtttctgcttcgcagctcttgcaagtcccagcttttataggatctttaggtcataaacgcggc

SEQ ID NO: 197947 - DNA, 149 bp, Homo sapiens
  chr1:214161237-214161386
  hyper
agatagactgtgacgtgcagtcttcctgtttccttcagctgtgtcttaaagtaaatcttgttgtggagcggagccctcagctgagggagcgctctgaaataatacaccattgcagccggggaaagcagagcggcgcaaaagagctctcg

SEQ ID NO: 197948 - DNA, 91 bp, Homo sapiens
  chr1:214387777-214387868
  hyper
tcagtgctgaccaagtcaccctggcctcctccccggcccctttttctactgcaggaaaggctggagcttcggaagagataacatcagggaa

SEQ ID NO: 197949 - DNA, 214 bp, Homo sapiens
  chr1:214724234-214724448
  hyper
ggaatggagagaggggaccagggtgtgggtttaaccacaaactccccagactgcgctcaccttccagctcgctcccgggaccagctttgcgcctcaccgcgggcagctcccaccgcgagataacacccctgcggcccggccaccccgcgccccaggctgccctgccaggcgtcccggggcgccaatcgcaagttggcgttgccagcgtctgccc

SEQ ID NO: 197950 - DNA, 44 bp, Homo sapiens
  chr1:214724487-214724531
  hyper
caacctcgggcccaactcccggcttggacggggcttacctgctt

SEQ ID NO: 197951 - DNA, 182 bp, Homo sapiens
  chr1:214724561-214724743
  hyper
cgcggaaaggctgtccttcgcggcggcggagccgattccccacggaattgattccagtgactggcggaggaggggcgaagggaaggagccgcaggaggcgaaaggggagggaggtttccgccgcgatcccggcgcgagagtccgagcagaggcgcaccgggggagaaaaggagaaaaaccta

SEQ ID NO: 197952 - DNA, 427 bp, Homo sapiens
  chr1:214724786-214725213
  hyper
agctgggaggggaaggagcgccagtggccacttgatgtctgtctagggctccccgaggacctgagccaggagagcaggcggctgagcccggagaagcacagcaacctgcccccgagtctgcgcccgctgcgctcactccgccgagaaaaagttggaaagaactttgaggggccgggagagccagagcggcaggaaatgcgagcggccgggagaggagggaggaaggggccgtgcgagtgggaggggacggagcaggcgccggcggccacggctcccccaccccagagccgggctccgcggccctgggggccgggaggcggagggagcgctgggcgcgcggccgggggcggggaggaatgcggcccgggagggcgcgcgccgggggcgccgcgggcgcgcgctgaaacgtggagccccagctcccgag

SEQ ID NO: 197953 - DNA, 233 bp, Homo sapiens
  chr1:214725561-214725794
  hyper
atagtccaccttatattggggaaccctccaagcaggacgtttcatgcagccaccccacaggggaaaacagaccaggagaaagtaaggtggcctcaccaagtaggcaatctcagagatctctccctagaatctctgggtactggacccggtgtcttagccttctctccctgccccctcccgccccgtaggaatgataaaaagcagcctgtgtgctgagagttggaaaatgtcgt

SEQ ID NO: 197954 - DNA, 325 bp, Homo sapiens
  chr1:215740713-215741038
  hyper
tcccaggcaggctgcggcggcgtcggtggcagcggagcacggagaagaggcccgggcggcccggcggcctggaggccgcgaaaggtggaggccgggccgcccttgtgcaccgcaggattgacccgggaaggggcagaagctagcgagccccgcccggccgccgggaaggtgggggaagccccgtgcaccccccgccctccggccgccgccgccccgctggccctgcagccgtcgccgctgcctcgggctacagccccgggctcggcggtcccggctggggaaggagggcggcgagcgcgtccggagccgccggagatggcgggag

SEQ ID NO: 197955 - DNA, 400 bp, Homo sapiens
  chr1:216774194-216774594
  hyper
cacaggacacaaccgccgcgctctggttggacgcaggctgcatcctgtttcccggacacatttattcagcccaatctttcctgtctgaacacagactgttgatgataaaatagcatctcaaattatgagggagaaagagctgcttcggcgttcctccccggttctctgcctggattgggctcccgtgggttgctgaggccctcgcggaggcctaggaagcccggcagcgcgggcggcagcagcgggttggggagcaaggccggcttggaacgcgggctcctgcccactgccacccgcaggctgccccgggctcccgggcgggcgctcggccaggggctctgctcgctccatggacagctgggtggaaaggacgccccgtgaaggacacccggccgtcgga

SEQ ID NO: 197956 - DNA, 226 bp, Homo sapiens
  chr1:216896661-216896887
  hyper
ttgtgcaccccagctataaatcaaagtttccttgacagagcacagtgcaattaacacaaatgttctcctagtgacaagcctataggcacagccagttgggaccaaagctctcacactctcctaatcaaggacttaaagccccgattggagcttattaatatgaagtagggctttacatatgcagtcccaccggcccagccgcgcagccgattggggggcctctgcc

SEQ ID NO: 197957 - DNA, 47 bp, Homo sapiens
  chr1:216896974-216897021
  hyper
actgagagtgggcagagaaaaagggagcggagaagggagcgattgaa

SEQ ID NO: 197958 - DNA, 68 bp, Homo sapiens
  chr1:218520805-218520873
  hyper
aagggttaaaaaaagtgtctcaaaactagcctctccggaaggcgccccctttccgtgctgacctatca

SEQ ID NO: 197959 - DNA, 151 bp, Homo sapiens
  chr1:219347035-219347186
  hyper
ttagcaaaactaaactcagtacagttacaactgcctcaaacttgaccccaaagtattgaaagctcctcagagagcgggccagcagcgctgcgcatgcgcgctcccgggcgtgctcccgcgcgtgcctgcgtatttgcgtgcgcggccccgc

SEQ ID NO: 197960 - DNA, 76 bp, Homo sapiens
  chr1:219347516-219347592
  hyper
ttctatcgggcggtcactggtccaccaccctcgctttggggccttgtgtcccgccgctcagccagccctccatccc

SEQ ID NO: 197961 - DNA, 112 bp, Homo sapiens
  chr1:220102055-220102167
  hyper
acttggcaggtggccacgagccgatgtctctctttgtgggacaggactgtgcagagaggggcgctgcggaggagagggggcgtgtctggacgtcaatcttcacagactccct

SEQ ID NO: 197962 - DNA, 209 bp, Homo sapiens
  chr1:220700605-220700814
  hyper
atgcactacagacgcgggtgcctacaggatgtcttgaggcaggtgggtggaagtgtgaggaagccacctggaagagggaggacagggcccaaatcagacacagctctccatcctccctaaacaggctcgcctaagtgacacttccttgtgtcccaggaagtgacgatcagccagtgtagatgttgtgactcgcgggtctcacccactcc

SEQ ID NO: 197963 - DNA, 588 bp, Homo sapiens
  chr1:220701527-220702115
  hyper
gctccgcgcgcagccggctcgggccgctcctcctgactgaggcgcggcggcggcggtggctgtgaccgcgcggaccgagccgagacattcgcgccgggggatcgggcgccgccgccgctgggccccgggcgcgtggatgcggctgggtcgggcggcgccgtacacctgaggcggagaacggggcgcggcgcgggtgacgctgtcagggccgcggttcctgacgcccaggcgctcgccaggacgagccaggcagtgatttgaggcaccggcttcaccttcacccatggtccggagagcctagcggggctcgccaccgcctcccggctccccttccacgcctcatcctgccagcctcgccgccccgccagcgccgggcaaccgcctcgcccgaagccctccctcgttactgtccgcataccccggcggcgccgccgcgggaagcggctccccctcctcttcctccgcgtcctcttccctctttcccccgccggggccgcttgttgcaccgccccgcggcctgcgggagccgctcgccccggccttgtgctcgcgtccgcacccctttcctgtcgccccccggggcccgca

SEQ ID NO: 197964 - DNA, 141 bp, Homo sapiens
  chr1:220863499-220863640
  hyper
gtgcagtgcgcgccgtagtctgcacagtttggccggcaggtgggatgaagggcggggctggcggagcgcgcccgccgcctggtaggccagttcggagcggagccaacgctatcccgggccccacggccagggggcgctgcg

SEQ ID NO: 197965 - DNA, 194 bp, Homo sapiens
  chr1:220921372-220921566
  hyper
ctgccagaaaaagtcgttcccaaatgtttgtaaatcctccgttgggcaacccgccttcacgttctgcggtgatcttgtcgagcgactaagcgtgcagtattagcagagaagggggtggcagagtgctggcgctgaaggtcatgttgcatgggtaactgtcgtgttgtaggggcggggaagagggaggagacact

SEQ ID NO: 197966 - DNA, 85 bp, Homo sapiens
  chr1:220959916-220960001
  hyper
taatttcaaaatcacgctttgtcctgcaaatgttgtatattgtttattttaggtcaaataaccccataaatacgtaagtaaataa

SEQ ID NO: 197967 - DNA, 201 bp, Homo sapiens
  chr1:223254692-223254893
  hyper
aggctcacagacccgtgtcacctctgacgtcaagtggcagggacacgctaaaagcctttgagtctattgattgagaaggctccagaaggttttggagcgctggaagaaggccaggcctggaatttacgcgtcggcctcttggtgtctcctcccgctgaagggagtaaatccaggcaggtctggggctgccgggcgggcacc

SEQ ID NO: 197968 - DNA, 198 bp, Homo sapiens
  chr1:223307128-223307326
  hyper
ggacagcttgggtgcgacttctgatttcaggagatgcgctttccctagagaccagcagagggcgcaaaaggggcagggaccgagggggaggagcccgcggagccgcggccggagagtcgagcggggcgcggggagctgcaagcgtccctgagctgagctccgctgggaagttcctatcgcttgcgcagtagagtgcat

SEQ ID NO: 197969 - DNA, 86 bp, Homo sapiens
  chr1:223538641-223538727
  hyper
gaagcccacattccagccacagtgattaagaggtgtcagctaatgaggtggcgtccaccggcagcgctttagagccagtgacactc

SEQ ID NO: 197970 - DNA, 328 bp, Homo sapiens
  chr1:223899911-223900239
  hyper
cctctgctaactccccgggtgttttccggacggccacaactatcctagccttcttccctatgggctgcaaaggtggcctcgggttccggtgggagccccaactctggaccgcgattcgcgagcctccccggcgccgggccgcgccatcccgggagctgtccgcagatggcagcaccggccccgggtcgcggcgttcccggcgctcggcaggccgcaggatggcctggtcccgggccgggagcccagcaggccgggagcggctgaggccacaccccgcgggccgggccgcttccctccggtgaatcatcgctcgcagcggcggcgcccg

SEQ ID NO: 197971 - DNA, 51 bp, Homo sapiens
  chr1:223936529-223936580
  hyper
ttctctggtattctcggcgttcaagcatttgaacggggtaggaaaggttct

SEQ ID NO: 197972 - DNA, 150 bp, Homo sapiens
  chr1:224302336-224302486
  hyper
gctccttgccccccgcccggaagcgggccctctacgggaggggtagcggagttggtcttcccaccttccgcctggcccgagagtagacccggagaggtcatgtcgcctgccttttgtatgccgcttccagcccccggcctgggtttgggg

SEQ ID NO: 197973 - DNA, 204 bp, Homo sapiens
  chr1:224622416-224622620
  hyper
cggaggcagctgccgcctctgtcctcggatccgctccgctctgctccctggtgtgttgattcttcccccagctgctgcctaatggagtccaggcgctcgcgtcacaggaaatgcctatactgccctcctcactcacttccggtggcaggtatggaacctatagggggcctgtcacccagcacgtgcatcgggggctgtcccggg

SEQ ID NO: 197974 - DNA, 34 bp, Homo sapiens
  chr1:224622766-224622800
  hyper
gccgccctccgaagccgggcgtgcatgggatggc

SEQ ID NO: 197975 - DNA, 250 bp, Homo sapiens
  chr1:224691180-224691430
  hyper
caggaggagggctgtcgctgctgtctgcaaccccaccgggcctcccagagccgaggtgacagcctgggcctcggggaagcccgtgtctcatgggcggttgtccagctgctcaggcctgcacaggggcgggtcccctcctaatcttatcctcacacaaccctggcaaccgcacagggctgcctggtgtttagcaaggggaggtggagtgtggtcctcccccaggagaggcagcaggcgacttccctattga

SEQ ID NO: 197976 - DNA, 106 bp, Homo sapiens
  chr1:224803611-224803717
  hyper
gccccaagtccccacacttcccactccgataggcgaaactgcaagaaccgggaggggcggctgcggcgtttaggcgcgaggcacacaccatacccttccgcagctt

SEQ ID NO: 197977 - DNA, 99 bp, Homo sapiens
  chr1:225117651-225117750
  hyper
ctccccacccagctgctgtgggagcgcctccgagtccccgcgcggaaccctcaccaggcagatgctggcgcatccaccaggcgccggcgccgccacgcc

SEQ ID NO: 197978 - DNA, 87 bp, Homo sapiens
  chr1:225117751-225117838
  hyper
gtagccccgaccgcaggagctctcaacgcgaggttcttcttagttgctctccctcaggcaggccgcgttcccttctagtcctatatt

SEQ ID NO: 197979 - DNA, 748 bp, Homo sapiens
  chr1:225614544-225615292
  hyper
ccttgggcagctcatcattcccctcctgctcgttcttctccctcttcccaggcagcctgagaaacaaaacttaaactggacttgttgcctaatctaaattaggatccctctgctcttctccgtagctccatcttctcccacacaccagttactacaatgcgtaactacagatctacacgtgtttacgtgcaaggtccccgggggcctgttcaccctggcactgcccaggcgccgcgcctcgcgctgcaggtgtccacgcgcggaccacggtatctaccgcgccctcgtgtgaacacccgaccgggccccgtaatcactctgggaaagcgccttcaacaaagccctccgaaagcaagtgctttactaagtgccccttgaggctactggcagtgcgaggctggctgtcattagaacatttttctgaaccctcaaaaaggtgaaaaagcaggaccgtgctttagcaggaacacgcacacccgcctaaatacccgatttttgagactgtccgggcgaaggaattcaacgcataggagcgagcagccatgcagtgtgcctggagaatcaccaaaccgcgacgaccacgaccctcaaagccagtgacaagcagcgcgaatctaagcccacctcggccgcagacccttccccgtcccgccaggccgccgcgccctgtcagcctcctactgcaggaccgcggggccgcctgctcatctgtcagacgggcgctcggaggggccgggagccaggctgc

SEQ ID NO: 197980 - DNA, 222 bp, Homo sapiens
  chr1:226069175-226069397
  hyper
tgttagagcccaacgaacagctaggagagacctttgcccccacactaaacaaaggagaggggcgtgtgaagggaaaaggagcctcggcttccgttcatatcccccttgaaggcacagcagacttgaggatgacctgagaggtgtcaagggagggtcagtgggtccgccacgctgtccacccctgcccttgaagaggacaccacctgcctggggctgaatgac

SEQ ID NO: 197981 - DNA, 289 bp, Homo sapiens
  chr1:226070382-226070671
  hyper
cagggtggtcgcggcgcagggagagcatctgcaaacgttggtccctgtagtgctttgaatttccccgaagagctcttagacccgccccgggagagtggggttgcgggggtggtagcatggggagctcagcaggattcagcccgcacctcggctccgggtagtcgggaaccgcgcggagcgccctgcaagaggccacggctcccccgccgctgtagaaggccggaccgtgaaagcccggagggtctccgttcgggcaaaaatgtgggggcgggtcgcagcatttccaacg

SEQ ID NO: 197982 - DNA, 171 bp, Homo sapiens
  chr1:226297380-226297551
  hyper
aagatgggagcaggcgctgaatccgtggcgcatggggaaagcggcggtcggagtggggcttcctggcctgtcacctcctcctgagctgctgcgaggagaggcgcgttggcctcctgggccacagctgcctccctgcccagggaatcccgggagatgcgaatatcgaagaac

SEQ ID NO: 197983 - DNA, 48 bp, Homo sapiens
  chr1:226924724-226924772
  hyper
ctggttcacctgcacgttctgcaactcgcgctgcaagatccgcagctt

SEQ ID NO: 197984 - DNA, 1206 bp, Homo sapiens
  chr1:226925659-226926865
  hyper
cgaggtccaagtccttggctcctaagtatgctgtgtgcggggcgcggctgactcagctctcccgggctgaggacaccccagccaccgtctccgggtctccccagcctgagcaaacattggctatccagggcaacccggcagccctcgccctgggcttcagggtctccctgctccaccctctcggggcatcagagaccgaccggctcggagggaacctaagcgggacctgccttgcccgagccgctgccagcgcccggatctgggagggcgcccgcgtgcccgccgtttaccttcctgaccctagccttggggctgtgtctctcggcctacgaaggcctgggcgggcagcggggccgcagccgaagcatttttcagggctagccttgtcgcctatccctagacaagtgttttgtgagtgtgggcgcaccgaggttctacacgttctctttaccggaaccagtacttgctgcccccctgccgtcgtcccctatgggggggtgtctgtgagtgtgtgtgtatacacgcgtgtgtgtatacgccgcacgcgcgcggagcgagtccgctctcagcgcgccctgttgccgaggacgcgactgcccctgcgggctcccggacccgcgcccactcggaggaacttaggggcgtgcatggctgcagccgggcagcagccctaggtgcacagagcctctagctctgcaaacctcccaggagccggcgctctaacaccccagggcagcgccgcggagcgcagggcttctccgcatcccgggcagcctcgcccggcgccagcagagccgccccgagaccccagcctggggactcctggagcgcgctgagggaggcggcgcggagtgagcggcccggaaggcgggtaggagaaatgcggagacctcgtctctccctattttctccccaccgccactccatgtcaccctccaaaatcaaacccccttccctgcctccccagcccacccctttgccctgtttcggaaccaggaacgccgagattcgctccagagcagaaagtgagggaaaagagggttgttcagaggcgagagccattaaaaggccgccaaacttacctgcagtttctcagattctcaggtcctgtgtagactacatgcccagaggcgcaaacctcgtagggacgagatggctttaaaagtaaaaatgctcagaaattattttctcacaagctatggaaga

SEQ ID NO: 197985 - DNA, 70 bp, Homo sapiens
  chr1:226926951-226927021
  hyper
gcacgcccttttcgaccgtggagatactgcccctgtcagtgtctgctccgggctacttcagtgtttgttc

SEQ ID NO: 197986 - DNA, 33 bp, Homo sapiens
  chr1:227058123-227058156
  hyper
gtcgtcgcttagttccgacgtcgggatgaccct

SEQ ID NO: 197987 - DNA, 116 bp, Homo sapiens
  chr1:227505400-227505516
  hyper
aatgttgctgcaaatcctcccaaccaccacttggataatgcatcagcggcaatttctccagcgggaaagggagggggcgaggtccctgaagcagcccctcggctcggagcacgcca

SEQ ID NO: 197988 - DNA, 153 bp, Homo sapiens
  chr1:227505859-227506012
  hyper
ggtgcttctctgaattcaaaggacacaagcagcagcagctgcggcggcggcgcgggcggctctggcagctacttctcccccttcttcacacccctgggctaagggcatctttccacagcgaggagggaggcggcccggcgcaggaggaggggt

SEQ ID NO: 197989 - DNA, 716 bp, Homo sapiens; identical to SEQ ID NO: 36900
  chr1:227506042-227506758
  hyper

SEQ ID NO: 197990 - DNA, 205 bp, Homo sapiens
  chr1:227652539-227652744
  hyper
agatagcgcaggtagcgacagagaggagtagaggcacaccttgggtaagacattgacctcttgcatgtcccccattgccagccccaagcaggacaggtgcaggaggttggcagggccctactgtgggtctgagatctacgagcaggcagcagccagtgaggactcaggcagtagtgacgatgagcagaagcgcaccacgggtaac

SEQ ID NO: 197991 - DNA, 191 bp, Homo sapiens
  chr1:228134500-228134691
  hyper
cgcgctggcgctcaggccagagggccgggaacaggtgaccggcggagggcggcggcccggctgagggagcggcccagggcgtccaggtcgggggctgggatccgaaggccagccagggctcccagcggcggcgctcggggtaggaggctggagggtggcggggaggcccggggcgctgcctcgcacggcgc

SEQ ID NO: 197992 - DNA, 216 bp, Homo sapiens
  chr1:228134891-228135107
  hyper
ctgcgctcccggccaggttccatggacgcgctcccgcgggccggggcccgggccacagagtcagaagcaaagcgcaagaaaaataaattcctccagcttggaggatttctctctttctctctctctctccgtttggggctcagcgcgaggaacatctggattttgtacgtatttttgttattgttaaattaacttctcgagaagagaaaggggggg

SEQ ID NO: 197993 - DNA, 207 bp, Homo sapiens
  chr1:228135899-228136106
  hyper
ggggcgaccacggcgggacggcattggggggccggaggcgggcatcgggaagcgggtagagcgttgggggcgctgcagtgggagcttggggcggcccccggggcgggattgagggggaggggaggggaggcgttggccgccgggctagccgccggcggggctccaggccgggacggtcggggatggttccacagaggacccagccgt

SEQ ID NO: 197994 - DNA, 119 bp, Homo sapiens
  chr1:228136152-228136271
  hyper
gaggaggagtcgggccagccggtgatgcctgcgcctcttgcgcatgctgaccccctcaaggagcggggccagagaatcgctcctttctggcagggactgtggccgctttcggcctggga

SEQ ID NO: 197995 - DNA, 104 bp, Homo sapiens
  chr1:228225422-228225526
  hyper
ccccagtgggaggggaaccccggccgactccccgccgcgtccggctgggagcacaatatcccagcgacggcgacaagattaagcacaaggggagagtgcaaatg

SEQ ID NO: 197996 - DNA, 63 bp, Homo sapiens
  chr1:228225939-228226002
  hyper
aggtgggcagcccccgaggggaggcgcccgggcgtcggctccggcgggctccggcggggaccg

SEQ ID NO: 197997 - DNA, 214 bp, Homo sapiens
  chr1:228444556-228444770
  hyper
ccaggcggtcgccggggagtacagctgcgaggcggggagccagcggctctccttccacctgcacgtggcaggtcagtgctttgggggttggagagtgactttgtgtggaggtgatgatgagactggctgatggactccacggcctccagtgccctttccatgagactccacctctccacttctccatgccctcacttcccggtttcataccctt

SEQ ID NO: 197998 - DNA, 44 bp, Homo sapiens
  chr1:228644857-228644901
  hyper
aaggggtggccacctgtggacgagggttccctgttgttaacaga

SEQ ID NO: 197999 - DNA, 120 bp, Homo sapiens
  chr1:228646026-228646146
  hyper
tcgtcaatgacatcttcgagcgcatcgccagcgaggcctcccgcctggcacactacaacaagcgctccaccatcacgtcccgcgaagtgcagacggccgttcgcctgctgctgcccggcg

SEQ ID NO: 198000 - DNA, 165 bp, Homo sapiens
  chr1:228646941-228647106
  hyper
ttggcgtgcgccgtgcaggtgaggagtgcgggtcacctccccccaaaagaccctgtgccaacctccccaaccctacccgccccccatgggcgaggccagacgtggcgcaagaccacgggctctgaggccatgggtgttgtcactttcccctggcggtggtgcctg

SEQ ID NO: 198001 - DNA, 708 bp, Homo sapiens
  chr1:228783332-228784040
  hyper
tataaggttgcgactgcgccggatgagtgaattgaattgcctggtggatccgggagcgggaaggcaccgcgaacggcagggaatcctggcctgcaccttagtgatctgaggcgtggtgtttctgctggatccggtttcatcgtgttgcgccgcccatcctgaatagttgtgatgttgttgcctggctgtgctgcaggttagcccacactaagcggtcccgggctgttgtgtgggcttgggcgtgtgaaaagagggagcagatttacggtgcggttgagaagtacggcgaccaaacggtaaagagggaggaacttgaagtctaaacaagcctgcgtctcctggttttctcaagtggcgtttcatctaagtagcggtctggcccagaccctgcttatcttcacgagatcagaggagaccggacgccttcggggtggtatggccttagacgccggtagtgcagcctgtctgccccaaaggcgcggctcagccacgcccgtccgactccatgcgccacctctaatccagtgccatggggatcttatcgggacccgggagccgctcgccggaggtctggctgggttgctctccgtgtctacgcccaagcaccgttgcccgccgccttgcgccttctgttggcctcttagagccttccgtgattgcttgcgcctaggccactcgctggacctccgcggcgccaccctgtttcct

SEQ ID NO: 198002 - DNA, 40 bp, Homo sapiens; identical to SEQ ID NO: 105183
  chr1:228784106-228784146
  hyper

SEQ ID NO: 198003 - DNA, 112 bp, Homo sapiens
  chr1:228870693-228870805
  hyper
tgagaaaaaatcacacgatcagctgcagttagacttaaggaaaaaagctgtctgttaattcaatctcattcgcaggacaggcctccaggacacttcatttttccccctgggt

SEQ ID NO: 198004 - DNA, 328 bp, Homo sapiens
  chr1:228870899-228871227
  hyper
cagtcgcgcggtggtcaccctcttgggagctggggaggaggctgcggaggctggcccggctccttcgggcgtcgcttcccggaccgggtgcgcggggtcccccggaacgtgtgttccaggtcctcccgcgccagtgttcgcagtccccgcctggtcgcggcggcgcctcgggcgcgggtgcaggcgcgcggcgcgcaggcggggggcgctgtggtcttggcgcggggaccgagccgctcggccagacccgcctcttttccctccccgccagcccgcccgcctgcccgccccccacgcgtcgtgtcgccgggaagccgggcggagacag

SEQ ID NO: 198005 - DNA, 269 bp, Homo sapiens
  chr1:228871596-228871865
  hyper
ggggggccgggggcgtgcggggggtgccgaggggcgcggcgtcaagtgcgtgctggtcggcgacggcgcggtgggcaagacgagcctggtggtgagctacaccaccaacggctaccccaccgagtacatccctactgccttcgacaacttctccggtgagctggccggggggccggggccgggggcgcgtggccgcggtccacccaggggaaggaaggtggcgcgagggtcgcgaggttcccaagggggctgcagggccccgggcgcgg

SEQ ID NO: 198006 - DNA, 103 bp, Homo sapiens
  chr1:228872003-228872106
  hyper
tgccaaaaaaaaaaaaaaaaaaaatctcacaatttaagcaacagataagtaggagtgaaacaggttgagttcagggtgcccggtcagtttgttgcatagagca

SEQ ID NO: 198007 - DNA, 69 bp, Homo sapiens
  chr1:229543603-229543672
  hyper
gttcaaaccaaggtaagagctatcagatccagccagatctgcttcctaagcctggccagggccctaagc

SEQ ID NO: 198008 - DNA, 209 bp, Homo sapiens
  chr1:229643803-229644012
  hyper
agatcacttaccgcgagcttagcgagctacgccggccgaccggcgagaagagcactggggagctgactgcagaccccaggggcagacccttcctgctagccgtccggggcgtggagccgggcccgagtccggccagcgggccccttcgggacccggtacccggggtccgcggagaaggggcggctgggaacatgactccaaggagcagc

SEQ ID NO: 198009 - DNA, 219 bp, Homo sapiens
  chr1:230223230-230223449
  hyper
cgcactgttaaccagcggttttcaatctggctgtacgttaggaacacctggggaaaactttgagctgtagatgcctatcacccaccctagactgattcagtcagaatgtctggctgtggggcccaagtgtgttttagaaaaagctccccatgtgtgaatgactctcacgcagtcaggtctggggacagctggttaggaaggcgtcgctgagagtctcca

SEQ ID NO: 198010 - DNA, 633 bp, Homo sapiens
  chr1:230561973-230562606
  hyper
ccgccgccaccgccgccaccaccgccaccaccgccgccgctgcgtctcctcggcgcccgccgcctccctgcccgccctctccacggcctccggcgctcggctgccgaccttcccgggcgcgagccgccagaggcgggccctgccgcccctcacctcccgcccgccggccaatggggagcccggcccggacagccgcgggggagctgggcgggcccggcgcggggaacgcccccaccctcctccgcggggcggggcggggcgcgcggccggggctggcggttagggggagggccgccggcggcagtgccggtctcctcctacagggacgcgcagcccgggaccgccacgcgcagcgcgggagggggagggcgggaccggggaacaggaggggagggggacccgggtgcttccagcggtccgggcccgcggacggagtgcgggccgatcccgctcactgtccccttccgcagtccgcgtgcagctccagggagctgtccgccccggtggttctgaaccaggcgccgccgaaacgctccaggtaggcggcgggcccgaggtcaccacacccgcggcggcggctgctgccgaggtttcctgggggtcactgccagctgcgccgcatgctcccataaa

SEQ ID NO: 198011 - DNA, 163 bp, Homo sapiens
  chr1:231053145-231053308
  hyper
acttgctaataaaccgcctctagggggcgctgacatacacgttaacttggtttttcatcaacagtaccattgtgcctttcagtggaagttgacctggtacattccactaagcactttaaacactcaaatatcttgttgtatattctgctgtgtgtgccttgca

SEQ ID NO: 198012 - DNA, 228 bp, Homo sapiens
  chr1:231297569-231297797
  hyper
ggggtgtggaactggagtggcccagggagacgatggcaggggcggggcggggcaggtcgttgtactgattcaagatacaatctccatccaaataatggattgttattaacaatgatcctccctgcaaaacccttaaaattgccccttgattccctagcagcaagaggcgagcccttattcgctgagctgaagcctcctcccccctcctccccattactctctgctctg

SEQ ID NO: 198013 - DNA, 91 bp, Homo sapiens
  chr1:231664200-231664291
  hyper
aggtccaggaggacgcatcgtctttttagtaacagtgcatgctgtgaggcttgtagagtcgcctctctcttcaggcgcagcagagggcggc

SEQ ID NO: 198014 - DNA, 169 bp, Homo sapiens
  chr1:232765026-232765195
  hyper
taccctcactgacacgggaagacccggagaggcccaggagctggcaaagtgggaagaaaggtcgcggtgagtgagaagagcgctcgccggaggctcccggtcttacaaagagggatccgtcccggtgagggcgcgcgctccgggcgcaccccctctagaaggggaatta

SEQ ID NO: 198015 - DNA, 162 bp, Homo sapiens
  chr1:232765375-232765537
  hyper
aacaggcggcggcggctcctcttccagccggggatcgggagcgcgggcgcatctgcgtctacaagccggaccctgcgccgcgaccctcgcacccccgcgcccctcgcacccctcgccgccgtcagccccccaaagcgccccgaagggcatccccttcccctt

SEQ ID NO: 198016 - DNA, 610 bp, Homo sapiens
  chr1:232765595-232766205
  hyper
cggattccccgacacgaaccttcgcaacgccgtccgccggaacctgctacagcctgtgcgcgccgggcggcgcgtacccgggctgccgcctcgccgcccgccgctgcccggggctgcccatcggcccggactctccccgcgccgggctccggcggaggcggcccggacccgctggctgcggctggagctctcggcctgcgctcgggcggccggcgggggcgcggtgctcctcctccgtcctcctcctcctctcgctccgccagctcctcccgggctcccagtctgccgcgccggctcccgatgccaccgcccgcccgcccagcggcaccgccccccgcccgctctgcgggctcccattggtcgctgcctgcaggccccctcggccccgccccacgattgggcgcggacgccgtcagtctcaccgtccgcccggctccgggcgcagccggtgcgctgttcccaggccccgcggcgcgcgggagctgcgcgtccaggaggggcccggacgcccttcttggggagggggctgcggggcgcatcatgagcggcgctgggcgagctcgagggccgggcagcctacctggaccccggcttctagagagccgtcgcc

SEQ ID NO: 198017 - DNA, 219 bp, Homo sapiens
  chr1:232941034-232941253
  hyper
aaaacccccaaagcagacaccgcccgagacccgctggagcgcttccgcaaatctcgcgagatagcaggcagcgatgccttttgctccggtttctcgtgagaccccggggcttcagcttctcgtttgcggagcccgcggcggcgtttcctggggcaacagcaatggcggcctcgctgtccgagcggctcttctcgctggagctgctggtggactgggtgc

SEQ ID NO: 198018 - DNA, 345 bp, Homo sapiens
  chr1:232941254-232941599
  hyper
tttggaagcccggctgctgccgtcccccgctgccgcagtggagcaggaggaggaagaggaggaaaaggagcagggggaggcctcgtcgccgcgcggtctgtgccccgccgtggccttccgcctgctggacttccccacgctgttggtttaccctcctgacggccccggcgctcccgccgccgaaccgtggcccggtgtcatccgcttcggtcgcggcaagtcctgcctcttccgcctgcagcctgctaccctgcactgccggctcctgcggaccccgcttgccaccttgctgctgcagctgccccctgggcgcccgacgcccaccccacagctcctgggggcctg

SEQ ID NO: 198019 - DNA, 165 bp, Homo sapiens
  chr1:233749566-233749731
  hyper
aaggcggtgcgtcccgggccccggcagcccagcccaggcgctctggccaagtttgcgcgcggtctccgctgactctcgggttacctgagccggcaaccacgtcagcgccacatcatctgggctttttatattgcaaggaaacaggaaaagaaggaagaaaaacat

SEQ ID NO: 198020 - DNA, 314 bp, Homo sapiens
  chr1:233749768-233750082
  hyper
cggaggagcggggcgggcgggcgcgcgggggagcgggcggcgggcgggagccaggcccgggcgggggcgggggcggcggggccagaagaggcggcgggccgcgctccggccggtctgcggcgttggccttggcggcggcggtggagaagatgctgcagtccctggccggcagctcgtgcgtgcgcctggtggagcggcaccgctcggcctggtgcttcggcttcctggtgctgggctacttgctctacctggtcttcggcgcagtggtcttctcctcggtggagctgccctatgaggacctgctgcgccaggag

SEQ ID NO: 198021 - DNA, 180 bp, Homo sapiens
  chr1:233750511-233750691
  hyper
gagaggtgactccagacgtgacttggttgttgccgtccgtaactctggggaagtggtccctaacttcggcctgggtggctgcaggtgcttcctccccttgagttcttttttcgcaacccactaagccaaactgtcgggtttgaatgtgtagcagcacctggccgccgtgcggcaaggcag

SEQ ID NO: 198022 - DNA, 198 bp, Homo sapiens
  chr1:234508999-234509197
  hyper
ctctgtaacactccgtccagctctcgcactctcagatgcaaacttccacacaaactcctcggctcgccttgtcccgcgggactagcatatcaagccttccgggacacaccgtgcgatgatatatacgtatatacccctcttgcccttgaaggccggaagtcggtcttacagataaaagcgaaacaggaagtcccgccc

SEQ ID NO: 198023 - DNA, 141 bp, Homo sapiens
  chr1:234828214-234828355
  hyper
ccgccatgcccggcttatttttttcttttaaatatatcagatctcccccaagttaatacgatcaatgcaattccagttcgaagcctagcaagagtctgctttgtgtgttggagatgttccatgcatcgcaattccccacct

SEQ ID NO: 198024 - DNA, 64 bp, Homo sapiens
  chr1:235667932-235667996
  hyper
gagcctaagcacgcgcttccgtcactcggcggccgcgggggcgaagcgcgaggccccacacaga

SEQ ID NO: 198025 - DNA, 95 bp, Homo sapiens
  chr1:235811920-235812015
  hyper
tccactgtgggaagcggcacacctcactcatgagcagacgacaggactggcacgttttaatggagcacacgggcgcagcctaggcggccttttgc

SEQ ID NO: 198026 - DNA, 42 bp, Homo sapiens
  chr1:235813161-235813203
  hyper
gaccacgcgggcctgggggcgcaggcggaccctcccccggcc

SEQ ID NO: 198027 - DNA, 45 bp, Homo sapiens
  chr1:236305443-236305488
  hyper
ggatggggaaggggccggggacgggtagcgcgcggcccctgggat

SEQ ID NO: 198028 - DNA, 205 bp, Homo sapiens
  chr1:236444198-236444403
  hyper
acctctctgaaggcgaaaggatctggtcagctaagcctcagatttctagcacactgagaacacttgtaatcatcgcttcacatcaacaaccagccagcacctcacgactgccagagccagagcctccatccacgagccacaacgccccactcagacccccccagtctcgtattgggacttacctggcgatgccacttggcagaca

SEQ ID NO: 198029 - DNA, 264 bp, Homo sapiens
  chr1:236444643-236444907
  hyper
gccgaggtggttcatgcccgtcccatctcccgccacactcccagccgcttaacacatccgagaggaaaaaacgaaaacagctcagggggaccgtcaccatcttcctcttttgactgccattacccggagtgtcgccgtccccccaccctgcgggcggttcgcagatgtttcccgcactggacggtcaggtctctgctccccgggttttctgctcgccagaaatcacctcttttctggcccggccctgcccggccctccccgcgt

SEQ ID NO: 198030 - DNA, 450 bp, Homo sapiens
  chr1:236445121-236445571
  hyper
ggggccggggaacgacgggcggcccaggcgacgacccaaggggacggttcccagcggccgagcgactccagggtcagaggtctgcactccagtccggaggcaggcgactctttccccaacacccggcagctgcgagtgaggcaggaaaggcgagcgcccccacttcatcccccaggcggccccgcccccggctcgcttggctcctcggccacgcccccaagcgcggggccttgtgggagttgtggtcctgggcggtcgcctaggcgccgcggcaggaaggcggagccgctgaacgagaggactcgggaactacaactgcgaaggccgccccgcctccccgaggcctcgggctccgcggcggccaatgaggcgggaccacgcgggcctccaaaacaccggggggtgcgggcgggggaagcggggcgacctcttctccgggaaaccaggctg

SEQ ID NO: 198031 - DNA, 106 bp, Homo sapiens
  chr1:236850212-236850318
  hyper
ctgtgctgtcctgtgccctcgcagccccgggggccccttaggaaagaggacacgtccggggacaggcaggacactgggcgtcgtgtgtgtgcgcgcgcgctagcag

SEQ ID NO: 198032 - DNA, 36 bp, Homo sapiens
  chr1:237205188-237205224
  hyper
cctagcccagtccaggaggaaggggcgtcgtgccgg

SEQ ID NO: 198033 - DNA, 183 bp, Homo sapiens
  chr1:239549401-239549584
  hyper
agaaacagactcactaaatgtcaaaaagtagatgcatcagactgttccttagagaaaggtttgccatggagtcgtatattgtaactgagctgaagttcactcatcgataagttgtgcccaaggaatcgaattccttccagtccttctaagcagtccagggaaaccaatttaaaagcgaacaca

SEQ ID NO: 198034 - DNA, 219 bp, Homo sapiens
  chr1:239549815-239550034
  hyper
gcatgctcagaagccgggcaggttttggtctcaagcacgcagcctgtgcattacaccagctctctcagtccggggaggaggaggagcaggaggaacgcgaggaggaaggagaggaggagcggccagcagtagccacgaccgccaccaccaggcagaggaagagttcgtggggaggaaaagacctctcctcccccttggagcgccttctctctgcttttg

SEQ ID NO: 198035 - DNA, 199 bp, Homo sapiens
  chr1:239551218-239551417
  hyper
gaacacttcctcagcatagcctcctaatagcgaggttaatttttgcgtgtttttaaacggcgggggcgggcggacagttgactccagcagcagaattcacttgtctacttcgcggtgtgcgtgctggaattgagatcctgttctgcatgcttgtgcgtgtgtccgactctccttgcacgcatttggaagtggtagaggc

SEQ ID NO: 198036 - DNA, 34 bp, Homo sapiens
  chr1:240775455-240775489
  hyper
gaatcctctcggcgctgcatggggatattatcag

SEQ ID NO: 198037 - DNA, 50 bp, Homo sapiens
  chr1:241520533-241520583
  hyper
gaggagggaggaggggacagtcacgtgggacaggggcgtccgaaggtgcc

SEQ ID NO: 198038 - DNA, 147 bp, Homo sapiens
  chr1:241520612-241520759
  hyper
cacaccgcccgggcctcccgggcctccccggcctcccgccctcgcgcccctcgggaggctgtagtcctgcccccggcgcggccagcccgcgctcccgcacaccccgcccgctcgcccgcgcgtgtgtacgtgcgccggaggcctgga

SEQ ID NO: 198039 - DNA, 97 bp, Homo sapiens
  chr1:241520789-241520886
  hyper
ggaaagggaggaaggctgtgcgatgggtgggtgggtggtaggtgggtgggtggtctagtgaatggatggacagatggacggacggatgcacggatga

SEQ ID NO: 198040 - DNA, 273 bp, Homo sapiens
  chr1:241682903-241683176
  hyper
ttcggaggccaaaacgagggcacggccgcgccacccaagccgggagccgaagctaaggctgcggctggagcccgcacgaggggacgcgagcgcgcgaggagccgaagtgctcggtacatggtgctgagggagcttgggtagaatttctgggcggctgtggccacgcctccacgccggttgtcagaaaccgttccgcccaccggcctccgctcttatccaatcaacagcctcacaccgacaggtggggcaggaccaatcgtgaatgaccagtaa

SEQ ID NO: 198041 - DNA, 514 bp, Homo sapiens
  chr1:244013707-244014221
  hyper
atcaccagaaaacaccgctcgggcgggggccgggtcacgccggcggggcggcggctctgggccccggggcgcgcccggcgcggggaggggttctgcggcctcctcccgggctgcgcctcgctgaggggaccccccgccgcctccccgccccctccttcctcccgctcggggccgccgccgatcggttctcgccgtcgccgcggggcttgttgttgactttgaggaaaactcctgacgtcaggggctggctctcggcgactggcgggagcggcttccccgcgtccccggccctgcccgccgcctctgctcccctccctgcccggccctcgtcctcaggcttccccgcgcccccaaaccagcggtgccccgcgccccctctcctctcgcgagaacatccccctagccagccagagccgggagcgggggcagtcgctcccgggcgggaagttctgggtttccccctcgcccgcgtggcccttggcgggcacccgaggcccgggagcggaggctcctc

SEQ ID NO: 198042 - DNA, 395 bp, Homo sapiens
  chr1:246887311-246887706
  hyper
tgctccacccccacgtgcaacaaggacaaccggctgccgcctccagcttccagcagggctagaagatgcgctgcccggggcggccagagccctgcagaacaaaccgccgcacggaattaggggccgccgtccgcgcctgccaggcttggaagcggactcgcccccagggccaccgccctaggaaacctcccgtcggaagcctcccaagcaagccgctcacccgcggctcccgcgcgaggcggcgtgggcgtgggcgcggccctggcgcggcggcgcgcgcggggtgaagggagcccggcgcgctggctgcggcgacggcggccgttgctgcgccgggtactggggtcgctgcctgaggcgcaggcgccgtggactccacccgccccggggcctgg

SEQ ID NO: 198043 - DNA, 199 bp, Homo sapiens
  chr1:247170806-247171005
  hyper
aaaaaaaaaaagaggagaaaggaacccacagaccacagctcctcccacccaggaacctttcacgggagtcgggactctcccgacaacccctccgtcatcacagcacaatccagggaagacgcggcgctgcgggcgcggggctgccccgggagggctctgggccgtgccgaagtcaccaggcagagaccggacagtcacc

SEQ ID NO: 198044 - DNA, 329 bp, Homo sapiens
  chr1:247241959-247242288
  hyper
gcaacagaagctgccgcgggaccacttggacctcccagggataaggggaaggagcagcggagacgcaccgagctcgccacattcgcgctgcccaacacaaaagccgcgccaggtcccggaagctgctccctcctttcgcggcgcgcttgagagtacagtccccttcccagcgcccgattggacagggccttaggccccgccccttcagtcctgagtgacgggagatgcaatcagacacggcgctgagtgaggccaggttctttccctgcagtccttttctaaggcatggattctgccctgtgctgagacctggcgccccccgggggact

SEQ ID NO: 198045 - DNA, 234 bp, Homo sapiens
  chr1:249167654-249167888
  hyper
acaaaagcatccattcgtcacttagtggcaagcgtttttccaactactttccgagtagtaactgcttgccagagtttccccagcttgggccggaaggtgaggcggtagctcgagctttgcctttctcaggcattgtcctgcgtttgcggggccaggcgctggcacacggtcactaacccctggtcgttagcttcgattcccggcctgggagagcgctatcggccactcctggct

SEQ ID NO: 198046 - DNA, 262 bp, Homo sapiens
  chr2:45670-45932
  hyper
cggtgaagttctccctccccagggcctccaccacctcggggtccaggccgcagtactggaagaaggtgtcagactcggccaaggcagcggaatagcgggagctgaggtccgactgtgagcgctgcagcccccgacgcctcaccacccgcggctctggcccagggggcgcggccgggacactggagggcgccgcggaccgcgcggctggggctggggtctcggggattgcggggtccgccgcggggccaggagtggtcgggac

SEQ ID NO: 198047 - DNA, 61 bp, Homo sapiens
  chr2:45969-46030
  hyper
cggggcaccggcgccttgtccttacccggcccctggaagagcttcttcaccaggcttgccc

SEQ ID NO: 198048 - DNA, 146 bp, Homo sapiens
  chr2:46450-46596
  hyper
gtcagtcccagggccggttccgaagtccgcgccgggtggggaacggcgccccagtgcccagctgcccaggcccggggttggggagaaccggagtctgcaccgattggcgaaactccccagttcccgcccctcccgacctcatcgcc

SEQ ID NO: 198049 - DNA, 541 bp, Homo sapiens
  chr2:46668-47209
  hyper
ccccgcccgtccccgcctcctcactcccgcccgggcccgcctccctggccgctctccgggtgccagcgcccgccctcacctcgcgtccggggtcccggccctcacctcctgcccggtgccgtccccgccccccctcaccttccggcggcgctgccaaccgcctggaggacgctggggcgagcaggctctgaacccccactcgctcagccccagatccccgaggtcactgctggacgcaggcatttccggggagggggagcagaggggacgtccccccacctcccccgggcaggtgcctcacatcctttgaattcttaaagtgacctcatcgtgtttggaaacttgactgtttaattttgtctacctgagctcatattcttattaacagaaaggaataggacataagaggaaagaacacgcagcgcacgccaggatcagcctacgtgttgggtggcaagaacgcagggcctcggattgggtccgactcggtcgctggccggcagcgggcgtggccgggcccgaggaccgagctaggactctc

SEQ ID NO: 198050 - DNA, 272 bp, Homo sapiens
  chr2:263891-264163
  hyper
catcgccggttttcccgtcctcctcctcccaccaccgcccagctcttgagaggggagggtgctgccggacaggtgggtccccgggtactcactgctgcccgcccggccgcggcgccccgtcccgaggctgcccaggaagaggaaggcgcgctgccccgccccgcggacaaggaggccccagcgagggcgtacctgcggcaggtgacgaaggaggcggcgcaaaacacccgccgtgtacgtttcgcgggacaaaaaccacgcgcccgccgggc

SEQ ID NO: 198051 - DNA, 267 bp, Homo sapiens
  chr2:264204-264471
  hyper
gtcctcaagatcgaaaagcccagagccccgcggcggctccaagcacggtgttgggggtgggggtctcagggagcgcccaggcccaaggccgccctggtccggcgtggaccccgcggggctcaaggcaggttccccgcgtgacccgcccagcccctctatgcgaactcgaacgacaggcaccacagcccgccacgtgcgcgagactcgcgctgtgccccaacccaggtgggcggcccgcggagccgcgaggcctgagcccgccctgca

SEQ ID NO: 198052 - DNA, 239 bp, Homo sapiens
  chr2:677555-677794
  hyper
tgggacttgtgctcgctccgccaggaggccgagggcgtctttagttcgttaacagaggagcaggcggaggcgggtggaatttaggaggtttgtttcaaaggctcagggcgctgtaccgccacgccagccctgtcccacctgggactccctagaagggtcagagcatcaatgaggacggtgtccgccccgagaccctgcaggagccggggacattgcccactcctcggaccctgcaggac

SEQ ID NO: 198053 - DNA, 101 bp, Homo sapiens
  chr2:945451-945552
  hyper
gcctccgcgatgggcgctcgtgcctgggtcgaaggactggggggcggaggatttggaaagggagaaaaatacgggctggcttctttttaaaaaatgtgggt

SEQ ID NO: 198054 - DNA, 175 bp, Homo sapiens
  chr2:3465089-3465264
  hyper
tccatcaggaagacgtgcagcccgcaccccggctttagcgcagccccagtgcccagtgcggggccgctgcctttgcgcttctgcgtctacgtcaggctggacgcacaaggagactcggcgtcctgttcatcctcggtagcaagcgaccgtgacgcagcctcgcactactgcaagc

SEQ ID NO: 198055 - DNA, 35 bp, Homo sapiens
  chr2:5832394-5832429
  hyper
gggcctccgagttaataaaggaagatgggcggagc

SEQ ID NO: 198056 - DNA, 60 bp, Homo sapiens
  chr2:5832655-5832715
  hyper
ggcggccgtcgtcgccgaagccaccacagccgctgtgtgcagcctggaagggggggcggg

SEQ ID NO: 198057 - DNA, 95 bp, Homo sapiens
  chr2:5834133-5834228
  hyper
ggactggctggaggcgaacttctccgacctggtgttcacatattgaaaggcgcccgctgctcgctctttctctcggagggtgcagagctgggttc

SEQ ID NO: 198058 - DNA, 65 bp, Homo sapiens; identical to SEQ ID NO: 105426
  chr2:5837518-5837583
  hyper

SEQ ID NO: 198059 - DNA, 729 bp, Homo sapiens
  chr2:7005469-7006198
  hyper
ggcagtagcagagcagcctgagcagctggcaccgctggaaggggccgcggcgcagctggtgcagcaggcgctggtgcagccgcgccgcccggacccgggccccgcagccggcgtccggggtcacgggcacgcacagcgagtagctgcgctccgggggccccagcagcgccgccaggcgggggtcgggggcgtctgcgtcgccgggggcgtcggcgcctagggcgaagtgagccagggtgcagtcgggaagctccaggacgaagcggcgcggcggagccatggccccagcgcagaccccgcgccgcccgagcagcggccccgacagtggcccgcgcaggagccggcgggcgaaggccatgggcgcctcagcgacgccgccctcggccccgcctcggaaacgaaacctggcgggagccaggcgccggcgggaaacgaaacccggagggagccaggcgccagcgggaaacgaaagcgaagcgttgcggggaaacgaaagccggaggcccaggcggggcaggagccctggggctggggcgcccttccggcctctcctcctcgccgcgagatgtgcgcgataaacggccggcgctcgggagcagacgcttggccccggggccccaggtgcgcggctccgcgggcctgcgcggtccccaggcgccggctcccggggctgacaccgaatgaggccccgcgccgtcggccccaaggtagctccgtgtgcgttctgcg

SEQ ID NO: 198060 - DNA, 633 bp, Homo sapiens
  chr2:8818829-8819462
  hyper
cttttcttttcttctcggtcctctttccttccccaaatcactcgaaacttaagacgtgcagcgtctgcaggtgcgcgcgggccggcggccgggcctgggcgagcctgggactgccgggcctcgcaggcattgatcagctgggcgcgcgcgctgagtgacggcgcggttgccatggcagccgcctgagcggcgccgcgaggacaaggctgcagggcggcgtgaatgggcggcgtcacgcgcctggcgccagagagtctgctccggggctccggctccggccccgccgcggcctggcccgcgcgccgccgccgccgccaccgccgccgccaattcatcacctgtcagggatcactcgcggggtcacgggcggaatggacacagctgtgagaacaaaacccgggaaagaaaggcgaacgctccccattgcgccagatgtgcagggaggaccttgagacgcgccccccgcccccgcaggctcctcccgccccccggcgcatcacgcgggggtggcaaaggcggcctggccagcgcggagctcccggcccggagctgcttctgattaccgcgaggggcccggacgcgagagccgccgcggggcctgccctagaggcggagtgagtgagtcctggagcc

SEQ ID NO: 198061 - DNA, 169 bp, Homo sapiens
  chr2:8821592-8821761
  hyper
ctcacgctctccctccgatgggttgcagtgaactgtggcttcccccctgcggtgctgaactcgcccgtgtagctgtgattttagagctgccgacagctctaaggtgtgtagggcttggtctgggaacacccccagggcaagggtcccgccgcgcgcttggaattagaat

SEQ ID NO: 198062 - DNA, 709 bp, Homo sapiens
  chr2:8821976-8822685
  hyper
accccagctgggctcgcgccccgcccaccccgcggggattggctgcgaacgcggaagaaccaagcccacgccccgcgcccgcgcccaccaatggaagcgcccgctcgtcttgatagacgtgccaccttccgccaatggggacgaagggaagctccagcgtgtggccccggcgagtgcggataaaagccgccccgccgggctcgggcttcattctgagccgagcccggtgccaagcgcagctagctcagcaggcggcagcggcggcctgagcttcagggcagccagctccctcccggtctcgccttccctcgcggtcagcatgaaagccttcagtcccgtgaggtccgttaggaaaaacagcctgtcggaccacagcctgggcatctcccggagcaaaacccctgtggacgacccgatgagcctgctatacaacatgaacgactgctactccaagctcaaggagctggtgcccagcatcccccagaacaagaaggtgagcaagatggaaatcctgcagcacgtcatcgactacatcttggacctgcagatcgccctggactcgcatcccactattgtcagcctgcatcaccagagacccgggcagaaccaggcgtccaggacgccgctgaccaccctcaacacggatatcagcatcctgtccttgcaggtaagacctgctccggggtccccgccccgccgccgcacactc

SEQ ID NO: 198063 - DNA, 136 bp, Homo sapiens
  chr2:8823634-8823770
  hyper
taatgtttaatttgcgctgtcgaggcgagtgtgtgtgttgcatctggacgccagggtttgcccaatctttgagtgtttggttaaatgttcaaactgtggcttcctcccggcgccagtcgcccgcctctgcccttag

SEQ ID NO: 198064 - DNA, 208 bp, Homo sapiens
  chr2:8825635-8825843
  hyper
agggccgtaggggcgtcttccccgtcgcaggctacccgcggacctggcccccaggtccccgccacctgtcgccagccgcggccccggccgacctctgcgcggcggggagggaagcgcgctctggtcccaacccgacccccgcctcgcctccgggagaggcgcagacgccggccgcacgctcgccccccagccacggggacccgcgcgt

SEQ ID NO: 198065 - DNA, 31 bp, Homo sapiens
  chr2:9143113-9143144
  hyper
ccaaagtgcagtagcgcttaagcctctccgg

SEQ ID NO: 198066 - DNA, 210 bp, Homo sapiens
  chr2:9143658-9143868
  hyper
ctcggggtacctggtcgatgggcagctgcacggcgttgctgaggggctgcagcagggtggagcccgtggtgctggtggtggccatggccgggcctcggcgctccggccgcccgcgccgctcgcccgctcgcgctgtgccgggcgacgacgaggatggggatgcagcggcgcgcccgcccctgggccgcccgcggtcggagctctgcgcgg

SEQ ID NO: 198067 - DNA, 260 bp, Homo sapiens
  chr2:9144090-9144350
  hyper
ctgcgcgacccaatcgcggcgcgacgccctgacgcccgcagccaatcagagagcgccggccgcgccacgcccctcccccgtgccgaggacccgggcgagggcgccgaggcgcggcccgggccgtcgccggagaacggctggccagcgtcgtggggcgcgctcctcgggtgagagcatggaagagcgtctttgcccctcactcctcggtttctcctccctggaatgtcgcggccccccacccctctctgggagagacggca

SEQ ID NO: 198068 - DNA, 1192 bp, Homo sapiens
  chr2:9346368-9347560
  hyper
tgtctcctaggcctgcgacgatgcaatgactgcacgcaaagcgcacattcacggtcaggtcacttctggcgtccggctgtggtccccgcagggtgcccgccggcggagcgcatcctccggcagggggcgagctccgcaccccgctttcctcatgggccggcgcggcccgccgttcaagtggggagcccagaggtgctccgcgccgtgggcggggggcggttggcgcgcacaaggccggactccggcggggcgcacctccacacgcaccctcgcgggcagcgggtcggagtcggggcctcgggccggctgggggcggggcatgggcgcggcgcgcggggcccggaacgccgagacaatgcggcgcgcggcggccaggaacggctcggcgggccggggcgcgcgccgccttccttcctgcgggatccgcttcccggcggcgcggcagcggcgagcgcgccgattggcggcccggtcctcccgccgccccgccccacgcccggccggccgccgcccccggcccggacccgcccctctccgcgggaggcgtcggggcccgcggctgggtggcgggtagttcccgccggctgtgcgcgcccgcctcggggctcgctctgagaggacgcggcggcagcggactcggagccctcggcgcgcaggcgggcggaccggccgagctgcgcggggctgcgcgccgcccctgctccgccgccaggccccgcgcggctcccgcgcccggcgctcccctttgtccgcgggccggagcggcggcggcagcggcggtgtccgagcggcggtcggagcctgctgcggcagttgaggcggcggcgcccctgcggctgtgcgccagcgccctcgcgccgaggcgatgccggaccagatctccgtgtcggaattcgtggccgagacccatgaggactacaaggcgcccacggcctccagcttcaccacccgcacggcgcagtgccggaacactgtggcggccatcgaggaggtgaggcggcctgcgcggcggctccggccgcaggtatcccgcgccccagccccgcccgccgctcccgcatccgcatcccgagaaaactttctttgctccgaagccggacgcggccgggccaaccctgcccgagacagaagccctttgttcccgcctaggtggctcggaggagatgggtgatggccaccttgggcctcttta

SEQ ID NO: 198069 - DNA, 316 bp, Homo sapiens
  chr2:9347677-9347993
  hyper
cccgccgccgcccgccgccgcccggggtctttggtacccggtgcggaccttatcaacttgttcttgaagtggaccggcgggggcagctccgcgctccgagctccccgccgcagcccccgagcgccgcagggcccccaccctcgggtccgcgggtccggggcatcccgggctgcccgggaaggcgtgcccgcctcagccagggcggcctggctgcgctccacccgtgcccggagaaggaactgcgggcaaggtgtgtgagagtcggcgcttctgggtccaagaagcctccaggagccgctccccggttacctgggtc

SEQ ID NO: 198070 - DNA, 279 bp, Homo sapiens
  chr2:10092190-10092469
  hyper
ccctgtcctcggggaaactcgacaccggaggggccaccctcctcccctcctccgcggccaggttgggtcccctcgggcgcgcaccttggggtccgggcccccggcgcggtcgggtgcggcgcgaggtcggggcgcagccaacgcccccgggcctccccgcccccctctcctgcccggtcggcctcgggagcctggtggggctcgcgccgcgtcgggacaggtggacttctccaggtaatctgtggtctcaggctcgtcactcggcgacctgctggaacc

SEQ ID NO: 198071 - DNA, 33 bp, Homo sapiens
  chr2:10151842-10151875
  hyper
gtacaggcgggtcaggtggacaggcgtgcgtac

SEQ ID NO: 198072 - DNA, 180 bp, Homo sapiens
  chr2:10152415-10152595
  hyper
ggtgtgcgtatgagtgtgcgtatgggcgagtcaggtgggcagacgtgcatatgagtgtgcatatgggtgattcaggtggacacgcgtgggtatgggtggctcacgtggacaggcgtgcgtgtcagcgtgtcacgtggacaggcgtgtgtgtgggcgggtcaggtgggcaggcgtgtgtat

SEQ ID NO: 198073 - DNA, 199 bp, Homo sapiens
  chr2:10183604-10183803
  hyper
cggtgtattttggttcgcctccgcgccccgccccgccagccgctccctccgcggccgccccgcccctcccgcgccgcgagggccgcgccggggcagagccgcgcgggcgggcgaggcgcgtgccggccgcaggagctccgggttgccgccgccgccgccgcccgcagcccacgtgcggccgctgctgcgcccgagctca

SEQ ID NO: 198074 - DNA, 453 bp, Homo sapiens; identical to SEQ ID NO: 37134
  chr2:10183814-10184267
  hyper

SEQ ID NO: 198075 - DNA, 73 bp, Homo sapiens
  chr2:10220687-10220760
  hyper
cccactcccgcccacgggtcccctcgctccccgccgtcgggtcagccctgtcccggccttctggaattgctga

SEQ ID NO: 198076 - DNA, 217 bp, Homo sapiens
  chr2:10443618-10443835
  hyper
gtgagcagctgtgcgcagagcggggtggcggggtgggtgtgggtggtccagccccacgcccagagccccctgtccctgctggtcggcgcagtgcgtagcttaggagcctcgaggacagctgggacccgacgggcaagggcgggcctcgcgggcaggctgggcagccctcagggaacaggtccgtgcggcccacgtgggtcgcctgtgagcttctgcc

SEQ ID NO: 198077 - DNA, 198 bp, Homo sapiens
  chr2:10588856-10589054
  hyper
acagctgtgcttccacctggcgttcagtacctcgtgcccgagagcggaaaagggaaatcgcgagcggaggaccgatgtgctggccacgtgggccccgccgggccgactccggaccctgctgccgcccattcctccggtgcaagggacctggaagtgatcccggtgccgctctgctcccaccagctagggagcagaggc

SEQ ID NO: 198078 - DNA, 117 bp, Homo sapiens
  chr2:10589055-10589172
  hyper
cgggagggaaggggcgtcccgggggtcgccagcacgctgcgggcagggctggcagccgcctccacgcccccgcgctggaagcctcgtctttgtaacatcgaggtatcctgtaactag

SEQ ID NO: 198079 - DNA, 218 bp, Homo sapiens
  chr2:10589298-10589516
  hyper
agtaactaggtatctttaagggcggctccctggcgcgctctgagagttacggaagtcccaaaatgctttgaccgaaaacgtctaaacagtgaatacataaagcaaaaagccgcgtgggaaattcgagtccctaggagcgcccaggggacgcctctggaggtggactgccactcactccaggccacgctggaatgcccgcaccagggaggcactgcact

SEQ ID NO: 198080 - DNA, 120 bp, Homo sapiens
  chr2:11052132-11052252
  hyper
cggcgtgggtccgccagctccgggacctgccgccgctgcctgcgcgccccggggcggaggacggtgccagccgcccacgaggagaccccgctcccgcaggaggccgagctgaagcggcgg

SEQ ID NO: 198081 - DNA, 33 bp, Homo sapiens
  chr2:11621413-11621446
  hyper
tttcatgatgagaaaaggaaaatgagggtgctg

SEQ ID NO: 198082 - DNA, 73 bp, Homo sapiens
  chr2:12856408-12856481
  hyper
gatcgggggcaagcggtgacaccaactaaaaggaagcaatggatttccttttaaatggagaggaggatgtcgg

SEQ ID NO: 198083 - DNA, 864 bp, Homo sapiens
  chr2:12856549-12857413
  hyper
cagagctcctcattcagggccacatctgagcctgggggcccaatgctcagagcgtgcctggctttctggggaaaagcgccaggaacatgaacgagctacgaagagctggagcgggcgctgcgggagcagcgtgtggggaacggctcgggagtcgctgctggtaaccccggcccagccgcccgcagctgggctcgcagccggctcgcagccgacacccagggtgctgcgcccggggccccgggccgcggaaggatatttcactttgtttacctccccggccgggcgagggagctgcgaggccggtgctggcgcccccggcacggagctgcaatggcagcggcgcggggagccgcccgaggactggcagcggcggggctgattgatgggcgcccggcgcaatgaggggggcccgggcgggggcggggcggggccggctctgggctgagccagtcgcgggggcggcggggggggggcggaggctccgtggaaatgtgtcggtgacattgaatggggagaccgagcgcgagcgaggcgcgcgcgcgcacacgcgcactcacggccccgctcgctccgagatccccggccacgtaagtaactattaataccgcctcgccgggggatgcgggcgtgctgagcgcggggattggcctcgggcaccgtcggccgtcccctttaatttttaaatacacggtcccctcttttctctggggggggcaagcaagaaatcaaagaaggaggagacaagccgtcaattttctccaaaacaaaccccaccgggcaatttggtctcggggtagggggagacggggtgattgcaaattattccaggacgagatccagttctccagcgggaaaggggcaaag

SEQ ID NO: 198084 - DNA, 102 bp, Homo sapiens
  chr2:12858042-12858144
  hyper
gaagccggcctgggggtcgcgtcgggagccctggcgctgcagctccgcaccttagcagcccgggtactcatccagatccacgccggggacacacacacagag

SEQ ID NO: 198085 - DNA, 195 bp, Homo sapiens
  chr2:14772370-14772565
  hyper
gcccagacgcccgcctcgggcaatgtcgctgcctgccccgggccgctcgcagtgcctgggccatactggggtgccctggggtttcttctccatacccagactcagcttccccgctggagtctgtcttcctggaacacggaacgcgggcgggctgtgttctcagtcacaatcagctcggatgagctggggggcgcg

SEQ ID NO: 198086 - DNA, 98 bp, Homo sapiens
  chr2:14773809-14773907
  hyper
ttttcttctgggagttggaccgagttcccggaaggggtcggaggctgtgtggtggcgtctgctctcgcctgacctgtggcggcttctccgcccctcgt

SEQ ID NO: 198087 - DNA, 239 bp, Homo sapiens
  chr2:14774042-14774281
  hyper
tctctgcctctctgtgcctccgcagatccccgctcctggccctcgcctcgccacctcattgatgggcaaccaactggaccgcatcacccacctcaactacagcgagttgcccacaggggacccgtcggggattgaaaaggacgaactgcgggtcggggttgcctacttcttctcggatgatgaggaagacctggacgaacgcgggcagcccgacaagtttggcgtgaaggcccccccgg

SEQ ID NO: 198088 - DNA, 255 bp, Homo sapiens
  chr2:14774684-14774939
  hyper
gaacgcctgcggccacctgggcctcaagagcgaggagatctgctggacgaactcggagagcttcgccgcctggtgccgctttggcaagcgggagttcaaggcgggaggggaggtgccggcaggcacgcagcccccgcagcagcagtactatctcaaggtgcacctgggagagaacaaggtccacaccgccaggtttcacagcctggaagacctcatccgcgagaagcgccgtatcgacgccagcggccgcctgcg

SEQ ID NO: 198089 - DNA, 239 bp, Homo sapiens
  chr2:14775287-14775526
  hyper
ggctgaggggagaaaggacatggccttccccgcgagtccatggccagtgactgtggcccgactcgaaaacaaccctcttctcaaaagggaccatcaccgccccgagcgtgcgcacacagaccggtcggaggcgagaactggtctctacagggcacagttcagctcctctgtggatgcgtccccagatcgcaggatttccaagaaatcgagcctgtcccttgtgcacttgggaataattc

SEQ ID NO: 198090 - DNA, 231 bp, Homo sapiens
  chr2:16079905-16080136
  hyper
gacctgcggagtggccgcactccaggtccgcgccaaggccgggcagctccgctttctgctcagtctccgcgaggtgtcgccttcggccgaagaaaccaccgcggcgccaccctcgtagctcgcacttatttatttatttattttcaaacaaggggggcgcccctcttctttcaatttgaaactggaaacatccagaggtcttgttcctaagggggcgcgtcctctccctgc

SEQ ID NO: 198091 - DNA, 87 bp, Homo sapiens; identical to SEQ ID NO: 105506
  chr2:16080304-16080391
  hyper

SEQ ID NO: 198092 - DNA, 332 bp, Homo sapiens
  chr2:16790148-16790480
  hyper
gctgggtcctgaactgctgctgcgatgggatcattcacatggctattaatcatacaagagcccatttatgacaaacgcaggtcactccctttgcatgacaaggcacatgggtccacagagccccattatccaaaaaaaaacacagagcattgtgggcgatgcaggcgaaggcgagtgcacacacacaagcggacattgtaaggctgtttgcacaaccccgccgtgctcctcgcggatttcctgccaaggagacatttagatctcacagaggcggctgcagacatttgctcattcaacatggcttcaggcagtggctgcggaaacccggtgca

SEQ ID NO: 198093 - DNA, 360 bp, Homo sapiens
  chr2:17699582-17699942
  hyper
tgctactaggtggttgggaatccgggtcctcaggaggcgttaaagaggaggtaggctttctgagctcggccatccgcggcgtgggctgagggagagacatgacagcgaatggaaaggatctgtccgagtcccggcggggctccaatcccttaataggcggttccgggccgctctggtcacgcccctgacccgcccctcaagacctggccttagcctaatctcagggtttgccccaccccgaatccgcccctccacagccccagcctcagccccgccccgcctccctcagtccctcctctccctgcccccacccacgcgccccggttgtctcaccactgaaggtcggagcaccctgggccg

SEQ ID NO: 198094 - DNA, 173 bp, Homo sapiens
  chr2:17721349-17721522
  hyper
ggtgctgcaggacccggctcccagtactcctagcagaagaccctctgatgaaatggcccatgacaaaatgaccaccataaccgttccttcagtaagccaggtagacgtgctcacagcttgctgggaagtcttctttcggagatttctgcagttttctccttcaccttacagcc

SEQ ID NO: 198095 - DNA, 247 bp, Homo sapiens
  chr2:17721867-17722114
  hyper
ggaagagaggaaaggggagggggtgcctggagaggcggaggctcgcgcgcctgcgcatccagctccagggaccctaggttttctatgggattcccaatctgcagcagagatttacccgagcgtgttgcggcagcggctgggcttgcaaggcgcgatccaagagggatttaagcagcccagagctccagagaaaaagagagcgagagagaaccacacacagagacggcttaagcgtttacccgaatta

SEQ ID NO: 198096 - DNA, 193 bp, Homo sapiens
  chr2:18741865-18742058
  hyper
tccacgggagttccgcagccgccgccttaccggaacccaagagaccacctgtacgcggagaacgctggggcgcggcgggtcggcccctgacggtgcgcgtggggcatgctgggacttgtagtttccctctgggggggtcgcctgattggttgtgagagttcagcgccctgggtcctgcgccctccgtggaagc

SEQ ID NO: 198097 - DNA, 137 bp, Homo sapiens
  chr2:19550409-19550546
  hyper
ctggagctggggggagccccgccttgccccaaggagaagagccccggcggcctggcttctaactgtgggaaaactagacaccccagggaaggttcagcttatggaaggcggactcgaatttttcctcctaagcgtcc

SEQ ID NO: 198098 - DNA, 83 bp, Homo sapiens
  chr2:19550611-19550694
  hyper
cgggtgcagagcctcgatcctaggaggggacaagtcccaagcagagaattgtgtctgagggaccctaagggagggagtgatgt

SEQ ID NO: 198099 - DNA, 191 bp, Homo sapiens
  chr2:19558190-19558381
  hyper
cgcccctggagctctagtgtcccgactcctctcctgccgcggggactccaagcgccggacacgcgggagcgagcgctcagcagccccggatcctgcacgccggggacggtgagcctcgctcgcggctccctcgctgggtctgaaccaggagcagctgagaacgtgccggggagaggccgagctccgactca

SEQ ID NO: 198100 - DNA, 162 bp, Homo sapiens
  chr2:19561707-19561869
  hyper
tcggagtgaaaattgagcagcttccagaaaattaactagaatgtggtctatattgctttgagttgttttggattcaaaaaaaaatgaaccccacctctccgcaccccatagcctaaaaaaaaaaaaaaaagtcctcattttttcaaatgaagtttgctcagc

SEQ ID NO: 198101 - DNA, 65 bp, Homo sapiens
  chr2:19563433-19563498
  hyper
ggctttctgaagaagcgcgggaagaagagagagagtctgtttccgtgaatcgatttccctgaaac

SEQ ID NO: 198102 - DNA, 119 bp, Homo sapiens
  chr2:20101402-20101521
  hyper
cccaaacaaccccaacgtcgcctccacccggggtcgccgcggccccaggtctcgcgatagttacctcccgggactctcgtcgctggaggccgcgcaagcgcaccggcgaatgtaagcgg

SEQ ID NO: 198103 - DNA, 42 bp, Homo sapiens
  chr2:20190155-20190197
  hyper
cacctgtgatgatcgctatggagccgcgcctcaggtggcatt

SEQ ID NO: 198104 - DNA, 282 bp, Homo sapiens
  chr2:20212119-20212401
  hyper
ggcttctcctcgttcgatgctcacgcgtccctcccgccgcccgcctgtacctgcaccgcgggcgcggccaggctcgctggtcccggaagcgggcgcgccgtcgggagccgcaggagaggggcggcgtccagggctgcccccgggacctcgggtctccagcctccggaagcccgggcgggccacggggtcgggggcggcggagggcagcagcagcagcggccagagcagcaggaggagtcccgggaggcggcgcgcgggggccgggcgcggcatggtgggctc

SEQ ID NO: 198105 - DNA, 219 bp, Homo sapiens
  chr2:20424156-20424375
  hyper
ggtctgcagggggggcgttgtggccgcggtcactgcatccccccgggtcaccgacgggggcccggccgccgcggtggccggggcgaggagggtgggaacgggcgaccccgggcgccgctgtgggctggcgggctccgacagatgtggagacgttttacataattgagcgcggggccccggccccccaccctccccagcgcgggaccggtgcggcaccca

SEQ ID NO: 198106 - DNA, 458 bp, Homo sapiens
  chr2:20424435-20424893
  hyper
gctgggctagcgcgggaagaagggaagtcttcgctccccctccccctccacgtgcacccgccggcatccgcgggtgaccagtcccggcttcccgccgcctccccgcctggccgccggccgcactcaccggcagggccggctgcaggctcagcgccagcgcgcacagccagagccagagcgccgcgcgcctcatgctgcccggaccggcggcgggagagcggcaggctgcgcgggtcgcggctgcgggccggcttcgcgggttccgctgctcgatgctctcttgggcgcctgcccagcgcgccgctgtcccaggcgagggctgcagggtccgccggctggagtccgctctctactgccggattcctctccgctcggctcggattcggcccgcacctctcccgccgagctccgccttataataaacccacaggcccttccttagccgttgcaaaaactgg

SEQ ID NO: 198107 - DNA, 220 bp, Homo sapiens
  chr2:20425530-20425750
  hyper
ggagttcgcagcgtttttctgtggaagacaacgccctctctcttcatctgagctaaaaggaaaaataagtaacttctttgttccccggtgacctcgggcacgcggatctgaggagcaccgtgcagttgctgctccttcgagatcccctgcgaggccctgggcctcagttcaaaaagctgtggaaggcctgcgggtgtaggggaaacggccgagagagcaa

SEQ ID NO: 198108 - DNA, 361 bp, Homo sapiens
  chr2:20646413-20646774
  hyper
cctcccccacaggcccgaccacccgccgggagtttgccaggaagaggggcaattctgaatgggagtcgccaacgccccactgagtgaagcctgtctcggaaccgctcgcccagaccctggaggctccagacagccagctcccggaccccgcgcgcaaacgctgcggcgaaggaggggacccgggtaccgccagagccccgcagcggcagcagcagcgcggactccccggtcgctgcctctcccagcccggcggcctgggccgtcaatcaagctggccctgccccgccctcgggctgcagggggcggccaatcagagctaagctccgcagcgatgagctcagccggctggtttcccattgga

SEQ ID NO: 198109 - DNA, 423 bp, Homo sapiens
  chr2:20646843-20647266
  hyper
cgcagtctggttggagctgttgtcttgtatgctcagcgaggcccggagagacccgggagagagctaggccgagtccaccgcccgagtctgctgcccgagcccgcgttacgcacaaagccgccgatccccggcctggggtgagcagagcgaccaccgcccgggagcagcgcggcgagacgcacggtgcgccctatgcccccgcgcccccaccgcccccgccgcggcagccgaagcgcagcgagagaacgcgccaccgcggggcccgggtgcagctagcgaccctctcgccacctgcgcgcagcccgaggtgagcagtgagcggcgagcgggagggcagcgaggcgttcgcgggccccctcctgctgcccgggcccggcccgctcatggcggccatccgcaagaagctggtggtggtgggcgacg

SEQ ID NO: 198110 - DNA, 262 bp, Homo sapiens
  chr2:20647309-20647571
  hyper
cgagttccccgaggtgtacgtgcccaccgtcttcgagaactatgtggccgacattgaggtggacggcaagcaggtggagctggcgctgtgggacacggcgggccaggaggactacgaccgcctgcggccgctctcctacccggacaccgacgtcattctcatgtgcttctcggtggacagcccggactcgctggagaacatccccgagaagtgggtccccgaggtgaagcacttctgtcccaatgtgcccatcatcctggtg

SEQ ID NO: 198111 - DNA, 449 bp, Homo sapiens
  chr2:20866660-20867109
  hyper
gatggagggggtgtcgcactgccgcggggaggcgtgtcgggaggctggggccagtggcagtcgcttggcgagggtgggggcgtagcgctgcggtgggaggaggcggctccggccctggtctccactctaggccggggtggggggcgcatagcggccgccggagctttcagcagggggcgctgctccgggcgttgggcgggggtggggtgggccaggagggggggccgcgggctggccgcgcacacttcccccattattaaacactatgttcaaaaggcgccgggggacttcccggagccacggagcccgcgccgcccgcccgcccggcccacggagcccatggacctgagcgccgccgccgcgctgtgcctttggctgctgagcgcctgccgcccccgcgacgggctggaagcggccgccgtgctgcgagcggcgggggctgggccggt

SEQ ID NO: 198112 - DNA, 161 bp, Homo sapiens
  chr2:20867313-20867474
  hyper
cggggcagccgctgtctccgcctcgggccatggtcgcgcggacacgatcaccggcttcacagaccaggcgacccaaggtacttacgcctcttctgtgcccgcccatcccgtcaggtcctgggctgagaccagccccggagccgtgccgcagctccgttaca

SEQ ID NO: 198113 - DNA, 508 bp, Homo sapiens
  chr2:21022199-21022707
  hyper
gccaggactatcaactcttgtgtttggtacacaggacacaaagcaggtgtccggtaactacttgcgagggaagatacgaattaaccaaggaataaagtgttccaatctgcattctgtcttgcgtggggaacaaaaccaaactaagacccaaggatgagggtttacggttaaggtcttcagcgtgaataaaaggcggcgtgagcactaaacgccgggggcaaagaacactcccggcccagagtttgacccctcctagcgagttcttcccggccagctgcccaactttttggcctctactcctccgcgggggcaccataagactccctacaggtgggctacacttaggggttcaaatgctgcattaccgcgctcgggtgagcgactgcccggcctgcaactcaagggactcccaggccaagtggctccgaactcgcgagctgtcggaacagtattatttttgctgctacgggccatctggcccagggcaacaggggctctgcgaggaacc

SEQ ID NO: 198114 - DNA, 31 bp, Homo sapiens
  chr2:23608444-23608475
  hyper
cggcggaggaggaggaggaacgaggggagaa

SEQ ID NO: 198115 - DNA, 249 bp, Homo sapiens
  chr2:23609647-23609896
  hyper
cgcggggctgggagccggggtaggtcggaggtggctcttagggcaggtcgcctctgcgttgcctggggaaggcggggacgcgctgcctgcctgcggccagccgtctcggaggagggggtggcggccacgcgcgagtctcggatgcctgggtccacccgctgagaagccagttgtcgtccctgggctgtggaaccaagcggcagacgcggtccgttggcgggccctcgcgcgggcccccagagatgctga

SEQ ID NO: 198116 - DNA, 218 bp, Homo sapiens
  chr2:23610070-23610288
  hyper
gctgctgctgcctgcgaaacttccacttcggcagctcagcggcatcccggcccgctgctgcaggttccagcctctctccagtccagcaacgctgggattcggactcctcttgcaatgacagatctgtcctggttacggctgtatttatactagtttcagtctctttaaagtcatctgtctagtcactacagagtttcttcctcgccgtgtggtcttat

SEQ ID NO: 198117 - DNA, 453 bp, Homo sapiens
  chr2:24299777-24300230
  hyper
ggcccaggtgagtagcgggcgaaggcggggcctgaggaggactgagctggggcgggacccaggtgagtagcggaagggatcggggcctgaggagggtggtggaggtgcggcggggcccagaagtgtagcaggaggtggttggggctgaggaaagtggtggaggtggggcggggctcagatgtgtagcgggaggtggtggggcctgaggagggcggcgagaggtggggtggggcccaggtgagtagcgggcagggctggggcctgctgtggtgcccactggttgcggggcgcgcgggcaggtgccggaggtggtgggcctgggcctctagctgtgcgcaaggcggaatatgtggggttctggcggcttgtgtcacggctgacgctgtaactatacccagaatctccgtccctggaggggccctcaggttgagcgtcagctgatcgggcctcagt

SEQ ID NO: 198118 - DNA, 33 bp, Homo sapiens
  chr2:24307619-24307652
  hyper
ccatgcaccaggcggcgccgagtggttctggct

SEQ ID NO: 198119 - DNA, 204 bp, Homo sapiens; identical to SEQ ID NO: 1365
  chr2:25142479-25142683
  hyper

SEQ ID NO: 198120 - DNA, 79 bp, Homo sapiens
  chr2:25265055-25265134
  hyper
cgcccgggcccctgtcggccgccgccagtccccgccccgactgtgaatgaaaggcgggcgccgccgagggctggctggg

SEQ ID NO: 198121 - DNA, 120 bp, Homo sapiens
  chr2:25440006-25440126
  hyper
atagaaaaaaaaaagataattgcaccttccaaggaaaaggtaatactggaactgtccaggataaggaaatggattaaataaatcatggaatatttctgggtgaagtagtatgcagtcatt

SEQ ID NO: 198122 - DNA, 149 bp, Homo sapiens
  chr2:25457152-25457301
  hyper
cacacgcaaaatactccttcagcggagcgaagaggtggcggatgactggcacgctccatgaccggcccagcagtctctgcctcgccaagcggctcatgttggagacgtcagtatagtggactgggaaaccaaataccctgggggagaaa

SEQ ID NO: 198123 - DNA, 139 bp, Homo sapiens
  chr2:25458563-25458702
  hyper
caacccgggtacctttccatttcagtgcaccataagatgtcctctttctcattcatgaagacaggaaaatgctggtctttgccctgctttatggagtttgacctcgtagtaatggtcctcactttgctgaactagatga

SEQ ID NO: 198124 - DNA, 95 bp, Homo sapiens
  chr2:25459791-25459886
  hyper
cgctggagctgaccttggctatcctgccatgctccagacactcctgcagctccagcttatcattcacagtggatgccaacggcctaggaggcaga

SEQ ID NO: 198125 - DNA, 108 bp, Homo sapiens
  chr2:25461984-25462092
  hyper
gagctttcaccaacctgttcataccgggaaggttaccccagaagtagcgggccctgtgtgcagctgacacttctttggcatcaatcatcacagggttggactacaaaa

SEQ ID NO: 198126 - DNA, 448 bp, Homo sapiens
  chr2:25463164-25463612
  hyper
ctatacctcgagaaatcgcgagatgtccctcttgtcactaacgcccatggccaccacattctcaaagagccagaagaaggggcgatcatctccctccttgggccgcgcatcatgcaggaggcggtagaactcaaagaagagccggccagtgccctctgagaggtcggaagagaaagccatcagctggggctgtctgcataggacagtggtgtggctcgggcacggggagggcacgggaagacagggtcatcgggaatagctgtcccagggcagaaatatccaaggaggaagcctatgtgcggaagcaccagctgagaaggtggaggggacaggatggtacctaccgtagaggcccttgcgagcagggttgacgatggagaggtcattgcagggactgcccccaatcaccagatcgaatgggccccactcctggatctgggaggataaa

SEQ ID NO: 198127 - DNA, 172 bp, Homo sapiens
  chr2:25464417-25464589
  hyper
agcatggacatacatgcttctgtgtgacgctgcggacgtccccgacgtacatgatcttcccctggtgccgcaccatgcccaccgtgatggagtcctcacacacctccgaggcaatgtagcggtccacctgaatgcccaagtccttcagcaccaggagccctgcaccagccag

SEQ ID NO: 198128 - DNA, 774 bp, Homo sapiens
  chr2:25466755-25467529
  hyper
gcacccctcacctgtagcgattccatcaaagagagacagcacccggatgggcttcctcttctcagctgggacaggtgggtaaacctttggagggtcctaagcagtgagcacaacaggtcagatgcaggcccagcggtgtcccaagctcccacccagcgctggccctccagccaggctcctagacccacacaccctgcgcacagctcaggccccacaaccaaggctcagccaagggagctcgagaccgcgccccaggcccagcactcacaaattcctggtcgtggttattagcgaagaacatctggagccgggagggccagtcctctcgccgccgcagcagcccgtaggtacccttgtgcccgcacatgtagcagttccaggggtcttccttaatggctgcctgggcagcccccggccccaccaagaggtccacacactccacgcaaaagcacctggaaggagacccagtgagcagaggagactctcagccctggtccggggaggccaaggtgtgctacctggaatggaaagaccgggtctggagcatggctagggggtggagggtctgtggggaagggagaggaggggaggcggtgggcggcgggagcctggggcccagctaaggagaccactggaggccacaacagcctcacctgcagcagttgttgtttccgcacatgagcacctcacggcccccacagcagatggtgcagtaggactggtagccgtcgtcgtcgtactggtacgcacactccagaaagcagttctagacag

SEQ ID NO: 198129 - DNA, 98 bp, Homo sapiens
  chr2:25468111-25468209
  hyper
gtgctcctaccttgcagttttggcacattcctccaacgaagagggggtgttccagggtaacattgaggctcccacaggagatgcagatgtctggaaag

SEQ ID NO: 198130 - DNA, 310 bp, Homo sapiens
  chr2:25468877-25469187
  hyper
aacaaacttaccctcaatgttccggcacttctgccgcacctcgtacaccagccgctctgcaaggggaggagagctggcgtcagaggaggccgcgcctgctcctcggatgcaggcctcctggtgccaccctctccagaagcaggccaactacctcttgtgcgctcatcaataatctccttgaccttgggcttctccgctgtgctcttccggggctttttggctggtggaggtggtgcgtaggcagctgcctcaggttccacccacatgtccgtgtacacttctttgtagggattcttctcttctggaggag

SEQ ID NO: 198131 - DNA, 173 bp, Homo sapiens
  chr2:25469474-25469647
  hyper
gtgccctcatttaccttctggtggctccaggcccttagggccagaaggctggaagccccccagggcccattcaatcatgggcttgttctgcacctccacggccttggcagtgtcactctcatcgctgtcgtggcacaccgggaacagcttccccgcgcggctgctggccacct

SEQ ID NO: 198132 - DNA, 123 bp, Homo sapiens
  chr2:25469906-25470029
  hyper
cagggacactcacctgcaggacctcgtagatggctttgcggtacatgggctgcttgttgtacgtggcctggtggaacgcactgcaaaacgagctcagcggcatcagcttctcaacacacacct

SEQ ID NO: 198133 - DNA, 162 bp, Homo sapiens
  chr2:25470449-25470611
  hyper
cacaacttaccactgagaatttgccgtctccgaaccacatgacccagcgggtgccttcagctgctcggctccggcccgtcatccaccaagacacaatgcggcctggccaccaggagaagccccgcagtttcccccacaccagctccccaatgccaaagcccc

SEQ ID NO: 198134 - DNA, 192 bp, Homo sapiens
  chr2:25470892-25471084
  hyper
agaagccgctcacctcgtactctggctcgtcatcgcctgctttggtggcattcttgtccccagcatcggaccccacgggctcaggcgtggtagccacagtgggggatgcggggtcagtgggctgctgcacagcaggagggctggcctcctccaccttctgagactccccgggcccctggttttcttccacag

SEQ ID NO: 198135 - DNA, 90 bp, Homo sapiens
  chr2:25497816-25497906
  hyper
ttccagcgtgccagccactcgtcccgcttgcgcttgctgatgtagtaggggtcccccgcctggaaggtgagcctcggcatgggccgctga

SEQ ID NO: 198136 - DNA, 237 bp, Homo sapiens
  chr2:25505304-25505541
  hyper
ctcacccgcttctgcaggggctcctcggccctccttgggggtgcagcagccattttccactgctcttgaggcttcaggcagggtctcagctgcaccctctccctctgctggggccccgcccttctgccccccagcagggctcccctcctctggctggggctcactccgcttctccaagtccccattgggtaatagctctgaggcgcctgagtcctgggccatggatggggacttgga

SEQ ID NO: 198137 - DNA, 79 bp, Homo sapiens
  chr2:26521880-26521959
  hyper
cgatgaggagtcctggggtaggggaggtgtgtgaaagtgtgtgaaagagatggtctcgggagaggccaacgcggggagt

SEQ ID NO: 198138 - DNA, 376 bp, Homo sapiens
  chr2:26522127-26522503
  hyper
taggacccagtctggtggacccgagagtaaaagtgagagtgaaagtgcgccgcaagggaggaaatgggaggaaaagcgtcgaaaccaactcctttggagtgcatgataaaaaaatttttaaaaaggatttagaggtgattatgggatgaaactggatgctcaaaatttaaggacatactgtgaattagaatagccctcttttagtgttggacgactggccgaaggcactacagagaaattggccgtgtgttttaaggtggtgactagggttggaggaccaccagggcattcagacctagtctttgtattgattcatggctaaatgaatgcagccctgcctagcagtttattgtagaacgctcgcagctcatggcga

SEQ ID NO: 198139 - DNA, 278 bp, Homo sapiens
  chr2:27274194-27274472
  hyper
gagggattcccggcgcagtgggctacgtgtttcattttagagacacaagactgttaagcgataaggagtttcacacgatgtctttttatttcgcagttgagtcccagtttctgccgctttatctttcccgcctcccggcaggcaggccgttaaccgtcttccggaagacgctgctagaaccctccggccgctcctgcccgccatcgtccccgaacgacactcgctcaggtacccactaacgtgcgaggaaccctgagagctgaccaatggtagcgagc

SEQ ID NO: 198140 - DNA, 250 bp, Homo sapiens
  chr2:27308893-27309143
  hyper
cgcccgacgtgtctacgtcggctgaagagacagcgggggcggcgggctcctggggtctcgcctgagacggggcacctagccctgggcgagcgccgcacccgggcccgcagcggcaccgcgcccagagcggcctctccccacgcccggggcgcgccggctcagggaggctcggggccgcccatgcagacttttggcctggcgcgatcccccaagaacccctccagggccggcctgcggaggagccgatcct

SEQ ID NO: 198141 - DNA, 111 bp, Homo sapiens; identical to SEQ ID NO: 1396
  chr2:27309206-27309317
  hyper

SEQ ID NO: 198142 - DNA, 90 bp, Homo sapiens
  chr2:27473358-27473448
  hyper
ccttggccttcgcctcttaaacgtggtgcaggactcaccctgggccacccccaggtgggcagccttgggagaagggcaggacctgcccat

SEQ ID NO: 198143 - DNA, 195 bp, Homo sapiens
  chr2:27806146-27806341
  hyper
ctgtccctttttctttacccacgttctgctgcctgttccccacctccttggatttaattcctcgccacattaccattagtttctattccttttacatccccaatgtctctcatatccgttgtcttttcttttggcctcccttttagagcctgggacagggctttgagaatgggggaagacgaaggctctggtatt

SEQ ID NO: 198144 - DNA, 197 bp, Homo sapiens
  chr2:28113199-28113396
  hyper
cagacgccgccatcgctcaaaggtgctgctgtccaacctggacggtgacctctgccctttgcccgaccccgtaaccagagacgccactcctgccctccctaacgacgcgggcctttcagacgcctacgcgggtcgcccacctgactgcccgaaatcaccccgcccaccaagtgtcccctcttcttcctggaatagtc

SEQ ID NO: 198145 - DNA, 71 bp, Homo sapiens
  chr2:29033265-29033336
  hyper
cccttctcacaagaagccaccgtattcacacgttgtgcttttctcagttcaagcggcctcttccttttgag

SEQ ID NO: 198146 - DNA, 41 bp, Homo sapiens
  chr2:29337889-29337930
  hyper
gatatgaactaattgctcaacgtgggtgtagcacggattag

SEQ ID NO: 198147 - DNA, 71 bp, Homo sapiens
  chr2:30142811-30142882
  hyper
tgactaaaaacactaaatcccggcacactcaggcgggagctgctcaccagtcccgaagatctggaagagaa

SEQ ID NO: 198148 - DNA, 82 bp, Homo sapiens
  chr2:30142977-30143059
  hyper
ccttcgccttggcgaatccaccaactgaacagctcgctgagattgaactggagcagccccacagccgcctccccggggggcc

SEQ ID NO: 198149 - DNA, 139 bp, Homo sapiens
  chr2:30143137-30143276
  hyper
cgcccttcagcaccctggacagcgtccgggcctctgccggggctggtgaaccggcggtccaggagacccccggcgccggccccagcaacctgagcagcggggcgcagtccagagctagcgagccgcgggcctcgggcct

SEQ ID NO: 198150 - DNA, 206 bp, Homo sapiens
  chr2:30143712-30143918
  hyper
atgaaacagacctggaagctcaggggcgagtccagagacactcaagcacactgggctcactggctgggaccttgagcctcccgctctccgcgccgagtgccgcgcccccgtctgtagctcgctgcgctcggtacagaggaactactatggttgaagggaggtggcagttgggtaccgtcctctcctgccccccgcagtcggagctg

SEQ ID NO: 198151 - DNA, 135 bp, Homo sapiens
  chr2:30144693-30144828
  hyper
ctgttccctctccagtctcttgttcttcccctcctctagattccctgccctatttctctgcagtgtgaaagggagcaaatgtgagaactggaagaggcctttgcaatcaagcactctccctaattatacatttaa

SEQ ID NO: 198152 - DNA, 180 bp, Homo sapiens
  chr2:30369411-30369591
  hyper
ttcgcctttaagaagctgactcacgtggatgctgtgttgtgtgcgctcagctgaaagggggaggtgggtccccagactgactacattggccgcctcgagagaaggggcagagttagcctctttgattggctgtacgagtccgaggtgctgggtcaggggcggggcgagctgtcgcaagcc

SEQ ID NO: 198153 - DNA, 47 bp, Homo sapiens
  chr2:30453520-30453567
  hyper
gtgtgggaggcgttcggctaaagctctttgtttctgctgtcatgagc

SEQ ID NO: 198154 - DNA, 68 bp, Homo sapiens
  chr2:31361021-31361089
  hyper
gggcaggagtcctggcgagcgcctcgctctggggagctctagacccaggatccggttggaggggcggc

SEQ ID NO: 198155 - DNA, 178 bp, Homo sapiens
  chr2:31361118-31361296
  hyper
gaagagaagcgagcctgggtggggggtgcagggcgacccgaaacgtggcagggaaggaccgagggcagccaagctggacgcccgctccagcgggagaagcgcggtggctgccgagatgttccccacgccgccaccgcggctgccgccgccgccgccgccgccttgcccgctgccgccg

SEQ ID NO: 198156 - DNA, 84 bp, Homo sapiens
  chr2:31361690-31361774
  hyper
gcgctgaagccggggtcccacccccaatgtgctcgtcctaccacagccaaggctgggattccagggcgccggcagggctgctgc

SEQ ID NO: 198157 - DNA, 105 bp, Homo sapiens
  chr2:31457427-31457532
  hyper
tcttcccctgaggaggagtcttcccctggggctgcgtgccgggggcgagcggcggccgcgatgttcagctggctgggtacggacgaccgccggaggaaggacccc

SEQ ID NO: 198158 - DNA, 205 bp, Homo sapiens
  chr2:32236057-32236262
  hyper
cctacccgccgaggaatctcaacgtgcacgctccgctctccggggtttagcggcagcagaggctgggaggtgggggcagggcgcggggagcaggacgcagccgcaaggcaagccccctcccccagccaacttcctcaaatggagagcacctagggctcgcggatgcggctttccacgaggacagtcccgcgggtatccatcatat

SEQ ID NO: 198159 - DNA, 334 bp, Homo sapiens
  chr2:32264664-32264998
  hyper
ggcgcgggagcaccacgagcagtagagcagcagagtgggacagtccacgactgggcgcctacatggggtctggaaactctacgacagtcccaagtacctagaataagtgagaaagtgggggaaagggagctgattacccgcgcccaagccgttcgttcttaagagccctgcaccgcgccaccagctcccagcacaaacagctccggccgtaagtgacggctgtcgcacgactgccgcgcctgcgcagaacctcccggcggacaagaagctgggaggcgcgcagaaccatcgtcagtccccgaggctctctgcagtccgcgtgagtcctggccaa

SEQ ID NO: 198160 - DNA, 139 bp, Homo sapiens
  chr2:33171660-33171799
  hyper
atctgaattcaaccccgcagcaagtatcacagcaaacacggataagaaaatgccggggcttccaaacaatatcaaacgcatggggcttctgaaaggacaggatcgttcagtaactttgctgagcgctttgtcctctccc

SEQ ID NO: 198161 - DNA, 142 bp, Homo sapiens
  chr2:33172105-33172247
  hyper
ggaccctcaccttgcgcggcccgctcccctcgcccctccccgctccccgggctccgcgctccccacccccacgccctcctcctgctcccagccacaatcggccggggtctggggccgctcagctgcccgcagagcctcctcc

SEQ ID NO: 198162 - DNA, 752 bp, Homo sapiens
  chr2:37898934-37899686
  hyper
ggggccaaccggtggccgggcgcgcgcgcgggggggggtcaccgttggaccctcggaggacaatgggcgcccattgttacctccccagcgccaccccccagtaggcgacttctctcggagaagatgccgctttcgactccctaagcacaaagaaaggtcgccggacgctcggtttaaagagggacccggaggtgctgccgcccgggtgcacggggacaataggactccgcccgcaccccggactcccgcactaaaactcgtgcgcccacctctcccgatcccaacaggccgacctagctgtgcgagtggcgggcggtgacccgcagggaagcgaggccacctgagtgcgccgccccggccaggccgcagctccccaggtccctctcagcccgggctccggtgggcgcggagggggagggtcgcgttctgtcagtttctagctcgctcccctcagagctgcagccaaaacccggagagtggaataagcgccctgaagatgccggagctcccggctgagcaactggacacgcgacgaacagcagacgctacaggttctcctacccagagggaggcgtttcttctccctcagggtctttcaaaaggatttgcctaaagctggggcaagccggtggcggctgccccagacgcgcgacgaggcgcaagtggcgcagctgccggcccgagagagtaaaattcaggccgcggtggcacctgcgcccgccggtcacccggccaccgccagcgccgccgcc

SEQ ID NO: 198163 - DNA, 203 bp, Homo sapiens
  chr2:37899746-37899949
  hyper
tcttaatcggcctccgtctcttcctcctccgcgagtcgtcggcctggggaaggagtaggcgacaggaaagggcggtgttttccggctgggaggtcccagcccgcatggtcagccaggggagggggctgggacccctgggagtcggacgctgggggcctggcctctgccctgagactctcgggttggatggaaatcctggcaca

SEQ ID NO: 198164 - DNA, 81 bp, Homo sapiens
  chr2:37899997-37900078
  hyper
tcaggtcatcaccgcggtgccctgggtctgtctgaaaccttagagggtgcgccttaagccgatgttgtaaacccaggctga

SEQ ID NO: 198165 - DNA, 149 bp, Homo sapiens
  chr2:38303709-38303858
  hyper
gtttaaattttatcttaggttctcgcaaacaaattgccacctcagtggaggctctttggcatgctaaattttttccagttcttgcggcgagatcaggaatccctaaaagtagccgctcccccgccccggggccccgacagtgcttgggc

SEQ ID NO: 198166 - DNA, 161 bp, Homo sapiens
  chr2:38342433-38342594
  hyper
catcctgcaaccacggttaaaaatcactactattcacttcttaccatttgatctgttgacagtttcagccatcagtcactgccggctcccacttcatttagttaccatgtccctcactaacacaagatcgccgtctaggggccaatcgtagaactacaggc

SEQ ID NO: 198167 - DNA, 88 bp, Homo sapiens
  chr2:42274456-42274544
  hyper
gcctagagctcctgtcccacgcgcgctcgcaggtgctggcccggctgtgcccgcttccccctcaccatcgccccaatccggaatccgg

SEQ ID NO: 198168 - DNA, 365 bp, Homo sapiens
  chr2:42274691-42275056
  hyper
gtcccctccggagcccgctacccgccggcctcgcccctttatctttcccccactccgcccggccggctccgttatccacctcccaatcccgttatccggccgccccggccccgttatccgccctcgcgttgggcgcggagcccccgcgcgcctcctggccgccgccgccccctcccccgctcccagacggagctcgggggaccgcgggctgggcgggaccgcgggctgggcaggaccggagccgcctccgcgccgcttcccaggcccggacggccgcgggaggaggtcccgctgtcagtcagcggggaaggccgggccgggcggccggagggggcggcgccgaggacgggctcgggccgggagct

SEQ ID NO: 198169 - DNA, 660 bp, Homo sapiens
  chr2:42275116-42275776
  hyper
gggcggctctgggccttataagcggcgggggcagggcggcagggaggcaagtgtcaggccgatgtgtcgcccgcgaggggccggggtcggggccgccggggccatgcgcgcgggctgggcagggggccggcggggcgcagagcggagccgcctcggagcctgagccgcccggggccggggccggggagccgcgcggggccggccggccggggggaggggagcgatgcggcgccggcgggcggcagtggccgcgggtttctgcgcctccttcctgctgggctccgtcctcaacgtgctcttcgctccgggctcggagcctccgaggccaggccagtcccctgagccttcgccggccccgggtccgggccgtcgcgggggccgcggggagctggcccggcagatccgggcgcgctacgaggaggtgcagcgctattcccgcgggggccccgggcccggggcgggccggccggagcggcggcgcctgatggacctggctccgggcgggcccggcctgccgcgcccccggcccccttgggcccggcccctgtccgacggcgccccaggctggcccccggctcccggcccaggctcccccggcccgggcccgcgcctgggctgcgccgcgcttcgcaacgtgtccggcgcgcagtacatgggctc

SEQ ID NO: 198170 - DNA, 47 bp, Homo sapiens
  chr2:42329271-42329318
  hyper
ttttttttaaatgatgtcatcgcagtctgagagcagccagacacgta

SEQ ID NO: 198171 - DNA, 82 bp, Homo sapiens
  chr2:42720180-42720262
  hyper
agccagcgcctggagggagccgcctcggccccgccggggcgcgcctcgtcgcggcccagcacgcccggctcgtcggccgagt

SEQ ID NO: 198172 - DNA, 153 bp, Homo sapiens
  chr2:42721246-42721399
  hyper
cccgcccgcgcccgcacctccccggcttgctcgggctgggattcccgggcgccccgccctggacctcgggctccccgcctcgtgacgccgtcctccccctccgctccggcccgtagtggcggggaggggtccgcagggcgggggagcggggag

SEQ ID NO: 198173 - DNA, 59 bp, Homo sapiens
  chr2:43019539-43019598
  hyper
gatggaggagggggaggaggcgagggcagggggcggccatgggggtgctggactcacat

SEQ ID NO: 198174 - DNA, 84 bp, Homo sapiens; identical to SEQ ID NO: 105792
  chr2:43020503-43020587
  hyper

SEQ ID NO: 198175 - DNA, 287 bp, Homo sapiens
  chr2:43445793-43446080
  hyper
cctgcagacagccagcggcaccaaggcctgtccttggcaggtgtgcccagcaacagaggtgagtctggggtccctgcaaggcaggggcccactgaccaccctcccacccagccctgcccggcctgctgccctgcaggaagcggatgccagcctggcggtcatttccgggttttgaaagcagtttttaaacttgaaagagccatgctaaaaaggtctgcttttcctccgtaggtgttggtaacacccacatacagacacacccacatgcacaccgcagcagacacatc

SEQ ID NO: 198176 - DNA, 81 bp, Homo sapiens
  chr2:43446676-43446757
  hyper
aggacgcagaaacacgtactaatacacttcccatacaggcgcacccctcaggcctccacacacgtgcacggcatgcatgcg

SEQ ID NO: 198177 - DNA, 620 bp, Homo sapiens
  chr2:43446817-43447437
  hyper
caaaacccatcaggagaggttgggccctggaggtgctgtggcttcctgctgccccgctccctcccgcctcctccctgcagggctcctcctggggaggcctgtccagctgccaggccccgccccgccacagcccccgctgtcctcctccctccctcagccgtgccagcagcggcacagaactggaattgccctggacggccacagctctgcatatcccccaggagtgtggacaagaaaaaataaacacaattagagttcacgacaatgggcccctgatggaaggtaagcccggctagcctctaagggctgtgccggctcccacgaacttccaaggccgaggacggtgccgagacccaacttccggtctcaagaaaacttggtgagagtcacatccgccctcacttgtcaccacaagcaaaactgaaggagagcgggtgtttggggacggttcctttccgaggttcagtgctctctagcgggcttcctccctgcacatggccaccctggcgtttttctgagcgcccccaggcaggttttagcaccgagcattctagtgccgggccaggctggcggccaagagctaggcctgcttgtttttcctgcgtcgggcccaccaggcc

SEQ ID NO: 198178 - DNA, 416 bp, Homo sapiens
  chr2:43452443-43452859
  hyper
tgccgctctcctcgaagggccggcacagctcggtcttgtagcgcgtggagttgatctgggagccgccgccccccttctgctgctgctgcaggtgcaggaggtgctggctgcgatcgccgttctcgctaaacgagcggtcccggaatttgttctccttgttgagcagggctgtgccgccgccccccgacggctccttaagggtgccgtaggaggtcggaccgccggccgccgcgctgccgcagctgctgccgttagcggcgcccgggaacttgggcgagcagctgccggggctgggcgcggggtgggcgagtgcatgcaggttgctggccgagtgccgtcggaggaatcccggcgcgaagcccgagctgggggcggcggccacaggcgtccccaccgccttcttgtccagcatgttg

SEQ ID NO: 198179 - DNA, 433 bp, Homo sapiens
  chr2:43822951-43823384
  hyper
cgccgaatcctggcgataccaaaggatgggaattggtgtggctcgccaggcagccctagcaaaactggccgagccgagctaccgcgggtctggcaggcaggacacctgggagccaaacctcgtgcacgtcggcgtctgagaagagtcgcaggcgcctggtccagtcccggaagcaggtctccttctacggcgtctccgaggctcgcagcgcggtccacggtcgactaccgggtcagggcaaagggagggagagaggggtaacctggaggagtcatcgcgagaattgaccaaacgcagctcctccaatcaggagttcgaggaggtcgtgacgtcaccggggtggccggtagcaatccggtttagttaaccagccactgtaccgtcagcgccgcgcgttcctcatggcgttagggctgacgggccttgttgctga

SEQ ID NO: 198180 - DNA, 84 bp, Homo sapiens
  chr2:45157711-45157795
  hyper
agtcttgtggccctggcagaggtgacaagggcatttgggaaagacagagaaaaataaattcgctccagtgactgtacacggggc

SEQ ID NO: 198181 - DNA, 128 bp, Homo sapiens
  chr2:45161093-45161221
  hyper
cctcggggagcagcggcttttcaccctgctatagggaggtgcgtttggctgagctgtccccccaccaaataaagctaatgatgtagtaatttaggagggggagaggggctgggcaaaaggagagaggg

SEQ ID NO: 198182 - DNA, 245 bp, Homo sapiens
  chr2:45165156-45165401
  hyper
gagcaaggccaagtgggtgcagctgccccaaccctccggatcctcgtctcccggaggcctgcagacccgttggctttccctgtaacccaaaacaaggagagagtgggaggtctctcgggcgttctccagatgtggttgagactttcccagtgctggggtggcgggtgacatttgtaaataaatgccagttggtccgggtacaaggagaacactatttaaaccccaaagacatcttttctccctgc

SEQ ID NO: 198183 - DNA, 50 bp, Homo sapiens
  chr2:45177234-45177284
  hyper
cactgtgccgggcggggctcggcgggagcgggcaggaacagccaggctga

SEQ ID NO: 198184 - DNA, 95 bp, Homo sapiens
  chr2:45180203-45180298
  hyper
cccttctgggcgcgccatcgctcccgccacctgcactaggactttgcaggaacgcgcctcctacgcgctgcctaggaggaccagacgcgagacaa

SEQ ID NO: 198185 - DNA, 215 bp, Homo sapiens
  chr2:45182675-45182890
  hyper
gaaggctgcaggtcggatagctagattccatgatgcccccaagaagttgccagactccagtctgggagctctcaagagccagagacccagggaagtcccctctttggcctccgaggaccccgaagcctggcagcagtgctcagccttggaccccgcggttccgcggccggacgcccctcgcgctggctgtgcgcaccctggcgcaaagcactgca

SEQ ID NO: 198186 - DNA, 228 bp, Homo sapiens
  chr2:45396995-45397223
  hyper
gctgagggtcgcggttccaagggcggtctctcgccccgggtcaggccccaccccgcggtggcggtcgcgtggcgctgtcctggagttgagctgtccccgcgccgcggcccgcacgcccaggaccgcacaccgccgcccgcaggcagagacgcctgcaacctcgccctctcgcccggctcccagctcggggctgggaaccggaaaggtgcatttccgtgtggggtgggg

SEQ ID NO: 198187 - DNA, 559 bp, Homo sapiens
  chr2:46524134-46524693
  hyper
acgaggacaccgacgctgtggcgcaactgccgtcccccgcagcaatcccggagcccggctcccggccgcccctcggccctgcgcaggctgcctctccccgacgcggagtcccaccccgctacccgccgcccagacgacctcataaacaagtcctcgaagtgcggaggcaggaggcggggcgcagcgcgggggcaggaggcgggccagggtcagggcagaggctgcggccgcgcgtccccattggccgggacgcagtgagccgcccggagctcggcgcgggcggggcctgccggcgcgtgcccgcccacacacccgcgccggtgcccgccccccgccctccgcgcccgccccgtgcccgccccaagccggccgacggagtttttaaagtgggctgccggccgcgggagctttacactcgcgagcggaccgccacacgggtccggtgcccgctgcgcttccgccccagcgctcctgaggcggccgtacaatcctcggcagtgtcctgagactgtatggtcagctcagcccggcctccgactccttccgactcccagcattc

SEQ ID NO: 198188 - DNA, 755 bp, Homo sapiens
  chr2:46524957-46525712
  hyper
cgggccgcggggagcggacgagggccacagccccccacccgccagggagcccaggtgctcggcgtctgaacgtctcaaagggccacagcgacaatgacagctgacaaggagaagaaaaggtaagcgggcgtccgggccgatcagggggccggtccgaggccagggccgggctgcgcggggcaggcgcgaccgagagtggttgggagaagagtgctgagaggtcttcggagctcgaggctcggtttggagggctgtgagggggagagcatgtgcccggtttgggggcgcggatcagcagctttgcagtggagacttctgcggctcggaggagtcggggatttgcgcgcacggcgaggccaggaggccgagggagatggcctggaggtcggaggtgcttccgcggtgcctttgaaaatctcccagccgccccgcagcagattaccgtggccaccggcgcttggaaatgtttgtgggtgcatgtcctcgactttctctggtctctcattttggggcagcatccacgtctctatttttctctggattcgcggagtccttccaaatgcgctcctgtgcccgcgccgcggcccaagtgggcaaaggggggcgggaggcggagagcggctcagggacacgatcctaccgaggagccaggacccttcagagcgccccgctgccgggctccagaccccaccgaaggttggagaacccacttcctcgtgccgcaccttgactctggggagagtaggtagtgagtg

SEQ ID NO: 198189 - DNA, 245 bp, Homo sapiens
  chr2:46525757-46526002
  hyper
ggacggcaacactggatgtccctggcaggtccgggtgtctgtctccgaagaggacagagaagggcagccacgatctgcccgcctgccctcgcgagcctctcggcactgggtgagaggcaactctggccatttcttgctgccctctcgccctctcccggccgctcccagtccagccgggcccggcgctacccgagcgagggttcgagccctctgcgcggccgcgcagaagcaggcagggcctcaac

SEQ ID NO: 198190 - DNA, 63 bp, Homo sapiens
  chr2:46526239-46526302
  hyper
gtgactggccgggagggctcactgccgaggttgatttgctcttgttccaacttccactacggg

SEQ ID NO: 198191 - DNA, 75 bp, Homo sapiens
  chr2:46526448-46526523
  hyper
ttgggccctgctcccctttcctggccgtagtcccccctttctcgtcaccgtcgcgccctcagacccaagacaagt

SEQ ID NO: 198192 - DNA, 81 bp, Homo sapiens
  chr2:47167906-47167987
  hyper
tgcctggcccgcatcgcaacagggcggggcggacagcggcaggccagctcccgggaggctcgccgtcggggttggggcctg

SEQ ID NO: 198193 - DNA, 451 bp, Homo sapiens
  chr2:47499382-47499833
  hyper
ccctcacccccggccaccaccctccccgactgaccacacctggaagggaaggaagggtgggggtggcctgcagagggtgtggcgagatctggacggcctgggggcgggggactaagttgaccggaaatggggctaggccgcggccagggacggcagcagatgatggttgaggagtggcctaggaaggcctccctgacggcgcccacacacgccccgcggcaccgcgaacacggctgacagggcagttgggcagcgaggtagtcgggaaagagcagggggagcccagcggctccgttgcgccctctgtcggccgccagcctccattgcacgcggcgccgcccacctgcgcactgggaccccggccctgggccgaccaggaaccccttgcgcccgcgccagctcgagccctgttgcacctgtcgtggtcaccgcaagcctctctgggagaagg

SEQ ID NO: 198194 - DNA, 329 bp, Homo sapiens
  chr2:47596115-47596444
  hyper
tcttcaaggcttcagagcagcgctcctccggttaaaaggaagtctcagcacagaatcttcaaacctcctcggaggccaccaaagatccctaacgccgccatggagacgaagcacctggggcggggcggagcggggcgcgcgggcccacacctgtggagagggccgcgccccaactgcagcgccggggctgggggaggggagcctactcactcccccaactcccgggcggtgactcatcaacgagcaccagcggccagaggtgagcagtcccgggaaggggccgagaggcggggccgccaggtcgggcaggtgtgcgctccgccccgccg

SEQ ID NO: 198195 - DNA, 60 bp, Homo sapiens
  chr2:47596505-47596565
  hyper
cgtcgctgtcctcccgacgcggacccgcgtgccccaggcctcgcgctgcccggccggctc

SEQ ID NO: 198196 - DNA, 55 bp, Homo sapiens
  chr2:47596794-47596849
  hyper
gaaacgggcataatagggaggggaccaagaggccgcgctttccagcgtggagacc

SEQ ID NO: 198197 - DNA, 41 bp, Homo sapiens; identical to SEQ ID NO: 37435
  chr2:47596941-47596982
  hyper

SEQ ID NO: 198198 - DNA, 79 bp, Homo sapiens
  chr2:47747971-47748050
  hyper
tgactgagagaagcaaaccacgcccggcggccccgcggcctggagagggtccccggcgcgggcggacgggcggtctacc

SEQ ID NO: 198199 - DNA, 78 bp, Homo sapiens
  chr2:47748523-47748601
  hyper
ttccggtaggcggcgtgctggctgctcaccaggtccccgaagccgatggtgctgaaggtgacgaagcagaagtagagc

SEQ ID NO: 198200 - DNA, 192 bp, Homo sapiens
  chr2:48009756-48009948
  hyper
atcttgagaatacaacgtgaaggtgaactgctgactaaagtttggtccctttcgctccgtctccttgcgaaaatgctctaacggcaggaggtcacgcgagcgctggacgcgtttctccccgcgagcccctttccgaggcctttcgggtccccccggttatccccgcccgggcggtgcgcgcccccgctgttc

SEQ ID NO: 198201 - DNA, 35 bp, Homo sapiens
  chr2:48011383-48011418
  hyper
aggctgcacgtgcaccgagacgaagatagaatatt

SEQ ID NO: 198202 - DNA, 133 bp, Homo sapiens
  chr2:50573244-50573377
  hyper
taattaagggaaggcgtgggggcaaaagtaattggcctcctgttgagtgagtcccaggactgcttcgctgtcactgcagtctgggcgcactttggaggaatgtgcgggctggaatctctccctccccgccccc

SEQ ID NO: 198203 - DNA, 168 bp, Homo sapiens
  chr2:50573879-50574047
  hyper
aatgatgcttgctgctgccatggaaatggtggatgtggtgcgctcccaaactggatgccccccacgccactcctaggaggccgctgagggtgagcgggactatccaaagcagggccaggcgcccccctgcgccgccgccgccgccgccgccgccgccgcccccgggcg

SEQ ID NO: 198204 - DNA, 251 bp, Homo sapiens
  chr2:50629607-50629858
  hyper
atagaatgtgggggcgggaaacaacccttgaaacggtaatcagcaagtaaagctgaattcctatgccatagtgtcccctgctggtcgattacggaagtagtagctttcggagagcaagtcaaacctcttggttaggccatatcatgttttgaacaaaaaaggcacaaaaacgaaaggaatgtgtgcatattgttttttgtctatttctttttacatagtcatcattggcagtgggacgaatgggggaagga

SEQ ID NO: 198205 - DNA, 235 bp, Homo sapiens
  chr2:51259566-51259801
  hyper
ggagcctgatcctgggggcggggaccttccgcaagcgcttctaacttgtcaccaccctctcttccccatcggaaagaaagaaagagagagagagagagagagagagagagagagagagagagagaacgaacgaacacgaaccagagaaccacgtagcctactgagcatgcccaggcccctgctagacccatggaaagctgtatggagattccacttctccggggtttggtagtga

SEQ ID NO: 198206 - DNA, 41 bp, Homo sapiens
  chr2:54682463-54682504
  hyper
aaaaatttgaggaaacgtccagtttccgtttcagggaatgc

SEQ ID NO: 198207 - DNA, 448 bp, Homo sapiens
  chr2:54784958-54785406
  hyper
cgaacttacacctcccctggctgtggcgctgcacagcgccctgagagtgactttgtctgacttcttcccggtggctcgccgggccgccgccgcgtggttggcgccagcgcactggggcagtcgcgcgcgcccaggtgcgggccgcgttacctcagcagacgctagagagtgaatgagccgcgcgggcccgggacccttggggctcttcactctccaggccgtcccgtgggcgcgctagccttttcaagtgatagtaatcggagacttttccgttacatgaggctcaacaaaagattgtaattccagcagctctgtttgggaaggcactaccgcggcgagtccagggcccggccgggggtcggcggctgccgggcggctggggcgaccgcggaccgtgcgggaccggtagggggtcgcgggccggctaggctcccccgcgcccctcctc

SEQ ID NO: 198208 - DNA, 713 bp, Homo sapiens
  chr2:54785407-54786120
  hyper
tggtatagcctgcatttctaatacaatgctgttatgctaatcaggtgacatcaccgcccagcacacggcgagtggctcctgataaaattacaaaccggcggccgccgcgggcagctgggaggaggtgtgcgcgctgcgcccgcgagctcccgggctcggcaaccgtggcatgcttaggattggccatatttaaaagttctgaagtagaacctgcgcctcctctctgcttctccctcctcctcagtaatttatttcgagcttccaggcaagggccacggaagaagggaaagcaagaaattagatgcctgtgtggtaactcctcgcggagctaaggtggactctcttgcagccaacttcccatcagatcaccctgctggacttgcagaccggaatggggctcgcctaaggagccgagcgctgcggaggctgctgcgtgttggatgggagtgggagggggctggagcgagatttccagggcgcagtcctccggggcgttacgccgggcataatggaattgcagaggacgtctagtatctccgggccgctgtcgccggcgtacacggggcaggtgccttacaactacaaccagctggaaggcagattcaagcagctgcaaggtaagccccctcccaaaggccgggcctgtcctgggtgccaacgggggttcttggaggctttatttgtgaccctaatgaagacgggcggcttcacag

SEQ ID NO: 198209 - DNA, 94 bp, Homo sapiens
  chr2:54951619-54951713
  hyper
cttggattgggtgacttatgcgaaaaatctgtttctttcttcctcgctctcgcttcctggatatagactgtcaatttcggatccaaagacggcg

SEQ ID NO: 198210 - DNA, 283 bp, Homo sapiens
  chr2:54951795-54952078
  hyper
ccgcaaacttcagtgagcgaactgggtgatcgctgttgggatatgcagattcctgatgtaaaaggcggggtggcccccccgagagcctctcccgggggccggagcccgcaggtgcagtgaggcgcgcgcgccggtgccggcgcccccagagccgccttgcccgggtagagggagcccggcgcccggcggggtctggcggccgcacaccggcggcggcggcttgtctgcggcggctgcagcggatgatggtggcggccggcccgctgggctgtgcctgtgtgtc

SEQ ID NO: 198211 - DNA, 217 bp, Homo sapiens
  chr2:55496288-55496505
  hyper
cccacttaactcctacctacagccccgggcccctggattctgagcacgggcggagatcaccttctggacccggaagaatggtcggtaggtcagtccgtccccgctacggtccccgccgggcttccggtcccgctggaaaaggttctttccggaattcagagagttgctgtcgccgctgggggtgggactgtctgcggtgtccgcggcgggcgtccag

SEQ ID NO: 198212 - DNA, 581 bp, Homo sapiens
  chr2:55509213-55509794
  hyper
atcagggagggctgtgagatcgcaggcgccgccccgcagcgaggcgcctgttgagagctcccgcaggccttcgcaagccggagccctcagcggacgatgttcagggactagcgggcgaggcgctcagacagggcggacccgccttcaccaggcaccagcactacgctgccggcgtcggccgagatccctctgggcagttccgcctcaggcttcggtctgcgcagccgcgggaagccgtgccgtttttccgcccatcgccacgatagcggctccacggcgggcgcggagttgggagcggcgctcgagcagcggctcggtgccctggccatccacactgaggtcgtggagcaccccgaggtgaggcccctagaagcgaccgccgagacaggcccagcggggtgggctgtgctgcacgtccgtcgggcgaggccgctgagatcaggtgtcccagggtcaatgtaccgtgagaacgtcgctcctggaatatttccccggtctcaaaatacgaaagtgaccctgcagggacagcagaggacttccatcttgggaccatgaggttactgcacggaaatctttactct

SEQ ID NO: 198213 - DNA, 529 bp, Homo sapiens
  chr2:55646458-55646987
  hyper
taccgggcgaggaggggcagagaaaaggcatctggaggaggaggaagggaaagggggctggaacccaagacaaaaagcccgtcaaggttgtccagctcctggaggatccagaccagcgaaactgctcccaatgaatcaatcccaacgggggctaaatgaaatacgttaaacagagaccacgttaaggataccgaggcgccaccagactcgacctcggcgttccgacctctacacgttccacccaccgatgggcatggagccgctttcgacccgcggagcctccactgcccgcagcccctcagtaccaacaggcagggctcgccccttccccccgagcagacaccattcctccgccgccctcaagcctcgcctccagcccccttcccctcccgggggtgggggcttgaatgtgtgtccctaaccccccagcttcctaagccctgccagcctttcagcgcgtctctgggaatccctggcacaaaatcaccgccgcgctccagccttctccgccctctatggagaagccgga

SEQ ID NO: 198214 - DNA, 80 bp, Homo sapiens
  chr2:56149729-56149809
  hyper
ctccccctcctgaaccttctcggtagccaacgaacgaggcagcaaagacgtaaaaactgctgtagaattgcatttcacgt

SEQ ID NO: 198215 - DNA, 89 bp, Homo sapiens
  chr2:56150447-56150536
  hyper
gtcccctttcttaacagcaagctaacgcggcggtcccctggagctgctcagcgtcccagcttctaaccagctcctatggaatccaggtg

SEQ ID NO: 198216 - DNA, 193 bp, Homo sapiens
  chr2:56412856-56413049
  hyper
tccttggagagcgccgggtctgcgaggagtgtgcctgcccagctgcagtacactagtggccgggaaccgccctgctggcgagcaccacaaacttcctctccttccagctagcgctggtgcctcctggtattccttcctctcattgttctgctttgtttgtaggaagccagacacaaacgaaatcactgcaggg

SEQ ID NO: 198217 - DNA, 160 bp, Homo sapiens
  chr2:58273538-58273698
  hyper
atagttagttgctcggcgagagctcggtaaggactagccatttggaagctcgtagtactcaggttgtggtacaggagatctaacactcctacacaaatgcatgtcgtgcttatttcgtaccaaactggtctggcggcggttcttcgtccagacgctggcg

SEQ ID NO: 198218 - DNA, 206 bp, Homo sapiens
  chr2:58274333-58274539
  hyper
gtaggtccccggcgtgctaagggcggacggaccaggcggctgggccgcgctgcttctcgttaccttccgcagggtcaggggccgcggcggggttggaggtcagcccaggcacatgttaacccctgggtaccagtttgctcggaaactcgtgttgaggactcatcttagccctgggaaggtacccagaagccgaagggacacccctg

SEQ ID NO: 198219 - DNA, 33 bp, Homo sapiens
  chr2:58655395-58655428
  hyper
taaataaaagagagcgcgaggggggaaggggag

SEQ ID NO: 198220 - DNA, 101 bp, Homo sapiens
  chr2:58776940-58777041
  hyper
aaaaaaaaaaaagaaattaacattagggataataaatagatcaatatactagggttaatggaagggacttcatggaaaagaaaggacgtaaatagggcctt

SEQ ID NO: 198221 - DNA, 70 bp, Homo sapiens
  chr2:60780329-60780399
  hyper
tactattattgggttacttacgcgagaattcccgtttgcttaagtgctggggtttgccttgcttgcggcg

SEQ ID NO: 198222 - DNA, 545 bp, Homo sapiens
  chr2:60783807-60784352
  hyper
gcagcgacgattccccgacatatatttaatttcaccatcataatatgcccagggtgaaatgggaagtgccctccgctcccgcccctcccccagccagatttcacccagtccagaaaaccacggctgtgtgtcggcatttgatccctcctggtcgtcgacccccctccccggcccctggtgccctcccctagggcgacaacccctccctcagcactgctggatgctcgctaaagagcccgaaagtgggggaggggagggtttgtatgtgtgtttaaagaaagatgtgtcgttttaagagattttaaaatattacgtaagtattgattaatgatgcaggtggttttgtagagggggtgaaaggtcactttaaatgcgcacacttggatacacaataagtatatttacctttccagaagtggcttttagaaagtaataaattatgacaacgttaaaattattttctggccgttcagttaacttcgtttggggctgtagagctgttgctgctcccattgaaagggtaattacgttccgtgggctctttc

SEQ ID NO: 198223 - DNA, 394 bp, Homo sapiens
  chr2:60784505-60784899
  hyper
agtcctagtttatgctttataatgtgttgacaagttttctaacagactttctgaaataatgcacatatattcacgtcggttagaaacccaccgtatttttagagttgagtagatctataccctaatgcagtgagagagtgtaaatcatacaggatttcatagtcctttcagtagttttcggtatgaagtatgagccgcgtggcctccagacgtaaccttttagaaaaaaaaaaagacagtgcttttattttatggtgtaaagtgcttttagctcaagggctctgaacgtgaatgtggtcaacaaacagctcgaagagggagacttaatacagtcccagccctcggaccgaggatcgcctggcgcgaggaactcgggctgagctggaagatgaag

SEQ ID NO: 198224 - DNA, 240 bp, Homo sapiens
  chr2:61109279-61109519
  hyper
ctcattaaaaatgtatatgtattgaagatggtggttttatgttttagaacaggaatgaggaaccttcagacctcgggcaagctctctccccctttttagtttaatttcatcaaatgcaaagaggtgatcccccttgtactgacagttgtacaaaatgtgtcacggctttaaaaatcatccgtggtattttaacacgaattagaaaatccgtggtattttaagtgttaatgttgcttcgac

SEQ ID NO: 198225 - DNA, 77 bp, Homo sapiens
  chr2:61109819-61109896
  hyper
aaaaaaaaatgtagtttttactgtgagataaagctcaaggttcctaatctgacgaatagagacgttgaatccccctt

SEQ ID NO: 198226 - DNA, 137 bp, Homo sapiens
  chr2:61110113-61110250
  hyper
aaggttgagggggacgggagagccggggcggggggataaatcaagtagcctggggtcgagttggtcttttaccaggattttggcaaggtgagtgggggacactttccagacagaggaagcagcgtgagcaaaggcag

SEQ ID NO: 198227 - DNA, 438 bp, Homo sapiens
  chr2:61175661-61176099
  hyper
gagtttgcgtgttttagggagaaccacatacctactgtcaggggtgggttgttttggtttttttttggtgaaggaaaagggttatacaaaaggatatgtctggaaaagttatgaatacatcttgtttagggtgacatttcaatataataattacaaatcgatgtgcataataaaccgggacctttcaatgtttgttagcccagcttgcaactaataataccgcatgtctttttacatttcagattttttagggacacaggcttgtttttctcacaattcgttagagattttcttttatgtcacaagataaaaattaagaaatagaggttaacgctgtaaaaggtcaactaattccaagttttaaaaattgggcgtaatcagaaattcagattcataagaactgaatcctcttcattttcttgtcggaacaactcttcc

SEQ ID NO: 198228 - DNA, 401 bp, Homo sapiens
  chr2:61991002-61991403
  hyper
cttcccacagctctccgaggagcccagctaccggaaacacgccacatcaggcctcggaattctgggcatcggacggacagctcgtgacctcagaaggaggaaaacggtcaccttctgaaagaaacacgaactcctctttcctgtatcagaacatttctcattcacctgagcgcggcgtttctatcctgagatgttgggaggaggttcgaggtgggcggggtgacggttttctcttggaaatgaaaaacagcctttcctgctacccctgcccgctcacacaggcgagacttggagtctgccccgcggaaagccgtttctatgggtgacgacgtatggcaacgcgtctaagggaacgtcggcgagtcgactattgtgttcccaaagtcgccctgaaatgagga

SEQ ID NO: 198229 - DNA, 323 bp, Homo sapiens
  chr2:61991463-61991786
  hyper
cgcaacgatgggcgggacggggcagaagtgtgggcgagctggggcgtcaccgcgcgccgggtagtctctctcacgccctggcgggtgcgcaggtctctaaactgggcggagcaagggaagtgatgtgtggcctccggaaggacgcgcgtaaatcctcacccataagtaacgagtcgccgtggtcaaacaaggccctcctacgataccaatcgcgtggcgggtgtggtactgccgaacccgaggaatgagaaaggaggcccggcagaaagttcggatcagctgccggccgttcccggcgtagcctagggcggggagggattgac

SEQ ID NO: 198230 - DNA, 211 bp, Homo sapiens
  chr2:62422788-62422999
  hyper
tggagggggcggccggggtcggtctagttccggttacaaactggacagaaaaggccactggagtctcgctaggcgatgcgcctagtcccctagcctcagacgaaccgcaagaggggccacccacaactggaggggcggaggctggagctgagtttcattagtgtttttggagctgccaggcatttccaggggggtcgccttcctagaggcc

SEQ ID NO: 198231 - DNA, 221 bp, Homo sapiens
  chr2:62424205-62424426
  hyper
caggctgctagcccgagtcgtgggggtggggtggggcggggtggggtgggtgctgccaggccagggagcgcctgaagccggactctacgagacacccctcgtgggaaggtgggcgtggggggccctgccggggctgcgggcgcgggactggcggctactccagcacggcaggcggacccttctggaggcaataaaccgagtcacccggttaatttccaggc

SEQ ID NO: 198232 - DNA, 637 bp, Homo sapiens
  chr2:62732953-62733590
  hyper
cgcggagaccaggcccggccgggggcgggaggccgccagcgcctcagctccctgtccggcccggcccctcctccaaggcgctctcccgcactgcggagaactggctgaaggcgacatcgccattttaggtacgggcaaattctggacgctccaaaatccacgccaagccctcggcaggccacaccccctgcaccgggcctcggtcactcacccggaccctcattggactctggaccggtccgattggaatcactgaacacggcccggctgaagtttcccagccgctggcgcaccggatccggcagctccatgcctgggcctcagtatccctcaccccctcagacacgggctagtctgcgggcgctccgaggctccgtggttcccacggcaaccgggcggcgcgaggccggcgggacccgggagcgcgcggggctgcccggctgggctgggtctcgtccggagcccgcgcaacctggaagggaccggcgcgctcagagcgcgttccaggcccagggagccgcgcgcctcggccgtgtacaaaacggcagatcccttagttctgctttgagctcgaccatcctaaaaacaaacctatactaagaaatgagctggggttggactgcgatacaaggagccc

SEQ ID NO: 198233 - DNA, 154 bp, Homo sapiens
  chr2:62798173-62798327
  hyper
agtgaaaaatcttgtccttgcgactggtaggtacagtcgctgtcaacccacagttctcccaaaaggcgaggtccttccttcggctcagcctgctccctctctcctcgcctccccatctctaggacgcgggaggtgggagccactgcgctcccgg

SEQ ID NO: 198234 - DNA, 83 bp, Homo sapiens
  chr2:62798526-62798609
  hyper
ctagccagtctctttacttggcggcaggtggtgtgggggtgcgaaggaaggggagatgcggcgaaatcaaagtactttttgta

SEQ ID NO: 198235 - DNA, 272 bp, Homo sapiens
  chr2:63276492-63276764
  hyper
gcagttaaggaaacagtgtgccctccatcatattctgttaccgtattttattcggactccaaaggaaagtgtcgcttgggggagggggaagcactttgatgagcggcggccgcggccccttttcactcagcgggctcccccttcgttctcctcctcctcacccagcgcccggtccgctctcggcgcccgaccccgcagcccgggcagcgcgagtgctccccactgcgatgcgcctggaggctccttgacttgccctcacacttaatcctgtg

SEQ ID NO: 198236 - DNA, 218 bp, Homo sapiens
  chr2:63277124-63277342
  hyper
agcgaaaaagaaactttcctatcaaaatgtttcaattaagaagtagggtgtacgtgtgaggggaagaggacgctgggctccaacgtttcagtagaagcgcttaagacttgcaaacacccttggtggggacctggaaccccgggagatgccgacgagcaagcaggtaagtggcggcgccctcccagtgggtgctcttcccaggcgcgagagtccggagg

SEQ ID NO: 198237 - DNA, 211 bp, Homo sapiens
  chr2:63278422-63278633
  hyper
atggtgaacggccccggcagctgagggcaggtaaggagaaagccgcggggccaccccggactccgggagcgcgttggttacccttatctccccctcctcaaatggatcccggcttccccggtccccagcaggtggtcggggctgtgggagcggcctggctcccctcttggtgagccgaggaccccggggcgctgtcgcggcccgcagcccc

SEQ ID NO: 198238 - DNA, 75 bp, Homo sapiens
  chr2:63287368-63287443
  hyper
ccttgtattctctgcttatactgtaggggcaaaaaagtctactcttagacaaacgtgtgtgaagtgctttaaggg

SEQ ID NO: 198239 - DNA, 335 bp, Homo sapiens
  chr2:63815746-63816081
  hyper
gtgggggtgatgtcgctaaggggtgattctcccctccctagagttacacacgctatctctcccgccaattgccgggctccatcaggcaggtcctttcctcctgagcccaaaccatccgtttgttgtcgtcctccaatcacaggggctcatcctcagggactactttgcaatcggcgcagagcgcagtgagaagagcttgaaaaaaacctctggtatcgggaagtgtagttcaacacttgaaggaaatgctttggagattgcgccacaaccagggcagcgtaaactacagttcccagagagcgccgcgtcgggagcggagccttttctcgctaaca

SEQ ID NO: 198240 - DNA, 94 bp, Homo sapiens
  chr2:64455371-64455465
  hyper
ttcaaaagcaagcccgtacaaagcccggctccttccttccttctaactccctatcaggaagctccttcgcccctcaaatcccttcaggggcttt

SEQ ID NO: 198241 - DNA, 34 bp, Homo sapiens
  chr2:64455661-64455695
  hyper
tctgtgggaggggttctaccgagacgaatggact

SEQ ID NO: 198242 - DNA, 395 bp, Homo sapiens
  chr2:64994380-64994775
  hyper
aattataagaaataaattaccgttaaaaaaattccccgttttaattactgcaaatgttaacgtgactaggtaagaactatttttaatcacctataattacacggttagtgtacagctaaaagcacgaagtcagtatccaaaagccacaattaaaaaaaacaacaacactaagacaaactttgcttttgtttgaaatgtgcaatatttttcctttacatgctctctcttcccgaataaatgctacgtttagaattgctagggttccgcagatacagaaagccagctagaaacatcccttccctgaattcgatgggcttacgtcttacccagcttgagcaaattcttggcgaatatttcatgaactcacaagagacgaatttgacatatttagaagg

SEQ ID NO: 198243 - DNA, 331 bp, Homo sapiens
  chr2:65215348-65215679
  hyper
tcccttgtaactcgcgtggccaaagcagatatcaaataaaagatgaaataaacaggaaatccatagaacgtgaacaataaggaaccgttcaggatggccaaaccgccgtctgcgctgttttctcgccagggctcaggcctgggaacggaagaggttaaaatccagtggcttgtgtttcagctttggttacgtggcagaaaccaactggaagtggtggcgtgagagctctgtttcttctagaagagctttgcgtcttaaacgcccataccgcagacagctgcctggcgggcgacccagccccatcctgatggccccaggacacaagcccagg

SEQ ID NO: 198244 - DNA, 90 bp, Homo sapiens
  chr2:66652773-66652863
  hyper
gtggaagcagaaatcgctcttccgaattatttaggaaagccaacacgcaattatgcaaaagtgtagataaggttctccgaagcagaaagc

SEQ ID NO: 198245 - DNA, 59 bp, Homo sapiens
  chr2:66652963-66653022
  hyper
gctctcggtcggttctgccgctctgtccccggttctgcagcgcactctcttactccctc

SEQ ID NO: 198246 - DNA, 95 bp, Homo sapiens; identical to SEQ ID NO: 106088
  chr2:66654136-66654231
  hyper

SEQ ID NO: 198247 - DNA, 264 bp, Homo sapiens
  chr2:66660314-66660578
  hyper
actttgcgcttaagagttggcttcaatacattttagagctcctaacctttcccaaacaatcttcggatgaagggatacccccaatcttgctcaaaactctttccctacctacacccccttgagggtgagggttcagtccgcagctggcgagtgggacgtgggtgggggcgatggaggcgcgggcgggctgcttggagggagtcagccttttggccaccttcagggcgggaatagggactggcagttcgcattccccgcagatcg

SEQ ID NO: 198248 - DNA, 149 bp, Homo sapiens
  chr2:66660888-66661037
  hyper
atacgaaaataacgccactaaatataatcacaagggagaagcttagagcgggagaataaagagaaggggtgagggggaattaaagcccaggcaataggtgttaaagttaaaaacaaaacaaaacaaaaaacagtggttggttggagcct

SEQ ID NO: 198249 - DNA, 180 bp, Homo sapiens
  chr2:66661524-66661704
  hyper
cattgttccctcccttcctctctacttcgcgcaggacgcctgggctggggctgggagccgccggggctaggaggtgggggagtccagacccgaagtgacaaaatgctagcattttctttcccccggccgggcgtccacctctaacagcaaagaaacctctaagctgggtctgcagaaagc

SEQ ID NO: 198250 - DNA, 152 bp, Homo sapiens
  chr2:66662597-66662749
  hyper
gcctgtgattgacagctggagtggcagaaagccatgagatttggtagttgggtctgaggggcgctcttttttttccttttctttctttctttctttttttttttttaaactgatttttgggggagagaagatctgcttttttttgcccccgc

SEQ ID NO: 198251 - DNA, 98 bp, Homo sapiens
  chr2:66662824-66662922
  hyper
tgggaccagtagctcacgttgctggagacgttaagggatttttcgtcgtgcttttttttttttttttttttttttccgggggagtttgaatatttgtt

SEQ ID NO: 198252 - DNA, 350 bp, Homo sapiens
  chr2:66802947-66803297
  hyper
gagggcggcgctgcaacctgggcgcagggtccgggtcagggggatcgagcgggcggccgggtcctggtggaggctgcggctgcttcggctcgcgggggcggggagaaggggaggggaaggagccttggtgggaggctccgaccccggagcagaggcgcctaccagcaaacttcgtagtgaagtcgaaggattctgaaaaggaaaaacgcaagccctgccctccccctccctctcgcgtctcccacgcggcgtgcagacttcgcgctcgactttgcgatcggggttagttgctgtgtgcagtgtcccccaagtctgcgggaggagcggaagggtataggctccagtcctgg

SEQ ID NO: 198253 - DNA, 137 bp, Homo sapiens
  chr2:66803754-66803891
  hyper
gggggctggagggcacatggaacgcgtgcacggcccactaggagggcgttgggaggagagtgcccgagtctggagccgcagccgggaagccgtagacagcaccccgacgccttaggcagaagctcctcaggatcact

SEQ ID NO: 198254 - DNA, 209 bp, Homo sapiens
  chr2:66803951-66804160
  hyper
aaggcagtaaaaacgtaacttcatgctgcaaagctcccgggtaggcgcttggacgccgatggagagaggcgtggaactgggtagtggggcgccctgcctggctgggcacttttccttgtctcattctcgtctcccatgccatgccttacccactggctgctagcggcgcgtttcacttaaggtggccacggtgcggagactacaggagc

SEQ ID NO: 198255 - DNA, 232 bp, Homo sapiens
  chr2:67624277-67624509
  hyper
ctctcagtttacgcggacctgactactacccgaacaacccccaccagtctggaggattttgagcctagacactcctccagagcaggctcctgtcccggctgcggaagtgcgcgcgccctcggcaccttaacagttccgcccctctcccggacccagccaatcagcggccgcctcttgcgcgcgccccaccgaccaaaatggcggctgccgttggtgcggggtgcggtttgta

SEQ ID NO: 198256 - DNA, 94 bp, Homo sapiens
  chr2:68547270-68547364
  hyper
ggatgcaagaggaagaaaataaccatattcaaggagctacatcttcttgtgggtgtacatttccattatacgtatgctcgtcccaaaaatgaca

SEQ ID NO: 198257 - DNA, 40 bp, Homo sapiens
  chr2:69240028-69240068
  hyper
gagtaagaaaacacgcacagctcacatgagaatggtaagg

SEQ ID NO: 198258 - DNA, 312 bp, Homo sapiens
  chr2:69240720-69241032
  hyper
acgcagggaggatgggggtccagcctgctacggcggatttgacctgtacttcattttggacaagtaagtgccgcgagttgtcccccccaccccaggctaagcgggcgaaaacgctttcgccccgggccgggctcgttggcagggtcgcctggggacaggagcgcatctccagggccacagagggaccgcgcggcaggcggcggcggagtgctgcgcctttgttggggcgcgctcctcccagcctcggctccagagcccgcagccgaggcgacgccgcttgctcggaaggggacagacttcttttctgtcttg

SEQ ID NO: 198259 - DNA, 37 bp, Homo sapiens
  chr2:69533478-69533515
  hyper
cttctggctggagatgcagccgtgccagcttcctgaa

SEQ ID NO: 198260 - DNA, 74 bp, Homo sapiens
  chr2:70313274-70313348
  hyper
cttttttaagtcataaaactcgcggaggtggaaggccccggggaggaagaggggtgcattctagagctttcggg

SEQ ID NO: 198261 - DNA, 323 bp, Homo sapiens
  chr2:70313475-70313798
  hyper
ctgagagattgtgaagcacgttgcgcacggggccctttctggtctggcttagcccaaggaggaaggggaaaaggcagaaatcacaactcataggccagcgtcttgagcgacacttcctcagcgggaagaaccggcaaaaaaggccttccaagatggcgggccctgacggggccgccccccttgagcctggcgcagtggctgcgcccatgggcccgaaaagcagccgcgggagcccaggccgcgcggggaaagccgcagaaacgtcctgaagccctggccggcagcccctgaacaaacgaggcctccacaggcgtacactattg

SEQ ID NO: 198262 - DNA, 232 bp, Homo sapiens
  chr2:70351264-70351496
  hyper
aaggtcgggaagggggcggggagagctggggctctggaggagcttggggctcgcgctgcgggggaggaagcgccttccgcggtcgctggggggaagtggttaggaggaagcacgggcagtggaggggactgctggagggtcccatctgggaaagcaggcacggatgcggggacatttccgcccgtcaccctggcaaagcgctcgcagggctggagggacagagttctcagat

SEQ ID NO: 198263 - DNA, 181 bp, Homo sapiens
  chr2:70351563-70351744
  hyper
gcaaaacagaggaaacaaaggaatgatgaaatgaactgagctgccttcatgccccggatgaatgttcagccattagaaaagagtgaatcccagctgggatttggggttccacggtgtactagaaaagcaaaacaaagagaagcgcctactagatgccatcttggaaaacaaaagcaaacgt

SEQ ID NO: 198264 - DNA, 295 bp, Homo sapiens
  chr2:70369036-70369331
  hyper
tgcccttccagaccggctctagtgactggcggggaagaaggggaaaaagaattagtgtatctggacacaacacccagcatgtgctaggcagaaactaagtgtgcgaagcggatcccgatgtacaaaggggaaaacagcggctgggaaagcctgagccacgggctccaggcggccagtcgcggtcctcccggcgcgtgccctcctcctccccgacctggccggagctgaccggggcgggtgtaggcccgggggcgggagggctactggatcccaggtggggcgggtgtaggcccgg

SEQ ID NO: 198265 - DNA, 180 bp, Homo sapiens
  chr2:70418116-70418296
  hyper
cgcctgccgcggccttttacaaacggggccaaactgttcgctgtaacgacaatcgttattggtcagagccgcccacgcgcggcaagtggccgcccacctgagctcgcgttgtcttatgggagttttagttctctccttcagagaccgctgagacactgggggaatgcggtggtagaacat

SEQ ID NO: 198266 - DNA, 405 bp, Homo sapiens
  chr2:70485366-70485771
  hyper
gccccgagggcgccgagctgcgtgctccgccagataaaatcggtaggcgagaagggggcggcgcgggaaggtgctggagcgcgccccgcgccgggcggccgctgcgcagtgcgcccagatcccacagccgcgacgcagtccagcggtgcaggccgagccagctgcgcaggtcgcgctttcccccattcacacttcagggcggctttcagctctggtcggaataggactgtgcattcccaggcgtggagaggtgcccacttgaggaatgggcgtggacggggacaggggcgggcgggcaggcaggcgcctagcgtacctgtagcccctgtctcttaggtgtggggctccggggaggcctaggtttctctatcttcccgttgaacactgaccgtgaagactccagtg

SEQ ID NO: 198267 - DNA, 327 bp, Homo sapiens
  chr2:71357126-71357453
  hyper
tactaagcggtggcgcttctggaaggcaccctctgcctaagtgacagcagctgctgtggaacgcgcccccgggggaggacattagatcaaggtgctttggccacgccgaggcctcctccgcccccgaccgccgttcccacgctccctgtcccatggcgaaggtcgccggtgcccggtattcacctacggcattcgcggctgcagccttcagcacccgcgccattttggaaagcaacccgccacgtcaagactagccacggaggttgagagacgcgcggcagagggcggggcgggaggcagagggggcggggacagaaaggtcagggg

SEQ ID NO: 198268 - DNA, 452 bp, Homo sapiens
  chr2:71453495-71453947
  hyper
agagaagtggcgaacgtctcccaggcaaatgaggcatgaagaatgagggctggagtcaagggggagatggagcaagtataaaaaggcagaggacgcgcaggggccgcgaataggggaagggcacgacgcgcaatccctcccgctccagcccggggagaggggcgggggatgccgcgcgggtcaatttgcctagcattgttgcacctgggtagaaatgggactcaggccaagaattcggttcgagtgttaggaggacgctgaggggagtcaggaacttgggtgggagtcggggggaaacagagcacctgtgcgggggggaaagggacgaaaaccccctattgctcccgaggggcaggggctgaccccagcggacgccccttttcgccgatggccgcgacgtgggaccccgcgcgctttccctccctacaggagctcgggcaggcgcgtgccgc

SEQ ID NO: 198269 - DNA, 242 bp, Homo sapiens
  chr2:71454386-71454628
  hyper
aagtttcagcttctgattggttttaatgtctgtcttttctcttccttcattttttttttcctgtggtggaacacctccttgagggagatgccggctctgattggctgaaaggacgctacgctagcctgggataggcattgggccaaggatgcgcccggcccactcgtgggggaggagaccaaggcgccgcactctgggtttgtttacacaggctcttgctcccgcttcgtctattggctgag

SEQ ID NO: 198270 - DNA, 40 bp, Homo sapiens
  chr2:71504818-71504858
  hyper
gtgggagaggctgtcctgctggcccggctgtttattgcag

SEQ ID NO: 198271 - DNA, 159 bp, Homo sapiens
  chr2:71693924-71694083
  hyper
cgctcccgccctgactgcgcgcctgtgtgccgccggggctgcccagccatgctgtgctgcctgctggtgagggccagcaacctccccagtgcgaagaaggaccggcgcagcgaccctgtcgcaagcctgactttccgaggtgagagccccgtggctgcc

SEQ ID NO: 198272 - DNA, 354 bp, Homo sapiens
  chr2:72372237-72372591
  hyper
cgcaaaggggaggggcgccacctgtctagccgccccgcctgccagcccacgagcgtaccgactcgggctccagatctacccgctcctgcacccccgaggggacaactcagtccccctagcccgggttggtccccctcctcactttccttttttccacagaaaactacttccagctaaatgtgcacacacgccagtacagccgaaaagtgactctgcagaacccggagccctaatcacttttccacatgcgcctccggcccggcgcgcgacggggaacgagctgggagcgcccgcgcagccaggaggggggctgggccgcgggaacgctgtccccctcccaggctggaaggcggg

SEQ ID NO: 198273 - DNA, 468 bp, Homo sapiens
  chr2:72372758-72373226
  hyper
tcttttcctctgtttttcttttctttcaacacaaaagttgggttgtgaattttccgaggtcgccgccgcctcgcccccaccccccgcctctgatctgcctaactataattaaagtgcgttttttgtggcattaataaagagttatttgtccgccgtttccacggtcttcacaaagagtactttcataggggcggccgctcgggccgcgagtccaatttatacaaaaatgttgtatttttagccctgggctctgtttagatggcgctcggtggaaacggagagcccttggaggtccccccgtaaaatctgataaatgactccgaaaaaataacgctgggattcagagggctctcattaaccccttaggcgctcctgtacacgtaccccctatttccctcctcacctccagatctagggccccgggttggagggatggggaggcttaggtttcctcctccctaacttctg

SEQ ID NO: 198274 - DNA, 55 bp, Homo sapiens
  chr2:72374932-72374987
  hyper
ccgacaccagatccaagccctcaaagagcatgttggcggccgctcgggggattgg

SEQ ID NO: 198275 - DNA, 304 bp, Homo sapiens
  chr2:72375582-72375886
  hyper
gagcctaaaagtccctgggctgcccggggcggcgcgctcgagccccagagccgccgcagcacccccgaggcaggagcggcgggcgaggcggcgaggcgggcgctgcggcccgagcgcgggtgcggagccggcgggccgcggccgggacgggacgcagccggcgacagagccccgggcgggcgatggggcggcggcggcggcggcggcggcggcggcggcggcagcgggcgggaggggtgaggcggggtggggttgggggaggaggtggaaaacccgagctgggctattgtatcaattaagaaaa

SEQ ID NO: 198276 - DNA, 132 bp, Homo sapiens
  chr2:72376426-72376558
  hyper
ccgcacacacggtgcgcactcgcttagtgcctgcttggcttctaggctccttcccttcctcttttcctccttcccaggtcagcggtcccctcctccagctccgagcagtccctcctgggccgaagccccggc

SEQ ID NO: 198277 - DNA, 135 bp, Homo sapiens
  chr2:72376588-72376723
  hyper
actggcaggcgcccaaagccctcgaaactgtgccttagggtcccgagcttccaacccccgggatcccgctggctcttatctccagggacccctgagttaccagtcccaatccccctaagccagatcccccattcc

SEQ ID NO: 198278 - DNA, 183 bp, Homo sapiens
  chr2:72376846-72377029
  hyper
cctttcctgcacattgggacccccctcccctgcttttgtagtccccctccaccgcccgcagcgtcggggaaccccgatactggtccggcaagtgtcctgcgcggggacaaacgcggcggccccggtacccagaggcgggagaagacgggcacaaacgttcattgatacaaatgagtaaataaa

SEQ ID NO: 198279 - DNA, 709 bp, Homo sapiens
  chr2:73052644-73053353
  hyper
cctctcgttccccagcgccggaccagcctcggagggagaacgaaggctgctcctgccccgagggaggcagcgggagggtcctgagtcactgggctgtagggcgccgggaagggaccccgcgtcggggctgcgaagggagacccgcctcgcccggtatgcagggtctctccgaagggaggggccggcgccggacctggggacagccggccggaggcccgacccagaggagcctgccccgtcccgcccgttcccgcccctctgtggtcccggcacccggggtacctgagcgtgggcccgatgcaggccgtgtcagtgctctcgatctctcgcaggatccgctcgtgctctgccgctgtctccaggctctccgcctccgccatcttaccccgctccatagactgggggcgccccgcagcgcgtcccctccgtcggctcggctcaccttttccctgccccacaatgccgctcccaccacaggctccacagccgccccagcctctggctacccgcaggccgacccctccctcaggctcgacacgcccccttgcgtcaccgcgtccgtcggcgttctgcgtaatgtccgctgggatttgtagttctctgggaaatgctaggttggattccattcattcatacatggaatccgcaaatactagttgaagcccactgtaagcaaaaacagttaacgacagtgcgtaaacagtgatga

SEQ ID NO: 198280 - DNA, 276 bp, Homo sapiens
  chr2:73114226-73114502
  hyper
gcgtcccagccggaggctgagcttgcgggcgaagaacacggcagcgctgggaaccgggctagggctttccgtgtgggccgcgcctgccggccctctctgttgtcccacttggcacggactgggctaccgccacggtttgacttccgccaccagcaaccaagggaaccagatcccaagggaaccagcacccctgggcgctcgcggcccgaagcctgaggttcccgccccgccccggcagggcggccccgccgacacccgtagcggtcccgccccccg

SEQ ID NO: 198281 - DNA, 39 bp, Homo sapiens
  chr2:73141975-73142014
  hyper
aggaagctgacagaaaggggcgctgggagaggaaaaggt

SEQ ID NO: 198282 - DNA, 191 bp, Homo sapiens
  chr2:73142102-73142293
  hyper
agggatggaatgggagtggaagctaggccaggctgggaccccggggctgtcccagcccaaccaagacggtgaccagactcaagttactgatcctccgctgtttcttcatctgtaaagtggagttaatgacagacagctggatgtcaacgttttttgttgtttgttttagagatgggatctccctgtatcgc

SEQ ID NO: 198283 - DNA, 180 bp, Homo sapiens
  chr2:73142353-73142533
  hyper
gagatcttcctgtctcagcctcccgagtagaaatgtcagcatttgaatgcctcacaagggaaggtggtgtaataaaaggtctattgatttagatatgaacaagtatacccagagccacacgaatgaaaggaggtggccagtgtagatgcaagtctaggacggtcggtagattccaagctt

SEQ ID NO: 198284 - DNA, 489 bp, Homo sapiens
  chr2:73142998-73143487
  hyper
taaagagcctgagacacaaacgagaggaaaagaccatcacagaaagctggaaatctccggagaggccagcgagaacccgcgctccccacggattccatcattccttccgaaggcgcctctgcggtgtctcagccgtgccaggccccggggttcccaggacgcggaggagtgctgggtgcggccgcctcgcctccccacccctggccgcccctccccacctcgcccaagggggccggaacggcgtcggcgcgcgggggcttttcggagcagtcgagtggaaaatagactttaacccgctttgtggcggccggggcgccctgagcgctctccaaaccacggctcccggcgctcaggcgggccgctgccaagacccggcctggagtccccgcagagttgcgcggcgcacggaccccgtggccttggggcgtcaggaggcccaacccagatctgcgcgcccaggcagcgctcaggccgctagaatggaccccg

SEQ ID NO: 198285 - DNA, 214 bp, Homo sapiens
  chr2:73144495-73144709
  hyper
gcctggatctccccgcgaaggctccagtccggcttttgcctccgactgcgggctccctccccacccgccgtccctcgccccgccccgccccgccccccaccttggggcaggtgagcggcggccaatgggcgagcgcggggcaggtgcccgctaactcgcgcctcgcagcgctgggcggccggggctgggcagggcagtgcggggacaccggggg

SEQ ID NO: 198286 - DNA, 140 bp, Homo sapiens
  chr2:73147009-73147149
  hyper
agcaatctaccctggtcctccgtgggctcgatccgaagcctgggtctcgaaacctggcgcccaggggccgagttgtagttggggcggtgtgtgagcccgcgggccgccgcggccgaggggctggcgggttggaggcttgt

SEQ ID NO: 198287 - DNA, 37 bp, Homo sapiens
  chr2:73148243-73148280
  hyper
ggaccccgggtgcttcggatccctagctcccacctcc

SEQ ID NO: 198288 - DNA, 209 bp, Homo sapiens
  chr2:73150976-73151185
  hyper
tcttggagggagatgctttgcgaccagttaactgaaagcaaatcgttggggctggcggccagggcagcgcccctgggaaagggcggagaaagagcgccatggacttttcttccccaccccttggcctcttccgctgccccaggcattgtgaatgtgggtccacgcctcgtccggcctgccccatctcttggcttaacagagggatctgg

SEQ ID NO: 198289 - DNA, 35 bp, Homo sapiens
  chr2:73151849-73151884
  hyper
aggaggcagagtaaatgcaaactgtatcccgagcc

SEQ ID NO: 198290 - DNA, 285 bp, Homo sapiens
  chr2:73151946-73152231
  hyper
cgggcagcgcaggcagcaccgaggccactggagctggctccagccctggcattcctgcagcccttttcccgccactgtgtcggggcgctcatagtcctgcggggagccggtccgcactggctttgctgctgttcctgggcaaaactggcggggccttggctgcccaccagccaggagcgtctggggagaaagcccaggtgtcctcagactaccaacagaggggcttaaccagggaggggccagcccctgcttggggcccgagggttgctctgatccggcccaggc

SEQ ID NO: 198291 - DNA, 60 bp, Homo sapiens; identical to SEQ ID NO: 37655
  chr2:73152264-73152324
  hyper

SEQ ID NO: 198292 - DNA, 297 bp, Homo sapiens
  chr2:73511726-73512023
  hyper
aggggtcttcggcgccgccctaggggtgtagggatggctcgcgccgcgctcctcccgggtcccagtcttcccggctcccggcaccgcccagtgcattccccgccctgggcacctccagctgtggcttctgttgcccaccttgaatcagggcctctccgccctaaccctagcactctggcttgggcctgcttccacgcgggggcaaatccgggggtgggtggttctgtgaatccggaagggggcgggcgcaggcgctactcctgagacatgcgccacggtccctaagcggcctcatgg

SEQ ID NO: 198293 - DNA, 65 bp, Homo sapiens
  chr2:73512162-73512227
  hyper
gctcttaaagagccgcctaggaacacgtgtacccatcacaaatcccatcccggacctagaggagg

SEQ ID NO: 198294 - DNA, 137 bp, Homo sapiens
  chr2:73520105-73520242
  hyper
ggcgctccgataaccgcacaggttcctgcggaggcgctggcggcccagtgtgggtgggaatgggggtgcgcaccccaggactcctaagcttcccatcgcccctattctcatagctccaatgtcccagtccctcctgg

SEQ ID NO: 198295 - DNA, 620 bp, Homo sapiens
  chr2:74153738-74154358
  hyper
tggattgtggaattacgtcttttaaaatgttatttgtccaatgaacaaaaaccactcgcaccgcaactccttttactatcaaattctgcaccgttgcaaaacttccttcactcaacgcttctttacaaacatcgcgatagcggagcggtctcttgggcgcaccccgccgcatgttcaaccccacccacttcctgtctgacgatctccttacgtcaacggtgcgctggagcgagtgagcagcgatacctagggcggaagtgctctcggcggaagtgatcgctgtgtgaatcgtgggtgggatggccgcgggccgcctctttctaagtcggcttcgagcacccttcagttccatggccaagagcccactcgagggcgtttcctcctccagaggcctgcacgcggggcgcgggccccgaaggctctccatcgaaggcaacattggtaagggccggaaagcggctgccaagccttggcctccgccacgcaggcgacagaggctgggaaaggagctgggcccggaatggcctgcgtctgatgcggccggcctctttttctgggctgcgaggagagcctttcccctcgcaaagtgcactgtgtatctttgcctccttgtttttagg

SEQ ID NO: 198296 - DNA, 421 bp, Homo sapiens
  chr2:74405756-74406177
  hyper
ggcccggcgcccgcggcccgaccccactcacaagaggaagctcatcttcggtcctcagaggggaggcgaggggcccctggcccccgcctggatcaggattcggagctggctagagggagcggaccgtccttagctcacgggcagcggaagccgggccgccgccgctcggagccgggtttctggccgctgcgagcctttgcaaacctcggcgcccgccttgcccgcctaccccacctcgcagacccgaaatgcggaaccaacaaaatctcgcgagctaaggtttcgctgcgccgggagggacttgtcgcgccccctttcgctccgcctcgtcctagaactcggccaatcatcgctctccaagccaggacctccctcccccggaggcgtggcgaggatggcggtcctgcggaaggggcagtgg

SEQ ID NO: 198297 - DNA, 295 bp, Homo sapiens
  chr2:74425424-74425719
  hyper
aacttttctcttgtgttgtccggccttcggtgacactagcggcgtcaggcaggagtttgacttcctcagcctatcatggcacgttgccgaggcttcagcgccttacaggacctcgctccaggctcttctggctccaatcaaaagcagggctctttcggacttcgcttacgtttaataaagaaaaccggttggccccttcggctccacctggctcaacagacagccagtggcatgcggcagggaccaatgggtggcggagggaggcggggcctgccacgaggccgcagtataaccg

SEQ ID NO: 198298 - DNA, 395 bp, Homo sapiens
  chr2:74425790-74426185
  hyper
ctgctttggctgcccggctgctgcagcccgcgcacagctgctcccttcgccttcgccctttccacctcgcggcagttcggtaagagggtcacagagctcggtcagcgcggaaagctgaggggaacggagggcgaggggcacgccgggcccccgagggacaccgagggaagtccttcccgaacatctccgccccggcggtggtggccgctgaggggtgtggcggggcgacgtggcaccgagcgccgccgcagctctcgactggggcgcttcctcggcgcggagggctggtacccgaagcccgcctttcggagggagccgctctcctgcgactcggggcgtcgccggggcccgtggccagtcggcgggcgggacgggggtggcgtgcggaacgcgaa

SEQ ID NO: 198299 - DNA, 249 bp, Homo sapiens
  chr2:74426214-74426463
  hyper
gcgccggccgcctctggctgggatgctgagagtcgtctgggggagaacaggcgagggttccaaaagagcagccctcggcgagttgtccttgcggggaccctagcggcggagggcgctgctgcagctgatgaaatcgcggagccgacttgctcggggtccccgcgccgccctcctccctccgccggtgggagtggcccgcgctgcctccgctctgccaggaacatgaacggactctgggcaccctagctt

SEQ ID NO: 198300 - DNA, 206 bp, Homo sapiens
  chr2:74685369-74685575
  hyper
tattggctattgccgctgtcagtcagggccgtgggtcgaaccttcacctactctttgtctgtacaagctcttgttgtctgggtgagcggcggaggcgctgctgtggattggtcacagggagaaacctctgatctgttcctattggcccgtccgtcaagggacgatgatgattggtagggcagagcaatctgagtcctagttggtgg

SEQ ID NO: 198301 - DNA, 328 bp, Homo sapiens
  chr2:74729572-74729900
  hyper
tggacaaggacaatctcagcgaagagcttgctcccctcctccccacccttaggaaacgtccgtgaaccggagtgagagggcagtgggagttcagggagcaaagtccaggcggaggagcgtgaggcggggcttccgtccgtcccgcacacttctgggattgttttctctttcagaaagcgctactgcggagtgaaccggtccttatatcttagtttcgtgactttgggggcggcaggcctgtgagttgttttccgccctggacgctgttttgcaaagatctctgcgcgcccaccgccaccctcccgggcgtgcgggccgggaagcagcc

SEQ ID NO: 198302 - DNA, 238 bp, Homo sapiens
  chr2:74729933-74730171
  hyper
ttttctccccccaactccccaagactcacttctagggaagtcctttttcccatcaagccctgggaaagactggccaggctgagagagggacccgtcctcctctgtgccaaaggcgggagcaaatcctggtgctgtcgcctttggatgtgagtcctggaaatggcgggggtgaggaaggtgggcaggggcaaggtttggccctcaggcgagaaccgacgccttgtcccggaagcgcagc

SEQ ID NO: 198303 - DNA, 93 bp, Homo sapiens
  chr2:74730644-74730737
  hyper
gcagggccttccagggagtcccagtcagactgctccccagctcccgcagctgctcggtccctgcaaagcccccgggagcgtttctactctccc

SEQ ID NO: 198304 - DNA, 205 bp, Homo sapiens
  chr2:74740310-74740515
  hyper
taggctgagctgctcgttggtgcccacccgccaccgccaccgcaggatggtagaagcgcccccctctctgagcccagtctcaccggctcagaggcgccagggcccccccgggggccggggcgggccggggaaggtaatgtaattccggcccagctaacccgattaccgcggcctgcaccgggcagggcggcggcgggggcgggtc

SEQ ID NO: 198305 - DNA, 36 bp, Homo sapiens
  chr2:74776040-74776076
  hyper
gccatcgcgcgccgccgtccccgggcccccggaccc

SEQ ID NO: 198306 - DNA, 142 bp, Homo sapiens
  chr2:74776396-74776538
  hyper
tcctcccgtgccccggacctgctcagatgtctcccaaggctattcatcagggagcaccccaatcccggcctgctccgcccggcgcccgcggcccctcacctgtagaaggccgcgttgaccctcttttcgctggggaagccca

SEQ ID NO: 198307 - DNA, 209 bp, Homo sapiens
  chr2:74781726-74781935
  hyper
ccttctcgctcctctccctcaccccaccgcgacccccccagcggctgccggcgggggccggggaggggcggaaactcctccagggaacccggccccgcctcccgccccgcctcccgccgcagggccaggaagcgcggaaggaaccgccgggggccatggacggagcagtgatggaagggccgctttttttgcagagtcagcgctttggg

SEQ ID NO: 198308 - DNA, 122 bp, Homo sapiens
  chr2:74782349-74782471
  hyper
gaccataaggggtcgagctctgggggtggccgagggagctcgcgccgcctggactgcaaagtgatccgtctggctgagtgtgtgagtgtggcccccgtcaccgtggagaccccccctgagcc

SEQ ID NO: 198309 - DNA, 47 bp, Homo sapiens
  chr2:75147056-75147103
  hyper
gtggcgctcgccgctcggagaagcagggagtcggtgcgccgcagctc

SEQ ID NO: 198310 - DNA, 38 bp, Homo sapiens
  chr2:75787357-75787395
  hyper
cgaaacaaaccaggtaaatagtccacggtgcagcacgt

SEQ ID NO: 198311 - DNA, 100 bp, Homo sapiens
  chr2:75787704-75787804
  hyper
ctctgggtgtttccgaaaagagggcgcttcggagaagccggagcccgctggggatgccgggcgcccccagagttcagggagcgctctcgggcacctctta

SEQ ID NO: 198312 - DNA, 95 bp, Homo sapiens
  chr2:75788345-75788440
  hyper
tccccctgctgggacgagcccagatttgaaagcagacctccaagcccctgccagcatccatcctctcattcctgtcccgtcgcctgctttgagcc

SEQ ID NO: 198313 - DNA, 146 bp, Homo sapiens
  chr2:80531182-80531328
  hyper
tggtgatttggtccatgttagatgctgcagcaaagaaaagggaggaaaaaaaaaatcttcgggaaagaatttaattaaaaagtgtcttacccacccttttccagagagtgacaacctccattcagctgctccctttgtgtgcaggc

SEQ ID NO: 198314 - DNA, 101 bp, Homo sapiens
  chr2:85359942-85360043
  hyper
ttgaaaacctgggccgggggtcgcgttggaaccccacaggaaaaaggcgcggaaagccgccgggcattttccggggttccatagatgtccccagtgtccta

SEQ ID NO: 198315 - DNA, 235 bp, Homo sapiens
  chr2:85360470-85360705
  hyper
cggcccccctgcccagcccggcggtccctcctccctccctccccgctcgcccctccccggcgggccaggggctgggacgccccggcggagcaggcggcggcggtggcgagttggggagccctaggctcggcgctgccggaggggcccgagccgagccgcctgcgccccggccgggcagcgccgggcccgcttcccgcggggccacgccctgtcaaactttgttgcggcggctagc

SEQ ID NO: 198316 - DNA, 235 bp, Homo sapiens
  chr2:85829251-85829486
  hyper
caacaccttatccagcgctcccgttgggtctctgagcgtccaaagtttgggctgagcccacggcagaacgtgaacaccctctggcactgggggcctccgcggtcaacccaaatgccaccggcgtgctgagagacgcaggcggaccgtaacatctggaagggagttaccctccttctgagggaccagggctgggagaagggctggacaaccgaagaggccacgccaaggagaggct

SEQ ID NO: 198317 - DNA, 201 bp, Homo sapiens
  chr2:86114869-86115070
  hyper
agctgtatccttccgtggaaaaggattagcagccataagcccgggggagggcagctaaacaccagagggcaggagatgagtctccttcctctctgtgacacccagcacggccctgccacgaggagcaggcaaccactggtgccagatgaagcgcagcacataaaaccattttccccttcaaatgaacgatgcctaattaag

SEQ ID NO: 198318 - DNA, 223 bp, Homo sapiens
  chr2:86668219-86668442
  hyper
aataggcctatggcggagggatcactcgcttattctctgtgtactttaacctaatgggggtcgcccgggagtcggaagggggaggggaaagggaggaggcagccaaggaattgtttttttctctggccccgccctcgcccggggggccaatggtgatgatctgtttcccccggagcctcgcccagctcctgtgtttcagccaatgagcggcggaagcggctcc

SEQ ID NO: 198319 - DNA, 53 bp, Homo sapiens
  chr2:86850368-86850421
  hyper
cactgacccaggtggcggggtcggccctccggtgccgcgatctcaagggggag

SEQ ID NO: 198320 - DNA, 167 bp, Homo sapiens
  chr2:87018396-87018563
  hyper
caccttgggactttttattggcaaaatgggcactgagggctgaaaaggaagaggaactagcgacctgcccgcttctgaggaactcgctagagcagccccagttttcaccgaggaaggaccctctcccttcccccaggagatttccatgagagcggcagcagccgaag

SEQ ID NO: 198321 - DNA, 915 bp, Homo sapiens
  chr2:88315897-88316812
  hyper
ctgcaataccaaatcgatgcgtagactagatagagtaaactcttactccaactccccgttccaaaactgcgtttaatatagcgttcatcaaacagaagaacataccagatattaaactgataagaacacacactacactcaatcattaaccaaacagcaaaaaagagataccagttacccggggcctcccacgtcctcccttctttcatccaccttaaggtcacggtgagaaacctcaccttcggtaaacatctcacctgctttctgatgtaaatattatattgaaaacataggccctttgagacattttgtccgctccttgactcttagtgacttcgagctttgtcgccccttttccttggtcgcgagggccgttcatttgcatgtcccacccgctctgcgcccgggaggcgtggccaccaaggggccgggccctgcacagcgccctggggaagctggtttgaaagctctggagcgaccccaatgccgggtaaaggacaagatttgcccagacggaagggaatttggggtgaagtggccgtaaaagtgtgggacgaaactgtttcgggcagagcggtgggaactcacctgaggaaagcatgggggaggagtcactaataagaatgagtggcagggacagggcggccttgtaacgccctcggtgttggaagggaagaccgtacagcgcgatggggaccagggcggcgggccgcagccagggtgtgggtgggcgacggtcaaggtgccttgaagcggattctgtcctcgggagctgcggttcttcctcctccgccctcaccggcgggcgaccttaggcagggcgtgaaatgcaacgggagccctggagggagggtgaagccgcgcgtgcaggaggaacctccttttggcgagttcaggccccgcagctgcggaggt

SEQ ID NO: 198322 - DNA, 65 bp, Homo sapiens
  chr2:96991316-96991381
  hyper
ccctgggtcccgggagacatcccgaggtaggatgggcccttggcctcctacggataggcgggtga

SEQ ID NO: 198323 - DNA, 210 bp, Homo sapiens
  chr2:97171202-97171412
  hyper
tgatttctcctgactcgcagactgacctgctggagctggccggcctaagagaaggaaacaggaatgggggtctggcctgggtaggtcttacggtagccttctttctcacttctgaccaatctcaagctggctgtgcattgtaatggtccaagcatgttaataaatacctatgtccagccccgcccccaaagactccggttccactggcct

SEQ ID NO: 198324 - DNA, 197 bp, Homo sapiens
  chr2:97173863-97174060
  hyper
cacccgccagccccgctgcaaacctttgctctgagaggggcgggcccgtgccctcaagcgcggggcggtctccgctgtgcagagactgaggcggcccctgctggcggcggtcagtactgcaggaggcgccgagggcccgggagcccccaaagccgggaggggcgccccagagggaggtgagcggcgccgaggctcac

SEQ ID NO: 198325 - DNA, 226 bp, Homo sapiens
  chr2:97175214-97175440
  hyper
caatgtcgttctggcggagctggtgagtcagggagcatccacgccgcctgggaagaccggctctggaggctggagggcttgaccagcactgccacccggtggccggcagcggaactgaccacaggcctggtgccctggagggaatgggccacaaacgctccgccaggactgcacctgtgtcctaggcgccgccctcagccaccaagtcggcctgcctctcgagcac

SEQ ID NO: 198326 - DNA, 62 bp, Homo sapiens
  chr2:97203314-97203376
  hyper
tgtgtccccttgtcttccctcggtctgcagaagggacggggtggcggctggggagcgtcagg

SEQ ID NO: 198327 - DNA, 37 bp, Homo sapiens
  chr2:97203545-97203582
  hyper
gcggtgcaggacccccgagggcccagggggtcccaag

SEQ ID NO: 198328 - DNA, 204 bp, Homo sapiens
  chr2:97303997-97304201
  hyper
tcgaagccaacgctgctctcacccgcggtcttacggccgcgcgctcggccacggccggatccctaagcgcgtgcgcgttaacgcctccacgccccggcgctgcgggcaccgagtaaaacgcggaagcgggttacggcctgggaagggagaggcggtgagcggcaaagcccggaacggatgaagctccggcgcctctgtccggaa

SEQ ID NO: 198329 - DNA, 298 bp, Homo sapiens
  chr2:97482863-97483161
  hyper
gggcggctgcgggagcgggtgctggagctggcgcgcggcggcggcgacccctacagcgatctcagcaagggcgtgctgcgctgccggaccgtggaggacgtgctcacgcccctcgaagactgcttcatgctggacgccagcaccgtgctggacttcggcgtcctggccagcatcatgcagagcggccacacgcgcatcccggtgtacgaggaggagcgctccaacatcgtggacatgctctacctcaaggacttggccttcgtggatcccgaagactgcacgccgctcagcaccatca

SEQ ID NO: 198330 - DNA, 156 bp, Homo sapiens
  chr2:97535760-97535916
  hyper
ccgcgcccctaggctcgggctccccgcgccaccacggcgggcgccggctctttctccagcgcggccgcggctctccgcccccttccccttgacgtcaggctgggggggtcgagcggaggccgggggcgggccgcgaaggctcgctcaggagggggc

SEQ ID NO: 198331 - DNA, 103 bp, Homo sapiens
  chr2:97779476-97779579
  hyper
atggaagacggcaagcgggagaggtggcccaccctcatggagcgcttgtgctcggatggcttcgcatttccccaataccccattaaaccgtatcatctgaaga

SEQ ID NO: 198332 - DNA, 69 bp, Homo sapiens
  chr2:98261938-98262007
  hyper
tggtagggggtcccgcccccggccctgtcctcctccccaggccgggacctccgcgcctcccacacacag

SEQ ID NO: 198333 - DNA, 133 bp, Homo sapiens
  chr2:98280679-98280812
  hyper
gatgtcatggctccgtcttaaaggggacgcgggcggcagaaagtggagctgggctggtgtgcgcgcggccggagtctgtggagctggaaattcaccggtccaggaagacgtctttcccgcgtcccagcaccgg

SEQ ID NO: 198334 - DNA, 220 bp, Homo sapiens
  chr2:98703014-98703234
  hyper
ctcagctccgcccacgtccagtggctgagctacaacgaactgccccacctcttttaaagcgtctttctctgaactgtgcaaggaagagagcatcgcctgacagtggtgaggtgaaaattaaaactacacaggggtcaatgctctgctgaaaagtatgaaaagaagttcgtttgtagcgtttcccgcagtctcctcgcctctcctcggcctctggcgcctt

SEQ ID NO: 198335 - DNA, 200 bp, Homo sapiens
  chr2:98703475-98703675
  hyper
ggcctcggcgccccgccctcttggccacggtccgcagccatcgccccagtgagggcgcggtctgtgggcggggccggctccaggagccgcgctgtgattggccgtgtccaggcaaccgcggagacgccgtcgtcaacagaccgcgctcggaaccagaggcgcgggtcacagagacctagaacagctggaatccttcgccc

SEQ ID NO: 198336 - DNA, 82 bp, Homo sapiens
  chr2:98703736-98703818
  hyper
gcccgccctctcgggtcaggcgggcccgggaggatgggagggtggctgctgagcgggagccgccacgtcttccacccgacat

SEQ ID NO: 198337 - DNA, 207 bp, Homo sapiens
  chr2:99061191-99061398
  hyper
ccggccctactgtctcagagggcggacccagctcgggctggtagtggggcgggggtcgcagggcgcgggccgggccctcagcgcgcatgcgcgacaagggggcggggccagggcggggctgcgcccggcgtctagagcggcggcggctggctagggctgcggcgcgcgtggagggttcgctgctggtttgccgccgggtcgggctcc

SEQ ID NO: 198338 - DNA, 101 bp, Homo sapiens
  chr2:99346431-99346532
  hyper
ttttcgggtttacacgtgtgggttaaagaaatctatgtcaagataacctgttcatcaaactgttttttaaacattcagaaaaagaaacataaaccacaaaa

SEQ ID NO: 198339 - DNA, 258 bp, Homo sapiens; identical to SEQ ID NO: 1686
  chr2:99346574-99346832
  hyper

SEQ ID NO: 198340 - DNA, 153 bp, Homo sapiens
  chr2:99553238-99553391
  hyper
agctgccgccccgtctggaggtgattcatgggtgtgacaccggcgagtgtgggaagaaaggcagctgatgccgtctcagctgcgctcgcctttctttattttctttctttcttctttttttaaaatcctttttcttgtaaagacagggctggt

SEQ ID NO: 198341 - DNA, 264 bp, Homo sapiens
  chr2:100721641-100721905
  hyper
ccgggctgcacgcacttctcccgcggcccagaatccacttgaccctgctgggcgctcccgcgggcggcggacccgggtgggtgcgggggaattccccggccgcccaggcgcggggagagtgagctgtgccgcccgcagcagcgccccaaacaaaccgtttaaggtctctggagcccgcaagttcagcgaaataaagcggcggcgcggaggaaacctcttccacccggacctgctctccgttgcggtttggcctccagtggtggt

SEQ ID NO: 198342 - DNA, 155 bp, Homo sapiens
  chr2:101033436-101033591
  hyper
gactcccctcgcaccgaagctgcacatgctccttcttccctgccttcctctgcatgctccttggacccaagctgaaccctttcttcctctctccatctacaattacaaacgcaaattctcagccaaggatgaaagaagtaaattgtaggctcgca

SEQ ID NO: 198343 - DNA, 276 bp, Homo sapiens
  chr2:101179132-101179408
  hyper
aggctagtcagagcgagacgtctttacaggtttgggccggcagctggaaaaggcacacggccccgggctcctcctccacccagccccacccctcctccgctgaagaccagccctaataaggcagccaccagaattagaaccaggtcaagtgcactccgagcaggacagtaggcagatcctatctggcgcatgcgaacgcttctgtgccagttccttgaagagcaggcgcagactcaaggctgttgcttccgcccttactccccgccgctcgtccct

SEQ ID NO: 198344 - DNA, 486 bp, Homo sapiens
  chr2:101435066-101435552
  hyper
cccccagtccaccgcgggggcctggcgcgcttggggcaaaggccctaggagaccccttctggccacaaaatcgagtatgacagaaaagggccagcgggggcgctttccttccagggccacttgccggaatgtaagagggacggagagacgtccggaaaaggctgccacgctcggagcgctgcgccaggccaggcacctaggccaggggagcggagacctcgtgggagcgggcagggggacctttcccctctcccgggcttccacccaggcgcctccccgctgtgaacgccgccgcccaggtgaaggggaaaccggccacgtttccggacctcggcggggcacacggtctccggttttcaccggctctgtcttggagccccgaagggcatcagacagcagccccggcacccggggattattcctgtacctctgcctccctccgcttggcgtttgcgggaaccttggtaaaatcctccctgtttctcg

SEQ ID NO: 198345 - DNA, 94 bp, Homo sapiens
  chr2:101435590-101435684
  hyper
cgcctgtctcctcccacagaggaaaaaaaaaaaaaggtcacgtatgtttggaaaaatatgtaggtcagtggaacatttcctgcactggtgcaaa

SEQ ID NO: 198346 - DNA, 273 bp, Homo sapiens
  chr2:101436113-101436386
  hyper
gcggcccgcactgcgagggtctacactaggcgggggcggcagattccttgttccccccgagtgacaactttaatgggacctcggctggcagcctctagtccacttgcctctcctctgggccggctcacctggaagcacaacccccccctcccccagccccggcgcccaaccccgaccctgcgccccaggcccgaccccgccgcgcgtccctggcagcccagcagaggctgcggcggcctggggactcgcgggtgtctgcgccgcccagggaag

SEQ ID NO: 198347 - DNA, 375 bp, Homo sapiens
  chr2:101436742-101437117
  hyper
cagcgcctcccgccgccgcccgggaggagctcgccgcgcccgctcgccgcctcgtctcccagcggcggcgggaggcgcgtctccccggcccagtccgcgcccggccccgcggggccgctccggcccgctccgaggtaaggggccgcgcctaggggcgcgggggacccagggtgggtagtacgtgcgcgcggggtcgcaggactcggtcacctgctcgccagcgtggaggacgcgcgggggcggaggggcgctcaggcgcgaggctgcgcggcaccggggaccccggacgcgggggcgcggagaggtgggttcccctccacagtcaggccgctgggggcttcgcgtcctgcaggaggtagcaatcgctgggccggt

SEQ ID NO: 198348 - DNA, 704 bp, Homo sapiens
  chr2:101767139-101767843
  hyper
gcgcgcccccagccacgacaccacctggagcctccggcgcctccagatggccgagtccgggctggctcggcgcaccccgctgtcacctggccccacacagcagcctcgctgctccagggcggccccgagccctccggccccgctccacccggcgtttctccttcgattcccaagtcgagtccggcctccagctcaccgggccaggcggcgaagacacctgcctcgcccggaaaacgcacgcgcccgggagccccctctaccaccacctcgacgggagcccgcgggagaaacgcagaaaaaaggaaaacaagcccgcggcagggccgtccgggccccgcgtctcccaagaaatcgcctctggcgacgcagcccgggactgggggccgcgggcccggcggggtgcgaggccccgggcccggccgccgcgcccgccccggcgagccccttaccggtgaggcggccgcccccctcgccgtgcccgcggcgccgctgcaggatgaagtagcagctgctcttctgggtcacccagagcttcagcgcgttcttcagcagcacctcctcgggcttgagccacatcgcggcggtccggccgcgcccgccggccccagctcacatctccccggccgccggtcgctgtgagccgagcccgctcgagaggcgacggcggcgcgcggggaccacagcccggccggtgcccagcgctc

SEQ ID NO: 198349 - DNA, 955 bp, Homo sapiens
  chr2:101924527-101925482
  hyper
tgaagaccccagcctcggctgccgcgaagtccccctcccgtcctcgcgccccggcctgctcacccgcgtgagacatgggcaaggtgatgttcccgtagcgctcctcattgtagaggacgacggccgaggcgttcctccgcgccgccaccagcaccttgtccttgaaggtgcagcccccacgagccaccagggcgacccagggcgcggcccctcggccgccgggctcgggcacgaagaagcgcgtgtcgggcgcgcagccctcgaggtctccgccgggcgcccacgggacgcccaccaggccatgcgcgccctccttgggcgagctgtcgccgaagcggccactctccgagacgctccacaccgtcaggttggtctgcgggtccacgtactcgatgtttaccacggccgagaaccactcgagagcccggccccgggccccgggcacgcacagggccagggcgagcaacgccagagccaacacgccgcgagccccgacgctggcttcgcgccgccgccacgccatggcagcaccgctgagctgactagggggagtcagggtcacgcgcgagtgcggtgcagtcgaagagcagagagaagcggacacccaccgccgccctggaagactgaggcggggtcggggccgctgcgcacgcgcacctggcggagtggacgaagggcgtgatcggccctggctccgcccccgtccgaccggccgcgttgtgcgcaggcgtaagctccgcggagcctcggaccgcgatccgtcccgggatctcaggcgcctgtgggccgaggcggggcgcgcagcctgtaccacagcttgcgccacggcggaccctgtggccaggggccaagtttgcgcaataggacgtctagcacccccaaagtgaagggaagtaactccagagaaacgggaagcttccctgaaagcaggtgtgggaccgcagttctgtaaaat

SEQ ID NO: 198350 - DNA, 227 bp, Homo sapiens
  chr2:102003274-102003501
  hyper
ctccgaccctcccccgacttcgccaggctcacggaggcaccatcgccttccattatgtacagtgtcgagggtcccatccagggcaccgggcacgtctggtggacccggatctcagtcccgagcggtcgcgagcacgtccctgtccccgtcccccggccgccgcctgaatgccaggccccctcgcgctccccgccgggcgctcaccttcttgtgggtggacacggtgg

SEQ ID NO: 198351 - DNA, 225 bp, Homo sapiens
  chr2:102003609-102003834
  hyper
acatcccgggtggcgcggggggcggcctggcccgggcggcgcccgcccggggccgcaggtgcgcgtcctccttgtgggcagaggcggggaagctttgctgccagatgctgcccgaatcctctagcagcgcgggcatagcctcctcagtggaggcgctgtccagctcctcgtccacctcgttggtgacggcccaagacacggagctcacgatcacgtagcccgcgg

SEQ ID NO: 198352 - DNA, 96 bp, Homo sapiens
  chr2:102004154-102004250
  hyper
cctcctcgcgcgccaggtcccgggatgggttcgtttcctgcaggatggcacaggttccgcagccagagggtgggcgttcaaatcccggcttaatac

SEQ ID NO: 198353 - DNA, 332 bp, Homo sapiens
  chr2:102313750-102314082
  hyper
accccagctcctccccggggaaatcccagcccgcttcctccccgctcctgcagttttcgggagcgccgtgcggggtcgagcgcggaggccgcaccctgggcgccgggcgtcgtgtcgggaccgctgcccgcgctgcccgccggcgcggccattgttcgagccccacccctgatgaatattcacgccgcgcgggcgcctcggcccgcgccctacccggcagggctcggggtgtgagtgcgtttccgccggtttttcctgcctgaggaggaaagggggagctgttttctctctcctcagaatatatttttggtgtcccgtttctcctcctccag

SEQ ID NO: 198354 - DNA, 70 bp, Homo sapiens
  chr2:102314091-102314161
  hyper
cgccccctccctccccacctcgctccccgcctccgcctccgcctcccgggttatctttgtctcgctgcct

SEQ ID NO: 198355 - DNA, 159 bp, Homo sapiens
  chr2:102314987-102315146
  hyper
acaagtctataaggtcggtgtgggcgccttctttgtttcccgtggcatgtggaaacttcttattgggggacgaggagagggtgataaacatgctgctgactggaggccacgccgcttggccaaagttgggagaggggtttctttcgccttgcagtccct

SEQ ID NO: 198356 - DNA, 68 bp, Homo sapiens
  chr2:102637363-102637431
  hyper
cagacatgcaaatctcgggtcccgtggagacctactgattgaaactggagtctgggggctgtcatctg

SEQ ID NO: 198357 - DNA, 59 bp, Homo sapiens
  chr2:102637461-102637520
  hyper
accctcaagtctaagaagcactgagatcctggaggcttctttctctccctggatgcccc

SEQ ID NO: 198358 - DNA, 63 bp, Homo sapiens
  chr2:102972744-102972807
  hyper
aggaggcggagatcgctgcttctcacctactttctgaacttggcctccgcagtcgcgacctgg

SEQ ID NO: 198359 - DNA, 580 bp, Homo sapiens
  chr2:103235356-103235936
  hyper
aagaggagagaacaggattccgattccgtgggggcgtgggaacactgagttccgcgcagggagtttccctgttcagagcaccttgtgcgcgagttgataactctcggaaaggaaacaaaatttggctttcctaaactttctgtacgtccagagaatcccatgccttgtcttggcctccgcagcgccaggctggggtgacagcactcctcctccaccggcccgggcttctcctccggaccgcgagcctgtggcgcctccccgcgcgcccagcgcaccggggtgtccccttggaggagcctgcgggggcgggggaggagggaagggcgcgactcgtgggtcgcgctggttccttcactggatggacgtccgacgctgcctccggggcggagacagctccggccaccatgcgcccgttgcggcgattccacccacagttcgctggctctgggggtggcgggtcttggcgcgcggtgcctgcgcgaagggagggcagccatcgcccccgcggtcactggggccccgcgttccccgcgggctcgggcaggtgcgcggtgtgccggccaggtccccttgtcctcct

SEQ ID NO: 198360 - DNA, 360 bp, Homo sapiens
  chr2:103236292-103236652
  hyper
caaccggcggcacccatggaaccactgggcaactggaggagcctgcgggcgccactgcctccgatgctgttgctgctgctcctgcaggtggcggggcccgtgggcgccctggcggagaccttgctgaacgcgccgagggccatgggcaccagttccagcccgcctagccctgcgagcgtggtggctcccggaacgacgctgttcgaggagagccggctgcctgtgtttacgctggattacccccacgtgcagatccccttcgagatcaccctttggatcctgctggcctccctggccaagattggtgagcgaactggacttgtggggaatgggagggggcgatctcggggggacacctgg

SEQ ID NO: 198361 - DNA, 139 bp, Homo sapiens
  chr2:105460782-105460921
  hyper
ataatgctttgattaatgtaatcctggcccgggatccgccacatgcccctcgaccctctcccaagagaaggaccctatttgacaaacaataacagagcagtaactcttgcaatctgcccacacctttgggggtggctgg

SEQ ID NO: 198362 - DNA, 47 bp, Homo sapiens
  chr2:105468516-105468563
  hyper
gcacctggagatctcagattgattcaatgaaatctgtgttccatctt

SEQ ID NO: 198363 - DNA, 350 bp, Homo sapiens
  chr2:105471072-105471422
  hyper
actcttgtttcagaggcaaccaagagctccggcaatagcaacttcagagaaatgcaccatcgcaagaagttttcctaggacagaacaaaacttgaaacgagaggaccagagggggagagcaggagccagcctcccctctccgcactcgcgagcagccagcagcaccacgccttcaaggacgaaaaagttttactactctaagggaaaacgagtgaaatgtgttcctgaggaggagaggagaggagaggagagagcggacaagagaaggagcgggccggttgctggtcatccgtaatttggctaaggaagaaaggagcagcttctttctttgttatctcccgtgaaacctt

SEQ ID NO: 198364 - DNA, 60 bp, Homo sapiens
  chr2:105472048-105472108
  hyper
aggggctggcggcggcgggggtggcggcggcggcggcggcgggggcggcgcagggggcgg

SEQ ID NO: 198365 - DNA, 170 bp, Homo sapiens
  chr2:105473814-105473984
  hyper
gggcgatcatgagatctcgttcatactgtggtggtgtttcgtttttgtttttgtttttaaagaagggtgaagatgcctgacgcacgaaaactgcactcgtgaggtttttccaccctgagatgacctacacggcagcggtggacagcacctgcctcgtcttctcctctttg

SEQ ID NO: 198366 - DNA, 245 bp, Homo sapiens
  chr2:105478381-105478626
  hyper
gcagaagcctctgcgtttgcatcctgaactttgcagcctaggaaaggaaatagtgcgcaggctggaggagctgggggtgggggcagcggagatagcaggaggggtacttgtgtaatcagattctttgattttgttagcctggctcatggcctattaattagattactctctctttcattcttgatttcacatccgtgtttgttcctgtatcctaaaatgcgggcgcgagcttggcgagcaggagc

SEQ ID NO: 198367 - DNA, 112 bp, Homo sapiens
  chr2:105483512-105483624
  hyper
ccgcagtcgccctgcggtggcaggagagctactcattcagcagtagcagcattgcgccgctgcagcatcccgaggtcacattcagaaagcccgttcttccaggacagcatcg

SEQ ID NO: 198368 - DNA, 122 bp, Homo sapiens
  chr2:105483840-105483962
  hyper
ctataacaaaggctccctacaaaactagtactaaggatctttaaaggatcacacaccttgcaggcgtgtccccagctcccgggacgcagagcccgctgactgttcccccgggctccgcagac

SEQ ID NO: 198369 - DNA, 337 bp, Homo sapiens
  chr2:105489278-105489615
  hyper
attaaggagaggactagggaatgggatcacctatcgtcaagtcacttattttagaggggtttggagaagaggtgaacttggtggtggagagaaagcgcgctccctaatcacctgttaaacagttattttaaaattagctgtcgcatctgacgccctagggtccccaagggccttttcataagggagtctgtttaacttcactggctttgggagcgagaaagtttgccctttgtttctggaaacacgcccacgcagtacgcttaggtaaccttacactgaacaatttccttggagcggctaaaaccgcaacaaccaaacttgcacctgcgccattctc

SEQ ID NO: 198370 - DNA, 133 bp, Homo sapiens; identical to SEQ ID NO: 1730
  chr2:105490035-105490168
  hyper

SEQ ID NO: 198371 - DNA, 43 bp, Homo sapiens
  chr2:105654394-105654437
  hyper
cgacgagctgtcgcggatcgcgggacacgccccctgatccaaa

SEQ ID NO: 198372 - DNA, 214 bp, Homo sapiens
  chr2:106362018-106362232
  hyper
ccagggcgcgtgtgccggggaagaatagccgcggatcgcagggccccggcgcagggacgggggaggccgcgatcggccgggagaacttaaccgtgtttattacaactatttatgttcgcgcacaaagctgctgtcacattgcataaaggaggtcctcgcttcggcgaagggagcttttgtgcccggcttcaggctctgcgccctgccccagatt

SEQ ID NO: 198373 - DNA, 272 bp, Homo sapiens
  chr2:107502155-107502427
  hyper
ggattctaaagatccctactaccccaaacattatagccacagagaaccagaaatgaacagaacacactttaacctttaagaagtgcagttttgtacgggggttggctgaagaaagacaaaaatcttcactcccttccagagccaaaagagccaaaataaaagatcacctttactgagccacaggggcacaactgtatccgcccgtccccaaagcgcaagccgtcctcccgttcgcttctccagaatttcctgcttttccccaaaccaccttc

SEQ ID NO: 198374 - DNA, 104 bp, Homo sapiens
  chr2:107504132-107504236
  hyper
ggtaaatactctcctgtgaacttcagcgtgtctctccgcgcgcactcctggcattgggtgccccaccccgctggttctctcgcggacccaaagagctgttcagg

SEQ ID NO: 198375 - DNA, 173 bp, Homo sapiens
  chr2:108603415-108603588
  hyper
gagggggccgaggaaaggccgcagggggccgggagagcatcgggctgctgcggagaggaacttgcctgcttggttgctcacaaaggcagagaagacacagcccgcgggcgcttcttttgcctcctttaaattccagagaggctgattctttcccccaacgtctcttcacccac

SEQ ID NO: 198376 - DNA, 70 bp, Homo sapiens
  chr2:109647969-109648039
  hyper
gcagtcggctctgcccgcctcgccgggctgcaccgagtccgcgggtctctagcgcacggcctggccccac

SEQ ID NO: 198377 - DNA, 85 bp, Homo sapiens
  chr2:109648464-109648549
  hyper
aagttcttggtgttcaaaccccctacggttacgtaaacagaactctgcagttatcttctttccctttcttcggagctttgttttc

SEQ ID NO: 198378 - DNA, 183 bp, Homo sapiens
  chr2:109744565-109744748
  hyper
gactggaacccagcccttcccgacgggaacgcaaagcggccacgagggggcagcgcacggcagggaatcttcgccgccgaccccagcccaccgccaaacttccctgctgctctcggtcctcctgtacgtacttccgttgctctgacgctcccagaagccggggcgtcgggaaggagagcgcga

SEQ ID NO: 198379 - DNA, 220 bp, Homo sapiens
  chr2:110370721-110370941
  hyper
cttggtactattaacgaaaatagttgtaaccacacttggaaaaccgctggcttactaacaagcgagataaatctacaaaagtaactggaaaggttcaaaacagtgaacaaacgcgttcttttagagtacaaaagagtcaaggcgggaaaaaaacggtttaaaatcccaatggaggaaaacttggacgaccacaccatcggataaaacgggagagcttttg

SEQ ID NO: 198380 - DNA, 485 bp, Homo sapiens
  chr2:110371219-110371704
  hyper
gccgccgcggaagccggggagcactgggcgggcggggccggagggggcgcgggtcacaatcccgggccggaccagggggccggtgggtcgagggcgggaagtcccgcgggggccggggagcgcggggctggggccccggcgtcggcgggactcaccaggtgccgcgccacctcggaggaggccatggtcgcgggcaggggcacggtgaagcggctgtatcagcccggccccgagcggctggtcccggcgacggcggcgggaaggccggagggcagaagcaacgggcggggcgcgaggctaggctgcctccgcgacggggaagggacaggggcggggccgagctggaggcctccgggggcggggttggggcggacgccctgtggtgcgcgctgagcgttttgcctgcgccaagcgagcccctcacaggagctaccctcgacgcctgaggactgagcgtcagcgttggggcgggctgaaggagagct

SEQ ID NO: 198381 - DNA, 446 bp, Homo sapiens
  chr2:110371818-110372264
  hyper
tggccgagacagcggggagcggaagtgggcgtggcctggtggcgtgggcgcggggcgggggtgcggggggcgtgtccgcccgggcgcggcccagtgaggcggtggccgagtcctctggcctcagacgcgtaggctggcagcccgctgagcccgccagactccgccgccgtcgggagccggccgctgggagcccgtcgctatgggaccgcgctgagccgcccgctggcgggggagcagcgcggtcgaggatggaggggccggcagagtggggccccgaggcggcgctgggccccgaggcggtgctgcgcttcctggcggagcgcgggggccgggccctgcacgccgagctggtgcagcacttcaggggcgccctaggcggcgaaccggagcagcgcgcccgcgcccgcgcgcacttcaaggagctggtgaacgccgtggccactgtg

SEQ ID NO: 198382 - DNA, 217 bp, Homo sapiens
  chr2:110962328-110962545
  hyper
tggggtaagggggcgttacaacctgggaaggtaagtaggttgggggcaagctcccaggattaggtggggtcacggtgggaaggcgcagtgcgcgcagctgcgtccgcctgtcgcccgccccagggccctctgcacagcctgaccatacctgttgcttcagctcctgattgcggcgccgcagggcctggagaggatctcgctgtcgtctcgccagcat

SEQ ID NO: 198383 - DNA, 293 bp, Homo sapiens
  chr2:111490023-111490316
  hyper
cgcgccggacctcccgcccgggaagccagggcagggcggggccggggagggaggggagaggaaggtgaggagggaggagacgggccgggaggggtggagagggagagggcgtgcgcctggggcctcacctgctgggagctggaggaggcgcggagcgaagccggccctgccagccacgcggagaagcagaggcaggtgagcgcgatgcagccggcgccgggtctggggctcggggactcctccctgcaccgctacctggacggcgacttctggagcctcaagaacgagctgcg

SEQ ID NO: 198384 - DNA, 170 bp, Homo sapiens
  chr2:111490689-111490859
  hyper
gttgaacctgtttcttgagtccccgccccgcgatgtcccacccttggtggggagaaggggacagaaaaccgcgatgggatgggcgcacagggatggagtggccctgtccagggcgtgtctgggcgtcggggtgggacaggcttacaggaccccctcggagtgcaggtgtg

SEQ ID NO: 198385 - DNA, 278 bp, Homo sapiens
  chr2:111874608-111874886
  hyper
gcctagcattggtccgccgtctcactgtactgaatttcaagaatcatggcctactgccagccaggtcaggaccgaaggcgctagtctggggagactggagcaggtctctagtggttcacctgttcggaggctcttcctgttcagttccctctgcgcgccagagggtggcaccccaggcactccagaggtggagaggaggggacgacaggggaggcaaagagagaggagcggagggaaggaccagggaggaaggaccaaggagggagctttaataaatt

SEQ ID NO: 198386 - DNA, 204 bp, Homo sapiens
  chr2:111874987-111875191
  hyper
gctaggtgtcagagttgggaatgtctaaaacaaaaaaggcttccgagggttattcatggccaacagtttccacaggagaatccaaagggaaactagtttccggggccgctgtgtgtgcgggtgcttggtgggctgaaagctgctgtcactagatggctgtaagtgtgccaacatctgacctgtcccattgtgttgtgttttgca

SEQ ID NO: 198387 - DNA, 136 bp, Homo sapiens
  chr2:111875611-111875747
  hyper
ccctttccctgaaacccagcctggcctgactgcaacctctcccaacttcagtgccggatcccctagacaatcagggtgggctccccgctgcgagcgcgccccacagccgggtgccgccaaaggtctcctgctgtta

SEQ ID NO: 198388 - DNA, 713 bp, Homo sapiens
  chr2:111877553-111878266
  hyper
tggcctcagccagtcgagggagctcctacgaggttatctgcgagcccagcaaatcttgggggtcctagccaaatgcagtgcgcaacgttctctctcacttggaggccgccattcacctcgtttttttttttcctaaaaggatttttttttctgagtgcttttttcatttccctattttacctgctttgcacatgcctcccgccctcacccgggaggcggcgaagacgcccactgggaccgcgcctggccgttttctgggcgcgtcctgcccccacggcctctgtctcttagggcgactgggcgcggaagaaaagctggagagcccctgcggggtggcaggaggagggtgcctgagtcccgcgagaggcccgggcgaggaagatgcgcagcctgctgatccgcgtcccgcccggcgccagggaccctcagagggaggagagctcaaagacctcgccccgcgccttcgcgaggaccaacccagtccccgcgcctgccccagagcggcttagaaactcagggcacagtgagagcgcagggcgcctcccgaggcttcacaccgccggccgggccagcggaggctgtgaccggagcgccccctctgtgccgcgcacgccgcggccgccgccgggttggggtaggtgagcgggaggctagggtacacttcggggtgggggatgggcgcgcacatggccgccagcaggcagagttactcc

SEQ ID NO: 198389 - DNA, 90 bp, Homo sapiens
  chr2:112656487-112656577
  hyper
caaacaccctccacccactgcggtgccagaggagggggcgtaggcgaacctaccgtccactgaccgcggcgcctcaagcgtcccgagggc

SEQ ID NO: 198390 - DNA, 33 bp, Homo sapiens
  chr2:114035443-114035476
  hyper
ggctcccgggcccgggaccaccggctccattgc

SEQ ID NO: 198391 - DNA, 88 bp, Homo sapiens
  chr2:114035831-114035919
  hyper
gcgggtgggtcccgcgaatcccgtgctgacgctctcgagatccaaccacccgagcgcacgcacggacgctcagcggcgcgggggctcg

SEQ ID NO: 198392 - DNA, 43 bp, Homo sapiens
  chr2:115920698-115920741
  hyper
cttattgctagcgtgggatagagggagcgcacgcggctaggct

SEQ ID NO: 198393 - DNA, 196 bp, Homo sapiens
  chr2:118771340-118771536
  hyper
cccctgcccatgcaggggtacctgctccccgcctccaagaagagggtcggcgcttccctgaggtggatacgcctgaggaagggggcggggcgcccctaacgcacccagggcccgctcagcccgccgccccgcggctcggccctctcttcaggaaccccgacgtgtcagggaaggaggaggcgttcttacctccggg

SEQ ID NO: 198394 - DNA, 50 bp, Homo sapiens
  chr2:118981042-118981092
  hyper
taaaatattttgctttatcacgcctggcgtgaaaagaaccaagaacactg

SEQ ID NO: 198395 - DNA, 211 bp, Homo sapiens
  chr2:119068126-119068337
  hyper
ttccaaggctctggctttccccagccgacttgggtttcggggcagcgcgggctcccttctttccagcgcaggaagaaggggtgagggaggaggggccggggtgctggcactcaacggtaacatctgttttacttaagcagctcgatttcgttttaggatgaaaaagtattccctttcagcatgaggaatcgtgggccctggggcttgtatt

SEQ ID NO: 198396 - DNA, 276 bp, Homo sapiens
  chr2:119532328-119532604
  hyper
aatgaacactagccaacacaagcagaggtttgccttgagtgacttctctgaaagtggcaccttttaccattttttaggtaacagaaactgacctgagggtgactaagcccgagatgaaaagctgttaaagggacctgcatggaagcaaaccggtgtgcggcgccgagcatagggtgctgggggcgccttttttctgtgctggcgtcccccacccccggcttgctgtcctcgtgaaacctcgctcccgcactgcagctgggtcgggaagcccttcct

SEQ ID NO: 198397 - DNA, 349 bp, Homo sapiens
  chr2:119591726-119592075
  hyper
tgcatgcgatgggcacaaaggactctgcgcctcctttccctaaccccaagccctgggcggtcggagaacccaagacgggttcaatcccgaaaagcaaactttgttaacttctggctgaatttggcacggcggaggggggagtgggcaataatccctccattctcccctccaccaacacccagggtccctcacttacatcgcagtccccaagtcaacactcgacttgtcactttgcaccacaatgcggtcagccctgtgaggacatgaagaatggatatgaaactcgaggccagataagcgtggaactaggttcagccgtcctccctggggtacctacctccctactccc

SEQ ID NO: 198398 - DNA, 85 bp, Homo sapiens
  chr2:119600864-119600949
  hyper
gtggggaccgagggcagaagggaggggggagagggcaaaggaagccgtgagaatagcattgccgagctgggccgcgagccccgcg

SEQ ID NO: 198399 - DNA, 60 bp, Homo sapiens
  chr2:119605299-119605359
  hyper
ctgtttttttttttttttttttttttttttttttcaaatctctgacagctcggatctttg

SEQ ID NO: 198400 - DNA, 84 bp, Homo sapiens
  chr2:119605386-119605470
  hyper
tcacccaggcacactttttgccttcaaaccggaagcacgtgagtcagggccgcacgtgtgcggagccaatggcgagccgggact

SEQ ID NO: 198401 - DNA, 94 bp, Homo sapiens
  chr2:119605501-119605595
  hyper
cgcgcgcgggactttgcggataaataatccgggggcgtcaaccgctggcggagagggggcgcctcggcgctggccctgtgcgtcgggtccgccc

SEQ ID NO: 198402 - DNA, 75 bp, Homo sapiens
  chr2:119606630-119606705
  hyper
cgggaatgtgagggacgggggtggcgtgtggactgaagctctaggcacctgcgggacttgtctccggattcgttt

SEQ ID NO: 198403 - DNA, 45 bp, Homo sapiens
  chr2:119609396-119609441
  hyper
tggtaatcgcatttcgagtgtagatcagatggcggtggggcctcg

SEQ ID NO: 198404 - DNA, 137 bp, Homo sapiens
  chr2:119610099-119610236
  hyper
tgtccccatcatccggtcttcccccagagttttctccctcttatctaaggcagttcacagcatggaccgttttgttctagaaatagtgcctctctctctcctctctctctctcaagctcagacaaactgagaccttt

SEQ ID NO: 198405 - DNA, 118 bp, Homo sapiens
  chr2:119610619-119610737
  hyper
ctacatacaattccctatttatttttcttcactttaatctgacatcccgctttttatgcttacactgaatcctacccaaaccccagaacccagacccgaatttgggtttaaccccttt

SEQ ID NO: 198406 - DNA, 255 bp, Homo sapiens
  chr2:119610998-119611253
  hyper
cgattgaggaggggccagcgcggcttctgggttctgctacccccacccctccgctcagtccgtggtctccaggaggtctgaacccgacttcaaagctgggaacggaaaacgccagaaaagaagaaaaaacacaacatccaagtcctttgtgcaggaacgcccccgtgactccaaaaccgttctttttgcttgtcccagaattaactgtcttccttctcttccctttgactcctgtaggggtgcgggtggttgtcc

SEQ ID NO: 198407 - DNA, 91 bp, Homo sapiens
  chr2:119611824-119611915
  hyper
attctcgtgtggttgcgctttgctgtgtcggtgtgaaagtgtgtgtgcgtgtccacgtgaatagtctccatgtgtgcgtgtcagtgagtga

SEQ ID NO: 198408 - DNA, 79 bp, Homo sapiens
  chr2:119614402-119614481
  hyper
tcagacctcaagccacgcttgacctttccatgaaatgaataaaactcgaaagccagggaaaggggacagtactttgatc

SEQ ID NO: 198409 - DNA, 134 bp, Homo sapiens
  chr2:119615627-119615761
  hyper
tcacctttcactaagatgtttccaatttaccaaggggatagaatgagagacagagatgtgagagatacagagagagagatagagagtgcagggtcgggggaggaggcagagagcggaagcggttctctttaggg

SEQ ID NO: 198410 - DNA, 162 bp, Homo sapiens
  chr2:120189853-120190015
  hyper
gtgagaaatgaggcgcgtctggggtggagggacagaatcgacttgcaaagtgaggcttatgtaacagaggatgcgtctcttgggaagttagacctttctgggggtggaggttaggaagaccgtctccctccccaaagctgcgtttggggtgctgggctgggg

SEQ ID NO: 198411 - DNA, 234 bp, Homo sapiens
  chr2:120281412-120281646
  hyper
ggcactgccacgggcggctccagaatttccgtgtaggagagtttcagaagccagaccagaggaaggggtcggtggtgggcacagggattcatcttagagccgccttcgtctggcgcgcacgatgtttttctttgggaaagggtccctccggagaagagctgggagagattaatgttgggaggattgggagggaagagtccctattcctcatgggaagatctgctagtccctctc

SEQ ID NO: 198412 - DNA, 660 bp, Homo sapiens
  chr2:120301687-120302347
  hyper
ctacaagaaagtgggcgtcgtgagtgatgcctgtcaggtgaagccccgcccactggctcgggcggctccgccccgtccgtcttctctcccgcgctccgctcttgaagggttccagtgtgtggtgtttccaactttctcatgtcccctcgggaatccattcgtatcccatgccataagtcgcgctgtctattcttgaccaggcccggcaaactgctccgagctcccaggaatcacccgccgcctccggtcgtggcccgcagcagcccggctcccccgccctggggcgtttggtcgcgcccggccgccggccctgggagcgcgtccgcgtcgtcatggcgacgctccgagcgggcgccggcgctggcgccggccgaatccggcccgggaaccacctccagggtgagcggccagggacctggggcccgggtggcccagggtcggccgctggggcgccgcagcctagctgctgaggcgaccgagccccgggtggtgtccagccgcaagtcggccgcggcttgggtccgaggagagtcgggcccagagggtgacctgaggatggtggggggagcggtgcgcgggcctggggcgaccctgacccttagcaggagtggaatgaaaggtcgcggaggggaggaggcgcttggccggggcgagagggcc

SEQ ID NO: 198413 - DNA, 129 bp, Homo sapiens
  chr2:120770809-120770938
  hyper
cgccgcagtacagtccgctgcgctcctagccgagtggacccttcctcgcccgcgcctgcggtagcggccttgtccccggggaggcgggcgggggccgcacccagaccctagggcggccggcccctctct

SEQ ID NO: 198414 - DNA, 218 bp, Homo sapiens; identical to SEQ ID NO: 106596
  chr2:120770966-120771184
  hyper

SEQ ID NO: 198415 - DNA, 332 bp, Homo sapiens
  chr2:121199617-121199949
  hyper
gtcatttgccgggcgttccgctttctccactgtaccatgctaatttttcgagggacaattttttgacaatgagtcctccagcccgaacagaaaccctttatggggccggccccagggaggccgcggcgctgccaaggcaaacaaaggctcattgctgccgcggaacatgcctgcgcctttcagggccgggttcgcagagcgcgccgcctccagcccgcgccgaggtaacacctggtccgccaactcctggcgcctaatcaagatatcaatcacggcgcgggggcaggggggcgcacgggccccgaaggctccagaacccggcaagtgcaggt

SEQ ID NO: 198416 - DNA, 212 bp, Homo sapiens
  chr2:121200178-121200390
  hyper
aggctggggcgcagcgcagcgccaggggcgcgggacccagccaagctccccactctgcccccactgggacagagaggcgcaagagtccaccaacccctgccacttgtggcctttcctgactgcccagggcttccaacaatgtagaagagtgacagtaaatgtccaggtccctgcatataggtgtttctttaatctgcacaccaggccggaaa

SEQ ID NO: 198417 - DNA, 241 bp, Homo sapiens
  chr2:121200454-121200695
  hyper
ttgcccgaagtcccacggctggtcagtggcaagtggacagtggcaactgcgcctggaaaacgccgtccgtggcgcggtcgcggcgccaggggcatgcctgacagccaccttctctcccgtgaccgccgggctccgcatcagggcgagccactcggctcgggagagcaggaaactggggagggccgagcctccggccacgccttgtcagccccggagcctccaccaatcccgggcccggaaa

SEQ ID NO: 198418 - DNA, 68 bp, Homo sapiens
  chr2:121200731-121200799
  hyper
caggtagcgcgcgcaggcgaaccgcaggcccgggcttctggggcctcacgctgcgcggagaggctgcc

SEQ ID NO: 198419 - DNA, 416 bp, Homo sapiens
  chr2:121494552-121494968
  hyper
ggttcccccttccacctcactttcatccctgcccccctactcatcgtctctccccacccccgacaatctctcaacaagtatatttgctgaggaatttgaaaaatccactactgcaacttgatctgtatgtgatggatggggagaggcgcggagagagttgggcgccaatcctattaagggtttagagaggggagtcttttccccggacggggcgggggcggggagctgggagggagcgtgtgcttgcgtgtgtgagtgtgagcgcgcccgccgcgctggagagctgggagtccacccagctcggcgccttttcagcccggcggtaactgctgtcatttcctaggaaacccgacttttaccgcgcggggagctggggatggagcccgtgcgcctcaccctgggtgatcggtcgctga

SEQ ID NO: 198420 - DNA, 240 bp, Homo sapiens
  chr2:121495008-121495248
  hyper
ccactaccttctcttttgtgtaattgttctgtggctcctagagttgatcccagctggaaaagtagacctgtccctactgtctggtcccgcgccctgggagtcttgtaggcgtccctctgtcccccagcccgggcatcccgctcggtgcgcgacctctggcacgggctttgcagctcggtggccgcagcggtgtcccgggccccctctccgccgctcttgccgggcgtgtgaaggtttaat

SEQ ID NO: 198421 - DNA, 286 bp, Homo sapiens
  chr2:122042359-122042645
  hyper
ctgccgcctgggaggagccctcgcagacatagggctctgcgcgctcgcctccccagcgggcccccaactccgcacgtcgggtcccgccggcgtccatctgtcagtccctaggcgggacgctgggcgggtctctcagtccccagagggcggacagcggggaggccagggcccagcaggggcgccccctctccgcccctggacgtccaacggcgcccggcccgccggcccggcccgagacccgcggggaccgcgcgcggcccttaccgcaggtagctgccggagttgt

SEQ ID NO: 198422 - DNA, 115 bp, Homo sapiens
  chr2:122042982-122043097
  hyper
aactccgatgtggggctcaggtgacccttgccgcccccaacccgctccacacggcccctctggcctctgctccccactctacgcccagggccggtctccagagcggctccgagat

SEQ ID NO: 198423 - DNA, 227 bp, Homo sapiens
  chr2:127413501-127413728
  hyper
atccggtagtggcagatggaaagagaaacggttagaaaagcgtggttcttgcgcaggaaagttggagcaaagaagagttcagaagtgggcgggtgtgtgtttaaaaaaaaaaaagggggtggaaaccccaccagccaagtctgcagaaaaaaaataaatgaagtctgcctatctccgggccagagcccctcccctcggcccgcgcgggaggagtgtgacccaggtgc

SEQ ID NO: 198424 - DNA, 51 bp, Homo sapiens
  chr2:127643929-127643980
  hyper
caggctcacgtggccgaccctcccagccccctaaccccggtcgggcccatc

SEQ ID NO: 198425 - DNA, 68 bp, Homo sapiens
  chr2:127782975-127783043
  hyper
ccctttcagggaccctgcctcgaactccacgacatgggaggcaggggcgggccttttgcaggggaagg

SEQ ID NO: 198426 - DNA, 260 bp, Homo sapiens
  chr2:127864043-127864303
  hyper
ctgcatgggcctggagagctgagggtcaccacctggcctcccagcctcccggcccttggcctccaaagcggggtagcctggagcgcgcgcctgagaagagcctggagcagggccggccactgctgtgcagccgagccacgaaggtgcaaagcggggccctgtcctgccccggccgggtgtggggagacagaggacgcaaacctaagagggcacccagagcgccggggaacgcagcctggggacctcgaagcccctcgaaa

SEQ ID NO: 198427 - DNA, 58 bp, Homo sapiens
  chr2:127865204-127865262
  hyper
taccctaggcgcctccgggacatctccacatctttgcctacggcgcctagcccagtac

SEQ ID NO: 198428 - DNA, 217 bp, Homo sapiens
  chr2:128165843-128166060
  hyper
cctgccgtggtaccgcctggcagcgtccaccccgccgctggggcgccctggaggctcctggccctccgtggggccgtgacaccggcgctgcggggagcggtggcctcgcagaggctgggcatgggaggacggccgccccgggtaaaggacagggccctggaaacgcgggtctgccgggagcaggggacaggaaggagaccgcggctctcccagtcct

SEQ ID NO: 198429 - DNA, 578 bp, Homo sapiens
  chr2:128173487-128174065
  hyper
ccaaagtcctgctccggcttcctgggtggacctgaccgcgttcgggtgcacgtggggcgactcacacctgacaagtaaagcgggtgaggccgcgcctgtgaagggcgcctggctcctccgcaggagcggtgcggcgcggcgcccccggctggaaccaggtgtaactgcagagaccctgggatcgcaggaacggctggcggcaggactgtccctacctcgagaaggtgacggggtttcctgcgctgccagccgatgaggcggccgtgacgcagcccgccgtgcagagtccccgtcggccgacaggcgtgcagagctctgcagaggacccttccgccctctgggcagcctgccaagccgtggcacccccaacccccagcactgggcacttgggagcattgcagccgccctggctcgtaccggtgccggtgctttgggcacctgggctggtttggacatgggtgccccgggcagagtccatttatgcaggtcagaatcagtgtgtggagcctgcatagacttgccctggagcggctgcctgtgctggggtggggaggagtagagggcgagaagttggtggg

SEQ ID NO: 198430 - DNA, 64 bp, Homo sapiens
  chr2:128421745-128421809
  hyper
cagggcccatccgacgccggggcagagcccacggcgtcggagggccccggtcgggtttccgagg

SEQ ID NO: 198431 - DNA, 105 bp, Homo sapiens
  chr2:128459399-128459504
  hyper
gtgttgctgctgcgcgcgcgcaagttcgcgctgctctggtcactgggctcggcgctggcgttggcgggaagcgcgctgctgcggggcggcgcggcgtgcggacgc

SEQ ID NO: 198432 - DNA, 71 bp, Homo sapiens
  chr2:128848514-128848585
  hyper
aactggatttcaccgactgactgttgaagctttcgggtctcagctgttggcccaacgaaccttcccaagac

SEQ ID NO: 198433 - DNA, 135 bp, Homo sapiens
  chr2:131792037-131792172
  hyper
gtcagtgaagaggggcccctcagggtggatcgctcccaccggagtttaaatcctgcctccgccatccctgcattcctgcgcgattttatgactgagcagaatccctaacctttcagagccacgtttactcatctg

SEQ ID NO: 198434 - DNA, 99 bp, Homo sapiens
  chr2:132767530-132767629
  hyper
ggcggcaggggcaaaaagccgtggcttcgggggcaaaaagccacagcagcaaaaaccctcagcggcgggggcaaaaagctgtaaaaagccgcggcggcg

SEQ ID NO: 198435 - DNA, 120 bp, Homo sapiens
  chr2:132795464-132795584
  hyper
gcccgcactgctgcagcgtccggctggccgcggcccctgcgccaccccatcacccccgcccccgccctccttcttctctcccatagcctccccgcgcagcgccgctctatgcaggccaca

SEQ ID NO: 198436 - DNA, 100 bp, Homo sapiens
  chr2:132796304-132796404
  hyper
gcgaaaagccgcaaaaagcagcggcggcggaggcaaaaagccgcggcggccggggcggaaagccgcaaaaagccgcggcggggcaggggcaaaataggag

SEQ ID NO: 198437 - DNA, 373 bp, Homo sapiens
  chr2:133173705-133174078
  hyper
ttcctggagcagcggctgcaagcagcgcagagcccagctgtccttggcaaacaccccacagaggaggcgagggcttgctggctcctctgggacgccccggtcaagccaccaccaaacgggccgtgacctcgccttcgaagggggcccccagggcagcggtggacgtgggggcagtgcgggcgagaggaagtttgtctttctcccagctcgggagggtcgccagcttccccggggctgcacctccttgggacgcttgtcgggttggagcgccgcagctgcctctgcggctgccgcctgggtgacggagggtggggcgggggtgggtcgctcgtagctcgagagccacgatctgatttcagggaccgtgcctatg

SEQ ID NO: 198438 - DNA, 212 bp, Homo sapiens
  chr2:133174170-133174382
  hyper
ctcccgcagctcgggagagggtgctctgggaatgtggaccggggctctcaagtgccggcagctggaaaggaagaggagtgctgcgaggcggagtgcgccctcggcgaagaggggcagaggcggagcgccaggtgctgcggtctcactcccagccagccaggagtttagaacgttcttcctccgccctctccccgcctcgccccagccacata

SEQ ID NO: 198439 - DNA, 270 bp, Homo sapiens
  chr2:133426367-133426637
  hyper
accccaggccttttcccaagaagttgaagggagggtggggacggtaccaccgcaagagtgaagtagctctggagatgtgcgttagctccagcctaagccaaaggatttgcctaattgctaattggttacaaattacttaattactattttggcaccattcgtgattacattcgcagacgtctttttagtttttatttatttaatttttaaagtcagcgtttctgtgccagggctctgaggatccctgagcgaccacctgggaacaacttg

SEQ ID NO: 198440 - DNA, 209 bp, Homo sapiens
  chr2:133427262-133427471
  hyper
tcctcctgcagcgcgggacttggacactttcccagcctcgcgccccggggcaccagtcgcggccgccaactcccgctgggcagccccagcgcagggctggccccgaggtgggcgccttgggggcaaaagggctggcgggtagatggattgtgcgcacctggcctcggctgctggcctctgggtattctcacctggaagcaagaacaatc

SEQ ID NO: 198441 - DNA, 226 bp, Homo sapiens
  chr2:133427659-133427885
  hyper
tgccgctcgcggagcctgcatcgcccgcgctcgggctcccggctgcgggtctctgctcctcccgctcgcgctcccgggccgagcaccgcgcctccggagttggcggctgagactgaaggaactactggcgatcgggagcacccacaaaagtctcgccttttctccccacctcccactccaggcatcacgtgacggctgccgagttggggtgggggtggcgggcggg

SEQ ID NO: 198442 - DNA, 78 bp, Homo sapiens
  chr2:134024276-134024354
  hyper
cgctcctccgctttgttgtgttccgccgccagtccccctgcgcctgcctgccagtgtccccgagccctctcctgccgc

SEQ ID NO: 198443 - DNA, 235 bp, Homo sapiens
  chr2:134024401-134024636
  hyper
actttcctcctggaggcgcgcgttaaagatctgcctgggagcgcccggcgggcggctcggcttgcgctctgatgaggaggctggggcccatcgattcccaccccctacccactccccctcccctcccctccgccgggcccccccatcagaagctgcttaggatcggcgctgtcaaatccagcccatctgctgcaatcataatcagtctcaaccgaacggttctgacaaatctccg

SEQ ID NO: 198444 - DNA, 166 bp, Homo sapiens
  chr2:134325852-134326018
  hyper
tccagctaaaaatttcctcccgcggttggttatcctctgtttatttttgaagcattcaaaggccacgctaacagaacagactcggttttcctgaacatccacagcggctgggaagtcctgccgtgaatgcggagcaagtttgcggagacttgctccctgggctgcg

SEQ ID NO: 198445 - DNA, 353 bp, Homo sapiens
  chr2:135476396-135476749
  hyper
tcagcggggccgggccgggggcggcagccggtggcgcgtggccccggggcggcggcgggacggtgggcccctgggagctgcggcgctggatgcccgcggccggctccatggcgcggggctgcggatcccggcggcggcgacgacaagcgcggcggggactcgagtcagaagtgcgaggcgccgcggctctggcgggggcaggagcggacggactggccgcgtggacagggagggagggcgggcgggcgccgcggagtggaggtgcacgggcgggggcggggacgagcggagagccgctcggctccgcggccggtggcggaggctggggccgcgttgttgccgccgcgctccgc

SEQ ID NO: 198446 - DNA, 88 bp, Homo sapiens
  chr2:136288366-136288454
  hyper
tttcattggctgaagcggcggcatgggtacctctcaggaactacaattccagccaagcaccgcgacaagtgaacggaggagaagttat

SEQ ID NO: 198447 - DNA, 139 bp, Homo sapiens
  chr2:136873851-136873990
  hyper
ccactcccaggcggcgtggggggtggggtgggtgctgctaggaggggcagtgattaactttttgtaagaagtttttcgcccagggagggaagaggggagaagggaggatcacggggggagggcgggggcgttgcaaaga

SEQ ID NO: 198448 - DNA, 912 bp, Homo sapiens
  chr2:136874020-136874932
  hyper
ttcccacgcctgcctaaatacaaaccattctgggcttcaagcaacttgtagtgggtaaagagaatgcggtcttaaaacgaaggcccttcggtgcttggggtatattgggcgggagtgtcagaaaatgaacaaacggcacctcctcccccaagcgggcgctcctccggtgtgtgggtctcttgccatcctcgtgtttatcacttggcgcgtttgggacgttagggagcggggcattttcctgggtggagaaggtaacggggtctgcacccgtggtcctcgccccaagtttcatttcctcactctcccgggtggcttcccattaccccgccactgatccagttaacccggccggaggtgggcagctggaagcctccaggcggtgggcacgcggggggccgggtcgtccagccccgggccgccgcggctgcccactacacccacgccaaccgcccgcaagcagcgctgcaggggctccgctgggcgacacgccaggctctgtcccacagggtgctggggagcgactgggcggctccgccgcgagcgtctttgaattgcgcgccgctgcaggaaaccaaaaactccctagcaagagggtttcaaaaggtttctggaaaccaccgacggttaaacatcacaactggactcggagagagccaaacggtttccccacttgcacctgccagtcttcgcggcggcgacctggcagcccaggtgcggtcttaaccgcccccgcccctcaccccgtacccgctcctatccccggagcgcaaatctcagggctggcagctgcgcggtgtcaaaggggaggtcaaaccactccgctgacctctgcacgaccccaaactctcgaactgcaggacccactcgcggccgtggggaagaggcgcgcttcggacggcgggaaggttttcc

SEQ ID NO: 198449 - DNA, 482 bp, Homo sapiens
  chr2:136875399-136875881
  hyper
tttctcctcgactcacagagaaaaagattccaatcctgctccccccccacccacccgcactatataggcatggtcaagaaaactcctttcggtgacccttttttggagtacgggtacctccaatgtcctggccgcttctgcccgctcggagaggggctgcgctctaagttcaaacgtttgtacatttatgacaaagcaggttgaaactggacttacactgatcccctccatggtaaccgctggttctccagatgcggtggctactggagcactcaggccctcggcgtcactttgctacctgctgccgcagccaacaaactgaagtttctggccgcggccggacttttataaaaacacgctccgagcgcggcgcatgcgccgctggggcggggagggagaaggcggggtgggggagaggggcagacgcgaggaaggagggcgcaggggcggggcggagaggtgcgcggcttgggaagcccagg

SEQ ID NO: 198450 - DNA, 217 bp, Homo sapiens
  chr2:136876145-136876362
  hyper
tagggccaagcttccaacgccattccccgcgctttcagcagacgcagcccattcaggaggtaaaaggagtaaagatccttccttcggaggatgtagctatacttgcacattcacagcatcactagggtcaggtgcagataattaggagatactttcagaagaaggtaggatttggcataattctggagactgatcagatgtagatatgtattgctca

SEQ ID NO: 198451 - DNA, 304 bp, Homo sapiens
  chr2:137522037-137522341
  hyper
agtgtcagagagtaagcaaacgactttctgagctgtgactctgctcctcgactgcccacgtgctctccgctgtctgcactcctgcctcacctgggctgactcggactctccacctcctttgctgcttccggcatgagctacccaggagcctaaggcgctccttcccgcaactccggtccccgcgccccgggactgcaaatcctttaaacagaggccccagagctaggggttttcccaggctctggtgggcgtgggctgacagtcgctgggagccccgcaacaggggggatgtccaggcaggtat

SEQ ID NO: 198452 - DNA, 60 bp, Homo sapiens
  chr2:137523039-137523099
  hyper
tgcgccgttccttcctcctcctcctcctcctccttctcttcctcctcctccttctcttcc

SEQ ID NO: 198453 - DNA, 149 bp, Homo sapiens
  chr2:137523676-137523825
  hyper
cgcccaaaatcgaaaggccgggagttgttctgcaggctttgcaaacaggttgactgagggtttcctttcccgtagcgctgactgcgaaatctgtgcataggcgttcagtgccagtggaggatagctgagcaagccaagaagttttgcag

SEQ ID NO: 198454 - DNA, 64 bp, Homo sapiens
  chr2:137523855-137523919
  hyper
aggctgtagcaacagtttacatttcccctgtccctgcgagtggctaggggcaagctgggctcgg

SEQ ID NO: 198455 - DNA, 142 bp, Homo sapiens
  chr2:142887729-142887871
  hyper
ggggcctgaatcggcgctttcgccgctccacggacctcgaatgcagcaggtaaggaagttaacctgggagctaagttgagggcggacacgcttaacgcggagaacctggagctcgcaaaagctcgcagttgagggccatcgc

SEQ ID NO: 198456 - DNA, 201 bp, Homo sapiens
  chr2:142888771-142888972
  hyper
aatccccttgaagggaaagtaactcgaagctggttctgtggggatttgggtctttggagaagggagagacttctgcattggcctgagccagccaggcgcctacaatgctccgcagttcacagccagctgagaaccctcagccgagcacagggctgcttctgcaggcaaaacaaagcttctcccttcgttcctcggaagctt

SEQ ID NO: 198457 - DNA, 33 bp, Homo sapiens
  chr2:145090080-145090113
  hyper
cccctcccccgcggccgccgcggatgccgccgc

SEQ ID NO: 198458 - DNA, 49 bp, Homo sapiens
  chr2:145275891-145275940
  hyper
gttgaaactgtcaaaacttggagaagggggacctcggaggcaggcagga

SEQ ID NO: 198459 - DNA, 864 bp, Homo sapiens
  chr2:148601655-148602519
  hyper
cctttgggtgggcgctccagacaggcccgtcggacgcgatttggaaacgggtcgtgcccggcctagcccgcatctactcgcccggccacagcccagccacagcttagggactttgaggcgcccgcgcccctttgtcgcggtatctctagcccaagcaggccggacgccgaggcctcgcggtatcgagcctccgtccgccccgcctcctcgccctccactccgccccgccctcgctctctcacccctcccccgctcccgcctcgcttccccgacaatctcctcgcgctcccggcccggcacgcgcgctgcgcccggccgccgctgccgccgccgccgccgccgccgctgccgccgagcgttcctccgctgcgcctggcttccagcttcgggccggaaccggaagtttggggggcggagcccggcggaggccaggagaccgaaaacgcggccgagcccggagcccggagctggagccagagcctggaccagaacttggccgccgcctgcaccgccgccgccgctgccgcccgccgccccttccccgcgccgcagccgcctcgccgccaccgccgcgagctcggccgccagtggtcctcggactttaggtgtctgggttgaaggtcggtccggacatcggacccagtcagttcccagactgtccgggcggcagcggacgccgctgccgccgccgcctcttcgtcgcctcagcctggcgttttgttccgagagacgggagaggcgagcggagctgacagtgattttgacagtgatttaaacccgcttttgttgttgttggcttttcgttgtttggttttgtgtgttgtgcgtgtgtgtggcggtttttcccccgtggtgcattttatt

SEQ ID NO: 198460 - DNA, 215 bp, Homo sapiens
  chr2:148602728-148602943
  hyper
ctgctgcaaagttggcgtttgccgtctttcttatctcctgttcttcaggtaggtgcagggagcgcggcgcggtggggctgctcctgcggccgcggcggccgctgctgggggccgcggctggtgttgagtcggagagtccagtggagcctggggaggttgcccactccctgcgcccctcggctgccaccgccccccccccccgcccccaggtctga

SEQ ID NO: 198461 - DNA, 57 bp, Homo sapiens
  chr2:149632585-149632642
  hyper
ctccatccggttccggcttgggcagccagaccggacttgcaggctcttggaggtcgc

SEQ ID NO: 198462 - DNA, 453 bp, Homo sapiens
  chr2:149634146-149634599
  hyper
cccctccctctctatctcccttccccaccttttctcccccaccccctccccctacttagctccctctctgcagctggggctgctggtagggggagggaacaccaatggattgtagttcttaaaggaatctgtcagatgaaacaaaccagctcggtcccccgccccttccccgcccgctgtccgtagcgtgtgtggctgatggtgccccctttgtatgcgagccgcgtggggagggaccgagttaatgggagcctcccggtccccgctgacacgttcctggcagcctgctccaggctgctgatgcagccttcccgtccccagcattgattaagtgatgtcatcctgatcactgagcatgctccgactaaccccctcctccccttcctccagtggctggtgtatttaggtcaagtgattgacaggtgacagtttaccgagggtattgcaggagtc

SEQ ID NO: 198463 - DNA, 112 bp, Homo sapiens
  chr2:149645384-149645496
  hyper
ccctccccacgctagtagtacgcttcggttactttgcacttctccgtagctgctttacatgtttgcgttttgaatgttgttgaggaaagatgcgaaaaagaatgtgtgctgg

SEQ ID NO: 198464 - DNA, 85 bp, Homo sapiens
  chr2:149645987-149646072
  hyper
cctgtggtgggaggcggccactccgcttggcgccgtgagggaaaccaaggaaaccgtctttgtcgctcacaggtgcctctttttg

SEQ ID NO: 198465 - DNA, 173 bp, Homo sapiens
  chr2:149894865-149895038
  hyper
tcattttcactcccgagggtctgcactcctcgtttctacattggttttctaggaagaaaggggttggaccctcccctctttaagctgggtggggtccgaatcccgtgcttctttcacttcctgagccgggctggctgggtgggaacaggctccttgccgcctccccagcgctg

SEQ ID NO: 198466 - DNA, 36 bp, Homo sapiens
  chr2:150061862-150061898
  hyper
aagctgggcatttgccaagaacatcaacttctataa

SEQ ID NO: 198467 - DNA, 56 bp, Homo sapiens
  chr2:150061932-150061988
  hyper
ttgccatcctagttcatggctgtggggccagagtgttaatatgaagcccccttttc

SEQ ID NO: 198468 - DNA, 360 bp, Homo sapiens
  chr2:150187292-150187652
  hyper
ggccccggcttaggcggggcctggccaaggcagggagtgcgctgagtccctggaactacccgatgctagggcagtcccctggggccagaggaactggggtcccggcctccggcgttttgcccctagtgggcagagagccccgcgagtagcctggacgggtccagaggggcgtgtgtactcgtgtgtgttgggctggcgcgtggagggtgggatggaaaggtcaggagctgccaagttcaaggctggaggaacctttcccaggagtaattcagcatcttctcacggcccaacatgcgtccaccaggaactccagccggagggagttcctgggcggcggactggcagcaccccacatgttgc

SEQ ID NO: 198469 - DNA, 538 bp, Homo sapiens
  chr2:151342169-151342707
  hyper
acaccgctggttagggcggcgggtgcctatgtcccagcccaagacctcagatggtgcccccctgccactccccggcctttgacctggcctaaacccctaactcagccggggggccggatgccttcccaccgggagggtacctagccctccctaccaccgcgcgccaggtaggtgggtgggcgcatgggaaagcaataacccggccttgaacctcagacccatgaatataacccaccgcggcgccaataattcaagtagactggaaggtcaaaggcgaatagtgttgcccgcggccttggaggcaagccgagtgggggatgcaatagaggtcaggaggggctggtgtggtgaaggggaaacggacgtgatcactgggatggagtgggggaaaaagggaaaagctcggtacaggtgggcaccgaggcaccgcgggcggccggcagcgcgaagaggaggttcagctgctgcccggcccctgcgccaccagcgcattcctgggtgtaggcgtcacgggcgccgcggctgcctgcgctcagtt

SEQ ID NO: 198470 - DNA, 166 bp, Homo sapiens
  chr2:151342737-151342903
  hyper
accgcgtcgcctctgggattttctcccgcctcccatcacccccgcggcgctccccgcctccccgccaaccagcaggttagatctaggaggggcgcccgccttgagccgggtggttccgccgaggcgcacgcagcgcccatgcaacaccccacagtatcgggccacc

SEQ ID NO: 198471 - DNA, 313 bp, Homo sapiens
  chr2:151343277-151343590
  hyper
cactgtaggaacgtaattctggatagacaaaatgggcaaaagaggaaggaaagagggcaaagaggttacgtttaaacgcacgacacccattgaacacccttcccctccccgctccccagttaagaaagaaaaccttcacacatcagaccacacactaagcacatggaccctttccgaaacccctgtcctactccccactcaccccacccggctctcacagatctgctgacccgaatctcccaaccccaggttatgcacacaggaacgaacaagtttcaggagctaaccagcccatgtgcaggcgcgtcccaac

SEQ ID NO: 198472 - DNA, 196 bp, Homo sapiens
  chr2:151343637-151343833
  hyper
ggaaagtagtaaggaccgagaaagacttttttttttctttttttttttttttaagggaaaacggatgaaagcggggaggcccacctcgggactgggatcccactggccgaccccctcgtggaagccgcggccggccacactcacctcggggaagcagtccttggcgaagacatggagcagcgcagtttttccacac

SEQ ID NO: 198473 - DNA, 272 bp, Homo sapiens
  chr2:151344094-151344366
  hyper
gagaggagcaggctggttactcccctccaacaagttttaagcctgactcctcaccgcgcctcccaagtccaattccgagccgactgctttgtttcacgctctctgcgcggctttatacgcccggccttccaatcctcttctttctcaatgagaggaggaaactgatctgcctcctccccttttatggagcctgggagcgagcgctgttggcgttgcatgccgaaaatgtaagcagtgcgccctctagggtgcccattcgggatctattttag

SEQ ID NO: 198474 - DNA, 113 bp, Homo sapiens
  chr2:152954399-152954512
  hyper
ataagagtattcaaattaggacaaaacagaagaaaccactaaatctcaactcgaatcaaaccaggtccccggccccgaggggtctggttactctaggtcgagttatacgaatt

SEQ ID NO: 198475 - DNA, 100 bp, Homo sapiens
  chr2:152956050-152956150
  hyper
gcctaatgtgtaaggcatggggttttgtggcttgcttttcgtccgtgtttttgtattgctttggcaattctgtccttagagctgcgagtcacacacatcc

SEQ ID NO: 198476 - DNA, 511 bp, Homo sapiens
  chr2:153192137-153192648
  hyper
ggattcgcagcagaccgatttcagggcgcacaacgtgcctttgaagctgccgatgccagagccaggtgaactggaggagcgatttgccatcgtgctggtaagtgcgcggcggcggtcgggcgcggggacccggggccccgggccgggcggcgcagctgacccccgcccctccccttcaccccgtgccgggagcgagcctccattcccgagggggaggctcccgctttcccctttgtggccccccagcactcctcttcacccccctggcagtcccccgcgctcagtctctcggggtcccgggatggggatgggggctcagggccggctgcccaaccagcctcgaacccattgtctggctggagaggcacctcacggcgcgtgtgcccgggaggtgcggcgtgggcgtgaagagaaggtggcgcgggctgggaggaggaggtggcgagccgcttaggctttttttttaaaaaaaacaaaacaaaacaaaacaaaacaaaacaccctgagcccc

SEQ ID NO: 198477 - DNA, 196 bp, Homo sapiens
  chr2:153574148-153574344
  hyper
ggggggggaggaggaggacggaggaagtttctgcgccgagtcctccgtcgggaaaactctaccaacttccccaggggaagggaagacaacagtgtcccagcttcccgagcttagaccgcctcaccccgtagggggtggggcagtgggggtctgccaccttcaccctccccgcccgagttacgtacgccccacaaac

SEQ ID NO: 198478 - DNA, 85 bp, Homo sapiens
  chr2:154335663-154335748
  hyper
ctgcccccctgacctctgggcgaatggaaagtggcgatgaatcgcaggtgccagatggtgccggctgaggcacccgcccactgcc

SEQ ID NO: 198479 - DNA, 49 bp, Homo sapiens
  chr2:154729267-154729316
  hyper
tactcgacccgacaccaggcgctccctgggtcttgggtgtcttcctcga

SEQ ID NO: 198480 - DNA, 142 bp, Homo sapiens
  chr2:154729379-154729521
  hyper
cgccgtgtgtgtctctgcctctgtttctctttctgagccttggtcccctcagtccacactctccggccatgtatctgtttttttctcttattctgtttccctctttctttcttgggatatctgtgtccctgttaatctgtct

SEQ ID NO: 198481 - DNA, 111 bp, Homo sapiens
  chr2:154730061-154730172
  hyper
tttcttcaggcaaaggtgttgctagcagaggagaggagctttggggactgaggtatgcctgccttaaactaccatgcattcattgcttaggaaagcggtttccttggagag

SEQ ID NO: 198482 - DNA, 80 bp, Homo sapiens
  chr2:155553936-155554016
  hyper
ctgcaggctcaactgaggctcggaggtgcaattcaggctggtggagcagcgggggaaggcagggacaggcggggctagcg

SEQ ID NO: 198483 - DNA, 612 bp, Homo sapiens
  chr2:155554076-155554688
  hyper
cgcctcgcatcttccacccggggccaccgaggcgctgacaaggagtgggggaccgaagaaggaagaggcagaggaaaagctagagcggcgctactgtttaacctgaaagtctgaccggcagcccaaggctcgaaccccgtccagcagcaccgctgtcgcctggaaggagggcacagcgccaaggaacccacgagcccccgctcgagtcattctgtgctctgtgcgccaaggatctttctggcagggacagcgcggtgccctcagggaggtgcggagcttgggggacctgcattggcgcccatcgtggtacaccaggaaaagtgggaacgaggaaaacagccgtgagcgcagagtgcgaggccaggctgccgctaccgcccgctgcgccgcctcctgccctctcccgctgggtgagtgcccaggcttcgcgcactgccgtgtctcagctgagcgcgggggcggcctgcgggcccttgagggtccgccggagggccccggtggcgcccgcggaaactcggcggtcgggggacgccaggcggacaggtctctggagtccggaacccgggaatctgagcccggagggcgtgggtagggggcgttgcaccagtgccc

SEQ ID NO: 198484 - DNA, 349 bp, Homo sapiens
  chr2:155554689-155555038
  hyper
gcagacatgcctttgggcgggattttggctaaaagataggagacaggtgcgccgggggtgcggggagcggtcccagggggcgggagattggggagcggcggggaggggggagggtctggtccaggcaggtaaaggcagcttcttaggcagccagcgagttggcaggtgggttgggactcgcttgtcaactcattaattttaagcagtcagtttgggggtactgcaggataatcaggagggccgtggggagtcaagaggtgacccgggatgccggtggtggggaaagaaaagaggagcctctggaagcttggaggcaaaattgcgcttgggttcctgttccttgcatccc

SEQ ID NO: 198485 - DNA, 31 bp, Homo sapiens
  chr2:157188949-157188980
  hyper
aagcataaaagaaggcgaactgcatgggctg

SEQ ID NO: 198486 - DNA, 383 bp, Homo sapiens
  chr2:157189365-157189748
  hyper
cgtcacgagcagggccgattttaaggtgggaaccgctctgcgttcaccttggtagccagcttgggtggtttttggtgttttttttcttttctttttttttttccgaaagaggtgtgacctctcccaggtctgcgcagcccgcagcgtcgcgacacttcactttccccgaagcccctgcgcccgcgcagcggctcggccgctcacatgtggggagggtgcaacaaaagcaccggcggaaggcaaggccggcgtggccaggtagtacgcacctggagccgcacggaatgggatgtgccttgcagcgccctaacctctcccacccaccttcgtcacccccttagcggaagagcgtacagatgtcccatgacacgagacgctcagag

SEQ ID NO: 198487 - DNA, 439 bp, Homo sapiens
  chr2:157292183-157292622
  hyper
ttctgggctctgacggcggggtcgcagggtcgcccgcctcctggacacgtctgtaggcctagggaagcctgccggccgggaggtacagagtaggagaagccagatcccagggcggacaacgagaagtcgtcaggtaagccagccccgccagcgtgccggcggacgagtgtctcctctcccgcaggcagatggccagggcggcccgcatgggcgagggcacaggaaatcggacaccgccaccgtcttccccagcctggcctagctcaggctttccagtccgccagcccgctggcaaggcggggcggaggtctggagtccggcatcgccgaggcacaaagcaggaactgcagccaggggcgagggcccttgcgtgtggcgctgcgcgaccccacccggcggcaggacccgcgtccccgtctagtcacgttcattgggccac

SEQ ID NO: 198488 - DNA, 222 bp, Homo sapiens
  chr2:158485076-158485298
  hyper
accgtacctggcgagagctcggcggccgctgcgagcagcaggagagcctggcggagcgctgagcagagcgcccgggtcatcgccaccaggcggccgcgccggggctgcgaggccccagagcagagcgaggcagccggggcagcacggcccgctttgaagttcccgggccgcgggaggggagcgcggcaccgacacccttttgaagtgcgcggttggctctag

SEQ ID NO: 198489 - DNA, 219 bp, Homo sapiens
  chr2:158485671-158485890
  hyper
ggtgatccgctctataacctcccgcagaagagccagcctcctagctctcctgacgtttgttgtccagggtccttaagtccaaccaggttgcgctgtgagagccccgcgggcttcctactggcttgtcccacccctgcgtcctggccatttgtgcctctggggaagggcgccctctctgttcatccctggaaatgaccagttgtccgactgccttctgga

SEQ ID NO: 198490 - DNA, 1840 bp, Homo sapiens
  chr2:159313054-159314894
  hyper
tgttcctacctttgacgccagggacaaaccctaccaggcacagttgggattggcagtaaggcaaggaaagcctgccccagatttcagagccagcgctggggaatctccctgtcctctccgccaccccctcccgcgcccgagacctgagacaccttctctctcacacccaccctctccaggccctctcgcgctgaacagcatcggtctctatggcgacctgaaaccgcagctcccattggcctgttcaatatgagggccgggccaatggggagggccagccctctccttcccgccaatggggtggcgggagctggcccggggacggcggcgtgctgacgttcccgggagcccggggctggccgggcgggagggctggcagcggggcgggcggcggcggcggcctctgggcagtagagggggctccggggctgagtccgcgtcgacgccggccgcggaggcggcaccatgggcaaggggtagaggggcaagttggccaccgccgccgccgggggtggtgggagagccgctccgggggcgggggccggtgggggagggaggggcgggcagccgcgccgccgcggcacttttttaattttttcgggtgccgcagcggcgacccctcggcgccgatgtccctgatccctggagcgacgacggccgctgcctaagctggaaagtaagtgtgtgggctcgcgggagggcgcggagactcctgcccacgagaccctcggccctcgccccgaacacgcgccagggccaggacctgcgcgccgggggccgggggcctccctcccgctgccgcgtccccagcgcctcgcggccgccgcggctttcctgccccgcctcgtgttcctgcccgcactcgcctgctgctcccctccccccggcaggcgcacaagtttcaccctccatttgcttttcccggcgattcctctccccggtctcccgtacgcgcagcgcacgacctctgcccacgctgggctgttcggattcagagctcccagccccgaacttgagcgccgcgctgagccctgctggacgccctcgcggcggcttccccgctgcctgccgccgcgcgccccaagtcgccctcgacaccactgggcgcccgccctcctcagcactcggggccggctgtctgtccttctagccccagatcctgcaccttggtcccctccccgtcttcccacgcccctgctgcccgcgcggtcttgcgtttgtccccgaagtcctgtactccttgccggtcctgcccacccctctgcctagtgcgcccctctctaccggccgcggatcctcacgctccacccctcccggctccccagcgccgagcctcgccgctgccctcctgcgccgccgcttcctcctctccctgccaggagttgaagcggagctgcggcacctccctggcggatctggtatccccgcccgctgccgaggctgccggccctctcccctggaccgctacccggagagcgagcggcggggccgggatttggctgcgtgttggctgagtgcgacacaccgcgagcgcgggcagtggaggtgccgcggcggccgtggccgctcggggcgcagcggtagtcaggtgtgtgtgtacagcgggggacgcgcgctgccggctcctgggctggcgacagattgtgcaggaatgcgaggaatgcaccaggggcagagtccacacagcccgccgcggctgccctagcgccttccctccccagctctcgccgcgcagccagaggtcaccggagcatcttcggagctggtgagcctcattccactcctctcctcccatagcttccctccatgcggcagaggggaagcgcggtaattctttggg

SEQ ID NO: 198491 - DNA, 686 bp, Homo sapiens
  chr2:159825050-159825736
  hyper
agaggaaggtgccttcgggaacacgcgcaagggcggggattcgcgctgccaatgaggccccggtgtgggccgagcaaggcggggggacgggccggagcggaggctttgctgtggcagctgctggagcggcggccgcctcgggagccggaggagaggcagccgcggagcgccgagctggcctcgccccgaggcccggccctgggtgtggggaaccgcgctgaggagctggaaactttcccggcaggtaactcccgcagcccggactccgccgcgggcctgcgagcgccccgggcatggccagctgccagtgtgcggagaggtcgagagggacccggggtggagagggtgatgggagaagggaaaggcgtgtgggaaagtttctggagcgccccctcctccgccgggcacacccgggagctttccgggaataggcacagacatgttgggcgccccgggccttggtctctcggcggctttggggagtccgcaccttccttgcgcggttcccccgcgccggaccgagccggcctcccctggaaccggtgtggtgggaaccgggaacgcttggggcacgctcgagttctgggaccacccccgcccggcgcgcccgctcgccccctttcccgccttctctgtagccctcgggcttggcaagggcctgggctacgcctggtacctggcgcggg

SEQ ID NO: 198492 - DNA, 360 bp, Homo sapiens
  chr2:159826224-159826584
  hyper
aaacttactggacttattgtgtaaagctccgggaggaaatgtggcgttggccaggtagaaacgcggcgctgcggccaaggggcggaggacgccaggctcggcaacggccttctcccagccccctcctgccagctccagatccgcgtgcctccagtgttgggaccgttctcagtggcgttgttccctgctggagttaacttgggaggtgaggagggaactttcatcttgaacttgaccccagaagcagcgtcgtccgtacaggttacaaggtaaatggaagctgagtcttaacgtgggttggaccgcaaactctggctggcgcggaaaggaagttcctggttcagaatctttgaggaaagg

SEQ ID NO: 198493 - DNA, 506 bp, Homo sapiens
  chr2:160142449-160142955
  hyper
tttccaaacaaactccggctcccagccctctgccgcactcagctccctttgcaagttccagggcattcagtgggaagtaccgaggccaccgtcagctgaacagtttgttttgaaaaagctctcaggcctacccaggacctgccttggggtagggggggcggtgtgggcgttccctcgggcctcggctgtcacgcgaacagtaaattcccgggcacaccaggtcagttggccagcgtaaacacatgaatcccatctcattcaaagcaaacccgaaaggtgtccagcgctcccaaaataaagtccgccacttacaccccccatgcacgaaagaccaggaatgtgcccccctctatgagcggccgggcctctgtggactgagcgaccccaggcaagagggaggcctgggaggcagggagctcacccgcaaggggcttccttccacccgacgccgacacgcccgccctagccccgggccaagggtgcacgaaccacgcctcgccgcactc

SEQ ID NO: 198494 - DNA, 138 bp, Homo sapiens
  chr2:160569034-160569172
  hyper
ggagaggggcgggcgccattgtgcttcgctgccgactgcatttcctcagtcacgggcctagaactccaaggagaaaggcggcggtgcgtgttgctgcgagtgggacgcgcactggtcggtgccggctcaggagccggg

SEQ ID NO: 198495 - DNA, 360 bp, Homo sapiens
  chr2:160654298-160654658
  hyper
aaacggcgcccgtcgtgcgactccaagtccctcagttctccggccaactggcctaatttgggggttccctccccgcggagtggggtctgcggtgaggatgtggactccgaggaagacagagccctcccttattctcggccacctcccctccccgagggcaggcgggtgagaggtgacccggagccaggacccacgggggacgggcgtgcagggaagggcgggatggccggccgggtgttgcgtctgcgggccgccctcgggtgcgcggggacgaagagcgtgcgttgggaagggggcgaaggcggtcgcgcacggtcccggcgagggactacgtaagggcttacccgcgacggcagcagc

SEQ ID NO: 198496 - DNA, 340 bp, Homo sapiens
  chr2:160919062-160919402
  hyper
cccagagccctggagacccactccgccaccgctgtctccacagtgaaccgacactcggggctctgggctgggatgcgggaaagtcgcggaggttttcctcgccccacccactgcggcttggggaaggaggaggaggaggggtgggccatctgcccatcccagaaattcctgcctttggggtggggacaggcggagtgaggctgctcgggtcacactctccgctcctctagcttgcagccctgctctctcctttctgggggaggccgaagaggagttgtgggtgagcgatttgagaatctccgggacaaggagcctgacatccgggtttgcaaaccacctg

SEQ ID NO: 198497 - DNA, 270 bp, Homo sapiens
  chr2:161263896-161264166
  hyper
cgcggagcccctgagcgcggccccctttgtaacgcggggctcgccgacctcggcgcggcatcccggccgccgcctcacctgcttgcgatagggcgtccggcagttgctgctgcccccggggttgccactgctgctggggaagatcatcgctgcgggcggcggcggcgggtgcgggcgcgggcgcgggcgcggggcagcctcgccgcgagggggagggcgcaaggaggtggccggccgggcccggggccgcggcagctctgggaactccct

SEQ ID NO: 198498 - DNA, 203 bp, Homo sapiens
  chr2:161264419-161264622
  hyper
cgcgccggccgggggcggggaggcggcagcgcaccgcctcgcgccgcgcccaggcccacccgcgcctccccgcccgcccgctgggcgcggcgcctgccgccccatcgcccgcccggcccccgcgctctccctcccgggatcggggccggagccggggccgggcggcccggggagcagccggcgcccccgctctggtgcaatgg

SEQ ID NO: 198499 - DNA, 97 bp, Homo sapiens
  chr2:161560616-161560713
  hyper
tgtggcctcgttgaaaggctttctctgaattgaatgacaacacggaggctgagggtaagattgcaaatcagagaacgtgggtatgaatgggaagctt

SEQ ID NO: 198500 - DNA, 60 bp, Homo sapiens
  chr2:162284265-162284325
  hyper
cctgagaggaacggcgattcctctccgtaaactcagatttcctcagtttttaacagtgta

SEQ ID NO: 198501 - DNA, 114 bp, Homo sapiens
  chr2:162930082-162930196
  hyper
aggatttgcaggtgggagtgcgttagaagagggagaccgcgggctgggggtgggggtggcgtctggagtgcgccagttggagttctctaaggcgggtgcccttgaacttgtgcc

SEQ ID NO: 198502 - DNA, 262 bp, Homo sapiens
  chr2:162930659-162930921
  hyper
taaaggcgccgcgggcaggctgcagggcaggcggcgcgggagcaggcgcgcgtggcgcggggcactggcatcccggccggggggagcccgcgagggccccctgagggcggtgtagggcgctgggcggcagccggggcgcagagtgcggggcccggaggagccgtgggggaggggaaagggcgcgcggcctcggatgcgcagaccctgggccggcgactcggggaccctgctccctcttagctaaaaatgacgtcggcgttca

SEQ ID NO: 198503 - DNA, 101 bp, Homo sapiens
  chr2:164593412-164593513
  hyper
ctccctggctcccctccctacctcccccaggcggctcgggctggagaaagcagcgcccggggggccctggtgtcggcggctggtgcgcaggcatagacgtt

SEQ ID NO: 198504 - DNA, 84 bp, Homo sapiens
  chr2:165477479-165477563
  hyper
taggagccagctcaaaggggattgtcttcagagacttttacaaacttggcccagctctgggcacatggctcaccccctaggacc

SEQ ID NO: 198505 - DNA, 243 bp, Homo sapiens
  chr2:165477596-165477839
  hyper
gacactcccccgcgccctccagggttgcctacctgtctgcagcacagccgcgggtcccgtccggaaggggcaggagcgctcgcgcgtgcagccagggggccggcgccaggtcgtgggcgtcgcccctcccctgggcagcgccacacacctgggcggccagcggcgaatcccgggcagccgccctgctcgcggcgctctgcccatcttgcagggaagtggtcattgtcgccggccggggggctc

SEQ ID NO: 198506 - DNA, 1139 bp, Homo sapiens
  chr2:165697530-165698669
  hyper
ccgcgtggaggacagtcagtgagtcaggccgccggcagggcagcgagttgccagccaggtgaaacggccgaggcctcgctgtcctcgccggcctcgccctccccggtgagaggcggcgcggcgctctgggcttacctggctggggcgtcctgcgggcgcggggttcggccgtccatcgccctgcggggcgctgcgcgggctccagctcccaggcggcgcgtcactgctggggtgggagaggccggcgggtcagggcgggacgcgcgccttcccgaggccggagcgaagctggctgagcgtcaagagcccgcccgagccgctccagccccggccggcccgcctcccgggtgcgcttccacctgcgggccccggctcccagcccgcgggcgccgccgccgtctctacaaggtctagcgggcgcccagagcacggcggaggaggcggtggcgctgcagcccccgccccgtggggtttactgggtagccatttggcgcctctcggagggagaggagccgccggggctggaaaaggaggaggagcggggccgggcgcacgggcaccgctgccacgccggcagcgcactcccaggctcctccggccgagtttgcacaaacaaaacgccctaggaaaacttttcccgaagagaagttgggagggctgatctctcttttcccacccaaggctcctacgttcttttccaaaggagacagtagctcgcctgttctccctcgcggcttcctctcctactcttcccttccccggcccgcgctcttgccgctcggctctcaagccaggacttgaatggagaagcggcaacccctgcgaggctcagcccagcgcgggcagggccgactcagcacctcccctgtcccgcgggcggggtgcgggcgctggctgggcgctgggggcctcgctggagcccgctctctcactcaccctgccccatttccctgcccggagtccgggagctcgccgccgcctctgcagcacggccgcacataagtggggaccagctcggcggcattggagcgagggaagcagcgagccggagagaggaacggggcgggggtgggccgggagcaagttggaatttccttcccccagggcttcgggtctttggggtccggctggggaagctg

SEQ ID NO: 198507 - DNA, 246 bp, Homo sapiens
  chr2:165873393-165873639
  hyper
agaaaggcttgtgctcatcacgccatctctcccttttcatagttctacgttgaggtcgtcctgagtttgtttttaaggtattttctgcgctgctacacactgtcatttcacgtgagggcagcagagaggcagcgtagaagcccctgaatagcaaatcagaagagcccgaagctcaaattttgggcgtagtgttttcagaacacctcttcaaaaattaaatcacacgttgtttgtatctccttaaac

SEQ ID NO: 198508 - DNA, 134 bp, Homo sapiens
  chr2:166649934-166650068
  hyper
aacagagagagaggggtgtccgcgtcccggccacagagccctttccaaaccactcggaaaccatttaaatggctcggcggccgcggtttgcagcctagaactgtttggggtccccggctaggaaagttgcctgg

SEQ ID NO: 198509 - DNA, 37 bp, Homo sapiens
  chr2:166650106-166650143
  hyper
ggcagagaggctggaggagacaggcaacctgctagcc

SEQ ID NO: 198510 - DNA, 737 bp, Homo sapiens
  chr2:166650508-166651245
  hyper
cctgccgccggcttacctggcgggtgggcagggcagggtggcgggaagcggcggccgggcaggcgctggacgtgggctaggcgccaggtgcaggtggcggcggctgcgactccggttgctgtcgccacagttgcggctcagtagagctcctcctccgccgccgcctcctgccttcccgctgggcctcccgcgttgcctggagaggcagaaccgaggctcggcttccacttggagtctcccaggtgagctccagcctgcgacgtcggcaggggcgaggccccacttccgcgcctgcgcgccagcctcccgccccgccccagccctacctgagcgctccaggtgagaaccttggatcgcgcgcgcagggtgggggcgccgtccgggccaagcctggctgtcgcgcggcttctctctgagtggtcggcgaggctgctgctccgcgcaagttgtggctcccggcccatctacattggaggaatcctgcactgacctggtggcagtgatcaccttgtagccagaacacagtctgctgggtccttggggaaccagaagttctagatttcccccacacggttcctcccttcctcctcggttcgccaaaatgaaggggtgcgctgcctccgaggaccacttcgggagggcagcaactgctggctcatgtggtttcttcgggcagggttcagcagcttctgtcaccagttaggtttcgtgagcttccttcccgtgtagtcttgatt

SEQ ID NO: 198511 - DNA, 197 bp, Homo sapiens
  chr2:166810403-166810600
  hyper
aatggagcaggggcggcggggacccggaggtgagggctgcgagggccgcccgggagggtccgggctgggaaaagggcctccgccggagagtgcagctggaaaaggaggtcacactgggaaacggctgtctgaggacagtgggtgggcgggccgaggaaatggaattcaggaataaaggaaacggagtatgaagaagg

SEQ ID NO: 198512 - DNA, 239 bp, Homo sapiens
  chr2:168149264-168149503
  hyper
ccaggcccacccctgcgggcccggctttccctcctcacctaaggctccggggccacgagtcccccatcctgcgcccctcccgcgcctcccccatcccaaaccccagcagcgtcgctgcctctcccggaaacaagcccgctgagcaaaggcggaggaaaaccttgggccttccgctctgattggtctccccccgccgagcggggcgaggcagcgattggctgccgggcgttgtcagtcgc

SEQ ID NO: 198513 - DNA, 220 bp, Homo sapiens
  chr2:168149556-168149776
  hyper
ccgccgcggctgctcggctagtgcagctgggcgagctcgcgcgggcgccgccgccgcctctgctgctgcccaccccgccgcgccgccggcgctgccggtcttgcaggcggccgccggggaggggcggccgagagagcggagcacgaggaggcgggggcggcagagaagtgatgctggcgccggggatcggggcagcggcagcggagcagcagcatcttcg

SEQ ID NO: 198514 - DNA, 104 bp, Homo sapiens
  chr2:168150962-168151066
  hyper
ctttgcgctgctgcaaatggatggtgctactgggccagatccgaatctccgtagttcagtgcagtgggttctccatccctgctcaggacgcacaaacttactct

SEQ ID NO: 198515 - DNA, 409 bp, Homo sapiens
  chr2:169312409-169312818
  hyper
tgacccaccgcctccgggcgcacgggaagaggactgagagccctgaaaccccagcggggcaggagccagcattctgagcatgtgcgagccagccagggggctagggcggatttggggggtcgactttaggtcgtcgccctaagcgcaaagcgaaagagcggtgagagcaggggcgggcgacactccccggagcggtgcccctgcgcccagggcgcagcgactgcgccctgccctgcgggtgtgggcgagttggccgcgtgtgtgcctcgctgtttgacgcgaagacgagccaatcagggcgggcggcccgagctgccatgtgacgggcaaggcggcccctttccccagcgcggccagagggaggagagaaccggggctcgccgcgagccttcgagagcagcggccgcgg

SEQ ID NO: 198516 - DNA, 163 bp, Homo sapiens
  chr2:169312881-169313044
  hyper
gcgcatccccgggcgccctgcgcggtggagagcttggcgggctgcgggtgccgcaggacaggagtggacaaagcaagatggcagggatcttagcctggttctggaacgagaggttttggctcccgcacaatgtcacctgggcggacctgaagaacacggagga

SEQ ID NO: 198517 - DNA, 695 bp, Homo sapiens
  chr2:169313104-169313799
  hyper
catggtgcggctcatcttcgagaggtaagaagggctgaagcccctcctcccctccccctgcgcacacacacgcgcgcacacactcgcgcgctctctggcgcacgcccccgcgcccccaacgctcgcgttcacgcctcccaacctttgtgttcggggaggggttgctgacccccctgccccgctggctttctgggagccagaaagggtctggcttgccacggatttcctcccgggcgccggggaggagccgcggagcgttagggtcgccccctgccctcctcctgggccctgctctcctcccggcaagggcaggcgaacaaaggtgagcggtggtcgggctcaggacccgccgcattccgcggggctcgcccctctccgccggcgcgccacgcaaggctgccaggcagggcttcccgccggggcccgcgccacccacctgacagccaggaacgttccggacgcgcggcccggagggaggaggaaccgcgcacacttcaatctttatgctccggcacacggattgtaggggttgtgcttcaaaagaattcgccagggacttcctggcttctggtcgctgtttggtttttatccgtgaaactatcaggcccacagtcctggcaaataggggataatagcatttcaggttatcagcggtttctttaaaagaggatgtgacaggacgggtccacatcctg

SEQ ID NO: 198518 - DNA, 268 bp, Homo sapiens
  chr2:170218861-170219129
  hyper
gagagccaggagcagcgtgcacgccactgctgccggcccgcgatccatctccgcgacggtccccggcctcgccgttccttccccgggaggtgggcgcgcgtagcacaccgcaccggcagcgcctctgctagcgaacgctcctttaggtctgcacctccgccagctcctagtggccaaaagcctgcccccacgcccgaggcatcccgttttctacccgcgccagtccccaccctccagacagtgcataaagccctttagacccgaccgc

SEQ ID NO: 198519 - DNA, 204 bp, Homo sapiens
  chr2:170430256-170430460
  hyper
cctggtcccaacacggaacgaaacaggctcggatgtctcgcccaaccctcatatctcagggtttataacctttcttcgagagacatgacctttcccatgagaccttgcccccaaaccaggaaaaaatgcccggcaggcgcagcgtgcactgcggaagtcacgcactacatatcccagggtgggtcgcggcgaggtgggtgaaat

SEQ ID NO: 198520 - DNA, 205 bp, Homo sapiens
  chr2:171568126-171568331
  hyper
gtgaaaggccaaagcattaagaatttgctgaaatgatctaaataatatctagatttttaaaaaatctagcttgagaggggtgactctctggttggatttatgccagaggcatgcgtcccttctagctgcaagaaaatgcccgaggcgaggtaccaagcttgggctggaagtagcaacccctgacttaatcccagagcgcgcagag

SEQ ID NO: 198521 - DNA, 294 bp, Homo sapiens
  chr2:171568711-171569005
  hyper
actgacccccgcccccgcagcccccgcgctgtctggggcgcgcctggccctcccgggcttactctctcccccacagctgcgcacttttgcagcgcgctcggtctttgatgtctctttacattatggcagagcagccacacgctcttcccgggcgcggggctttgtgtaatggaactgacatttggccttgatacctgtatctcttggtgattacaacaaatttctaaaataaatattgtactttgatctcccagcattgcatttttaatggacgctctcaacattacttcatta

SEQ ID NO: 198522 - DNA, 116 bp, Homo sapiens
  chr2:171569931-171570047
  hyper
gggggagaagggggcgtgcgagtgcaggatgtgcgagggacccattgtatttgggtcgcaagcagcccacccgtcttgagtacgatattctcattccgcaggcgcgccctgggcgt

SEQ ID NO: 198523 - DNA, 243 bp, Homo sapiens
  chr2:171570957-171571200
  hyper
ggtcgccttgggtgtcctgccgagctcagctttgagggtatgcgcggcgcgggtgtttttcccaggtccactctgcaaaagttgtggcctgaggaaaacttccaggtcgccagcaggaacgtcacaggagagccccggtcgctcgtcaggcgggcggccctggagcgtgcgcgccacccaacgccgcgctgggcggccgcccggccccgccccaggtcacagccctgccctcggccccaccgc

SEQ ID NO: 198524 - DNA, 161 bp, Homo sapiens
  chr2:171571315-171571476
  hyper
tgcaagtaaatacaggggagagttacactctttgccgtctcaaagtccggcgcctggaagccgaaggcagatttttccagagataacaaagacactttgtcactttgggcgctgcgtcggtgcaaatctttaattgcaagtgtgtgtgtgtgtgtgtgtgt

SEQ ID NO: 198525 - DNA, 326 bp, Homo sapiens
  chr2:171571520-171571846
  hyper
cgggtctccaggcggcaaggccccctttgatcaggaaaatccaattatttgtgtatatacatttcccacatagtgattacttcattaattgtcccgcctttatctcctcccttcccatcccccctaataatcagttcttttatccagaccaacaaacacaccataggagctttgtggattcaaaggatttgctttcgcttctgaaagagccgctattctttgatgattgggtagcggcaaacttcaaagccataaatcttccctctgactggctggcggcccagcaaagtccttatcaaattcttggaggtgatcctgaagcgctc

SEQ ID NO: 198526 - DNA, 279 bp, Homo sapiens
  chr2:171572068-171572347
  hyper
tccaggtcagggccgagcccggagggggcgggagaaaggtggaaagggccgtgtccggatctctcctggtactccgtgcaccttgaacctcaaagggaaccccgccgatgggtgcagctggagccaggcctaggggtgcccacgccaacttcacacctaatccggtgtggcctttgctggagggacgcgtggatccgggattgttcggaggtgcccggctggccgagaacaggaccggagctcaccctgctgggccctcctgctgatttcagcctgggg

SEQ ID NO: 198527 - DNA, 49 bp, Homo sapiens
  chr2:171627264-171627313
  hyper
atccgagggtgtgtgcgcccagtttccggcgccgcgggacacccacaac

SEQ ID NO: 198528 - DNA, 632 bp, Homo sapiens; identical to SEQ ID NO: 38182
  chr2:171627346-171627978
  hyper

SEQ ID NO: 198529 - DNA, 322 bp, Homo sapiens
  chr2:171673094-171673416
  hyper
ttccctcctctcacccgacagcctgcctatttccaaaggaaaaaaaaaaagcgtgttgagtacgttctggattactcataagaccttttttttttccttccgggcgcaaaaccgtgagctggatttataatcgccctataaagctccagaggcggtcaggcacctgcagaggagccccgccgctccgccgactagctgcccccgcgagcaacggcctcgtgatttccccgccgatccggtccccgcctccccactctgcccccgcctaccccggagccgtgcagccgcctctccgaatctctctcttctcctggcgctcgcg

SEQ ID NO: 198530 - DNA, 397 bp, Homo sapiens
  chr2:171673476-171673873
  hyper
ctgtcagggccgagccgagcggatcgctgggcgctgtgcagaggaaaggcgggagtgcccggctcgctgtcgcagagccgaggtgggtaagctagcgaccacctggacttcccagcgcccaaccgtggcttttcagccaggtcctctcctcccgcggcttctcaaccaaccccatcccagcgccggccacccaacctcccgaaatgagtgcttcctgcccgccctagtccctgctctccacgggtgcgctgcgcagggacccccccccccccgcctccctcgtcactcttcttatccctgccctccggattcacgccccggggaagcacggaggctgaggctctagttgaagtggggcaagagcgattttcccttgagcttccatgctgcgagcgcc

SEQ ID NO: 198531 - DNA, 152 bp, Homo sapiens
  chr2:171673939-171674091
  hyper
tttccaggggccgtagtcgacccgctgcccgagttgctgtgcgactgcgcgcgcggggctaggagtgaggtcggagggagggtgtggaggcgatggccggtgggcccttctctgtggggtcctcgatctacccagattagcccgcaatctct

SEQ ID NO: 198532 - DNA, 369 bp, Homo sapiens
  chr2:171674329-171674698
  hyper
gatggctaaaaaccggctgggataagagggaggcaagcaacattccgactcgctgctttctggctgtctggagtgcaaggtgactgtggttcttctctggccaagtccgagggagaacgtaaagatatgggcctttttccccctctcaccttgtctcaccaaagtccctagtccccggagcagttagcctctttctttccagggaattagccagacacaacaacgggaaccagacaccgaaccagacatgcccgccccgtgcgccctccccccgctggcccacacgccggctgctgagtgcccaatggggcttgtagcggctcggctggaaaatcgctcactgagcgctcccctgtgctcctagcctag

SEQ ID NO: 198533 - DNA, 75 bp, Homo sapiens
  chr2:172289937-172290012
  hyper
gcatgcccaagtccacgtgggagatacagcggccccacccttaagggacttagagcatggcggtgggacacatgt

SEQ ID NO: 198534 - DNA, 35 bp, Homo sapiens
  chr2:172379091-172379126
  hyper
ctggggtcggcactgctcgtcggcttcctgtcggt

SEQ ID NO: 198535 - DNA, 181 bp, Homo sapiens
  chr2:172379723-172379904
  hyper
ctgaacttgcttccaggctgcagatgaggaggggaaggcagcggggaaaagattgccggagcgagaatttgcccgtatttgtaacatcctcggccctgggtaaaggggctggccaaggggggcgagtgaagcatccgccctgggttcctctcctcctagagtgttaaactcagtcgagtcc

SEQ ID NO: 198536 - DNA, 456 bp, Homo sapiens
  chr2:172750647-172751103
  hyper
gctgcaggcagggcgctcggaatgtctcttatgcaataaaagcagcagcagagagttggagtcaccttgaccgccatgctgtgctcggaagccggggacgagcgagtgagcgagcagggccgagctgtcagggcgcgcgcgcgccgtcttcccggccgcgcccgccctccctctcgccggcgccgcgcgcgtccctatgcaaatgaactcggggcgcgccgcgtgcggaaaggggcccggcgtcccggccagaaaggcagctggtccagggccggccggccgggcggaggagggggacgcgcctcccacggggaaaacaagcgcgacccatgggatcccgacgcgccgcgtggttgccacagctaggtcgccgccaggaaagccccaggtttcctaaggcctcttagtgggtgtggctttgggcaccgaccagccaaagtcgttttccccgaggct

SEQ ID NO: 198537 - DNA, 147 bp, Homo sapiens
  chr2:172947570-172947717
  hyper
cacattgagaaaccagctaccgccagcggctcggcatcagagggcccgcgctcagtgctcctccctagacctttctgagctaagaaataattccggagtgtagccatctcttgctcacacacaacccgcttctaaattaagcaaggc

SEQ ID NO: 198538 - DNA, 230 bp, Homo sapiens
  chr2:172950233-172950463
  hyper
cagcagcatcatgcttagacttttcaaagagacaaactccattttcttatgaatggaaagtgaaaacccctgttccgcttaaattgggttccttcctgtcctgagaaacatagagacccccaaaagggaagcagaggagagaaagtcccacacccagaccccgcgagaagagatgaccatgaccaccatgccagaaagtctcaacagccccgtgtcgggcaaggcggtgt

SEQ ID NO: 198539 - DNA, 254 bp, Homo sapiens
  chr2:172950493-172950747
  hyper
tgtctccttctcccatgtcccacgggcactactccatgcactgtttacactcggcgggccattcgcagcccgacggcgcctacagctcagcctcgtccttctcccgaccgctgggctacccctacgtcaactcggtcagcagccacgcatccagcccctacatcagttcggtgcagtcctacccgggcagcgccagcctcgcccagagccgcctggaggacccaggtacgtgcgcttgccagggagagggagag

SEQ ID NO: 198540 - DNA, 169 bp, Homo sapiens
  chr2:172951779-172951948
  hyper
cgagctgcctgccgtccggccctctgtccctggacaatctgattagggcgcaggaaggatttccccagacgatttgtttgggaactcagaggtcacacgtgcctaaacaactggaacaatagactccgggcttaatccctcctttgcctttaaattgtgtgactaatca

SEQ ID NO: 198541 - DNA, 132 bp, Homo sapiens
  chr2:172955235-172955367
  hyper
tgggagcacctctagtgaagcgcttgctcagattagtttcctccagaggaacacgggcttcaagggactagaaccagattggttcccttctcgtggccctgcgtcccagcccagccccaacccccaccccag

SEQ ID NO: 198542 - DNA, 58 bp, Homo sapiens
  chr2:172955887-172955945
  hyper
tcctaggttcaatttcccctaggagatgtgactttgctagtgcgaagatttctgtccg

SEQ ID NO: 198543 - DNA, 149 bp, Homo sapiens
  chr2:172958351-172958500
  hyper
gcgctgcgcttgcagaataggactgaaattttcggctatatagcctctgtctttatagctgatgaaaaaaattgcagattattagcataaatgtttactcttcattacgctgatgacattgtgcactcgagatcttggtaatctttggg

SEQ ID NO: 198544 - DNA, 87 bp, Homo sapiens
  chr2:172964092-172964179
  hyper
ccggcctgggcagcggcttgagctctgagcacgtgactgaccggaccctggcaccaagaaaaaagcgcacacatccaatgaaaacaa

SEQ ID NO: 198545 - DNA, 82 bp, Homo sapiens
  chr2:172964665-172964747
  hyper
tgaggagagagctgagggagcgctcctgggggagcgcggtgggggtaagataagggatgggggctccgagggctgggaactg

SEQ ID NO: 198546 - DNA, 164 bp, Homo sapiens
  chr2:172967062-172967226
  hyper
ggtgtagtagctgctgtcggtggcggtggacaccggaagggtgggcgactcctggggcttgtggaggctgctgctgctgctgctgttgccacccgggccggcgccgccgccgctcgggggctgctggtgctggtggtacgtgctggaggcggcgatctgggtcg

SEQ ID NO: 198547 - DNA, 344 bp, Homo sapiens
  chr2:172967650-172967994
  hyper
gggcatttaacactcgtcacgtgagcgctggcgacgtcacctagcaacagccaatcagaagcaaacggccgcggagctccgggaacgcccggccaaggggcgggcgtcacatggtgggcgctgtggctgcggctgcggctgcagcggccccaggtgcaaacagactgccgccgaatgtgagcagcgaggcgaggggtcgaggtagcgaggagtcagggtggcccgcagcaggaagacagaaggcgtggagacagactggcgttttgcctcagaggaagaagtggggtcccctctcccattctgtgagcaagtgccagttccagtgattcgtactttcatgtccg

SEQ ID NO: 198548 - DNA, 395 bp, Homo sapiens
  chr2:173037293-173037688
  hyper
tgcaggtgagggctcgggcggtggcgggccgtggtccggcgcagtttccccgcggcccgctgggtcgcactgtggccttaggaatgtgggccggggcggggcggcttgggagcgcgctgcagccaacgccgcgttcagccccgggcgcaactgcagccgtgccgggggcctccggggccccgaccgaccgacagctctttcagaccgcagcgaagtttgcacacacgacagcacgtcccggggctaggatcttgcccgcctgcggggctgacctgcaccacccttggggaagcgcgaactgccgccccgctgccgggagttaggcgcccgggcctgggtcgcccccacagacggctcggacggcacgaacgagcggaccccaaggatagtgggct

SEQ ID NO: 198549 - DNA, 83 bp, Homo sapiens
  chr2:173099598-173099681
  hyper
ggggacactggggggagcagcggcgggcatctggaggcatcgggggacagcgggggacattgaggggcagtgagggcggccga

SEQ ID NO: 198550 - DNA, 47 bp, Homo sapiens
  chr2:173601390-173601437
  hyper
aaaccataaagcatgtaactcccgacgacagctctctctaaggagga

SEQ ID NO: 198551 - DNA, 319 bp, Homo sapiens
  chr2:173940416-173940735
  hyper
gcgggtgccggggcgcggggcggatggtgccccccgggcgcaggccagggaggcccgagcgccttccccacgccccgctcgcccgcgcgtgtgaggggagggcggcccagccgtttcgcgccgggaggtaggtggtgctgttgccgtgactgtcttcctcattggcgccgtgcagagaggcggaatgttcaactcctaactgcagcggaaacgtgggagccgcgcgggccgctgtcgtcccaacccccgccgccctcgtcgcgcgcggggcctccgcgcccccggctgctgctcacgccccgcccgggagccaggtagg

SEQ ID NO: 198552 - DNA, 1046 bp, Homo sapiens
  chr2:174219342-174220388
  hyper
gaccgcgcagctgcacaaggagagtggtccccgtagcccctaaagcccccctttctcaaaggggattttaggagtgcccaaggctatcctttgaggtcagaatatataggggggtcgtgttttttccagggggccacctagtcttgcgccatgtctggccgttaccacagcttgcaggacctgtgtcccaacgcgggaaagacagcccgagccccgcccctccgggcccgggtcggcgcgcccagcctgccagccgcgctgctgctgctcctcctgctgtgggaccgctgaccgcgcggctgctccgctctccccgctccaagcgccgatctgggcacccgccaccagcatggacgctcgccgcgtgccggtgagggctgggcgggcgaacccgaggggcgggcgcggtgggtgctggacgcaggcgggcgcgggccgaccctctccaactccgcagcctagcgctgccttaactggtggcctgcctaggcgttgcccgcttgggcaagcccctgattttgtgcacctgggataactgagggccatggggacgttcctgcgtggcgtgcgcacccgaagtgcgggcggcgtggagacttgagtcgtttgcaggatggctagcagcgctggaaagccctaggcacgtgcgtccgccaaaggccggacagcggccgggagcgctggccggtcccgattttgcctgccaggcagagccagcctgcctgccccctgggaggttgtcccgcagcggcccagccctttcccgcacacaactcggagccagtgcgtggctcgccgcgtctatacccgcgctcagtgggtggcccttgggcgcgcaccccgcccggcaagagacgcgtccgcttctaaccgctgagggccagcgcgtctgaggtttaaggtcttgcgaaccggtctcctagaacttgggctgcgcacgcagtgtgaagcgaccgtagtcccgggcggtggttaagtgcatttaaagggcttggtgggtcaaagcgttcgccgaccatttgctcgtttcctacttcctccacccc

SEQ ID NO: 198553 - DNA, 217 bp, Homo sapiens
  chr2:174349951-174350168
  hyper
ggaaagagaaatatgcgttgtagagagttcccaacttgaaagagtcaattggtataaatacgggcttcatgacctcaaattcgcagggtttatttcaggcaaaattgtctcttttttatcaagcaagaaagtagaaaacagtacagtgtatctgtttagattctggcgtctgaggtctttgtggacttgaatgctgatagggcgataatgcatctaa

SEQ ID NO: 198554 - DNA, 42 bp, Homo sapiens
  chr2:175190729-175190771
  hyper
acgtccgacttgtccgggaatggagcagagaaagaggaacca

SEQ ID NO: 198555 - DNA, 71 bp, Homo sapiens
  chr2:175192823-175192894
  hyper
ttcccgccaaaccacgaaggccgggaaataaacagcgcctgcccaggctctgggcgcgcgagcccaggaga

SEQ ID NO: 198556 - DNA, 650 bp, Homo sapiens
  chr2:175197265-175197915
  hyper
atggttggcttgaaaatgtcactagtgctaagtggcttttcggattgtcttatttattactttgtcaggtttccttaaggagagggtgtgttgggggtgggggaggaggtggactggggaaacctctgcgtttctcctcctcggctgcacagggtgagtaggaaacgcctcgctgccacttaacaatccctctattagtaaatctacgcggagactctatgggaagccgagaaccagtgtcttcttccagggcagaagtcacctgttgggaacggcccccgggtccccctgctgggctttccggctcttctaggcggcctgatttctcctcagccctccacccagcgtccctcagggacttttcacacctccccacccccatttccactacagtctcccagggcacagcacttcattgacagccacacgagccttctcgttctcttctcctctgttccttctctttctcttctcctctgttccttctctttctctgtcataatttccttggtgctttcgccaccttaaacaaaaaagagaaaaaaataaaataaaaaaaacccattctgagccaaagtattttaagatgaatccaagaaagcgacccacatagccctccccacccacggagtgcgccaagacgcacccag

SEQ ID NO: 198557 - DNA, 454 bp, Homo sapiens
  chr2:175198064-175198518
  hyper
gtttggggttggtagtttaattttttttttttcctaagaagcagggtgtgggtttagtggggagtgtgctatattaaaaccagtgcccaggtctgcccgagggcgctggtatttctggttcaaaaacagcttctggctaccctggagaagaaagagaaagcggggcccagaaagagaaaaacaagcaggtcagcggttgctgggggactcgaagacgcaccctggtctgcttgaggacgcctcttttcacactgacaaggtccagggaggacttcaggatgcttccagcctgcaaaatgtggaagcgcccacgtgtggcctggtcctccgccctcccgggtgaaagtcctggagagatttctcgggcgcgtccgtgaaagcagggcactaatggggagcctacctcttaaaacagcgcacttgccctacggacgagcctctaggccctggtggt

SEQ ID NO: 198558 - DNA, 72 bp, Homo sapiens
  chr2:175199018-175199090
  hyper
gtacagagaggcctatttcgctcctctcggaggagctgtcccttcgcgccccctccccagtataactgtgag

SEQ ID NO: 198559 - DNA, 218 bp, Homo sapiens
  chr2:175199150-175199368
  hyper
tcacaagcaagaatgatagatacaagctgaagttgtgttctgtaggcaaaagcctggacacacaaagtgagggctcacatttccgtctccacttgggccctgctggtgcgggctgtgtctgggtgtctcctcccctcctgcctcctttcctacaagtggggagtcgagtaggactgtcagccctaacttgcaacatctcggggtggtttgtgtgtggg

SEQ ID NO: 198560 - DNA, 205 bp, Homo sapiens
  chr2:175199935-175200140
  hyper
tgctagactgcagcttcagcttctattagcactttccacatttctgggactgatttttccccaagtttttggaacccagaaagatgcctttgcaagaaaaggccttcttaatcaagtcctttttcatttggtttcaaaaaaaagctagaggtttcttttcttcccctcgtgatttataccccatcccccgcattgctttggggat

SEQ ID NO: 198561 - DNA, 89 bp, Homo sapiens
  chr2:175203999-175204088
  hyper
agataaaatgtaaacgttttaaaaagcccccaaactaagcacttgatttgataactaggctttttaatgttatggaagacaactgctcc

SEQ ID NO: 198562 - DNA, 323 bp, Homo sapiens
  chr2:175206394-175206717
  hyper
gccacctagagctccgaggcggaaaggccgtcgcctgcccggctcgcggctgtcagcgcgtggagaccggcttttgccgcgagcagcagcaaccaagaggatcctgcgaagaaacgcgacagtttgcgttccagcggggaacgagccctgctattgggggtggggagcactacatggcagtggcttttgggcaaaagggtcgtttctggaacgtgctaactgaaaatccaaacaaaacaaaataacgaccggttggccctggtcttagaattgtccatttaacatccttttcaaggcaacttcagggtcttccaacttaagag

SEQ ID NO: 198563 - DNA, 318 bp, Homo sapiens
  chr2:175260398-175260716
  hyper
aaacaaactcagccgcctaaccggaactgcgtttccagcagcaagggggaacttccgagatcaaaggtgacagcttccggcaactgatgcctccactggccactcctccctccgtccacctgtcacttcgggtagctgggaggccaggtgaggggcgcgcacgggggaggggcgtgcatagttgagacagaaacccggaagacccaactgtggcgcggcactgcttgaccgaggggctccggagcccagctgcaccggctgcggtttgagcgcccagggccggggtgcggggtggaccgcggcggcccttcgaccaaa

SEQ ID NO: 198564 - DNA, 90 bp, Homo sapiens
  chr2:175546698-175546788
  hyper
aacaaaggctcacagcgactgggtcagctgctttcccttacactcacaacgctaacagttctttctttaaaaagaaaagtatgtatagta

SEQ ID NO: 198565 - DNA, 420 bp, Homo sapiens
  chr2:176937754-176938174
  hyper
cccatcccaggactaagtaagtcatttgctggtctggcttggatgaaccaaggatcgcaggaggctgcctgtgtgcctacccgtccccccgcccgagtcccctagtgggcgaacgctgggccgggcacggtatctccctggcgagcacagcctgaacccaaggctggttttgaggtggcagttaattactagcccggaaagccgaagccccggagccgatgtctgggctgacagggttccctcctcagcctcggggcagtcagacgattcctaacaacttctcccaaggaggtagatccctgtttatcaaccagcacaccccgtcggcccttttctttggtaaacactctttaaacaaacagcccatccgccctgttattgccaaagctgctcagagctttaataaaagcccagggaaga

SEQ ID NO: 198566 - DNA, 66 bp, Homo sapiens
  chr2:176944006-176944072
  hyper
cactttttgcataaaatatgcaagatgcttccattccatcagcactgaaaccaaagaccaaaagag

SEQ ID NO: 198567 - DNA, 150 bp, Homo sapiens
  chr2:176969908-176970058
  hyper
tgggcctgggatggagatggggaggcagataagtgtgctgggggtctgggttgaggagaagaatgtcagctggaatctgggcgggggtgccagctgcggggagggagcacacaagatgggcagttctagttgggggaggctcgatgccct

SEQ ID NO: 198568 - DNA, 118 bp, Homo sapiens
  chr2:176971436-176971554
  hyper
aacaagctcccaggcgggtgagctgcagagggtggcagagtcgcgggggagggagcggctgcagtaaggggggtggggttcggaacctcacaccctcacacctagttcctagcttcta

SEQ ID NO: 198569 - DNA, 273 bp, Homo sapiens
  chr2:176972103-176972376
  hyper
cggccagagcgcagccagcatgtacctgccgggctgcgcctactatgtggccccgtctgacttcgctagcaagccttcgttcctttcccaaccgtcgtcctgccagatgactttcccctactcttccaacctggctccgcacgtccagcccgtgcgcgaagtggccttccgcgactacggcctggagcgcgccaagtggccgtaccgcggcggcggcggcggcggcagcgcggggggcggcagcagcgggggcggccccggcgggggcggcgg

SEQ ID NO: 198570 - DNA, 114 bp, Homo sapiens
  chr2:176975915-176976029
  hyper
agaaggggattcctttggtattctagacatcggttaaaatgtcagtgccctaatagtgtgatcgttccatgagcttaaaactgttttttttctttctgtttccatctatttttt

SEQ ID NO: 198571 - DNA, 72 bp, Homo sapiens
  chr2:176976744-176976816
  hyper
cggctaccagtggcgaccgagtggcgccggcaggactgtgagttggtgtgcccaggccgggctgggctgatg

SEQ ID NO: 198572 - DNA, 60 bp, Homo sapiens
  chr2:176980658-176980718
  hyper
gagggacgctttcgcggatagtgaactgctggcaaagaattgtctctgggctgaaagctc

SEQ ID NO: 198573 - DNA, 146 bp, Homo sapiens
  chr2:176982147-176982293
  hyper
agatggaaaagaagatgaacgagcccgtgagcggccaggagcccaccaaagtctcccaggtggagagccccgaggccaaaggcggccttcccgaagagaggagctgcctggctgaggtctccgtgtccagtcccgaagtgcaggag

SEQ ID NO: 198574 - DNA, 195 bp, Homo sapiens
  chr2:176983836-176984031
  hyper
aagagcgttaacctcaccgacaggcaggtcaagatttggtttcaaaaccgccgaatgaaactcaagaagatgagccgagagaaccggatccgagaactgaccgccaacctcacgttttcttaggtctgaggccggtctgaggccggtcagaggccaggattggagagggggcaccgcgttccagggcccagtgct

SEQ ID NO: 198575 - DNA, 33 bp, Homo sapiens
  chr2:176986465-176986498
  hyper
ctttaagtgcgaaccgcgcgaagcggccctgcc

SEQ ID NO: 198576 - DNA, 125 bp, Homo sapiens
  chr2:176993339-176993464
  hyper
gacagctttggagagagctgctaaaatcgggaatattttgtcgattcacactcgactgggccacatgactcgggcaacttttcttcatctctgctcacaaactaggctgagccttctctttctct

SEQ ID NO: 198577 - DNA, 75 bp, Homo sapiens
  chr2:176995668-176995743
  hyper
aaggttgggatgcattttttttttaagaagggagagggggagaaatctgctttcatctcacgttctggctttaaa

SEQ ID NO: 198578 - DNA, 41 bp, Homo sapiens
  chr2:177001061-177001102
  hyper
aggagaaggaagagaggaggcgggggagagagaaagcagaa

SEQ ID NO: 198579 - DNA, 55 bp, Homo sapiens
  chr2:177005679-177005734
  hyper
caacttgaatcctgtgtggggcaagctgggcccaatccgcggatcccaaccagcc

SEQ ID NO: 198580 - DNA, 60 bp, Homo sapiens
  chr2:177042472-177042532
  hyper
cttgttgggccaggaatgtccgtggttggtgaggaggctgggagaaggcctttttgatgg

SEQ ID NO: 198581 - DNA, 191 bp, Homo sapiens
  chr2:177052772-177052963
  hyper
cctaggcacacagcactcacagcataagatgtagttccatgagtcctaggaaagggggaagaaaggaaaaaaccaaacatctgctctaggtttagaagagggataacatcagcgccaagcaaaccgaaagcgcagaggactcagaagaggggaagaggaataactttatctgtcctggaggtgggcgaaga

SEQ ID NO: 198582 - DNA, 75 bp, Homo sapiens
  chr2:177502150-177502225
  hyper
gacaaatacttttcagatctcgcacccctctttacaaacctgagcggggctttcggggtaaggggaggcaagact

SEQ ID NO: 198583 - DNA, 60 bp, Homo sapiens
  chr2:177502920-177502980
  hyper
aaaaaaaaaaaaaaaaaaaaaaaaccctaactgtaaatattatttggaggtgggcgaggg

SEQ ID NO: 198584 - DNA, 51 bp, Homo sapiens
  chr2:177503135-177503186
  hyper
gtgtgagactccagtaaccccggagctctcgtctgtaatcagcacatttat

SEQ ID NO: 198585 - DNA, 318 bp, Homo sapiens
  chr2:178257219-178257537
  hyper
ggacacctcgagggcggacgtggtttggctctcggtccagctggaccgggctgggccaaccgggagtcagctcgaactcacctgcttggcaggtgcgcgcttcccgaggcgtgacaagggagcgccggcgcggtgggtggggggcagagaatgtgaagctccagacgcatggcacccgccgccaagtcgccgcggtggctgccgggatgcgccgcagcgaatggtcgcgccgggcgccgctctgagtgacctttcacccgcgcccagcggttccgggcggcagcacaaggcggtagccatggcggaggcggcggctgc

SEQ ID NO: 198586 - DNA, 258 bp, Homo sapiens
  chr2:178257777-178258035
  hyper
gtgagtagcggtatgtggaaggagttagcgtcgagggaccaggccgggcctgtgctgcaggagggcacaggcgaggtgggaagggaagtgacacgggtgggcggaaggcatcccggtccctgaaagtagggacccacctctctttcgagagagtggactagaccctggattctgtcaggaagggggcgggatgggatggtggattttggtcactatgtgagggtaacaggcttgaagaactctcgttggagaagggtt

SEQ ID NO: 198587 - DNA, 344 bp, Homo sapiens
  chr2:178417525-178417869
  hyper
gcaacagagcaaccggaagcggaagactgccggtttccttgtcgcaagaaatctgttaggaacaaaaagggaccactctcgtcagtctctcaatttcagcttgatcttcaaatactctggactgcggagtggcggcattcaggaggggaaagactactccgggccgttcagagactgaatctactcgtcccggcatgcaccgttccagtggttccgcggcgcgggtcgtagccgcgctgcatgctgggagacgtagtcccggctgtacctaccgaaccggcggcccgtgggggtgcagggtaactctccttccctgcctcttaaagatgaggggcgctcactgt

SEQ ID NO: 198588 - DNA, 207 bp, Homo sapiens
  chr2:178483485-178483692
  hyper
ggaaacggaagacgacgggttactttgccacggaaggaatctgttaggaataaaaagggaccgttctcgttagtctctcaagttcggtttgatcttcaaatattctggactgcagcgtggcggcagtcagaaggggaaagacgactactccgggccgttcagagactgaatcttcccggtcccggcatgcatcgttcctgtggcgcc

SEQ ID NO: 198589 - DNA, 401 bp, Homo sapiens
  chr2:178937351-178937752
  hyper
cgccgaccccaccccgtggtcctgctactcctgctccgcacaggtgcccagcactgagctgccgccgctgccccggctcctgttccggaaacccgagctatcgctgctcctgttctggctgccgccgctgctgctggaactgctgctgtaaccggatgagtggaccgctgtgacagggaggtagggcaggacacgcccctgagtgaggcacggagcctggagggaggagagaagaggagggagccgcggacgccagaccagccaaagtccacggcccaggctgccaggcggttcctggaagagtctctggacggccggaatcggcgcctgggtacaggactcctgattggaacacgattagaagagggaaacgcaccttgttccttccccgcttcttgctc

SEQ ID NO: 198590 - DNA, 261 bp, Homo sapiens
  chr2:179316084-179316345
  hyper
cgcccgcccctgccggccctgaccagcctgtagtaactggcccctaggccgcagttctttgtccttagcaggaggccgtttcttgccgggagagagggattagagggattgtccggcgtgggtctagggtcgttgaggcctaaagttaagcctttgtggggaggacggattgggggctgggtcactttaagaaaaagattctaaaattacgaaggcagaattccagggagtctcccgggcctggtcctgaagcttgagacc

SEQ ID NO: 198591 - DNA, 464 bp, Homo sapiens
  chr2:179343530-179343994
  hyper
tgacaacattcgcattttctaaaatgaaactggcataagacgaaataaacagcctgggatgtcgtagagtcagggaatatggttgtcatttctggaagcaaaaggcttctaagacccctagggaacgagcagatagatactggggggagggagaggcatgctggaaaaggagcgtaaaaaataggctggcggtggctttctgggtgcttcggaggtgtccttgaagcgcattctcaggtcggaatcttgcattcagaggttccaggctgagtcgcacaacctgaaggccagcccgatgcaacgaaactgcggtaccgcaactcctctgcctggctgcaggcgtttccgagagccgacctccacaattcagcatcctccgctggcttgcatttcttttccccgccactcggggccgcccttgattcgagggcctctggtagtgcggggaatgttcttttgacttt

SEQ ID NO: 198592 - DNA, 85 bp, Homo sapiens
  chr2:180129611-180129696
  hyper
cgagtgggactctggcgctccggacggaccctgccgtccccacccctagccgaggcccaggctccccaggcgggaggcagtcttg

SEQ ID NO: 198593 - DNA, 32 bp, Homo sapiens
  chr2:180725140-180725172
  hyper
gcacataacagtggcgaaacagatggtcctcc

SEQ ID NO: 198594 - DNA, 48 bp, Homo sapiens
  chr2:182323095-182323143
  hyper
accccaccatagggcaagtcctggaaagattcacgttgcctgttactt

SEQ ID NO: 198595 - DNA, 64 bp, Homo sapiens
  chr2:182521311-182521375
  hyper
cccagttgggaaggaggaggcggcgacttggggactcggtaacctgtccgggcagtgaggcgag

SEQ ID NO: 198596 - DNA, 301 bp, Homo sapiens
  chr2:182521646-182521947
  hyper
aggcacagcggcagcctccgggggcgcctcttcctcccggccgccctccagggcactcacccggttcctgcgcctcctccagggcatggcggagtcgcaggctgggcccgagccaggggtccggggaggcctttggagaaggaggtggagggcgcggcagccccagctctagccgcgtccagcgctgccacagcaacggcgcgcagggcagggacccaggagggaggcggggccgcgcctgacccagtccagcaccctggcctgccagcctcgccgcttcgccactcaccacaaaaagacc

SEQ ID NO: 198597 - DNA, 168 bp, Homo sapiens
  chr2:182757468-182757636
  hyper
cctgtgggtcccgcgaccgttgtaagctacaaaccggaaagtgagccggcggatagcttcctcctctaagcgattagaaatggaagtgctgtgaccgctgattatttggtgaccgtgttgactttacagttaggacttgagctactcacgcatcgtgttagcatcaga

SEQ ID NO: 198598 - DNA, 85 bp, Homo sapiens
  chr2:182818945-182819030
  hyper
gggacccctccccccgcgccccactacccgctaaccgcctcccgccacacacacacacacacacacacacacacacaccccgcgc

SEQ ID NO: 198599 - DNA, 105 bp, Homo sapiens
  chr2:183902297-183902402
  hyper
cactgctgccatctccgtaagaatatggaacactcaagttttcctacccacctagaatttcgcccacccaccaccctccctttcctatgggccccatcatggggg

SEQ ID NO: 198600 - DNA, 568 bp, Homo sapiens
  chr2:183902442-183903010
  hyper
cgcccccaccccgtgcgaggcccagcgcccgatcccgccgccgggagccgggaaatggcttctctgccttcggccggccggcgaaccacagggagaggcgcccgggactccgcattaggccgcggcgcatccaggcgaccccgggccgggcctcgggcggcgacgccgagatttctacacccggcgcctcctgccgcccccaccccacggcctcccttgcccttcatccctcccgggcccgcccgcctccgccgcggcctccccggcccgtgcgcaccttcttgatgttgtagaggcgggtgagcatgccgacgccccggtcgttgaggatggtgagcttctccgccagcttctgctgactgggctgcagcactgagcgcgacatggtggtgctggtgccgccgccgccgccggccgcctcgcgcccagtcacgggcccgcggccttcgcagcagcctctctcgggcctcctcccctcccgcccgcgacctccgccttaggagagcgcgcccatggccctcgcgccccaatcccgcgccggcgacagagcgagccgcggcggactcct

SEQ ID NO: 198601 - DNA, 561 bp, Homo sapiens
  chr2:183903037-183903598
  hyper
cgccccggcagcctcctgccttccgcccgccgcccttccgcccccacccccggcgctctccgccccagcccccaacgagccgccttccccggctgctccactaggtgtggcggcggcggcggcggcggcggcgtctccggcggctgagaacgaggccgcttcccgcagccccggacgggccctcggtcacctgatcggcagcgccggcgcccccgcgaggccggacggggaactgcggccgacgggccctcggcatggcctcgccgccgccgctctggccctggccctggcccggaccgcccactacgcctgatgccgggatgggagtcccaagcggggactgagtggggtcgcgttgtgtgctctttccacttcgccccacaccccactccttcaagttcccaaaagttgcttttccgcaccacccttctaaagaaaccggcagaaactctgctgggaggcggggtgttttccaggcgagtttcgcttaagagtgggctggtggctccaagcgctttttcctcccactgcttgacaggcgctcgccgcagaacacagcag

SEQ ID NO: 198602 - DNA, 163 bp, Homo sapiens
  chr2:183988919-183989082
  hyper
caggaagcattcccggatgaaaagcattcacagaaccatacgctggttcgccaccttcccggtgcaaaaaccctttcctcggaaattctcagcgcaaagactttgccctattccaaaatggctccggcgcctacaacttaagcatagcgcaggtccggaagtt

SEQ ID NO: 198603 - DNA, 90 bp, Homo sapiens
  chr2:185462530-185462620
  hyper
gaagaactgaggttctcaggggaggtggggtgagaggattgccaggaggagggacatataaatcaggagtccctgcttttaccctctact

SEQ ID NO: 198604 - DNA, 284 bp, Homo sapiens
  chr2:187454990-187455274
  hyper
gggcactgggcgcctcgctggggcggggggaggtggctaccgctcccggcttggcgtcccgcgcgcacttcggcgatggcttttccgccgcggcgacggctgcgcctcggtccccgcggcctcccgcttcttctctcgggactcctgctacctctgtgccgcgccttcaacctagacgtggacagtcctgccgagtactctggccccgagggaagttacttcggcttcgccgtggatttcttcgtgcccagcgcgtcttcgtaagtggccgcacttggaactgg

SEQ ID NO: 198605 - DNA, 232 bp, Homo sapiens
  chr2:189156402-189156634
  hyper
cctccacccacctccggttccgcgtgcacgcgcgagatagtccagtgggcccacagataacgaccatcagagattaaagaaggaaagtcagcgagcttgaacacaggcgtcccgtgtggaaatgtccaaggagaccgccagaagtgcgcaagccggagtcggctagagtttccttctcaccgagagggggagcccggcgttcccggccgggagcgacccggagtccccagcc

SEQ ID NO: 198606 - DNA, 583 bp, Homo sapiens
  chr2:189156844-189157427
  hyper
ctctccacgcccctgcccgaagcctgacccgactgcctctctcagtgaggtacggagatttatctaggctcttccctggctgcgaacccaggctccctccaggtagcgtggaatcgcttagaagctgatatcccgaggggcggtgggggtggacagctccggccaccagtgcccgggaaggagggcgcggggctgcgcgtagccgctggccagcaggttgtaaaaaattaggacagctaaatgctcagggagtcgtccagcactaaaggaggctaagacctgttgacgcctgctatggcagcgcttgagaaatgactgggggagtccagcgaggtcggggacgcagcggtctccgggctccagaaacctccttagccttttgtggtaactttggtccggcggcggggggccggtgagcaggaactggagggaggcggtggggaaaccgtggatccgtccggctgagggtgcgtggatcagactgggctgagcaggcaagtcatcgtcgggtcacagcgaggcgacccaggagcgaacttccagggcagcctcccttttgttggcgctgggagagaatgtgggc

SEQ ID NO: 198607 - DNA, 42 bp, Homo sapiens
  chr2:189157688-189157730
  hyper
tctctattctgaggctcctgcggctgccgcgctgacttccct

SEQ ID NO: 198608 - DNA, 111 bp, Homo sapiens
  chr2:190306062-190306173
  hyper
aaaggtgcctgcacggaagcggagtcctaccaccgagtctcaggcctagaagggcccgggggtgggttctgtgggctgggaacagccttattacccggctcaacgaaggaa

SEQ ID NO: 198609 - DNA, 120 bp, Homo sapiens
  chr2:190445060-190445180
  hyper
ttcctccagaactcgtgtagagttgcttgtctccaaagccccacctgggtttccaccatatgctttcggtcaacgacactcaccacagcatcctctctggcggttgtgatctcccgccct

SEQ ID NO: 198610 - DNA, 819 bp, Homo sapiens
  chr2:190445255-190446074
  hyper
taacaggagtgcaaggaactggagatagcacctctaaaaacacaacagccttgggcaaaaagactacaacgacgactttggcaaagaacaaaagaaaaggggcccagggattttcttttttccttctttccaaacttagctaacactgtagctgaagttggaaaggcaaagccttatggaagcggtttgggaggctcagcaggtcgtccgagcctagcggacgccctgagccagctctctccgccgccgccgccgccgccgtgggccgggcccagctcttataccgagtcgggggcggagctccctgcgacctccgactggggccgccccgtccccttcagggccgcccgggcgtccccgcggcgcgagacgagctcccgtcaaccttgcgcgccgggccgtccccgcgcccttgcccggaggagtcgcccaccccgggcgcaagcgtccaaccggccgcagacaccctgcgcggcttgcggggaccttcgcctcgacgcgttccactccccgggttttcctgctctccgggaagccgcgagggcaacctcggggggcggccgtggggctgggaaaaggaggaaggcgcgtggagccggcggggcggcgtagggagattctgcgcgaaactaagcgtcaggtgctggaagaaagcgctgcgcaccggctaccccgcagttcagggaaagggcggccgccggacggtcgcagtgcaaagctccagcgcgagcttggtgggtggggattccttttttaacgaaaataatttttaatacaggtatctaaataaatataattcatgccacagaggccgctttc

SEQ ID NO: 198611 - DNA, 287 bp, Homo sapiens
  chr2:190446109-190446396
  hyper
atgcctttccttccccggactgcatagcagggcttccctcaaagaaccagaatcaaagggcaggaagggggcgcaaagatcagagtccatccctcttgagaggagcaaacggaggcttgcaaaggtgaagtcccgcagcgagttacagacctacccgtatccccaaactggggcctccaaatccgtcctggagacagaatgaggatgctgcagccccagcaaacccttcaccatcattccttctccctctgtaccctctcaccccgcccccacgcgcgcgtcccttc

SEQ ID NO: 198612 - DNA, 82 bp, Homo sapiens
  chr2:191044992-191045074
  hyper
gaacccttagctgggaaggccgcggccaggctgcggggccccctgcaggcgggctcagtgccccggcccagcacctgttgtc

SEQ ID NO: 198613 - DNA, 516 bp, Homo sapiens
  chr2:191045505-191046021
  hyper
cgaggagcgcgcggcgggcgcggcggcgacggcaggaggaggggccgggagcccgggcgccgccgaaggacgccccgtcctccacatgctgccacttggctgagccgggcgccggcgagaaggcggcgccgctgccctggcagctggactgcactttgcccccgcccggcctcagctgccgcccgcccagacgccagcaagcccccctcccacgacagggctgctccgggagcttcggagacccgccccgggcctgagcgcaggctgcctccgggaccccacggctgtccggacgtgccatgggcgcgcagctgccgggcaacgtgttgtgtaagtgaacatctgggaggtgggtgactggtgaagggcgggtgtctgtcggtctttgcttgtcagctgtgccttttagatttttcaatggcagaaacccatgagttacaggaggctttaattaaacgagaccgttctcagccagctgccgtggatagagcctcacatctccgtcccctaatcgag

SEQ ID NO: 198614 - DNA, 183 bp, Homo sapiens
  chr2:191208157-191208340
  hyper
catctgtcaaacccgcagtcccctatgagagtacagatgaatggaggaggaagatttaaaagtgaattcgtgggcggcgacaaggaaacagcagccgtggccaagctgaccccagagcccttcccttcctggccctccctctgaatcatcgcgctccacttgtgacgtcgcggacgcccggct

SEQ ID NO: 198615 - DNA, 139 bp, Homo sapiens
  chr2:191512982-191513121
  hyper
ctccctggttccattcctccctcctcctcccgtcccaacgccagagcggaggtggggagggggcaagatgggcgaggcagagatgctctcccagccgccggttcttccagcgccgcgcacctgccgccccttcctccat

SEQ ID NO: 198616 - DNA, 345 bp, Homo sapiens
  chr2:191514824-191515169
  hyper
aatgttgcaggatctcggggaaagggatagttgagatggaatatacatttgtcgattctgcagaccaagctttgcagcgagtgatcgggaggaatcgtagacttgcatgtacttacacctcgctccctgagattcgggaggcacggaaaattttgggatggctgttaatttaaaatttcatctgaaagagtcgatttggagtaacttgtcactaccagttggtttgccagtgacgtgtctgccaactcaaagagtgcaaagatcagaagctgaaagaggaattctcagatcttgtttaaaaatattttggcagttttaatagataatatgagattgcataggaac

SEQ ID NO: 198617 - DNA, 84 bp, Homo sapiens
  chr2:191745041-191745125
  hyper
gtccggggctgctctcggaggagtcgccagacgccctgacctgggggccagatgcgagctgggatcggctgagttccgacagct

SEQ ID NO: 198618 - DNA, 413 bp, Homo sapiens; identical to SEQ ID NO: 2097
  chr2:191745184-191745597
  hyper

SEQ ID NO: 198619 - DNA, 436 bp, Homo sapiens
  chr2:191745657-191746093
  hyper
tgcgggagtccgagccggaaccacacccaagtagctgccctttcctcttctgtcatctcaccgccccaccacagaccgcgttccccgaggaaaccggccgcccacgcccggagcatcctcccctgttgagcgggcgctgacggacccggcggcatgatgcggctgcgaggctcggggatgctgcgggacctgctcctgcggtcgcccgccggcgtgagcgcgactctgcggcgggcacagcccttggtcaccctgtgccggcgtccccgaggcgggggacggccggccgcgggcccggctgccgccgcgcgactccacccgtggtggggcgggggcggctggccggcggagcccctcgcgcggggcctgtccagctctccttcggagatcttgcaggagctgggcaaggggagcacgcatccgcagcccggggtgt

SEQ ID NO: 198620 - DNA, 80 bp, Homo sapiens
  chr2:191746519-191746599
  hyper
cagctccctggcttgcggctgcagcgcctggccgcccgccccagccattcgtgggcgatgctgcacgaacatctccaccg

SEQ ID NO: 198621 - DNA, 140 bp, Homo sapiens
  chr2:192015231-192015371
  hyper
gccctaaaatgtcactcgcgcccatcaaagccacagtcaccggctgccgtagctgcaagcttttttctgaaatccaggtacgctaatctaaagtcagacatcacagctctagagaagctggctaagaaagtgaagagggg

SEQ ID NO: 198622 - DNA, 251 bp, Homo sapiens
  chr2:192015426-192015677
  hyper
ccccgcagggagattcgcccgggcaccgtggcgcgggcctgcggagcggtttccgcggagaacccgtgccagggcgcatctgtgggtcgtggagtcgggcgcttccttctataataagcctcctcaggaaggttaaaatgaagcaattgtcaaaacgccaagggaaagcaaagcttcagagtatcctgcataataagcatgtcctccttacaagaggcagccagaaggtgtggtctggccacttacctagc

SEQ ID NO: 198623 - DNA, 33 bp, Homo sapiens
  chr2:192015678-192015711
  hyper
ctctctcagcacaggtcccaggcagtgctcaag

SEQ ID NO: 198624 - DNA, 206 bp, Homo sapiens
  chr2:192109717-192109923
  hyper
tcccactgtttgccggaatgtgaccccaggctggcttcgagttgtcaaatgttgtatttctcattttatgtcagtgagtctggaagcaaaaaaggtagaaagactgccttccgtgggggccgcgacgatcgcccctccttccctcaagcctcgtcccatccaggctcgccccgggtgcggagggtcgggccgcaaacccgcaaggc

SEQ ID NO: 198625 - DNA, 253 bp, Homo sapiens
  chr2:192110303-192110556
  hyper
aggacgacgtggaggcggagtggcgcccggcgaggtagcgccaggcgaggtagcgcgagcgctttctctctctctcccctgcccttccctctgcgtccgtcgtcggcccccgaggcgcctgctccgcgcctttgtgcccgcggtccctggccccgtcgcaccctgcgggcgggggtcagcgggctctgccgctctcttgggagacgcggcgctgcggcgggaacggcgcacgctgtaggttgcggagggtggt

SEQ ID NO: 198626 - DNA, 179 bp, Homo sapiens
  chr2:192110584-192110763
  hyper
cgggagggaagaagggcttgtaaactaagttgctcttactttgccccatgcctctcgtacctgtgggcagagtcgaatctcggctgtcctcgtgttcacccacagcccctccattcctctggcccacagctgtttcctggccccctggaaagacacggtgtggcttcctccgggcagga

SEQ ID NO: 198627 - DNA, 36 bp, Homo sapiens
  chr2:193058975-193059011
  hyper
gaggtgaggggctgaggaggcgcgctagggtaggct

SEQ ID NO: 198628 - DNA, 386 bp, Homo sapiens
  chr2:197035576-197035962
  hyper
gctgggagcaggacgcgtccacgagtcccgatgggaacgcgcccacgccgcagctgggactcgggagaggctagggggaccgcgtggccttgctgtggaagggacccgcgcgggcccgccgcgaagggggccctgcctggcgcgacctggggagagccggggccggccgggtggagggcgcacggggacacacggacacgcacagacacagacacgcgccccgggctgaggagggtggtgggaggaccgccggccgccccccgcgcggagccccagggaacccggactccagccgcaaagcggagaggcgccagcagcaatcagccacctcaggggcggcggagtccaagcccctctcagccggaccgtaccgcctaaaccctcct

SEQ ID NO: 198629 - DNA, 34 bp, Homo sapiens
  chr2:197458535-197458569
  hyper
accctctgaggtcgtgcagacaacactgttcctc

SEQ ID NO: 198630 - DNA, 121 bp, Homo sapiens
  chr2:198175715-198175836
  hyper
cctgcacgcggcgcccggccgggccggccccgggccctgggcggatcgcgggcctccctgacgggtctcacacatatgggtggggaagcccgcggggacacaccccgagggggcaggaaag

SEQ ID NO: 198631 - DNA, 121 bp, Homo sapiens
  chr2:198257786-198257907
  hyper
gtctcaaatacattgggccatacatagttcaacaagtgattcagcgaatcttcacaaccaaatccataaaccccaagtgacatgtgctgtaccactgcactagccgtctgtctgtgtacaa

SEQ ID NO: 198632 - DNA, 106 bp, Homo sapiens
  chr2:198262740-198262846
  hyper
gactgtggctctacgaatagcctttttgtgggcttttaagagctctaaaagctcaaagcaaatcctcatccactctcttgcagatacatattcagctcccctaatt

SEQ ID NO: 198633 - DNA, 148 bp, Homo sapiens
  chr2:198265015-198265163
  hyper
aagtcagctgcctgttgcctaactttagcagatttgttatttaaacgccacaaaactgtaccacagatctgaggcaagtatggtttgactcgtttgccaagagcattaaccactgtgccaaagccgttcaacattactgagtcctaaa

SEQ ID NO: 198634 - DNA, 178 bp, Homo sapiens
  chr2:198265429-198265607
  hyper
tttcattacctctgtagtctgttcttggaaagcataaagaataccatcaatcagttgttcttcaagtttatgatcaatatctgctgctcccaaattacccataattttctcaattgtctccatcaccatttttctgtactgttcggcttcatctttcagatcatccacaatcctggat

SEQ ID NO: 198635 - DNA, 341 bp, Homo sapiens
  chr2:198266479-198266820
  hyper
ttttcatttcctcatcaggagactggaattctcgaataaggattaacatcacttctctagtatagtagttggcatattctgcatccataagaggaataagatacccaatagccttcaagaaagcagccaaaccctatttttaaataaaaaatatatgtactttagtaatttagatttatgtcgccttaactttaatgaagataaatcaaaaggtaattggtggatttacctttcctctgtgttggcggatacccttccataaaggctttaacacagaatcaaaagattcgataccataaggagttgctgcttcagccaaggcagcaatggccaaagcactg

SEQ ID NO: 198636 - DNA, 376 bp, Homo sapiens
  chr2:198267374-198267750
  hyper
ctcgcttgccaggacttcttgcttttgcacacagcttttaagaagggcaataaagaaggaatgcccagggcagaggctacaacagcaaaagctctagctgttgtgttacggacatactcatccatgttatctatatcaggtctcatggtagagatcatagtagccagaccagcagcctaaaatgtaaacaaagaaaggacagtcatgagttggtaatattaatcttcaaccatttctttccataatcaattccataaacagatataaattttcttctctagaaattaaatgtaaatacctttgccaaattagaaatgatctctcggccttccactctagcatagtaatcttcatcaatcaatagcggttcaatgac

SEQ ID NO: 198637 - DNA, 70 bp, Homo sapiens
  chr2:198268366-198268436
  hyper
ttcacaagtaaatgacgctcttgatcctcaagtgtaggagacatcagcagaggaagaatctgattaaaca

SEQ ID NO: 198638 - DNA, 93 bp, Homo sapiens
  chr2:198269812-198269905
  hyper
ggtgttccattcttaatttttaaaagcaacttcattatttttctctctttttgctcttctggactaagtgttgattcatcaacatcaacctat

SEQ ID NO: 198639 - DNA, 81 bp, Homo sapiens
  chr2:198272718-198272799
  hyper
taccttatatccttctgggaacatagcatctaattcctcatcagaaagtgggcgatttctctcatcaatttctctttccca

SEQ ID NO: 198640 - DNA, 147 bp, Homo sapiens
  chr2:198273117-198273264
  hyper
ggctggtgtgccaattggtgtctttccaggggtcagaactggagtgcttccacccatctgactagctggtgtttcatcccaccgtgattttcttttactggctccaggagtcggtgtttcaccaatagaatctccacctcgatctgt

SEQ ID NO: 198641 - DNA, 165 bp, Homo sapiens
  chr2:198669112-198669277
  hyper
cgggtacaccctggctcgagtacattagccccgctgggccggctcccagttgcagaacacattccattcttcgcgctcgggcacacccctccgcagtgaggattggtcgggccgagccccctcggcgaggcgaggctcctaagaggcccagacgcctgccaatcc

SEQ ID NO: 198642 - DNA, 644 bp, Homo sapiens
  chr2:200320725-200321369
  hyper
tcccgcagacacgggctctcgctccgccgctccatgctgctccgactcggagacaaagttcccaccggcaggtcgcaataaaacgcacagggacctagggagggggtggggggaggaagggggagggagaaaaaagagggaaaaccgctcatacacgtgatagacgttcaggccagtggcagagcgctgcaccacagccacacaaacttcctcccacgctgcccgaggggcccgagccgggaagccggtcccaaccttacactgggcggcccccaggaagcccagcgcctcggttcggcgactctgcccagtcgcagctccccagaagtcagccctcggggtcgcggccggggttggcacccaggggcgcctagaagtggtccattcattgggacggggttggcataaaccgttcctgggtgctacagcctagcccgtcccggggtcagggttgcggaataagtgaacttcagaaaaagacgttccacccacatgggaagggagttgggggtgtgcgcaagtccataaccgaattaaccacccggtaaatgcgctgtgaatggccaggcaggagccaaaggccgggcgaaagaaccccttgaatacccgctttttacctatacggagcaagtcctgagataagc

SEQ ID NO: 198643 - DNA, 41 bp, Homo sapiens
  chr2:200322457-200322498
  hyper
cggcggcggcgagccggggctgctggttcgcagggcggcta

SEQ ID NO: 198644 - DNA, 59 bp, Homo sapiens
  chr2:200322611-200322670
  hyper
ctccagcctctcccctctcggccgcctctgccagcagccagagccggactcactgacaa

SEQ ID NO: 198645 - DNA, 251 bp, Homo sapiens
  chr2:200326988-200327239
  hyper
aggagggcgggagggaatcatttctttcaaatgaagcccacgccagctctgaagccaatttccgccgcggactgtccgtggagagttggcgaccaacactttctcggacggcataaccgcgaggggcttagactggaaatcagatgcgccaagaggacaagagccaggggccagaataccccagtgggggacgcgccttggaggacggttcgcccagggtgggcttcagccctttcccagagtgctccggg

SEQ ID NO: 198646 - DNA, 274 bp, Homo sapiens
  chr2:200327794-200328068
  hyper
tggtgtcccttcggcggccgcgggccgggggaccggggaagacggagggtcctgcggcctggagcaccaccctaccacaccaggcaacgccccccggggcgcccttcattcttttgcagagcccagaacttaataggtgggtccccttctgcaaccacgctgcgagagaatgactgccctgctaatctagtttacttgtagaaatcgactgtaaaccgggacaacaaggcaagggtgggggaagaaaaggaagcgccgaaggagccgccgctgc

SEQ ID NO: 198647 - DNA, 179 bp, Homo sapiens
  chr2:200328488-200328667
  hyper
cccaaccccttgaaatgaaaagtacacctggaaagcccaagatagcacccggtccgcaccccaaatttcaggcaggccagcaggcgtccagaaatccgctcccacccctcgtaggggcaggcaagctcaggcagccgggtgcaagggggcccaaaccgcagttgcctcccgaacgcttt

SEQ ID NO: 198648 - DNA, 218 bp, Homo sapiens
  chr2:200329745-200329963
  hyper
cttttagtatcaataaagcctagtaattgggtttgttggttacctaagctcgagttcgactttctcagtctctctctctctctctctttctcattcagaggcaacgttttcaaaaaccggcaattgcgtgtgcgtttggggtgtgcaagtgtgagtgtagatgtgtgaaagttatttgtttcagcagtccttgtctcgagagcaatcatcattgtagc

SEQ ID NO: 198649 - DNA, 70 bp, Homo sapiens
  chr2:200331853-200331923
  hyper
agacctcaagtcaggtctcccggccagactcaggcctttctaatacaggcgtgaagggcgggacgcccag

SEQ ID NO: 198650 - DNA, 291 bp, Homo sapiens
  chr2:200331953-200332244
  hyper
caggtggataacttctgcggattcggctttcaggctgctggagctctccccagcccgaggccttagcccagcgcaatcccttgtccagaccggccagtttccgcgtggcgaaaaagggggaggcaagtgtgtcttttccaaggagcttttatccaacagcctcccctccccccaactctcagccttaggtgccgggcttcagccgaagcgtttttcaaatttgtcatcattggaaacctcggacaagtggagtgtaaaattttgagggtttccaggtaggctctgacttca

SEQ ID NO: 198651 - DNA, 314 bp, Homo sapiens
  chr2:200333835-200334149
  hyper
ccttgaaaagagcaccccctaatcccggaggaagggagggtgaaggaggaggggagagcccactacaggcaaggcaggaaggttaatcattttgttaaccggaaagggtgctgccccgcctggccgtcgtcaccgagcgtgtcagtcacccgctctcgatttcgccgcagaattacctgctcaaagagccaccccaagaagccctcagctccgaggtcttcccgcccgtcgtctgcgggaagtaaacggcgtcctccctccaaagaagtggatgccccttcgactctcctccgccccccggcggttcctaaatc

SEQ ID NO: 198652 - DNA, 79 bp, Homo sapiens
  chr2:200604747-200604826
  hyper
ccgccagaagaacttcgagggtggaaaacaaccactgtttaaaggggaaattaatttcaattaccgcaccttttttcac

SEQ ID NO: 198653 - DNA, 566 bp, Homo sapiens
  chr2:200715514-200716080
  hyper
ccaggctgccgcaacgcgtgctggggccagaaccccgctgctgggattccctgcgcggtgccgactaggttcctgggtggagtgtcccaggaccacgtgggctgaaagggaacccgaagtgactcccggcctccccacaggtctcgcgggacgcagcagcggcgagggcgcggggttgtggcgcctgggagcgaggggcagccggcggctgcgctgccccggccgagctctcgaaccagcggccgcgcctgccgctctgcggtttgggaggggagcggacctgcgagcgccgaagggcggtggggcagggcgaccgcccagcccaagtcgccgccgcgcgtggcccgcgcgcagcctccgccgccgcgcgtggcccgcgcgcagcgtctgccgccggctccgcctcccggacgcccggagcgcgccccaccccagccgcacaccgaccgggctggctctgcctctccctccctgacccggcaccacgtgcctggcgtccttgaacgcttcagatttttatcagtgttgccttttcgtttgctcttccgtatcgccagaccctccac

SEQ ID NO: 198654 - DNA, 111 bp, Homo sapiens
  chr2:200820437-200820548
  hyper
ctttctccgacaccgctgaggcggtttcccaccgacttcctttccatacagcaccggcaggcaccggtgtgaagggtcataaaaatggcgctggccgctcgtttgctaccc

SEQ ID NO: 198655 - DNA, 1349 bp, Homo sapiens
  chr2:201171095-201172444
  hyper
aggtttggggaaaggcgaggaagtcggtctggagcaagcaagcaaagtgcggaagctgtactgggattcttctagaaagtggggtgggaaaggagctagggagggcgtgtggagggacgagatctgtgtcagaacgtgcgtgtgagcggatacaaaacccgagagaggcgtgagcagcgctgtgtttgcgagcgggagcgaggggcgccggctggggtgtgtgctcctggtgagtgacaccgaggggaaggcgggcgggtcggcgggcgggggcagcctgcgaggggcgggagtgtccctgcgtggggcggccgagccggagttgtgtcagtgaaggaatccagtccgggggccgagctggctgcgccctccgctgcaagcgccggcagcgcggggcgagctccggacggcgcgcggcccaggcagcggctcccgctcggcccgccctccgagccgcaggggccgccaccgccgcggcgcctcccctggcgaccgcgcccccgggccccggctccggcccgggacggaggagccggcgctcgacacagaggtaagcccaggaccccctccacgccgggccggctggggatgcagggcgcgggcggacgcggaggggcctgcgcggccgggacggagactcggctgggccgagcattccgcagcccgggccgcccagcctccgccgcctcccggagcgctgggtgtggcccgcgctcggcgccgaggcgggctggtggcgcggaccggacgcgaaggtcgccgtccttcctttctccagccggcgcgggcaagcgggaggaggcgccggctgggacgcacagtggcgctccccgggcgagcgtgtggccgccgcgctccgacgtgtacccgcccgccccggatctgaatcgcccgcggccgccgtccctcgcctgccgtcctcccgcgcgggcgcccccgttccctcccaagccggaaagagacccaccgtcccccaggctgctctctggcccggagccgcaaagcccacgtcagccgcgaccaccccgccctcggatcccagccgggtgcgggggccgcggccccactgaaccccgcgcccctggcgcccagcgggagtgggatgcgttggcgtccgcgctgcgcgggtgggctggggtggccggagcagacgcggagcgccctggccgcgggacgaagcggtcgcgccgccgcatttgggcggggggaccccggagtccgcgggctgcggaccccagcgggagacggggttgtcgtaggatgcgctcgcgctggacgccggcgcactctgaatatcatgctgccgcacacgcggggctgaagggccgagtcttcacctgcgcggggat

SEQ ID NO: 198656 - DNA, 119 bp, Homo sapiens
  chr2:201172480-201172599
  hyper
cgtgttcccgcggggttggtgtgtttttgaacttcacgagcttctcatcccccccgcaatcctggttttagcagatgtcggggttttggagacctgacacttttcgtgaaagattcttt

SEQ ID NO: 198657 - DNA, 140 bp, Homo sapiens
  chr2:201727376-201727516
  hyper
gtctcttcacagacacgtgaaacacacgtcattctccccgtttaaacgtgtaccagaaactagtctccaactcaaatgcaatcataaatgttcctcaccaacaccgcattactgattactgcaaacgtaatcagagttat

SEQ ID NO: 198658 - DNA, 215 bp, Homo sapiens
  chr2:201729300-201729515
  hyper
actccaagtcgaaggagacaaagcttgtaacgcaatcacgggaatcacgcagctgactgcgtcgcgcaccaacaacaaaatggagctgacagctgctgcgtcgagactcgtctcgaaaacactgatgacgcagcgagcgcgtctccgccgcggggcgggtcatgcacggggcgagcaggcggaaagggcgggcgtgtcgcgcgcgcgaccatcgt

SEQ ID NO: 198659 - DNA, 149 bp, Homo sapiens
  chr2:201828571-201828720
  hyper
ttcctttcttctttccgtttccggggaagggaaaaggaagtgttgtttggatctgaggaagtttgcacagtagctggctgagtggtagctgtttgtcttgtagcaatctttaaaaagtgttctttggggtcgggcgcagtgtctcacgc

SEQ ID NO: 198660 - DNA, 214 bp, Homo sapiens
  chr2:201983220-201983434
  hyper
tcctggtggggtcgcacgtaacggtcctgagctatgcataagccgtttgaccacgcatggagaattttaccacccagagacacgcgagtggccctgtgcaagtttcaactgcgcggggggcggggaattccgcagacaggattctagaatttatgtcttgtgtggtaacatttcagccggtgggtggcggggattaggcgtgaagcggttcagc

SEQ ID NO: 198661 - DNA, 726 bp, Homo sapiens
  chr2:202898961-202899687
  hyper
accggaccaggcgcggggggcgtgcgcgctgcggtgcgccgggggtccagagtcttgggcaaactttgaagggtgccggagccgcttgttgctcctcgcggcggagggagccgcaccgttacgtccccgcggggagagcgaggcggccctcctcggcgcccccaacccaggctgacgagttttgggcccccggcggccctgcgagtgcagggcggcggcgtctgcggcgccttcgcggcgcgggcacccaggcggcagcgccctttgctccacgccgcccacggcccggccccggcgccgtgaggactctcatgcgtcgggcgcggcggcgcctccccgcatccaagcctctcccaaccgcctcgtcgcactcctcaggctgagagcaccgctgcactcgcggccggcgatgcgggaccccggcgcggccgctccgctttcgtccctgggcctctgtgccctggtgctggcgctgctgggcgcactgtccgcgggcgccggggcgcagccgtaccacggagagaagggcatctccgtgccggaccacggcttctgccagcccatctccatcccgctgtgcacggacatcgcctacaaccagaccatcctgcccaacctgctgggccacacgaaccaagaggacgcgggcctcgaggtgcaccagttctacccgctggtgaaggtgcagtgttctcccgaactccgctttttcttatgctccatgta

SEQ ID NO: 198662 - DNA, 34 bp, Homo sapiens
  chr2:202900077-202900111
  hyper
gggccgtgccaacggcctgatgtactttaaggag

SEQ ID NO: 198663 - DNA, 195 bp, Homo sapiens
  chr2:204399768-204399963
  hyper
cctcacggccccgcgcccagccggctccctaccccctggccccgagggcgaggctaaccactcaccgcggcagtcggtcggccttcccgcggccccgggcaaggaaaccgccgctcgcgctcctccagccgctgcctccgcctcctccccaggcgcggcgctccctcgccagagacgcagcgactgccagcagct

SEQ ID NO: 198664 - DNA, 188 bp, Homo sapiens
  chr2:205409782-205409970
  hyper
ttcctaacaggccctcggggcactcctgcatctccgcacccggcagcctcgccccttgggtgtttttggtgggcgtgactagaagcacctgctcctgggctccttttgcatcttgctgcagtcccctcctgtgaagggcgcagctctgcagtctcctcgctcttccctcgggtgttctttctgagatc

SEQ ID NO: 198665 - DNA, 898 bp, Homo sapiens; identical to SEQ ID NO: 38498
  chr2:205410026-205410924
  hyper

SEQ ID NO: 198666 - DNA, 188 bp, Homo sapiens
  chr2:206750390-206750578
  hyper
acggggaaggcaaacgtctcctcctccctcccacaccctctgccggttttcccgctctgcctcctggcgcccttttccgcccagaaagcaggagcccgcctagtccttcatggcgggagaacagcgccctcgtgtggactgccgggttcttggtgctagaggcagtttgggtccgttgccttttcact

SEQ ID NO: 198667 - DNA, 202 bp, Homo sapiens
  chr2:206949821-206950023
  hyper
tcccccacgccctggggggtcccgggcgctaggaccagggctccccggagagacagcggcccccagttcgggcctaaaaggaaactttctgggccgcggctgcacctgactcctcaccgcccctccacccgaccccacgcccgccaggccgcccgccccgccccgccccggcctggccgtccggagcgcggaggagggggat

SEQ ID NO: 198668 - DNA, 71 bp, Homo sapiens
  chr2:207307392-207307463
  hyper
tgtgtgcccatccccgtggttgacaaacaacggatttcccaagatagctgccacacacttggtttctaatc

SEQ ID NO: 198669 - DNA, 239 bp, Homo sapiens
  chr2:207308960-207309199
  hyper
attcatcccagttcacttttggaagtccatttctgttgcattcgcgaaaaacccattccaattcttgttggttccactgggaggtgtttagtggatcctgggtccctcagcgatctctgtgcaacttgcggaggggcaaccagtggatgggaaatacagcgagggagcaagttgctacttgcgtggtggaaccttaatgtgaatgcggggaggatgtagtgataatagtggtaatgggc

SEQ ID NO: 198670 - DNA, 71 bp, Homo sapiens
  chr2:208031939-208032010
  hyper
ggatgtagacatagagagatctgttacatctgagatgaaaaccctgcacaattcacgttagggttggccaa

SEQ ID NO: 198671 - DNA, 226 bp, Homo sapiens
  chr2:208633317-208633543
  hyper
gtcaggttgtagccgatgccgcggcacatgggcaccgtgatttcctggcacaccggggccttggacgcggcggccgcccggcccaccagctgcgctaggagcagcagcaacagcgagggcggcgcggatgggtcaggccgagccatcgccccctccctcccctcgcctccagcagcccgcgagggacgcacacaggcagaggaatccgggccggggcttctccctc

SEQ ID NO: 198672 - DNA, 101 bp, Homo sapiens
  chr2:208633756-208633857
  hyper
tccctgttggagaggcgtcaacagttcggtccccgcgagctgtctccaaatctcttaagttaacccctttcctttcctccccgctccgcctcctgtaacca

SEQ ID NO: 198673 - DNA, 78 bp, Homo sapiens
  chr2:209108240-209108318
  hyper
ttagacagagccatttggaaggaactgtgtgcaaaatcttcaattgacttatcttgattatacatccccatggcaaca

SEQ ID NO: 198674 - DNA, 261 bp, Homo sapiens
  chr2:209113128-209113389
  hyper
ttttacccatccactcacaagccgggggatatttttgcagataatggcttctctgaagaccgtgccacccagaatatttcgtatggtgccatttggtgatttccacatttgtttcaacttgaactcctcaaccctcttctcatcaggagtgatagtggcacatttgacgccaacattatgcttctttatagcttctgcagcatccttggtgacttggtcgttggtggcatcacgattctctatgcctaaatcatagcttga

SEQ ID NO: 198675 - DNA, 211 bp, Homo sapiens
  chr2:209118761-209118972
  hyper
acagcccagtttatccggtttaaagtacagtgctgagtgtactcggtgggacaaaggccaattttaggcccgcaggcactttccaaataaaggtcatgggagcacaatttatctctgcgtgtgcgagggcgtgcccccgcttcgccgcccgttagcaggtcttggggtttgcatgtccttgctcttggcctgcacccgtccttatggccgt

SEQ ID NO: 198676 - DNA, 47 bp, Homo sapiens
  chr2:210637062-210637109
  hyper
atatatatgtatatatttcagtgaagtttgacgacaagcagattggc

SEQ ID NO: 198677 - DNA, 208 bp, Homo sapiens
  chr2:210867113-210867321
  hyper
agtactgcgaggacgttaagatccaaacagcacaagaaggaaggtcaaaatcaggtgtacgaggcccgtgtgccccgccccgccccaggcggacggctgacagcgccccaccccaggaggaggcgggacttcctcaccgcagagtggctgcttccggtagaatccggaagcctgtacggagaaggggcggggccaaaactgcgcgccc

SEQ ID NO: 198678 - DNA, 96 bp, Homo sapiens
  chr2:211035494-211035590
  hyper
gggtccaggaaaccacgtgttctgccttctgcgcacgcgccagccaaaacaaaagggaggtctgccaagccccaccccccacgtgaccggcgtcca

SEQ ID NO: 198679 - DNA, 271 bp, Homo sapiens
  chr2:211090073-211090344
  hyper
tcagctgaggcgtccacctgtggtgtcctcccaaaaaagcgctcgcgcgcgcccttccggagccccaaccacgccacaggctggtcgcgagggaatacgcccgtcttggctgtcagcaataggattttacagcgaaactgctgcctttgcttgcagcattctttcttgtttatcgaagcagctctgagcctttttagcgtcctgaagcgctttgagtaacggatgaaagctatggagcccccaaatacgcgcaaatacctaaccataaaaa

SEQ ID NO: 198680 - DNA, 92 bp, Homo sapiens
  chr2:211341442-211341534
  hyper
caccccgcagccccggacagtaacagaagggctattttaccgcccagttcctgccaggagggccaatcagagccttcgccgttcccgagacc

SEQ ID NO: 198681 - DNA, 137 bp, Homo sapiens
  chr2:213401042-213401179
  hyper
ggaggatgaaaaacgaagtcccccggggcatttacagtttccaatggatcaccttagtatgcgtgttgcaattataccagggatgcacccgagagcttttctttgtgcggccctttcatctggatcactttgtgttt

SEQ ID NO: 198682 - DNA, 598 bp, Homo sapiens
  chr2:213402010-213402608
  hyper
ccctggatggtttcggaaatctctctggctctccaaaaggcaccccttggccacgtcaagacaccggtcctcctcagacctctcccgtcccactttcatccccaggaaactctagtgtcagaaactttgagctccattgcactgcaggtgctgtcattagtcctgcaagccgtggcgggccagccccgccgcgctgcctctcggggtcaattagccctttgcctgcccaggtacctggggctcgagctctccagcaagcagtggccgcgcacccatcgccgctgccgctttcgcctcgggtggatccagtgacccgcaggctcggcagcctggccgggcagtaaacagacaagtttgaaggactccggccaatagcaagttgaactacaggaagaactcttcccggagccaaacacggcaaccgacgggaaggccgggcttctggctcaagtgtgccaagcctttttttttttttttaagaggtcaggcaggcgagtaagcgcccctcaagtcaatggggagagggctccgggaagccggcggaagaggcccagaactccgggccccggaccgaggcgcgcccgcctgctgcactccg

SEQ ID NO: 198683 - DNA, 223 bp, Homo sapiens
  chr2:216946187-216946410
  hyper
tctccctggtggtcgtaatttcgcccacacctgccccgtctttgctctgcagctccacactccctcagccccgccgagagctcctggctcccgtctccaggttaccccaggtcaccacagccacctctctgcaccagcggcccgctcacgtacccagctccaggagctccttcacgatggcttttccgatgcccgtggccccgccggtgacgatggccacttg

SEQ ID NO: 198684 - DNA, 41 bp, Homo sapiens
  chr2:217008385-217008426
  hyper
actaacaatgaaccacgtgcgaaagatactataagctgctt

SEQ ID NO: 198685 - DNA, 113 bp, Homo sapiens
  chr2:217236450-217236563
  hyper
ataaaaaatgaaataatactagtggaataattcggttctcaggcaagagtgcttctggagggtgggggcggaggagggcggctgccgggtctgctcggcagctctgcccccgc

SEQ ID NO: 198686 - DNA, 339 bp, Homo sapiens
  chr2:217236604-217236943
  hyper
caccccgccccttcctcctctccaccgcctctggctggctaggctcgctgttgctacctctcctcgcagatgcaacgaggtaaggcttgtttgcggtgccagctgaaggtggggaggggggagcgaagcagtgtggccgaggtgggaggcagccggcacttggctccagcttggtcctcgcgactccccaaaaccgtatataaatatatctcttataaaagccgagaggaagcaaatcagattccaggctgctgccaggtgttgtctcgtcttccgccgttgctcagcacccgccgctgcccccactggctcgattcccaaaggggtggtgctggaagg

SEQ ID NO: 198687 - DNA, 239 bp, Homo sapiens
  chr2:217557011-217557250
  hyper
gcactcagaaggtgggggttgagcaaggggcggcagggaattctacaggggatcttgcttgggactgaagtgtcgtgtgtgtgtgtgtgtgtgtgtgtgtgtgtgtgtgtgtgtgatgcgccctccgtgctcgcctagcaattgcgcgcgcgtgcgctctgcgtgtacacccttcacactagccacatcacactacacgcttggtaaataataagtggagccaggatgcggctgagtga

SEQ ID NO: 198688 - DNA, 52 bp, Homo sapiens
  chr2:217558852-217558904
  hyper
ggggatttggaccttgtgaccgaataagagctcagaatcagtattcggacag

SEQ ID NO: 198689 - DNA, 47 bp, Homo sapiens
  chr2:217559556-217559603
  hyper
aaaggggccaagagggcccccggagatttttttgtttttgtttttgt

SEQ ID NO: 198690 - DNA, 31 bp, Homo sapiens
  chr2:219232859-219232890
  hyper
gctagaaataggaaccgttaccgtcgtacct

SEQ ID NO: 198691 - DNA, 165 bp, Homo sapiens
  chr2:219263453-219263618
  hyper
gaggggtgtttgtcgggcttggcattattaatttttaaatggtgaacttacaaaatagtaacgacgagtgaaaagaacttcataaacgaggaaaaagaccaacccgcagacccacggcgcgcaccacggaggggcttgcagcgagaagacagggacctccgttcc

SEQ ID NO: 198692 - DNA, 764 bp, Homo sapiens
  chr2:219263678-219264442
  hyper
ggtcccccacggtcgggctttgggcccaccgcgtgcggcgccgtgctgggctcctaggatcggcagcgagtccagtgactcccaccgcacccccagtaatcacagggcggccgtcgaccgcgggcaggggagggggtctgggaaggcccctggagaaggtggcatttcctcgaggtcggtggaatttggctacgcgaaaggaacagcgcgtacgaaaacttcaggcgggaacgcgcggtggcccgtgcgcggcgggtagacgtgcggggccccgggtggggccgtggggagaggtcggcagggggctttcccagggcagagagttagaatttcacgtcctacagaccgggggcacctcgccctggggctgcggggggcggcgaccgtcccattcaagagcgtgattctgaggtttgcacagctgtttcgggccagcagagccttcgctggctcttgacgtccttgcgaggtgatctctgcgaccaccagacaggagagaagacccattttacagatgaggtagtgctatctccaagtcctcaacgaggaaaccgagaagcctctagtcccgggtcttcagaaaacgcagaggtggagccgcgccgcactcgggcactccccggcgtgggcgctcccggcgggcgggccttggccgagggcgctcggcggcctggaacggtgagccgggtgccgggcctgccacgcagccgcagagactcagccccgccggcgggcggcaggaagggaggcgacgccccctggag

SEQ ID NO: 198693 - DNA, 360 bp, Homo sapiens
  chr2:219723506-219723866
  hyper
ggcatgatgaatggagctgtccctcttccccacggagcctttgatctccccctcgtggggagggggccaggggcatcaaagacatttttgtggcattagaaaatctgataaacgccatctcacctgcagctggctctcccaccccttctacccgggccaggttgggggaggaactcgaggcagggactcttggacacgcgaggccgggctaaagcgaattctgacccctcgatctcttgaaagtctgcgacctccattctcccgctcgcttacaagtgccagcgcttgcgcgcacgccctggagcggctactcttgccctctcatttcccccacctccccgccctagaacgcgggcttga

SEQ ID NO: 198694 - DNA, 295 bp, Homo sapiens
  chr2:219724171-219724466
  hyper
ccgtcccccattcctcagctcctctttctcccccctcacccctctctactcttcttcccagcccttccttgcccccgactccaggcggccgcgagcggcggggggctccaagtccgagagaggcgaggcgagggggcgaagcgggcgggtcccacagcccgaagcgcgctggggccccgccccggcaccccgctcccgccctccgctgcgctccgcgccagccgccccggggcgcacggctcgctcccgagagtcccgctgcctgactgtcgcaactgccacctccctccggccc

SEQ ID NO: 198695 - DNA, 143 bp, Homo sapiens
  chr2:219735642-219735785
  hyper
gcatgtcacagctcccgctgcgggctgagtggggctggtcctcctcccttccaccccaagcccttttttgggttacacccctgacctgctattctctgctttccagggctgtgggcagccccttggttatggaccctaccagc

SEQ ID NO: 198696 - DNA, 614 bp, Homo sapiens
  chr2:219757351-219757965
  hyper
ctgcctggttgtgggaccctcgctcccggcctcagcgtttgcctctgtataatgggagtgggtttcagaagcaggccaggctaagcgctgggaggggagtggggctgcgcgccgtgtcacccctcacggtgcctccctccgcaggcagtgatggagaacatgcggcggaagtgcaagtgccacggcacgtcaggcagctgccagctcaagacgtgctggcaggtgacgcccgagttccgcaccgtgggggcgctgctgcgcagccgcttccaccgcgccacgctcatccggccgcacaaccgcaacggcggccagctggagccgggcccagcgggggcaccctcgccggctccgggcgctcccgggccgcgccgacgggccagccccgccgacctggtctacttcgaaaagtctcccgacttctgcgagcgcgagccgcgcctggactcggcgggcaccgtgggccgcctgtgcaacaagagcagcgccggctcggatggctgcggcagcatgtgctgcggccgcggccacaacatcctgcgccagacgcgcagcgagcgctgccactgccgcttccactggtgctgtttcgtggtctgcgaagagtgccgcat

SEQ ID NO: 198697 - DNA, 85 bp, Homo sapiens
  chr2:219758014-219758099
  hyper
cctgatcgaggtcccctcctggagcctggccctctgaggcttacggtcttggcaaggcagcatcgccttggctcttgggaagagg

SEQ ID NO: 198698 - DNA, 217 bp, Homo sapiens
  chr2:219761651-219761868
  hyper
atgattcctctctggaccttgtccttgaagttagggttggcgcataggaggtctctccctggagcggctaacccctgctggtgggttgggaggtataggatggtgaggaagccctttgccacttcgcggctgcgcactttggaatgcccccggttactgtggtaaccagggcagccgaggtgtgtcctcggggctgggaggcgcccgcccccccacc

SEQ ID NO: 198699 - DNA, 166 bp, Homo sapiens
  chr2:219827883-219828049
  hyper
tggctccagaacccaaaaatgtcggtccccacttgccctcccgggacgacaggactcgattcccctggcctcagcccagcgcccttgtaacctgcctggagccggaaatccccagtccagatttgtgaattgagttcccggagggagggggagagctggcggaagg

SEQ ID NO: 198700 - DNA, 68 bp, Homo sapiens
  chr2:219828117-219828185
  hyper
tttgggaggagggagggaggatcactagggtcactccgcggctgtcggctgtcgccatagtaaccaga

SEQ ID NO: 198701 - DNA, 754 bp, Homo sapiens
  chr2:219845643-219846397
  hyper
atccaggcctctcgctgcctgcgggcggcgcccaagcccgcgccaccctccttctcgggacgttttccttggcagttctctgctcaggcccgagatgagcctctccctgctttcccctaaccacgggttctggcgcagcaaagaacagagagagaggaggcagcggagagctcaggagctttaatggggctgaaagggtcagaaacacaccgggagtttctcctgggagtgtggggacaggaggaagggggccgtgtgtcacggaggacggtggctttcaccaaacctgctcaggtcccaggaaggaggaccgtgagaggcctccacgtgctgaggtgggagcagttccttggggaagagcaaaagtgggaaaagatttggcactcgttaaagagtagtgatattgaatggggcttctaggagccaggcggaaatgcactggagtggtggggagacaagagaggtccacaaatcccctccgggacctggagacctagaagaaaaaaagtgaaagagggcgcacatcgccctcctcaggggactgcggggtgggacaggagcaaatctagtaccagacaaggattgagggagcttcggtcccgtccccctgctaagtgcggcaggtggagtaaactctggattagaggacggttgacggaggctcccgggccctccccgggatgccgatgggatcgggcgagactctaggcgtgcgggcgaggccgcaggcacccgaccgccccgtctagtggta

SEQ ID NO: 198702 - DNA, 187 bp, Homo sapiens
  chr2:219847616-219847803
  hyper
cgaacagtggccccctatacgtgacaggaggggcaagctctcatgggctcactatcctagccaccttcgggtgcgcaggcctctgcgctggccctgagaatttggcctcttattttcggaacaggcgggattccctgcctacgaaggtgccatagttctcggggcctgatgaacaactctgaggagg

SEQ ID NO: 198703 - DNA, 61 bp, Homo sapiens
  chr2:219857662-219857723
  hyper
ctgaggctctgagcctaggccggtggaacccagcgcccctcaacccagcccagccgcggcc

SEQ ID NO: 198704 - DNA, 247 bp, Homo sapiens
  chr2:219858468-219858715
  hyper
ctggcctcccctgggcctcgggctaagaccgcgctgctgactcgctgagcggaagttcttcccagagtctaatcgccagccttcctcggccctagtccaggcctctcttttgggcgatgctaaggcggaggtagagagggctctgcccaaaggattcgcttcatgtgctcagtcctctttttcctgggggatcggtccatcgcggcccttttcctcccaagcgtgcgttcccagatcctgcgccgcg

SEQ ID NO: 198705 - DNA, 175 bp, Homo sapiens
  chr2:219858751-219858926
  hyper
gcggtggtcaggactcgccacgcggcggcgccgggcgctggaaacgaccgcccgagggccgcgcggtttactcagtgtttaggcataatagccacctagggagtggctcgccgcgggaggtaggaagaatgttgggctttagctcggctcaaccggtgccgctgcgggtctccca

SEQ ID NO: 198706 - DNA, 642 bp, Homo sapiens
  chr2:219866613-219867255
  hyper
agccaccctccgcccggctttcctggcccctccgcccggcccagcctagcttggcttcgtccccagcccacgccttggagcttgtcccggagcccgggctccgtgtgctcttatactgcctgttcagtccccgcccccagacacacacactcacacctgtccaggcgcccgtttgctcggggcaaatattgactcatggaggcggagcgctcccccctcccccgcccgggctctgagaccggagcttctccgaggccttggtggcgggggcggaggggagggtgctggggaccctgggcgcctctggaacaacaccagatgtcacttttccacccacctgcctctgggagggaggagccgagaagcagaggacagaagctcccgggcgggggttaggaggaaccgagaggtgggtatccatcctcgtctgaggactgattcacagtgggagtcgcttagcagggtctgtggcccgaaatccagtggtgacctcgacccgccccagcctagttcctggccctccgcggcgtgcctcagttcttcctccccagcctcttgggcactcggagctcggcaaatgctaaggggctggccctgggggtgctaagcctccgagcaggcgcggcgcggaaaggtgagggg

SEQ ID NO: 198707 - DNA, 198 bp, Homo sapiens
  chr2:219906102-219906300
  hyper
ggccacgatttcccgaaggatagggtctcccgggacagataccttccctggccactcgcgccgctccctgagaccctgggaccttgggactaacgctcagaacttacatcgcctccatattgccgtctccatagatacaggacgcgcaggaaacggcgtcttcagatatcccagggcaacgacggcagcccgagtaag

SEQ ID NO: 198708 - DNA, 256 bp, Homo sapiens
  chr2:219923737-219923993
  hyper
ttccccgcctctctccctcactgccaccgccccctctcgggtccagagcccgggcgtgcgctgtcaatgattgcccagcccgtggcccggatccttatctgcattcctcggcgcccggcccggcccggccaccagccaaccttcggccccgacactggccggccagccccggcgccagggtgcatgctgagggccctgagtctagctgctcttcccaacggatctagaaagccaggggcctgctttcagggggaag

SEQ ID NO: 198709 - DNA, 255 bp, Homo sapiens
  chr2:219924893-219925148
  hyper
gcgcctgtgttctcctcgtccttgaagatgatgtctggattgtaattgggggtgagctccttgaagcgctcggagctgcgagcgatcttgccttcatagcgtccgctggcgcccagggtcttctcgggcacattggggctgaactgcttgtaggcgagcggcacgagtttgcgtggcggtcgccggcggctgcccaccacccgacccggcccgcagccccatgccgccggcaccaccagcagcagcaacaggacc

SEQ ID NO: 198710 - DNA, 215 bp, Homo sapiens
  chr2:219925613-219925828
  hyper
tgccgtctgcggcgcagcccggggccgagtgagaggggaaatggaagagatccgggctcgggccccgcgcagaccgcaccctacccatgtccctgcctcctgtgcgctcgacagcgaacctgcagcaagggcagcacagcctcctccccctcgggcgggcggccccggcactagccagccctcgtcccgctcgcgcctccgccgcgcgtccgccc

SEQ ID NO: 198711 - DNA, 223 bp, Homo sapiens
  chr2:220094309-220094532
  hyper
cggctcggctcggcgcgacccgcggcgctaggccgggtgtctgccactcactgtcacccgcagccaggctggccaataagcacggggggcggagacacaacggccaattctcggcttcagggacgggactaaagtctcgaggcgggtcttggacagtcagcggcccaatagtgtgctctacgtggggcggggctcaggtgcggacgccgccggttgtcctctt

SEQ ID NO: 198712 - DNA, 34 bp, Homo sapiens
  chr2:220118641-220118675
  hyper
ctagctgcagtgccgcaccgcccttataggcggg

SEQ ID NO: 198713 - DNA, 134 bp, Homo sapiens
  chr2:220173086-220173220
  hyper
ctggccttggaggcggttaccagagaggaaggggtcacagagcgaggactctccactagacctgagccctctgttgtattctgccaacccacagcgtcacaggaagtactctgcctctcgggcctccaagcccg

SEQ ID NO: 198714 - DNA, 239 bp, Homo sapiens
  chr2:220348745-220348984
  hyper
tacccctaagtctgcagaaccttctgccaccacacctagtgatgctccgcagccccccgcaccccagcctgcccaagacaaggctccagagcccaggccagaaccagtccgagcctccaagcctgcaccacccccccaggccctgcaaaccctagcgctgcccctcacaccctatgctcagatcattcagtccctccagctgtcaggccacgcccagggcccctcgcagggccctgccg

SEQ ID NO: 198715 - DNA, 182 bp, Homo sapiens
  chr2:220361644-220361826
  hyper
ggacccattcatccgctggagtaaggacggcaaggagctacgtgacggtcccaagtaccgctacgtcttcgaggaccctgacgtggtggcactggtggtgcgcgacggcgagctggcagacctgggccagtacagcatcaacgtcaccaaccccttcggccagtgctccgactcggcgcgca

SEQ ID NO: 198716 - DNA, 261 bp, Homo sapiens
  chr2:220377745-220378006
  hyper
gggccaggcctgacgcagggggcggggtggccgttgggcagcgggtggacctcgggctctaatccccagcagctgccgtttccctcagatcgattcctttctcactttttttctcagctgctggttctgcggcttggatcgatggagccacctccccccgcccgtccacgcttcctctccctgctgctcattagcgccccgattaatcagcccccctttcctcccggggacaagggcttcctcccccgtgagggcacatgc

SEQ ID NO: 198717 - DNA, 111 bp, Homo sapiens
  chr2:220378982-220379093
  hyper
gcctggctcctgacgcccgtgctgccggtgaaacgctgttgacatgtcctgaattattaagcgtggggagggctccggagcacatgctgagcggagcggctggggctgcgc

SEQ ID NO: 198718 - DNA, 199 bp, Homo sapiens
  chr2:220407985-220408184
  hyper
tggtagggcaagacgcgcggctcccaattctccccggcgccttcgccggccccgggcttctcgcgctccgctccgggctgcaccgagttgggccggcgcgccgcgttggtgttgccgcgcggcggcagctcagagtctccaggttggggcgggcctgggccgcacggctcctccacccaggtgacgctgagcaggctca

SEQ ID NO: 198719 - DNA, 56 bp, Homo sapiens
  chr2:220408723-220408779
  hyper
tgcctggatggtgcgccctgagtgacgtcaggagcagaggccggagctgtccatca

SEQ ID NO: 198720 - DNA, 56 bp, Homo sapiens
  chr2:220417712-220417768
  hyper
ggagccgcgggctaggcgtaagcgcgttcccgtcctaggggcgggagttgcagagg

SEQ ID NO: 198721 - DNA, 80 bp, Homo sapiens
  chr2:220435309-220435389
  hyper
gtgcgcgttgcgggcgtggcacacgtagacgccggaatccggcagccgagccgccaggatgcgcagtgccaggctcgcgc

SEQ ID NO: 198722 - DNA, 110 bp, Homo sapiens
  chr2:220436254-220436364
  hyper
tgctcttaggagcctctcttcccagccccctcccacagcttgggcctcttccccctcctccctcccacctccagccgccaggtccccagccgcccgccaggcttgggcct

SEQ ID NO: 198723 - DNA, 209 bp, Homo sapiens
  chr2:220492470-220492679
  hyper
ccgcggggcggggcacgccgggcagggcgggggacccgggctgtcccgggcgtggctgggcctcggaggggcgcttgggccgggagcgtgcatccggctcccgggtggggggcgccagcgcaaggaacctgaccccgccctcctcccccagggctccccgctaggccccctcagtggcccctccttctcacctgggtctcgggtcccct

SEQ ID NO: 198724 - DNA, 138 bp, Homo sapiens
  chr2:222435635-222435773
  hyper
cggatggacggacggatagatagatggatgccggaaaggagaagaatgagagacggatgtgagactagatgcacgcaggccagagcaccagcatacgctggaacagagcacgagcatacactcgaacacacgcgcaca

SEQ ID NO: 198725 - DNA, 406 bp, Homo sapiens
  chr2:222436961-222437367
  hyper
cagccatggttcgccggtgccaacgctgctcctgccgcttctatcccagtggaataaatgcttaagttaggagagcagcgggctgaagacattgccaagggggcgggcccggccggtgacgtgagcccgccagtccggggcccgcggccaatggcggcgcagacagggcggccgagccccgccttcaccgagcagggcccgccccagggttccgccccctccgggctccacggggcgcgcggtctcccggggctctagggggcgagcacggccggtccccgcccccgcctgccggagggagccagcgggatcccccacgttacctcgaaggtcgagcccctggacggcggagggactttggaaaagctcggaattgaccgaggggagccagagaagaggttggaaa

SEQ ID NO: 198726 - DNA, 827 bp, Homo sapiens
  chr2:222437421-222438248
  hyper
ataaaagaagtctaagctgacctgcggttgcttctttaggagagtcgacgtgtctgcgtccagcgcgcccgggctgagctgcagactcgcgcctgccaccgccaccctctgccaccttgccctgttttgtctttatggcgcttccccctctgaaatactctttgcggggagttttgtggctctatcactcgcttcttccctggctccccagatgcctggagagcggggacctacttggtccccaacgtccagtccgcagcagggctccgtcactgtctccagagactgaacgaatgactttctagcagtaaggaagtccccgctggccccgtccccctgcacacgccgtggacctcgcccagggcccaggacgccccgagatggccttgggcagggaaccagttgtggatttcccgggggcagggttgggggcagtccctggaaccgggcctagcccgtctgggagcggtggggtagaagtgaaaggcttaagtgtgggtgcggggacttgcagccgcacagacaaggcagaccgggactgggaagctgcccggagcggctgctgcgactctccgctccgacctagccggggcagccctccctgccccgggagaagacggcgagcaggaggacccgcagagccccgcccggctgctccggccccgggggcactggcaccatcgggctgtggtcttttcccgatgcccgagccgtggacgcggccacctaagagcggtccggcgaaggcagcgcagccggtgtcccagggaccggtccccaacgccactcggtgcatttccccaggcgctggcaggggcactgattcc

SEQ ID NO: 198727 - DNA, 357 bp, Homo sapiens
  chr2:222438500-222438857
  hyper
gaggtggtgcgtgcgtttgggcgagcttttcagccaccgccaagtctcgtgcactagggctactcctaccgtggggctgcggacagcgctcaagaggtcctggagtctgtcgtgactctcgcctgctggatttcaaaagatggaatcggaaagcgtttcaaggagaaactcctaacaaaccttccgggggttgcctgagtggctgctctcggaaaagcggatcctaaataaagcgggagggttatagggcgacgtcgaggagaggacaggtctcgagtcactgctacagtttcaggtcactgggctccgcagcagatcgtgttttctcccgtggctcgagagctgcgctggtttctc

SEQ ID NO: 198728 - DNA, 33 bp, Homo sapiens
  chr2:222438887-222438920
  hyper
agcaacttttacttttacacaagatgagcacgc

SEQ ID NO: 198729 - DNA, 304 bp, Homo sapiens
  chr2:223166850-223167154
  hyper
tttcagagacactacaggtgaaaataacagcgggctggctgtccaggcctgagtggagcgtgcccttgttagcttgaaagttctccctcgcagcccgtttggatgcgtgcgtctacagcccagtcgcactttggtgaccggcctgggctgtgaagcaccctttagcgaacagcctccgcacttggggacactggcacaagggtttcatggcccgtggacttctcagggcctctgagggttgacttcatactcagccagacacaggtcttaagaggaaattatgatctatgcaaaataatgtccc

SEQ ID NO: 198730 - DNA, 48 bp, Homo sapiens
  chr2:223168157-223168205
  hyper
ggaccgtcttgtattgggagcgggcagcctaggccttggaaagaccag

SEQ ID NO: 198731 - DNA, 60 bp, Homo sapiens
  chr2:223170211-223170271
  hyper
tacgacccacacagggacacaaacaaccacacatgtacacacacacacacacacacacac

SEQ ID NO: 198732 - DNA, 284 bp, Homo sapiens
  chr2:223171556-223171840
  hyper
cagtcttgtccgctgaaggcaggttaccctgggctttcaagggaaaacgccttggggcggggtgtcctgtgcgaccacctctctcagcaaagcagggtttgacctcttggcctgaccttgctccctagtcccaccctatactagtaggtcctaacctttctgcgctttgagcctggaccatcgtcccttcaagagattctactggataaaaaaaaattataaaagctggatcaagcttggcgtcggaggtctggccctcagctggttcccaccctaaaggactg

SEQ ID NO: 198733 - DNA, 146 bp, Homo sapiens
  chr2:223177678-223177824
  hyper
gcacctattttgtgggggatggggaagcccacagaaaagccccctgatgggggaaggagcaaccgccaccccgcccatgtgagaaaagagcccagcagccaaatgccggtgcaagtatttacttaaccttcctgagaacgcaaagg

SEQ ID NO: 198734 - DNA, 79 bp, Homo sapiens
  chr2:223536121-223536200
  hyper
gcggcaggagcccgcgctgcccggctcgggctggctgccagttgacccctctccccgtccctcgtgtcccacgcggcgc

SEQ ID NO: 198735 - DNA, 77 bp, Homo sapiens
  chr2:223536673-223536750
  hyper
gcatagaaccttccaaccctcgttcccctgtcggccagagcaggcaggtcaaagagggcatttggagctaacgtgga

SEQ ID NO: 198736 - DNA, 136 bp, Homo sapiens
  chr2:223725610-223725746
  hyper
gccgccagcgccgcgctccccggcccgaattcgataggcccagccccgcacgcgccaccgctcgcgggccaatgggtggcagcctctctgcataggcaacgagtgccggccgggggtgagcgtcccaggcggttcc

SEQ ID NO: 198737 - DNA, 171 bp, Homo sapiens
  chr2:224702620-224702791
  hyper
gtcaggcgagagcgcgtggcccgctaggaactccctgcgcggggaactccctgcgcggagaacaccggggacttttcgcgattctgccgcgcgagtgtgtcctgtattccttccgcaaacgtttatcaaacctggcaaagatacttccgatacactcgcagaaagtgccgg

SEQ ID NO: 198738 - DNA, 341 bp, Homo sapiens
  chr2:224808957-224809298
  hyper
ccccgggcaccagggtccgcagtgaccagccgccggtcctccacgcttccagaggagacgatttggaactgacccgggagggccaagaaacaccttccgagtaccaggctaaaccccgccagggagagagaccgggacgaaggtcccaggctagtgcgacaccgcaggtcggggttccctggttggaggagcgcggtgggctgggaggggcgcgttggtgcgcactggaacaggggtccccggcttgagcagcgcggtgagacagagttcccgcgctggaggggcgcggtgagacagaggtcctgggctggagaggtgcgttggggcgcactggaaccggg

SEQ ID NO: 198739 - DNA, 207 bp, Homo sapiens
  chr2:224904434-224904641
  hyper
ggggaaacggtgccaggacgcggccgggaaggggcagataacccctcgaggcgttttgcagggtgtcctagagctgacttctccctgcctaggggacagaggaacggcggcaagtcgccttaggcaaatacagacgaggggaaccagaaaactggattcccggctatggtgatagcatgaggtacccgcagcgtcctgggaacccag

SEQ ID NO: 198740 - DNA, 236 bp, Homo sapiens
  chr2:225906168-225906404
  hyper
gttggtatggataggatcctagcatcagatgctggctgctgccccagggacttcccgcggaaatcacccagcacttagaagccgtttcaataaggaagtaaccagtaaagcattgctggtgggagaaccccgcgaaacatcttagaaaaatatcagaaaccgctggagacctaatgacccacgtctcctccagcctgtgttcctcagccctttctggaggagtattaagtggtttg

SEQ ID NO: 198741 - DNA, 163 bp, Homo sapiens
  chr2:229045944-229046107
  hyper
tccaagctgtgtccgcggaaagtccggctcctggctccacctagggcagagcagacctccgtccctgggccttagaggcgggcacggggctgacccccaacccgtgccactccagcgcacaggccccactcagcatcgcgccctgtggggcagttgacagggt

SEQ ID NO: 198742 - DNA, 357 bp, Homo sapiens
  chr2:230932490-230932847
  hyper
agccccgaaatggccgtccccggtctctcaccccatttcagcctctcttgaggagcctcaatcggaagcgctaagggggcccagcctctgcgcgccctgggtgcgggatcgtgcccgcggggtccggcctcgcgccccacccttcgagcgcccgcccccacccgcgctcggtgctcccgctcccttggcaccccgagaccacatccccacttcgggcaccccgcatccctcggcgcgttcggaagccagcagcccaccggggaagctgggccggctgcagcaccacagcctgtgcagagaggcatccgcaccccgcgaagtccctaggcgcagccccgggtcccccgctctgcgcct

SEQ ID NO: 198743 - DNA, 37 bp, Homo sapiens
  chr2:231191894-231191931
  hyper
ggtcagggcagccacactgcacgcaggctgggccgac

SEQ ID NO: 198744 - DNA, 237 bp, Homo sapiens
  chr2:231692871-231693108
  hyper
gtgaggaccacaccgggaggcgccgtggggggcgggagacctcagccgcggggcggagaagggccaggcgcgcgctcctggaggtacggggcgcgcagccccgaggtgtgcccgggccgaggtgggcgtctcccgggcgcgcccgggcgtatggcggcgtcgctgggatgccagatcccagggagctcaccgaggccacgccgatggccacccgggtggagcctgggctgtgggctt

SEQ ID NO: 198745 - DNA, 458 bp, Homo sapiens
  chr2:231902081-231902539
  hyper
cctcttcctcccacccgggcccgcgatgcgggctgcgcccaggggcgcgtgcacacagaggccccgcccgggggcccgggggtccggctgggctcggccctcgggggcgtgtcctctgtgccggggcgccaccgccccgagaggcgggcagcgggtgcgcccgggccgcggcggccgcagagggcgggcggcggccagcatggagcgcgagctggaggcgctggcggcccggcttgcgcgccctgccgagccgcccttccaggcgttggtggaagcggcggggggccgcgggcaggtgctgctggtgggcgagctgtgggagcgcgaacagagccgcgcgctgctgcgggacttcgcacgggcggtgttcccgccggagccaggcgcggccaagccgggcggcgcggcggcagagggcgcggggcccggggcggcgcgcggggcgcagagggcggcga

SEQ ID NO: 198746 - DNA, 163 bp, Homo sapiens
  chr2:231902830-231902993
  hyper
actgccccggcctcccggcctcctgcctggccgtccaggcggccgcctgcagggccctgcaagccgccggagccgggcaaccaggtgagactgcgcggggcccggctgggcgcgggcgggcggtggctcgggcacgtcccccaagttggacccctttggccat

SEQ ID NO: 198747 - DNA, 136 bp, Homo sapiens
  chr2:232260806-232260942
  hyper
ccctggcggctgggaccccaggtcttgccggcagctgggtcccctctcccttccagacccctgagggccccctgcgtccgggccactctcctcctctcggggcttccttccgcgggacctcggaccgccgcccgcc

SEQ ID NO: 198748 - DNA, 38 bp, Homo sapiens; identical to SEQ ID NO: 38715
  chr2:232260984-232261022
  hyper

SEQ ID NO: 198749 - DNA, 121 bp, Homo sapiens
  chr2:232478346-232478467
  hyper
tatagaaaaaacccgtcgtgctgcctccccggctccagccaggtttacagcaccaggatctgggccggcagcgtccttcaccggagggaaattctaaccctggggcgggacctgggcacgt

SEQ ID NO: 198750 - DNA, 164 bp, Homo sapiens
  chr2:232479526-232479690
  hyper
cccgcgcgcgcgcgcgcacgcacgtggcccggcgcgcccgggagacctccgtgtgatcaccgcgcgcagcagctcccgggcggaaacacctcccccctccacgggaaagtgggctcaaccgggggcggaaagcgacacggctgggggacgactacgtgctccct

SEQ ID NO: 198751 - DNA, 207 bp, Homo sapiens
  chr2:232646098-232646305
  hyper
agggggactgttaacgtcaatgggaagggccctccccgggaagtcccataggacacaatattcatctggtgttgttgcctagagtttgtcccagcggagggttggcttcggatctgcagaggctttagggacctgctccagccactgagcacactagccgtctgagacggcagctgagttgcactgtgcgacgcgacagagactaca

SEQ ID NO: 198752 - DNA, 49 bp, Homo sapiens
  chr2:232791481-232791530
  hyper
cacttgcccaaagtcatacaggcataaagttggcgctgcccgaaatcca

SEQ ID NO: 198753 - DNA, 168 bp, Homo sapiens
  chr2:233283897-233284065
  hyper
cccaggtcccagcccccgcagtcctccatgacctctagcatgggccgaggactcagtagctctatctcgcgcatgtcgaggcacgaacggaaaaaggcgctcaccttgcactgggccgcgccgccgggcccatccctgggccgtgccagcaggcgcctcaggcgctcc

SEQ ID NO: 198754 - DNA, 220 bp, Homo sapiens
  chr2:233284832-233285052
  hyper
cacgtgtcggatgctggattgggaggcctcttatgggaagggggaggcgctgggcacggggcctggcacgtagggggccttcattgcatctctcttcccttcgcctttcttgtccacgacctgtcctagccaaggccaagtggggtgggggaaggagcagaggctggagtgaggaggtgcggtcaggggcgcgtctatgcggcactttcagctctccgag

SEQ ID NO: 198755 - DNA, 124 bp, Homo sapiens
  chr2:233285131-233285255
  hyper
caaacccgctcgctggctccttctgctcggtggcccgacggcccacccgccccttcccaaggggaacgcactattgctccagggtcgcggatacacaacccaccccctgcacggcagtgatggg

SEQ ID NO: 198756 - DNA, 70 bp, Homo sapiens
  chr2:233367714-233367784
  hyper
gagtcagcccagttgggtcaaactaaggacccagtgcagaccccgaggcccagagacacaggtgtgcgca

SEQ ID NO: 198757 - DNA, 84 bp, Homo sapiens
  chr2:233414992-233415076
  hyper
catagtacagtggcgccgcgaccgacaaaggaaagcctccgggaggtcaaaagagataccagagagtgcgtcccgcactggagg

SEQ ID NO: 198758 - DNA, 209 bp, Homo sapiens
  chr2:233497971-233498180
  hyper
gggttacttctgggggacaagaaaggcaccgtctgaacggtcgagacgctttttcccgctacggttttccccggagctgacaggggcagcaaggtcggagttgatccgagggtccctgcctggtcccggggggacggtcagcctcccgcccggagccgcggggagaggaagcaggtcggggtctccgggacgcgcagacacccagacac

SEQ ID NO: 198759 - DNA, 33 bp, Homo sapiens
  chr2:233499312-233499345
  hyper
aacttggccgctggcaccggtccggcgggggct

SEQ ID NO: 198760 - DNA, 234 bp, Homo sapiens
  chr2:233740542-233740776
  hyper
gacccctcacacagcgctaccggcaacttgcttaacctagaggtggggggtgacgtccctgtcggccccgtcacctggggccccagcacctctccttggctttgcagacgatgttccacaggagcccgtgcccacgctgtggaacgagccggccgagctgccgtcgggagaaggccccgtggagagcaccagccccggccgggagcccgtggacaccggtcccccagcccccac

SEQ ID NO: 198761 - DNA, 189 bp, Homo sapiens
  chr2:233741586-233741775
  hyper
ctgcctcccatcccgctccgctggggttcagagcgttccgtgaggaggtaagcgctagggcaggagaggccgacagagaccccggggcccgccgctccttgaggccggggttggggagggcaggggccgtcggctctcccagccagaggccgcgtggttttgggggacgtcttgactctgagtcctgca

SEQ ID NO: 198762 - DNA, 329 bp, Homo sapiens
  chr2:234474850-234475179
  hyper
atcaagcctaaaggccttccagtatgtatccactaatcccatcgttagccctgggggcctaggtgacttccccaaggtttcacatcgagtgtggcggagggtcacttggagatgagaaacgtaaagcgcctagcataggtaccaaatgacaggaagcgctgaaatgcaattatttttcttttcctcagaagaaaactaaaaaaacacaactcgagagtctagcctcgagctcgttgtctgcattcctgaattcccaactcctacggccggccgaggccctccaagccaccacaggcccaggggcgcaaaaaggcagaggtccccgtggc

SEQ ID NO: 198763 - DNA, 104 bp, Homo sapiens
  chr2:234475503-234475607
  hyper
aatgtaactcttctgctccaagagtttgggaactggagcgggagcgggagcgggcaaggtgagctcgcttacaagtccgctggtgagttcgcgggtccactcgg

SEQ ID NO: 198764 - DNA, 592 bp, Homo sapiens
  chr2:235860154-235860746
  hyper
cactgtcctcagccaaggtgtagtaaagcgtctccgaacgcggcgcgaccctcgcccacgcccgctcgcggggggaccgcaccgccccaggggtcctcgctaggggttcccggagaaggggtgggagatgggggtgcgggggggcacaggagcgcgggccagcacccagacctgctcggtaccggggacccagacccgaggatgccgggcggccaaggccccgctaccctggccggctccgggcggaggaagaagaggaggcgcccagactggatacccgcctggacccggagccgcggcaccacccccagcccgccccacgctcgccagcctcagacggccgcgccccgccccgcccctctcccgaagccccgccccggcgcgggaccaccccctccgcggcctcagctccggtcctggccccgccccccgcgcccccgcccccgcccccgcccccgcccccgcccaggcgcgggaccaccctccgcccgccgaggcgggggcccagcgcgcccggcactctcggcggtccgggcccctcgccactaccgccgccgccgccgccgtgagtcccgcggagccgcgcgcgccc

SEQ ID NO: 198765 - DNA, 84 bp, Homo sapiens
  chr2:235860808-235860892
  hyper
agccaggtaggcaggcggcggcggggagcgcctcgggcggcagggccctgggggccggcgggggcgcggggtcgtgctcggggg

SEQ ID NO: 198766 - DNA, 438 bp, Homo sapiens
  chr2:235860951-235861389
  hyper
tgagttcggggctgcgcgggtgcctgggcgtggggcggcttcggggaagcctcgcgcgcccctcgccgctcccccgggcgctcgggtctccctggtgctggtgggcagggacccggcccggggttccgggcgccgagccgcagccctccgcgtgcgctcgggccgccccccaaccccggctctggccacttcccggcgggcggccctgcggggtggcctccctgggcaaccggacgcgtcctcgggcgcaaatcggggggcgcgctcggctcacgggggccgtgggggccacgggagggcgtggaggggtcggggcgcccccctcgagcggcgctggggaggagggaaggacgcgcggtctccggttaaacttgttggtgacaatgcatatttcaacttcttcggagatccctcctgtgaggatgaaattgaaaactc

SEQ ID NO: 198767 - DNA, 297 bp, Homo sapiens
  chr2:236402404-236402701
  hyper
aggcgcggggcctggccggcgggagggtcccgcaccccggcccagtgtgaacaccccgcgcacccccctggcccggcccgccgggggcgcggactacaagtcccaggaagcccagaggcaggcgcggggcggggcctggcgcaattccccgggatccggcgcgctgggaagcgccgaggaggacgcagcgccggcggccggagggcggcaagcgcgcgggcaggcggggcgcgggcgcgggcgcgggcgagggcgaaggcgggggcggggccgacgtgggccggagccctgcgtgcc

SEQ ID NO: 198768 - DNA, 138 bp, Homo sapiens
  chr2:236403013-236403151
  hyper
cccgagcaagcctccttcggggccggccgcacccgccgcggcgcgctccatgggggcgcgctccccccgggcggcccgctgacccgggacgccggggcccgctcgctcgccggccgcgcgtcccggccatgaactgag

SEQ ID NO: 198769 - DNA, 118 bp, Homo sapiens
  chr2:236403736-236403854
  hyper
ctctcctgcgggaaagtggctcggtgcctccgcgtcctgggctgccggagcgtcccggcccagcagacgcctgggggcagccggcggggtcggcgccacccgacccctgacaggttac

SEQ ID NO: 198770 - DNA, 216 bp, Homo sapiens
  chr2:236403941-236404157
  hyper
gggcggtgcagggctgccctccttagtgtgtttgcttaattcaggggtgcagttgaacttagtggatgccgagagccagccctagccgcgggagcatcgtgtccaggtgcccctgtgcaaacgctggaaccggtagtgtgctttgtaccaaccaaaagtccggggttggattagaggaagaaccctaccaggagggcagggcgtcctccagcggaa

SEQ ID NO: 198771 - DNA, 307 bp, Homo sapiens
  chr2:236578055-236578362
  hyper
caggctggtgctgggctgggcccctcggaggctccggtccgcgctgcgtcgatccatcccggcgcttgggcctgcacgccgccgcgctcgccgccgccgccgccgccgcgctcccgggactcggccagcccggctgggcgcgcggcccgcggtcccttgcacgtcggcccccgtcgcccgccccgccccggcgcgcgtttccattttaaaccgccgcccgccgcccgccacccgccacccttcggccgcagccggtgcagctgtccgcgcgtcccggagcccagggagtggcggaggctgcggaacc

SEQ ID NO: 198772 - DNA, 31 bp, Homo sapiens
  chr2:236578677-236578708
  hyper
cttggcccggcgccctcccggcccgcgggct

SEQ ID NO: 198773 - DNA, 371 bp, Homo sapiens
  chr2:237076187-237076558
  hyper
cctccgccttgtcgaagttaccgccgccgggcagcggctgcggcgcgaacttgcgggccgctgccgcctcctggtgctggggcgacgcggagaagccgccggggagcgtggccatgagcgtagaggtgagcgccatgccctgcgccaggctggagcagaagcctgtgggcaggctggggatctggtggtgagggtgtgcgggcggcagcgctggctgcagcgcggcctggggcagcgcgggcggcggcggcggcggcggcggcagcactaccggccggtagggcatgaacatggggtagccggtgtagacgaaatggccggggctgggctgcggcgggctgccgatcagcgagtctatgctgaaggcggtg

SEQ ID NO: 198774 - DNA, 161 bp, Homo sapiens
  chr2:237076815-237076976
  hyper
gccccggagtggagagggcgcccgggccccgagggctcgccggagcccccgtccgccgcttgcccgtcggagcccgcgcgcttcgcgggtttggccctcggccccggtaagctgccgtccgtccgtccgtcccgccgtccgtcgcctcccgcgggccgctg

SEQ ID NO: 198775 - DNA, 119 bp, Homo sapiens
  chr2:237080431-237080550
  hyper
gcagctcttgctcctggcaatagttgggaaataacttgggatgggttttatttatggaagggcaattgggattcacacccagctaaccctgaacagtccctcccgagcccaggacgcac

SEQ ID NO: 198776 - DNA, 341 bp, Homo sapiens
  chr2:237087081-237087422
  hyper
ttttttttttttttttttttttgaaaggagcaaacatccccagctttaatgcggcccaattatctcgtttgcacgacttaaaatgtttctctttaactcatttcaatctagtaaatatgcttcagcaagtagctaatttctcagggatggcttcgcctcgccatttgcatataaagcgcgtcggggcccggccccttctccgagtgcgcgagtcccttcttccggtgcgcgggtggcaggcagccaggcctcctagtccagggaggtcgcctaggtttggcctagggaaggcggagtctggggtccgcgacagtgcctggggaccagggtggcagggaggg

SEQ ID NO: 198777 - DNA, 162 bp, Homo sapiens
  chr2:237088239-237088401
  hyper
gaacccctcttgctgccagcgggtctggggagggtggggctgggctccgcaggctgtcggaaccccctcccacgccgcgcagccgcggggcgctcgtgtccctgaagcctgagctgggcgtggaggacaggccccgcgtgttcgcggatcgcgagtgggggc

SEQ ID NO: 198778 - DNA, 97 bp, Homo sapiens
  chr2:237436060-237436157
  hyper
ccttcccaatatgggcgccttttttctagagaagaaaattttagttccgtttcttcttccagagctgagacctttcactaaacgacacattactgcc

SEQ ID NO: 198779 - DNA, 151 bp, Homo sapiens
  chr2:238384223-238384374
  hyper
tctgtcgccccctcccggagcggaggagtcacggcgggaaacagcccgaagccggcggggccccgagggggtccgcgctgcctgcccggggaccccttttcttggcagagaggatactgacatcggtctggaggccgtacgtcagtcccgg

SEQ ID NO: 198780 - DNA, 37 bp, Homo sapiens
  chr2:238395041-238395078
  hyper
ccctaatgtccattggaattcggaaggacaggcaggc

SEQ ID NO: 198781 - DNA, 274 bp, Homo sapiens
  chr2:238395455-238395729
  hyper
gtcggtggctttggtagggcgcgtttctgagcctcagtttccccatttgtaaagccgaagtacatagcgctttccctgcagagttagaaatttcgacgatgtgccgcgcgctctagagcgcgctcagcaagcgggtcccaccgtgcccaaggcaggaccgcggcgcgatgtcacctatgcaaagtcgccgcaactcacgggaatcgcagctgtgtgctcaactttcccctccccgccgccgtctttctccccaaactggcttgggggtcgagta

SEQ ID NO: 198782 - DNA, 128 bp, Homo sapiens
  chr2:238395961-238396089
  hyper
cattatccagccttgccccggcgccctgacctgacgccctggcctgacgccctgcttcgtcgcctcctttctctcccaggtgctggaccagggactgagcgtcccccggagagggtccggtgagtgca

SEQ ID NO: 198783 - DNA, 31 bp, Homo sapiens
  chr2:238536853-238536884
  hyper
ttgtcatccatccatcgatgtcactcaaggt

SEQ ID NO: 198784 - DNA, 210 bp, Homo sapiens
  chr2:238876150-238876360
  hyper
gctgcctgccttgtacggaggaagcggggcgtccagcgcctggccaaggtcaccggcccgacgtggccgcagaaaccgggactggactcccgatcggggcaggagtcgcgctaggccgtgaggagcgggggaggtgaggggagtgacaactcgcgcccggtcctcgtacctgcagcgggaagagtaagtatggacgcttacctacaactg

SEQ ID NO: 198785 - DNA, 738 bp, Homo sapiens
  chr2:239148240-239148978
  hyper
gcgcgctcccggacccgcccgcccgccccgcagccccacggcgcctgcccggccgccgcacctcggcgcccgccagcagcagccgcagctcctgcaggctctcgttgatccgcgcgcgccgcttcttctccaccaggggcttccgggcctgcggggagcggggcactgaatcccagccccgcacggcctcccgcccgcttgctcgcccatggccccggcccgcaccttgcggtcccctcgcgtctcccagccgtcctcatcctcacggcccacacggtcccggccaggcgccgcgggtggcgccatgcccgctccgccggggacgcggcaggggctaggagcagcggggacggggagcggcggggaccggagtgccggcgccctccgctgccccgcggccgcccagcagcagcccagccgtccgcgctcctcgcggcttccggcccgccgcggtcccgccccttttatagccgcttatttgcatctcaatgcgccgattggccgcgcgggcccggggcggccgaccgcgaggcgcgctgcagccaatcggggcagcgcgctttgtccggcccagcggctctggcggtcgggcagctggctgagctaggcggggcccccagcccggccttccctagacccccgcgggggcggcaccggggcggcgaccccgggtagctgcggccctgcccgcgcttgtttctctccgtctgctgctctaggaccactgatctgccgcgc

SEQ ID NO: 198786 - DNA, 209 bp, Homo sapiens
  chr2:240294262-240294471
  hyper
cactcctacatcccggcctcccggtacaccaggagctctggtcccctctctctacagagtgtacgcggcaacacgcacaagcaagcagtttatacacagcgacagaacagacacactgcttcatgttcagagcaatagcttctttctctctttcctgctctctccaccatcaaacacccaacaggaaacctttgcgtggttgctgtcca

SEQ ID NO: 198787 - DNA, 142 bp, Homo sapiens
  chr2:240402418-240402560
  hyper
tgcccactccacacccgccaccttagttacttccagccctgggccctctcctccagagaactgggggtgcctctggcttttcttctctccggatcccactgtttgcttagttgctagagtgttctttaaatttatttattta

SEQ ID NO: 198788 - DNA, 199 bp, Homo sapiens
  chr2:241374416-241374615
  hyper
tcttggcgagtttcctgcgtgcagcccccacaccacaaaagcccccggtgcgagccggagcccagcgcgagacggctggaagggcgcggggagggagccgctgcggggtgcaggcggggagaggggcggcggctcgaggcgcggccggcgggcggagggtacggaggcgccgggagagcgttctcggggcgcgctgcca

SEQ ID NO: 198789 - DNA, 331 bp, Homo sapiens
  chr2:241375298-241375629
  hyper
gcgcgggcgggtggccgggggcgccgccggccccgccatggagctccgggcccgaggctggtggctgctatgtgcggccgcagcgctggtcgcctgcgcccgcggggacccggccagcaagagccggagctgcggcgaggtccgccagatctacggagccaagggcttcagcctgagcgacgtgccccaggcggagatctcgggtgagtgagggcgcggcgccgggaacccgggcctggccgggctttgggctccggaccctggtcttcccgacgcggctactcgcccccggcgcgggatcctgccgcctgcgccccgccgcccgggcccc

SEQ ID NO: 198790 - DNA, 330 bp, Homo sapiens
  chr2:241375891-241376221
  hyper
cggggccggctgtcggggcgctgtggggctcggcgtggccgggctttcggggcgccgctgacggtggccgcggaccccttctgctctgtacagacctctctgggaggcgtctccggtcctgcccggggattctcgtagggtctccagcaaaggcagcctaggtgggttttataagctgaccccctcggggggtagtgcggaggggtggggagggagctgggcacttatccgcgggcggaacgccgccgcctcgtagagattcctgtcgaagaacttgtacgcgccggcccccgcctggcgcttgggcagcctcgtgccgcgagtccagct

SEQ ID NO: 198791 - DNA, 69 bp, Homo sapiens
  chr2:241393469-241393538
  hyper
gaaatggtggcgggggggcttcgggcagacggcaggggtgtggggaggggagggaagcacgatggggtg

SEQ ID NO: 198792 - DNA, 168 bp, Homo sapiens
  chr2:241499837-241500005
  hyper
atgggacgcagagcggtccaaggccccggcgccctggtgaggcccaaacctcccgccatgccccggccccaacgagacccaagccccctgtcccggcccagcgcccgcgggggacccaagccccagcctggtccacctcggaggcctctaggacccgggggcgcccgg

SEQ ID NO: 198793 - DNA, 47 bp, Homo sapiens
  chr2:241760796-241760843
  hyper
tgggggagattcacatccacttctgcaagacacgggccccccactcc

SEQ ID NO: 198794 - DNA, 205 bp, Homo sapiens
  chr2:241771771-241771976
  hyper
ccgctccgctgtaggccccgcctgctataggccccgccccgctgtaggccccgcctgctataggccccgcctgctgtaggccccgcctgctataggccccgctccgctgtaggccccaccccgcaggaaacctcgccccgctggtggcgcgccctggttgccgtggcaacctcctccctccgccgccgggttgccggcttcgcta

SEQ ID NO: 198795 - DNA, 162 bp, Homo sapiens
  chr2:242088871-242089033
  hyper
aaaggagcccttccgcgcttttatcccaccgaccaatcgcacagcgactagcaccgattgacaagctccacggaccagccacttgcgcgtatgggcgggactaagctagccagagtctagaagcccgcgctaagggttgctagggacgcaccaaacacccct

SEQ ID NO: 198796 - DNA, 334 bp, Homo sapiens
  chr2:242157713-242158047
  hyper
gcccacgacctgcgcggcttcctcaacttcacgctggcgcgagccccgtcctccttcgccgccgcgcacaaccgcacgtgcaggtgagccccgcgccaggtggagggggccgcgggcgcacgaggacgaggcggagcggggctcgggtggggtgggggtgcggcggtggggagccgggaggggcgggcgccgccgggcaaggccgggggagggggggagctgggggcgccgtgggcaggggctggggggaggttccccgcggtaagggacggagctttgcggggctggagggcaaatcgtggattctaggtgaattgctagttggtcatagtgt

SEQ ID NO: 198797 - DNA, 84 bp, Homo sapiens
  chr2:242212408-242212492
  hyper
cgggtggggaaggcggtgccgaggagttgggaaattaatcacctccagaaagcagagggagcgcgccccgcaagaacccgagtg

SEQ ID NO: 198798 - DNA, 97 bp, Homo sapiens
  chr2:242269473-242269570
  hyper
acggggagtaaagcctttaaagaggagcctctactttttacatatacacgagctagacatggacatcttaattaaatcttaccgagtccagcaatat

SEQ ID NO: 198799 - DNA, 181 bp, Homo sapiens
  chr2:242448319-242448500
  hyper
tcgtctccgacgttacggcggccgcgcggccctctcccttgggctctgccctgcgcagccctggttcgagcgggccagtgaggcccggcgccctccccgcctcgccacgaggatccaccgcggccgcccaggcttctagccttgtcgtcacggcacggagataagcccgcgctggccacat

SEQ ID NO: 198800 - DNA, 247 bp, Homo sapiens
  chr2:242498019-242498266
  hyper
ccgctccggcctggtcgccttctccgggcgcatccagggaactcgctcggtcctccttaagcggggaagctcggaaagcgtctccccgactccgcccccagggttgcctttcccttagaaggccaagccccaagcccagcctctcgccagctgggagtcgcgcgctgcccacctcgctgcccaggcccccgacgccgcggcaggagccccccaagagcgcgggaagccccgtggacctggcgctccc

SEQ ID NO: 198801 - DNA, 223 bp, Homo sapiens
  chr2:242498800-242499023
  hyper
gcccggcgccccgcgcgccccgttccccgcgccgcctccctccacccggctgagcgcttgtgcccgcaggtgcggcgccccccacccgcgtcgccgccatggaggtgctgcggcgctcctcggtcttcgccgccgagatcatggacgcctttgaccgctcgcccacagacaaggagctggtggcccaggccaaggcgctgggccgggagtacgtgcacgcgcg

SEQ ID NO: 198802 - DNA, 203 bp, Homo sapiens
  chr2:242575608-242575811
  hyper
accctataaataacacgtgccattcccgtctttaaaacttaaataacaccatgcaacataaaacagaaacatctccaaagtggtttttaaagtctgttcgcggttctggtgcctcccgcgtgtaatccgcagaaatctcactgaaataggctgaactcacaaggccttagaggggtttgggccctgccgcgggggcccacgtg

SEQ ID NO: 198803 - DNA, 123 bp, Homo sapiens
  chr3:2139586-2139709
  hyper
gctgccaatctctacggttaccccgaggtgtggagttgcggcgaagggagccacttctgcaaggaaacagtagattcataatgtagaatgaccgtggcaacgtcgttcaaagcacattctttc

SEQ ID NO: 198804 - DNA, 54 bp, Homo sapiens
  chr3:2141396-2141450
  hyper
ctggggggtttccagtttctttcgagaggcaagacaaccgccccgtcccctccc

SEQ ID NO: 198805 - DNA, 83 bp, Homo sapiens
  chr3:3840347-3840430
  hyper
gacgcaggttcacgcgcagtttccgaagacctattccgtccccaccctcctccccttcctcggagacacctccacttaacact

SEQ ID NO: 198806 - DNA, 137 bp, Homo sapiens
  chr3:4910151-4910288
  hyper
tccacccagccccgccgtgcgcctgcgcgccccggcccgtgggccagcgggcagtctactcacgtgggcctccgcatggcccagcgccgccaagggcaaggcggagcctcgcgatcgccccgccccctccgtgcccc

SEQ ID NO: 198807 - DNA, 224 bp, Homo sapiens
  chr3:4910550-4910774
  hyper
atcacaagatactgctccagattttcccattttatggctaaatccaaatgactcggaccccctgccccatcacatcaggaacttcagcagttccttccaccaaagctcaactattgctgcaagcgctttggtaatcacgagcattatctatgaagctactgctgtggtcagggccccagtcgtcctgctgagtagcagactttgaaagacggtgtccaaggcca

SEQ ID NO: 198808 - DNA, 82 bp, Homo sapiens
  chr3:5018903-5018985
  hyper
gagccccgaagtgaggtcatgccagttagcagttagaaaaggaggcatttctcacacttgctaaagagtttgacgcttgtga

SEQ ID NO: 198809 - DNA, 157 bp, Homo sapiens
  chr3:5019132-5019289
  hyper
tcgcccagtctcggcagtgaccccatttttttttcaatccttcccacagccaggtcactcagcagtggggtgactgacccgaagcgcagtgggaagggcttacagtcatctctcaactccccgaacttgcagggcaggggagcgcagaggtcagtga

SEQ ID NO: 198810 - DNA, 235 bp, Homo sapiens
  chr3:6903907-6904142
  hyper
ccgaaaacaggctcgtaaaagtgccaggctcctaggagagctggttaggagaatggaataggaaagatgagacgatgcctggaaaccgggcatttcccaactccccagcttcccacccccaagccagcctgccaacctgcactcccttgaaaaatttggagacagccttaaggaggcacttcttaaatcgagggctccgtcttaacctagatgtggatgttaagtccgcatctcc

SEQ ID NO: 198811 - DNA, 89 bp, Homo sapiens; identical to SEQ ID NO: 107827
  chr3:6904532-6904621
  hyper

SEQ ID NO: 198812 - DNA, 64 bp, Homo sapiens
  chr3:9811685-9811749
  hyper
tggaggtggagcctgcggcggagggacccgggattgggaggcgaggcaccgctccaaggctggg

SEQ ID NO: 198813 - DNA, 91 bp, Homo sapiens
  chr3:9812389-9812480
  hyper
agcctgcaactaggacggcaggcaagaggccaaaggtcggtttgctcaaggccttccttgggaagaaatttggtgccgagtggaaagaggg

SEQ ID NO: 198814 - DNA, 124 bp, Homo sapiens
  chr3:9851463-9851587
  hyper
ataaggaagccctcgctcgactgccccggggcccatcgcagcccccaaccagccccgagcggtctgatggtgcccagggaatggtttccaaggcaatagcaaacggggcggggcttggaacgga

SEQ ID NO: 198815 - DNA, 137 bp, Homo sapiens
  chr3:10052429-10052566
  hyper
tagggggagaggacccgagttagtgccccctccccaccctgagggtcagcccggggcagggctggtcactgcgccttgaggagcctctcccctatgcccttgatgggtggcccgcaggggacgcggccgcactcggt

SEQ ID NO: 198816 - DNA, 33 bp, Homo sapiens
  chr3:10052882-10052915
  hyper
ccgttaaaagccccgcccgccgccgctcgccgc

SEQ ID NO: 198817 - DNA, 478 bp, Homo sapiens
  chr3:10206277-10206755
  hyper
caggtattaccaacacctagggagttgcctggcatacagtaggtaattaatggagtatttgatgagcgcatgatgcatggtgtagtgccgatggaagtggggtcagaaggcctcctgccgctgcggcagaattcccgtgtggccttctcccaccagggcctcagtttcccctcgcagttccgattctctggccggcgctggggtggagccggcggggccgtcgtgccgcccgtggccgctggggacgctggtgccctcccgccccgcccacttccccgccggtccgcccctggctagagaagccgcagcccgcagtgtccgacccagtcgtcccgcgccggagccggccccgtagcgtgccatggcctgctacatctaccagctgccctcctgggtgctggacgacctgtgccgcaacatggacgcgctcagcgagtgggactggatggagttcggtgagtgcggcccggggagggga

SEQ ID NO: 198818 - DNA, 70 bp, Homo sapiens
  chr3:11035434-11035504
  hyper
gatgtcctgttctaggcttggctcggtcttcagacaagaaactcagaccgggcagtcccctattgaggct

SEQ ID NO: 198819 - DNA, 191 bp, Homo sapiens
  chr3:12045490-12045681
  hyper
ctccgcatagggaggctgacacctcttatccttccaaaaggagtggggtcggtttccttcgcctccatttcagctgggacacggctctttttctctccaaccaaaaagatggtggggcctctggttccttttccttcccctggggagaaggcctggctcccacgccctccccgcatagtcacgctcaggtt

SEQ ID NO: 198820 - DNA, 441 bp, Homo sapiens
  chr3:12329041-12329482
  hyper
ggagccccacacctcggtctccccagaccggccctggccgggggcatccccctaaacttcggatccctcctcggaaatgggaccctctctgggccgcctcccagcggtggtggcgaggagcaaacgacaccaggtagcctgccgcggggcagagagtggacgcgggaaagccggtggctcccgccgtgggccctactgtgcgcgggcggcggccgagcccgggccgctccctcccagtcgcgcgccgccgcccccgcccccgcccccgcccccgcccccacccccacccccacccccacccccagccggcgcccgcgcccgcccccgcgccgggcccggctcggcccgacccggctccgccgcgggcaggcggggcccagcgcactcggagcccgagcccgagccgcagccgccgcctggggcgcttgggtcggcctcgag

SEQ ID NO: 198821 - DNA, 205 bp, Homo sapiens
  chr3:12330025-12330230
  hyper
gcagggtgtctggacccggggaagcgaagatccgcgtgcgtccgtcctgaggccgcgcggcacccctgctgaggaggaggtcccgttcgctgtccagagcccaggggcgaccgccgcttggggaccgggggaccgttcagcgaggggcgcgcttgtagctggccaggccctgtgccctgacgcgttgtgctggccctacgcccgg

SEQ ID NO: 198822 - DNA, 101 bp, Homo sapiens; identical to SEQ ID NO: 2394
  chr3:12330283-12330384
  hyper

SEQ ID NO: 198823 - DNA, 48 bp, Homo sapiens
  chr3:12851562-12851610
  hyper
gtgtcccgctgggcgccttccacgccagcctcctgcactgtctgctgc

SEQ ID NO: 198824 - DNA, 77 bp, Homo sapiens
  chr3:12851692-12851769
  hyper
cctcttcgtcgagctcgctgaccacctactggaccggctgcccggcccgcgggtgcccaccagcccgactgccatcc

SEQ ID NO: 198825 - DNA, 218 bp, Homo sapiens
  chr3:13008720-13008938
  hyper
aacccacagtctggcggacgcaccccgccccgcaggcagctttctctcgcacgccgggcgcccggtcccgacggtcacccgcactcccgcacaggcatccccacagcctgcgccagcccaccgctcagcacccgggaaggccgctcgccccgcgccgcgccctcacccgctgtcaagctctagctccagaagggactgggtcctctccgagttgcagt

SEQ ID NO: 198826 - DNA, 102 bp, Homo sapiens
  chr3:13323321-13323423
  hyper
gccccgggtgatcccgaagacagagaggcagaggggcaggcagagggcacagagcagcagaaaccccgccccagagacaccgaagcctcccagcccccttgt

SEQ ID NO: 198827 - DNA, 329 bp, Homo sapiens
  chr3:13460980-13461309
  hyper
cagcctgaggggaagcgccggcctgcctcgtctcacttcgcctctgtaaagcggcccctgggcttccctccaaaactcctttcctccagggtctccgttcctccccgcgacgctaggcgctgcgcttcgtttcacagactcacttcccacgccagggcgagggcggtcacagacaaacccgagctggggtcccagactcaagggaagtgcggcccagctgccccggcgccccctcccgggtcaggccggctcgggcccggccggcttgggccctgcggtcccagacgccgctccccaggccacccctcctcccgcacaacccagaacac

SEQ ID NO: 198828 - DNA, 156 bp, Homo sapiens
  chr3:13692028-13692184
  hyper
cacagataagttgcgggccgcgggaaacaggaccctggggggccccctagagcctcgcggagcggcttgcagaggagcctcggggccacggcgtgtgtgcagcgacacctggcggtggcatgcggaactgcggacggctgcgcaggagcggacagc

SEQ ID NO: 198829 - DNA, 201 bp, Homo sapiens
  chr3:13920779-13920980
  hyper
gactgcccagtctctaggaacggctgtgccgcgcctcctgagagagttcgtctcgggctccggggactgagctccccgagattggctgtggtcctggcttgatgttcctgctagacctgctgtccctatgcccgggtccgaagggtccccgggatgggctgaacctttgcagcagctagccctcccccagagtccctcagg

SEQ ID NO: 198830 - DNA, 551 bp, Homo sapiens
  chr3:13921903-13922454
  hyper
agactcggccgagaggcctagtgccttggtctgctgccctgctccctccagcccggaacagggagctggggctgacagggcacaccccagttccccaaccccagcttcaggggagggcgccccctttcgcggagcgacgggctgactggctcagtgtatttcttccctactcccacctattcgagagtggcggcagggggtgcccaggttgggcagcctcctctgggatcctgctgttagccgacagactgagtcgggctgaggcccagttgccccgcgcggaacagcagtggggcgcctgagccgcgggagcgtgaggggcgcagctggccgctcagagcgcgctcgcggcgtcaccaggcggacgcggcgggtggtgcacctcggcctcgctcccgggaacagaatgctttgagtgccctggccgacccgagggggctaacacccttctttggtgtacacctcatccagtgagctagggggagtctaaccgtccctggaaattgggtggtgccaagactccgagcggcagtttatgtttttgccagcga

SEQ ID NO: 198831 - DNA, 420 bp, Homo sapiens
  chr3:14444178-14444598
  hyper
ccgccgccaacgccgagccccgaggaccgcaagcccagaggacaagctgcgccaagagggagtgctggagctgttcacccagcgggtcagagagcgagccgggcaggccagcccccggccggcggaaccctggcacagcctgagcagatgctgcgggcggcgccgcagccaccccaggtaccggagggaccgggagctgggcgcgcagccggcgctgcccgccgtctgcagcccctccccatccccgcgtcgccgcagtcccggcctcctcccctccgcgtgcgcccatccggcgcccctttcaccaccgcggaagggaccgagagtcgcctgctcagtcccgctggcggggctgttattgtttccccggcaaaagggctccggctcttggtgcgggcggcaggagagtgtgtgtgtgtg

SEQ ID NO: 198832 - DNA, 384 bp, Homo sapiens
  chr3:16553594-16553978
  hyper
ccaaacagcttgcttcgtaacccctctctggggtttggtgacatctggggtcacttgaacttcgttgggattcagctgttcagagatacaaattaggaatcccggcagcagagaggccctacccacaggcccagaggtcgctcacattacacccggcttccttcctggcaaggccttaacttatcctgagatgacacacgatggcaggggttggaagatgcctagtctagttgagcgcccagctcctgaaacagctgtaccgactacaagggttccagcacatgagttgctggaaactggggtgaccactgacagagattgagccagactttttttttaaaaaagtacttcttgtttgtttgttttaagcccccgaagaaactc

SEQ ID NO: 198833 - DNA, 92 bp, Homo sapiens
  chr3:16555426-16555518
  hyper
cagaacccaggggtcaggggctcatcgatcctccctcccagcccctcctaatcaaggttgtgtgctgtcaggaagagcgcctgggagacaag

SEQ ID NO: 198834 - DNA, 210 bp, Homo sapiens
  chr3:16926010-16926220
  hyper
ccctcgcccttcgccggaggtgggcgccttttcctgcgtggcgggtgctccgaccccagttgctctgagccccggggaagcgcgccccgagcccctgacgtgggcgccccgttacctcggggtgggtgcctggggcccctgaggtgggcgcgggttgccccggggtgggcgcccggcccgcgcgggttatttttggcgcccgcagaggcg

SEQ ID NO: 198835 - DNA, 49 bp, Homo sapiens
  chr3:16926261-16926310
  hyper
cggggctccgccggcgccggagctgactcgtctctctcttctttcccct

SEQ ID NO: 198836 - DNA, 206 bp, Homo sapiens
  chr3:16926812-16927018
  hyper
tcccccgggagagcaagccgggcggcctgccccgccggagcagcatcatcaaggtaggtgggagaagggcgctcatcgcccaccctcagccgtccttggattctattttctccctgggggagtggtggtggaaggaggaagcccactgctaacaggaaccactggagcatgggtgcttggggtggttgagcggggattggatgcaa

SEQ ID NO: 198837 - DNA, 277 bp, Homo sapiens
  chr3:18485652-18485929
  hyper
caggcaccttactgcccgcccggctccagaacgcaccgagaggctccccttttccccatttgcttccttcggtcttttccactcccctttccttttctaaaaggggccataccggtgacctgaaggagtttgttcagccagggtctattgggcaggtgtggtggtgtgtccacacccagacagaaaacgaatggcatcttcaaatcccccatcccgaccgctctcccctactctaccagcccacccctccaaggtccgtctgcgtgagaaaaggggc

SEQ ID NO: 198838 - DNA, 104 bp, Homo sapiens
  chr3:19190216-19190320
  hyper
ggttatgaaaggattactggcgccgcaaaacaccttcctggacaccatcgccacccgttttgacggaacacgtaagtcttacacttgaacgagtggtatggcat

SEQ ID NO: 198839 - DNA, 214 bp, Homo sapiens
  chr3:19988481-19988695
  hyper
cctcgccccgccccgcgaacaaacctaggcggggagggattcgggaaggggcgaggaagcggaaggagcaggcggactggcgatgatgggaagtgacgaagtggcgcagttcgctgcgtgcagcgacgtggcggcggggccggcaccgggcagcggaagtggctccggcggtgggacttgagtgtttgtgttttggttcgtgaaggagccggcg

SEQ ID NO: 198840 - DNA, 224 bp, Homo sapiens
  chr3:22413369-22413593
  hyper
ctgccctcaaaacgcgtgtatctcaggtttttttaagtatttgttttaaaaagaagaagaagaagaaggaaatgaaaaggaagcaggaagctgtcccgctgtgtttctttatcccaacaacttcgccaggtttcccccgaggagggagcacgcctcgcacacacccaatgaaagacagacagcaggacgtccttaccgggtggcccagccctcgactctggaca

SEQ ID NO: 198841 - DNA, 215 bp, Homo sapiens
  chr3:22414323-22414538
  hyper
gcggcctgagggtgccgggagagagcgagactgatgaccacgaaaaaagaaacctggagactagaggcgaggaactagctttaatggagtgagtgggtcgtgggtgttaagtggaaacacgaggaggcgaaatgcatctagaaactacagatatcggaaatgagcttgagtgagctgctttttgagtgaggctcgaaaagggggctgtcattttg

SEQ ID NO: 198842 - DNA, 69 bp, Homo sapiens
  chr3:23986035-23986104
  hyper
cattcaaggtgaaacgcccagatcttgactgcacattagctgagttcggacacacgcgtacacccgtct

SEQ ID NO: 198843 - DNA, 204 bp, Homo sapiens
  chr3:23986746-23986950
  hyper
gcgggtcacatggtcgcggctgccctccccgtcagccgccctcgccgccgcggtgcgctggctgcaggaagccgccgcgccgccgcttttgttgtcagggacccagcgaggagcgccgctcgccggccgccgccaccctctctcgctgcagcctgctgtgcgctgcacggcctggggcccgggagccccgcccgctctgcccat

SEQ ID NO: 198844 - DNA, 760 bp, Homo sapiens
  chr3:24536592-24537352
  hyper
gccccggcccgcttcccgggcgctgtcttactccgggcccggggcgcctgctccgcgccgcgtctgcgaaccggtgacctggtttcccctccagccctcacggctgtccgacttgcgcggcggtggcggcggcggccaagagcaggcaaacccggctccgccaggggcgcagcgaggaaatggcctcctggcgcacaccccgccgccgccgccagccatcgccaccgccccgggctgcccagccggtacagacgccccctgccaggctccgggccagcgctccgacgcgctcacagcgcccggcttgccgaccccgaccccgaccccgagtcctacgcactcgaggtccccgggccggccgcctccgcacctgcctccccaggtgtgggcgctccccctcctcctaatcccggccgtgccctcccagggttggtgacggtgctgtgggtttggtggccgcgcgtccacccacccgattgcctgcgcgcataggtgcgggtttgggcgtcattactctagttggagaagaggaaagaatggggaacgagtgacaccgggaccggagggcgagtcttccaggagcacgtctcggccttctttgcccggcccgaccggcccgacccgtgccgcagcgctcctccctccgctcctaaaccacttgtggcgcgtgtcgggaatacagggcgctctggctcttcttggggcctccgctggtccgaccatctggcagctctcttaaccaccacggccaccccacgaa

SEQ ID NO: 198845 - DNA, 369 bp, Homo sapiens
  chr3:24563042-24563411
  hyper
aggtgtaaagcccgagcgagcagctcgagtctcagtcctgcagcctaaggcagcccctccaagccgtgggcgccggccgtccgtctcctcaccgtggcgccctttactcggccacccggggcacagccaggggcttcaccgagccccgggtccaccgtggtcgcggccgccggtcgccgggagcccggagccgggacgcgagggttgggggttggggatgggtcccagtgtcgcgcgggagttcaaagcccggcactggcacggggctccgccgccgcagccgctggagccttgggctcccgccgcggggagagcgggggtagggcgcctgtcccggagtgacccggcggcggaggaagggcgggccgc

SEQ ID NO: 198846 - DNA, 97 bp, Homo sapiens
  chr3:24563522-24563619
  hyper
ttcccccgcgagctcagacccggcactgagggaagagacactccgagtcctgcgtctccaagttttgctccaatgcccttgacattgaatgcatgtg

SEQ ID NO: 198847 - DNA, 41 bp, Homo sapiens
  chr3:24563737-24563778
  hyper
tttgcactgcccagcgctggagggggcgaccagagccttac

SEQ ID NO: 198848 - DNA, 140 bp, Homo sapiens
  chr3:24870862-24871002
  hyper
gcgccgcggactccaaggcagcccgccaaaaggtaaagccaggagagcgcgctggcgggtcttcctgttgggtggctgctgtccaagcccctagcgtccccggagccccaagctgggtctggaagaccagggcatttgca

SEQ ID NO: 198849 - DNA, 157 bp, Homo sapiens
  chr3:24871245-24871402
  hyper
cgtgaacccaggagtcgctggcaagttgcacctgccagccggatccgccccggctcccttcgcgtccctgccgggtccagcgctgtcctgcgcaccttagggctgggcacggcgaaacctggcgcccttgggagcagaggttctcgctccattcccc

SEQ ID NO: 198850 - DNA, 267 bp, Homo sapiens
  chr3:24871522-24871789
  hyper
ggctgcacatggcaggagttggagaagagtactaggggcttggcgccggacacagggacgcggccagggaccgagccctggaggctgaggctctaagcctggactgtcagccgcgaaggggttcttgctgtgtgcgcgctttggcaggaagaggctgtgtgtgattgtagagacgatgggcggaaaaacagagaagagagaggtacttggaatctatgtaattgcagtgtgccccagtgtgcacttttctccctccagatattttga

SEQ ID NO: 198851 - DNA, 60 bp, Homo sapiens
  chr3:24871886-24871946
  hyper
tgaaagtgaacaggtgacagaagacgtgtgtgtgtgtgtgtgtgtgtacgtgcgcgcgcg

SEQ ID NO: 198852 - DNA, 221 bp, Homo sapiens
  chr3:25469458-25469679
  hyper
gttggtgctcaacgtgagccaggagcagcgtcccggctcctcccctgctcattttaaaagcacttcttgtattgtttttaaggtgagaaataggaaagaaaacgccggcttgtgcgctcgctgcctgcctctctggctgtctgcttttgcagggctgctgggagtttttaagctctgtgagaatcctgggagttggtgatgtcagactagttgggtcattt

SEQ ID NO: 198853 - DNA, 151 bp, Homo sapiens
  chr3:25469874-25470025
  hyper
tccgagcagggtttgtctgggcaccgtcggggtaggatccggaacgcattcggaaggctttttgcaagcatttacttggaaggagaacttgggatctttctgggaaccccccgccccggctggattggccgagcaagcctggaaaatggta

SEQ ID NO: 198854 - DNA, 121 bp, Homo sapiens
  chr3:25824793-25824914
  hyper
ccaaaaaggtctccggggtgttctggcagagctcagccacggccggggacgccgagcctgaggagctgcccaatgccgccgccgccatgcttgagcgccagcgggcgccgccgccgcccct

SEQ ID NO: 198855 - DNA, 74 bp, Homo sapiens
  chr3:26663958-26664032
  hyper
gcttaattcagctctgatctcagtagttagaaaaataggagaaagaatggggccatagcctgctgcaagtagag

SEQ ID NO: 198856 - DNA, 219 bp, Homo sapiens
  chr3:26665682-26665901
  hyper
gaagcaaacaaacctccccgcgagaatctgaatgcgttggcatcttgggtggtgactgaatggtcagatcgtggactagggatgcttctccaagctctaagaggaccatagtctgctctcttctctggcacccgcttgcttctacgctccttcacctctgcagccaggtcggtagacccacgcccaccttccctgccaggcactcaggagtcaaggatg

SEQ ID NO: 198857 - DNA, 228 bp, Homo sapiens
  chr3:27410377-27410605
  hyper
tgaacctccagaggcgtcggagcagattggaagagacacattcaggctccatttaaccagaataattccgttatcaaaatggaagcgccaagaagcatcgttgatggcgctttcccaccatccatccgtccaacacaaacccacctgctttgaaaagactgcctcacgcagtgactcacttacccaccacagccgcattctctacctctgcctcttgtctagtgaagc

SEQ ID NO: 198858 - DNA, 82 bp, Homo sapiens
  chr3:27411079-27411161
  hyper
caagcttgcaagcagaagaggcagcaagtgatgctgaaggctgtgctgcagccacttcaccggaacctagagctacctgtga

SEQ ID NO: 198859 - DNA, 132 bp, Homo sapiens
  chr3:27755955-27756087
  hyper
aatctgctatatcccggcagtgattagcactttggggctttctagagggcagaaataggagagcactgttttcgaaattccatcgcatctcccaatattcggtggttggatgcagatgtaagggggctgttg

SEQ ID NO: 198860 - DNA, 187 bp, Homo sapiens
  chr3:27756466-27756653
  hyper
acagttagcagaatgatcctcccagctagacctttaccccgggagggtccaggagggggctggaaaggtttgcaatctgggcctgaagccgtctgcagataagcctggcgggacgtctggctggggggacaaaggggaccctccaccccactctttggacctcccagggttcagccaggggatgggc

SEQ ID NO: 198861 - DNA, 441 bp, Homo sapiens
  chr3:27756715-27757156
  hyper
tccaaggtcactgtttgcagagcggcagtgcacggaacgactggaatcctcctttgtaagtgccacgcccgtccctagcctgcgcctcagaccgagtccgggcggagtttgactgcagctactgaggccggcagccggcggcggcgggtgcgcagcgtctgggttcagaagaaagccgcaggtgggcgcagaagctgagctgtgtgcagccccccgctccgccgcgccccagggaccctgaactggtgggcgctcaaagggccacgggggttcccagggagcctaggtgggcctaaggatgggtggccccaagtaagcctagaaaaaagcccagagaacttagtggccaggcgctctgacagagcctggtctccaagagccagaagcggaggttttcgaggcttggttaagtctgatgtgggcaatcggcagcaatcttcc

SEQ ID NO: 198862 - DNA, 194 bp, Homo sapiens
  chr3:27764674-27764868
  hyper
caaagcacaccttcctcttgtcgaaggcaaactccctggccttcaacgcacagaaccactttttgtttgttcccatccttttacccagtgggaaaggtttgtagagaggaaactcgcgctaagcttttgggattccggggacggccagagcacattgccatcctggaggacctaagctctcagcttctaaatca

SEQ ID NO: 198863 - DNA, 60 bp, Homo sapiens
  chr3:28616602-28616662
  hyper
tggtggagccctgccctgctgaggacgctcttccagcacagaactcaccaccaaaaagag

SEQ ID NO: 198864 - DNA, 214 bp, Homo sapiens
  chr3:28617983-28618197
  hyper
caaggtaggtccacagtgttggcgctgtgataccttttgaacaaaaccaaggagttgctgtcgtggctgtcactttaacccctccgctccccaacccccttccctggtttgtgtgggggtgggggtggcagatgtgaagaaggcttaagatttaagggaatccatgggcgatagtgactttccgaactggagggtatgtgcagaagtctgtcct

SEQ ID NO: 198865 - DNA, 160 bp, Homo sapiens
  chr3:32148437-32148597
  hyper
gaggcgctgggctcgcgtgcgtgcgggggacagcgcggagagagggcaccccgagcacgcgggcacctgtctgcgcccccgttactgagcgcacagaagccacctgcttgccacgcctgggtgttttgcacaatatcctaagggcgtattccgttctcca

SEQ ID NO: 198866 - DNA, 565 bp, Homo sapiens
  chr3:32433047-32433612
  hyper
acacatccgcagccgcacccacacaaaatcccaggaggctcagtaccagctgtggtccgggccttgcccacctcggagaggccacgacccaaggcatccggtttcctctcgctccagtctaacttccgcgcatctacgagggccgggactgccgctacctttctggaaggcgccggccggccagtcaccggagggatcccgccagaggcggctccgcgtctccagcagcggggcagggacccgggcgccccgccctcgccagcgcccgcccccgcccgcccccggcccgccctctgtatctggcccctgggcagctgcccggggaggcggccagcgagctggggccgcgcaatgtcgcacggagccgggctcgtccgcaccacgtgcagcagcggcagcgcgctcggacccggggccggcgcggcccagcccagcgcgagccccttggaggggctgctggacctcagctacccccgcacccacgcggccctgctgaaagtggcgcaaatggtaagtgagcgcggggcgcgaggccgaggttctacagggcgtcccgggaaagcag

SEQ ID NO: 198867 - DNA, 200 bp, Homo sapiens
  chr3:32433665-32433865
  hyper
atcgcgcagcgggcggggcaccgcgtcgctaaagttcgcggcaggcttcctccgggaaagttgctgccgcagcccccgcgctggagctcagtccccagagccgccccggcccttgctcccgcggacccaggtcgccagggtcgcaagtttctccggccacccccctgcgaagcctgacccgcctactgactgaaaccacg

SEQ ID NO: 198868 - DNA, 82 bp, Homo sapiens
  chr3:32434068-32434150
  hyper
gagggtcttgtgttccatagtggggaaaaagaactgggaccgttgagacggccgtcctggtcccctgcgccctcaagttccg

SEQ ID NO: 198869 - DNA, 137 bp, Homo sapiens
  chr3:32442878-32443015
  hyper
caggctgcaggcagccagggcgtaagtgggtagaggaggggttcggggtcggtgtgagccccataggttttctggcactgcaggggccctagagaccccggccccgcaagcacgccaggaccctggaatcctagggg

SEQ ID NO: 198870 - DNA, 55 bp, Homo sapiens
  chr3:32443510-32443565
  hyper
ctggggcagtcactctcctccctctgctgagcccgctctctttagtttactttaa

SEQ ID NO: 198871 - DNA, 224 bp, Homo sapiens
  chr3:32612552-32612776
  hyper
ttccgctcatccgcggccctgggctgcggcaggggggttgggtgtgtcaggtgaaaagtgctccctcccacccttcagacaggtccccaaaccctgcggcctgcgcggaattcctgcattgtcattgccggcccacccactgttcaggctgagagcggtcccccgcccaaaccggcgcttcgccggcgccaagatagaaatgggtcgcccggctggtaaagagg

SEQ ID NO: 198872 - DNA, 206 bp, Homo sapiens
  chr3:32726595-32726801
  hyper
cggaggggacgtcggcgtggggcggggccagtagcagttcccacgccggcgctccaggcgcggcaggctgccgcccccggaagtagtgggtaccgggacgccgtgaggcggaagctgtgtatggcgggaggctgtggcggtcccttggtggggaagctgttgctgttgctagacgacgggaactagctctcgtcacttcctcagcc

SEQ ID NO: 198873 - DNA, 124 bp, Homo sapiens
  chr3:33137820-33137944
  hyper
cgcacctcacctattcgcctcgccagccctgccccgatcaacgatggcatcccccggcagcctgcctattccccccctcaacctggacccccaaacgccgaaggaaaacggtcccacaaataca

SEQ ID NO: 198874 - DNA, 242 bp, Homo sapiens
  chr3:33155230-33155472
  hyper
agattatatagaccgtagggccgatgtatataatctattagggccgcgtcggccttgcaggcgggtctccaagtgaatgagcggcagagtcccatcatgcgcatcagcctgcgtgaaccagtgcgcagcgcgcctttcccgggcaccctctaggtgctggcagctggcgcccagatcccccggctgggtggggaggggcggccggacggggcgggccggaggctggcgtccccgccccgaaa

SEQ ID NO: 198875 - DNA, 85 bp, Homo sapiens
  chr3:35681641-35681726
  hyper
cacagctgtgtgggatcccagccgacactgcagaaagctccttttactagcagttaaataaatcgaccaaaaacaaaacaaacaa

SEQ ID NO: 198876 - DNA, 183 bp, Homo sapiens
  chr3:36421689-36421872
  hyper
ccccacccagtgccggcgtgcgcccagccttcccccagccctttccagggcgctgccccctgcctgccctcactactccaggcgctggccgcgcagccccgccctggagctgcctccccgcctccttcctcctcctgcgggcgagcagaagcccgctcgcccgctgccgagtggcagtcacga

SEQ ID NO: 198877 - DNA, 166 bp, Homo sapiens
  chr3:36985645-36985811
  hyper
agggctccgcttcccagccttgggtccctactactaccttccccctagactcggtgagcccaggctgatggaccgtgcagtccagtttgagccagcccagcagccctcaatcgggcgggcagggaagaaggcctcctactgccgggaagaggccagcgcgctccaa

SEQ ID NO: 198878 - DNA, 250 bp, Homo sapiens
  chr3:36986413-36986663
  hyper
gggcggcgcgatgcagaggcggcgttcgggggcccccagctgcctgcggctcggctacccagccgcgatcagagggggcgggggacgcaggaaccccggcgtccgggcggtgtgcagccgcagacctattccaagtttccacgtagttgcgagagcccaaaaactgtcacgtgcacgtcgctgctgagtgggaggaggtgtttgtcatcgcgttcaaaaggggcgtttcggtgtctcccgtcatgcaagc

SEQ ID NO: 198879 - DNA, 1448 bp, Homo sapiens
  chr3:37033965-37035413
  hyper
ctcagggcctacaccgcggataaagaccaggaggtagttctcataggccacaaaagcctggtcgtccaaggcaagagaataggctttaaagtccctggctcggttaaaaagctggttgcgtagattcctgtcaatgctcaggatcctctgccttgtgatatctggagataagtcaacgccttgcaggacgcttacatgctcgggcagtacctctctcagcaacacctccatgcactggtatacaaagtccccctcaccccagccgcgacccttcaaggccaagaggcggcagagcccgaggcctgcacgagcagctctctcttcaggagtgaaggaggccacgggcaagtcgccctgacgcagacgctccaccagggccgcgcgctcgccgtccgccacataccgctcgtagtattcgtgctcagcctcgtagtggcgcctgacgtcgcgttcgcgggtagctacgatgaggcggcgacagaccaggcacagggccccatcgccctccggaggctccaccaccaaataacgctgggtccactcgggccggaaaactagagcctcgtcgacttccatcttgcttcttttgggcgtcatccacattctgcgggaggccacaagagcagggccaacgttagaaaggccgcaaggggagaggaggagcctgagaagcgccaagcacctcctccgctctgcgccagatcacctcagcagaggcacacaagcccggttccggcatctctgctcctattggctggatatttcgtattccccgagctcctaaaaacgaaccaataggaagagcggacagcgatctctaacgcgcaagcgcatatccttctaggtagcgggcagtagccgcttcagggagggacgaagagacccagcaacccacagagttgagaaatttgactggcattcaagctgtccaatcaatagctgccgctgaagggtggggctggatggcgtaagctacagctgaaggaagaacgtgagcacgaggcactgaggtgattggctgaaggcacttccgttgagcatctagacgtttccttggctcttctggcgccaaaatgtcgttcgtggcaggggttattcggcggctggacgagacagtggtgaaccgcatcgcggcgggggaagttatccagcggccagctaatgctatcaaagagatgattgagaactggtacggagggagtcgagccgggctcacttaagggctacgacttaacgggccgcgtcactcaatggcgcggacacgcctctttgcccgggcagaggcatgtacagcgcatgcccacaacggcggaggccgccgggttccctgacgtgccagtcaggccttctccttttccgcagaccgtgtgtttctttaccgctctcccccgagaccttttaagggttgtttggagtgtaagtggaggaatatacgtagtgttgtctta

SEQ ID NO: 198880 - DNA, 428 bp, Homo sapiens
  chr3:37493091-37493519
  hyper
cggagaccacacttcgggaatcactggtgtacgagaccaagtgactagaatatggaggggtgctctgctcgcttccacgtggctactattgttatgaacaacaacagccggcgtttactgagcactgctcctacagcttatctcacaactgggtgaaggagcagaggatgcgcagggctagaacctggagtctaaactcgtccttcacccgggttgctctggatcttactggttgtgagacagggagggaaagagagacaaaggcagggagacaggcccagcagggccggcagagcctgtagtgacggaggggagcagccttatctccgggaacccgagcgccccgtgcgcggcggggagggggcagttcggggcgccccggcgggtcccaggggctgactcccgcccgggaagtgcgcgcagggctc

SEQ ID NO: 198881 - DNA, 354 bp, Homo sapiens
  chr3:37902095-37902449
  hyper
cccgagcccgccctcctgcggcactaccccgcccccccggcttacggggctgcagagtgtggcctgcaagttggaagcgcaggacgcgggcgtccaaaggccccgacgctcccaggctgaggaggcactttgtcgtctctcccacgctctggccgtcgtcctaggcctgacagtggccagctgccttgcacaagcacagtccctgccagacttggtctgccaccagcgccttccgctcttctgccctcgacggactcccccggtccccttgctgcacagcacccgaaaatgcccactgcccaggcccctctcagtcacgacaccctcacgtgcaggaggttggtccttcaggac

SEQ ID NO: 198882 - DNA, 561 bp, Homo sapiens
  chr3:37903491-37904052
  hyper
agcccagcggcggcggcggcgggagctggggcgcgggcccgggccgcctctcccagagcgcggggccgggcggcgggcgcgcccaggcagcggctgcgagcgcccccccgcgccgcgcccccgcgccccccgcgccgcgcccccgcgcgcttggcttgcggggggccgggcctgcgggcggccgccgcgccgcgcacccatggacggcccggccatcatcacccaggtgaccaaccccaaggaggacgagggccggttgccgggcgcgggcgagaaaggtgaggaggggcgcaggcggccgcgggctgggggcgagcgcacaccccgcgccgctggagttcactgccgggcgccggcatgggcctgggggaggggtgcacagggcccggagggtgcgtgggtgtggggtgcgcccggaggagagcgaggctgccagagtgcgtgtgccgactgagccagtgtgagtgtgcaggggctggcggagagactgggagcgagtgtgtgtgcatctaaccgggaggttgtgagtttgtgtgcgcgcacgcccgcagagaagttgtg

SEQ ID NO: 198883 - DNA, 129 bp, Homo sapiens
  chr3:38182655-38182784
  hyper
acaaggcaatgaagaaagagttccccagcatcctgaggttcatcactgtctgcgactacaccaacccctgcaccaaatcttggttctggactcgccttgccaaggccttgtccctgccctgaagactgt

SEQ ID NO: 198884 - DNA, 78 bp, Homo sapiens
  chr3:38495097-38495175
  hyper
ggggcactaattgcgagtgcagtggccacaggctcccgggcaaagtggtcaggagcccattcccgccacctccgtccg

SEQ ID NO: 198885 - DNA, 52 bp, Homo sapiens; identical to SEQ ID NO: 39102
  chr3:38495213-38495265
  hyper

SEQ ID NO: 198886 - DNA, 101 bp, Homo sapiens
  chr3:38495679-38495780
  hyper
gaagcgcgcagggaacgagaccgaaggaaggagcgggaaggagagcgcagccgccgcctggccctgcgcgccccgggagcgccgtgcggccctgcccgcgg

SEQ ID NO: 198887 - DNA, 1234 bp, Homo sapiens
  chr3:38496021-38497255
  hyper
gggcgcccggctcgccgaacttgggggcacgatcttgtctgtgcagtcatctgcgggattctggttcctagaggcgcccctgcgatgggggccgggacgcggagcctcagggtcggagttcgggctacgcgggcgcgtggaacccagggaaagagtgaggaaaacctgagcgtggggaaggcggccaagaggggtgggcagatctcattgggggtggcaggattgtaggtgcagcagcagcagcagcatgcggggagggttgcatgtccctcagagtcactaagtgtagcgaagcgaagggggcggcttcacgcagcccaaagtcccctgcatctcttgccaccagtctgcgtcgcgttaccggcccggcgggctgttggtgctggctcccacctgctccctctttccctgccgttggccccgggatgcggagtgtggtcgcttcgcgggaccgctttgtttgggcacttgggaggggagggggtgggtaagatggaaaacccaacaggtccctcttccttcgggcctccaggaggcacgtggcggggtgggtgaccagcgctcagctcgcccgcggctgcgggcgtgtggctggaggtgttcggccagcgcatgtgtgtttgggggtatgtgggcgcgggcgtaaacaagcggagttccgcctggaaagcttgtttctcctacggtccaagcaccgatttccctctctcagtggtgccggggtgcgcctaaccccggcgggcgcgccgggacgtcccctggccagtcctgggaaacgtggggagctgggcattgaagctctggcgagaaggtcggggcggctggtacccggccgccgggtcctgcgcgtctttgttcccagcccccattacacatgcagcgcgggtcccccgccgccctcggtggcagccgcctggagtctgggaaaccctcgaggggcggggccgggcgtgcaggggcggggccggagtccccacgctgctgcgggggtggggatttgggatctgcgtcccattcccaccctggttctaccttctcctgtgcgtcgtcgtgaggcttagtttacaccgaaagcgagtgagttctgtagggtagtagcgcgcgcgcgcgcagcctgagtccggaaaccgaagggcaaagaccagctggcacctgagtaccgtatggaagagggcgttgcagctctcctggagccgcttcttggaggcgaagtggtggtcgtgttggactttct

SEQ ID NO: 198888 - DNA, 196 bp, Homo sapiens
  chr3:39093354-39093550
  hyper
atcacatggctaccggccacacagcaactaacagcaccgaggaaacacaacagcctgtttaccttcagccccgccactaacccttggccaaagggaaaggggcaggacatcctcccgctctgagccacctccggaagtgacgtcggagtgtcaacatgcaagatggcggcccatcaccggcagaacacagcagggc

SEQ ID NO: 198889 - DNA, 202 bp, Homo sapiens
  chr3:39148307-39148509
  hyper
ctccggaagcctgctcgcccagacctccatgtagcggcatctaaaggctgggaccctccccagctgcaaacgctctcctcgaggattctgcagcactctcccggccctcccgctccccactatcccgtggctggtttgcaccggtcctctaccctcggaagcccttacgaccctacgactggcaggacgcgcgccgacgggc

SEQ ID NO: 198890 - DNA, 215 bp, Homo sapiens
  chr3:39149042-39149257
  hyper
ccgctcggcacccaggtccagtcccgctgcgcctacccggaccgacccgacgccagtagcaccgactcgctctctcggcgctcgattcctgcgccttgtgacgtgaggcgttttgttcctcccactccagacactggacgctcctagcaaccggctagcagctcggtttccaaggactgtaacgccttcaaccgcccgccgcgatagagtgccca

SEQ ID NO: 198891 - DNA, 260 bp, Homo sapiens
  chr3:39850975-39851235
  hyper
gcgggccgcccctcccgccgggcgccctgcacgcgcccccgccccgcctccgcaggctcccccgctccgggcgcctctgattggctctcggccgggccagcaggtgtcggcggtggctgcggccaggctggccctggctgcctgcggcgcgggcgcctccctcgcagccgctgctgccgacgccgctgcgctcccgcctcctgtcggttcccgggttcccgctgcggctgcggttctggcagccgagcccccgcggtgct

SEQ ID NO: 198892 - DNA, 116 bp, Homo sapiens
  chr3:40350787-40350903
  hyper
tgttcctgcaccccgattttacttacattacccggggcctcgagggtgactcatagagattagccctgagcgtcgacccctcggcgccgccactgcacagcgagagaaggggagtc

SEQ ID NO: 198893 - DNA, 91 bp, Homo sapiens
  chr3:41240629-41240720
  hyper
cgcggggcgggggcgtcgggcttgggacaggggaggataccagggccaccttccccaacccaggccgcgggggcccggcctccccgatgca

SEQ ID NO: 198894 - DNA, 161 bp, Homo sapiens
  chr3:42056668-42056829
  hyper
ggaatggtcatactcggttgctctttgatcttggacctcagctttgtcacagaggttcccagcccagtgtagcctaagccagctggaaagctgagcccggctctgggggatgctgaatcggtttaaagcccttgtctcagggctgcgagtttggcaacagt

SEQ ID NO: 198895 - DNA, 51 bp, Homo sapiens
  chr3:42304893-42304944
  hyper
aggcagcattcttacctttccgggcctgctggatgtatcttgccagcaggg

SEQ ID NO: 198896 - DNA, 45 bp, Homo sapiens
  chr3:42641736-42641781
  hyper
taacagtaggacacggacataaccactcccggccaaaaagaacac

SEQ ID NO: 198897 - DNA, 382 bp, Homo sapiens
  chr3:42696177-42696559
  hyper
cggcaccatggtacgcagggccctgcctgtccccccgcttatccgcccacctgccagctctgacctcccaggcacacggcccgcgggcccgggtggaggggctggagggatcttcccccctcccccggtctcccggctccatctgctgggtcccgcgggccgggaatgcggcgctgtggcgctgctctcggtggggagggggttaaattcctgtggtgggggcgccggcgcgcgaggctgaggtcttgctaggcaccggcgaaggggggcgctcccctgcgcccggacggcgccgccctcgggctgggtaatggggggaagagggagtcggattcccgcctgggccttgggccacgtgggcgctggagccgccctgcctggg

SEQ ID NO: 198898 - DNA, 33 bp, Homo sapiens
  chr3:42845262-42845295
  hyper
ttgtaatctctaacccgccgactcggcaggaga

SEQ ID NO: 198899 - DNA, 211 bp, Homo sapiens
  chr3:42845988-42846199
  hyper
ctcccggcttctccccacccacagccgtcccagccaatcagaggccagcggccgcaaaaggacgcgtgcgtgtgcgcggcgggtggggcagtgcagagcgggtcctggattggctgggccggtgagtgctggcccactaccccggctctagcgtactggcggagacagacgtgagagctcggcgcctggggttcgcgcccgggcacttgag

SEQ ID NO: 198900 - DNA, 104 bp, Homo sapiens
  chr3:42922532-42922636
  hyper
acagccagagggcccgcgggcgctcgggaaaggggcgggtgcacttccggcccccgaagcctcagcgagggagtctccgggaggcgcggcggggagtaggcagt

SEQ ID NO: 198901 - DNA, 257 bp, Homo sapiens
  chr3:43147024-43147281
  hyper
ggcaagccccagggcgttgcccaggtccccggcccccggcccccgacccccaatccccggcccccgaccctgagggtccacccccgccccgcccacctcccgcgcctccctcagctcgcttcacacgtcacccctcagttctgcaaactctcctggatcccgaaggcgtcctagaacctccccctcaccccggggcccagcaccgcgtcgtcccctccagggggccgagggttcgacacctccacttcaagtcccag

SEQ ID NO: 198902 - DNA, 120 bp, Homo sapiens
  chr3:43147607-43147727
  hyper
cggccacaaccttggctcgcggaatcctgggaggtgtagttttgcgtacgaggacagcccgcgccgccaccagcctgcggaatgttgggagtgataatttgcgccgagaggctgagtttt

SEQ ID NO: 198903 - DNA, 214 bp, Homo sapiens
  chr3:43663334-43663548
  hyper
gtggctgcaaggggccgggctctgctgcggacagctggggggtccgaggtgccctccccgactcaccagccgccgcagcgctccacgtcttcggaggcgggtccgagagccggcgagaaccggaggccgggcgaaagagtgctcggtgcggggggcgggccaggccagtggggcgggcgccgccgagcgctgggcgtggcggacgcggcggggc

SEQ ID NO: 198904 - DNA, 359 bp, Homo sapiens
  chr3:43731959-43732318
  hyper
ggctcctgtgagtcgccctctccccctggccccccaacccgcggggaaaggctggcgggacgccacacagcacctcgattacgccatttcatttgccactgcaccatctatcggacactagctaggctcttccaggaccggacgcacctccgtccccaaggtgccacctgacagccaacaccgacggggtgatgcatgaatacagtcattattcaaattagctaaaacacctaactcattcgggtgagtctcgccagtccctctgggctgactgtcccgccccgcgcttacacccgggagcgtcgggcgggagaactagtgcatgctggctggggatggcggacgcaaagccggaggca

SEQ ID NO: 198905 - DNA, 141 bp, Homo sapiens
  chr3:43935656-43935797
  hyper
ctcacttcctcgtccggaaattgaagctaataagagcactgacttccctgggcggcggttgaaggctacctgtgtggatctgggcacagcgaagagcggagccttaacagggtgagcacgccggttgcgcgctctccagag

SEQ ID NO: 198906 - DNA, 426 bp, Homo sapiens
  chr3:44038922-44039348
  hyper
tattacaaaggtcgtttgttgttgttgtttttttaaaacaccaagtaaccccccccccccccccccacggacttatactttgtttatgagatttctccaaccttggtggtttggagaaatgaggtgggggaggggaggaccaagggcagcaagacgtccactacgaaaataagatacttactaatttaatagggccgttcctttttacataagatgctcccccaccccccaccaatttacaataggtaaactttgagcttcctcaaagtttcgctatctagcgtttatgcccgaagctttacgaataaactccctttccaggtaaacctgcccaacccttgtcctatgcccagcgaagcccaggtacgatgggtcaaggacccctggcttccacattgtctgagtcacgttccagttggaaaggcc

SEQ ID NO: 198907 - DNA, 61 bp, Homo sapiens
  chr3:44063212-44063273
  hyper
aacatgtaggaaccctttctcgtaatgccacttgcaggttacagctttcaaagcaaagcca

SEQ ID NO: 198908 - DNA, 50 bp, Homo sapiens
  chr3:44379864-44379914
  hyper
accagggtgctgacgtcagctagaggcagggcaccgcggaaggttgaatc

SEQ ID NO: 198909 - DNA, 95 bp, Homo sapiens
  chr3:44481213-44481308
  hyper
actcaaaactggttcggatgttgaaactgatgacactgcagacaccaagaggttatgaaaaagtttactactcacatgaggccttctagggaaag

SEQ ID NO: 198910 - DNA, 206 bp, Homo sapiens
  chr3:44518642-44518848
  hyper
taaaaagcaagagcacgctctcatttcgtaatatatatttatggatgtcagtgtgcagaattatgcacagatattttaaatgtcaggaggcctggagacagatttcaggattgcggctacttttacttttcttctactttcccgtgttatctaattgtctctgataaatacgctttatatgcagaattggatgaaacgagaaagcc

SEQ ID NO: 198911 - DNA, 92 bp, Homo sapiens
  chr3:44597031-44597123
  hyper
tcttgcagtaggaaactgtatgaactgtcatatttgggtcagacccaggctcagaatcgcaaacgtggagcgtgacttggaaatgcaaaaat

SEQ ID NO: 198912 - DNA, 162 bp, Homo sapiens
  chr3:44626179-44626341
  hyper
ccacccagatgctcggtctctttccgccctaaccaagccccctgcccagcttccaccacttccagggccctcctcacattggctgaagtcgccaagcccttccatccaatgatagggcaaagcccggaagggaggcagggccagagcgtcggccgaccgcgc

SEQ ID NO: 198913 - DNA, 222 bp, Homo sapiens
  chr3:44666691-44666913
  hyper
gggcctgagcttgctgggactgcacagccctcggtagcctctcccgggccctgacccccggcatggtccgtcgccagcttcgtgttggggttcgacgtcgtggcctcggctgggcaggcagccggcccgagggaagtactgaggacagcagctccgagtctgtgtgtgtttgtggaccggtgctcctgtctaacggactctgctggcgctttgagaagagct

SEQ ID NO: 198914 - DNA, 66 bp, Homo sapiens
  chr3:44690079-44690145
  hyper
aacagcacaatcctcctaagcgcttctgccccatccctggtctggggcgacattggacacccatcg

SEQ ID NO: 198915 - DNA, 255 bp, Homo sapiens
  chr3:44690175-44690430
  hyper
ggccggcttggcgacttggggagccggaagcccatcccgaggcacttcctgtccggtcattgttctcgtgccggtagaagctgaagtaccggtcagccagcctcctgctgcagagccagtgaactcaggtcgggcttctcagctgcgcacagtgagtggggtcggagggggtgggcacgaacgtcgagggagaaaaaggggctctcccaggggccatggccctaggagcggcccctgcgtcctttccccggggac

SEQ ID NO: 198916 - DNA, 52 bp, Homo sapiens
  chr3:44690489-44690541
  hyper
gctgctgcccacctggggcctggtccgggagaggatgcacacggaccggcca

SEQ ID NO: 198917 - DNA, 540 bp, Homo sapiens
  chr3:44803071-44803611
  hyper
gatacctggttccgcttgctcatggtagctctgggtaaagacagaagacaggttccgcgacggattcgcgacgatacagaggcgcttagctgtgacgtcactgggccacgcccccgatgcgtaggccgggcaacatggcggcctccatgcgggcgtcaacgtccgatccaagcgccaaattcaaatttgcggccatcttgagcgggcggaattcagtcgcgcgcggtgcagtcgggaggtggaggcaccggctgcattgttttcgggatcgaggggtgagggcgctatggcacccggctgcaaaagtaagtctgggcccccggcttcgttaccctatttttgcccccaaatacagctgtgaaaggatggcagcctcggaccgcccgcaaggttcttgctaggcatgaactgcaggagctgagtgaccggcggggacgtttgggaatcccgctctgtcgctcaaagacaatacgctagccgaaaagctcatcccttccttcagtgtcctgtgcgcatgccaggagtctggcgcagttctag

SEQ ID NO: 198918 - DNA, 180 bp, Homo sapiens
  chr3:45187116-45187296
  hyper
tttttgcaccaacgctcttcaactttaggagagggggaatgcagcgtgcggacgggaaaaaggggatctagtgggaaatgcggacgtgaaagcactttttttgcaccttctctctggaccaggcgaggaggtagagggcgagcctggagaggaaagatctcttcccacaccctgcctggg

SEQ ID NO: 198919 - DNA, 208 bp, Homo sapiens
  chr3:47018209-47018417
  hyper
tagttgcctccatcttgcccgcgtacgcccctccttttctcccgtcttgcatcgcgcaggcctaaggagagtggataaatgtctcgcggccaatccaaggacgagaatgagagactgggaggtcctgaaagccaatcaatgcggggttattatgggcgagccctccccgccttgccccgccccgccccgccccgcccttattcttccg

SEQ ID NO: 198920 - DNA, 278 bp, Homo sapiens
  chr3:47020746-47021024
  hyper
aaaagttgcgtttcggtcttcccataaagcgacagagtagcacctggcatttgataagcgctacaaggggtcgtcatggtggtggtggagattattgttgaaggaccctcgccacctccacgcggcccgccgccccttccctgaatggcggcaaatgcagtcaggcgagcagcgtcctgggcggattcagaccctggggaagtctggaattcctcaccccgaccctcgtcccggaggctcaggctggcccttccaatggcactggtggggcagggcag

SEQ ID NO: 198921 - DNA, 196 bp, Homo sapiens
  chr3:47205677-47205873
  hyper
gacacacacgggccaccgatctgccgccagtcggcgtgccttgcagctgttggcttgaccccaggccgggacgggcagagcggaacactgcccggcgggtccaggccgaccgtgcctgtggctctccggaacaataaacccccggccccagtgatgtgggccagaccggacctggagaggcggcaccgcgacccct

SEQ ID NO: 198922 - DNA, 79 bp, Homo sapiens
  chr3:47324508-47324587
  hyper
tgagttgcctagtcgcggctacggcgtcatggaggagatccggcggcagggcaagctgtgcgacgtgaccctcaaggta

SEQ ID NO: 198923 - DNA, 501 bp, Homo sapiens
  chr3:47890801-47891302
  hyper
gcgtgctgatggccggcctctaccccaacctcatccaggtgctgcctctgggagggaatggagttcaccaggtcccagcctccttccctgtctgcagctccttgctcagccccacccgtcttttcctccatccctgcaggtgaggcagggcaaggtcacccggcaggggaagttcaagcccaacagcgtcacatataggaccaaatcaggcaacatcctgctgcacaagtcgaccattaacaggtgagggcatgcaggcctggatggggcagctgggatggtccaaaagggtggcctcaccagccctgtgttccctagggaggccacacggttacggagccgatggctgacgtatttcatggcagtcaagtccaatggcagcgtcttcgtccgggactcctctcaggtgcacccgctagctgtgctgctgctgaccgacggggacgtgcacatccgtggtgggtgcctgcaggcctcccgcccaccccgctctgcagctgc

SEQ ID NO: 198924 - DNA, 87 bp, Homo sapiens
  chr3:48130785-48130872
  hyper
aacttgggaggggcgcggggcggggcctaggtcgcgggccatctgggctctggaaggaacccttagaggagcgggaggacgccacag

SEQ ID NO: 198925 - DNA, 199 bp, Homo sapiens
  chr3:48470350-48470549
  hyper
ccaacccccagaccccgaggcgaggaccccatcactggccctgggagggcggggaaggggccggccggtcccccgcggcgacggcgaggagggggcgcggaggagcagctccacctcctcagtctcccaatcgcgttccaggcggagtcgccagagtttcccttcgcgcggagaagtgtggtcccaactctcaaaacca

SEQ ID NO: 198926 - DNA, 257 bp, Homo sapiens
  chr3:48700956-48701213
  hyper
caggctgcgagtcccgagtgctctgggatgccacgtggagcccggcgttgccccatggctgcgggccccgcttcttcgggtccccgcccctcgtccgtcacgaccgcatgccttaaccccttgaagggactgacacagaaactcagtcctccccccaccctcggtgcattccagctctccctgcgtaactcctggcacgcgccggtctcgccaggccaatgggtggacctggcgcaacagacgtcacgagaggagcg

SEQ ID NO: 198927 - DNA, 212 bp, Homo sapiens
  chr3:48701259-48701471
  hyper
tctattggcacaatgggaggccccgcccctcacggcggactcatcgcatgggggagggggctccgcgggttgccggctaaccgtgagagagtccgggaggtacactatacggaccggcctccaaaggcggaatcgataacgagctgcagcgccgggtgcagaggacgcgggcatcccgaagcccaggaagaggtcagggccgggaccccaga

SEQ ID NO: 198928 - DNA, 111 bp, Homo sapiens
  chr3:48701576-48701687
  hyper
caccatcaaccaatcagtcggcgcatcctttcgccccttgactgctccgcttccgggaggcggggcttctgcgggttccacctcccgagcgccccttgtggctaccaaggt

SEQ ID NO: 198929 - DNA, 47 bp, Homo sapiens
  chr3:48885300-48885347
  hyper
tggttgtgacgcacgccaccgcgggcgtgcgcgtccccgcttagcac

SEQ ID NO: 198930 - DNA, 219 bp, Homo sapiens
  chr3:49027049-49027268
  hyper
atgccccctctgacggcctatgaaaccttgcacatcaggcagcttcttcctaaggcctgcctgactccggcgagacttcccgggagatccggaccgaccgcggaaccgagctccaagaatgcctgcgaggaggctgtgggtcctaccctatcgccgcttacgcagtcccagcctccgcggcgcccccaaatgccgcactgttgagtcatctcagcgctg

SEQ ID NO: 198931 - DNA, 360 bp, Homo sapiens
  chr3:49027820-49028180
  hyper
accggtgcgtccgctgtgcaagccccgcggcatctgctcgcgcgcctacttcctggtgctgatggtgttcgtgcacctgtacctgggtaacgtgctggcgctgctgctcttcgtgcactacagcaacggcgacgaaagcagcgatcccgggccccaacaccgtgcccagggccccgggcccgagcccaccttaggtcccctcacccggctggagggcatcaaggtgaggacctccctgccccgccgcgctccaggccctgcacggctgagcccgagaggaccggcgctcagcccgggtccccacgctgcccccggcgctgctctgcgtcggtcccgcgcgctcccactcactcgcctgct

SEQ ID NO: 198932 - DNA, 207 bp, Homo sapiens
  chr3:49044449-49044656
  hyper
ccaccccgccagccgcgatacggcgcagttcctatattcatgttatttattgtgtactgactccatctgccccgtcaaataaaaaaccacaaggttcgagccgccgggcccgacaaactccgggtcggcgaaacagagtccgcgataggtgcagcgggctggcagctgggagcgccccgcaagcgtcacgtgagggggcgaggggcg

SEQ ID NO: 198933 - DNA, 68 bp, Homo sapiens
  chr3:49066685-49066753
  hyper
ttgtaggtgaggccgtctccgcagttgaagagctgctgtgctgtgagtccgtcgtctggcacgtagga

SEQ ID NO: 198934 - DNA, 188 bp, Homo sapiens
  chr3:49158289-49158477
  hyper
gtcccggcgccgccgccaccgccttagcggcttgttttgtttcgacttctagctaaggccgagggaggcggagcgccaagctggtgacgcacttccggcgggaatgggctcggagcgacccgcagctccggggcgggcccgagcggaaggaggcggtgctcgggtggcttagcggtgcatgggttctg

SEQ ID NO: 198935 - DNA, 187 bp, Homo sapiens
  chr3:49171171-49171358
  hyper
ggcctgccgggatcgcaggagcctggggttggaatgtgcgcggcggcgtggagggggagagaaggaggaaagtgggtgggggatatggggcgcgccccacccagggccctgggaacgggaagctgggggaaacatggggtcctccggtctttagggctgggtctggcctgccgcctccacagtcccg

SEQ ID NO: 198936 - DNA, 82 bp, Homo sapiens
  chr3:49449357-49449439
  hyper
acgagagaaccgacggaggaccgcgggcggcgggagggtagcgcgagagagcgagggcgggcggcggcgggagggcggggaa

SEQ ID NO: 198937 - DNA, 203 bp, Homo sapiens
  chr3:49449454-49449657
  hyper
cgagtgcccagcgggctcgagccggcacaggtcgcggccccgcgcacgcgcgcgcactcacagctcatccactattgctcaggagcccgtccacgccctaaaagcaaaacccttaaccaatcattgcagccgcgtggggcatcacgggaactccggggctataaaagacctggttgctattttgtactcccggagtcactcat

SEQ ID NO: 198938 - DNA, 122 bp, Homo sapiens
  chr3:49507371-49507493
  hyper
gttctgaaggctccgagtgaccgggaccgaccgccggggtgtgtcccgggacggacttccctggccgtgggggcgaggcttccataatggggcgtgacttttagggcgggggagtggctagc

SEQ ID NO: 198939 - DNA, 149 bp, Homo sapiens
  chr3:49711249-49711398
  hyper
acgctcacgctcacgctcacgctcacaggctcccggctccacattcctcgcagggctccaatccggacccgcccgccttgcccttcatcctcaaagactcattggtcccattcccctcgggccccgcccttcgcgtgcttgggccatgc

SEQ ID NO: 198940 - DNA, 39 bp, Homo sapiens
  chr3:50126252-50126291
  hyper
cgaccacatttcccggcagccctcgcacagccaggccgc

SEQ ID NO: 198941 - DNA, 114 bp, Homo sapiens
  chr3:50192966-50193080
  hyper
cgggcgcccaggccccgccgctgcggaagaggtgagtgcagcgggaaccgggagggagcgggcaggcggccgggccaccccgcgacccctctgggacccgcggcactgcaactc

SEQ ID NO: 198942 - DNA, 92 bp, Homo sapiens
  chr3:50243562-50243654
  hyper
ttcgattggccacagcaaatgcgtgcgtttgtttacacccaggcagggggaggccaggggagggacctgcggggacccgcccttttcccccc

SEQ ID NO: 198943 - DNA, 365 bp, Homo sapiens
  chr3:50374290-50374655
  hyper
caaactgctcggtcggctttagtcatagctggataatgcccggctcaggtctaccacaagccatacagctgctttttccgtgttcaacctgtctgtgacagaaaccaagggggccccggcacccagcatctaggcggtggaatcggggtcttacgcacggttccgcgggcaggtccccggccaggacccgcggggagccacgtagccaggagggtggggctgcccaccgacccaggacgcggcaacggaccggggagggcggagctccagcgaccgcttcccctcccgcccgccggcaccccctggctcccacctggtcccggcgcggcctgcgagctagcgaggttcgcgcggtgaagtactgc

SEQ ID NO: 198944 - DNA, 124 bp, Homo sapiens
  chr3:50374793-50374917
  hyper
caaccaccgccccggtcgcgtgcgtgcgtgtacgcgtgtcagtgtgcgcgtgcgcccgggccagagccgcgccgcaaccgttaagactgaaacgtagatcgccgggatctagctcttgtctcat

SEQ ID NO: 198945 - DNA, 49 bp, Homo sapiens
  chr3:50374946-50374995
  hyper
cacgcttcgcccccaggaatgacctcatcgctccggagctccactcaca

SEQ ID NO: 198946 - DNA, 61 bp, Homo sapiens
  chr3:50377912-50377973
  hyper
acttgacccgcggcgactgcgctgccccttggctgccccttccgctctcgtaggcgcgcgg

SEQ ID NO: 198947 - DNA, 165 bp, Homo sapiens
  chr3:50378002-50378167
  hyper
tttgcgcacgacgccccagatgaagtcgccacagaggtcgcaccacgtgtgcgtggcgggccccgcgggctggaagcggtggccacggccagggaccagctgccgtgtggggttgcacgcggtgccccgcgcgatgcgcagcgcgttggcacgctccagccgggt

SEQ ID NO: 198948 - DNA, 219 bp, Homo sapiens
  chr3:50387962-50388181
  hyper
gaacgtccctcttcccgcccagtcccgcgagcccgggtggcacctgataggtgatcttgggtcccagcgtggggtggaactcgctgaagaatatgcattcgatgcggcagccgctgcccatggcaataaccgggcccaggcccgtagctcctcgttcctcgcgcagaggcgtccccacctcctgtgaacacttgtcagagacagcctcgaggcctgtgt

SEQ ID NO: 198949 - DNA, 59 bp, Homo sapiens
  chr3:50654360-50654419
  hyper
tgtccctggaaaccgaggaagtaaccgccccctcgggaagccacgcctcctattttgtt

SEQ ID NO: 198950 - DNA, 195 bp, Homo sapiens
  chr3:52001297-52001492
  hyper
ccaaacttcgcggcccgccgtgccccgcccggcccgcgccctacctcgctggggctgtcctgcggcggcggcggcggcggcacggcggctgggccgctcagtcccacattgtccccgggagaggcggccgctcacaactgcgagtgacatcagctgcgaacaatgaggggtttgacaggcgcggagcccggccgg

SEQ ID NO: 198951 - DNA, 103 bp, Homo sapiens
  chr3:52273293-52273396
  hyper
gcgcacgccagcgcgttcctctgtggcaggagaggggggcctgcgtgtgaccgagcgtgcgtgggaggacgcgcgtgtgtgtctgtgcgccctgatcacggtg

SEQ ID NO: 198952 - DNA, 131 bp, Homo sapiens
  chr3:52280023-52280154
  hyper
gcacgaggacgcacgctaccctggaatgcaggctacgccgagtgagtgcccctccccgacccccagctcaggcccgggcctgaacccgcttcgggtcctgcgcccgcctagaaagcgggaggagctgagtg

SEQ ID NO: 198953 - DNA, 271 bp, Homo sapiens
  chr3:53164441-53164712
  hyper
aggaaatgccgccgccactccgtttagtcgcgataagatggcgtcacggcgcgcctcgctgtctgattgatggccttgagagaggggggcggggcacgagaagttctggtcctttaagtgggcctgtctcgggccgtctgttatggcgcctggctctttctatttcggtaggttttgcgctgtctgtcgcttgtgcgctgtctgtccctctcttccccgtataaacgaaatagtgtggcgagtactaagagataccgttaaagaatccaaa

SEQ ID NO: 198954 - DNA, 226 bp, Homo sapiens
  chr3:53195774-53196000
  hyper
gtgttctccccctgcgcgcctctccgagacccgatccttctgtccctcgccacccgatccgtccgtcccttgccctccgcgtgctccatcgccccacccccacccacacccctacccccgcccgccgccccctcgatcccgtcctcccggagccgcgcccccggcccacgctcgccgccccctgccagtccagccgcctctccgctctaccgcggggcccaggcca

SEQ ID NO: 198955 - DNA, 271 bp, Homo sapiens
  chr3:53381602-53381873
  hyper
atcgaggcaaaattcccccatctgcgtcagtcccctcaacttccgcctctacgcgggcctcgcggcagggcggtacgtcagccattctggtccgccgcgcgcacgctccgggcgccgggttccggcgttgtcagggtccgcggccctacgatgtgggcggtgtccaaggctgcgtagtggagcttgcaggctggagctccggcgcttcctttccctgagctaaaacgactgggtcctgggatctggcctctagctcgcctgccgagctctt

SEQ ID NO: 198956 - DNA, 48 bp, Homo sapiens
  chr3:53879618-53879666
  hyper
gtccctgggccacccacccacgaattacgggggcgtgggtggaggctc

SEQ ID NO: 198957 - DNA, 247 bp, Homo sapiens
  chr3:53879786-53880033
  hyper
cttccgctttgggagccccaggtgttgctgtccgaactcacttggtggaaacagacatttaccagaaagcctggggtcgggcagcgggcactcctaccgctctaaccccgcgtagctgaaagaattcgctccctcaaaggagtcagtgagcttcggcagtctgcgttccacccgtttcgcttcgcgcggcggggcgattgtgtaaagcgggcccgggtctcggcgtccagcccggccccaaacctcc

SEQ ID NO: 198958 - DNA, 273 bp, Homo sapiens
  chr3:53925898-53926171
  hyper
gcgtcacaggccgcgattagacaaaatgctgacgaggacgaaggtgggcagagcccattggctgctgaaagagacgcgcccccgacgggcgtttttgcatcgtcacatctgcgacttctggttaggcggaggcggccgagctgacaaccggatatgacgttaaggactgccctgtagtgcccgcggttgccagtcctctatccgacttgatcgtgcagagttggttcgcaccgcccagtgaggggaagctgttttctcgtcgattgataggct

SEQ ID NO: 198959 - DNA, 201 bp, Homo sapiens
  chr3:54156155-54156356
  hyper
gccgcccgcaaagtgcggagcgccgcgccctgccctcggcttccctcccgcgcccccaacccccaccctggctagggtcgcccggcccggggccagccccagagtcgcgcccgcggtggcggactgcggagttgtaaagaactcagcggccgcagtagcccgggtggggcagggcgcgctccgccgcggccaaggacactg

SEQ ID NO: 198960 - DNA, 239 bp, Homo sapiens
  chr3:54157074-54157313
  hyper
gaggctcacctcaagtgacggcaccaactttggagcctggttaccgaatccaacttccatgggccgctgaatttcccccctctttgctctactgccgccccacttctttttttgggggggggatgggtggatttcttctgactgctatttgccaggtgatgcccagtttggggggtcgagtcctcgggcagtggttcgaatgaaactcagtggtctttttagagagcctgggagacttt

SEQ ID NO: 198961 - DNA, 346 bp, Homo sapiens
  chr3:55521390-55521736
  hyper
tccaaccccaaatgtgggcgtgattgtgcaaaagaccttacgacaaataataataaaaagaaattcttcacaagagggtgaaaaaaatgtaccactactcaactgtggcccggggcgggggaaggggggcgatctgtgcgcccaggtgcccccagttcattcacaccacagattctgcaaactcttggcggctcacgcctcctgatctccagctcctcctctctgggtctgtagccgaaacgtctgcttccagacgctgatcctgcagccgcgagttagtgtggacgtctctgtacacacacagacacacaccccaacacacacacccccgctgcagctttggggc

SEQ ID NO: 198962 - DNA, 43 bp, Homo sapiens
  chr3:55522552-55522595
  hyper
ttgctatgcgcatgcgtggtgaggccggcctatgacaaactct

SEQ ID NO: 198963 - DNA, 379 bp, Homo sapiens
  chr3:56501326-56501705
  hyper
atcacagagggaaccgacaattcaccgctcggggagtaaattgcctttcatacagcaaaggcaggtagccgcctaaaatcgatccactcctaaaagagcggaccctccctctctggcaaggagaacagagacccttaagtacaaaataaataaggcagggccgaacggagagtttacgagcgctattttattaccccgaaccaaagcagctcttaatcttcactgtcctaagacgatctttcaaaggctcgtacggtattttttttaattaggtacaccttcgtaagtatccctttttttgtataattaggagatggggaggaggagagaagggatgccgttcagttcaatttcacatcgtattccttttcatacacca

SEQ ID NO: 198964 - DNA, 869 bp, Homo sapiens
  chr3:57112603-57113472
  hyper
accttaaccccttggcgtcctccaccctggtgtcctatctcgggattttctggctgctcggtttacaagatgcagccgccgggacaagggcctcaggcaggctgggacggcgcccgccgcccggagcgccctgagcccggctcccccgccgcgaagtgacccgcggccctgtgagccgccaccagcagcgcccgacgcgacgctgacctgcgggtgccccgcggggctggagaagaaagttgagcgaaaggggcgcgtcccaggacaggtggcacctccctccccggaagtggctccgggaattttcgctcaaggggctacccggggaacagagtcagggtccccagcaggagcgacggctagtcgaggctggcggtggcactgcccacctgcgctgcgcccagtgcgcccccgtgcgctgggcataccccagaccagggagcgctcagggcccgccggggacgccgagacctagcagggtaactcggaggtgggagtgggggtccagctcggggaccagggcaaaggagggactagaccggaagacggtctcactccgggagacctagcgggggtgtcccgccaaaggggtgtctagccggggagggtctagcgcgggagcgggtttcccgactgcttcccgcactcacctcgacccccgcgctggttcggcctctccaggctggaaaactcaccgcggcggcggcggctgcggcggcggctcccctgggctgggcggggccgggggcggggaggccgggccggccacgtgggcgggaggcgggccggggacccccgcgggcgccggagccgggcgacgcaggacttggacgtggccacgcccggccaccgctcgacaccccagctcc

SEQ ID NO: 198965 - DNA, 179 bp, Homo sapiens
  chr3:57198370-57198549
  hyper
gaatggcaatcacccgcgcccatcgcccagacagtgtcaaaggagcgctcggttccacgaagacggctcaatgcacacggcgaaagtctgggcacctctccagtctcgtctcaggcacctcacccagatgacacccacgcggccctttggcggaaaaatatccgcaactcgaagcaggg

SEQ ID NO: 198966 - DNA, 538 bp, Homo sapiens
  chr3:57198581-57199119
  hyper
acgaagggctgaaccgggaggcgaagtttctcaggaggtcccggagtcagaggaggggtaggagtggggtgacggccccaggcgaggaggaacaaagctactagaagagcggggcgcatccctccccggtgctccaagtcccctctccggccgcccgggccttagcagggttgtggactgaaagtccgggagaatacccccttccctctccaaagcgcaacccggtccgggtggctcgggggatcccagcccgggacacgcagccctgggacgaaggaggtcccgggccaagaacaaagggtggggcgcccggcccagccccgccgcccctcacgcccgccctctgaatgggaccccggccggcggccgcacctcattagcaacacaaagccggggtcgggcagccgctttcatctcggccagggccggaggacacgcgtccggggagggaaaccaggaggatgcgcgggaggagtgagacccaggccggccgcggaccccgcgaagagcagacaggttggcgcgggctcgcctcccc

SEQ ID NO: 198967 - DNA, 199 bp, Homo sapiens
  chr3:57261348-57261547
  hyper
gggattaagactggacgcttcgagcggagttgggaatgttatcatctgaggaaactaaaaggcgccagcagtaggactttctccaaggtctctgacaaaatatgttgcgggaaaagtcaacccgccccaaattcccccgtgtggccctaactcgaggctctggctcctcgcgccggcaagctgaggaagagacggtccc

SEQ ID NO: 198968 - DNA, 622 bp, Homo sapiens
  chr3:57994558-57995180
  hyper
gagagcatcaagctcgtgtccatcggtgagttctctggccgggcccaggcgcccactgtggtgccgacccgcccccgcgcgtgcacccctgcggagggcgaggatttcccgcagcgcgcccccacctcggagataagggggagtcgtccccaggggtgggttatagggggcctagaccccctccccggtgtcttcccctgggatgggacctgttgtgatcgctccccgccatccgccccagcagtgcacctttggctggctaagggttgagggtttgggctggggtcacaggaggagaggtggagttgttgcatttctctacacctggggcgcccctatgggagctaggggactagaaaccctcgttcgctgtccccgggggcgggccctagggtcagatgctccgcggagtgctctccctgctgcgcccaggttggtgctctcagaggcagctgaatgggcgttggctcggaggccgggccgtgagacctgaggaggaaccgttctctgcgcctggggcctccctgcccaggtggagacagagacctggtaccttcccctgccgtcgctggaatgggtgtgggccccgaggttgcaagggtaggcgcgggtgtgtgtcctc

SEQ ID NO: 198969 - DNA, 48 bp, Homo sapiens
  chr3:58223132-58223180
  hyper
gtgtgtggctctgcgggctcagaggccctccccgcgccccgccaccgt

SEQ ID NO: 198970 - DNA, 179 bp, Homo sapiens
  chr3:58224037-58224216
  hyper
aaggactgcagctcgcccacccagatagcatcttgctccgtgtcacgcgccgcctccgcgccgtccccaagatctcgctccgctactcccctcccccagcagcctttcagcttccctttccccagcctgccccggctcccgtgcccttgcgccccttccgtgtcgaaacacttgaatca

SEQ ID NO: 198971 - DNA, 319 bp, Homo sapiens
  chr3:61237049-61237368
  hyper
cccactgggtggccgcctgagggacccgggaacagagggcaaaaagtcctgtgaccggacagagcagagcggggactgcaattcccagaagaccccacggtaggggcgggacccaagatggccgcttgtctggggacaggagcggaggccaatacgcgcagagcatgcgcctacgccgggccaattgaaagccatagtgacagtaaccctgattcaggggcgggaaacactgaccacagaagacaagttgaggtgagaatccccttacaagggggtttggggcataaatcgcacaatctttggctttttctaactagaa

SEQ ID NO: 198972 - DNA, 303 bp, Homo sapiens
  chr3:61548614-61548917
  hyper
gcgtcctccctctctctgggggctggggcgcgggcagcacttcggtgccggcgtgaggcagcctccttgggcgcagtgagacggcagggcgcaggcggtttcggagagatccgtgtctcccctagccccggcccgtggccctttccctccgctgctctgctcgattggattgcctgggtctggacgcggggagggggcgggggcggtttcggcggccggggcggtttcggcggccgggttgctgttcgcgccggggctgatttttttcctgtctcgcgcgccctgcctaccttcatctttgcc

SEQ ID NO: 198973 - DNA, 90 bp, Homo sapiens
  chr3:61656126-61656216
  hyper
taaattatgtcacagcgcattgcagacttgtaatctgttttcaaaatggtattgtctgcgcccttattgatcagcgcgacatcttttact

SEQ ID NO: 198974 - DNA, 44 bp, Homo sapiens
  chr3:62254650-62254694
  hyper
tatcaacagaattgtggcatagattgcagttatactttacaact

SEQ ID NO: 198975 - DNA, 31 bp, Homo sapiens
  chr3:62254724-62254755
  hyper
tattggccaacagagaacagtgaggaatatg

SEQ ID NO: 198976 - DNA, 44 bp, Homo sapiens
  chr3:62358624-62358668
  hyper
ggaaaactgcaatttaataagcacctagtcgggcccgggtcacc

SEQ ID NO: 198977 - DNA, 269 bp, Homo sapiens
  chr3:62365154-62365423
  hyper
accggaaggggtacaggggtgagggaaaccgatttcagacttcccccaacttctgtaagtttgccaggcaatgtaggtctgagttagatggtgcattgaataagaacctgaagcgttgtgatcgctttgcaagcgaatctctcagctctgttttgtttgtttgttttgtttggctttgataagaacttctcgtgtgtaccggcaaacggaaaagttctctcttgcccgcatctctggagctctcagtcgaatcccatcttttctttacc

SEQ ID NO: 198978 - DNA, 288 bp, Homo sapiens
  chr3:62859603-62859891
  hyper
aaggaagcagtgcccgaggacactttggcgacgctagtcggtgatcagctgacccgggcagggagaggagggtgcccttcgcagagtcacgggaagcttcgccttctgggcttgctttctcccgcctgcccctgcggttgctctctgccccagcgagcggagcgctgctccaagacgctcttctccctccacctcggcgcccccacctgccgttgcccccgcccgccgaacgcacgcccaggagggcgggcccggagttgagcgcagccgcccgccgctggagagcgc

SEQ ID NO: 198979 - DNA, 205 bp, Homo sapiens
  chr3:62859964-62860169
  hyper
acaaagcgggacctgcctgcctcgctcaccaacgctcccgggctgggggggctcgagcaagcggcgctgcgctccgcggccctcgccggtcccagtcagctccaggagcgctccaggctgggttgggctgggcctgggcgagcccggccgctgggagggggcctcgtagccctttccccagggcgcggtctccacctctcctgct

SEQ ID NO: 198980 - DNA, 198 bp, Homo sapiens
  chr3:62861325-62861523
  hyper
tgggggagggagaaatccagaaaccagccgagcgggctgtttggagacgctaaatcgagaggtcttacttaggaggaggaagtccgtgagatcttatacgggaaagaaagggtccatctcctttccccaggcttctttacacctggggcgtggggggcgtgggggctgggcagcgtgtttgtcccacctgtgtaaact

SEQ ID NO: 198981 - DNA, 77 bp, Homo sapiens
  chr3:63264062-63264139
  hyper
cgaggccccctgccctcgccgggctgctccagggtgtcgctcctctggctgctcccgaaggggcttctggccctgag

SEQ ID NO: 198982 - DNA, 85 bp, Homo sapiens
  chr3:63264169-63264254
  hyper
aaaagaactggtggatgagaagagcgagcgagggcgagctatggaccctgtgagtcaggtgagacagaactgggcagggcggctg

SEQ ID NO: 198983 - DNA, 152 bp, Homo sapiens
  chr3:63264840-63264992
  hyper
aagctcagaaagttggtcagaactgagacagctcctctgcgggactgggatgctggaagcgcgtgttcaactgctccgcgggagcttcagggagggaaagatgctgcgaagctattacagactgttataaacggcggcgggtagagagcaga

SEQ ID NO: 198984 - DNA, 78 bp, Homo sapiens
  chr3:64430905-64430983
  hyper
cacaggtgcgcagccgcggggcgcagtggggctgcgcgcgggcgctcgcggccggctggaggtgcccggcgatcggcc

SEQ ID NO: 198985 - DNA, 354 bp, Homo sapiens
  chr3:64671301-64671655
  hyper
cacatgcgggggtcgacagagagtcggggaaccaacgtggattccctgctaaatgctatttggcagcgcaagaaggcggcctccccgccctgcctcagtccctagggaaacgtgcgccgcaggctccctctctccactccctggaacccgtgagtagtagaaaccccagaggaaccgaaatcacgtccggacagcctctccaggctgtctcccactatcccgtttctcccggccaccccgccagtagggtgcagagttggactgcgctgcacccccactctcggttccaccccaattcaaagcgtccggggtaggctccgccttctcccccgcccccagagccctcggcccacc

SEQ ID NO: 198986 - DNA, 306 bp, Homo sapiens
  chr3:64671732-64672038
  hyper
tgagagaaagcggggactctagattacgcaccgccctccacaacacacactgaaggaactcccagtgccttgggcaggggatcctcagccccacatccccgatgcaaggcgcaccaataaggagtctggtccgccctgcgctcagcggctccgctcccgggtggccaagtttgctgcagggaaccgcaactccagtaactttctccgagtttggaaactgacttccaggccgcctcgcagcgttgggcaacgcgccgctgaaccgagtccaaactccagaaagctctgaaacatccagaagcccct

SEQ ID NO: 198987 - DNA, 211 bp, Homo sapiens
  chr3:64672413-64672624
  hyper
tggcggtgagattaaatagaaactgctggccgaaggcagagaggcggtaatgcgcctgggaggaggtagaggaggaagaggaggaggcgaaggcaggccaggggtcagtggcagagttaatgctccgtcgcgttcttttgaagtggacgttcgtgggaaagggttctccgagagcgttcactcggatgggagacacgatttcgtattcgct

SEQ ID NO: 198988 - DNA, 519 bp, Homo sapiens
  chr3:64673419-64673938
  hyper
ggagagcgcgcggagcccggcgcccgccgccaacttttgactttaggagtcgctgaggtctcgctgcgagggtcccgtctgcgctcggctgagcaacgccgccgcctgccgagagctgagccgctcgggccgcaggaggagccggaggagcaggaggaggaggaggactggggctcggctgcttggccgcataatgcccagcgagcgggcaggagaaggcgaggaacttgcgctccgaggcgcgccgggcgccctgtgctggccgggatagctgagcggcttcttgaatggggggctgggggggcggaggcgggggggccgcgggtccacagcctctcaaatgcccccggtgcacgcctctaagaggaggagaggggaggagaaagcgagacgaacggggaccgcctccttccagaccatgtcccctcctcggccggcccgtgcgggactcgcagccggaggccctgccggctgcaagaggcggaggccagaggcgtcaccagcgccggggcagctgtt

SEQ ID NO: 198989 - DNA, 187 bp, Homo sapiens
  chr3:66023466-66023653
  hyper
ccagccccctcttcgaaacgcaggtgggcaaacaaccctcaacctcgcaacaactttgtgtatttcaccgccaccacagggcgcacggcctcaacttctcttcactgcgctccgaggagggaagcaggaaatcgagaataaggggcagcccacagaccaccctccttttctcggggcgccccccaaa

SEQ ID NO: 198990 - DNA, 1113 bp, Homo sapiens
  chr3:66024122-66025235
  hyper
cgctcccctgcacacgctcgcgcactcaagccatcataaaacaaactttctgggcttccccgcgagccccgcacaggcgcccgcgagctttgtttgcattccggtgcctctgggtccacgttccggcgcccgcccgtgctctcccggaccagagtccactctgcgccgctcgggttatttttttttccttccttcctttctctcttgccttttacaaatgcggtgcctcctctttgcctcccgcccggctcgcctctcctcgctggcaggctgttactgagggtgagggaagcccttccagccagttgccgggagccctgaagacgcggtggcggggcggcggggagcagggcgggaggtaagtgctcgcggcccctttaagcagatacaaaggctcggcttgttttgttacagttcattctattccgcgccgcggagcgcagcggccggcgacaggagacgcgcgcgcatgcgccccgcggccgccagccggccggcccacccctcccctcctccccgaagggagagattccaacgtgcttcccgatgggtcctaaaaccgacctgccgggagaaggcaactcccccccaacccttcctgaacccctatcctctctccttttctttcagtgccctggactccgcggattcctttggggctggagggccgcacacgtgttttactccaactgtttgcaacttttgaaacccgggcaatctggctttggcatttgaaaaccatttcaaacaggtgggggttggggaggctgccacactcaccctggcgctcacactcacgcacacgcgcacgcactcgcgccggccctaagcctcctaaccgccctcggccagtggctggccaggctgtcggtcacccagcccggctggttcgccgccccccttgccgcaggtcccactgaaacccccgagacccgccccggggcgctcgccgcctccctgcctgccctgcgcttgcgggttcgggtcctggcgcggggtctgccagggtctctgcgacccgggggagggggacggtgggatcctccggttccccaactgggatccctgtgcgggtcacacgcgctcttacacacacccgcatccttaaacttt

SEQ ID NO: 198991 - DNA, 1604 bp, Homo sapiens
  chr3:66550298-66551902
  hyper
tcactcacccccagatggcccgcacgacgcgtgctggctaacccccaaatctctacgacccacgctcgctcgtctccagaccccacgaggcacgctcttcttctccaggctctctcgcacgcctactcccccggacctccacgcagaatctcccttccgccactccaacctgacagtcttccaacacgcacaagcacgcacaactccacacacacaacccagtccgcaccccctccctgagtacgaacccccgccgctccatccccaagtgacagagccccggggcgcagagagggcggaaagggcggcactcacaggctccgcgtccaggagggcaggtccccgggcaacgcagccagcccgcgcccaccgcagtccagcgagtccccagcgcaagtgcaggcggccgcgcagggcgcccgcgggccggccgcggcggtcaccggctccagccgaagcaaaagcagccagagaaggagaaggcaaggcgagcggcgcggggccccgagccctccccggaccggccgcgccatcttgtctggagcgcgctgcgaactccgggcgcggggactgtgaggacccgaacggccgcagacgcgggcgggcccgcggggcgctccgctcggctctagactccgcaccggggcatggcccccgccccaagttctctctgcggccgcggctccggcactcagcgtgcccccggtgcccgggccgctccggagcacccggcgggggccgcaaaccccgcgcccatccgggccggccggcccgcccgcgctagctgcgaactccgccgattcgggcaaggtgtacccagcctgcgctcttcgtccgcccggggcacgccgagtgccgctaccgacaccggccgagggcagtgctgccgctgcgcctggaagacaggcgttcagccccgcagcccgagctcggtgccggcaggcatcttcctctgggctcggagcgcaaagccgtagacctcgggctggacggcgcggccggccccgcgctgggaggccccagtgcgcctcgctgtccccacgccgcggccagagagcgcgcgcgcgcgcgcagcctcgggttccgcacggctcctccgcgcagcaagagtcccgccgacctcgcagccgaacaatcagccgcttgctgttcgcctccccgcggcccagccccggccggtcccccaagccccgcccccggccgctcgcccgcacacaccccctaggctccgcgctccgcggccgcctgctggcccacgttggatgctttgcaacagcgccccgccacgcctccccgcctgctgctcattggctgccggagtccaccgtggccagcctcgagggccattggagcgctcgctgtgatcccgcccctcccgcttcaccggctaccccgcccccacactcttttcccacccaaggtgtgaagggcgggagactgggaggagaaagggagggacggcccccgcctcttaaaggagacacgcaggttgttgttggagaacgggaacgcgggctggggaaaggaggcgtgaagatacgccctctgcgtcaagaaggggagagaaagttaagagggtaaaacgcccccgttttggggctgtc

SEQ ID NO: 198992 - DNA, 577 bp, Homo sapiens
  chr3:67048277-67048854
  hyper
gcttgatttcataccggaagctagtcactggcaggaagtttacggaagaagaaaaaggtaaaaaaatgtgccgggggccaggagagaggcctaaaatggggaaattcgcacttgaagagctttccctaccccagcccctcagaatgacagttctcctccgccagaagactacctctcccggcaggcactgcgcgctcgacggccacaggctggccagctccctgctctccacctccatccgaatcagccaataggaattcccggcttgggcctccgcccgacccggaccacgcgggagccggggcaatcaaactacatttcccgacacgcatgtgctcgcgtcgtggccaatcagcgccaggaattcggaggctaggggtggagccagatgcacaggacaccccattggccaggggaagcttagaagagccggaacccgggagctagagaagcgaaatgacatttcctttttaaatagctggagtcggggccccatcgagaaatggccgcgtcggcaggtgggtcgtgtggtggccagggcggcgtggagggaggtgagggggaaggtgggccgggg

SEQ ID NO: 198993 - DNA, 158 bp, Homo sapiens
  chr3:69062098-69062256
  hyper
aacacgtgagaccccgaatgacacctcaacggctggcccctacttgtgccaaaaagtctctcggcgggtgccaggcagggctcaggaagtgctcggctgccccttgaacgtcagtcccggcagagcccagctgtccgcttgaacgtcagtcccggcca

SEQ ID NO: 198994 - DNA, 241 bp, Homo sapiens
  chr3:69434906-69435147
  hyper
caggtggagcctgcttcccacgagtgcccggcatcctgctggggccctcgggtgccgcgcgctccagctcacctggtacacgtcctgcagcccgcaccacgtccgcagcacctggtggcaagcccgcagcctctccgtgtaccatctccgcagcgtggacacggtcaagttccatacgaagcggctgccgctgaacagcaggtcctccacgccacacatgaacaccgaagccatgcctcct

SEQ ID NO: 198995 - DNA, 215 bp, Homo sapiens
  chr3:69788414-69788629
  hyper
caggagttgcactagcggtgtccaccacgttgcctctcccccgcctggccttctgggagctgtagttttcgtgggagcggctccccaggcgagctgggaatgccccgcccgggccgaactacagatcccaggcggcgctcggccgccagcccctcccgcccgggtgcgagtgtaaactccccgcgctggggcgggcggccgcgagccggcgagcg

SEQ ID NO: 198996 - DNA, 213 bp, Homo sapiens
  chr3:69789001-69789214
  hyper
tgggggccgcgcctgcccggcccaagtgcgcctttaggaagctcggatggagcgcacttcgcgggggcgcggcgggtcgccggggacgaagcgtccaggcgcggggaccctcggccgaggatgccagctgctgagactgattgggggctggggagcgacctggcgcgatgtgggggaggaggagcgccgggccgggacgctgtcccggtggga

SEQ ID NO: 198997 - DNA, 1738 bp, Homo sapiens
  chr3:71113096-71114834
  hyper
ggggtaaaaagtcccgtttccactgaccgtccttcatgcagttctgacagttgagttagctacattcagagccggttcagctgggagtaccccgtggcaattcctcagtctgctgcacgtccaaacccaaaccccgctcactacttaattaaccagccaagtaatgcaacagaggcttagaatccccaacctgccagagtgttccattcgctcgctcgcctgctccggtgtggggctctgtgcctctccctccccctttactgtgtgtgaactcgtcgaatttgaacagctaagctgaaaatagcctagacagatatagaaacaaactatcagaagcaaagaaacatccacatgggttacactgagatggaaggctccttgtatatttcacacgctctgaaagtgacagaaatcacaccccagatacgtcccccgaacggagtgatggcgagggcttcaccaaagtggctgcgtgaaggccagaccggcagaaaatgaatcgcaaacgaaaaagagagagagagaaacacacaagcaggacttcctccaactctcaactacaccccacccatgaacatttaaaaaaagagagcgagagtgtgagccaaagagcaaggggggtgggggggtatctctctccaggacccacaggcctgcagctcctttttcttgcccctccactccctccccgcctccacttccagagcgcaactcctacccaacttggtaaacagcgaggatgaggatgattttttaaaagactcaacttcagaaccctcgggctctcctgccttccccagcgaggcccccaggaagcgggcgccgcggagccgggggaaggagagcgaaaccggcaaagatcaatcagaaggaccaacctgacactctccatgtagccgccaggcgcgcggagccgggctcggggcgcccgcgcgggccgggcgtggggtccggcggcctcggcgtgcaggcggactgcacgcgcgcaggggcgctccggctcgcgggctgacaagacgcgccgcgccgcgcccacccgccccgccctgctccaccaatcacaacccgcctctaaacaccccgcgccgcgccgcgccgcgccgcgccccacacaatgggctccgcggcccgcgccccgcgcccgcgcgccccggccccctccgcgcggcaggtgaaatcacgctcgggtgccaccctgcttttgtctggagagcaactccacttaatagctgttaacccggtgacccgcctccggctgacgtctgggtcggccgggctcggcgcgcaccgctccctctggccggggctctgcggggccggggctgccggcggggcggcgtgtttgtttcgtctttgagactgacaaagagttgtcctaacctttccgagaaacccgggaggccgaagaggggcacccggcgctcgcggcgccaagccgactgctccgagcaactgttcggcttcgggagggtacgcaggtctcctaggcagcgcagaaaagcgcttttcctcgaaaacctccctgggaggagaactttcgcttcacgtcgggggtttcacagagccttggcctccccacacccctttctttcccagagtcggtctcgccaaagtgtgccagtgcgcaccgaggaaaactaagccgacgcggggtggaaataaataacaaccaaacgtgcctcgtcgctgaaccaggcgacttcccctctagaacgacagctgccgaagaaagcatctg

SEQ ID NO: 198998 - DNA, 817 bp, Homo sapiens
  chr3:71631082-71631899
  hyper
gatctcacaaagttgcaacaacaaaaaggaggggggaggaatagggagaagggggtgggatggggatacgatcacgggcgcaaggtttggagttacaactgtttatttagtccttattctcacagggggcgggagctgcgcgggaatggggggctgcaggcagcgatttcgaagcaaacacatgggaggggggcatgcgactttgtttccgggagcggagctccccagagcccgtgtgtgtcactgccagtctcccgggaccaaggcggagctcacaacaggtggggaggggggctcgtcgagggccaaaaagaagaaggaatctaagtttccgagcgcgacgttgtctgaaaaggagggaggcgggaggcgggggcgagggaaggcggaggcagcaaatgaccgcgaccccgcggcaactggcaaactcctcggctcccggcgccgccgccaccgccgtggtccccactcgaagcgcacgccgcctcggctcgctggctccagggagtcgtctcggcgggacaggaatagagcgcagggagctcgggaggaaggctgcgcgcaagcgagggacggagagccatcggccgccaggacagggccggagggacgaggcgacacgcgcgcgacgcaggacaaatcggagcttgggaaatctccccgtcccccaagcttcagaggggggtaaaatcagaaaatgtgtgtgatggtgggagagagatccgggcgcggcgactcctcgcagcgcatccggctcccgcacccacccgtggatctggccacggctgttgcggactcgtctcgggaaagcggaggc

SEQ ID NO: 198999 - DNA, 60 bp, Homo sapiens
  chr3:71802788-71802848
  hyper
agggggctccgcggcggcggcggcggcggcggcagcggcggcagcggcggcggcgggccc

SEQ ID NO: 199000 - DNA, 302 bp, Homo sapiens
  chr3:71834745-71835047
  hyper
ggggacacagcagcccctgaatccattcgtttgttcagcaggtctatactgggcgcccgctgcgtgccaggtactgccaccggctctctcctcacggtggaataacttaacagagaagacagacatcaatcaaataccctggaaacgtggaaggcaggggaaagaacaaagggagagcaaaatcgccccaatcccacatcacccgcgacgtgaaaggatttgtccttccagctgcgggactcctatttgtttatttcaagtcagaggccttccctttatgcccacatctgttcccgaccctc

SEQ ID NO: 199001 - DNA, 166 bp, Homo sapiens
  chr3:72149792-72149958
  hyper
agctctgctcagcacgggtaagagaataataaatcggtcacttcactatccaattagcagctgttgctccccgctggaggaagaaaacaaacaggaagaccctgccctgttttgtttaggatcaaactcgcctctgtaccacctaccggagggactctggggtttg

SEQ ID NO: 199002 - DNA, 117 bp, Homo sapiens
  chr3:72150077-72150194
  hyper
gaaactccgtgcaggggcaaagctgagttttgcaaccagtgagcgggagcccggggggcgtggccaggctgaggggatgcgttgtcctggtaacccgtaacttccagaaccatccat

SEQ ID NO: 199003 - DNA, 126 bp, Homo sapiens
  chr3:72496657-72496783
  hyper
tgcaacagcctcaccgctcgcagcgcctcgaggcttgcagtgcccaggggccgacaaggtccacctttggaccgcgttcccccgcgcccctctgttcctctgccatgcggagctttgtatttgcct

SEQ ID NO: 199004 - DNA, 174 bp, Homo sapiens
  chr3:72787765-72787939
  hyper
cccaggaaatcctgcgggtgccttcccccaacgaaagccactgatgtcgcccctctcctcccagcagcttccagaccgcgaccttctgtagctctgctcagaacttcacctggaacagcttcttacaattcttaaacagcccctcagtcgactgtgattaagcatacactccag

SEQ ID NO: 199005 - DNA, 308 bp, Homo sapiens
  chr3:73674224-73674532
  hyper
gctggaaggcagaagcgcgtgggaggacactgaggctcgccagaagggacgggccagcccaggacgccagcctgaatcttctcgggaaactcctttctgttctcttacagtctacgctataggagacaaaacgccagccgagaaaagctcgctgagtttggagctgaggctactgctttctcccaagggttctcttcgagccccttcccgaacggatcaaaacttttttactcccttctccctcccccttcctctagtggctgattgcagaggactaaaaatatcttggggcccgctatctcagcact

SEQ ID NO: 199006 - DNA, 261 bp, Homo sapiens
  chr3:74663366-74663627
  hyper
ccccagagcaagtccgatgagagaagcatcttttattctcgacccgtcaggtgcatttccctgcaaacaaacttcggggctgaggagccatgaagccagggcgtaaagtttgccctggcaggtggctcatccctgtggcccggccggcgccaggagtcgggcatcccggacttacctggtctctgcagctcgccagacgcccgccccgacggcccactcgccgccgccgccgccgccgccgccgccgccaccgccgccgcc

SEQ ID NO: 199007 - DNA, 154 bp, Homo sapiens
  chr3:74663660-74663814
  hyper
cgcccgcgtaagccgccgccgccgcaggcgcagcaccctcgtccgcacggttcccggcccagtccacggcgccagcccgcccgccgctgccaccgccgccgccgccaagcgccaggctgctgtggctgctgccggcgcctagcgagcactgccc

SEQ ID NO: 199008 - DNA, 72 bp, Homo sapiens
  chr3:75471467-75471539
  hyper
ttggagtctctgaaacgcttcctgtcttttgttcttcatgccccgtgcccctgttagcgtattactgttctc

SEQ ID NO: 199009 - DNA, 210 bp, Homo sapiens
  chr3:79067401-79067611
  hyper
ctaggaacattttcgcctaaaagtctagcaggaatcgagcccctccggccttaggagggaggggtaaccaaaatacacttctgggtttgatcgtgcaaagtggagagggggcgaacagggaggatcaagggtgaagaaagaagacgcggggttacctgaacagagacatattaatccaaacaggtaaaagtgagcgggctccgcaatcat

SEQ ID NO: 199010 - DNA, 65 bp, Homo sapiens
  chr3:79817151-79817216
  hyper
gagcagaaggcattgcatacaaataggtccaagtgtgcgcttctattggtggctgcggaggcccc

SEQ ID NO: 199011 - DNA, 324 bp, Homo sapiens
  chr3:85008817-85009141
  hyper
aggtaatccccgccccggcgcagggaacatcaacttctcgcccattccccatcttccccattccaccccatatttccactctcccctcccagtctccctgtccccagcgatttccaccccctccccctactctctggtgcggcagggggcagtggcagtttgcaccagcccctcgaatttctaacactggctcagccctgccttcccagcagtcagccccttacgcggcaccttttgccttctcattcacctgagcttccttcatctcactccattcccgccagcatccccctcccacgccttttggctggcaacttgtgcctc

SEQ ID NO: 199012 - DNA, 60 bp, Homo sapiens
  chr3:87039596-87039656
  hyper
ctgctctcccttcccggctctctcgggatggctttctgctcaaggacgctcccgcagatc

SEQ ID NO: 199013 - DNA, 206 bp, Homo sapiens
  chr3:87040548-87040754
  hyper
gatggtggtgggaggggaatggtatgcagaggctccgcgccctcaaggctcggcaggttcccaccctgtctctgtcacctggccgccagggcgagggcttccctactccaaggagattttacagggaacaccaactcagaggctgggaccaaacaaaagccgagtgtacaaaggggtaaaacagagcaggcgcagaatacacgggg

SEQ ID NO: 199014 - DNA, 65 bp, Homo sapiens
  chr3:87276369-87276434
  hyper
aggaaagcggccgcggcttcaaactccgtagtgcgcaggcgccacacaacgcgcaggcgccgcct

SEQ ID NO: 199015 - DNA, 212 bp, Homo sapiens
  chr3:87841846-87842058
  hyper
ccccagcgcgcagtcagcgtcgcggccccgaaagctggcgacaggcgctgctgtcttcccgccccgtggggtcgcccctgccctcccgcgccccggggctgggggcgccaccttgccagctccgactgctgcagggagcgccaggggtgagtgtgcggatcagcgctgagcccgggagtgcgggtcacgcccgcagctggcgcgcaggtggg

SEQ ID NO: 199016 - DNA, 154 bp, Homo sapiens
  chr3:87842412-87842566
  hyper
cagcggaaggaggggagagtcttcgaatccatctctcggtgggatcttgagaggattcgcgggggggacggtaagataaatctgaggagctggaagaagccgtagatcggaaatcgcttgcagttttccaactttatttcccgcgggtacgaac

SEQ ID NO: 199017 - DNA, 38 bp, Homo sapiens
  chr3:93692750-93692788
  hyper
ggaggagaccgcccgctcccagcgcccagcccgagagg

SEQ ID NO: 199018 - DNA, 338 bp, Homo sapiens
  chr3:96531740-96532078
  hyper
ttggctccatctcccgctcccctgacctcttgtcactgtgccatttccctcctgtgctttctgcccacttggaaaatatcgtatatcctttacaagaccgctactttctctcctctgttcacatttctccattaccatccacattttctcaaaacattccgacgggttttgaagtggggttttcaacctccctcgactgtgatagccgaagtcccttcaagaaagaaaaatgatgttggaaatactagtaacaaataaagtatcacggaaatccccacccaagcgatacggtttccttgacgcgcccttaaccaaggcgttaagtttagcctgacagc

SEQ ID NO: 199019 - DNA, 201 bp, Homo sapiens
  chr3:96533782-96533983
  hyper
caatttggtttcttcttgcctctgctgacagcgtggccaggcgactgcagtcacgtctccaacaaccaaggtaagggacggggcggaggagcgggagtgggtgggaggaggagggtgcttggagaaccagggtactggttgcctcctgcaggtaactttgtacaggggtcagagtctcctggctcgccacacgaggggatc

SEQ ID NO: 199020 - DNA, 255 bp, Homo sapiens
  chr3:97690787-97691042
  hyper
tgtctcttaggcccgacatgacgcccggcggcgcagcccacgtggaagccgtgctcgcacaggcagttctgccaccaccgggcggaggccggcaccaccctccttgctaagcctccaaactttccgtgcgctcgtcaccggtgtcgcgaccattagcaggccacgtgtgcgactctctgtaaccaaggcttccgcgaccctacccctagatccgggccccacccaccctgccccagtctccggggaggtgggacg

SEQ ID NO: 199021 - DNA, 92 bp, Homo sapiens
  chr3:98311894-98311986
  hyper
tcttggtcttcatgtcgcccggcctccttcgcagctcgcccaggtcggtcacaggcggggccatgaagctgctgcagcggtgggccagctca

SEQ ID NO: 199022 - DNA, 121 bp, Homo sapiens
  chr3:98451249-98451370
  hyper
gtggaaatcgatcctcctaccttgtcctgaagccacccgccgcctttcctcgtccctcccttcgcggtgattttccggtcccggcgcccggcgagggcgcgcggctggtgtccgccccgcc

SEQ ID NO: 199023 - DNA, 70 bp, Homo sapiens
  chr3:98451479-98451549
  hyper
ccaccgtgcaactggcgccagccgcggagcaggaggagcttcccgcgactccggaggcgctcggcgcagt

SEQ ID NO: 199024 - DNA, 292 bp, Homo sapiens
  chr3:98619762-98620054
  hyper
aaaaagtaaagccgcgccaacttgggggacagacgggcaagaccttgcctttgcaactcaaccccgtgagtacccagccaggtccggccacgcacgaaagcgcaccgcgcctccctgcagcgtctgcagatttgttcaggggccaagagacccgcagccccgacggaggttcccccgccgctcactcccctgggaccactcaccttgctgggctccagcgtcctcgagcagcaggagcaggacaagtaagagcaggaggaacagaggcatggagaaggaggaggagttggag

SEQ ID NO: 199025 - DNA, 115 bp, Homo sapiens
  chr3:99594776-99594891
  hyper
gaattcattggatgcgctttgcgaaacctgtctgcagtttgtgatgctgagacagctttaacagccacccacagacttgctacctggctgtctgacagcagtgccccttggtgga

SEQ ID NO: 199026 - DNA, 448 bp, Homo sapiens
  chr3:100120034-100120482
  hyper
cgggttaagggaaagcgtgggtgtgagtaggagtcttcggaaaccctttttctttcttttcgccccgctgctgttcgggagatggacttctggagtccccgtcgtagctggtgttgtcccctctaccttcaggaaagaagggcagatggccctcttgcctactgaagccgaggaggggcgcgtatacagcgggctaagggcgctcaagagatccgagtggaagaaaaagcagcggcacagcactggaatgggcgggagtggcagaagagttgtgaaggctattggctagcaagggtggtgggcggggcgtagaccgagctacccagtttactggtcgatttcggatccagttttccagttatagccacgttggcacctcttgaacctctgtggccgttagcacggttttctgcccgcgtgcccgagaaaccaacggattagaaggact

SEQ ID NO: 199027 - DNA, 981 bp, Homo sapiens
  chr3:101231399-101232380
  hyper
cctgttcagcagaacgagacccggagaggcattgtatcaaagaaaaggagtctccggtcgcaagccccacctttcctccccagcagcagctacctgctgagggaaagaggagggagaggggaagggacgcaaagtcgagaatcaaaggaagagaggaaagtggggtcaggcgctgagaagccgaaatgaaattggaacattggtggaattacgaggaaggcgtggcagagagtgacaagccaaccgggaagatccatgggccgatgagacgcaaggagggtgttcgcgggaggagggaaaaaataaaaggggttttgaggtgaagagcgcccgaggcttcgatgacagctcggaccgggtcttcgactccaggggcgggggcgacccgggagccttccattgtgcgcgccccttcctctccccgcccccgccctcgcccccgcggcttcgggccgcaaccccagctgccgcctgcgcctcccgtttcccccgggtaggagacaatatgttcagcccttctctgaccctttctcaccggatgaagatggccgtcgcccgagctttctcttgtccatcttctcccgctgctgaaatttcagttgcaggcgctgtcacctcaggacccctccggcttggagagggagggggaggggaaaggaaaaaaaaaaaaaaaaaaaaaaaaaaaaaaaagcccgcaaagtgcgaagcgcgcttgcgcaagagccgtcgcctgcccttcgaccggaaatcagccgcccctcccaccttcgaccggaaatcacttcctgggacttttcactgtgggctgcctcttccagcgtttttttggtggcgtttatttcatgatctgagcccctctggggaggtgaaccacctgggtgctcgattttagctttgttgactttgaagattagattgacaaaaattaaaagggaaaaacaggaactcctccggttcactggatctcgcgaggtggccaaa

SEQ ID NO: 199028 - DNA, 189 bp, Homo sapiens
  chr3:101292846-101293035
  hyper
agcactcttagaccgcccaaccttcccagctcttccttccgaggcggctactcgatgacatcacatccacttccgcttccgaaggcggcctcttttcattcctcgggaccgctctaggctgccaccacgccggctggccccaaaaactcgatggttgttgggcggggtcgtgacgtccttggcgtggct

SEQ ID NO: 199029 - DNA, 472 bp, Homo sapiens
  chr3:101443394-101443866
  hyper
cagccaattgggccgtctgggagccgtgcatcctgggagttatagtttccggctccctccttcagattacaagctccacagagccgcgggaggacggttgcctggtattattagcaagcagcaaatatggcggtggcgcgcgtggacgcggctttgcctcccggagaaggtaaggcgatccctaccccgagtcctaaggtttacttcacggagctgaattaaatagtggagagcagaaaacctaggtttagatgtgcagttctggaccagttcttttgatgcggatctgtggtcgtcgcggaggcgggctaccctctgggagttgtagttcacctgccgttcccagctctccggcgtcgcggtgagggccgagcgggggactacagcccccagaagccttcgcgcggcccggcgccctggctcccgcgctcccgatgctgaggaggcggtggatttcgggctgcgatgacct

SEQ ID NO: 199030 - DNA, 298 bp, Homo sapiens
  chr3:101497996-101498294
  hyper
caacgccctcggcccgcccccgccgaagctccaccaatcgtagccgggggtcggaggtgaggagacgtcgccgggtgaggaagcggggggctagcggcctggcgctgcggcgaccgaccggggcgtcaggatccctggcccccggagagcgaagggcgggcgggtcccggaggtgagtgctggatgtggtctgtgtgcggacgtcgggaggggccgctgcgggcggagcgacccattgcccggctctgccagcgcgctcctagactgcgaagcccctccctccgcgcgcatctgctcc

SEQ ID NO: 199031 - DNA, 103 bp, Homo sapiens
  chr3:101498504-101498607
  hyper
tccacttgcggcaacgccacagctcggtacagttcggacctccacgccgcagcgaaagacttctgtcctccaggcaccttcactaacccggtgcggagcactt

SEQ ID NO: 199032 - DNA, 40 bp, Homo sapiens
  chr3:105587995-105588035
  hyper
ctcctcgcgctgccgccccgtccacgtcctccacagtaca

SEQ ID NO: 199033 - DNA, 223 bp, Homo sapiens
  chr3:107244817-107245040
  hyper
ggggcggtgatcacttgtgcaagttgatgaatgatcgcggtgtggtttttgcgtttgcagaatggatcaactttctgctttgtacatgtggggagtaggaagcgagggtacgggagataccctagaatgccagttgggttgccccccagcctctgccctttcaatacggggagcttctttgccttctgttcccacagttctccagtgtcggggggtggtagag

SEQ ID NO: 199034 - DNA, 420 bp, Homo sapiens
  chr3:107940794-107941214
  hyper
cggacctcccgggagtttggggtgaagtgcccttccctggctaggaagacggaggcaaggaattgctaacccgctctcacgaaactggttcccagcaggaccaaggagggcatctccctgggggctagcaggcacccgggcgctcggggacgccggcacccacctggacggggccttcaggttgctcttccggaggaactcctcctcgtagcggagcagcttcagcttctccaccaagtcctccatcaccacgaacatgtggtaggccgcgccgggcccccgctccaagaccacttccccggtcccttcgccacgggacctaggcaccccatcttccaaacccgacgtcgtgacgacggccagagcagcagtcatcgcagaacggacagagtccagcgtgggctcaggcccacagacctc

SEQ ID NO: 199035 - DNA, 204 bp, Homo sapiens
  chr3:107941274-107941478
  hyper
caccggacaatccgtcaccagggaaactagactccgcctccttccctccaatcagggcggctttcctgaatgacgtcacctgtggccctcttcttgccctgcctctgtggaaatggtggtcgggaagcagccccgcccctcatggaggcgtggcgttcgcgccccactgccggctgcgtcttctccctcgctgaaagtctgaag

SEQ ID NO: 199036 - DNA, 204 bp, Homo sapiens
  chr3:110790437-110790641
  hyper
atgtgtaggagggcggggtgggaggagacagggcttgcgcccggggatcagacgggaggtggagttgcgcggggagggcgggcgagtcgggcgcccgctctgagagtcggtttcttttccccctcttgcgtggggcggggtggtgcgttccgagttcccaggagttcgacgcgggcgggtgccgaggggaggggagtggcggcg

SEQ ID NO: 199037 - DNA, 126 bp, Homo sapiens
  chr3:110790671-110790797
  hyper
agtggcgtcggcgacggcggtgtcgaggcagccgccagcgttcggccaagtgtcagccggcagcgacggcgctagagctgggagctggggacgcgcgcgccggaccttccacagcctccgcccaga

SEQ ID NO: 199038 - DNA, 123 bp, Homo sapiens
  chr3:111393432-111393555
  hyper
agagcgctggccaatcggagcgcgctccgccagcggccaatcacgggccgcctagcccggcaaatctgcccggcagtgcggggaggggctgctgggagtcctggtgccgccggctgcacttct

SEQ ID NO: 199039 - DNA, 1227 bp, Homo sapiens
  chr3:111578040-111579267
  hyper
tcatcaccctaggacgtaaaccctcccgcccttctttcagctcttaaaaaaagcctgccacgaaagtccctactgcgttgctgcgaacgtagctttgagaagctggcgcccagtgatggggcaaacagccatgcccttccagcagccgtgaaagccccaacagcaaactgcctgggagcggggcaggtcaccaacttcgttgctcgaactccctgggtgcccgccgcggtggttacaaagggggtcaagagtgccggacccagccgcgcggagcccaccattgcggcccgagggggacccgacgggggcccgacggtgtggcgtggcgcaaggagcgcgcctgccttctctcgccgccgggaacgggctgcaccaatggccaggtgaggaggcggcggtggtcgcccgggaggagggggtggtgccgactccgtgtgccaggagtgcgtcccggggacgctgcctcccccgcggccgagttggttgccgccggttgcgctgcggagggttgggggcggagaggaggcagtggctgcccgggccgaggaggggcgcgctgactgctcaccgcgagtcaggaggggccggcgggctcacggagggagacagggtgggcgggggcaaaggctaggcgctagggcggcggcgccagcgtagagcggcggtttggaggaaagatgagacggtgagtgggctccggggacacagagtttctttgcttctttacaggctgtagggacaaaagcccgggctggggtcggcagtgcccaggctgcgcagctgggtgggtgggggtggcgaaccccgttgtgcatgactctcggggggctgggtagatctccggttgaggggatcccggggagggagtgtctggtagggaagatgcttccagagtgattgtagaaaacaggcagaatgtgggggaactgggggcaactttttccagcaactctggaatgcacatggagagagggatggggatccttgggatagctccctgagaaagagaaggtccgctgctggatggtgtagggcgcgggattcagagaagactccctccccgcaaatatttggctagctgcgcttctagttccactttctttcaagagtgaacctacgagctttaaccgccaaaagcggctgatttcgatttggcctttgaccccccactgaaagtttacagtgtggccgtctcggcacccctagagatagcagctggaaggcttg

SEQ ID NO: 199040 - DNA, 215 bp, Homo sapiens
  chr3:111697740-111697955
  hyper
gaaagagccacgacgctctgcgcatgtgcgctcttcgcaagctgaaaatcttgcggggagctctttagcaagttccgccttccagcctgaagcgcatgcgcagcctcggttccgttgcgtagcgtgtccctcagtgggacactgcagggtgcggggacaactacgaagatggcggttgcgcgcttggcagctgtggcggcctgggtaccttgtcg

SEQ ID NO: 199041 - DNA, 347 bp, Homo sapiens
  chr3:112051794-112052141
  hyper
tcagtttccccagcggtcacctttgaaaagggaaaaatgtctgaaaatagacaaagctgaatataaacatcatttaattccccccacacagacagcctccgctcctgtgagggcgtggggaaaacggagtgggagaagggggctagcgaggaggaagaggcgggaggtgcggcaggggcacaggtgacgctcctcccgcctgcctagcagagctccaggcgcacatccgcagtcagccacctcgcgcgcgcctccaggagcaaggatggagaggctggtgagcggggccggggcttgggaaggagggcgcagggcaggcgatgttgagccggtggccctggggcggg

SEQ ID NO: 199042 - DNA, 79 bp, Homo sapiens
  chr3:112052419-112052498
  hyper
agctcccaaaactggggaggcacagcctattttaaactgcccccaaaagggaaagagaaatgctgtattggttccatat

SEQ ID NO: 199043 - DNA, 103 bp, Homo sapiens
  chr3:112930511-112930614
  hyper
ggaccctgagccccggcccgccggtgtcagccgccgcgcgcgcgcacagacacacacacagagacacacaaacacacacagaaaagacacacacgcgcacaca

SEQ ID NO: 199044 - DNA, 151 bp, Homo sapiens
  chr3:112930655-112930806
  hyper
cgcacgcgccctccctctccggcccgcaacttctcggtcctcggctcctttgttgctccagccgcggccgctcgcccgtgttgtgtgtccccggtgtcaccgagcgtgttgtgtgtccgtgcggcgcggcgctgtgtggctccctcgcgcc

SEQ ID NO: 199045 - DNA, 278 bp, Homo sapiens
  chr3:112931274-112931552
  hyper
gcgccccggccccatgctccaggccgtggggggaacccgaggcgtggcggcaaatgcgtagagtcactcaacacgcactcggcctctttggagggtgagggtttctcatagttggcgtcttctaaaggaaaaacactaaaatgaggaactcagcggaccgggagcgacgcagcttgagggaagcatccctagctgttggcgcagaggggcgaggctgaagccgagtggcccgaggtgtctgaggggctggggcaaaggtgaaagaggtgtgtgtgtgt

SEQ ID NO: 199046 - DNA, 745 bp, Homo sapiens
  chr3:113251174-113251919
  hyper
agagaacgtgatgacgtgagactctccatggagagtaggaggtaataaagaaataaaacaggtgtctgaggagaggttctattagagaggggagaatagagagtaattatcgttcagacaggcaagagttctctgcaggtagcagcctgggaaagcgaactcgcgcaccctcttgggggacgggctcttttgctttctatttcttctcctgcagccagggtgcacacgtatttgaaacagaccgaatttcctcctcgatgtggcgtcaggttgacttttcgagactagcgggtatttctttttaatgactccaatgcctttttattattgctgttattgaggttgagggagaagagatcggtctaaattctggctgggtaagtggggggattctcggcgatgagaaacgggggacttagaagccggaggaaaatcagcagccccacatctccacttctccagtccgccctactctccacccgtgacctccagtggagaccccaggcggcagcatcagtatttgatcggcccttcgtcagcacgctgccagccctggccggctgggttcgccaggcatcacccgctcggctctgaagcggacgcctggccctgcaccgggctttggaaggaccctctctgcgctcgccccctccccagggtggctccgctttcgagcccgggcgcggtgcccaccatgcgcggctgcctgcggctcgcgctgctctgcgcgctgccctggctcctg

SEQ ID NO: 199047 - DNA, 279 bp, Homo sapiens
  chr3:113775219-113775498
  hyper
tcaccttgggactcggcttccttgtgaaccgtttccagcgattcagccccatccttttctttgagaaggaccttccctgaggcgccaggagcattttccaagttcgagcccgaacctcggccaaagctgcagcaaccgcccttctgcccgggctgcctccgggtcacgctgggaattgtagttcctccgcccgcaaggaaagcaggcataggacaccgtcgaaccaccactcccacgaggctctgcgcaggccgctcgcgttggctcagttaccatagc

SEQ ID NO: 199048 - DNA, 62 bp, Homo sapiens
  chr3:115231423-115231485
  hyper
ggagaaggtctccccgcagctcctctggaccgagccacacctctgcctgggaatcctgggct

SEQ ID NO: 199049 - DNA, 150 bp, Homo sapiens
  chr3:115377489-115377639
  hyper
cgacacggcgcttggggtccgcggggctcctcctccaactccgcagacctccggggaggcctcttgctccccgaacacccgggagttcgctttcatttttaacgaatctccacaatctcttgtttgggagataattgcttctttcagggg

SEQ ID NO: 199050 - DNA, 37 bp, Homo sapiens
  chr3:115377953-115377990
  hyper
cagggccaggggagtggaagagcggccggcaggaagg

SEQ ID NO: 199051 - DNA, 31 bp, Homo sapiens
  chr3:116163677-116163708
  hyper
cacacgtgtagacgcgcgcagcagaaaagtt

SEQ ID NO: 199052 - DNA, 303 bp, Homo sapiens
  chr3:116163989-116164292
  hyper
ctttgccagtttatggtcctttccactttgcctctctctttccctcgctcagtctcttttccctctaagacttaacaaagccctcataaaacccaagcagaagggtgaaaagtaaaagcaacacaatttcaaaagagagagtgcaaatagcaagccctctggaagagctgaagaggaagccaaaggaaagggttcttgtttggtctctctgtgactggatgctcctctgccagtgtctgagctgagctccttcgctctgtaacccactttcccaggctggcgggcgggcgggcgagggagccg

SEQ ID NO: 199053 - DNA, 52 bp, Homo sapiens
  chr3:117715651-117715703
  hyper
agcccccaccccaccaagacacacacacacacacacacacacacacacacac

SEQ ID NO: 199054 - DNA, 33 bp, Homo sapiens
  chr3:119041464-119041497
  hyper
gtgtggagggaccagcgtcgaagacaaaggaat

SEQ ID NO: 199055 - DNA, 202 bp, Homo sapiens
  chr3:119813913-119814115
  hyper
ggcgtctataaagcgctgtctcattggcctgaagcttaggcgctggagttggggcaaaagggagagggagggagcccgaaactcgcggcggcggccaatcggctctcactgccgtccaatcgcaagacctagctgcagtgtgattggccttcggccccggtcccaggagcggggagatgcctgactcgggtcgtggctgacg

SEQ ID NO: 199056 - DNA, 79 bp, Homo sapiens
  chr3:120169025-120169104
  hyper
gacacttcacaaagaagaaaatacatttcagagaatcatgatctcactttaaaagagagaaaggaaaattaattttgcc

SEQ ID NO: 199057 - DNA, 471 bp, Homo sapiens
  chr3:120169149-120169620
  hyper
gacttgggagggaaaagtccccaactactctcagtctcctctgaagtgaaggacggaactgaggcgcctttttgaactcgctgctgctccagtcgccgcctcgtccccgtcggcccagcccgtcccctctcctcctccccgctctccctccatgttagccgcggcggggctcccgcttacggcccgaactacttttcctgctttaaagatttaagtttcgtaagcagcattactgccccagctccaccccagcacaccccaaggaccgaaactcccagcgccaccccgggagagcatccccaggacgcgcgcccacccgcccagcgcgcagacccaagaggccccggggaccgagttcggactcctcggcccctcgcctacctcggcgcggacccaggcgaccgccaccagcgcgagcgcgagcgcgagccagcgtttccacatctgcggaagagagaagagagcgagtct

SEQ ID NO: 199058 - DNA, 142 bp, Homo sapiens
  chr3:120626723-120626865
  hyper
catcccccagagcacgacccccagcatactggccaataccgctgtcaatcaaatacctcacctacttctctaaattcccccctcccactgtcattggctttaccttcggcctatccacagatttcttctgccctggagacca

SEQ ID NO: 199059 - DNA, 59 bp, Homo sapiens
  chr3:120627258-120627317
  hyper
cacctgtgtgtgtctgtgtgagtgtgtgtgtgtgtttgagagagagagagacagagaga

SEQ ID NO: 199060 - DNA, 270 bp, Homo sapiens
  chr3:121741107-121741377
  hyper
ctgcggcgctccccacggctccgcctcccgccccgcgcgccgccgtttcctgctccgcccccgcctcccgggggactgcggccaccttccctacctgctgccgcctcctgctcgctgaaacaccgtcccccaccccgctgacggagaagattcccactttcctccagaagttctcgggaaatctcatcccctgcaaatgtatccccctctccttctagaattatgtggatataactttctagggtgtgtttcctgcgttatatttccatt

SEQ ID NO: 199061 - DNA, 65 bp, Homo sapiens
  chr3:121902662-121902727
  hyper
agagtttgggcacgcgatttgtatttattttactgtgaatctctggccttatatcagaaaaaaaa

SEQ ID NO: 199062 - DNA, 318 bp, Homo sapiens
  chr3:122514237-122514555
  hyper
ctggtctggaacacctggggtcccatccagaactcggcgcgccaggcctacggcttctccagctgggacatcgcgctgctcgtgctgtgggggcccatcggcttcctgccctgcttcgcgttcatgtggctcctggacaagagaggtgaggggtcgcggagcgccagcccgcgctgtctctcctccgggagcaggcgcctgcccgcgctccaggcctgccagccgcctcccttggccccggcataggggttgtgtgaggtgatagagtgttgctagcattccatttctgacttaggaaccctccgtccccaaagcgac

SEQ ID NO: 199063 - DNA, 163 bp, Homo sapiens
  chr3:122785820-122785983
  hyper
gcgagcacttcttcccggccgcctctccccagctgctgcgcatgctttggcagacgtggcaccgggaactcggaggcggggagcggctgggaagtggccgtggtggttggccgcggtggagctagcaggcgggcgggcgggagcgggcgccggagtggagaaa

SEQ ID NO: 199064 - DNA, 105 bp, Homo sapiens
  chr3:123168102-123168207
  hyper
tcgcggcgagagtggatgcgtggccccggcgaaagccgagccgagccttcggcgcgtccgcgcagggggcggggtccgggtcagggaccggctcctgcggtgcgg

SEQ ID NO: 199065 - DNA, 165 bp, Homo sapiens
  chr3:123752220-123752385
  hyper
agacaggcagacgggcgagcaggagagccagctgccgctgctgggggacagcgggcgcccaggcagcccgcaccccggccccgggccccggccccagccagacagcaggcggccagcgccctggggaaggggtaccatgggggagctggcggcaggcacccccag

SEQ ID NO: 199066 - DNA, 247 bp, Homo sapiens
  chr3:123752573-123752820
  hyper
gccctcccacagtcatgaacccccctgagggagcagcggaggaaggaggagcagcagactcggacgtggacgcctttttccggacaggtaagccgggcagggcgcggggggccagggctgaaggctactgcctcggacgcggcgtctcggacaagtttggggaaggagggctgttgctgccgcgtgcgtgttggggggcagtgccccctcggcgtcggggctggagttgccgagattctggttgtta

SEQ ID NO: 199067 - DNA, 102 bp, Homo sapiens
  chr3:123753162-123753264
  hyper
aggagtggggcggaagacatcggtctcgcctggtgcgtgtggggagctggtccctctgacttgagaggcagacccagctgggagggcggtgggcgcctcgga

SEQ ID NO: 199068 - DNA, 202 bp, Homo sapiens
  chr3:124605380-124605582
  hyper
atccccccagcagcccgcccgctcccggccggccacaaggaccgctttgtgcccgccaacggagagcccgggccccaaggcagggctggcggcggtcctccccgtgccctgggcgcgggccctggcgggctaggtcagcaggccggccagcctgtttacacaggaagggaagctcctcctcagcccgggagggaacaggaga

SEQ ID NO: 199069 - DNA, 453 bp, Homo sapiens
  chr3:124773932-124774385
  hyper
ttttgtttcaaactacgtacatcctttgtcctttacaatatcccgtcctagaaccccttaaaaatcagttatttagatgagaaagtcgagccctgtacctggagaggccagttctgtatagcggaaaaaatgaaactggggaccggctggccagatatcggaggtgggagagatgctttgcagtctttttccctttcctttccattttttttaaagtggggtggaagagatacagggtaccccataggaaataagttttcttccaaagggttggaggagaacgggatagtcacacccctcagtccagccaactgcgaaagcgtccctccctacccgccgaccctcagggtcccgcacacgccgggcgaggagcccccaccctgggtcgcgccgcgcggaggggcctacggctggggatgcagcccggggcgcgcccacgcccccagcacagac

SEQ ID NO: 199070 - DNA, 178 bp, Homo sapiens; identical to SEQ ID NO: 39562
  chr3:125691029-125691207
  hyper

SEQ ID NO: 199071 - DNA, 89 bp, Homo sapiens
  chr3:125931877-125931966
  hyper
cggcaggggcgcccccaggaagggacaggacagggagctttgtcccgcagcgaacgggaacgcggaggcccggcctctcgcctccccac

SEQ ID NO: 199072 - DNA, 232 bp, Homo sapiens
  chr3:125932020-125932252
  hyper
gaaggcgccgcccggcggccgcggcccttcgccgcagccagagtgctttgtccgagctcaaaaaagccgtctccatggaagcggcccttccgctcggagcccggcggcctggagggagacccggcggggatgcgaggattccgccccagccccagaggacgcggcggagagcctggaggaggcgctttgagagtcgaggtctcccgcccgcgcgcctccctggcgcagacct

SEQ ID NO: 199073 - DNA, 257 bp, Homo sapiens
  chr3:125986252-125986509
  hyper
tcccaggctgtggcgctggggcggtgcgctggccgtgggtcgagaggtcgctgcgccctgcattcctggccgcgcgcgcacaggctggaatccgtacattccattcataacattcccgcaagcgaggggaggagacgcaaagccggggagtgagtgattaaagaaaagaaagaagggcttcttgcagctccgggctgtgttttttcctgcgcgccctggcgcagtccccggctcggaaaggcaggagcacgtgagcg

SEQ ID NO: 199074 - DNA, 37 bp, Homo sapiens
  chr3:126242824-126242861
  hyper
cttgggtggataatggcacccctgggcaaaccctagg

SEQ ID NO: 199075 - DNA, 246 bp, Homo sapiens
  chr3:126243058-126243304
  hyper
tgcgccgcgccgcgcgtcttggtaggcgctgcgctgccggggccgggtcctgggccagtgcaactccgcccccagccgtatccagcggactgtcctccgccgcgcgcccggcacagcatggggaggcgctgctgccggcggcgcgtgctggcggccgcctgtctgggcgccgcgctcctgctcctatgcgccgcgccccgctccctgcgcccgggtgagtgcccgccggccgagccgcgcaccccc

SEQ ID NO: 199076 - DNA, 48 bp, Homo sapiens
  chr3:126373704-126373752
  hyper
gggggacgacaggcgggcacggcgccccggcggcgacaacacgcgcgc

SEQ ID NO: 199077 - DNA, 285 bp, Homo sapiens
  chr3:126373824-126374109
  hyper
ccgctccagagtctcgctctcgctcctggcccggccgggcctgctcacaaaccgaaacgcaggcggctgcggcgccgggacggggcctgaggggcggcgaacgctgccctcgctggccactctcaccacccgcgcgaatccgcgaggcagccgctcgccccgccccccaacaccgccccgcgcatgcgaaattgggtcccccgcccgcccgcagcctaggtgtcacctgcccttcgcaaaggggcgggtaccaagcgcgagcctctttatctccaggttgtgcct

SEQ ID NO: 199078 - DNA, 358 bp, Homo sapiens
  chr3:126701039-126701397
  hyper
ttctgtaggggtgacgtgattcacacagcaaaaaccgcacccctcaggctacagatgggggccaagtccccagccgggactcagccctcccacgacggggttttcctggcccatctgctctgttatcgatgctcctgttgccggcttccccttccttggcctggttgcgtccaccgggaggccctcccggatgcctcctgcctgggagtggcggttgtgagtacagtaactgagtgctgggtgtctgcccctcagccttgccatgcaggctgggggtattgcctggacagctctggcccgtcaccctggattctgcagccccacacctcacaccgtgtagatccgctgccccacgcta

SEQ ID NO: 199079 - DNA, 207 bp, Homo sapiens
  chr3:127348123-127348330
  hyper
tggttgggggtgagtgcgctccgggcccgagcgcgggagggcgggcggcggcgtgggcgcggtgctggacagctccccgggccgccaacaaaggggccagagtgcggcgccgccgggagcgcgcgtgtcccggccgggccgcggcgccgccccgacacacgcgcacgaggagtgggtgcgtgggggccgcggcgggcgcctggcgtg

SEQ ID NO: 199080 - DNA, 45 bp, Homo sapiens
  chr3:127451716-127451761
  hyper
ggtctcaggaggttcagtgacttttccagcccagggctgtctgag

SEQ ID NO: 199081 - DNA, 101 bp, Homo sapiens
  chr3:127634312-127634413
  hyper
ggcccatattgggcagtggcctcagtcaggcccgctggccgccctgccacacggtagcgtccaagccaggtcgtggcccagcgagtggggacgcgccccga

SEQ ID NO: 199082 - DNA, 129 bp, Homo sapiens
  chr3:127794264-127794393
  hyper
gttttcacggtacacgcctttggcaattttgcatcaaaaaactaagtgtatgcacattttttttaattgaaagcccaactcagccttcccccactgctccttccccgcatgcacggggggacacacgcc

SEQ ID NO: 199083 - DNA, 288 bp, Homo sapiens
  chr3:127794860-127795148
  hyper
cattgggaagccctccggccccctctctgcacacctggcacacggctcctccctggcggcatgtgggtatttgggttgggcgagcctctccctcccgattcccgagttccgagtgggtcccggcggaccagcgctattctggaggggcagtgcctcagaggcaggtcgcttcgagtggggatttgtgcgctctggcgcggaggaggggggtgggaagccggctcttgccctcctcacccggtggggagcgagcagggccaacggtgcgctgagagcgctcagggcgtc

SEQ ID NO: 199084 - DNA, 49 bp, Homo sapiens; identical to SEQ ID NO: 39590
  chr3:127795229-127795278
  hyper

SEQ ID NO: 199085 - DNA, 337 bp, Homo sapiens
  chr3:128216309-128216646
  hyper
tgtccgtgtgccagcgtgggtggactccgggctggggaagcgacagggaatggtgtgtgccggtgtgacagacgccagagcggcggggtggaacgtgctgtgtcacgggagactttcttgaccaaaacggaatgtgcgagtgtggaaggaagaggggccgtccgcggagtttggggacacccgggcgtccgagccccagagcctctgcagctgggacaaggaagcccgagcccgccgcctgaggtccccgcgccgttagtgacacgcgccgccgacaaaggctgtatttttccaggctcgcgccccgcccgcgcgcgcgcgatggtccccatggcga

SEQ ID NO: 199086 - DNA, 354 bp, Homo sapiens
  chr3:128216713-128217067
  hyper
tccaggcaggtcaaacccaaagtcacacaacctgcgacgcgggccccgcccccactccccggccgcccctcccctgccccggccccggccccggccccagcccggcgacccccggctgctgcccaagcgcaggcgcagagcgccacctggcggcggcggggtctcgggtggggtccgcggagccggtgcccgtgcagaagaggtggggtgagggtctctacctccagaaggcgggctctctgggagcaggggctttgctttgtcactgctgttccccagggccagactaacacacagtaggtgctccataagtgtttcttgaaaggatgtttggagggatggatggatggatgg

SEQ ID NO: 199087 - DNA, 188 bp, Homo sapiens
  chr3:128840084-128840272
  hyper
ccctccgagggagcgccttccaggggccctggccggcctcccaccttgacccgcttgccctggatctccagcgtcttcatggtgaagtcgacgccgatggtgcttccctggcgctccgagaaggcgccggtcttgaagcgctgcaccacgcacgtcttgcccacgcttgcgtcgcccaccagcaccag

SEQ ID NO: 199088 - DNA, 124 bp, Homo sapiens
  chr3:129324048-129324172
  hyper
tctggatctctgcgcgctcccacctgtgacccactcagctcacgacccgctcggttcccgcccgcccccgcccccgcccccgccgccgccgccgccgccgccgccgccaccgcccgggtgtacc

SEQ ID NO: 199089 - DNA, 365 bp, Homo sapiens
  chr3:129324202-129324567
  hyper
cccgtgccctgcaccacgctgtcgagcaccgccaccacgtcgggcgccggttccacgaagcaggcggtgcgcgcagctcggatggcggctcgcacgtcggcgaagcggaaggcgcagagtgcggccggagcagcgcgggccgcgggggacccctggggccgctcgaagacagcaaagagccgctcccgggctgggaagaccgacaccaggcggctgtagaggtcgccgcggcccgcgccgcccgcgcactgcaagcccaactggatgtaggactcggtgagcttcttggcgtcgccgccggcgccgtggggcaggcagatgcgcgccagcaggctccgcgcctggctctccttgtcgcccgcgcg

SEQ ID NO: 199090 - DNA, 234 bp, Homo sapiens
  chr3:129324659-129324893
  hyper
gctgctccttggcgccctgcttgatcttgaggatgttgtcgtcggaggggttgaggtcgaaggtgaagagcttggccaggtcgccgcgcgtgtccagggagcggatggcgatctcgggcgtgttctcgaagcggtggtcctccaggctgcggttgcgcgggaagaaggagctgccgtaaccggtgtacgtggcgcccacgagcaggcggctgccccccgcgcccgcggcgggag

SEQ ID NO: 199091 - DNA, 288 bp, Homo sapiens
  chr3:129325045-129325333
  hyper
ccctggtagatggacccgcacacgactaccaggccctggccggggtccagctgcaggatcttgttgtagttgtccgtgaggcgccgcgggtgctcgcacgaggcctgcggcagctgcggagcgtgacacagcgggctgtcgggcaccgggcccacggccgcctcggcctccaggctcaggttggcgcccgacagctgatagaggcggttgacggccgccaggtacacggtccccgccgcgccgtccagggcgaagttgttggtgggcgtgggcgaggggaaccgacgc

SEQ ID NO: 199092 - DNA, 562 bp, Homo sapiens
  chr3:129345876-129346438
  hyper
cgtgctcgtcccgcctcgcttggagggagcaagggctccgagccctgggcccaggtcctgtgcctccgcttccccggctgcgggtacacccccagcttcccgagccccccgggccctcgctgctccacccagaagttgcggtgactgcggccccagcaccccgttccctggccgggcatcacttgcgcagcatgctgcccccagaggacagggctacagttagtcgcccacacctcattcacccccttgggcccttgagcgtcttagaagccgcagatgccaaggaggggacgctgcctcgcggatggtcacttgggagcaaagctggggactaaaggaaccagggacagagattcctgctctcgccaaattggccgctctgggccaggcactgaggacacaccgcgaagccggatagccaggtcctgtcctcagggccctgtccggaagaggactgggcagcctcgagtccgcggcaatgaatgaatgttcaattgcacagatggggaggcgaaggagggagggagggagggagggcagtcgcttgggcggtcattggagg

SEQ ID NO: 199093 - DNA, 107 bp, Homo sapiens
  chr3:129346564-129346671
  hyper
ccagacttgaggggagtggctggagttgagactcaaatccaagaaggaaacggtggggcttggaccacttgcctactgagaaaaatggaagtcgggaaggctttaga

SEQ ID NO: 199094 - DNA, 48 bp, Homo sapiens
  chr3:129694299-129694347
  hyper
ggttgcactcccggcgaggcagtcccagcgttggcttccccagttccg

SEQ ID NO: 199095 - DNA, 84 bp, Homo sapiens
  chr3:130235709-130235793
  hyper
ccttcagtgcgcctcggatctgcacgccctgcctatctttggggtacagagaaggcgcgtaccatgaaagccccaacttcccct

SEQ ID NO: 199096 - DNA, 816 bp, Homo sapiens
  chr3:131753156-131753972
  hyper
caactccattcgccccaccccacctgggcgagttgggtggatgtcagaaggcgagaggtaggggatggaagtcccttcagattaaagacgttgcttgctgctgctttttaaaacaacaacagcaatgacaaacgtgcaaaggtgagcgagaaccagtgcatctcaaaagttggtcttgctacgcagcagctccaacagactttgcaatcacagcgccccaggaacacaggaatgaagagttggcatttacttacctgggtgtgccaatctcgaagagtggagagagaattcagcccgggacgaggtctgtcccgcccccaggatgcaaaatccggctttgaagtggaggtggttggtgtggtagttttgtactgatgtaaggggcgtcgcacctccttcccctctcgtcctccgaggtcagtttagcaacagcggctgggaaaggtgctgagagcagagttcggtctctccggaaaccctgactccattctcggtgatgggggtgggggaagagggtgaaaatgttggagatgtcaggtcggctctcagttaactcggagagtaaagaggagggtactgagaaaagagggagggagtggagtggagcgagggaggaaggaaaggagggtggcagaaagagaaggggacgagcgggtggcggggagatggcagcttctcacagagagatttccaccttctgacgaatcccatgcacccagcaacccggcaagagactggttccgaaacctccgcgcgagcgccccctgggggttgctgacggagacgagcattgccccgggaacccgagctcaggcc

SEQ ID NO: 199097 - DNA, 84 bp, Homo sapiens
  chr3:131754152-131754236
  hyper
tgggagttacactttttggcactcaccaaagaaaacttcttagatgggtgcttaactgtcaccaaaaatggtaaaggtgttgct

SEQ ID NO: 199098 - DNA, 80 bp, Homo sapiens
  chr3:132757908-132757988
  hyper
ggaggaatccagagattggttcaggggctatttttttttttaagcagttgggcaccggtggagccggtctaaatgaaagt

SEQ ID NO: 199099 - DNA, 49 bp, Homo sapiens
  chr3:133276458-133276507
  hyper
agaatgtgcatttggcgttccgagctaagaaatccgggagtggccaacc

SEQ ID NO: 199100 - DNA, 52 bp, Homo sapiens
  chr3:133969907-133969959
  hyper
ctttcccgacggacgggccaggctggagccaccggccgcgcctgcagctcag

SEQ ID NO: 199101 - DNA, 61 bp, Homo sapiens
  chr3:134092503-134092564
  hyper
gccccaccacgagcccgggcggacctggagcaccggtggccgctggtacgcctggggcgag

SEQ ID NO: 199102 - DNA, 475 bp, Homo sapiens
  chr3:134092643-134093118
  hyper
ttccaaatactctaacgctgacgtcaccgggctggacagcaggctgcattctttctaagtgagggccaattcgtggctccagagaggattttccaaggaagacaaagaggaattcttggactagttgggggcaaaggcacctgtaacccccacctaaccaaatcagcccgcaggaccctgcaacttgagctccaagcggcgcctccatccctgtcccccgccacccccacccccgccgacctgcaacccgaaacactgtggctgttgtctccggagtcggccctctcccctctcccccagccccaagagacccgcgcgtttctagagccccgcaaagcccagcgcgctgcgctccctgggcagagcggcccttgccaggcactgcggctgcctcgaaagggcgcactgcgccccgaggacgctcgatcctcgaggctccgactcccggaaaaggccgggttgcgccgagactcca

SEQ ID NO: 199103 - DNA, 404 bp, Homo sapiens
  chr3:134093148-134093552
  hyper
gcgcgctctcccgagcgccgagcggccttccttaccgctgcggcccgagggtgcccagcgcagtcagacaccacaacctccggctcggcccagctcagctcggcggcgaagatgtgttctcggccgtggcgccgacgctctggctgttcgcgccccagcgcgcagccccagggtcggcccgcgccggaggcggctgctatgccaggaatgtgagagtttcaggttccccctcgggatcaaagcgaaccacaaataacctctcagcgcaccgccctcctccgccctccgccttctcccgctccctcctcccggcccccgccttcctccggggaggcggcgctgctggccgagcgccggcccggcccccgagctccgttcctccgcgcccagcgccctccaggccg

SEQ ID NO: 199104 - DNA, 239 bp, Homo sapiens; identical to SEQ ID NO: 39653
  chr3:134093626-134093865
  hyper

SEQ ID NO: 199105 - DNA, 294 bp, Homo sapiens
  chr3:135684610-135684904
  hyper
gagagtccgcgccgcggggaggcttggaggcaagcgctgcccgcgagctgagccgccggaggaggagccgcgggcaacgaggtaggcaaaggaacactggccgcacggcctggagccttcagctccctcgtcccggcccgagggggtggcgaggctcggggcggcgcgcggaggccggggcgggcggggccgggacctgggggcggggaccggcctggccagaggggccacacggagctgattgggctgtggaagtcggaattccagtcggtgcggtgcggtgcggtgcgttgc

SEQ ID NO: 199106 - DNA, 64 bp, Homo sapiens
  chr3:136471113-136471177
  hyper
gggggggttgttacggggtggtcgccgggggttcgggagcgggggccgcgccttcaacggagct

SEQ ID NO: 199107 - DNA, 133 bp, Homo sapiens
  chr3:136538836-136538969
  hyper
cctcatttgagaggaggagagggaagaagggtcgcgcgggccggcaggaaagagactcgtgttgcggcggatgaaggctcagcgcggacctgcatctcgggccaggttttctttcacccggctccgcgaggag

SEQ ID NO: 199108 - DNA, 55 bp, Homo sapiens
  chr3:136751321-136751376
  hyper
caaaaatttgtttcccactccgtcctcttcccggatacttggagacagcagcgtc

SEQ ID NO: 199109 - DNA, 156 bp, Homo sapiens
  chr3:137480764-137480920
  hyper
gtcggggggtcagctggcgccctgcccaccatcgaacgcccttcgtatcactccgctcctcattgcgaattggactgcgcattggctgcgacccaaggctgaacacaagaagcttggagaggagctcgggcgtttgaggagaaggaaatatgagga

SEQ ID NO: 199110 - DNA, 273 bp, Homo sapiens
  chr3:137482464-137482737
  hyper
ctgcattgcctgacgcgaggccttccaggagcaggtcagacaacattgctcagccacccagggtcccagcgctacgcccgggcgccgcatcctggggcaggggtggatgcctagttgcaggggcttcccgggagaacactgccaaagcaccgccgagggtggggcgcgaaaagtttatttcgcttttaccctgagcctgctatatgttatttttctcttccaaggatatttgacaagagggcaaagtgctgtccttgcatttcgcggcaaagc

SEQ ID NO: 199111 - DNA, 357 bp, Homo sapiens
  chr3:137482857-137483214
  hyper
ttttatttgttgacagtgcccgagacaatgtggaaccgaagtccccagtctagagctagcctctctgctctagccctctctctgcctctgtccctcacacctctccccgcccccaccagtcgcgctctctgtttcttgcaccggcgtgttggcaggtgcgccccctcggcttctctgctgctgattggcgcccaggttggggagtcgccgccccgcgcttatgtcagagtgcgtgcagtcccggcccacctcgcctttgaacttcgccgcttttggctctcgttcaccagcctccccgcattctcagccaggtgcagcgctaggcgcggcagctccgggaaagccacgggaaggggg

SEQ ID NO: 199112 - DNA, 204 bp, Homo sapiens
  chr3:137487099-137487303
  hyper
gaaaaccgaaaccagggttccgggttgcgcttggtcttaggctcagatggggaattaggaaactagggtgcgctgtagaagagaggcgctcagggggctgcggcctcactcagaggtggctgagacctctttccagcctgcaaagagccgggggcccagttcgggtcctgagacctaaagtcaaagacttggctcgggcggttt

SEQ ID NO: 199113 - DNA, 200 bp, Homo sapiens
  chr3:137488137-137488337
  hyper
tttcttaaaccttggctgccatctggctcaggggtacactggctacatcttcagagagatgtggaattcttgacccctttccgcctctggcctccctcattccgagaactccgtcagcctttcatgcacttctcggttttggatctgactccaaaaatctttgattcccttccagtttccgagtttttctatttaaatat

SEQ ID NO: 199114 - DNA, 703 bp, Homo sapiens
  chr3:138067014-138067717
  hyper
taggactggggaggcgtccctaggctcagaagttggcccggccggagcggagatttaaaggttggagcgcagaggctcttaaagaggccgagtcgaattcccactcggcgtccaccttaaagccagctccccggcaccacggatctgacccgggtaagtgctgggccgcgggagaggctgcggcgccgaccccagcccctggcgctctagcgcgccctgccgggcccaggggactcggcgcgggtgggctggacttcgtaggcgcgcgtcctgggggccggggtgcacgcgggggcgacagggtcgaggcacccggcccgggctccccactggcgcgcccgcagcggcgctctatttttagcaggcgctgtggcaatataaggaatgcgcggcgcgctaggcgctcggggcgcacgctggcggcgcggtcgctttaaggaggcgccggggcggggacggaccggagtggccggctggcggggagccgtcagtccggcggccgcggggcccggcgggcgcgacgctgcctcctcaccggcgcaggctaggagggggcggcctgagtgccgtagccgagccggggctggagcgcgcggtgagtggtcgggcggccttggaggggagggggcccggccgcgccgcctctcgccccggccgtcgctttgttccggggcgggaggtgtggccgccctccgggctcggc

SEQ ID NO: 199115 - DNA, 80 bp, Homo sapiens
  chr3:138067747-138067827
  hyper
gaccggctgtgcgtggcgttttgcccccatcgcgggctcccgcgtaacggtgtgcgttcgtgaaatcggccacgaccaag

SEQ ID NO: 199116 - DNA, 560 bp, Homo sapiens
  chr3:138153256-138153816
  hyper
cacttggtccacccggactggcgagtgcacacctccggctgacgcctgcgccacgtgctggggtcggaggccgagctcaccggctggttgctctttagagcgggcaggagccaggcgggcggcccgcccctctagggcggagacttccggagctgcggactcactggagccgagaactggggcggcgcggcgcggcgcggtgcatttccaggcgctgctctccgtcgcagagaaccctgagctcggcgcgccgagagtcccagcagggcaagggggcgcggcgtcctggtcctcgagcttgggagacagatgcgcatgggcgtgggggcatgcggacctaagctcgggtgaagctctcgggaagggcaagactgcggcgacgagatgcgagcagaggagccctgcgcccccggggcccccagcgccctgggagcccagcgcacgccgggccccgagctgcgcctgtccagccagctgctgcccgagctctgtaccttcgtggtgcgcgtgctgttctacctggggcctgtctacctagctggctacctggggctcagcat

SEQ ID NO: 199117 - DNA, 106 bp, Homo sapiens
  chr3:138657308-138657414
  hyper
caaggctgctgcctgcaaaggcaatgccgtggagactgggttccacagcgacctgggtttttaagtcaccgaaagctacagggcagggtcacaaacactctcccgc

SEQ ID NO: 199118 - DNA, 270 bp, Homo sapiens
  chr3:139258672-139258942
  hyper
ccctacaaaggaagaggagaccggagacgggacgtttgctttgttggccgaactcttcggctgctggggatttccttcaaacgccattaacttctcacactcagcagccactcgggagttgggaaacaatctcctggggtttgtgctggcgtgattaaggaaagaggccacttacaggcctttgtctaaagcctcgcgccggtggtggctggggtcaggaaagctgggaggttcaactacgggcgagaaaattggggcactttccacgtc

SEQ ID NO: 199119 - DNA, 100 bp, Homo sapiens
  chr3:139655101-139655201
  hyper
gcctgggagcgtcgggagctctggggtggggggccgggtctgaaacaggaggtcacgtgcttgcagggggtggggaggcgagggaagagcagagctggtg

SEQ ID NO: 199120 - DNA, 1525 bp, Homo sapiens
  chr3:140660223-140661748
  hyper
ctatataggagtatccgtgcacaaacctttttatgcattgtgcgagggttactctgagatagacaccaagggaactgctgggtcataaatccaattttttcaaagtaaatccgcttgcgaacccggaaccaagtcgatttttcccgccccgccagttccctgttcaggagagtgcagccgtgattggcgcgttcactcaggccaggggcgccccaggtctcaggtgctaggagcgcggtgacctaccaccctccgggcacgcgttctggccacgcctcgcggcccctttcattgaaagagcccgtagggatcacgtgaaagaacactgcagagtgcgtgacgtcacgacgctcacaccaatgggagcctctgtttatgtcgggagccatcaaatagtcatcttccccctaccatcccccgcccactctccgtcgcgctgcgctgcgtcgctttcagcctctggtgaagggcggcgcgcttaggcaggcggtggcgcggctggagtgccgcggggagggctgtgccggttgctttctgcagccgcatctcggccagctctcctcgccgtccccggggcgctgtgcgtctccagtccgggaccgaagccgcctgccgtagcgggcggccagatccgcgtcccgcctcagcggccggaggacatgcgggagagagaatgagccagagggacacgctggtgcatctgtttgccggagggtaaggtcctggcggggcgtgcgcactggggctgagggtgctggggccgaagacgcaggcgaggggggcgaggggggccgaggggggtgggggggtgggggggcgggagtgaggcctgggcggggagctgccacgggcctgcgggtgaggggagcgacccagcccgtgggtggtgaggggggctccggttcggggaagcaagggggtgaggcccgggcccgagggcgagagagtgaggcccgggcaaagagggttgaggcatgaaacccgggccgggagtgaggttttgggcccgcggggccggggtgaggcggaggccgaatccatgcgtctgaggagacgcgggcaagagctggggtcggcgcttgattacccggacgccgctggacctggccgcacgccgcaatctagcaggcgtcggggatccagggccgctttgaggagcctggcttcggatttcgcgtaggttgcatggcccaaggggacggggcggaaagtgcggaggctgaggacaaaatgggcgccggagactcctttagccctcgctccttgcagcgctcgcttgggcctctgcacgtcactcacgccccacctcggacctcgggccgctcatttccgggctcggctttgcaaggtgggtggtaagggggctacgggatcgagcggggaaggctttggtattctcccgtggttgctgtagggtgtttctagcccttggaaaatttcttgcccgaggttttccaggtggtgaatggggtgcaaagctttccagtacctttggggtcagattcctttcgagaaaaccacccct

SEQ ID NO: 199121 - DNA, 78 bp, Homo sapiens
  chr3:141457301-141457379
  hyper
tgtggagctgggacgtggagtgcgatacgtgcgccatctgcagggtccaggtgatgggtaagcgctgcacgcgagtcc

SEQ ID NO: 199122 - DNA, 34 bp, Homo sapiens
  chr3:142837797-142837831
  hyper
tcatctacaaaaccaagaagcgggacaagtattt

SEQ ID NO: 199123 - DNA, 72 bp, Homo sapiens
  chr3:145878417-145878489
  hyper
ctgcagggaaattcgggcacgctgagttcaccgagaactccaaggagtcaacgagggcgggtgcccctacac

SEQ ID NO: 199124 - DNA, 112 bp, Homo sapiens
  chr3:145878553-145878665
  hyper
gggacaggcccccactactcacctggccagccccgcggaagggctggtggatgaatgaactgcccccccgccggccgagcctcgcgggacagcggcggaccgcggggtgctc

SEQ ID NO: 199125 - DNA, 44 bp, Homo sapiens
  chr3:145878695-145878739
  hyper
gtccgcacccagacagggattccaggggtggaggacgagcgcca

SEQ ID NO: 199126 - DNA, 99 bp, Homo sapiens
  chr3:145878769-145878868
  hyper
cccccatattcggccctcgagggccgcgcgggctcaggcgcccacggccccgcagcgccgcgcttctcgcgagaacgcagagacccgggtccgccctga

SEQ ID NO: 199127 - DNA, 363 bp, Homo sapiens
  chr3:145878937-145879300
  hyper
ctgagtgaggtcgtcggtggaggcacggagcagcaggcgcccggggcgctgcggaggccttataggctccccgaggggaggcgacggggcgggccgcgccctggctattggccgccggctgacccgccgccgctgcgcgcccggtgcggtcgcctcagctcgccctcctgggccccacgtctggactgtttgctcagcgcggacgctatttaaggagctgcctgcggctacgtgtggaggctcacgcagcgcttctggctggaacggggaagcctgcacttagctttgggagtgggtttgggagagggaggaggagccgccgggagtctggcgggagggcggtgttcccgtctgggttcctct

SEQ ID NO: 199128 - DNA, 602 bp, Homo sapiens
  chr3:145968403-145969005
  hyper
agaaacccaatcaagcgagacctgtcacgcagagcgaaacgaaagggccgcccccgtgaagtgcagccaggacccccatccctgggcaggaaactgctcgctcccaaaccctctgcgtctgcagtgcagacgcgcgcccgacaccacggaacttctgcaaccacctgaggatgcgacgcgagcgcagtgtccgggaactgctagcgcaggacgccgcgcaacctccgcgcctgcccgcaggcaccgcggcctcgggcctcccctgacgacgccctcggccccgcagcccgggcgcccgcgccaccctgtcctgctctgcgcccgcctgtccagccccactcaccgcctgccccgcagaatgctgggcaccggggacgccagacgccgggtctagttgtactggcagaggaaagggaaaggaaaggaggcagggaagggagacggagaggatttttcaagttataaacaaagtaagcgcgcggaagggagggctaggcgcgggttctgggggcgggtccggcacgcctggaccctccttccccgcgcgcggcttccccgtctcggaccccgccccgcgctgggagagccgccagcccggggga

SEQ ID NO: 199129 - DNA, 187 bp, Homo sapiens
  chr3:147074101-147074288
  hyper
tgacctggtgataccaggttgttagtaacgcttgatgtttggggagttcggcatatttgactctccctgcggctcctcctcctagcccacccccagcccccagatctgggccccttggaaacactctggcctccgcagaaaattttgaagaaaatgcaaagggagaactaatattgttttcctatta

SEQ ID NO: 199130 - DNA, 43 bp, Homo sapiens
  chr3:147106268-147106311
  hyper
ttttcttccttcacattattatccatttttattatgatcgggt

SEQ ID NO: 199131 - DNA, 258 bp, Homo sapiens
  chr3:147112377-147112635
  hyper
cagtgtgacctaccgccccttcccgaagctaaaacctctggtgagggggtgagatccatgcgacattgtgggaaaccctgaaaagaactcagggaaaccgtacacttccagacaagctttagaaataaagtgccaggctccaagtggactttggtctggtctccgcatgtgccagtgtccgggccatggaccttccccgggaagggagagtttggggagaagataggcgttagaacaactagccttaggaagttcttt

SEQ ID NO: 199132 - DNA, 40 bp, Homo sapiens
  chr3:147112665-147112705
  hyper
aataggggcgagtaaggcaaggcaccgggcagtaggagaa

SEQ ID NO: 199133 - DNA, 214 bp, Homo sapiens
  chr3:148709993-148710207
  hyper
ccgggcgcgagccccgtctggtgggagggcgccggctttggcttcacttgttgcgaggcgtccgggccactccacgagttagccccagcactgggaagctccgagttagctggtccttccgtgtcattgaggctaatagccagggttattacagcagttgaactgccacaaagattgcaggtgtaacccagagttcagccgtctttaggaagat

SEQ ID NO: 199134 - DNA, 590 bp, Homo sapiens
  chr3:149375406-149375996
  hyper
gaaaggtcgcacgattccaggacaggcagccccccgaaagaagttcagcccgagccaactccaccacgtctcgactccggaagcccgaggagcctggagccctggagtggtgccggatgagcgcgcgagctccagcgggcactacctgggcgggcagcgaagctgagcctgagcgcgcggcggccgccgtcccgcccgaacttgccgtcgggcctgggtcgctcgggtgagtcccgagattgcggagctggagccgaggcttggctgacaaatcccgacccgactctgtgcctggcagtctaagggcttcggctctcacatcccccgagctggcctaaggcgctagtgctgggcgaaaaggaggcgcaggagaagcagacagcgcggccgcagcagctcccggactgtcccataaacaaagtttggagcaaactcccacccccaggaaagaggcgggcccgaaagttgagctgttgaattatgtatgacctcctagtccctagccggccagcccccgctcgcccctcctcttcctcctcctcctcctcccacctcggctccagaaaaccctgggcgtgatgggtacttta

SEQ ID NO: 199135 - DNA, 372 bp, Homo sapiens
  chr3:149689311-149689683
  hyper
tggtgacgggatgcggagcgtttcctcctttttgttgtgggggcggctggtggcaggggcagctggtggcagggttgcccacgctaatctccgagtctctaagggcaccgtctttcctggatccctcttgcgcctcgtccataaaggcagacccgcgggcgcgcgccggcaacctgaaatcagagcaggcgtccgtggcgctcaggaaccttgctgagcttcgccgatctttcattgttgcttcatttgggtaccaagggcctctcattctgtggattctttgcctggaggagcccccttaatgttgctaatcacgtgtggttaaattgctcgtaaattccgaacaaaacaaatagcgacctgtgttacact

SEQ ID NO: 199136 - DNA, 54 bp, Homo sapiens
  chr3:150126521-150126575
  hyper
caccgcccgcccgcggaccttcagccagctccggcccgcggctcccggctgaat

SEQ ID NO: 199137 - DNA, 227 bp, Homo sapiens
  chr3:150320966-150321193
  hyper
cagtgaaacaggtcggctcttcactccaggagtgtgcgcgggcgccgggccgcgcaggcgcattactgctcccctcccccgaccttggctgatcgcgcctgcgcagtggggagcagctcgctcctgggctttgggctggctgcagtctgtctgagggcggccgaagtggctggctcatttaagatgaggcttctgctgcttctcctagtggcggcgtctgcgatggt

SEQ ID NO: 199138 - DNA, 203 bp, Homo sapiens
  chr3:150481642-150481845
  hyper
gctcgtatagcaggccgaggagggagctcatgggcagcgttggctaagagttcgagatcatctagaaatgtcagaaacgtaggttgggtcgtgaggtctctgaagacagtgggtgaaactccagtgtaaggcgctgcgtccgcttggtagagagccggccgaagtccgagtctttgttgcgaggcgtagggccaccctgcgcg

SEQ ID NO: 199139 - DNA, 61 bp, Homo sapiens
  chr3:150802826-150802887
  hyper
tcgtggctttcggcaagtgagtggtcctctctgagctggctcaatttctccatccataaaa

SEQ ID NO: 199140 - DNA, 91 bp, Homo sapiens
  chr3:150805097-150805188
  hyper
ccgaaaccttgctcgctctcacccgtttctgcctgctttatttttcttcttgccgcttcggtaaatcgtcgtaaactttttgaaaaatgtt

SEQ ID NO: 199141 - DNA, 95 bp, Homo sapiens
  chr3:152553725-152553820
  hyper
actacctgccggctgtctacatcttggtattcatcatcggcttcctgggcaacagcgtggccatctggatgttcgtcttccacatgaagccctgg

SEQ ID NO: 199142 - DNA, 156 bp, Homo sapiens
  chr3:152879646-152879802
  hyper
aacgggagttggcaagaccacagcctactccatccctgaggcggcccgccgcgcccacgtgcttctcgcagagccgccgcccttgtccaccactcccacagctgtaaaataaagcggcctgcatgcttcctacagcgctttcctcgctcccatata

SEQ ID NO: 199143 - DNA, 44 bp, Homo sapiens
  chr3:153838774-153838818
  hyper
gggcatgactctgcgttagaactctgcgctactgcccacgcatc

SEQ ID NO: 199144 - DNA, 58 bp, Homo sapiens
  chr3:153839460-153839518
  hyper
gaatgggtggcgggctcatttgctgcgggtggtcttttggcgcgggagggacgcggag

SEQ ID NO: 199145 - DNA, 98 bp, Homo sapiens
  chr3:153840393-153840491
  hyper
gggccccagaaaagttcttcggaacaaaaactccccctccaaaggctgccctcccaggagaacgagctcctcgagaatccttccgtggttttgagtac

SEQ ID NO: 199146 - DNA, 223 bp, Homo sapiens
  chr3:154042065-154042288
  hyper
cgaccaccccctccgccgccgccgcctcctccggagcctcggttacctccatgaccccctgctggcccccctccatagcccccaccggagctgcggggacccccatcacggccccagttctgatggtagtcataactcattgtcctggcagactacaacccgtcagaaccagcaaccgctggaaatggcgtccgggcccggaagccactgtgcgcccacttcc

SEQ ID NO: 199147 - DNA, 77 bp, Homo sapiens
  chr3:154797107-154797184
  hyper
agcattatagtctccggtccacaggggagagatggagccccctcaggactagagaatcccgaagagcccgtgtattg

SEQ ID NO: 199148 - DNA, 120 bp, Homo sapiens
  chr3:154797214-154797334
  hyper
ctaaaaatgtttagcaaagcccttttgggaatggtgagatggggggtggggaggatgggacattttcattgccaccgcccgccccccgtctccccggccccctcacatgaagtgactgga

SEQ ID NO: 199149 - DNA, 41 bp, Homo sapiens
  chr3:155722292-155722333
  hyper
agccgcagactggagctgttcctattcggccatcttgccag

SEQ ID NO: 199150 - DNA, 103 bp, Homo sapiens
  chr3:156533995-156534098
  hyper
aactgatctcatcgcaggtcgtcacgacacgcgcttcccctcgcctgcacgcggcgtggcgtgagaggggccctggcagccggcgcgcccacccctgatcctt

SEQ ID NO: 199151 - DNA, 145 bp, Homo sapiens
  chr3:156534539-156534684
  hyper
cgccaaggaggccgagaggggcccaggggcgaggtcgactctcagcccgctgtccccttatcccacgtttcgcagcctgaggtgtttgttgtatatcgggaactgacacttttcggcgttaaaatgagggcgtcacctgctcgaa

SEQ ID NO: 199152 - DNA, 167 bp, Homo sapiens
  chr3:156799361-156799528
  hyper
aattcaggtacatctcgattgctcgtggtaataaaggagacattaggcgtggataacaagaccgcaaatggtgagtaaagcaagacaccaggtatcatttctttcctgtttattaacattcactccaggctgtatactttggttaccatggtcgcgtggtgtctgat

SEQ ID NO: 199153 - DNA, 64 bp, Homo sapiens
  chr3:157155188-157155252
  hyper
ggaatgccaggaacgggctgcaacttggcaccaccgagggaggtcagcttttacaaagcacatc

SEQ ID NO: 199154 - DNA, 101 bp, Homo sapiens
  chr3:157155490-157155591
  hyper
ctcccgcagaggccaggctgaccagtgctctggacgagctgctgcaggcgacccgcgacgcgggccgcaggctggcgcgtatggagggcgcggaggcgcag

SEQ ID NO: 199155 - DNA, 43 bp, Homo sapiens
  chr3:157217106-157217149
  hyper
cacaaaaacagaaatgatggcgcaaaacgtggcacatttcagg

SEQ ID NO: 199156 - DNA, 537 bp, Homo sapiens
  chr3:157217201-157217738
  hyper
aggcgcccttgcagttactcagctgcatggtttgagactgggcgggagattcaggcaggctccgagggcacagcgagtggaatccgctcagctcagtgaacctgaagttgttcattgcggagccggtgccgggtggaagaattcaaggaatgcagcctgatgccaccggcagccccagagaccggtcaggtgacaggctgcacctcacccagcggagttacctcccagtgcaacgctctgtttcctgaggtgaaacacaaagcctgctccagtaaaggagagttgtttttaacagagaaaacagaactccctgtgttcgtgaaaatctatactttcccagggaagaatggggggcgggggcgagccacgcaggaaacaattttcaacagaactcaagcaggtgaacggaatggctgtagggagccacctctcagagctccaggggaggagaagagaactgcagcttcattaacacttccctctccctgagatctcacaaacgttttggaaacactgagtgttcgtccagtaagagtc

SEQ ID NO: 199157 - DNA, 193 bp, Homo sapiens
  chr3:157260919-157261112
  hyper
ggaaaaaaacgaggcggggtgggggaggtcgtgtcccagggttctgacagtggagccaggacgtccgggagctgacaatctaaacgcgacctgggaaggggcggtagcgggagtggctgcttcctgggaggtggtgctcgcaaacctggcagctgactgggtggggcgtgccttccctggcagtcgcggaggg

SEQ ID NO: 199158 - DNA, 278 bp, Homo sapiens
  chr3:157815379-157815657
  hyper
cccttcctctttttctctcccgtttgtctttcgatttttttgtttgctcattttttcattgttaacaagatttttttttctatgcaagagtccatcgttgcagctttgcggtgagccaaactccgcggttccagcactcccctgtccagtctctctccagactcccccaaacccgctcctacaaaacccaattctaggccctcgagtaggaaaacgggcaggagccacggagcctgcgtgcctcgtgagatccctggtcctgcgtggagtctggcttt

SEQ ID NO: 199159 - DNA, 67 bp, Homo sapiens
  chr3:157815822-157815889
  hyper
cccagggctgcggcgtgctttttggctttcagtctgagatcggcgatgctggagttcttgctggtgg

SEQ ID NO: 199160 - DNA, 582 bp, Homo sapiens
  chr3:157815923-157816505
  hyper
ggcggaagccgaatccgcggccagcgtggcgagcggcagtccgaagggcggtgctgggaacatcatgtagggcgcgtgcgcggccaggtgcggatgcaggtggtggtgcgcgtgcgccacagcgctgtccagctgcagctgcgcctgaacctgaaaggacaagggcgtcacgttgcaatgactatcctagggtgacaacagaatagaaacagagcattaacggcgtccagcttggccagagagagagttgggttgtgtttgggcacggggagagggcatttggctgtgcatcttgttccgacagtgaccttctcagcctgttgctgaatctggggttccacatggatactccagtgtcccctgggtctccgaaactcgcttagggtaggcttatttccccggaccccgggaacccccttctgcaggaatgtggccgtctcccctgggaactgggctgaaatggtatattggaaagactgcgggtgaggacccttaccctcttctcttgatgctgccatgcatctcttaccccactaccaaaacaacggagtatcaacaagcaaactacgcaactttttaatg

SEQ ID NO: 199161 - DNA, 193 bp, Homo sapiens
  chr3:157821711-157821904
  hyper
gtccttctcctccctttaaaaacaggagctcttctagtgtgagcatatacagccaccatatatatatccccctggaacctttatcctctgcgcccgaatcagagactccgggttttaagaagtcaaagctgagtttagatagtcgaggctgtttgcagttcttcccagcgcaggatccaggccagcatgggtg

SEQ ID NO: 199162 - DNA, 52 bp, Homo sapiens
  chr3:157824081-157824133
  hyper
gaggaggagaagagaaggggcgggggctgccggagggaaatgggaactgatg

SEQ ID NO: 199163 - DNA, 161 bp, Homo sapiens
  chr3:157825408-157825569
  hyper
ccctctaatttcatttattacggagagctaaaaaagagacgctcgccaggagtaaaggtctctctgcctaccccccccaccaccccgcttacgatttaaaattctatttctgggctattttcatcggaacggtttgttacgttagaggaacatctatattc

SEQ ID NO: 199164 - DNA, 39 bp, Homo sapiens
  chr3:158288780-158288819
  hyper
ccatcccacaggagccttggcgaaaagctccccggccgg

SEQ ID NO: 199165 - DNA, 170 bp, Homo sapiens
  chr3:158289012-158289182
  hyper
ctcttgtcgcggccgcggcgagttaacatcgtttttccaatctgtccgcggctgccgccacccaagacagagccagaatgttcaggatgctgaacagcagttttgaggatgaccccttcttctcgtgagttacgggagccaggagtccggggtcgcgcgggaattaaggt

SEQ ID NO: 199166 - DNA, 75 bp, Homo sapiens
  chr3:159480856-159480931
  hyper
gaggtcatcctcagcgtgcagcccggaggggaagggaaacgtgagctaaagcaacaggttccacccacagcctga

SEQ ID NO: 199167 - DNA, 958 bp, Homo sapiens
  chr3:159480975-159481933
  hyper
ggtggagggagaggaagcggcgaggaggaaggtggaagggaaatgatggtgcatgaccaccgagcacacgtcactcgggctcccacatgggcttgtgtatgtgcgtgtgtgaggggagggaggtccttcacagggtcactcgggcacttccgcgtggaataggaggcgccaggctcgtgctttgggatgccgggtggcttcggcggggtaacgagtcacgcagagacggcttgaggcaagccaagaaaatacgggtgtcggcgtgaaaatacaccactcttcccagcgcgccgcccttgctaactggctggacctgcgcccctaacgcccagtgcccccttcttttgggcctatcttggcccctccaaccccatcccagcctgcctcctgctccagcctgccgccgcgaaaaccgggactgcggactgcgccgcgcccggcagcctctgggcatgctcggtggcgggaccggctccaccgccaggagggcgcgtcctccctcccctagggcggtgacggcgcctgcagcgacttgccgccgcgccccggccaggcacaccttttggggaggcgggggaccaccctgcccggcgtgggccgagagcgccccccaccccgagccttccggcgggtgggaggaggggccggccagggagacgcggaggcgggagtgagacctccgactgccagcggttccttacaaagtaaagctcagctcgcgcgcggacccgggctcccagccgcgggcggggaaggggcggggcggggcggggccgggccgggccgggccggggcggggggtggtctcagcgcctagagcgagatgcgaaattagtagccgcccacccccttctcagttcccgcccccagggaattataatttcctgggaaagtgtctggttctcggagaatccttggggcggggtaaaggggcgcgcctggcgcaaaatggttaata

SEQ ID NO: 199168 - DNA, 104 bp, Homo sapiens
  chr3:159756932-159757036
  hyper
cccgtccctgtgcaccgacccgccagcgcgcagcctggtgagagcacttgtgcgccttgggatcgcctgggctgcttcttggcgctctgcctagggggaacctg

SEQ ID NO: 199169 - DNA, 35 bp, Homo sapiens
  chr3:160118170-160118205
  hyper
cctgacccggacacgaactcgtttctccacgtcgg

SEQ ID NO: 199170 - DNA, 69 bp, Homo sapiens
  chr3:160167183-160167252
  hyper
acgcgcctccacctcggcacccgcccgtccccaaccccgcgggactgaccgactcggcggcgtccgctc

SEQ ID NO: 199171 - DNA, 1581 bp, Homo sapiens
  chr3:160472497-160474078
  hyper
cgaggaggtggtgggagaccaccacttgcgagcttccaaaggactttcaaacctgaaccgcagagtcagagccctcgcgccgtagaaaagtcaggagcgccccggggcccccatcggaagcttcgtgccttcccgtggaaaggtcgcgagcagggaaggccttcgtggccactgagtcccctactccaggggcggcggccgctctccgaaagagcggcccttctcgtccctcccgaggttatcgtcagagtgcacttccttggggaaacagaggtcattctgtcgagtcccccctttctgctgttctcgggagggagaaggctgctggacccaggctcgctccccgcctctcgggagatccgggaaggcctctattgctgaacgccgagacagcggccagcggcccgatcgtctccctaccgctttgcaagccgggagaagtgcgtcccttctcgcttgccttatggctggcgaagcggggaccgcactatagtgcagccgccgaaggggggaacgctcacgtatggctctcggcttcccagtgagcagcaatagttcctggaaaaccaacgctaagactaccggggtcagtattagcttgtcttaggagccggcacagggggaaggaacaacgattcgcaagagctaggcagcggacctccctcttttctcccccttggctgtcctggaccgcatggggctgcgagcccgcaccggcggccgcggaacttgctcagcctctgacagctgggtgggaacacctcggggtgtcgagtcccgactcaaggggcgggacggggcggggcgagcgcgcggggggcggagcgcgcgcgagccgggacgcgaggagggagcgcgcgagtgaagccgagctgagccgagccgatccgagccgggaggtgcctgggagaggcaggcagagcccagccggccgcctgcggctcagtaccgaccgtgccgcgtcgccgggctctgcgtacccctgtctctgcccaggctcccgcaaaacttttattctctggggcccccggggtgtgtgaaggaattggaaccttccgccatctccgcgctccccttcggcggcgaccgaggggacctgcgtccctcgtccgccgggctctggagccctgcgcctcacctgctgatcgctctccggagtctcgagggggcacccccggagggaccgcgcgggcgccggcgcccctgaactctcccgctcaccgcggcagacccgcccagcgcaactttaacttgattcttcttgcccaaccggggcaccagcggctgctgctgcggcggctgctgctaccgccgccgccgcggtctcacaaaggggctcagggaagggaggcggcgcgggcggcagggacgggcctccgggccgccgaggcggggagacaaaagggaagctgcctctgctcgcgctgcctgctcggagccgcttgctcggctgcctctggctgggctccgcgatcctctcccccaccctcgggcactgctccgcctccctcccggcgggctgtccccgcagtgctcccggacccggcgagccttcggggcgcgcgtcgctggtggtggttg

SEQ ID NO: 199172 - DNA, 359 bp, Homo sapiens
  chr3:160822407-160822766
  hyper
ctgtagccctagccccgtgggatttccttctctctccgcccgttctccacattccccacttagtttcacattccttcccaatccctccgacatccctgcgccggggcccttccctagcgctccgggaaagcgttcgccgcaggcctgttaggggcccaccaataccgtaacaccgttcccgtcctcttcctcggcaccgctgcaaacgccccgggtcgctacccggatttgacggtggctggagcggcacgggcgacgcaaggcaggtattgcaccctggggcaaggcaaggtggacaaccagcggatgcggcgcggccgcggcctgggcctgggccctccgcgtcgcccactgcccca

SEQ ID NO: 199173 - DNA, 245 bp, Homo sapiens
  chr3:160822962-160823207
  hyper
ccacccagtggcaggactcaaccgcctcggagaccctgcagggccgcccttctcactcacctcctgtgctcggcgcgcacccagctcggaagcgggaaggtggccggcgttctctccctgcgcacacacgcagcctccccgcatccgcacgcacggccgggcgcgcgcagaccacgcgccagggccgcggccggaagcccctggctgcacgcgcgggcccaggcggcccccagccctgtgagctc

SEQ ID NO: 199174 - DNA, 196 bp, Homo sapiens
  chr3:161089233-161089429
  hyper
gtgtatctccctgcggcttaggtgagcgccgaggctttggctcctccccagctgctgcgagcttcccactgcgccgggcgcctgggagcctcccggagttaggtgttcggccccgccctcaggactcttgctaaaactcaaattctacctggctaattccggtgattaattattgacaaaaggaaaacactcctac

SEQ ID NO: 199175 - DNA, 229 bp, Homo sapiens
  chr3:161090543-161090772
  hyper
cgagagcagggcttgctgagagtggcggaggaccttgaaggctcccggttctgtatctccgtggccgagacgctttctgctcgaggcccaggggagtccgggagcgaaagcctcttttgatgaatgagcatttgggcagtatctgcccatcagcccccactgccgaaggaggagacactgcacatgctcggccagggctgattgtgttaaagcgcgaattttagctgct

SEQ ID NO: 199176 - DNA, 158 bp, Homo sapiens
  chr3:164914485-164914643
  hyper
caccaagggagcggcgctcgggagcccccagatcagcccatcgccggagctccgccagcgcgtcccccccgcacccccggcccctcctccgcgccaactgtgtaaatcagccgccgcagtcctctcgccgcgcatcgcaggcaaaatcccggcttagg

SEQ ID NO: 199177 - DNA, 157 bp, Homo sapiens
  chr3:164924661-164924818
  hyper
agctgcttcttaacgcctccagatggcgtgctggtgctcgttcgcgcctcccagcgaccggccagttgccagctgctggagagaatgagcttggagccgcagggcttaatcccgcgcggctcagagatgggtttctggactcgcgaagcagctgcaa

SEQ ID NO: 199178 - DNA, 46 bp, Homo sapiens
  chr3:167097866-167097912
  hyper
tcagcaaacacttgctgggccggtgcctccagctccacccgagctg

SEQ ID NO: 199179 - DNA, 101 bp, Homo sapiens
  chr3:167098187-167098288
  hyper
aggagcctgcgaaatgagagagaatggtgatcacaggaaggaaaagggcggaaaaactcaacaggctctggaagctttccgccagagaggatcttggagat

SEQ ID NO: 199180 - DNA, 148 bp, Homo sapiens
  chr3:168863867-168864015
  hyper
cttcagtcatttcatataacacactcctgtgtttttaaaagctgtcaacctccaaagatagcttaaaaaaaaaccgtttaggtagactttagagaaaggccctttcaaaaaaccaacagcaaaaggaaaaaaaaaaaaatccccacaa

SEQ ID NO: 199181 - DNA, 521 bp, Homo sapiens
  chr3:168864062-168864583
  hyper
tgttggacagcaaagctgttacttggcaaggtggaactcggccgagagcggctccaaagtcgcgtggccagtgccaggaattcagattttggcaaccgcaccttgtgcgtccccgaaaccgacggacagagacacacggagggaggggaaggaggagaagagcgcaaggaaaagaggccgacaagccggcagagaaacccaccgaaggccggacgacccaccccggagacgtgtccagaccgcaccgtttcgcaggaggaacaaggaaatcgcccggcttagcaacgtagataagcagcagggctccgcgagactgcgggcgaggaggaaagaaggctgggggcggggggcgcccgtagaaacggtgccccggcaggaaactgtccgaagtgacaaactttcacatcgcccagactttttttccttttaaagtgaggagttctcttacctttagatttctatggcctcaactcagcaataataggcattcacagaagaatcaaaataaacaaaataaaata

SEQ ID NO: 199182 - DNA, 224 bp, Homo sapiens
  chr3:168864623-168864847
  hyper
acgatcccgagcaacatttagagatgtttaaaaataataataataattttttaaaagcctcgcgtctcgatttccaaatgggtctctgacaactttgtccgtctctaggatctgctctccaggaccacgcgtttcggatttattgtccgccaacagtgtatttttaatacaagaaatgaagtcttctttcgtctgggtgacccgggtttggtgtgttttggctt

SEQ ID NO: 199183 - DNA, 292 bp, Homo sapiens
  chr3:169379645-169379937
  hyper
gcgttccgtaaacaacacaattagagagttttgttttcggcgagtgcgagtgtgggagagagaaccgcggcctgtccactcccgaggcagctccagccccgcctattgacacctcaaggaagagcgctcccagccgctccggggctcagtgtccctgagtccccttcaactcgaagtagaagcatttggacaaacgcagtcctgtcgtctacagtcctggcggagcatcacaccgtgtgggaaagtgtgggccccgccggcaaagccaggcgagtcatccaacacttttgct

SEQ ID NO: 199184 - DNA, 519 bp, Homo sapiens
  chr3:169386025-169386544
  hyper
ggagggtggagacacgcgcgcactcacacacacacactcacaaaagtttgaacaaacctgataagcctcgagatagaacacgtaggctttaatgttaaagctacctgatttgtctgacattgtcagagaaatacacacacatacacatataagcacacatccaggcagcagcggctgcatgaaggtgttaactttgaatgatccgccacgctttgccctaaaagggaagcttgcagagaaatgcgcgctttgaacgccggcgaggcgacagctcagggctagctcggcttccacgtccagccagggaaagggagccacgggccgcaaagggcgcggggcggctgggggcacccctctccacagcgtctcgacgccggggcctgagacacggaacagcctcctcttcctgcgaaatcctcgcgctgccggggcggcatggcacagcgaggcgcgctcgggaccagccggctcagcgagtacgcgcagctggtgttcggcggccgggcgatttctgcccag

SEQ ID NO: 199185 - DNA, 73 bp, Homo sapiens
  chr3:169386633-169386706
  hyper
actccctccccctagttcaacatcctcccatccaacttctgatgtgtatataaggtacggggagcagggagcg

SEQ ID NO: 199186 - DNA, 221 bp, Homo sapiens
  chr3:169386973-169387194
  hyper
ccaggtgctaagctcgcggtcccccaccagccgctctggccgccctctccgggctcggcgcggcctcctcccgcacagcctagtctgcggcgccctcgcctggtttctttggccgcggcagctctggtgctcacgccgcttagggctccagctgtgcacagtagccgcctgggcgtgggggtgggaaacagctggagcgccccggggaggcgcgggttggg

SEQ ID NO: 199187 - DNA, 247 bp, Homo sapiens
  chr3:169482162-169482409
  hyper
ccataaaaggcaacaaaaagcggaagacgggagaacccacgcaggaacggctccaggcaaccccggctcactgcccattcattttggccgactttggaggtgccttcacgtctcctgccaatttgcagcacactggcccagtcagtcaggtttgggggttcacaagcccccattgccggcgaggggtgacggatgcgcacgatcggcgttccccccaccaacaggaaagcgaactgcatgtgtgagc

SEQ ID NO: 199188 - DNA, 241 bp, Homo sapiens
  chr3:169482439-169482680
  hyper
ggaatcgcgccgcgcgcggggactcgctccgttcctcttcctgcggcctgaaaggcctgaacctcgccctcgcccccgagagacccgcggctgacagagcccaactcttcgcggtggcagtgggtgcctccggagaagccccgggccgaccgcggcctccaggcggggttcgggggctgggcaggcgacccgccgcaggtccccgggaggggcgaacgggccagcagctgacattttttgt

SEQ ID NO: 199189 - DNA, 32 bp, Homo sapiens
  chr3:170073884-170073916
  hyper
acgacctgggagctcggcggtggaggcctaag

SEQ ID NO: 199190 - DNA, 254 bp, Homo sapiens
  chr3:170074116-170074370
  hyper
aaagggacaaagctcgagtctcctgaattttgtgcactgctactcggtggactatttcagttcctgatcttgtggtggggtggagaaaaggggatttcttggtgtttcgaaatgtgacggagcagctctgcagagttcaatatgctaatcggctaccctgggaaccaggaagaccaccctacacgcctcagagggtcacagccggaaagctcttgagtcctatcttccctacctcgtctcgtccctctccaaaa

SEQ ID NO: 199191 - DNA, 77 bp, Homo sapiens
  chr3:170075432-170075509
  hyper
cgggccgaggactcggtgacgtcagagggctgtgtgtagcgatgtgtgtggggttcggagccgcgccggcacagccg

SEQ ID NO: 199192 - DNA, 258 bp, Homo sapiens
  chr3:170626174-170626432
  hyper
ctgagccccggcgggtcccgcgctcgcctctgttcccccatccattctccttctttctctcggtcagcgctcagttctgggcgccttccccggccctgcctcactctggccccatccccaccagcttttccccaccagcttttccccaggtcttcacctttcagctggcaaagagcgcctttcgtctgcgcacccgcgctggtcccctacagcagcggcgccggcagcggcggtggcggccgcggcagttccaagaga

SEQ ID NO: 199193 - DNA, 456 bp, Homo sapiens
  chr3:170626783-170627239
  hyper
gtgcgtggcagttatcacatgacgatcgtcagaactcgcgaggcgcgcagattcagcgagtgccagtgtggctggctgtgaagcgaactttgggttcgagcttctggttcagcttgcagcctttcttggggttcgaacctcctcctggtccttaaagaagaattcaggtgcagtattttattacccagctcggcaccgcaggtcctgaggaccccccattcaccccttggtgagatttttggcagcgactgccgccggatgcccctgtagagtcagcactgctccctggggtgggaactcccgaagcgtccgccagctaacaagccagcagtgaaatgaattaacccacttctcacaccaaaggctgttgggaagttgtggaggcgaagggtgtctgactcctacggcattgtgggtccagagaggtgttctgccgactcatccattctttcctcc

SEQ ID NO: 199194 - DNA, 349 bp, Homo sapiens
  chr3:170746074-170746423
  hyper
tctctgtgccgcgtcgtaaatgataccggtgtggtttaccaacctttgtcttttgaacctgccttttcagaaacggaatttgccttgagtgcgcgggcggccagtgagcctttaacttcttgtgctcagccccggcctgccggcgcggagcacggcggcaggaaaccattctcttctcccattgggagcgcgacccgccattcactagcgggccttcggggcaccctgatcagtttcctcaggttcagccaaggcctctgtggttctgctctttctcagaaatgaatgagtaatctctgcaccatctgggatatgctaaaactttatctccgtgcggggagggggtgcg

SEQ ID NO: 199195 - DNA, 375 bp, Homo sapiens
  chr3:171527555-171527930
  hyper
caaacaccttcaatcgtattgtgaggaagaagaccttttacacactccctgctgctggcccccggccccctcgccccacctccgagtggtcacatcacacggcgggagccgcggtcagcagctgtgatcacacccccaggaccgtgctctgcgggctgggctcgaagccttgggacgcggcacttcctggttggtacgggatgccggtcccatcgcccccaccagcccagtcatgccaccgcgcacccgaaccaagggcgcccggatgacctggggacaccacacacactgcacccgaagccctgtggcggcgaggcggtgcatcctgcagaggacgcctgggcttcagcctgagcctgcgcggctctgcgctcc

SEQ ID NO: 199196 - DNA, 79 bp, Homo sapiens
  chr3:171527971-171528050
  hyper
agctttcaccctgcaggaattccacccgaaggcgtgcgagggaggcccttggggatcgctagggagtccgccgccgact

SEQ ID NO: 199197 - DNA, 216 bp, Homo sapiens
  chr3:171528333-171528549
  hyper
ctccgcccggattcgccccggattcgcaggggtggagcgaggcggtgccaggtcccggggcgtcgcggtgccggctggaggccccagcggggcaggtctcgcgactgggcctctgatcgcccgcgttccttgttctcttttcccaaagtttcataactcgaccgcatcaccctagggaatgctcgctattaggaccattatcaggtcctctcgagc

SEQ ID NO: 199198 - DNA, 196 bp, Homo sapiens
  chr3:171757155-171757351
  hyper
gcgatctgcagaacgcgcagccctcgccattcaggagttgttagttccctaagcctcaggtttctttagtctggctgaaccaaaaggagtttctgcttagctaggcagggccgggggacaacagcttctgcgagtctgcgattgtggcggccggtatattcggcggtttacggtaatgggcgggccccaaatcccc

SEQ ID NO: 199199 - DNA, 154 bp, Homo sapiens
  chr3:171758579-171758733
  hyper
ctcgggctgtgcccgcgaactttcccagaggtccgggtcccggcgtcccgtgggaaccggaggacccgggcccgccgtctcgggagactgggctgcgccgcccggcggcgcctttggcggggaggcttccaggagtgcgcggtcggagttggag

SEQ ID NO: 199200 - DNA, 52 bp, Homo sapiens
  chr3:172165380-172165432
  hyper
aaagcctgagcgcgcgctgagacccacccagcattttcacggtttgcttgtg

SEQ ID NO: 199201 - DNA, 287 bp, Homo sapiens
  chr3:172240998-172241285
  hyper
tttgctaagcgcctcgaagactgagtgcactgcactgcactgacctgcttcagctcgttggtaaagtacacgtaagttacagccacacagagagactgcaggagcactgtgaagatcacgatcagcacgcaggtctgtcccaggctgggtcccccctggacctccatcatagccatgatcctgtcagagtctgactgctgtaagtcagccaggcagccggtcactgaagcccttccttctctattcttttatagtcagtgaggaaatgaaagcgaatgagttgtttt
